United States Patent Application Publication US 2011/0183924 A1 - sequence listing, part 146

SEQ ID NO: 379830 - DNA, 4147 bp, Homo sapiens
  misc_feature (1715)..(1715): n is a, c, g, or t
  misc_feature (2897)..(2897): n is a, c, g, or t
  misc_feature (3759)..(3759): n is a, c, g, or t
  misc_feature (3844)..(3844): n is a, c, g, or t
ggcttctgaccgctcaccctcccccgtcaactccttacgtagtcaccattatgaaaaagtgtgccccttcagcaccttgggaagacctggatataaccagggtcccaggtttgaggagacagtgctgggtcaaacagcctttattttagcagttgtgagaccctagagaactcctttggtgttttggggtctccccagcatgcacaatgggggttatgctagcatctctttcctagggaactcatgaggttatgtttgagataaatatttaaaaactcatggtgtggtgttccctgtggatattgcacacacttagaaatggaacaaatacaagaaggggtgagaggtaacgtctaatgcaactccagtgggcctggggtccacagtgtgatctcgggaaaagacacttttgctctgggcctcatctttcatgctgcaccagtagaggttgagattaaatgaaattcagacatcctcctcctatgacattgcaccttccagtgccttcccattttgtttagacccagaccctgtgcctcatctcagcctagggtgggcagcgtccacagagacagcactgaggggttagtgactcccttctgaatgatggaatatgacacagatgatggaatagcacttctgggctagttcaggctgttacagcaaagaaagagctgtaacggcctggggagctcatcaaaaacagaactgtatttctccctgttctggaggctggaagttggatatcagagtagcagcgtggtcgggcttagtggtgacactgccgccccattcattgagcttttataggtgctgtcctttccttggaggacgcctcaactttaggagcatgggtagacctccattcaaagcccagctcccccttgtagcttggtgatcgtgaggaagtcatagaacatccctgtgcctgttttctcctctgagaaatggcgttagtgagaattgtttccctttttaatcacagaaaataaagcatgcgaagaagttaacttggtgccattgggcagagggtgagagcccagcaaaccggagagatcagctgcccacatcagtggcgaggagtgcggagagtgggtgaggctggggcaggaagcaggccagcctgccagagcccaggaacaggtgaaaggacctgctgaagctcacacccgtggaccacccagactgcctgccgctacaggatgccctccgcatctcccaggacttctttccggcatcagtgtggacattgaccccactggactgcagtcacagtggactcccaaggggcaggtgagctcatggcacagcaaggcctcacgctcaggttgaggagcccagagtggaccagatccccagtcccttctctgatggcacaggcatctctctgtgccccttgtctctgcaaccctgattccccattcccagccaaggagaggtcttcgatccctggtcatgctgatttgattccctgtggcattgtgggccctaggctgagagctttaagcccagtctctcaataatcctaagaatccagtgagccagaagagggcacaggaccagagagtctctccaggtacgccacacagtctttgagctgtgtcagagctggattgtttacctggggctggctgtttggaggccccaggcattgtcccccacaccagggaagttggcctgtgggtaactcgttcttgaatgcagacacctgcctntgccatcagggtgacccaggagggtgagggagcaggacatctcagccactttagattgacttgcatgagcaagagccaggaagggagccccacagagggaaaggctggtattagaggtggccaaggccatccaggttgctggaacattccacatgggctcctggatgtcaaacagcagtttccctgggggcccttcttggtggaagggtgggggttagtccagtgaggagaaacaacactcagcatgagaggcacaattaacccctgtgggtcggcagcctggcccagatcaaaggcttcctgaccgatagaggttgttatgtggccctgaggagtgaagactgcctgggttcatgctgctttgttacatttgtgagtgaggggcaggtctggagagtgtctgatggcgcataaggagctgtttctgtgcagttgttggttctggtttgcaaaaccatgggatatcactagtttggtttactctggggatatctgaaaaatctctggaagacttagagtagcatcagttgtaggtcatcttaactgtacggtttcaatgcacgcacctacatctcgcagtgtacacaggtcacacggtgtgtcatagagacaggaaagactgggacagatggttgcagccccgtggaagcccccctgactctgagggtggctgaggggaaactctggaaatcctcatggagtagaaaccatccagagcccaggtgagaggtggctgcaggtccccccaggacacttctgcagccccaaccgaaggcagcccggggtctcccatcccctgggtatatttgttaaaaatgtgtccatcatatatgaatttgggtttggtatttggttccctcgttgtgtcttgttctgtatttttgtgttaatgtcaataccgtattgtttggaccactatagctcttctatgtcatttgtaatcagggagcataatacatccatgtactttgtatttcccagtgatgagattgctagatgacatagtaattgtatttttagtttgaggaggaactgccaactattgctcatagtgtgtacacccatttacattcccaccagtagtgtctaagagtttccctctctgtaaatttacacttgtgattgcgttttaaaaattctgtttttgcttttggcaacattcattttatgtggatggggacnctgtcttagtgtgatttgatttaaatttttgtgatgattagtgatgtgggcaagctttttttttttacctgttcatttcctgccttcttttcagaaatgtctatcagttctttgcccaagttttgttggattagttggttttgtgtattttcctaccttatgttagtttctggtatatgtcagatgaacaccttcagctccatgattccttatacttaccgcctcacagcatcctgtgctcattctgtctcttccgctcaatgaccactgcctgtgtcccattcttctccctccccagggcagggcccagacctcctgcctcccatggaagcctggcccaatgcggggccagccacatggcacagtgtccagggcctttctgagtggtggacaggccagttggcatggaaaatggtgtctggggtttctgagttgactgttgaatgcagactcaacccactcacaaccagtcaccaccactgccacccaagcaagccacctgggagcctggaaattgctctgcccacctcttgccatgggcacagacacataccatagggaggactgccaacagacccagcccacctgcccctggtccccaaggatgacattcaggggcctggggatcaccccagcccaccaaccacaacctgtgtccatgcaggctcccacagggcctaaggacaggctgacccctcccagagaacccccaccccacaagtacccaagtacttcacccagggacctgggtatagacctgccctgccttccacttctggcatgtgcttgcaccagcagggggcctaacaacaggccagaccacctgatgccagcatcaggtcccatgccatcgtgggacctngggatcaccctgctctacccatgagcaccatcaggggccccggggcaggttcatcccacctggcatatgtatgcatgaactaganatgtgtttgcctgctgggcatggtggctcacgcctgtgatcacagcactttgggaggccaaggcgggtggatcacctgaggtcaggagtttgagaccagcctggccaacatggtgaaaccctgtctctactaaaaatacaaaaattagccaggcgtgctggcatgtgcctctagtcccagctactctggaggctgatgcaggagaatcgcttgaactcaggaggcggaggttgcagtgggccaagattgcgccactgctcttcagcctgggggataatccgattgagactccatctcaacagc

SEQ ID NO: 379831 - DNA, 1620 bp, Homo sapiens
catctccacttcacatgagccactgcgtgtttacagttagctttcagctggacacagagttccactgctgggtacaaacacctgaaagcctccagttggctccagtctgttcctgatggttaaaaaaccttagtcctgagttggaaatccttgcctaggagtccagggcagcttagtgaccacagccaccggcccatccctgcctccagtgtccctggactccaagaacctttcagagtcattgagggcacatggggggagacctgtgagtccctaggtcaaccctgatgctgccatggagagagccctcctcacctggacactcctgcccacgtcttgtgtagctgacctattgggttgctgcacagagcagagacgatgacgtgcaccgaggagaagttgttgaggcttaggcactcctggagagggaagaatgagctgtgcggttcagagttggagcttggcccactacagcctcagccccctctgctgagatctcccctcctggatgaagcagaggcctggggagcctcaggagggcagacctggggccgagtggatgtcactcatctaggaggattttagttcaacccaaggaagaccccaggtcggaagtgagcagccaccactgggccgtgggagtcaagtctggagaaacagctacggccatcccagccctggccaaggggaaaatgccggaagactccagggtgggaggaagcgcgtcccaaggcccaggatctgcgaggcgacttggggaaaacgcaggcaggacctgctgaagctcacacccgtggaccacccagactgcctgccgctacaggatgccctccgcatctcccaggacttctttccggcatcagtgtggacattgaccccactggactgcagtcacagtggactcccaaggggcaggatccacctctgatgttcagtgaagactaccagaaaagtctgctagagcagtaccatctgggtctggatcaaaaactcagaaaatacgtggttggagagctcatctggaattttgccgatttcatgactaaccagtagtgggtgcagtggaccccatcatggagaagttcaacacatccagcctacgaccagcacctgtgggaggtggatattcaaggcagcagagcctacagccggggcatggagaaggcagggctcctcgccaaggccgagatggatggttttacgttgaactaattatatactcaagtgctgtttaactgtgtgccttgacctcttctctcctttaatgatccctgtggcccacatggcttatgggtaaaggtgtgctgggctcgagatgccccctcccagggtgcacttccaggactcagctcctggacagggacagtcagtcatcaggaataaggtgggatcagggcaggggctctcggctgctgatgcctgctcacctgacccctggtattgctgctacgtgctataggtggttgaggagtgggcccagggcaccttcaaactcaaccccaatgatgaggacatccacacagccaacaagtgccacctgaaggtacgaaccctgcagccccactgccttcctggcctcccctctccaccttgcgcggggccactttgagcattagcacc

SEQ ID NO: 379832 - DNA, 1322 bp, Homo sapiens
catctccacttcacatgagccactgcgtgtttacagttagctttcagctggacacagagttccactgctgggtacaaacacctgaaagcctccagttggctccagtctgttcctgatggttaaaaaaccttagtcctgagttggaaatccttgcctaggagtccagggcagcttagtgaccacagccaccggcccatccctgcctccagtgtccctggactccaagaacctttcagagtcattgagggcacatggggggagacctgtgagtccctaggtcaaccctgatgctgccatggagagagccctcctcacctggacactcctgcccacgtcttgtgtagctgacctattgggttgctgcacagagcagagacgatgacgtgcaccgaggagaagttgttgaggcttaggcactcctggagagggaagaatgagctgtgcggttcagagttggagcttggcccactacagcctcagccccctctgctgagatctcccctcctggatgaagcagaggcctggggagcctcaggagggcagacctggggccgagtggatgtcactcatctaggaggattttagttcaacccaaggaagaccccaggtcggaagtgagcagccaccactgggccgtgggagtcaagtctggagaaacagctacggccatcccagccctggccaaggggaaaatgccggaagactccagggtgggaggaagcgcgtcccaaggcccaggatctgcgaggcgacttggggaaaacgcaggcaggacctgctgaagctcacacccgtggaccacccagactgcctgccgctacaggatgccctccgcatctcccaggacttctttccggcatcagtgtggacattgaccccactggactgcagtcacagtggactcccaaggggcaggatccacctctgatgttcagtgaagactaccagaaaagtctgctagagcagtaccatctgggtctggatcaaaaactcagaaaatacgtggttggagagctcatctggaattttgccgatttcatgactaaccagtgtggttgaggagtgggcccagggcaccttcaaactcaaccccaatgatgaggacatccacacagccaacaagtgccacctgaaggtggtcacggacctcaggttgtggatgtggcagacctgctttcacgctctcgggcctcctctgggagctcatcaggactatgggggattgggcagaggtgttcctgctccagcgtggctcctggactggcgccagatgctggccctgggggtttcaatccaagcataattcagtgaagcatgtgttt

SEQ ID NO: 379833 - DNA, 1359 bp, Homo sapiens
ggcttctgaccgctcaccctcccccgtcaactccttacgtagtcaccattatgaaaaagtgtgccccttcagcaccttgggaagacctggatataaccagggtcccaggtttgaggagacagtgctgggtcaaacagcctttattttagcagttgtgagaccctagagaactcctttggtgttttggggtctccccagcatgcacaatgggggttatgctagcatctctttcctagggaactcatgaggttatgtttgagataaatatttaaaaactcatggtgtggtgttccctgtggatattgcacacacttagaaatggaacaaatacaagaaggggtgagagaaaataaagcatgcgaagaagttaacttggtgccattgggcagagggtgagagcccagcaaaccggagagatcagctgcccacatcagtggcgaggagtgcggagagtgggtgaggctggggcaggaagcaggccagcctgccagagcccaggaacaggtgaaaggacctgctgaagctcacacccgtggaccacccagactgcctgccgctacaggatgccctccgcatctcccaggacttctttccggcatcagtgtggacattgaccccactggactgcagtcacagtggactcccaaggggcaggatccacctctgatgttcagtgaagactaccagaaaagtctgctagagcagtaccatctgggtctggatcaaaaactcagaaaatacgtggttggagagctcatctggaattttgccgatttcatgactaaccagtagtgggtgcagtggaccccatcatggagaagttcaacacatccagcctacgaccagcacctgtgggaggtggatattcaaggcagcagagcctacagccggggcatggagaaggcagggctcctcgccaaggccgagatggatggttttacgttgaactaattatatactcaagtgctgtttaactgtgtgccttgacctcttctctcctttaatgatccctgtggcccacatggcttatgggtaaaggtgtgctgggctcgagatgccccctcccagggtgcacttccaggactcagctcctggacagggacagtcagtcatcaggaataaggtgggatcagggcaggggctctcggctgctgatgcctgctcacctgacccctggtattgctgctacgtgctataggtggttgaggagtgggcccagggcaccttcaaactcaaccccaatgatgaggacatccacacagccaacaagtgccacctgaaggtacgaaccctgcagccccactgccttcctggcctcccctctccaccttgcgcggggccactttgagcattagcacc

SEQ ID NO: 379834 - DNA, 1216 bp, Homo sapiens
ggcttctgaccgctcaccctcccccgtcaactccttacgtagtcaccattatgaaaaagtgtgccccttcagcaccttgggaagacctggatataaccagggtcccaggtttgaggagacagtgctgggtcaaacagcctttattttagcagttgtgagaccctagagaactcctttggtgttttggggtctccccagcatgcacaatgggggttatgctagcatctctttcctagggaactcatgaggttatgtttgagataaatatttaaaaactcatggtgtggtgttccctgtggatattgcacacacttagaaatggaacaaatacaagaaggggtgagagaaaataaagcatgcgaagaagttaacttggtgccattgggcagagggtgagagcccagcaaaccggagagatcagctgcccacatcagtggcgaggagtgcggagagtgggtgaggctggggcaggaagcaggccagcctgccagagcccaggaacaggtgaaaggatccacctctgatgttcagtgaagactaccagaaaagtctgctagagcagtaccatctgggtctggatcaaaaactcagaaaatacgtggttggagagctcatctggaattttgccgatttcatgactaaccagtagtgggtgcagtggaccccatcatggagaagttcaacacatccagcctacgaccagcacctgtgggaggtggatattcaaggcagcagagcctacagccggggcatggagaaggcagggctcctcgccaaggccgagatggatggttttacgttgaactaattatatactcaagtgctgtttaactgtgtgccttgacctcttctctcctttaatgatccctgtggcccacatggcttatgggtaaaggtgtgctgggctcgagatgccccctcccagggtgcacttccaggactcagctcctggacagggacagtcagtcatcaggaataaggtgggatcagggcaggggctctcggctgctgatgcctgctcacctgacccctggtattgctgctacgtgctataggtggttgaggagtgggcccagggcaccttcaaactcaaccccaatgatgaggacatccacacagccaacaagtgccacctgaaggtacgaaccctgcagccccactgccttcctggcctcccctctccaccttgcgcggggccactttgagcattagcacc

SEQ ID NO: 379835 - DNA, 615 bp, Homo sapiens
tgcgaggcgacttggggaaaacgcaggcagggtattgaacccgtgaaaggttacgcaaatgtatgtttgaaagtggaaatgaaacaaggattttctctgccacacagacagcaggttggcgaaaagttaaaagcgtgttagtattcaggggaggctgcgttcagagaagcagctaccttcagaggctgctggtgaccgtgtgaccagctggagcccttttggaaagtcaactagctagagctgttgaaagttgatatctgcatatcctttcacccagatatccctttcctgggtgtctgtctgctgcaggggatttgtttattttatgggttgaattgtgtccccttccccaaatgtaactgtttctattctcaaccccagagactcagaatgtgactgtgtctggacacagagtactccaagaggtaattcaggtgaagtgagttcattagggtggcccctaatttaacatgcctggggttcttacaaggagagggggtcagcgcacagagaagttcaagagaagaccctgtgctgactgagatagaagtccgccatctccaaggcaaggagagaggcccagagaaaccaccccaggctgacagtttgacgttg

SEQ ID NO: 379836 - DNA, 4526 bp, Homo sapiens
  misc_feature (1035)..(1035): n is a, c, g, or t
  misc_feature (1082)..(1082): n is a, c, g, or t
  misc_feature (1121)..(1121): n is a, c, g, or t
  misc_feature (1158)..(1158): n is a, c, g, or t
  misc_feature (1169)..(1169): n is a, c, g, or t
  misc_feature (1175)..(1175): n is a, c, g, or t
  misc_feature (1200)..(1200): n is a, c, g, or t
  misc_feature (1211)..(1211): n is a, c, g, or t
  misc_feature (1216)..(1216): n is a, c, g, or t
  misc_feature (1252)..(1252): n is a, c, g, or t
  misc_feature (1300)..(1300): n is a, c, g, or t
  misc_feature (1326)..(1326): n is a, c, g, or t
  misc_feature (1328)..(1328): n is a, c, g, or t
  misc_feature (1440)..(1440): n is a, c, g, or t
  misc_feature (1745)..(1746): n is a, c, g, or t
  misc_feature (1765)..(1765): n is a, c, g, or t
  misc_feature (1877)..(1877): n is a, c, g, or t
  misc_feature (2012)..(2012): n is a, c, g, or t
  misc_feature (2223)..(2223): n is a, c, g, or t
  misc_feature (2236)..(2236): n is a, c, g, or t
  misc_feature (2270)..(2270): n is a, c, g, or t
  misc_feature (2380)..(2380): n is a, c, g, or t
  misc_feature (2397)..(2398): n is a, c, g, or t
  misc_feature (2414)..(2414): n is a, c, g, or t
  misc_feature (2434)..(2434): n is a, c, g, or t
  misc_feature (2457)..(2457): n is a, c, g, or t
  misc_feature (2569)..(2569): n is a, c, g, or t
  misc_feature (2648)..(2648): n is a, c, g, or t
  misc_feature (2876)..(2876): n is a, c, g, or t
  misc_feature (2907)..(2907): n is a, c, g, or t
  misc_feature (2930)..(2930): n is a, c, g, or t
  misc_feature (3034)..(3034): n is a, c, g, or t
  misc_feature (3236)..(3236): n is a, c, g, or t
  misc_feature (3238)..(3238): n is a, c, g, or t
agcaatttgggaggtggaggaggagcaggaggaggaaaaggaaacaaccaggccagtcatggtgtctcgtgcctacgaggaggaggaagcggaggaggggaaaaaaaggaggagcgaaaagaaacggagcagaaggagttggaggaggaggaggtggaggaggaggagggaaaagaaatggagcagcaggaggagggaaaagaaatggaagaggaggagcaggaggaaaatgaaatggaggaggaggaggaggaaaaagaaatggaggaggaaaaagaaacaggaggaggaaaaagaaacggaggaggaagaggaggaggaggacaaagaaacagccaggccggacgtggtggctcacccctgtagtcccagctgctcgggaggctgaggcagaagaatcgcttcaacccgggaggcagagtttgcgtgagccgagatcgtgccactgcactccagcctggagacagagtgagactccatctcatctcaaaaaaaacaaaagaaaacaaaacaaaaacaaaaaaacagccaggagccgtggctcacgcctgtaatcctagcaatttgggaggcgataagaattattgaaatgcagtaagaattaccgaaatgttgaacaaagacaccaagtgagcacgtgctgttggaaaaatagcaccaatactacactagctcaacacaaggttgccacaatcctgtaatatattaaaaattgggccaggcaaggggccgggaggggtggctcacacctgtaatctcagcactttgggaggccaaggcaggcggatcacctgaggtcaggagctccagaccagcctggccaacatggtaaaaccccatctctactaaaaatacaaaaattggctgggggtgatggtgggtgcctgtaatcctagctactatgtaggctgaggcaggagaaccacttgaacccgggtggtggaggttacagtgagccaagatcgtgccatggcactccagcctgggtgacaagagcaaaacttcatctcaaaaaaaaagaaaagaaaagaaaanaaatgggccaggcgggctgggtgcagtggctcatgcctgtaattccngcacctttgggaggctgagatgggtggatcacgaggtcngaagtttgagaccagcctggccaacatggtgaaaccncatctctactnaaaatngaaaaattatcctggcgtggtggcnagcgcttgtantcccngctactcgggaggttgaggcaggagaattgcttgancctgggaggtggaggttgtagtgagtgaagatcttgccactgcactcnagcctgggcaacagccagactctgtntnaaaacaaaccaacacaaacaaacaaaaacaaaccccaaaaccaaaattgatatttcccgtgtacattcgaccttgactgttgctcattcaacccagcccaactcagtgcccnatcccctggccctgaagagaccattctggcccagaagtgtcctggctcggagcagcaccttctgctaccacactgggcctcccttctcctcagtgcccaaggggaggcacctcactctgatctcccagtggcatcctattatgcctgccagtaaggataggcgcttggtcctagagcagagtggtctgccgttggaccagcccagcactccaggtgacctcagcctgccccaggccttcctgtaggttggcactaattggtttggctgcagccttgcatatttagcagtttttattactaataanncaggcagggtggcccaggnccccgctgggggaggtactgccaggctcccagctgaggggcaggctggctccaattctgactggctggccccagtgatcagaaagatccaggccccacctagtgctttgctngagatctaggcttggtggggcagcttgtggggtaaggggcaggaccagctcaaaagacggggtgggggcggaggctccctctgcagggcagagtcctttggcagctggggctgttgggcatggaggggtcagttnacagctcagggccagagcacggtagaggtctctgggtgcacacaagaaccaggagtggagctgaaacatgtcctgtcccctgcctgccctcccttagtaactgctggcatttcccaattccttcctgagcaccaggcaccatgttatgcatgcaatttgcaaatgttacctgattgaatgctcaaaacaaggctatcacataggtactgtnttatttttcagangatgtcttgctctgtcacccaggctggagtgcantggtgccatctctgttcactgcaacctccacctccagggttcaggtgaatctcctgcttcagactttcaagtagctgggactatagctgcccgccactgcgcctggctantttttgtattttcagtnnagacagggtttccccntgttggccgggctggtctcnaactcctgacctcaagggatccncccatctgggcctcccaaccctgagtttttataataggccccaggccaggtggttaacagaggtctggggcattgcagggggacagaggaggacatatgtccctattggccnttgtagagtcccttccacaaaaaggatgtcagtcaagtgacgtgcccacctccaccccaccctccccccagtcctgggnactaggactacttcccaggtgccctgtacccttccccgatctgtcccatgccctggcctctgcccgctttcaaaacatagatgtggccagcgccttggcttatgcctataatcccagcactttcggaagcagaaggattgcttgagcccaggagttcaagaccagcctgggcaacatagatcctgtctcaacatattttctgcaaaatttttgtttttcctagacagngttccagcctgggcgaccaagtgagactccntgtctcaaaaataagaacaaaangtagatgcctacgtaccatctctctacccttggctcctggggagtaagggtcacccagtgacctcctagaaggccagtgacaatggggggtgtcagagtgctcntcagagccaagggagcagtaggaattgggatcttagtctcttagtctgactccaagctgtgagggagagagttgcagggcacttaagcttggtggagaccgtcagtgcctccttgcctgtccctgcagcaaaagttcaggacaccagagccaagctcagaggccgtggtggaacaggggtgaagagcatgggttctgacttnanactgctgggctgcagccctggctctccctccccgggtaagggcaggctgcatgcctccctgtgcctcagtttccccctcttcatagtgggattgtattggtgcctaccccagagagttgtgtcatcaattaggatggcacctggcaccttggtcagtggcaggaaaggttccagaagctctgctctggtcccggggtgcctcgggccctgccaccatctccttggggtggtgccatgtggtgggaaagaccccaacttcaaggccagacgcagtggctcatgcccataatcccagcactttcagaggccgagatgggaggatcacctgaggtcaggagttcaagaccagcctggccagcatggtcaaaccctgcctgtactaatgatccaaaaattagccaggtgtggtggtgcgtgtctgtagtgccagctactcgggaggctgaggcaggagaatctcacgaacccgggaggcggaggttgcagtgagccgaggttgcactactgcagtccagcctggctctgtcttggtgttcagccatgttcccatgctcactcccaaggtgactctgggaaggtctcagcctttttgtcttcccagttaggatggtcccatgcccctgttaccatcagacttggtaagtttcccgaggagactctgcaagaggcactgttctggatggtggaggagagactagttgttctgctctcctggccacagtgggtgcagtggaccccatcatggagaagttcaacacatccagcctacgaccagcacctgtgggaggtggatattcaaggcagcagagcctacagccggggcatggagaaggcagggctcctcgccaaggccgagatggatggttttacgttgaactaattatatactcaagtgctgtttaactgtgtgccttgacctcttctctcctttaatgatccctgtggcccacatggcttatgggtaaaggtgtgctgggctcgagatgccccctcccagggtgcacttccaggactcagctcctggacagggacagtcagtcatcaggaataaggtgggatcagggcaggggctctcggctgctgatgcctgctcacctgacccctggtattgctgctacgtgctataggtggttgaggagtgggcccagggcaccttcaaactcaaccccaatgatgaggacatccacacagccaacaagtgccacctgaaggtacgaaccctgcagccccactgccttcctggcctcccctctccaccttgcgcggggccactttgagcattagcacc

SEQ ID NO: 379837 - DNA, 1791 bp, Homo sapiens
tgagtgaaccccaacctttggagaaccccagtgagcctctccagatgtctgagtgggcctgtggctcctttttcagcaccaagggacccctcttctgtctgtgtcaaggagaaagaccagccagaaggaatctcagacatcctttaccagtgccatcgcagacttggtttctatgtgtttttccaaacagtgagtgatacaggccattgaggcagaatgctgagagctgcttcaagtgagggggaagagaaaagtaacaaacatgaatcacagcacccccagcagattttccagagttttaggctctagggacccctttgtttgctgtgtcttagatcattgagtccctacaagaaccctgtgaggttcgtcttctcactactccctgttccagaggagccaaccgaggctccgagaggtgcatcttcaagacagagccagtaggggacagaggcacctctgtgtcttggagggggatggacactcaccttctaaccagtagttccaaaaagtgtggcacagtgataaagtcccaggaggggcccaggcaggtggcataggaggagatgggtttagttagaaaggctggaaccagggactcccaacagcttctccccagtgccgggctggaaagttagcatcctgcagatctcattttcatactagggggacaaggagggacatgggagtcagtggtaacaccatggaccaccagaggatcgggatctggaactcacaccaagaagcaccaacccttcagggacttgtgcatatggagaacctgggtgcccatggtgaaaagcgttctaggctttcaaagtaacattgcatgtgaggatggagaatgataaaacgattcctgccttcaaggcatcgtcccggtgtttgtcagctgtggggcaacagcaccctctgtgtcagcaacctgcatgaagagcatcatccctgcaagtcctcaaggcctggggaggcctcatcccctcctcatttcagcaacagcacacaggacaatacgctctagaagaactctttgacttaaaggtatatgattgtttttgttcctttaacatgaacgtgagtctggagaaacagctacggccatcccagccctggccaaggggaaaatgccggaagactccagggtgggaggaagcgcgtcccaaggcccaggatctgcgaggcgacttggggaaaacgcaggcaggacctgctgaagctcacacccgtggaccacccagactgcctgccgctacaggatgccctccgcatctcccaggacttctttccggcatcagtgtggacattgaccccactggactgcagtcacagtggactcccaaggggcaggatccacctctgatgttcagtgaagactaccagaaaagtctgctagagcagtaccatctgggtctggatcaaaaactcagaaaatacgtggttggagagctcatctggaattttgccgatttcatgactaaccagtgtaagcggcagtttggctcatgggataatgtacccgtcctcattttttcaggttgccttgcccattctggacacttagattgtaagaatattggaaacaaagcgaggagctggtttaatccatgcaggttgcgttgaggatttcctaggaaaagtgagttgtgcttagtaagtaggaaagcagtcaggcccctgcttcccaaatacagtcaaaaagcaaacaggagagtctgctatagtgagatgtaaatggctagcttgcctttttcttgtctatttcatagccaaggaggaaggaaaaactggacc

SEQ ID NO: 379838 - DNA, 1754 bp, Homo sapiens
tgagtgaaccccaacctttggagaaccccagtgagcctctccagatgtctgagtgggcctgtggctcctttttcagcaccaagggacccctcttctgtctgtgtcaaggagaaagaccagccagaaggaatctcagacatcctttaccagtgccatcgcagacttggtttctatgtgtttttccaaacagtgagtgatacaggccattgaggcagaatgctgagagctgcttcaagtgagggggaagagaaaagtaacaaacatgaatcacagcacccccagcagattttccagagttttaggctctagggacccctttgtttgctgtgtcttagatcattgagtccctacaagaaccctgtgaggttcgtcttctcactactccctgttccagaggagccaaccgaggctccgagaggtgcatcttcaagacagagccagtaggggacagaggcacctctgtgtcttggagggggatggacactcaccttctaaccagtagttccaaaaagtgtggcacagtgataaagtcccaggaggggcccaggcaggtggcataggaggagatgggtttagttagaaaggctggaaccagggactcccaacagcttctccccagtgccgggctggaaagttagcatcctgcagatctcattttcatactagggggacaaggagggacatgggagtcagtggtaacaccatggaccaccagaggatcgggatctggaactcacaccaagaagcaccaacccttcagggacttgtgcatatggagaacctgggtgcccatggtgaaaagcgttctaggctttcaaagtaacattgcatgtgaggatggagaatgataaaacgattcctgccttcaaggcatcgtcccggtgtttgtcagctgtggggcaacagcaccctctgtgtcagcaacctgcatgaagagcatcatccctgcaagtcctcaaggcctggggaggcctcatcccctcctcatttcagcaacagcacacaggacaatacgctctagaagaactctttgacttaaaggtatatgattgtttttgttcctttaacatgaacgtgagtctggagaaacagctacggccatcccagccctggccaaggggaaaatgccggaagactccagggtgggaggaagcgcgtcccaaggcccaggatctgcgaggcgacttggggaaaacgcaggcaggacctgctgaagctcacacccgtggaccacccagactgcctgccgctacaggatgccctccgcatctcccaggacttctttccggcatcagtgtggacattgaccccactggactgcagtcacagtggactcccaaggggcaggatccacctctgatgttcagtgaagactaccagaaaagtctgctagagcagtaccatctgggtctggatcaaaaactcagaaaatacgtggttggagagctcatctggaattttgccgatttcatgactaaccagtgtggttgaggagtgggcccagggcaccttcaaactcaaccccaatgatgaggacatccacacagccaacaagtgccacctgaaggtggtcacggacctcaggttgtggatgtggcagacctgctttcacgctctcgggcctcctctgggagctcatcaggactatgggggattgggcagaggtgttcctgctccagcgtggctcctggactggcgccagatgctggccctgggggtttcaatccaagcataattcagtgaagcatgtgttt

SEQ ID NO: 379839 - DNA, 371 bp, Homo sapiens
attgtgacttcgacctggagttaattttctttgcagtaaagcgagactggtgacttagaattgttgtcaagggttttctagctgaaaaaaaaaaatattgtcagctaaaacaagtacatatttgtattgaaaacgacatagatgttttctctttagtttgtgattatagggacatagtttgaaagtgaatttcttcaataagattaatttccaaaaaaaaagttattttgtttcatttttgctggttttgaatgcaactgtttgttaccagtgccaaaacagtggatgtgaatgaaatgtatagtcagacggaaatttcacgtcactgagtggaatttcacccttctttaaaagtctccgctttctgcctt

SEQ ID NO: 379840 - DNA, 1518 bp, Homo sapiens
  misc_feature (1511)..(1518): n is a, c, g, or t
tggttgcctagcaaccggtggtgccaaacactggagctcagagcggggggcgcggagagcgaagcgggaaaggaggtggtgtctgtgaacaggcctaggggtttctgacccttctggtttctgtgccatggccacgctgagcgtcaagccaagtcggcgcttccagctgcccgactggcacactaacagctacctgctatccaccaatgcccagctgcagcgagatgcttcccatcagatccgccaggaggcccgggtgctccgcaacgagaccaacaaccagaccatttgggatgaacatgacaacaggactcgactggtggagaggattgatactgtcaaccggtggaaggagatgctggacaagtgtctgacagatttagatgccgagatcgatgccctgacacagatgaaggagtcagcagagcaaaacctgcaggccaagaacctgcctctggatgtggccattgagtgcctgaccctgcgggaaagccggcgagacattgatgtggtgaaggaccctgtggaggatgagctgcataaagaggtggaggtcatcgaggccaccaagaaggccttgcaacagaaggtcagccaggccttcgagcagctctgcctcttgcaggaagtccaacagcagctcaactccgaccatcggggcaaaatggagacactagagatcgacagaggctgtctctctctcaacctcagatccccaaacatctcgctgaaggttgaccccacacgtgtacctgatggctccaccacactccagcagtgggatgacttcagtcggttcaacaaggaccgagcggaggctgagatgaaggcagccacagagctgagggaggccactgctctaactattgctgagaccaacaacgagcttgaagcccagagagttgcaacggaatttgccttcaggaagcggctgcgggagatggagaaagtgtacagtgagctcaagtggcaagagaagaataccttggaggagatcgctgagctgcaggaggacatccggcacctggaggaggatctgcgcacaaagctcctgagcctgaagctgtcccatacccggctagaggccagaacctaccggcccaacgtggaactctgccgggaccaggcacagtacggcctcaccgacgaggttcaccagctagaggcaaccatcgctgccctgaagcagaagctggcgcaagcacaggacgcactggacgccctgtgcaagcacctggcccggctgcaggctgacattgcctgcaaggccaactccatgctgctggacaccaagtgcatggacacgcggcgcaagctgaccgtgcctgctgagaggttcgtgcctgaggtggacaccttcacacgtaccacaaatagcaccctgagtccactcaaaagctgccagctggagctggcctagccttggaggactgcaggaggagggcagggttgggtgggcaatggaaggagggaggagagaaatgaatggaataaatgcagaggatctcagnnnnnnnn

SEQ ID NO: 379841 - DNA, 1748 bp, Homo sapiens
  misc_feature (1741)..(1748): n is a, c, g, or t
ggcgggagggcgtggcggctaccagacggggagggggccgccccgggggccgccccccagctccccagtgccaacaggcacgcgtccctggagacagaacagggctcctgcccttagatcccccacggggactggcccgcagcctggggaagaaaggaaaggaagatcaacaaggtggtgtctgtgaacaggcctaggggtttctgacccttctggtttctgtgccatggccacgctgagcgtcaagccaagtcggcgcttccagctgcccgactggcacactaacagctacctgctatccaccaatgcccagctgcagcgagatgcttcccatcagatccgccaggaggcccgggtgctccgcaacgagaccaacaaccagaccatttgggatgaacatgacaacaggactcgactggtggagaggattgatactgtcaaccggtggaaggagatgctggacaagtgtctgacagatttagatgccgagatcgatgccctgacacagagacggggtttcaccattttggccaggctgttctcgaactcctgacctcaagtgttccatccaactcggcctcccgaagtgctgggattacagatgtgagccaccgtgcccggccgcgccctcttttctagatgaaggagtcagcagagcaaaacctgcaggccaagaacctgcctctggatgtggccattgagtgcctgaccctgcgggaaagccggcgagacattgatgtggtgaaggaccctgtggaggatgagctgcataaagaggtggaggtcatcgaggccaccaagaaggccttgcaacagaaggtcagccaggccttcgagcagctctgcctcttgcaggaagtccaacagcagctcaactccgaccatcggggcaaaatggagacactagagatcgacagaggctgtctctctctcaacctcagatccccaaacatctcgctgaaggttgaccccacacgtgtacctgatggctccaccacactccagcagtgggatgacttcagtcggttcaacaaggaccgagcggaggctgagatgaaggcagccacagagctgagggaggccactgctctaactattgctgagaccaacaacgagcttgaagcccagagagttgcaacggaatttgccttcaggaagcggctgcgggagatggagaaagtgtacagtgagctcaagtggcaagagaagaataccttggaggagatcgctgagctgcaggaggacatccggcacctggaggaggatctgcgcacaaagctcctgagcctgaagctgtcccatacccggctagaggccagaacctaccggcccaacgtggaactctgccgggaccaggcacagtacggcctcaccgacgaggttcaccagctagaggcaaccatcgctgccctgaagcagaagctggcgcaagcacaggacgcactggacgccctgtgcaagcacctggcccggctgcaggctgacattgcctgcaaggccaactccatgctgctggacaccaagtgcatggacacgcggcgcaagctgaccgtgcctgctgagaggttcgtgcctgaggtggacaccttcacacgtaccacaaatagcaccctgagtccactcaaaagctgccagctggagctggcctagccttggaggactgcaggaggagggcagggttgggtgggcaatggaaggagggaggagagaaatgaatggaataaatgcagaggatctcagnnnnnnnn

SEQ ID NO: 379842 - DNA, 1522 bp, Homo sapiens
  misc_feature (1515)..(1522): n is a, c, g, or t
ggcgggagggcgtggcggctaccagacggggagggggccgccccgggggccgccccccagctccccagtgccaacaggcacgcgtccctggagacagaacagggctcctgcccttagatcccccacggggactggcccgcagcctggggaagaaaggaaaggaagatcaacaaggcatggttggctgggggcaggtggtgtctgtgaacaggcctaggggtttctgacccttctggtttctgtgccatggccacgctgagcgtcaagccaagtcggcgcttccagctgcccgactggcacactaacagctacctgctatccaccaatgcccagctgcagcgagatgcttcccatcagatccgccaggaggcccgggtgctccgcaacgagaccaacaaccagaccatttgggatgaacatgacaacaggactcgactggtggagaggattgatactgtcaaccggtggaaggagatgctggacaagtgtctgacagatttagatgccgagatcgatgccctgacacagatgaaggagtcagcagagcaaaacctgcaggccaagaacctgcctctggatgtggccattgagtgcctgaccctgcgggaaagccggcgagacattgatgtggtgaaggaccctgtggaggatgagctgcataaagaggtggaggtcatcgaggccaccaagaaggccttgcaacagaaggtcagccaggccttcgagcagctctgcctcttgcaggaagtccaacagcagctcaactccgaccatcggggcaaaatggagacactagagatcgacagaggctgtctctctctcaacctcagatccccaaacatctcgctgaaggttgaccccacacgtgtacctgatggaccaacaacgagcttgaagcccagagagttgcaacggaatttgccttcaggaagcggctgcgggagatggagaaagtgtacagtgagctcaagtggcaagagaagaataccttggaggagatcgctgagctgcaggaggacatccggcacctggaggaggatctgcgcacaaagctcctgagcctgaagctgtcccatacccggctagaggccagaacctaccggcccaacgtggaactctgccgggaccaggcacagtacggcctcaccgacgaggttcaccagctagaggcaaccatcgctgccctgaagcagaagctggcgcaagcacaggacgcactggacgccctgtgcaagcacctggcccggctgcaggctgacattgcctgcaaggccaactccatgctgctggacaccaagtgcatggacacgcggcgcaagctgaccgtgcctgctgagaggttcgtgcctgaggtggacaccttcacacgtaccacaaatagcaccctgagtccactcaaaagctgccagctggagctggcctagccttggaggactgcaggaggagggcagggttgggtgggcaatggaaggagggaggagagaaatgaatggaataaatgcagaggatctcagnnnnnnnn

SEQ ID NO: 379843 - DNA, 282 bp, Homo sapiens
gccttatgtattttgtgacatttgatcaggagctcatgcgtcttagtattttatgggtgggaattctttgaagcttggattgaggttaattttttaaagaaaggattatatttagtcacaccagttgactgggaacactactaacctaatcattttgaataatttattttaaattaatcattagctagaggtgttatggactttgtggcttcaaattctcaagggaaaaatttttgttcccctccatcaagcagcatgttttgccacagacaattttcctgg

SEQ ID NO: 379844 - DNA, 975 bp, Homo sapiens
  misc_feature (20)..(20): n is a, c, g, or t
  misc_feature (80)..(80): n is a, c, g, or t
  misc_feature (279)..(279): n is a, c, g, or t
  misc_feature (547)..(547): n is a, c, g, or t
  misc_feature (630)..(630): n is a, c, g, or t
  misc_feature (690)..(690): n is a, c, g, or t
  misc_feature (858)..(858): n is a, c, g, or t
  misc_feature (863)..(864): n is a, c, g, or t
  misc_feature (880)..(881): n is a, c, g, or t
  misc_feature (884)..(884): n is a, c, g, or t
  misc_feature (908)..(908): n is a, c, g, or t
  misc_feature (928)..(928): n is a, c, g, or t
  misc_feature (957)..(957): n is a, c, g, or t
atgttctttatacataaganggttcatataggacagacctttggtaaatataatgaatatgagaaagcctgtaataactnagctattattgtccaagggataactcaggtaagacagccaacttgctgtagaaagtctgacttcagtaaacatcagcaaacacacacaggagagaaaccccatgaatgtgttgaatgtgagaaaccctccattagcaaatcagacctcatgatacagcacaagatgcctactgaggaaaaaccttatgcctgtaactgntgtgaaaaattgttcagctataagtccagcctcactatccatcagagaattcacacaggggaaaagccctatggatgcaatgaatgtggaaaaaccgttcgctgtaagtcattcctcactttacatcagagaactcacactggggataagccctacaaatgtattgaatgtggaaaaacttcactgtaaatcacttctcactttacatcacagaactcactcaggggaaaagccctatcagtgtagtgaatgtggaaaaacctttagncagaagtcatacctcacaatacatcatagaactcacacctggcaaaagccctatgcatgtgaccattgtgaaaaagcatttanccataagtcaaagcttactgtccatcagagaacacacacaggggaaaagccctatgaatntaatgagtgtagaaaaccctttatcaataagtcaaacctcaggatacatcagagaactcacattagaaaaaccctatgaatgcaatgaatgtgggaaaacgtttcaccaaaagtcgttcctcactgtccatcaaaggactcacaggcgaaaaaccctacgaatgcaangaacnngggaaaacctttcacnntangtcattcctcactgtccatcaganaactcatactggggaaaaancatatgcatgtaacaaatgtggaaaaacntatagccacaagtcataa

SEQ ID NO: 379845 - DNA, 353 bp, Homo sapiens
ggggggcggggatggtaaatctctttatcaaaaatatactgtaatatgagatgttttaatttatttttctcttacttcaaattgctaacaaatgatccccaacacctccaactgatttatgctcttttccagtgacagggtctacttctgagatattttactccagggtacatgtctataattaactaactttaaaaagtgaggaaagaatatatttagccttctcagctaaaaacatactattttcctctatttctaagaagtttcctttaaatacagtaaggtttctttaaacagttctcatttagataacattgtttttccccatactatcaacgaacagaatttagcga

SEQ ID NO: 379846 - DNA, 334 bp, Homo sapiens
gcgtcgacccaagccagatgcagaagtgggaattgtctggattgttttcagggtgttaatgaaccctaggaatagcaggcaggaggcttcagcagcctcacccactggcataattcctgctgagaccactgggggctggcccatcctacagtctggccatctctccccatgagccatcacccttgccctccactctggtttggctgggatgctgggaagtggctttttcctgaggctctttagagaagaggtcccctcagcatgggatgtgggccaagtctctgtgagctgcaattgcttcttcacagggtcccagggcctccgtcgacgagag

SEQ ID NO: 379847 - DNA, 1228 bp, Homo sapiens
agcctctctgtggaagggcagcctgcgcctgggtaccgaggctgctgcgcggcggacagcgggcgcgatgtatctccgcagggcggtctccaagactctggcgctgccgctgagggcgccccccaaccccgcgccgctcggaaaggacgcatctctgcgccggatgtcatctaacagattccctggatcatctggatcaaatatgatttattatctggttgtaggcgtcacagtcagtgctggtggatattatgcttacaagacagtcacatcagaccaagccaaacacacagaacataaaacaaatttgaaagaaaaaacaaaagcagagatacatccatttcaaggtgaaaaggagaatgttgcggaaactgagaaagcaagttcagaagccccagaagaacttatagtggaagctgaggtggtagatgctgaagaaagtcccagtgctacagttgtggtcataaaagaggcatctgcctgtccaggtcacgtggaggctgctccggagaccacagcagtcagtgctgaaaccgggccagaggtcacagatgcagcggcgagggaaaccacggaagtaaaccctgaaacaaccccagaggttacaaatgctgccctggatgaagctgtcaccatcgataatgataaagatacaacaaagaacgaaacctctgatgaatatgctgaactagaagaagaaaattctccagctgagtcagagtcctctgctggagatgatttacaggaggaagccagtgttggctctgaggctgcttcggctcaaggctaatctccagccggtagacatttcagcaacaaatgccatagggtgtctgataagtgcttttgtgtttttagtacacttagtttaaaaaaaaaaagacttattttctagaaaacgttaatgggtcttgaagatttttggcatccactgatagattttaggactgagagacttgagattgtacatttcttactactcttctactgtctgagatcagaatatgacattgcagtaaagagcttaaatagtttcatctttggtttttttttctagacacttttcttttatcccagtcatctctgaatttacattttatattaaagaaattgagctatccatacaacctgtatttactttaatttcactatgctttcagcttactttattgtatgatatgtaggtctaaaatatagtttgagtcaaataaaattagaaaagctttgg

SEQ ID NO: 379848 - DNA, 1838 bp, Homo sapiens
tgcgcgttgggacaggggcggaaccccaggtggtcgggacaggctgttgcgggagcgcgccctcagcgaagcaagtgaggcatctcactgggaaagtcgaatgtgtgtggcggccgccgccgaggcgggttccgaagagacctcagcagggcaggccagggcctacgcgaacgcccacccttaagagcgcggggacagggaactggagcgttcctcccagcccccgacgtcgcgggcccagtgtccccgtccaggctggttgggcgcacgcgcggccccactcgcccccacgcgtgcgtccccgctggtcccgcccccggccggaagttccggcggcggagctgggccgggcccgagcggatcgcgggctcgggctgcggggctccggctgcgggcgctgggccgcgaggcgcggagcttgggagcggagcccaggccgtgccgcgcggcgccatgaagggcaaggaggagaaggagggcggcgcacggctgggcgctggcggcggaagccccgagaagagcccgagcgcgcaggagctcaaggagcagggcaatcgtctgttcgtgggccgaaagtacccggaggcggcggcctgctacggccgcgcgatcccagagcgcagaagctgggacgggccgtgggtcagagtgggcacgctgagcctacgccctcatgcggctggcccggccttggtccctagacccggaacccgctggtggccgtgtattacaccaaccgggccttgtgctacctgaagatgcagcagcacgagcaggccctggccgactgccggcgcgccctggagctggacgggcagtctgtgaaggcgcacttcttcctggggcagtgccagctggagatggagagctatgatgaggccatcgccaatctgcagcgagcttacagcctggccaaggagcagcggctgaacttcggggacgacatccccagcgctcttcgaatcgcgaagaagaagcgctggaacagcattgaggagcggcgcatccaccaggagagcgagctgcactcctacctctccaggctcattgccgcggagcgtgagagggagctggaagagtgccagcgaaaccacgagggtgatgaggacgacagccacgtccgggcccagcaggcctgcattgaggccaagcacgacaagtacatggcggacatggacgagcttttttctcaggtggatgagaagaggaagaagcgagacatccccgactacctgtgtggcaagatcagctttgagctgatgcgggagccgtgcatcacgcccagtggcatcacctacgaccgcaaggacatcgaggagcacctgcagcgtgtgggtcattttgaccccgtgacccggagccccctgacccaggaacagctcatccccaacttggctatgaaggaggttattgacgcattcatctctgagaatggctgggtggaggactactgaggttccctgccctacctggcgtcctggtccaggggagccctgggcagaagcccccggcccctatacatagtttatgttcctggccaccccgaccgcttcccccaagttctgctgttggactctggactgtttcccctctcagcatcgcttttgctgggccgtgatcgtccccctttgtgggctggaaaagcaggtgagggtgggctgggctgaggccattgccgccactatctgtgtaataaaatccgtgagcacgaagcacgaggtgggacgtgctggtgtgtgaccggcagtcctgccagctgttttggctagccgaggaaggtggagatgaagacgctggtgtcaaggttgagcgtagcatgccaccagcggtcggggaag

SEQ ID NO: 379849 - DNA, 253 bp, Homo sapiens
gcggccgctccaacatcagaacttgggggaagcggtcggggtggccaggaacataaactatgtataggggccgggctggccaccccgaccgcttcccccaagttctgctgttggactctggactgtttcccctctcagcatcgcttttgctgggccgtgatcgtccccctttgtgggctggaaaagcaggtgagggtgggctgggctgaggccattgccgccactatctgtgtaataaaatccgtgagcacga

SEQ ID NO: 379850 - DNA, 1749 bp, Homo sapiens
tgcgcgttgggacaggggcggaaccccaggtggtcgggacaggctgttgcgggagcgcgccctcagcgaagcaagtgaggcatctcactgggaaagtcgaatgtgtgtggcggccgccgccgaggcgggttccgaagagacctcagcagggcaggccagggcctacgcgaacgcccacccttaagagcgcggggacagggaactggagcgttcctcccagcccccgacgtcgcgggcccagtgtccccgtccaggctggttgggcgcacgcgcggccccactcgcccccacgcgtgcgtccccgctggtcccgcccccggccggaagttccggcggcggagctgggccgggcccgagcggatcgcgggctcgggctgcggggctccggctgcgggcgctgggccgcgaggcgcggagcttgggagcggagcccaggccgtgccgcgcggcgccatgaagggcaaggaggagaaggagggcggcgcacggctgggcgctggcggcggaagccccgagaagagcccgagcgcgcaggagctcaaggagcagggcaatcgtctgttcgtgggccgaaagtacccggaggcggcggcctgctacggccgcgcgatcacccggaacccgctggtggccgtgtattacaccaaccgggccttgtgctacctgaagatgcagcagcacgagcaggccctggccgactgccggcgcgccctggagctggacgggcagtctgtgaaggcgcacttcttcctggggcagtgccagctggagatggagagctatgatgaggccatcgccaatctgcagcgagcttacagcctggccaaggagcagcggctgaacttcggggacgacatccccagcgctcttcgaatcgcgaagaagaagcgctggaacagcattgaggagcggcgcatccaccaggagagcgagctgcactcctacctctccaggctcattgccgcggagcgtgagagggagctggaagagtgccagcgaaaccacgagggtgatgaggacgacagccacgtccgggcccagcaggcctgcattgaggccaagcacgacaagtacatggcggacatggacgagcttttttctcaggtggatgagaagaggaagaagcgagacatccccgactacctgtgtggcaagatcagctttgagctgatgcgggagccgtgcatcacgcccagtggcatcacctacgaccgcaaggacatcgaggagcacctgcagcgtgtgggtcattttgaccccgtgacccggagccccctgacccaggaacagctcatccccaacttggctatgaaggaggttattgacgcattcatctctgagaatggctgggtggaggactactgaggttccctgccctacctggcgtcctggtccaggggagccctgggcagaagcccccggcccctatacatagtttatgttcctggccaccccgaccgcttcccccaagttctgctgttggactctggactgtttcccctctcagcatcgcttttgctgggccgtgatcgtccccctttgtgggctggaaaagcaggtgagggtgggctgggctgaggccattgccgccactatctgtgtaataaaatccgtgagcacgaagcacgaggtgggacgtgctggtgtgtgaccggcagtcctgccagctgttttggctagccgaggaaggtggagatgaagacgctggtgtcaaggttgagcgtagcatgccaccagcggtcggggaag

SEQ ID NO: 379851 - DNA, 1567 bp, Homo sapiens
tgcgcgttgggacaggggcggaaccccaggtggtcgggacaggctgttgcgggagcgcgccctcagcgaagcaagtgaggcatctcactgggaaagtcgaatgtgtgtggcggccgccgccgaggcgggttccgaagagacctcagcagggcaggccagggcctacgcgaacgcccacccttaagagcgcggggacagggaactggagcgttcctcccagcccccgacgtcgcgggcccagtgtccccgtccaggctggttgggcgcacgcgcggccccactcgcccccacgcgtgcgtccccgctggtcccgcccccggccggaagttccggcggcggagctgggccgggcccgagcggatcgcgggctcgggctgcggggctccggctgcgggcgctgggccgcgaggcgcggagcttgggagcggagcccaggccgtgccgcgcggcgccatgaagggcaaggaggagaaggagggcggcgcacggctgggcgctggcggcggaagccccgagaagagcccgagcgcgcaggagctcaaggagcagggcaatcgtctgttcgtgggccgaaagtacccggaggcggcggcctgctacggccgcgcgatcacccggaacccgctggtggccgtgtattacaccaaccgggccttgtgctacctgaagatgcagcagcacgagcaggccctggccgactgccggcgcgccctggagctggacgggcagtctgtgaaggcgcacttcttcctggggcagtgccagctggagatggagagctatgatgaggccatcgccaatctgcagcgagcttacagcctggccaaggagcagcggctgaacttcggggacgacatccccagcgctcttcgaatcgcgaagaagaagcgctggaacagcattgaggagcggcgcatccaccaggagagcgagctgcactcctacctctccaggctcattgccgcggagcgtgagagggagctggaagagtgccagcgaaaccacgagggtgatgaggacgacagccacgtccgggcccagcaggcctgcattgaggccaagcacgacaagtacatggcggacatggacgagcttttttctcaggtggatgagaagaggaagaagcgagacatccccgactacctgtgtggcaagatcagctttgagctgatgcgggagccgtgcatcacgcccagtggcatcacctacgaccgcaaggacatcgaggagcacctgcagcgtgtgggtcattttgaccccgtgacccggagccccctgacccaggaacagctcatccccaacttggctatgaaggaggttattgacgcattcatctctgagaatggctgggtggaggactactgaggttccctgccctacctggcgtcctggtccaggggagccctgggcagaagcccccggcccctatacatagtttatgttcctggccaccccgaccgcttcccccaagttctgctgttggactctggactgtttcccctctcagcatcgcttttgctgggccgtgatcgtcctggcctgagatgggatcctctagacgcctgca

SEQ ID NO: 379852 - DNA, 2089 bp, Homo sapiens
tgcgcgttgggacaggggcggaaccccaggtggtcgggacaggctgttgcgggagcgcgccctcagcgaagcaagtgaggcatctcactgggaaagtcgaatgtgtgtggcggccgccgccgaggcgggttccgaagagacctcagcagggcaggccagggcctacgcgaacgcccacccttaagagcgcggggacagggaactggagcgttcctcccagcccccgacgtcgcgggcccagtgtccccgtccaggctggttgggcgcacgcgcggccccactcgcccccacgcgtgcgtccccgctggtcccgcccccggccggaagttccggcggcggagctgggccgggcccgagcggatcgcgggctcgggctgcggggctccggctgcgggcgctgggccgcgaggcgcggagcttgggagcggagcccaggccgtgccgcgcggcgccatgaagggcaaggaggagaaggagggcggcgcacggctgggcgctggcggcggaagccccgagaagagcccgagcgcgcaggagctcaaggagcagggcaatcgtctgttcgtgggccgaaagtacccggaggcggcggcctgctacggccgcgcgatcgtgagtgcgcccgcgcggggagggcggcggcggtggcaccggggagggccgggcccgggcccggccggccccaccgagggtctggctcctcttcggggcgtgtcctcggctcccaaagcccagccgtggttctcgagcccagcgccgggtgccggagaacgagggtgcgatgctggatggaggccggccgggtggggggagggcaggggccctcgacccttgaggaccccaggtcctaagcccggactctccaaagatttggaaaactttacaaaaccaagtggaatcaagcggataggctcagccagtactccactgtgcacagatccttggacccaggggctttgacaactgagaaacctagtttcttgattctagccagagcgcagaagctgggacgggccgtgggtcagagtgggcacgctgagcctacgccctcatgcggctggcccggccttggtccctagacccggaacccgctggtggccgtgtattacaccaaccgggccttgtgctacctgaagatgcagcagcacgagcaggccctggccgactgccggcgcgccctggagctggacgggcagtctgtgaaggcgcacttcttcctggggcagtgccagctggagatggagagctatgatgaggccatcgccaatctgcagcgagcttacagcctggccaaggagcagcggctgaacttcggggacgacatccccagcgctcttcgaatcgcgaagaagaagcgctggaacagcattgaggagcggcgcatccaccaggagagcgagctgcactcctacctctccaggctcattgccgcggagcgtgagagggagctggaagagtgccagcgaaaccacgagggtgatgaggacgacagccacgtccgggcccagcaggcctgcattgaggccaagcacgacaagtacatggcggacatggacgagcttttttctcaggtggatgagaagaggaagaagcgagacatccccgactacctgtgtggcaagatcagctttgagctgatgcgggagccgtgcatcacgcccagtggcatcacctacgaccgcaaggacatcgaggagcacctgcagcgtgtgggtcattttgaccccgtgacccggagccccctgacccaggaacagctcatccccaacttggctatgaaggaggttattgacgcattcatctctgagaatggctgggtggaggactactgaggttccctgccctacctggcgtcctggtccaggggagccctgggcagaagcccccggcccctatacatagtttatgttcctggccaccccgaccgcttcccccaagttctgctgttggactctggactgtttcccctctcagcatcgcttttgctgggccgtgatcgtccccctttgtgggctggaaaagcaggtgagggtgggctgggctgaggccattgccgccactatctgtgtaataaaatccgtgagcacga

SEQ ID NO: 379853 - DNA, 1761 bp, Homo sapiens
tgcgcgttgggacaggggcggaaccccaggtggtcgggacaggctgttgcgggagcgcgccctcagcgaagcaagtgaggcatctcactgggaaagtcgaatgtgtgtggcggccgccgccgaggcgggttccgaagagacctcagcagggcaggccagggcctacgcgaacgcccacccttaagagcgcggggacagggaactggagcgttcctcccagcccccgacgtcgcgggcccagtgtccccgtccaggctggttgggcgcacgcgcggccccactcgcccccacgcgtgcgtccccgctggtcccgcccccggccggaagttccggcggcggagctgggccgggcccgagcggatcgcgggctcgggctgcggggctccggctgcgggcgctgggccgcgaggcgcggagcttgggagcggagcccaggccgtgccgcgcggcgccatgaagggcaaggaggagaaggagggcggcgcacggctgggcgctggcggcggaagccccgagaagagcccgagcgcgcaggagctcaaggagcagggcaatcgtctgttcgtgggccgaaagtacccggaggcggcggcctgctacggccgcgcgatcacccggaacccgctggtggccgtgtattacaccaaccgggccttgtgctacctgaagatgcagcagcacgagcaggccctggccgactgccggcgcgccctggagctggacgggcagtctgtgaaggcgcacttcttcctggggcagtgccagctggagatggagagctatgatgaggccatcgccaatctgcagcgagcttacagcctggccaaggagcagcggctgaacttcggggacgacatccccagcgctcttcgaatcgcgaagaagaagcgctggaacagcattgaggagcggcgcatccaccaggagagcgagctgcactcctacctctccaggctcattgccgcggagcgtgagagggagctggaagagtgccagcgaaaccacgagggtgatgaggacgacagccacgtccgggcccagcaggcctgcattgaggccaagcacgtgagggtgccccccacccacatgtgggtctgtgtgtgtgcacgtggcgtgggagcatccccgccttgtgttgggtctgtgccccatggaggagggaggtggggtgtctcccccaagcacagcactcaactcttcacaggacaagtacatggcggacatggacgagcttttttctcaggtggatgagaagaggaagaagcgagacatccccgactacctgtgtggcaagatcagctttgagctgatgcgggagccgtgcatcacgcccagtggcatcacctacgaccgcaaggacatcgaggagcacctgcagcgtgtgggtcattttgaccccgtgacccggagccccctgacccaggaacagctcatccccaacttggctatgaaggaggttattgacgcattcatctctgagaatggctgggtggaggactactgaggttccctgccctacctggcgtcctggtccaggggagccctgggcagaagcccccggcccctatacatagtttatgttcctggccaccccgaccgcttcccccaagttctgctgttggactctggactgtttcccctctcagcatcgcttttgctgggccgtgatcgtccccctttgtgggctggaaaagcaggtgagggtgggctgggctgaggccattgccgccactatctgtgtaataaaatccgtgagcacga

SEQ ID NO: 379854 - DNA, 1645 bp, Homo sapiens
tgcgcgttgggacaggggcggaaccccaggtggtcgggacaggctgttgcgggagcgcgccctcagcgaagcaagtgaggcatctcactgggaaagtcgaatgtgtgtggcggccgccgccgaggcgggttccgaagagacctcagcagggcaggccagggcctacgcgaacgcccacccttaagagcgcggggacagggaactggagcgttcctcccagcccccgacgtcgcgggcccagtgtccccgtccaggctggttgggcgcacgcgcggccccactcgcccccacgcgtgcgtccccgctggtcccgcccccggccggaagttccggcggcggagctgggccgggcccgagcggatcgcgggctcgggctgcggggctccggctgcgggcgctgggccgcgaggcgcggagcttgggagcggagcccaggccgtgccgcgcggcgccatgaagggcaaggaggagaaggagggcggcgcacggctgggcgctggcggcggaagccccgagaagagcccgagcgcgcaggagctcaaggagcagggcaatcgtctgttcgtgggccgaaagtacccggaggcggcggcctgctacggccgcgcgatcacccggaacccgctggtggccgtgtattacaccaaccgggccttgtgctacctgaagatgcagcagcacgagcaggccctggccgactgccggcgcgccctggagctggacgggcagtctgtgaaggcgcacttcttcctggggcagtgccagctggagatggagagctatgatgaggccatcgccaatctgcagcgagcttacagcctggccaaggagcagcggctgaacttcggggacgacatccccagcgctcttcgaatcgcgaagaagaagcgctggaacagcattgaggagcggcgcatccaccaggagagcgagctgcactcctacctctccaggctcattgccgcggagcgtgagagggagctggaagagtgccagcgaaaccacgagggtgatgaggacgacagccacgtccgggcccagcaggcctgcattgaggccaagcacgtgagggtgccccccacccacatgacaagtacatggcggacatggacgagcttttttctcaggtggatgagaagaggaagaagcgagacatccccgactacctgtgtggcaagatcagctttgagctgatgcgggagccgtgcatcacgcccagtggcatcacctacgaccgcaaggacatcgaggagcacctgcagcgtgtgggtcattttgaccccgtgacccggagccccctgacccaggaacagctcatccccaacttggctatgaaggaggttattgacgcattcatctctgagaatggctgggtggaggactactgaggttccctgccctacctggcgtcctggtccaggggagccctgggcagaagcccccggcccctatacatagtttatgttcctggccaccccgaccgcttcccccaagttctgctgttggactctggactgtttcccctctcagcatcgcttttgctgggccgtgatcgtccccctttgtgggctggaaaagcaggtgagggtgggctgggctgaggccattgccgccactatctgtgtaataaaatccgtgagcacga

SEQ ID NO: 379855 - DNA, 1710 bp, Homo sapiens
tgcgcgttgggacaggggcggaaccccaggtggtcgggacaggctgttgcgggagcgcgccctcagcgaagcaagtgaggcatctcactgggaaagtcgaatgtgtgtggcggccgccgccgaggcgggttccgaagagacctcagcagggcaggccagggcctacgcgaacgcccacccttaagagcgcggggacagggaactggagcgttcctcccagcccccgacgtcgcgggcccagtgtccccgtccaggctggttgggcgcacgcgcggccccactcgcccccacgcgtgcgtccccgctggtcccgcccccggccggaagttccggcggcggagctgggccgggcccgagcggatcgcgggctcgggctgcggggctccggctgcgggcgctgggccgcgaggcgcggagcttgggagcggagcccaggccgtgccgcgcggcgccatgaagggcaaggaggagaaggagggcggcgcacggctgggcgctggcggcggaagccccgagaagagcccgagcgcgcaggagctcaaggagcagggcaatcgtctgttcgtgggccgaaagtacccggaggcggcggcctgctacggccgcgcgatcacccggaacccgctggtggccgtgtattacaccaaccgggccttgtgctacctgaagatgcagcagcacgagcaggccctggccgactgccggcgcgccctggagctggacgggcagtctgtgaaggcgcacttcttcctggggcagtgccagctggagatggagagctatgatgaggccatcgccaatctgcagcgagcttacagcctggccaaggagcagcggctgaacttcggggacgacatccccagcgctcttcgaatcgcgaagaagaagcgctggaacagcattgaggagcggcgcatccaccaggagagcgagctgcactcctacctctccaggctcattgccgcggagcgtgagagggagctggaagagtgccagcgaaaccacgagggtgatgaggacgacagccacgtccgggcccagcaggcctgcattgaggccaagcacgacaagtacatggcggacatggacgagcttttttctcaggtggatgagaagaggaaggtgagtgtgtgtcgcttgctgccgatggctggcaggtgctcgtgcagtgccccttttcagcctctgaccgtgtgcccctgtgccacagaagcgagacatccccgactacctgtgtggcaagatcagctttgagctgatgcgggagccgtgcatcacgcccagtggcatcacctacgaccgcaaggacatcgaggagcacctgcagcgtgtgggtcattttgaccccgtgacccggagccccctgacccaggaacagctcatccccaacttggctatgaaggaggttattgacgcattcatctctgagaatggctgggtggaggactactgaggttccctgccctacctggcgtcctggtccaggggagccctgggcagaagcccccggcccctatacatagtttatgttcctggccaccccgaccgcttcccccaagttctgctgttggactctggactgtttcccctctcagcatcgcttttgctgggccgtgatcgtccccctttgtgggctggaaaagcaggtgagggtgggctgggctgaggccattgccgccactatctgtgtaataaaatccgtgagcacga

SEQ ID NO: 379856 - DNA, 1849 bp, Homo sapiens
tgcgcgttgggacaggggcggaaccccaggtggtcgggacaggctgttgcgggagcgcgccctcagcgaagcaagtgaggcatctcactgggaaagtcgaatgtgtgtggcggccgccgccgaggcgggttccgaagagacctcagcagggcaggccagggcctacgcgaacgcccacccttaagagcgcggggacagggaactggagcgttcctcccagcccccgacgtcgcgggcccagtgtccccgtccaggctggttgggcgcacgcgcggccccactcgcccccacgcgtgcgtccccgctggtcccgcccccggccggaagttccggcggcggagctgggccgggcccgagcggatcgcgggctcgggctgcggggctccggctgcgggcgctgggccgcgaggcgcggagcttgggagcggagcccaggccgtgccgcgcggcgccatgaagggcaaggaggagaaggagggcggcgcacggctgggcgctggcggcggaagccccgagaagagcccgagcgcgcaggagctcaaggagcagggcaatcgtctgttcgtgggccgaaagtacccggaggcggcggcctgctacggccgcgcgatcacccggaacccgctggtggccgtgtattacaccaaccgggccttgtgctacctgaagatgcagcagcacgagcaggccctggccgactgccggcgcgccctggagctggacgggcagtctgtgaaggcgcacttcttcctggggcagtgccagctggagatggagagctatgatgaggccatcgccaatctgcagcgagcttacagcctggccaaggagcagcggctgaacttcggggacgacatccccagcgctcttcgaatcgcgaagaagaagcgctggaacagcattgaggagcggcgcatccaccaggagagcgagctgcactcctacctctccaggctcattgccgcggagcgtgagagggagctggaagagtgccagcgaaaccacgagggtgatgaggacgacagccacgtccgggcccagcaggcctgcattgaggccaagcacgtgagggtgccccccacccacatgtgggtctgtgtgtgtgcacgtggcgtgggagcatccccgccttgtgttgggtctgtgccccatggaggagggaggtggggtgtctcccccaagcacagcactcaactcttcacaggacaagtacatggcggacatggacgagcttttttctcaggtggatgagaagaggaaggtgagtgtgtgtcgcttgctgccgatggctggcaggtgctcgtgcagtgccccttttcagcctctgaccgtgtgcccctgtgccacagaagcgagacatccccgactacctgtgtggcaagatcagctttgagctgatgcgggagccgtgcatcacgcccagtggcatcacctacgaccgcaaggacatcgaggagcacctgcagcgtgtgggtcattttgaccccgtgacccggagccccctgacccaggaacagctcatccccaacttggctatgaaggaggttattgacgcattcatctctgagaatggctgggtggaggactactgaggttccctgccctacctggcgtcctggtccaggggagccctgggcagaagcccccggcccctatacatagtttatgttcctggccaccccgaccgcttcccccaagttctgctgttggactctggactgtttcccctctcagcatcgcttttgctgggccgtgatcgtccccctttgtgggctggaaaagcaggtgagggtgggctgggctgaggccattgccgccactatctgtgtaataaaatccgtgagcacga

SEQ ID NO: 379857 - DNA, 1831 bp, Homo sapiens
tgcgcgttgggacaggggcggaaccccaggtggtcgggacaggctgttgcgggagcgcgccctcagcgaagcaagtgaggcatctcactgggaaagtcgaatgtgtgtggcggccgccgccgaggcgggttccgaagagacctcagcagggcaggccagggcctacgcgaacgcccacccttaagagcgcggggacagggaactggagcgttcctcccagcccccgacgtcgcgggcccagtgtccccgtccaggctggttgggcgcacgcgcggccccactcgcccccacgcgtgcgtccccgctggtcccgcccccggccggaagttccggcggcggagctgggccgggcccgagcggatcgcgggctcgggctgcggggctccggctgcgggcgctgggccgcgaggcgcggagcttgggagcggagcccaggccgtgccgcgcggcgccatgaagggcaaggaggagaaggagggcggcgcacggctgggcgctggcggcggaagccccgagaagagcccgagcgcgcaggagctcaaggagcagggcaatcgtctgttcgtgggccgaaagtacccggaggcggcggcctgctacggccgcgcgatcacccggaacccgctggtggccgtgtattacaccaaccgggccttgtgctacctgaagatgcagcagcacgagcaggccctggccgactgccggcgcgccctggagctggacgggcagtctgtgaaggcgcacttcttcctggggcagtgccagctggagatggagagctatgatgaggccatcgccaatctgcagcgagcttacagcctggccaaggagcagcggctgaacttcggggacgacatccccagcgctcttcgaatcgcgaagaagaagcgctggaacagcattgaggagcggcgcatccaccaggagagcgagctgcactcctacctctccaggctcattgccgcggagcgtgagagggagctggaagagtgccagcgaaaccacgagggtgatgaggacgacagccacgtccgggcccagcaggcctgcattgaggccaagcacgacaagtacatggcggacatggacgagcttttttctcaggtggatgagaagaggaagaagcgagacatccccgactacctgtgtggcaagatcagctttgagctgatgcgggagccgtgcatcacgcccagtggcatcacctacgaccgcaaggacatcgaggagcacctgcaggtgaggcctgcggctgggggagcagggccagtggcatggtcctgggccccatgactgccctctgcccttcttgtcactgcagcgtgtgggtcattttgaccccgtgacccggagccccctgacccaggaacagctcatccccaacttggctatgaaggaggttattgacgcattcatctctgagaatggctgggtggaggactactgaggttccctgccctacctggcgtcctggtccaggggagccctgggcagaagcccccggcccctatacatagtttatgttcctggccaccccgaccgcttcccccaagttctgctgttggactctggactgtttcccctctcagcatcgcttttgctgggccgtgatcgtccccctttgtgggctggaaaagcaggtgagggtgggctgggctgaggccattgccgccactatctgtgtaataaaatccgtgagcacgaagcacgaggtgggacgtgctggtgtgtgaccggcagtcctgccagctgttttggctagccgaggaaggtggagatgaagacgctggtgtcaaggttgagcgtagcatgccaccagcggtcggggaag

SEQ ID NO: 379858 - DNA, 1792 bp, Homo sapiens
tgcgcgttgggacaggggcggaaccccaggtggtcgggacaggctgttgcgggagcgcgccctcagcgaagcaagtgaggcatctcactgggaaagtcgaatgtgtgtggcggccgccgccgaggcgggttccgaagagacctcagcagggcaggccagggcctacgcgaacgcccacccttaagagcgcggggacagggaactggagcgttcctcccagcccccgacgtcgcgggcccagtgtccccgtccaggctggttgggcgcacgcgcggccccactcgcccccacgcgtgcgtccccgctggtcccgcccccggccggaagttccggcggcggagctgggccgggcccgagcggatcgcgggctcgggctgcggggctccggctgcgggcgctgggccgcgaggcgcggagcttgggagcggagcccaggccgtgccgcgcggcgccatgaagggcaaggaggagaaggagggcggcgcacggctgggcgctggcggcggaagccccgagaagagcccgagcgcgcaggagctcaaggagcagggcaatcgtctgttcgtgggccgaaagtacccggaggcggcggcctgctacggccgcgcgatcacccggaacccgctggtggccgtgtattacaccaaccgggccttgtgctacctgaagatgcagcagcacgagcaggccctggccgactgccggcgcgccctggagctggacgggcagtctgtgaaggcgcacttcttcctggggcagtgccagctggagatggagagctatgatgaggccatcgccaatctgcagcgagcttacagcctggccaaggagcagcggctgaacttcggggacgacatccccagcgctcttcgaatcgcgaagaagaagcgctggaacagcattgaggagcggcgcatccaccaggagagcgagctgcactcctacctctccaggctcattgccgcggagcgtgagagggagctggaagagtgccagcgaaaccacgagggtgatgaggacgacagccacgtccgggcccagcaggcctgcattgaggccaagcacgacaagtacatggcggacatggacgagcttttttctcaggtggatgagaagaggaaggtgagtgtgtgtcgcttgctgccgatggctggcaggtgctcgtgcagtgccccttttcagcctctgaccgtgtgcccctgtgccacagaagcgagacatccccgactacctgtgtggcaagatcagctttgagctgatgcgggagccgtgcatcacgcccagtggcatcacctacgaccgcaaggacatcgaggagcacctgcaggtgaggcctgcggctgggggagcagggccagtggcatggtcctgggccccatgactgccctctgcccttcttgtcactgcagcgtgtgggtcattttgaccccgtgacccggagccccctgacccaggaacagctcatccccaacttggctatgaaggaggttattgacgcattcatctctgagaatggctgggtggaggactactgaggttccctgccctacctggcgtcctggtccaggggagccctgggcagaagcccccggcccctatacatagtttatgttcctggccaccccgaccgcttcccccaagttctgctgttggactctggactgtttcccctctcagcatcgcttttgctgggccgtgatcgtccccctttgtgggctggaaaagcaggtgagggtgggctgggctgaggccattgccgccactatctgtgtaataaaatccgtgagcacga

SEQ ID NO: 379859 - DNA, 1931 bp, Homo sapiens
tgcgcgttgggacaggggcggaaccccaggtggtcgggacaggctgttgcgggagcgcgccctcagcgaagcaagtgaggcatctcactgggaaagtcgaatgtgtgtggcggccgccgccgaggcgggttccgaagagacctcagcagggcaggccagggcctacgcgaacgcccacccttaagagcgcggggacagggaactggagcgttcctcccagcccccgacgtcgcgggcccagtgtccccgtccaggctggttgggcgcacgcgcggccccactcgcccccacgcgtgcgtccccgctggtcccgcccccggccggaagttccggcggcggagctgggccgggcccgagcggatcgcgggctcgggctgcggggctccggctgcgggcgctgggccgcgaggcgcggagcttgggagcggagcccaggccgtgccgcgcggcgccatgaagggcaaggaggagaaggagggcggcgcacggctgggcgctggcggcggaagccccgagaagagcccgagcgcgcaggagctcaaggagcagggcaatcgtctgttcgtgggccgaaagtacccggaggcggcggcctgctacggccgcgcgatcacccggaacccgctggtggccgtgtattacaccaaccgggccttgtgctacctgaagatgcagcagcacgagcaggccctggccgactgccggcgcgccctggagctggacgggcagtctgtgaaggcgcacttcttcctggggcagtgccagctggagatggagagctatgatgaggccatcgccaatctgcagcgagcttacagcctggccaaggagcagcggctgaacttcggggacgacatccccagcgctcttcgaatcgcgaagaagaagcgctggaacagcattgaggagcggcgcatccaccaggagagcgagctgcactcctacctctccaggctcattgccgcggagcgtgagagggagctggaagagtgccagcgaaaccacgagggtgatgaggacgacagccacgtccgggcccagcaggcctgcattgaggccaagcacgtgagggtgccccccacccacatgtgggtctgtgtgtgtgcacgtggcgtgggagcatccccgccttgtgttgggtctgtgccccatggaggagggaggtggggtgtctcccccaagcacagcactcaactcttcacaggacaagtacatggcggacatggacgagcttttttctcaggtggatgagaagaggaaggtgagtgtgtgtcgcttgctgccgatggctggcaggtgctcgtgcagtgccccttttcagcctctgaccgtgtgcccctgtgccacagaagcgagacatccccgactacctgtgtggcaagatcagctttgagctgatgcgggagccgtgcatcacgcccagtggcatcacctacgaccgcaaggacatcgaggagcacctgcaggtgaggcctgcggctgggggagcagggccagtggcatggtcctgggccccatgactgccctctgcccttcttgtcactgcagcgtgtgggtcattttgaccccgtgacccggagccccctgacccaggaacagctcatccccaacttggctatgaaggaggttattgacgcattcatctctgagaatggctgggtggaggactactgaggttccctgccctacctggcgtcctggtccaggggagccctgggcagaagcccccggcccctatacatagtttatgttcctggccaccccgaccgcttcccccaagttctgctgttggactctggactgtttcccctctcagcatcgcttttgctgggccgtgatcgtccccctttgtgggctggaaaagcaggtgagggtgggctgggctgaggccattgccgccactatctgtgtaataaaatccgtgagcacga

SEQ ID NO: 379860 - DNA, 1056 bp, Homo sapiens
tgcgcgttgggacaggggcggaaccccaggtggtcgggacaggctgttgcgggagcgcgccctcagcgaagcaagtgaggcatctcactgggaaagtcgaatgtgtgtggcggccgccgccgaggcgggttccgaagagacctcagcagggcaggccagggcctacgcgaacgcccacccttaagagcgcggggacagggaactggagcgttcctcccagcccccgacgtcgcgggcccagtgtccccgtccaggctggttgggcgcacgcgcggccccactcgcccccacgcgtgcgtccccgctggtcccgcccccggccggaagttccggcggcggagctgggccgggcccgagcggatcgcgggctcgggctgcggggctccggctgcgggcgctgggccgcgaggcgcggagcttgggagcggagcccaggccgtgccgcgcggcgccatgaagggcaaggaggagaaggagggcggcgcacggctgggcgctggcggcggaagccccgagaagagcccgagcgcgcaggagctcaaggagcagggcaatcgtctgttcgtgggccgaaagtacccggaggcggcggcctgctacggccgcgcgatcacccggaacccgctggtggccgtgtattacaccaaccgggccttgtgctacctgaagatgcagcagcacgagcaggccctggccgactgccggcgcgccctggagctggacgggcagtctgtgaaggcgcacttcttcctggggcagtgccagctggagatggagagctatgatgaggccatcgccaatctgcagcgagcttacagcctggccaaggagcagcggctgaacttcggggacgacatccccagcgctcttcgaatcgcgaagaagaagcgctggaacagcattgaggagcggcgcatccaccaggagagcgagctgcactcctacctctccaggctcattgccgcggagcgtgagagggagctggaagagtgccagcgaaaccatcgagatgtggcgcgagatgtggcgcgagatgtgagcggggcgagctcgatt

SEQ ID NO: 379861 - DNA, 835 bp, Homo sapiens
gggatgtgctgcggtcgttctagaggatccctcagcacactggaggatgcagcaccagaggatggaggtggggtgtctcccccaagcacagcactcaactcttcacaggacaagtacatggcggacatggacgagcttttttctcaggtggatgagaagaggaaggtgagtgtgtgtcgcttgctgccgatggctggcaggtgctcgtgcagtgccccttttcagcctctgaccgtgtgcccctgtgccacagaagcgagacatccccgactacctgtgtggcaagatcagctttgagctgatgcgggagccgtgcatcacgcccagtggcatcacctacgaccgcaaggacatcgaggagcacctgcaggtgaggcctgcggctgggggagcagggccagtggcatggtcctgggccccatgactgccctctgcccttcttgtcactgcagcgtgtgggtcattttgaccccgtgacccggagccccctgacccaggaacagctcatccccaacttggctatgaaggaggttattgacgcattcatctctgagaatggctgggtggaggactactgaggttccctgccctacctggcgtcctggtccaggggagccctgggcagaagcccccggcccctatacatagtttatgttcctggccaccccgaccgcttcccccaagttctgctgttggactctggactgtttcccctctcagcatcgcttttgctgggccgtgatcgtccccctttgtgggctggaaaagcaggtgagggtgggctgggctgaggccattgccgccactatctgtgtaataaaatccgtgagcacga

SEQ ID NO: 379862 - DNA, 1622 bp, Homo sapiens
tgcgcgttgggacaggggcggaaccccaggtggtcgggacaggctgttgcgggagcgcgccctcagcgaagcaagtgaggcatctcactgggaaagtcgaatgtgtgtggcggccgccgccgaggcgggttccgaagagacctcagcagggcaggccagggcctacgcgaacgcccacccttaagagcgcggggacagggaactggagcgttcctcccagcccccgacgtcgcgggcccagtgtccccgtccaggctggttgggcgcacgcgcggccccactcgcccccacgcgtgcgtccccgctggtcccgcccccggccggaagttccggcggcggagctgggccgggcccgagcggatcgcgggctcgggctgcggggctccggctgcgggcgctgggccgcgaggcgcggagcttgggagcggagcccaggccgtgccgcgcggcgccatgaagggcaaggaggagaaggagggcggcgcacggctgggcgctggcggcggaagccccgagaagagcccgagcgcgcaggagctcaaggagcagggcaatcgtctgttcgtgggccgaaagtacccggaggcggcggcctgctacggccgcgcgatcacccggaacccgctggtggccgtgtattacaccaaccgggccttgtgctacctgaagatgcagcagcacgagcaggccctggccgactgccggcgcgccctggagctggacgggcagtctgtgaaggcgcacttcttcctggggcagtgccagctggagatggagagctatgatgaggccatcgccaatctgcagcgagcttacagcctggccaaggagcagcggctgaacttcggggacgacatccccagcgctcttcgaatcgcgaagaagaagcgctggaacagcattgaggagcggcgcatccaccaggagagcgagctgcactcctacctctccaggctcattgccgcggagcgtgagagggagctggaagagtgccagcgaaaccacgagggtgatgaggacgacagccacgtccgggcccagcaggcctgcattgaggccaagcacgacaagtacatggcggacatggacgagcttttttctcaggtggatgagaagaggaagaagcgagacatccccgactacctgtgtggcaagatcagctttgagctgatgcgggagccgtgcatcacgcccagtggcatcacctacgaccgcaaggacatcgaggagcacctgcagcgtgtgggtcattttgaccccgtgacccggagccccctgacccaggaacagctcatccccaacttggctatgaaggaggttattgacgcattcatctctgagaatggctgggtggaggactactgaggttccctgccctacctggcgtcctggtccaggggagccctgggcagaagcccccggcccctatacatagtttatgttcctggccaccccgaccgcttcccccaagttctgctgttggactctggactgtttcccctctcagcatcgcttttgctgggccgtgatcgtccccctttgtgggctggaaaagcaggtgagggtgggctgggctgaggccattgccgccactatctgtgtaataaaatccgtgagcacga

SEQ ID NO: 379863 - DNA, 1799 bp, Homo sapiens
tgcgcgttgggacaggggcggaaccccaggtggtcgggacaggctgttgcgggagcgcgccctcagcgaagcaagtgaggcatctcactgggaaagtcgaatgtgtgtggcggccgccgccgaggcgggttccgaagagacctcagcagggcaggccagggcctacgcgaacgcccacccttaagagcgcggggacagggaactggagcgttcctcccagcccccgacgtcgcgggcccagtgtccccgtccaggctggttgggcgcacgcgcggccccactcgcccccacgcgtgcgtccccgctggtcccgcccccggccggaagttccggcggcggagctgggccgggcccgagcggatcgcgggctcgggctgcggggctccggctgcgggcgctgggccgcgaggcgcggagcttgggagcggagcccaggccgtgccgcgcggcgccatgaagggcaaggaggagaaggagggcggcgcacggctgggcgctggcggcggaagccccgagaagagcccgagcgcgcaggagctcaaggagcagggcaatcgtctgttcgtgggccgaaagtacccggaggcggcggcctgctacggccgcgcgatcacccggaacccgctggtggccgtgtattacaccaaccgggccttgtgctacctgaagatgcagcagcacgagcaggccctggccgactgccggcgcgccctggagctggacgggcagtctgtgaaggcgcacttcttcctggggcagtgccagctggagatggagagctatgatgaggccatcgccaatctgcagcgagcttacagcctggccaaggagcagcggctgaacttcggggacgacatccccagcgctcttcgaatcgcgaagaagaagcgctggaacagcattgaggagcggcgcatccaccaggagagcgagctgcactcctacctctccaggctcattgccgcggagcgtgagagggagctggaagagtgccagcgaaaccacgagggtgatgaggacgacagccacgtccgggcccagcaggcctgcattgaggccaagcacgacaagtacatggcggacatggacgagcttttttctcaggtggatgagaagaggaagaagcgagacatccccgactacctgtgtggcaagatcagctttgagctgatgcgggagccgtgcatcacgcccagtggcatcacctacgaccgcaaggacatcgaggagcacctgcagcgtgtgggtcattttgaccccgtgacccggagccccctgacccaggaacagctcatccccaacttggctatgaaggaggttattgacgcattcatctctgagaatggctgggtggaggactactgaggttccctgccctacctggcgtcctggtccaggggagccctgggcagaagcccccggcccctatacatagtttatgttcctggccaccccgaccgcttcccccaagttctgctgttggactctggactgtttcccctctcagcatcgcttttgctgggccgtgatcgtccccctttgtgggctggaaaagcaggtgagggtgggctgggctgaggccattgccgccactatctgtgtaataaaatccgtgagcacgaaaaaaaagcattacatagaaacaaaaaacaaaggggggcgcgaaaaagacccgaggggccaattttgcccgccccgtttgtgcacggggcccaaaggggcgaaaaaaaaggacgggcggtaccccggggggaacccccgggctgggagccccccgggggaaggcacccaaaaccgga

SEQ ID NO: 379864 - DNA, 1699 bp, Homo sapiens
  misc_feature (99)..(99): n is a, c, g, or t
  misc_feature (111)..(112): n is a, c, g, or t
  misc_feature (117)..(117): n is a, c, g, or t
  misc_feature (120)..(120): n is a, c, g, or t
  misc_feature (127)..(127): n is a, c, g, or t
  misc_feature (130)..(131): n is a, c, g, or t
  misc_feature (136)..(136): n is a, c, g, or t
  misc_feature (138)..(138): n is a, c, g, or t
  misc_feature (155)..(157): n is a, c, g, or t
  misc_feature (164)..(165): n is a, c, g, or t
  misc_feature (171)..(171): n is a, c, g, or t
  misc_feature (175)..(175): n is a, c, g, or t
  misc_feature (188)..(189): n is a, c, g, or t
  misc_feature (253)..(253): n is a, c, g, or t
  misc_feature (433)..(434): n is a, c, g, or t
cttgggaagtaattctgacttcctgtacaattgcctgataagtctcttctgggctgtatgttgctcaagtggaagtccaagtttttgttacctccgacnattaattggttnnacacnccngtgtgtnaannccagnanggcaatgctctcgggtnnncccattnnttgganatanccagcttcagatnncaccaacaccagcaggcaacaatcaggacagcacagtcagcctgagatgtccctgtaatcatgnttttgataaagtctctgtgtcctggggcatcaatgatagtcacatagtacttgctggtctcaaatttccacaaggagatatcaatggtgataccacgttcacgctcagctttcatttatccaagacccaggcatacttgaaggagccctttcccatctcagcagcctccttctcaaattnnttcaatggttcttttgtcgatgccaccgcatttatagatcagatggccagtagtggtggacttgcccgaatctacgtgtccaatgacgacaatgttgatatgagtcttttcctttcccattttggcttttaggggtagttttcacgacacctgtgttctggcggcccgagcgcgcaggagctcaaggagcagggcaatcgtctgttcgtgggccgaaagtacccggaggcggcggcctgctacggccgcgcgatcacccggaacccgctggtggccgtgtattacaccaaccgggccttgtgctacctgaagatgcagcagcacgagcaggccctggccgactgccggcgcgccctggagctggacgggcagtctgtgaaggcgcacttcttcctggggcagtgccagctggagatggagagctatgatgaggccatcgccaatctgcagcgagcttacagcctggccaaggagcagcggctgaacttcggggacgacatccccagcgctcttcgaatcgcgaagaagaagcgctggaacagcattgaggagcggcgcatccaccaggagagcgagctgcactcctacctctccaggctcattgccgcggagcgtgagagggagctggaagagtgccagcgaaaccacgagggtgatgaggacgacagccacgtccgggcccagcaggcctgcattgaggccaagcacgacaagtacatggcggacatggacgagcttttttctcaggtggatgagaagaggaagaagcgagacatccccgactacctgtgtggcaagatcagctttgagctgatgcgggagccgtgcatcacgcccagtggcatcacctacgaccgcaaggacatcgaggagcacctgcagcgtgtgggtcattttgaccccgtgacccggagccccctgacccaggaacagctcatccccaacttggctatgaaggaggttattgacgcattcatctctgagaatggctgggtggaggactactgaggttccctgccctacctggcgtcctggtccaggggagccctgggcagaagcccccggcccctatacatagtttatgttcctggccaccccgaccgcttcccccaagttctgctgttggactctggactgtttcccctctcagcatcgcttttgctgggccgtgatcgtccccctttgtgggctggaaaagcaggtgagggtgggctgggctgaggccattgccgccactatctgtgtaataaaatccgtgagcacga

SEQ ID NO: 379865 - DNA, 1565 bp, Homo sapiens
tgcgcgttgggacaggggcggaaccccaggtggtcgggacaggctgttgcgggagcgcgccctcagcgaagcaagtgaggcatctcactgggaaagtcgaatgtgtgtggcggccgccgccgaggcgggttccgaagagacctcagcagggcaggccagggcctacgcgaacgcccacccttaagagcgcggggacagggaactggagcgttcctcccagcccccgacgtcgcgggcccagtgtccccgtccaggctggttgggcgcacgcgcggccccactcgcccccacgcgtgcgtccccgctggtcccgcccccggccggaagttccggcggcggagctgggccgggcccgagcggatcgcgggctcgggctgcggggctccggctgcgggcgctgggccgcgaggcgcggagcttgggagcggagcccaggccgtgccgcgcggcgccatgaagggcaaggaggagaaggagggcggcgcacggctgggcgctggcggcggaagccccgagaagagcccgagcgcgcaggagctcaaggagcagggcaatcgtctgttcgtgggccgaaagtacccggaggcggcggcctgctacggccgcgcgatcatgcagcagcacgagcaggccctggccgactgccggcgcgccctggagctggacgggcagtctgtgaaggcgcacttcttcctggggcagtgccagctggagatggagagctatgatgaggccatcgccaatctgcagcgagcttacagcctggccaaggagcagcggctgaacttcggggacgacatccccagcgctcttcgaatcgcgaagaagaagcgctggaacagcattgaggagcggcgcatccaccaggagagcgagctgcactcctacctctccaggctcattgccgcggagcgtgagagggagctggaagagtgccagcgaaaccacgagggtgatgaggacgacagccacgtccgggcccagcaggcctgcattgaggccaagcacgacaagtacatggcggacatggacgagcttttttctcaggtggatgagaagaggaagaagcgagacatccccgactacctgtgtggcaagatcagctttgagctgatgcgggagccgtgcatcacgcccagtggcatcacctacgaccgcaaggacatcgaggagcacctgcagcgtgtgggtcattttgaccccgtgacccggagccccctgacccaggaacagctcatccccaacttggctatgaaggaggttattgacgcattcatctctgagaatggctgggtggaggactactgaggttccctgccctacctggcgtcctggtccaggggagccctgggcagaagcccccggcccctatacatagtttatgttcctggccaccccgaccgcttcccccaagttctgctgttggactctggactgtttcccctctcagcatcgcttttgctgggccgtgatcgtccccctttgtgggctggaaaagcaggtgagggtgggctgggctgaggccattgccgccactatctgtgtaataaaatccgtgagcacga

SEQ ID NO: 379866 - DNA, 1928 bp, Homo sapiens
tgcgcgttgggacaggggcggaaccccaggtggtcgggacaggctgttgcgggagcgcgccctcagcgaagcaagtgaggcatctcactgggaaagtcgaatgtgtgtggcggccgccgccgaggcgggttccgaagagacctcagcagggcaggccagggcctacgcgaacgcccacccttaagagcgcggggacagggaactggagcgttcctcccagcccccgacgtcgcgggcccagtgtccccgtccaggctggttgggcgcacgcgcggccccactcgcccccacgcgtgcgtccccgctggtcccgcccccggccggaagttccggcggcggagctgggccgggcccgagcggatcgcgggctcgggctgcggggctccggctgcgggcgctgggccgcgaggcgcggagcttgggagcggagcccaggccgtgccgcgcggcgccatgaagggcaaggaggagaaggagggcggcgcacggctgggcgctggcggcggaagccccgagaagagcccgagcgcgcaggagctcaaggagcagggcaatcgtctgttcgtgggccgaaagtacccggaggcggcggcctgctacggccgcgcgatcacccggaacccgctggtggccgtgtattacaccaaccgggccttgtgctacctgaagatgcagcagcacgagcaggccctggccgactgccggcgcgccctggagctggacgggcagtctgtgaaggcgcacttcttcctggggcagtgccagctggagatggagagctatgatgaggccatcgccaatctgcagcgagcttacagcctggccaaggagcagcggctgaacttcggggacgacatccccagcgctcttcgaatcgcgaagaagaagcgctggaacagcattgaggagcggcgcatccaccaggagagcgagctgcactcctacctctccaggctcattgccgcggagcgtgagagggagctggaagagtgccagcgaaaccacgagggtgatgaggacgacagccacgtccgggcccagcaggcctgcattgaggccaagcacgacaagtacatggcggacatggacgagcttttttctcaggtggatgagaagaggaagaagcgagacatccccgactacctgtgtggcaagatcagctttgagctgatgcgggagccgtgcatcacgcccagtggcatcacctacgaccgcaaggacatcgaggagcacctgcagcgtgtgggtcattttgaccccgtgacccggagccccctgacccaggaacagctcatccccaacttggctatgaaggaggttattgacgcattcatctctgagaatggctgggtggaggactactgaggttccctgccctacctggcgtcctggtccaggggagccctgggcagaagcccccggcccctatacatagtttatgttccgtataccagtaagttttcaatgtttccccttgggcacaagcgcgccagaacccgctttcgccgcccaatgtttcccttggcctggttttagagacctccttgtgaccttggctttttcccccccttaccttccaagggcaattccgggcctttttttttggcaccttcggtggggcccccggttgggaaaattcccggagttacacacacctcgtttttttgagggatgagagcgggcctatcgggggaacactaacacgcggccagacgcgggtctggacacgggcgggcgcgttaggggcggcctttcgtggacgcccgttttggaaatggcggaggccgcccagagtttttggcccaccacgtggcgcgccctaagccctttaaaattcctgtctcgggttggatcttcagacttttagcagtgagaacgtttctcccgagagttcgaaaaggcccaacgaggaaaaggagcgtcatcgg

SEQ ID NO: 379867 - DNA, 1704 bp, Homo sapiens
tgcgcgttgggacaggggcggaaccccaggtggtcgggacaggctgttgcgggagcgcgccctcagcgaagcaagtgaggcatctcactgggaaagtcgaatgtgtgtggcggccgccgccgaggcgggttccgaagagacctcagcagggcaggccagggcctacgcgaacgcccacccttaagagcgcggggacagggaactggagcgttcctcccagcccccgacgtcgcgggcccagtgtccccgtccaggctggttgggcgcacgcgcggccccactcgcccccacgcgtgcgtccccgctggtcccgcccccggccggaagttccggcggcggagctgggccgggcccgagcggatcgcgggctcgggctgcggggctccggctgcgggcgctgggccgcgaggcgcggagcttgggagcggagcccaggccgtgccgcgcggcgccatgaagggcaaggaggagaaggagggcggcgcacggctgggcgctggcggcggaagccccgagaagagcccgagcgcgcaggagctcaaggagcagggcaatcgtctgttcgtgggccgaaagtacccggaggcggcggcctgctacggccgcgcgatcacccggaacccgctggtggccgtgtattacaccaaccgggccttgtgctacctgaagatgcagcagcacgagcaggccctggccgactgccggcgcgccctggagctggacgggcagtctgtgaaggcgcacttcttcctggggcagtgccagctggagatggagagctatgatgaggccatcgccaatctgcagcgagcttacagcctggccaaggagcagcggctgaacttcggggacgacatccccagcgctcttcgaatcgcgaagaagaagcgctggaacagcattgaggagcggcgcatccaccaggagagcgagctgcactcctacctctccaggctcattgccgcggagcgtgagagggagctggaagagtgccagcgaaaccacgagggtgatgaggacgacagccacgtccgggcccagcaggcctgcattgaggccaagcacgacaagtacatggcggacatggacgagcttttttctcaggtggatgagaagaggaagaagcgagacatccccgactacctgtgtggcaagatcagctttgagctgatgcgggagccgtgcatcacgcccagtggcatcacctacgaccgcaaggacatcgaggagcacctgcaggtgaggcctgcggctgggggagcagggccagtggcatggtcctgggccccatgactgccctctgcccttcttgtcactgcagcgtgtgggtcattttgaccccgtgacccggagccccctgacccaggaacagctcatccccaacttggctatgaaggaggttattgacgcattcatctctgagaatggctgggtggaggactactgaggttccctgccctacctggcgtcctggtccaggggagccctgggcagaagcccccggcccctatacatagtttatgttcctggccaccccgaccgcttcccccaagttctgctgttggactctggactgtttcccctctcagcatcgcttttgctgggccgtgatcgtccccctttgtgggctggaaaagcaggtgagggtgggctgggctgaggccattgccgccactatctgtgtaataaaatccgtgagcacga

SEQ ID NO: 379868 - DNA, 2058 bp, Homo sapiens
tgcgcgttgggacaggggcggaaccccaggtggtcgggacaggctgttgcgggagcgcgccctcagcgaagcaagtgaggcatctcactgggaaagtcgaatgtgtgtggcggccgccgccgaggcgggttccgaagagacctcagcagggcaggccagggcctacgcgaacgcccacccttaagagcgcggggacagggaactggagcgttcctcccagcccccgacgtcgcgggcccagtgtccccgtccaggctggttgggcgcacgcgcggccccactcgcccccacgcgtgcgtccccgctggtcccgcccccggccggaagttccggcggcggagctgggccgggcccgagcggatcgcgggctcgggctgcggggctccggctgcgggcgctgggccgcgaggcgcggagcttgggagcggagcccaggccgtgccgcgcggcgccatgaagggcaaggaggagaaggagggcggcgcacggctgggcgctggcggcggaagccccgagaagagcccgagcgcgcaggagctcaaggagcagggcaatcgtctgttcgtgggccgaaagtacccggaggcggcggcctgctacggccgcgcgatcacccggaacccgctggtggccgtgtattacaccaaccgggccttgtgctacctgaagatgcagcagcacgagcaggccctggccgactgccggcgcgccctggagctggacgggcagtctgtgaaggcgcacttcttcctggggcagtgccagctggagatggagagctatgatgaggccatcgccaatctgcagcgagcttacagcctggccaaggagcagcggctgaacttcggggacgacatccccagcgctcttcgaatcgcgaagaagaagcgctggaacagcattgaggagcggcgcatccaccaggagagcgagctgcactcctacctctccaggctcattgccgcggagcgtgagagggagctggaagagtgccagcgaaaccacgagggtgatgaggacgacagccacgtccgggcccagcaggcctgcattgaggccaagcacgtgagggtgccccccacccacatgtgggtctgtgtgtgtgcacgtggcgtgggagcatccccgccttgtgttgggtctgtgccccatggaggagggaggtggggtgtctcccccaagcacagcactcaactcttcacaggacaagtacatggcggacatggacgagcttttttctcaggtggatgagaagaggaaggtgagtgtgtgtcgcttgctgccgatggctggcaggtgctcgtgcagtgccccttttcagcctctgaccgtgtgcccctgtgccacagaagcgagacatccccgactacctgtgtggcaagatcagctttgagctgatgcgggagccgtgcatcacgcccagtggcatcacctacgaccgcaaggacatcgaggagcacctgcaggtgaggcctgcggctgggggagcagggccagtggcatggtcctgggccccatgactgccctctgcccttcttgtcactgcagcgtgtgggtcattttgaccccgtgacccggagccccctgacccaggaacagctcatccccaacttggctatgaaggaggttattgacgcattcatctctgagaatggctgggtggaggactactgaggttccctgccctacctggcgtcctggtccaggggagccctgggcagaagcccccggcccctatacatagtttatgttcctggccaccccgaccgcttcccccaagttctgctgttggactctggactgtttcccctctcagcatcgcttttgctgggccgtgatcgtccccctttgtgggctggaaaagcaggtgagggtgggctgggctgaggccattgccgccactatctgtgtaataaaatccgtgagcacgaagcacgaggtgggacgtgctggtgtgtgaccggcagtcctgccagctgttttggctagccgaggaaggtggagatgaagacgctggtgtcaaggttgagcgtagcatgccaccagcggtcggggaag

SEQ ID NO: 379869 - DNA, 1557 bp, Homo sapiens
tgcgcgttgggacaggggcggaaccccaggtggtcgggacaggctgttgcgggagcgcgccctcagcgaagcaagtgaggcatctcactgggaaagtcgaatgtgtgtggcggccgccgccgaggcgggttccgaagagacctcagcagggcaggccagggcctacgcgaacgcccacccttaagagcgcggggacagggaactggagcgttcctcccagcccccgacgtcgcgggcccagtgtccccgtccaggctggttgggcgcacgcgcggccccactcgcccccacgcgtgcgtccccgctggtcccgcccccggccggaagttccggcggcggagctgggccgggcccgagcggatcgcgggctcgggctgcggggctccggctgcgggcgctgggccgcgaggcgcggagcttgggagcggagcccaggccgtgccgcgcggcgccatgaagggcaaggaggagaaggagggcggcgcacggctgggcgctggcggcggaagccccgagaagagcccgagcgcgcaggagctcaaggagcagggcaatcgtctgttcgtgggccgaaagtacccggaggcggcggcctgctacggccgcgcgatctgccagctggagatggagagctatgatgaggccatcgccaatctgcagcgagcttacagcctggccaaggagcagcggctgaacttcggggacgacatccccagcgctcttcgaatcgcgaagaagaagcgctggaacagcattgaggagcggcgcatccaccaggagagcgagctgcactcctacctctccaggctcattgccgcggagcgtgagagggagctggaagagtgccagcgaaaccacgagggtgatgaggacgacagccacgtccgggcccagcaggcctgcattgaggccaagcacgacaagtacatggcggacatggacgagcttttttctcaggtggatgagaagaggaagaagcgagacatccccgactacctgtgtggcaagatcagctttgagctgatgcgggagccgtgcatcacgcccagtggcatcacctacgaccgcaaggacatcgaggagcacctgcaggtgaggcctgcggctgggggagcagggccagtggcatggtcctgggccccatgactgccctctgcccttcttgtcactgcagcgtgtgggtcattttgaccccgtgacccggagccccctgacccaggaacagctcatccccaacttggctatgaaggaggttattgacgcattcatctctgagaatggctgggtggaggactactgaggttccctgccctacctggcgtcctggtccaggggagccctgggcagaagcccccggcccctatacatagtttatgttcctggccaccccgaccgcttcccccaagttctgctgttggactctggactgtttcccctctcagcatcgcttttgctgggccgtgatcgtccccctttgtgggctggaaaagcaggtgagggtgggctgggctgaggccattgccgccactatctgtgtaataaaatccgtgagcacga

SEQ ID NO: 379870 - DNA, 406 bp, Homo sapiens
tattgtagtatcactgttgattgtgttatccatacttgtgtagatgttgaaagtgtgatgaacagtgtggtatccctactcttgatcctggaaccagacaagcaagaagctttgattgaaagcctatgtgaaaagctggtcaaatttcgcgaaggtgaacgcccgtctctgagactgcagttgtaagttaagatctgaaagaaactcagtttttctaggtgcttttttcatgttactaacttttaatggtgcagagcaggaattctggaacttgactctcagctgtggctcatattagctgtgaccttgggcaagtggcttgacctttctgtgccctagtttcctcctttgtaatatgaagttgttaacggtacctgccacaggtttgtggtgagagctaacctca

SEQ ID NO: 379871 - DNA, 318 bp, Homo sapiens
cggcgcctttttttttaccagaaacacgtgcactttattgaatgccattgtagaaaagcgtgtgaggataaagggctgatacaggactcggctccgggggcagggcgaggaatggaagttggagtacgtgggatacaggtcatgggcagagctcctgtatcaacaactgtatgacacacttaatgcctggaaacaaaatctgaacaaagtgaaaaacagccttttgagtctttctgatacctgagtttttatgcttataatttttgttctttgaaaaaaaagccctaaatcatagtaaaacattataaactaaaaaaa

SEQ ID NO: 379872 - DNA, 1287 bp, Homo sapiens
acccgccccaacctacggctaggtacgaggctgggtggttgcggcgtggtcttgcgagtggagtgtccgctgtgcccgggcctgcaccatgagcgtcccggccttcatcgacatcagtgaagaagatcaggctgctgagcttcgtgcttatctgaaatctaaaggagctgagatttcagaagagaactcggaaggtggacttcatgttgatttagctcaaattattgaagcctgtgatgtgtgtctgaaggaggatgataaagatgttgaaagtgtgatgaacagtgtggtatccctactcttgatcctggaaccagacaagcaagaagctttgattgaaagcctatgtgaaaagctggtcaaatttcgcgaaggtgaacgcccgtctctgagactgcagttgttaagcaaccttttccacgggatggataagaatactcctgtaagatacacagtgtattgcagccttattaaagtggcagcatcttgtggggccatccagtacatcccaactgagctggatcaagttagaaaatggatttctgactggaatctcaccactgaaaaaaagcacacccttttaagactactttatgaggcacttgtggattgtaagaagagtgatgctgcttcaaaagtcatggtggaattgctcggaagttacacagaggacaatgcttcccaggctcgagttgatgcccacaggtgtattgtacgagcattgaaagatccaaatgcatttctttttgaccaccttcttactttaaaaccagtcaagtttttggaaggcgagcttattcatgatcttttaaccatttttgtgagtgctaaattggcatcatatgtcaagttttatcagaataataaagacttcattgattcacttggcctgttacatgaacagaatatggcaaaaatgagactacttacttttatgggaatggcagtagaaaataaggaaatttcttttgacacaatgcagcaagaacttcagattggagctgatgatgttgaagcatttgttattgacgccgtaagaactaaaatggtctactgcaaaattgatcagacccagagaaaagtagttgtcagtcatagcacacatcggacatttggaaaacagcagtggcaacaactgtatgacacacttaatgcctggaaacaaaatctgaacaaagtgaaaaacagccttttgagtctttctgatacctgagtttttatgcttataatttttgttctttgaaaaaaaagccctaaatcatagtaaaacattataaactaaaaaaa

SEQ ID NO: 379873 - DNA, 1275 bp, Homo sapiens
aaatttaggctaggtacgaggctgggtggcggcgtggtcttgcgagtggagtgtccgctgtgcccgggcctgcaccatgagcgtcccggccttcatcgacatcagtgaagaagatcaggctgctgagcttcgtgcttatctgaaatctaaaggagctgagatttcagaagagaactcggaaggtggacttcatgttgatttagctcaaattattgaagcctgtgatgtgtgtctgaaggaggatgataaagatgttgaaagtgtgatgaacagtgtggtatccctactcttgatcctggaaccagacaagcaagaagctttgattgaaagcctatgtgaaaagctggtcaaatttcgcgaaggtgaacgcccgtctctgagactgcagttgttaagcaaccttttccacgggatggataagaatactcctgtaagatacacagtgtattgcagccttattaaagtggcagcatcttgtggggccatccagtacatcccaactgagctggatcaagttagaaaatggatttctgactggaatctcaccactgaaaaaaagcacacccttttaagactactttatgaggcacttgtggattgtaagaagagtgatgctgcttcaaaagtcatggtggaattgctcggaagttacacagaggacaatgcttcccaggctcgagttgatgcccacaggtgtattgtacgagcattgaaagatccaaatgcatttctttttgaccaccttcttactttaaaaccagtcaagtttttggaaggcgagcttattcatgatcttttaaccatttttgtgagtgctaaattggcatcatatgtcaagttttatcagaataataaagacttcattgattcacttggcctgttacatgaacagaatatggcaaaaatgagactacttacttttatgggaatggcagtagaaaataaggaaatttcttttgacacaatgcagcaagaacttcagattggagctgatgatgttgaagcatttgttattgacgccgtaagaactaaaatggtctactgcaaaattgatcagacccagagaaaagtagttgtcagtcatagcacacatcggacatttggaaaacagcagtggcaacaactgtatgacacacttaatgcctggaaacaaaatctgaacaaagtgaaaaacagccttttgagtctttctgatacctgagtttttatgcttataatttttgttctttgaaaaaaaagccctaaatcatagtaaaacattataaactaaaaaaa

SEQ ID NO: 379874 - DNA, 1569 bp, Homo sapiens
acccgccccaacctacggctaggtacgaggctgggtggttgcggcgtggtcttgcgagtggagtgtccgctgtgcccgggcctgcaccatgagcgtcccggccttcatcgacatcagtgaagaagatcaggctgctgagcttcgtgcttatctgaaatctaaaggagctgagatttcagaagagaactcggaaggtggacttcatgttgatttagctcaaattattgaagcctgtgatgtgtgtctgaaggaggatgataaagatgttgaaagtgtgatgaacagtgtggtatccctactcttgatcctggaaccagacaagcaagaagctttgattgaaagcctatgtgaaaagctggtcaaatttcgcgaaggtgaacgcccgtctctgagactgcagttgttaagcaaccttttccacgggatggataagaatactcctgtaagatacacagtgtattgcagccttattaaagtggcagcatcttgtggggccatccagtacatcccaactgagctggatcaagttagaaaatggatttctgactggaatctcaccactgaaaaaaagcacacccttttaagactactttatgaggcacttgtggattgtaagaagagtgatgctgcttcaaaagtcatggtggaattgctcggaagttacacagaggacaatgcttcccaggctcgagttgatgcccacaggtgtattgtacgagcattgaaagatccaaatgcatttctttttgaccaccttcttactttaaaaccagtcaagtttttggaaggcgagcttattcatgatcttttaaccatttttgtgagtgctaaattggcatcatatgtcaagttttatcagaataataaagacttcattgattcacttggcctgttacatgaacagaatatggcaaaaatgagactacttacttttatgggaatggcagtagaaaataaggaaatttcttttgacacaatgcagcaagaacttcagattggagctgatgatgttgaagcatttgttattgacgccgtaagaactaaaatggtctactgcaaaattgatcagacccagagaaaagtagttgtcagtcatagcacacatcggacatttggaaaacagcagtggcaacaactgtatgacacacttaatgcctggaaacaaaatctgaacaaagtgaaaaacagccttttgagtctttctgatacctgagtttttatgcttataatttttgttctttgaaaaaaaagccctaaatcatagtaaaacattataaactaaaaaaaaaaaaaaaaaaaaaaaaaaaaaaaaaaaaaaaaaaaaaacaaaaaaaaaaaacaaaaaaaaaacaaaaaaaaaaaaaaaaaaacagaagcgaacaacagcaccaacaaacacaacaaaaaacagacaaaagacgcaaccaacaacaaaagcacaaacaaaaagcgagcagcgcggccccgctccagctacaaccgccagaccacgcccgaacaagcgcgcgcgagagccagagacaagacagaggaccgacacctcagacgcacacccacactacgtaacgc

SEQ ID NO: 379875 - DNA, 1842 bp, Homo sapiens
acccgccccaacctacggctaggtacgaggctgggtggttgcggcgtggtcttgcgagtggagtgtccgctgtgcccgggcctgcaccatgagcgtcccggccttcatcgacatcagtgaagaagatcaggctgctgagcttcgtgcttatctgaaatctaaaggagctgagatttcagaagagaactcggaaggtggacttcatgttgatttagctcaaattattgaagcctgtgatgtgtgtctgaaggaggatgataaagatgttgaaagtgtgatgaacagtgtggtatccctactcttgatcctggaaccagacaagcaagaagctttgattgaaagcctatgtgaaaagctggtcaaatttcgcgaaggtgaacgcccgtctctgagactgcagttgttaagcaaccttttccacgggatggataagaatactcctgtaagatacacagtgtattgcagccttattaaagtggcagcatcttgtggggccatccagtacatcccaactgagctggatcaagttagaaaatggatttctgactggaatctcaccactgaaaaaaagcacacccttttaagactactttatgaggcacttgtggattgtaagaagagtgatgctgcttcaaaagtcatggtggaattgctcggaagttacacagaggacaatgcttcccaggctcgagttgatgcccacaggtgtattgtacgagcattgaaagatccaaatgcatttctttttgaccaccttcttactttaaaaccagtcaagtttttggaaggcgagcttattcatgatcttttaaccatttttgtgagtgctaaattggcatcatatgtcaagttttatcagaataataaagacttcattgattcacttggcctgttacatgaacagaatatggcaaaaatgagactacttacttttatgggaatggcagtagaaaataaggaaatttcttttgacacaatgcagcaagaacttcagattggagctgatgatgttgaagcatttgttattgacgccgtaagaactaaaatggtctactgcaaaattgatcagacccagagaaaagtagttgtcagtcatagcacacatcggacatttggaaaacagcagtggcaacaactgtatgacacacttaatgcctggaaacaaaatctgaacaaagtgaaaaacagccttttgagtctttctgatacctgagtttttatgcttataatttttgttctttgaaaaaaaagccctaaatcatagtaaaacattataaactaaaaaaatttgcctagtctggacagttattgtctcaaatttatactaaaatcacaaactccagaggatatgaagtaataaattacaaggggtcacaatgtctgtcatacaatacataaattctgttctttaaaaaaggatattgaagaagcaatgagcactttaaagaaaggataatatacagagagaagacagaagtagagtaatacaatttcttcacattagaaaaacttggaaaagcaaagacaaactgtagagctttaaatacaacagtcattttattctagtaaaaactataccagaatttcagttacataatttcactactgaaagcacttatctacattattttaatctgttgtttttttccaacgtctcttctgcttttcttttctttggctggttgtcattttctaaacttagtaaattttcacttttatttagttgattcgtaatgaggctctgccagtcatcatcaccagaagtatttttagtcgtcttgattgcctgcaaatggctttgtagtggagttgatatcagaggctttgttttcacctcggaaa

SEQ ID NO: 379876 - DNA, 1877 bp, Homo sapiens
acccgccccaacctacggctaggtacgaggctgggtggttgcggcgtggtcttgcgagtggagtgtccgctgtgcccgggcctgcaccatgagcgtcccggccttcatcgacatcagtgaagaagatcaggctgctgagcttcgtgcttatctgaaatctaaaggagctgagatttcagaagagaactcggaaggtggacttcatgttgatttagctcaaattattgaagcctgtgatgtgtgtctgaaggaggatgataaagatgttgaaagtgtgatgaacagtgtggtatccctactcttgatcctggaaccagacaagcaagaagctttgattgaaagcctatgtgaaaagctggtcaaatttcgcgaaggtgaacgcccgtctctgagactgcagttgttaagcaaccttttccacgggatggataagaatactcctgtaagatacacagtgtattgcagccttattaaagtggcagcatcttgtggggccatccagtacatcccaactgagctggatcaagttagaaaatggatttctgactggaatctcaccactgaaaaaaagcacacccttttaagactactttatgaggcacttgtggattgtaagaagagtgatgctgcttcaaaagtcatggtggaattgctcggaagttacacagaggacaatgcttcccaggctcgagttgatgcccacaggtgtattgtacgagcattgaaagatccaaatgcatttctttttgaccaccttcttactttaaaaccagtcaagtttttggaaggcgagcttattcatgatcttttaaccatttttgtgagtgctaaattggcatcatatgtcaagttttatcagaataataaagacttcattgattcacttggcctgttacatgaacagaatatggcaaaaatgagactacttacttttatgggaatggcagtagaaaataaggaaatttcttttgacacaatgcagcaagaacttcagattggagctgatgatgttgaagcatttgttattgacgccgtaagaactaaaatggtctactgcaaaattgatcagacccagagaaaagtagttgtcagttgctcaggagaattagaaggcttaggatcaatagtcatagcacacatcggacatttggaaaacagcagtggcaacaactgtatgacacacttaatgcctggaaacaaaatctgaacaaagtgaaaaacagccttttgagtctttctgatacctgagtttttatgcttataatttttgttctttgaaaaaaaagccctaaatcatagtaaaacattataaactaaaaaaatttgcctagtctggacagttattgtctcaaatttatactaaaatcacaaactccagaggatatgaagtaataaattacaaggggtcacaatgtctgtcatacaatacataaattctgttctttaaaaaaggatattgaagaagcaatgagcactttaaagaaaggataatatacagagagaagacagaagtagagtaatacaatttcttcacattagaaaaacttggaaaagcaaagacaaactgtagagctttaaatacaacagtcattttattctagtaaaaactataccagaatttcagttacataatttcactactgaaagcacttatctacattattttaatctgttgtttttttccaacgtctcttctgcttttcttttctttggctggttgtcattttctaaacttagtaaattttcacttttatttagttgattcgtaatgaggctctgccagtcatcatcaccagaagtatttttagtcgtcttgattgcctgcaaatggctttgtagtggagttgatatcagaggctttgttttcacctcggaaa

SEQ ID NO: 379877 - DNA, 1697 bp, Homo sapiens
acccgccccaacctacggctaggtacgaggctgggtggttgcggcgtggtcttgcgagtggagtgtccgctgtgcccgggcctgcaccatgagcgtcccggccttcatcgacatcagtgaagaagatcaggctgctgagcttcgtgcttatctgaaatctaaaggagctgagatttcagaagagaactcggaaggtggacttcatgttgatttagctcaaattattgaagcctgtgatgtgtgtctgaaggaggatgataaagatgttgaaagtgtgatgaacagtgtggtatccctactcttgatcctggaaccagacaagcaagaagctttgattgaaagcctatgtgaaaagctggtcaaatttcgcgaaggtgaacgcccgtctctgagactgcagttgttaagcaaccttttccacgggatggataagaatactcctgtaagatacacagtgtattgcagccttattaaagtggcagcatcttgtggggccatccagtacatcccaactgagctggatcaagttagaaaatggatttctgactggaatctcaccactgaaaaaaagcacacccttttaagactactttatgaggcacttgtggattgtaagaagagtgatgctgcttcaaaagtcatggtggaattgctcggaagttacacagaggacaatgcttcccaggctcgagttgatgcccacaggtgtattgtacgagcattgaaagatccaaatgcatttctttttgaccaccttcttactttaaaaccagtcaagtttttggaaggcgagcttattcatgatcttttaaccatttttgtgagtgctaaattggcatcatatgtcaagttttatcagaataataaagacttcattgattcacttggcctgttacatgaacagaatatggcaaaaatgagactacttacttttatgggaatggcagtagaaaataaggaaatttcttttgacacaatgcagcaagaacttcagattggagctgatgatgttgaagcatttgttattgacggtaaggcagacagaacattttcatttatttctagaatttctcatctactacatggatcatagtaagatttttatctggaaactgagccttacacaacaaagatttgtttatagcagatgtgtatttagtagattagtggatatatttgttgtagggtgaaaatttagtagaaatataaactgctatattctatcccttgaaatcacgtagaacaaagacgtttaggcaatacaccactgtggttaagagcacagattttagtattagatgtggatttaagaccaggcccttcctttgtgaaacaggaatgtaggggttcatttgtggttgtaagaattaaatgaattaatacaggtaaagcacagtgcctggcacatagtaagtgatctttcaagtgttaaccattaccagtttttttatgattagcctagaaacaagaacttcttccccaacaattagattataaagcaacttaactgctcaggaattttttctgagctttttaaatttgaaagttgggattatgcaattaagattaataaaaggtacagaactattgaccttttttcccctaatgctctaagttttctatgaagaagtaataacttagtaggaaattagtttattcccctatatgagatggtaggggaagaacacctagcattc

SEQ ID NO: 379878 - DNA, 1356 bp, Homo sapiens
aaatttaggctaggtacgaggctgggtggcggcgtggtcttgcgagtggagtgtccgctgtgcccgggcctgcaccatgagcgtcccggccttcatcgacatcagtgaagaagatcaggcagtttttcagaaagaggacagaatttgagattgtgcttgtcattcgtagtcagttttataatagagcaatcctcaacaggctgctgagcttcgtgcttatctgaaatctaaaggagctgagatttcagaagagaactcggaaggtggacttcatgttgatttagctcaaattattgaagcctgtgatgtgtgtctgaaggaggatgataaagatgttgaaagtgtgatgaacagtgtggtatccctactcttgatcctggaaccagacaagcaagaagctttgattgaaagcctatgtgaaaagctggtcaaatttcgcgaaggtgaacgcccgtctctgagactgcagttgttaagcaaccttttccacgggatggataagaatactcctgtaagatacacagtgtattgcagccttattaaagtggcagcatcttgtggggccatccagtacatcccaactgagctggatcaagttagaaaatggatttctgactggaatctcaccactgaaaaaaagcacacccttttaagactactttatgaggcacttgtggattgtaagaagagtgatgctgcttcaaaagtcatggtggaattgctcggaagttacacagaggacaatgcttcccaggctcgagttgatgcccacaggtgtattgtacgagcattgaaagatccaaatgcatttctttttgaccaccttcttactttaaaaccagtcaagtttttggaaggcgagcttattcatgatcttttaaccatttttgtgagtgctaaattggcatcatatgtcaagttttatcagaataataaagacttcattgattcacttggcctgttacatgaacagaatatggcaaaaatgagactacttacttttatgggaatggcagtagaaaataaggaaatttcttttgacacaatgcagcaagaacttcagattggagctgatgatgttgaagcatttgttattgacgccgtaagaactaaaatggtctactgcaaaattgatcagacccagagaaaagtagttgtcagtcatagcacacatcggacatttggaaaacagcagtggcaacaactgtatgacacacttaatgcctggaaacaaaatctgaacaaagtgaaaaacagccttttgagtctttctgatacctgagtttttatgcttataatttttgttctttgaaaaaaaagccctaaatcatagtaaaacattataaactaaaaaaa

SEQ ID NO: 379879 - DNA, 1244 bp, Homo sapiens
aaatttaggctaggtacgaggctgggtggcggcgtggtcttgcgagtggagtgtccgctgtgcccgggcctgcaccatgagcgtcccggccttcatcgacatcagtgaagaagatcaggaggagctgagatttcagaagagaactcggaaggtggacttcatgttgatttagctcaaattattgaagcctgtgatgtgtgtctgaaggaggatgataaagatgttgaaagtgtgatgaacagtgtggtatccctactcttgatcctggaaccagacaagcaagaagctttgattgaaagcctatgtgaaaagctggtcaaatttcgcgaaggtgaacgcccgtctctgagactgcagttgttaagcaaccttttccacgggatggataagaatactcctgtaagatacacagtgtattgcagccttattaaagtggcagcatcttgtggggccatccagtacatcccaactgagctggatcaagttagaaaatggatttctgactggaatctcaccactgaaaaaaagcacacccttttaagactactttatgaggcacttgtggattgtaagaagagtgatgctgcttcaaaagtcatggtggaattgctcggaagttacacagaggacaatgcttcccaggctcgagttgatgcccacaggtgtattgtacgagcattgaaagatccaaatgcatttctttttgaccaccttcttactttaaaaccagtcaagtttttggaaggcgagcttattcatgatcttttaaccatttttgtgagtgctaaattggcatcatatgtcaagttttatcagaataataaagacttcattgattcacttggcctgttacatgaacagaatatggcaaaaatgagactacttacttttatgggaatggcagtagaaaataaggaaatttcttttgacacaatgcagcaagaacttcagattggagctgatgatgttgaagcatttgttattgacgccgtaagaactaaaatggtctactgcaaaattgatcagacccagagaaaagtagttgtcagtcatagcacacatcggacatttggaaaacagcagtggcaacaactgtatgacacacttaatgcctggaaacaaaatctgaacaaagtgaaaaacagccttttgagtctttctgatacctgagtttttatgcttataatttttgttctttgaaaaaaaagccctaaatcatagtaaaacattataaactaaaaaaa

SEQ ID NO: 379880 - DNA, 1244 bp, Homo sapiens
acccgccccaacctacggctaggtacgaggctgggtggttgcggcgtggtcttgcgagtggagtgtccgctgtgcccgggcctgcaccatgagcgtcccggccttcatcgacatcagtgaagaagatcaggctgctgagcttcgtgcttatctgaaatctaaaggagctgagatttcagaagagaactcggaaggtggacttcatgttgatttagctcaaattattgaagcctgtgatgtgtgtctgaaggaggatgataaagatgttgaaagtgtgatgaacagtgtggtatccctactcttgatcctggaaccagacaagcaagaagctttgattgaaagcctatgtgaaaagctggtcaaatttcgcgaaggtgaacgcccgtctctgagactgcagttgttaagcaaccttttccacgggatggataagaatactcctgtaagatacacagtgtattgcagccttattaaagtggcagcatcttgtggggccatccagtacatcccaactgagctggatcaagttagaaaatggatttctgactggaatctcaccactgaaaaaaagcacacccttttaagactactttatgaggcacttgtggattgtaagaagagtgatgctgcttcaaaagtcatggtggaattgctcggaagttacacagaggacaatgcttcccaggctcgagttgatgcccacaggtgtattgtacgagcattgaaagatccaaatgcatttctttttgaccaccttcttaccttttaaccatttttgtgagtgctaaattggcatcatatgtcaagttttatcagaataataaagacttcattgattcacttggcctgttacatgaacagaatatggcaaaaatgagactacttacttttatgggaatggcagtagaaaataaggaaatttcttttgacacaatgcagcaagaacttcagattggagctgatgatgttgaagcatttgttattgacgccgtaagaactaaaatggtctactgcaaaattgatcagacccagagaaaagtagttgtcagtcatagcacacatcggacatttggaaaacagcagtggcaacaactgtatgacacacttaatgcctggaaacaaaatctgaacaaagtgaaaaacagccttttgagtctttctgatacctgagtttttatgcttataatttttgttctttgaaaaaaaagccctaaatcatagtaaaacattataaactaaaaaaa

SEQ ID NO: 379881 - DNA, 2241 bp, Homo sapiens
aaatttaggctaggtacgaggctgggtggcggcgtggtcttgcgagtggagtgtccgctgtgcccgggcctgcaccatgagcgtcccggccttcatcgacatcagtgaagaagatcaggctgctgagcttcgtgcttatctgaaatctaaaggagctgagatttcagaagagaactcggaaggtggacttcatgttgatttagctcaaattattgaagcctgtgatgtgtgtctgaaggaggatgataaagatgttgaaagtgtgatgaacagtgtggtatccctactcttgatcctggaaccagacaagcaagaagctttgattgaaagcctatgtgaaaagctggtcaaatttcgcgaaggtgaacgcccgtctctgagactgcagttgttaagcaaccttttccacgggatggataagaatactcctgtaagatacacagtgtattgcagccttattaaagtggcagcatcttgtggggccatccagtacatcccaactgagctggatcaagttagaaaatggatttctgactggaatctcaccactgaaaaaaagcacacccttttaagactactttatgaggcacttgtggattgtaagaagagtgatgctgcttcaaaagtcatggtggaattgctcggaagttacacagaggacaatgcttcccaggctcgagttgatgcccacaggtaatgttaaacgttactctgatgagggtttgacagcgatgtagaggtaagctacaatattaaattaagtaactgaaatcatgtttgcaactaccagtgatccagagccatttgatagtgtgtatttcctggtgattctaatgtagatactaaaattcaaggtttgatattggaagaactgtggattgaatatgaagtagctgcatggcgtttacctggcgggggggggtattgctggtatggggatgatgatcccaacccaagaattagaacctaatcttgggccaattgaccctaattttaaggttataggtggaaagttgatggcttgccaaaaattaacccattgctaatgagtataagggcttttaacagtcttagatctaactggtaacaagaatagaatcagttttctaaatctatgtaataaggattatgaaacttctttttttggtcattgctttgtgtggacctctacatgataggagttggtaaaaagggaagttggtggtaaagatccttgactttgaggtcaggctgcctccattcacattcttactccacctcttaatgagcacttctgaactgcttcatagttgataaagggggcagagtaatactgtttgtctcctaggttgttgtgaggaataaatgagatgtaaggcaagtgaagcacttagtgtcttggcatgtggttctgctgctgcttactatttgattaccttggtgctttctctccagctatgtttttatctacaattaatatatttcattttgttaaaacagatgaacctgataaatgtgttggcctgtcttaacccaatcctgtagcttttttaatgttgtttatatgttttggactgttagatattttgccgaattaagtatattttatgatctgcaaaaactcaatgaaaagccaggatttcaaaaccctgagcttacatttttgttctctaattacaggtgtattgtacgagcattgaaagatccaaatgcatttctttttgaccaccttcttactttaaaaccagtcaagtttttggaaggcgagcttattcatgatcttttaaccatttttgtgagtgctaaattggcatcatatgtcaagttttatcagaataataaagacttcattgattcacttggcctgttacatgaacagaatatggcaaaaatgagactacttacttttatgggaatggcagtagaaaataaggaaatttcttttgacacaatgcagcaagaacttcagattggagctgatgatgttgaagcatttgttattgacgccgtaagaactaaaatggtctactgcaaaattgatcagacccagagaaaagtagttgtcagtcatagcacacatcggacatttggaaaacagcagtggcaacaactgtatgacacacttaatgcctggaaacaaaatctgaacaaagtgaaaaacagccttttgagtctttctgatacctgagtttttatgcttataatttttgttctttgaaaaaaaagccctaaatcatagtaaaacattataaactaaaaaaa

SEQ ID NO: 379882 - DNA, 1221 bp, Homo sapiens
aaatttaggctaggtacgaggctgggtggcggcgtggtcttgcgagtggagtgtccgctgtgcccgggcctgcaccatgagcgtcccggccttcatcgacatcagtgaagaagatcaggctgctgagcttcgtgcttatctgaaatctaaaggagctgagatttcagaagagaactcggaaggtggacttcatgttgatttagctcaaattattgaagcctgtgatgtgtgtctgaaggaggatgataaagatgttgaaagtgtgatgaacagtgtggtatccctactcttgatcctggaaccagacaagcaagaagctttgattgaaagcctatgtgtaagcaaccttttccacgggatggataagaatactcctgtaagatacacagtgtattgcagccttattaaagtggcagcatcttgtggggccatccagtacatcccaactgagctggatcaagttagaaaatggatttctgactggaatctcaccactgaaaaaaagcacacccttttaagactactttatgaggcacttgtggattgtaagaagagtgatgctgcttcaaaagtcatggtggaattgctcggaagttacacagaggacaatgcttcccaggctcgagttgatgcccacaggtgtattgtacgagcattgaaagatccaaatgcatttctttttgaccaccttcttactttaaaaccagtcaagtttttggaaggcgagcttattcatgatcttttaaccatttttgtgagtgctaaattggcatcatatgtcaagttttatcagaataataaagacttcattgattcacttggcctgttacatgaacagaatatggcaaaaatgagactacttacttttatgggaatggcagtagaaaataaggaaatttcttttgacacaatgcagcaagaacttcagattggagctgatgatgttgaagcatttgttattgacgccgtaagaactaaaatggtctactgcaaaattgatcagacccagagaaaagtagttgtcagtcatagcacacatcggacatttggaaaacagcagtggcaacaactgtatgacacacttaatgcctggaaacaaaatctgaacaaagtgaaaaacagccttttgagtctttctgatacctgagtttttatgcttataatttttgttctttgaaaaaaaagccctaaatcatagtaaaacattataaactaaaaaaa

SEQ ID NO: 379883 - DNA, 1286 bp, Homo sapiens
  misc_feature (821)..(821): n is a, c, g, or t
acccgccccaacctacggctaggtacgaggctgggtggttgcggcgtggtcttgcgagtggagtgtccgctgtgcccgggcctgcaccatgagcgtcccggccttcatcgacatcagtgaagaagatcaggctgctgagcttcgtgcttatctgaaatctaaaggagctgagatttcagaagagaactcggaaggtggacttcatgttgatttagctcaaattattgaagcctgtgatgtgtgtctgaaggaggatgataaagatgttgaaagtgtgatgaacagtgtggtatccctactcttgatcctggaaccagacaagcaagaagctttgattgaaagcctatgtgaaaagctggtcaaatttcgcgaaggtgaacgcccgtctctgagactgcagttgttaagcaaccttttccacgggatggataagaatactcctgtaagatacacagtgtattgcagccttattaaagtggcagcatcttgtggggccatccagtacatcccaactgagctggatcaagttagaaaatggatttctgactggaatctcaccactgaaaaaaagcacacccttttaagactactttatgaggcacttgtggattgtaagaagagtgatgctgcttcaaaagtcatggtggaattgctcggaagttacacagaggacaatgcttcccaggctcgagttgatgcccacaggtgtattgtacgagcattgaaagatccaaatgcatttctttttgaccaccttcttactttaaaaccagtcaagtttttggaaggcgagcttattcatgatcttttaaccattttgngagtgctaaattggcatcatatgtcaagttttatcagaataataaagacttcattgattcacttggcctgttacatgaacagaatatggcaaaaatgagactacttacttttatgggaatggcagtagaaaataaggaaatttcttttgacacaatgcagcaagaacttcagattggagctgatgatgttgaagcatttgttattgacgccgtaagaactaaaatggtctactgcaaaattgatcagacccagagaaaagtagttgtcagtcatagcacacatcggacatttggaaaacagcagtggcaacaactgtatgacacacttaatgcctggaaacaaaatctgaacaaagtgaaaaacagccttttgagtctttctgatacctgagtttttatgcttataatttttgttctttgaaaaaaaagccctaaatcatagtaaaacattataaactaaaaaaa

SEQ ID NO: 379884 - DNA, 1206 bp, Homo sapiens
aaatttaggctaggtacgaggctgggtggcggcgtggtcttgcgagtggagtgtccgctgtgcccgggcctgcaccatgagcgtcccggccttcatcgacatcagtgaagaagatcaggctgctgagcttcgtgcttatctgaaatctaaaggagctgagatttcagaagagaactcggaaggtggacttcatgttgatttagctcaaattattgaagcctgtgatgtgtgtctgaaggaggatgataaagatgttgaaagtgtgatgaacagtgtggtatccctactcttgatcctggaaccagacaagcaagaagctttgattgaaagcctatgtgaaaagctggtcaaatttcgcgaaggtgaacgcccgtctctgagactgcagttgttaagcaaccttttccacgggatggataagaatactcctgtaagatacacagtgtattgcagccttattaaagtggcagcatcttgtggggccatccagtacatcccaactgagctggatcaagttagaaaatggatttctgactggaatctcaccactgaaaaaaagcacacccttttaagactactttatgaggcacttgtggattgtaagaagagtgatgctgcttacaggtgtattgtacgagcattgaaagatccaaatgcatttctttttgaccaccttcttactttaaaaccagtcaagtttttggaaggcgagcttattcatgatcttttaaccatttttgtgagtgctaaattggcatcatatgtcaagttttatcagaataataaagacttcattgattcacttggcctgttacatgaacagaatatggcaaaaatgagactacttacttttatgggaatggcagtagaaaataaggaaatttcttttgacacaatgcagcaagaacttcagattggagctgatgatgttgaagcatttgttattgacgccgtaagaactaaaatggtctactgcaaaattgatcagacccagagaaaagtagttgtcagtcatagcacacatcggacatttggaaaacagcagtggcaacaactgtatgacacacttaatgcctggaaacaaaatctgaacaaagtgaaaaacagccttttgagtctttctgatacctgagtttttatgcttataatttttgttctttgaaaaaaaagccctaaatcatagtaaaacattataaactaaaaaaa

SEQ ID NO: 379885 - DNA, 1845 bp, Homo sapiens
aaatttaggctaggtacgaggctgggtggcggcgtggtcttgcgagtggagtgtccgctgtgcccgggcctgcaccatgagcgtcccggccttcatcgacatcagtgaagaagatcaggttagaaaatggatttctgactggaatctcaccactgaaaaaaagcacacccttttaagactactttatgaggcacttgtggattgtaagaagagtgatgctgcttcaaaagtcatggtggaattgctcggaagttacacagaggacaatgcttcccaggctcgagttgatgcccacaggtaatgttaaacgttactctgatgagggtttgacagcgatgtagaggtaagctacaatattaaattaagtaactgaaatcatgtttgcaactaccagtgatccagagccatttgatagtgtgtatttcctggtgattctaatgtagatactaaaattcaaggtttgatattggaagaactgtggattgaatatgaagtagctgcatggcgtttacctggcgggggggggtattgctggtatggggatgatgatcccaacccaagaattagaacctaatcttgggccaattgaccctaattttaaggttataggtggaaagttgatggcttgccaaaaattaacccattgctaatgagtataagggcttttaacagtcttagatctaactggtaacaagaatagaatcagttttctaaatctatgtaataaggattatgaaacttctttttttggtcattgctttgtgtggacctctacatgataggagttggtaaaaagggaagttggtggtaaagatccttgactttgaggtcaggctgcctccattcacattcttactccacctcttaatgagcacttctgaactgcttcatagttgataaagggggcagagtaatactgtttgtctcctaggttgttgtgaggaataaatgagatgtaaggcaagtgaagcacttagtgtcttggcatgtggttctgctgctgcttactatttgattaccttggtgctttctctccagctatgtttttatctacaattaatatatttcattttgttaaaacagatgaacctgataaatgtgttggcctgtcttaacccaatcctgtagcttttttaatgttgtttatatgttttggactgttagatattttgccgaattaagtatattttatgatctgcaaaaactcaatgaaaagccaggatttcaaaaccctgagcttacatttttgttctctaattacaggtgtattgtacgagcattgaaagatccaaatgcatttctttttgaccaccttcttactttaaaaccagtcaagtttttggaaggcgagcttattcatgatcttttaaccatttttgtgagtgctaaattggcatcatatgtcaagttttatcagaataataaagacttcattgattcacttggcctgttacatgaacagaatatggcaaaaatgagactacttacttttatgggaatggcagtagaaaataaggaaatttcttttgacacaatgcagcaagaacttcagattggagctgatgatgttgaagcatttgttattgacgccgtaagaactaaaatggtctactgcaaaattgatcagacccagagaaaagtagttgtcagtcatagcacacatcggacatttggaaaacagcagtggcaacaactgtatgacacacttaatgcctggaaacaaaatctgaacaaagtgaaaaacagccttttgagtctttctgatacctgagtttttatgcttataatttttgttctttgaaaaaaaagccctaaatcatagtaaaacattataaactaaaaaaa

SEQ ID NO: 379886 - DNA, 931 bp, Homo sapiens
aaatttaggctaggtacgaggctgggtggcggcgtggtcttgcgagtggagtgtccgctgtgcccgggcctgcaccatgagcgtcccggccttcatcgacatcagtgaagaagatcaggttagaaaatggatttctgactggaatctcaccactgaaaaaaagcacacccttttaagactactttatgaggcacttgtggattgtaagaagagtgatgctgcttcaaaagtcatggtggaattgctcggaagttacacagaggacaatgcttcccaggctcgagttgatgcccacaggtaatgttaaacgttactctgatgagggtttgacagcgatgtagaggtacaggtgtattgtacgagcattgaaagatccaaatgcatttctttttgaccaccttcttactttaaaaccagtcaagtttttggaaggcgagcttattcatgatcttttaaccatttttgtgagtgctaaattggcatcatatgtcaagttttatcagaataataaagacttcattgattcacttggcctgttacatgaacagaatatggcaaaaatgagactacttacttttatgggaatggcagtagaaaataaggaaatttcttttgacacaatgcagcaagaacttcagattggagctgatgatgttgaagcatttgttattgacgccgtaagaactaaaatggtctactgcaaaattgatcagacccagagaaaagtagttgtcagtcatagcacacatcggacatttggaaaacagcagtggcaacaactgtatgacacacttaatgcctggaaacaaaatctgaacaaagtgaaaaacagccttttgagtctttctgatacctgagtttttatgcttataatttttgttctttgaaaaaaaagccctaaatcatagtaaaacattataaactaaaaaaa

SEQ ID NO: 379887 - DNA, 2255 bp, Homo sapiens
aaatttaggctaggtacgaggctgggtggcggcgtggtcttgcgagtggagtgtccgctgtgcccgggcctgcaccatgagcgtcccggccttcatcgacatcagtgaagaagatcaggttagaaaatggatttctgactggaatctcaccactgaaaaaaagcacacccttttaagactactttatgaggcacttgtggattgtaagaagagtgatgctgcttcaaaagtcatggtggaattgctcggaagttacacagaggacaatgcttcccaggctcgagttgatgcccacaggtaatgttaaacgttactctgatgagggtttgacagcgatgtagaggtaagctacaatattaaattaagtaactgaaatcatgtttgcaactaccagtgatccagagccatttgatagtgtgtatttcctggtgattctaatgtagatactaaaattcaaggtttgatattggaagaactgtggattgaatatgaagtagctgcatggcgtttacctggcgggggggggtattgctggtatggggatgatgatcccaacccaagaattagaacctaatcttgggccaattgaccctaattttaaggttataggtggaaagttgatggcttgccaaaaattaacccattgctaatgagtataagggcttttaacagtcttagatctaactggtaacaagaatagaatcagttttctaaatctatgtaataaggattatgaaacttctttttttggtcattgctttgtgtggacctctacatgataggagttggtaaaaagggaagttggtggtaaagatccttgactttgaggtcaggctgcctccattcacattcttactccacctcttaatgagcacttctgaactgcttcatagttgataaagggggcagagtaatactgtttgtctcctaggttgttgtgaggaataaatgagatgtaaggcaagtgaagcacttagtgtcttggcatgtggttctgctgctgcttactatttgattaccttggtgctttctctccagctatgtttttatctacaattaatatatttcattttgttaaaacagatgaacctgataaatgtgttggcctgtcttaacccaatcctgtagcttttttaatgttgtttatatgttttggactgttagatattttgccgaattaagtatattttatgatctgcaaaaactcaatgaaaagccaggatttcaaaaccctgagcttacatttttgttctctaattacaggtgtattgtacgagcattgaaagatccaaatgcatttctttttgaccaccttcttactttaaaaccagtcaagtttttggaaggcgagcttattcatgatcttttaaccatttttgtgagtgctaaattggcatcatatgtcaagttttatcagaataataaagacttcattgattcacttggcctgttacatgaacagaatatggcaaaaatgagactacttacttttatgggaatggcagtagaaaataaggaaatttcttttgacacaatgcagcaagaacttcagattggagctgatgatgttgaagcatttgttattgacggtaaggcagacagaacattttcatttatttctagaatttctcatctactacatggatcatagtaagatttttatctggaaactgagccttacacaacaaagatttgtttatagcagatgtgtatttagtagattagtggatatatttgttgtagggtgaaaatttagtagaaatataaactgctatattctatcccttgaaatcacgtagaacaaagacgtttaggcaatacaccactgtggttaagagcacagattttagtattagatgtggatttaagaccaggcccttcctttgtgaaacaggaatgtaggggttcatttgtggttgtaagaattaaatgaattaatacaggtaaagcacagtgcctggcacatagtaagtgatctttcaagtgttaaccattaccagtttttttatgattagcctagaaacaagaacttcttccccaacaattagattataaagcaacttaactgctcaggaattttttctgagctttttaaatttgaaagttgggattatgcaattaagattaataaaaggtacagaactattgaccttttttcccctaatgctctaagttttctatgaagaagtaataacttagtaggaaattagtttattcccctatatgagatggtaggggaagaacacctagcattc

SEQ ID NO: 379888 - DNA, 855 bp, Homo sapiens
aaatttaggctaggtacgaggctgggtggcggcgtggtcttgcgagtggagtgtccgctgtgcccgggcctgcaccatgagcgtcccggccttcatcgacatcagtgaagaagatcaggctgctgagcttcgtgcttatctgaaatctaaaggagctgagatttcagaagagaactcggaaggtggacttcatgttgatttagctcaaattattgaagcctgtgatgtgtgtctgaaggaggatgataaagatgttgaaagtgtgatgaacagtgtggtatccctactcttgatcctggaaccagacaagcaagaagctttgattgaaagcctatgtgaaaagctggtcaaatttcgcgaaggtgaacgcccgtctctgagactgcagttgtttagaaaatggatttctgactggaatctcaccactgaaaaaaagcacacccttttaagactactttatgaggcacttgtggattgtaagaagagtgatgctgcttcaaaagtcatggtggaattgctcggaagttacacagaggacaatgcttcccaggctcgagttgatgcccacaggtgtattgtacgagcattgaaagatccaaatgcatttctttttgaccaccttcttactttaaaaaccagtcaagttttggaaggcgagcttattcatgatctttaaccattttgtgagtgctaaaatggatcatatgtcagtttatcagaatataacgaattcctgattcctgggctggtacatgaacagaattgcacaagggactacttacttagggaaggggcgaaataggatctttggccatgcgagactcatgggcgtgagggacatggtggggaaaaaag

SEQ ID NO: 379889 - DNA, 614 bp, Homo sapiens
aaatttaggctaggtacgaggctgggtggcggcgtggtcttgcgagtggagtgtccgctgtgcccgggcctgcaccatgagcgtcccggccttcatcgacatcagtgaagaagatcaggctgctgagcttcgtgcttatctgaaatctaaaggagctgagatttcagaagagaactcggaaggtggacttcatgttgatttagctcaaattattgaagcctgtgatgtgtgtctgaaggaggatgataaagatgttgaaagtgtgatgaacagtgtggtatccctactcttgatcctggaaccagacaagcaagaagctttgattgaaagcctatgtgaaaagctggtcaaatttcgcgaaggtgaacgcccgtctctgagactgcagttgtaagttaagatctgaaagaaactcagtttttctaggtgcttttttcatgttactaacttttaatggtgcagagcaggaattctggaacttgactctcagctgtggctcatattagctgtgaccttgggcaagtggcttgacctttctgtgccctagtttcctcctttgtaatatgaagttgttaacggtacctgccacaggtttgtggtgagagctaacctca

SEQ ID NO: 379890 - DNA, 829 bp, Homo sapiens
aaatttaggctaggtacgaggctgggtggcggcgtggtcttgcgagtggagtgtccgctgtgcccgggcctgcaccatgagcgtcccggccttcatcgacatcagtgaagaagatcaggcagtttttcagaaagaggacagaatttgagattgtgcttgtcattcgtagtcagttttataatagagcaatcctcaacaggctgctgagcttcgtgcttatctgaaatctaaaggagctgagatttcagaagagaactcggaaggtggacttcatgttgatttagctcaaattattgaagcctgtgatgtgtgtctgaaggaggatgataaaggtttgtttttaatttttttctaatatttcctaataaaatcttttaaatttttcttgtgaattatagagtcgtccctcattatctgaggcaaggaggatttggaaccctcagatacagaaggctgactgtatttatatgttttgaatttcagactacaggacttttaaatagataggtagtggttgtatgtattttgggggcacaggtgatattttgatacatgtatgcaatgtgtaattatcaaatcagggtaattggaatatcacacatcttttctttatgttggaaacattcaacagttctcttctagctctttcaactatacaatacattgttaaccagagtctaagcactgttgttttcaatcttaccttcacacatgctttcagtttgtgtaatctattatacctataaagtaaacctattttgagaaaacctttattttatacataggtgtatttcttaagtgttattacactaaatgcttatagtcttag

SEQ ID NO: 379891 - DNA, 482 bp, Homo sapiens
tgactgtagttaaatagttgctatttatcataattttattaaagttcagactgaatgtgattagcttatttaatgaaagagtcctattttccagcacatttcatttaatggctgagcattggctagaatactaatgacttttatgtctgctttatatagttgctcaggagaattagaaggcttaggatcaatatggtaaagattttttttaaataattatgtaattcttaaattctcttactattctaaattaggtatatttaatcttgcttttaactggattcaaatctgtagtattataaaagaataccagaggctaaaaggttgactaacactgtgtttaatttttcaatttttgtcatagcacacatcggacatttggaaaacagcagtggcaacaactgtatgacacacttaatgcctggaaacaaaatctgaacaaagtgaaaaacagccttttgagtctttctgatacctgagtt

SEQ ID NO: 379892 - DNA, 957 bp, Homo sapiens
  misc_feature (775)..(775): n is a, c, g, or t
  misc_feature (823)..(823): n is a, c, g, or t
  misc_feature (825)..(825): n is a, c, g, or t
aaatttaggctaggtacgaggctgggtggcggcgtggtcttgcgagtggagtgtccgctgtgcccgggcctgcaccatgagcgtcccggccttcatcgacatcagtgaagaagatcaggctgctgagcttcgtgcttatctgaaatctaaaggagctgagatttcagaagagaactcggaaggtggacttcatgttgatttagctcaaattattgaagcctgtgatgtgtgtctgaaggaggatgataaagatgttgaaagtgtgatgaacagtgtggtatccctactcttgatcctggaaccagacaagcaagaagctttgattgaaagcctatgtgaaaagctggtcaaatttcgcgaaggtgaacgcccgtctctgagactgcagttgttaagcaaccttttccacgggatggataagaatactcctgtaagatacacagtgtattgcagccttattaaagtggcagcatcttgtggggccatccagtacatcccaactgagctggatcaagttagaaaatggatttctgactggaatctcaccactgaaaaaaagcacacccttttaagactactttatgaggcacttgtggattgtaagaagagtgatgctgcttcaaaagtcatggtggaattgctcggaagttacacagaggacaatgcttcccaggctcgagttgatgccccaggtgtttgtccgagcttgaagatccaatgctttcttttgaccccttcttactttaaaccagcagtttgggagggagcttatcangatcttaccatttgggggcaatgggccatgtccgtttccgaaataagntnctggtctgggggtcttgacacaaatggcaaggccctctttggaggggcgacaagaatttgaccgcgccactggcgggtgcgttcccacaggtcggtcccagtcctctggtcatggacaactattttcccaaa

SEQ ID NO: 379893 - DNA, 412 bp, Homo sapiens
atgtcctagtagcgcaagggaccgctgccgagcctgggccgggcggccggggctgacacccgcagctgttctacacgcgagaatggggaggccggtggctggggcgcgcgttcctggcctcgattcgcaccagctcgccggccggcggtcccagcgcggggcccgacgcttcaccgccagctccctggtcggcgtcgggactcatttctgacgacatagtacttttagactgatgaggaatgatgtctgcttccgtccgtcaaatgcagccacattcggagtgggaggtggtgaatctgtagttagcataagcagggtagggaaaagtaattttgtgctaaagatcaaaatgccgggccgggcgcggtggctcacgcctttaatcccagcactttgggacgccgaggcgggc

SEQ ID NO: 379894 - DNA, 1766 bp, Homo sapiens
acccgccccaacctacggctaggtacgaggctgggtggttgcggcgtggtcttgcgagtggagtgtccgctgtgcccgggcctgcaccatgagcgtcccggccttcatcgacatcagtgaagaagatcaggctgctgagcttcgtgcttatctgaaatctaaaggagctgagatttcagaagagaactcggaaggtggacttcatgttgatttagctcaaattattgaagcctgtgatgtgtgtctgaaggaggatgataaagatgttgaaagtgtgatgaacagtgtggtatccctactcttgatcctggaaccagacaagcaagaagctttgattgaaagcctatgtgaaaagctggtcaaatttcgcgaaggtgaacgcccgtctctgagactgcagttgttaagcaaccttttccacgggatggataagaatactcctgtaagatacacagtgtattgcagccttattaaagtggcagcatcttgtggggccatccagtacatcccaactgagctggatcaagttagaaaatggatttctgactggaatctcaccactgaaaaaaagcacacccttttaagactactttatgaggcacttgtggattgtaagaagagtgatgctgcttcaaaagtcatggtggaattgctcggaagttacacagaggacaatgcttcccaggctcgagttgatgcccacaggtgtattgtacgagcattgaaagatccaaatgcatttctttttgaccaccttcttactttaaaaccagtcaagtttttggaaggcgagcttattcatgatcttttaaccatttttgtgagtgctaaattggcatcatatgtcaagttttatcagaataataaagacttcattgattcacttggcctgttacatgaacagaatatggcaaaaatgagactacttacttttatgggaatggcagtagaaaataaggaaatttcttttgacacaatgcagcaagaacttcagattggagctgatgatgttgaagcatttgttattgacgccgtaagaactaaaatggtctactgcaaaattgatcagacccagagaaaagtagttgtcagtcatagcacacatcggacatttggaaaacagcagtggcaacaactgtatgacacacttaatgcctggaaacaaaatctgaacaaagtgaaaaacagccttttgagtctttctgatacctgagtttttatgcttataatttttgttctttgaaaaaaaagccctaaatcatagtaaaacattataaactaaaaaaaaaaaaaaaaaaaaaaaaaaaaaaaaaaaaaaaaaaaaaacaaaaaaaaaaaagagaggggggggcgcgcggctcaaaaaatctccccaggggggggcccaatatagagggggaccccgcgtttttgggaaacaaggggggcccaaataggggggcgggctataataatacagccgaggaggacgaaggggcggcgggttaaaaaacaaccgccgcggaggcgggcgaaaaaactcctcgtcactgggggcgaatactcgcgggagaaaagcaccccccacccagcgggggggggcgaaacataagtggggggcaaacacacacacccacgaaggaaatattaaaccgcctcacaaggggtaactaacaacacacgtcagagggcgagcagggcgcgtcaacacccgccggaactagactcgcggagggaaaaaaatttgtcggacagcggaatatacttatccgagaaaaatctatacg

SEQ ID NO: 379895 - DNA, 1679 bp, Homo sapiens
acccgccccaacctacggctaggtacgaggctgggtggttgcggcgtggtcttgcgagtggagtgtccgctgtgcccgggcctgcaccatgagcgtcccggccttcatcgacatcagtgaagaagatcaggctgctgagcttcgtgcttatctgaaatctaaaggagctgagatttcagaagagaactcggaaggtggacttcatgttgatttagctcaaattattgaagcctgtgatgtgtgtctgaaggaggatgataaagatgttgaaagtgtgatgaacagtgtggtatccctactcttgatcctggaaccagacaagcaagaagctttgattgaaagcctatgtgaaaagctggtcaaatttcgcgaaggtgaacgcccgtctctgagactgcagttgttaagcaaccttttccacgggatggataagaatactcctgtaagatacacagtgtattgcagccttattaaagtggcagcatcttgtggggccatccagtacatcccaactgagctggatcaagttagaaaatggatttctgactggaatctcaccactgaaaaaaagcacacccttttaagactactttatgaggcacttgtggattgtaagaagagtgatgctgcttcaaaagtcatggtggaattgctcggaagttacacagaggacaatgcttcccaggctcgagttgatgcccacaggtgtattgtacgagcattgaaagatccaaatgcatttctttttgaccaccttcttactttaaaaccagtcaagtttttggaaggcgagcttattcatgatcttttaaccatttttgtgagtgctaaattggcatcatatgtcaagttttatcagaataataaagacttcattgattcacttggcctgttacatgaacagaatatggcaaaaatgagactacttacttttatgggaatggcagtagaaaataaggaaatttcttttgacacaatgcagcaagaacttcagattggagctgatgatgttgaagcatttgttattgacgccgtaagaactaaaatggtctactgcaaaattgatcagacccagagaaaagtagttgtcagtcatagcacacatcggacatttggaaaacagcagtggcaacaactgtatgacacacttaatgcctggaaacaaaatctgaacaaagtgaaaaacagccttttgagtctttctgatacctgagtttttatgcttataatttttgttctttgaaaaaaaagccctaaatcatagtaaaacattataaactaaaaaaaaaaaaaaaaaaaaaaaaaaaaaacctgtgctggcgcgggcctctggcgccctctgagaaaaaagcttctctagagcaccaattccggttggggcgcgccggggcgccgccagcgtggggtacagcgtgagaaacatgtggcgcccaatagcgctgtgttcccaataggaggtgacccgggggctcatagagaaccataggtgcgttgggggttctccctccccaatataaaaaaaagacgccccgggggggaaaccccaagagcgcggttcgggacacaccaatctcccagaagaggagagtccgaaaagaggccaatcagccggggagcttcatatacaacacgcggaggctccaaacggcgaacgcccgaatattaaaaaattacgccga

SEQ ID NO: 379896 - DNA, 2041 bp, Homo sapiens
acccgccccaacctacggctaggtacgaggctgggtggttgcggcgtggtcttgcgagtggagtgtccgctgtgcccgggcctgcaccatgagcgtcccggccttcatcgacatcagtgaagaagatcaggctgctgagcttcgtgcttatctgaaatctaaaggagctgagatttcagaagagaactcggaaggtggacttcatgttgatttagctcaaattattgaagcctgtgatgtgtgtctgaaggaggatgataaagatgttgaaagtgtgatgaacagtgtggtatccctactcttgatcctggaaccagacaagcaagaagctttgattgaaagcctatgtgaaaagctggtcaaatttcgcgaaggtgaacgcccgtctctgagactgcagttgttaagcaaccttttccacgggatggataagaatactcctgtaagatacacagtgtattgcagccttattaaagtggcagcatcttgtggggccatccagtacatcccaactgagctggatcaagttagaaaatggatttctgactggaatctcaccactgaaaaaaagcacacccttttaagactactttatgaggcacttgtggattgtaagaagagtgatgctgcttcaaaagtcatggtggaattgctcggaagttacacagaggacaatgcttcccaggctcgagttgatgcccacaggtgtattgtacgagcattgaaagatccaaatgcatttctttttgaccaccttcttactttaaaaccagtcaagtttttggaaggcgagcttattcatgatcttttaaccatttttgtgagtgctaaattggcatcatatgtcaagttttatcagaataataaagacttcattgattcacttggcctgttacatgaacagaatatggcaaaaatgagactacttacttttatgggaatggcagtagaaaataaggaaatttcttttgacacaatgcagcaagaacttcagattggagctgatgatgttgaagcatttgttattgacgccgtaagaactaaaatggtctactgcaaaattgatcagacccagagaaaagtagttgtcagttgctcaggagaattagaaggcttaggatcaatatggtaaagattttttttaaataattatgtaattcttaaattctcttactattctaaattaggtatatttaatcttgcttttaactggattcaaatctgtagtattataaaagaataccagaggctaaaaggttgactaacactgtgtttaatttttcaatttttgtcatagcacacatcggacatttggaaaacagcagtggcaacaactgtatgacacacttaatgcctggaaacaaaatctgaacaaagtgaaaaacagccttttgagtctttctgatacctgagtttttatgcttataatttttgttctttgaaaaaaaagccctaaatcatagtaaaacattataaactaaaaaaatttgcctagtctggacagttattgtctcaaatttatactaaaatcacaaactccagaggatatgaagtaataaattacaaggggtcacaatgtctgtcatacaatacataaattctgttctttaaaaaaggatattgaagaagcaatgagcactttaaagaaaggataatatacagagagaagacagaagtagagtaatacaatttcttcacattagaaaaacttggaaaagcaaagacaaactgtagagctttaaatacaacagtcattttattctagtaaaaactataccagaatttcagttacataatttcactactgaaagcacttatctacattattttaatctgttgtttttttccaacgtctcttctgcttttcttttctttggctggttgtcattttctaaacttagtaaattttcacttttatttagttgattcgtaatgaggctctgccagtcatcatcaccagaagtatttttagtcgtcttgattgcctgcaaatggctttgtagtggagttgatatcagaggctttgttttcacctcggaaa

SEQ ID NO: 379897 - DNA, 1643 bp, Homo sapiens
acccgccccaacctacggctaggtacgaggctgggtggttgcggcgtggtcttgcgagtggagtgtccgctgtgcccgggcctgcaccatgagcgtcccggccttcatcgacatcagtgaagaagatcaggctgctgagcttcgtgcttatctgaaatctaaaggagctgagatttcagaagagaactcggaaggtggacttcatgttgatttagctcaaattattgaagcctgtgatgtgtgtctgaaggaggatgataaagatgttgaaagtgtgatgaacagtgtggtatccctactcttgatcctggaaccagacaagcaagaagctttgattgaaagcctatgtgaaaagctggtcaaatttcgcgaaggtgaacgcccgtctctgagactgcagttgttaagcaaccttttccacgggatggataagaatactcctgtaagatacacagtgtattgcagccttattaaagtggcagcatcttgtggggccatccagtacatcccaactgagctggatcaagttagaaaatggatttctgactggaatctcaccactgaaaaaaagcacacccttttaagactactttatgaggcacttgtggattgtaagaagagtgatgctgcttcaaaagtcatggtggaattgctcggaagttacacagaggacaatgcttcccaggctcgagttgatgcccacaggtgtattgtacgagcattgaaagatccaaatgcatttctttttgaccaccttcttactttaaaaccagtcaagtttttggaaggcgagcttattcatgatcttttaaccatttttgtgagtgctaaattggcatcatatgtcaagttttatcagaataataaagacttcattgattcacttggcctgttacatgaacagaatatggcaaaaatgagactacttacttttatgggaatggcagtagaaaataaggaaatttcttttgacacaatgcagcaagaacttcagattggagctgatgatgttgaagcatttgttattgacggtaaggcagacagaacattttcatttatttctagaatttctcatctactacatggatcatagtaagatttttatctggaaactgagccttacacaacaaagatttgtttatagcagatgtgtatttagtagattagtggatatatttgttgtagggtgcaaagacgtttaggcaatacaccactgtggttaagagcacagattttagtattagatgtggatttaagaccaggcccttcctttgtgaaacaggaatgtaggggttcatttgtggttgtaagaattaaatgaattaatacaggtaaagcacagtgcctggcacatagtaagtgatctttcaagtgttaaccattaccagtttttttatgattagcctagaaacaagaacttcttccccaacaattagattataaagcaacttaactgctcaggaattttttctgagctttttaaatttgaaagttgggattatgcaattaagattaataaaaggtacagaactattgaccttttttcccctaatgctctaagttttctatgaagaagtaataacttagtaggaaattagtttattcccctatatgagatggtaggggaagaacacctagcattc

SEQ ID NO: 379898 - DNA, 1287 bp, Homo sapiens; identical to SEQ ID NO: 379872

SEQ ID NO: 379899 - DNA, 1286 bp, Homo sapiens
acccgccccaacctacggctaggtacgaggctgggtggttgcggcgtggtcttgcgagtggagtgtccgctgtgcccgggcctgcaccatgagcgtcccggccttcatcgacatcagtgaagaagatcaggctgctgagcttcgtgcttatctgaaatctaaaggagctgagatttcagaagagaactcggaaggtggacttcatgttgatttagctcaaattattgaagcctgtgatgtgtgtctgaaggaggatgataaagatgttgaaagtgtgatgaacagtgtggtatccctactcttgatcctggaaccagacaagcaagaagctttgattgaaagcctatgtgaaaagctggtcaaatttcgcgaaggtgaacgcccgtctctgagactgcagttgttaagcaaccttttccacgggatggataagaatactcctgtaagatacacagtgtattgcagccttattaaagtggcagcatcttgtggggccatccagtacatcccaactgagctggatcaagttagaaaatggatttctgactggaatctcaccactgaaaaaaagcacacccttttaagactactttatgaggcacttgtggattgtaagaagagtgatgctgcttcaaaagtcatggtggaattgctcggaagttacacagaggacaatgcttcccaggctcgagttgatgcccacaggtgtattgtacgagcattgaaagatccaaatgcatttctttttgaccaccttcttactttaaaaaccagtcaagttttggaaggcgagcttattcatgacttttaaccatttttgtgagtgctaaattggcatcatatgtcaagttttatcagaataataaagacttcattgattcacttggcctgttacatgaacagaatatggcaaaaatgagactacttacttttatgggaatggcagtagaaaataaggaaatttcttttgacacaatgcagcaagaacttcagattggagctgatgatgttgaagcatttgttattgacgccgtaagaactaaaatggtctactgcaaaattgatcagacccagagaaaagtagttgtcagtcatagcacacatcggacatttggaaaacagcagtggcaacaactgtatgacacacttaatgcctggaaacaaaatctgaacaaagtgaaaaacagccttttgagtctttctgatacctgagtttttatgcttataatttttgttctttgaaaaaaaagccctaaatcatagtaaaacattataaactaaaaaaa

SEQ ID NO: 379900 - DNA, 1287 bp, Homo sapiens; identical to SEQ ID NO: 379872

SEQ ID NO: 379901 - DNA, 879 bp, Homo sapiens
acccgccccaacctacggctaggtacgaggctgggtggttgcggcgtggtcttgcgagtggagtgtccgctgtgcccgggcctgcaccatgagcgtcccggccttcatcgacatcagtgaagaagatcaggctgctgagcttcgtgcttatctgaaatctaaaggagctgagatttcagaagagaactcggaaggtggacttcatgttgatttagctcaaattattgaagcctgtgatgtgtgtctgaaggaggatgataaagatgttgaaagtgtgatgaacagtgtggtatccctactcttgatcctggaaccagacaagcaagaagctttgattgaaagcctatgtgaaaagctggtcaaatttcgcgaaggtgaacgcccgtctctgagactgcagttgttaagcaaccttttccacgggatggataagaatactcctgtaagatacacagtgtattgcagccttattaaagtggcagcatcttgtggggccatccagtacatcccaactgagctggatcaagttagaaaatggatttctgactggaatctcaccactgaaaaaaagcacacccttttaagactactttatgaggcacttgtggattgtaagaagagtgatgctgcttcaaaagtcatggtggaattgctcggaagttacacagaggacaatgcttcccaggctcgagttgatgcccacaggtgtattgtacgagcattgaaagatccaaatgcatttctttttgaccaccttcttactttaaaaccagtcaagtttttggaaggcgagcttattcatgatcttttaaccatttttgtgagtgctaaattgggctcatatgtccacggtttatacacagtatatatagggctaaa

SEQ ID NO: 379902 - DNA, 1840 bp, Homo sapiens
  misc_feature (820)..(820): n is a, c, g, or t
acccgccccaacctacggctaggtacgaggctgggtggttgcggcgtggtcttgcgagtggagtgtccgctgtgcccgggcctgcaccatgagcgtcccggccttcatcgacatcagtgaagaagatcaggctgctgagcttcgtgcttatctgaaatctaaaggagctgagatttcagaagagaactcggaaggtggacttcatgttgatttagctcaaattattgaagcctgtgatgtgtgtctgaaggaggatgataaagatgttgaaagtgtgatgaacagtgtggtatccctactcttgatcctggaaccagacaagcaagaagctttgattgaaagcctatgtgaaaagctggtcaaatttcgcgaaggtgaacgcccgtctctgagactgcagttgttaagcaaccttttccacgggatggataagaatactcctgtaagatacacagtgtattgcagccttattaaagtggcagcatcttgtggggccatccagtacatcccaactgagctggatcaagttagaaaatggatttctgactggaatctcaccactgaaaaaaagcacacccttttaagactactttatgaggcacttgtggattgtaagaagagtgatgctgcttcaaaagtcatggtggaattgctcggaagttacacagaggacaatgcttcccaggctcgagttgatgcccacaggtgtattgtacgagcattgaaagatccaaatgcatttctttttgaccaccttcttactttaaaaaccagtcaagttttggaaggcgagcttattcatgacttttaaccattttgngagtgctaaattggcatcatatgtcaagttttatcagaataataaagacttcattgattcacttggcctgttacatgaacagaatatggcaaaaatgagactacttacttttatgggaatggcagtagaaaataaggaaatttcttttgacacaatgcagcaagaacttcagattggagctgatgatgttgaagcatttgttattgacgccgtaagaactaaaatggtctactgcaaaattgatcagacccagagaaaagtagttgtcagtcatagcacacatcggacatttggaaaacagcagtggcaacaactgtatgacacacttaatgcctggaaacaaaatctgaacaaagtgaaaaacagccttttgagtctttctgatacctgagtttttatgcttataatttttgttctttgaaaaaaaagccctaaatcatagtaaaacattataaactaaaaaaatttgcctagtctggacagttattgtctcaaatttatactaaaatcacaaactccagaggatatgaagtaataaattacaaggggtcacaatgtctgtcatacaatacataaattctgttctttaaaaaaggatattgaagaagcaatgagcactttaaagaaaggataatatacagagagaagacagaagtagagtaatacaatttcttcacattagaaaaacttggaaaagcaaagacaaactgtagagctttaaatacaacagtcattttattctagtaaaaactataccagaatttcagttacataatttcactactgaaagcacttatctacattattttaatctgttgtttttttccaacgtctcttctgcttttcttttctttggctggttgtcattttctaaacttagtaaattttcacttttatttagttgattcgtaatgaggctctgccagtcatcatcaccagaagtatttttagtcgtcttgattgcctgcaaatggctttgtagtggagttgatatcagaggctttgttttcacctcggaaa

SEQ ID NO: 379903 - DNA, 879 bp, Homo sapiens
aaatttaggctaggtacgaggctgggtggcggcgtggtcttgcgagtggagtgtccgctgtgcccgggcctgcaccatgagcgtcccggccttcatcgacatcagtgaagaagatcaggttagaaaatggatttctgactggaatctcaccactgaaaaaaagcacacccttttaagactactttatgaggcacttgtggattgtaagaagagtgatgctgcttcaaaagtcatggtggaattgctcggaagttacacagaggacaatgcttcccaggctcgagttgatgcccacaggtgtattgtacgagcattgaaagatccaaatgcatttctttttgaccaccttcttactttaaaaccagtcaagtttttggaaggcgagcttattcatgatcttttaaccatttttgtgagtgctaaattggcatcatatgtcaagttttatcagaataataaagacttcattgattcacttggcctgttacatgaacagaatatggcaaaaatgagactacttacttttatgggaatggcagtagaaaataaggaaatttcttttgacacaatgcagcaagaacttcagattggagctgatgatgttgaagcatttgttattgacgccgtaagaactaaaatggtctactgcaaaattgatcagacccagagaaaagtagttgtcagtcatagcacacatcggacatttggaaaacagcagtggcaacaactgtatgacacacttaatgcctggaaacaaaatctgaacaaagtgaaaaacagccttttgagtctttctgatacctgagtttttatgcttataatttttgttctttgaaaaaaaagccctaaatcatagtaaaacattataaactaaaaaaa

SEQ ID NO: 379904 - DNA, 1208 bp, Homo sapiens
aaatttaggctaggtacgaggctgggtggcggcgtggtcttgcgagtggagtgtccgctgtgcccgggcctgcaccatgagcgtcccggccttcatcgacatcagtgaagaagatcaggctgctgagcttcgtgcttatctgaaatctaaaggagctgagatttcagaagagaactcggaaggtggacttcatgttgatttagctcaaattattgaagcctgtgatgtgtgtctgaaggaggatgataaagatgttgaaagtgtgatgaacagtgtggtatccctactcttgatcctggaaccagacaagcaagaagctttgattgaaagcctatgtgaaaagctggtcaaatttcgcgaaggtgaacgcccgtctctgagactgcagttgttaagcaaccttttccacgggatggataagaatactcctgtaagatacacagtgtattgcagccttattaaagtggcagcatcttgtggggccatccagtacatcccaactgagctggatcaagttagaaaatggatttctgactggaatctcaccactgaacaaaagtcatggtggaattgctcggaagttacacagaggacaatgcttcccaggctcgagttgatgcccacaggtgtattgtacgagcattgaaagatccaaatgcatttctttttgaccaccttcttactttaaaaccagtcaagtttttggaaggcgagcttattcatgatcttttaaccatttttgtgagtgctaaattggcatcatatgtcaagttttatcagaataataaagacttcattgattcacttggcctgttacatgaacagaatatggcaaaaatgagactacttacttttatgggaatggcagtagaaaataaggaaatttcttttgacacaatgcagcaagaacttcagattggagctgatgatgttgaagcatttgttattgacgccgtaagaactaaaatggtctactgcaaaattgatcagacccagagaaaagtagttgtcagtcatagcacacatcggacatttggaaaacagcagtggcaacaactgtatgacacacttaatgcctggaaacaaaatctgaacaaagtgaaaaacagccttttgagtctttctgatacctgagtttttatgcttataatttttgttctttgaaaaaaaagccctaaatcatagtaaaacattataaactaaaaaaa

SEQ ID NO: 379905 - DNA, 394 bp, Homo sapiens
aaatttaggctaggtacgaggctgggtggcggcgtggtcttgcgagtggagtgtccgctgtgcccgggcctgcaccatgagcgtcccggccttcatcgacatcagtgaagaagatcaggctgctgagcttcgtgcttatctgaaatctaaaggagctgagatttcagaagagaactcggaaggtggacttcatgttgatttagctcaaattattgaagcctgtgatgtgtgtctgaaggaggatgataagcatcagtagttaccgacagaagttattcacaaaagaccaaatatatgattctatctatatgaaatgttcagaataggcaaatatatagagatagaaagagactcaatactgtatgggactgagggactgatgggagaagactgg

SEQ ID NO: 379906 - DNA, 797 bp, Homo sapiens
  misc_feature (4)..(4): n is a, c, g, or t
  misc_feature (17)..(17): n is a, c, g, or t
  misc_feature (19)..(19): n is a, c, g, or t
  misc_feature (23)..(23): n is a, c, g, or t
cagnagcgcgccattgngntggnaccccggaattcggccattatggccggggagagcagagcaccaagatcgttctggcaggaacagccagtgggaggttccagctgagcgctccccagaggtgagctgatccccagccacagcacacaggaccaggctgcgagaacagcatcatcagcatcatgctattacaatcccaaaccatgggggtttctcacagctttacaccaaagggcatcactatccctcaaagagagaaacctggacacatgtaccaaaacgaagattacctgcagaacgggctgccaacagaaaccaccgttcttgggtttggcattactggatccctctcaattatctctggaaaacaatcaactaagccctttgacctgagcagcttgacctcaaatgcagtgagttctgttactgcaggagcaggcctcttcctccttgctgacagcatggtagccctgaggactgcctctcaacattgtggctcagaaatggattatctatcctcattgccttattcggagtactattatccaatatatgaaatcaaagattgtctcctgaccagtgtcagtttaacaagttcattttcctcgacccagtcacaagatcatatccaacaggtcaaaaagagttcttcacggtcttggatataagtaactcttggcctcagaggaaggaaaagcaactcaacactcatggtcaagtgtgattagactttcctgaaatctctgccattttagatactgtgaaacaaactaaaaaaaaaaaagcttttgttttgt

SEQ ID NO: 379907 - DNA, 1121 bp, Homo sapiens
aagaatcaattattgttcatgaggtgcatgtggaaggccacttttataattaaaaaaatgagtttaacagtgaaaccccatctctactaaaaatatgaaaaactagccaggtgcagtggcacacgcctgtagtcccagctagttgggaggctgaggcaggagaattgcttgaacccaggaagtggaggttgcagtgagctgagatcacaccactgcactgcagcctgggtgacagagtgagactcagtctcaaaaaaaaaaaagagtttgtataaatgggctccttctggaggacactctggtcatctgggatcagctggtgtctactgggaagcagaccagttagagaattgcttaatatgaagctagttggttttagaaatcacatagcccaacccctcatgaaagaaccacggcttggataaaattacatagaaaatgaatgacacagactattgggctgagaatgagaacgcgtatcccctcacttttatcgggaacacagctacctgcctcccgagagagtctccctagccaagtttccttgttaatgtgatgagactttactagaatgtctctgtcctgtttatgcttccctgtgctcttccttacatccccttagctcttgatgttataattttaaaatattttcatttcccctaaaggctacaacaacaaaagaaatgtttatagaatttggatgaattatgatttaactatgatcctatttaaaatagtaaaataattagcagactggagaattgcattatttttaattaatattgctgcaattacatattatggcaaagttggaagaactagtactacacaaaacttggggaaaaggtattatgagttatcttttttaatctccgaaatcaaagtttaaaaattctaaccaattatgtattttctagagttcattttcctcgacccagtcacaagatcatatccaacaggtcaaaaagagttcttcacggtcttggatataagtaactcttggcctcagaggaaggaaaagcaactcaacactcatggtcaagtgtgattagactttcctgaaatctctgccattttagatactgtgaaacaaactaaaaaaaaaaaagcttttgttttgt

SEQ ID NO: 379908 - DNA, 2962 bp, Homo sapiens
attcacatcctgtgtaatcataaatactgctctaagaaagggacaggaagtctcagaggctggagagcagagcaccaagatcgttctggcaggaacagccagtgggaggttccagctgagcgctccccagaggtgagctgatccccagccacagcacacaggaccaggctgcgagaacagcatcatcagcatcatgctattacaatcccaaaccatgggggtttctcacagctttacaccaaagggcatcactatccctcaaagagagaaacctggacacatgtaccaaaacgaagattacctgcagaacgggctgccaacagaaaccaccgttcttgggactgtccagatcctgtgttgcctgttgatttcaagtctgggggccatcttggtttttgctccctacccctcccacttcaatccagcaatttccaccactttgatgtctgggtacccatttttaggagctctgtgttttggcattactggatccctctcaattatctctggaaaacaatcaactaagccctttgacctgagcagcttgacctcaaatgcagtgagttctgttactgcaggagcaggcctcttcctccttgctgacagcatggtagccctgaggactgcctctcaacattgtggctcagaaatggattatctatcctcattgccttattcggagtactattatccaatatatgaaatcaaagattgtctcctgaccagtgtcagtttaacaggtgtcctagtggtgatgctcatcttcactgtgctggagctcttattagctgcatacagttctgtcttttggtggaaacagctctactccaacaaccctgggagttcattttcctcgacccagtcacaagatcatatccaacaggtcaaaaagagttcttcacggtcttggatataagtaactcttggcctcagaggaaggaaaagcaactcaacactcatggtcaagtgtgattagactttcctgaaatctctgccattttagatactgtgaaacaaactaaaaaaaaaaaagcttttgttttgtatttgtttactatgagtcgttatttaatttctcttgaaaataatttcctcaaagcccaagtcagtaaaatgttatcagccagtcttccaaaatggtcataaactttataaactgctttgggtaaactgagcagaaggtgatacacagaagggaaaatgtgcactcatgctagtgtgaatttggtaagtcgcgtgactctgcaggctgtttctgtattattttcacactcatattgcttaaatattacatattagggattgtaagaaaactttaattaaaaattaaagactatatataattaaactactctgccctggacactctctgagaaacagatctactgggccctttttcatgagccattaggtggaagacagcaaagagatcttctcaagtgcttaggattacctctcaacacacagcaagcatgtccctgcctcccatgaatcttaccatgtaaatccaaatctctgcaatcctgtggcaccaaccagtggtgctcattctattgtttaaaaatggccttcttggctgggcgcggtggctcactcctgtaatcccagcactttggtaggccgaggtggacggatcacccgaggtcaggagtttgagaccagcctggccaacaaggtgaaaccctgtctctactaaaaatacaaaaaattagccaggcatggtggtgcgcacctgtagttccagctacttgggaggctgaggcagaagaatcacttgaacccgggaaggggaggttgcagtgagcggagactgcaccactgcattccagcccggcctacaagaacaaaactccatctcaaaataaataaaaaaataaataaaaataaaaatagactatatatagtctttgaattcatttattttaaataaatgaataaaataaaataaaaaagaatattcagtcgttggcacataaactatgttctcttctgtcatttcagggtaggagtcaatgaagacatcttagtcttaacaagttacagataatctctgactggcatgttttctgcttctagcttggagctaaatgctgctcatgctgaaaagaataatgtctatttctttgtttgggtattagctctattttgatctatagcacagttttgtaattcagatcatcacccctgcactttgtaccacatgggcgtattctttcttcccagtcattgctgcaattatcttgtctgttctttgtgtaatatgttctgtgtgagcctctgcattaaactcgatttcttgggcaattatggaaattccagtgtggctgcagtttaactttgcactctctatgcatatgaggtttcctaaataaatgaggagtagcatagtttaaaatatatatatcttataactttctacaacaaagaattattgagtccaaatgtcatcagtgctcattttgagataccctgctatcgatggtcgctacaaaccaggaaatactcaagttattatgtgtatacattggttttagttttatgaaacaatttaccttcatgatctcatatctaaaggcagtttctgttgttttaattagtatttgtgtagttcaaaccaggaaggatttgactatcattagattttgcttaactttatgaaagctaaaatattctctgttataaaggggcaactccatctggtcctatagcatctttactactgatttttttttgtttaatttgaaaatgcaaagaattgttaaatgttcttaaatgttctcactacaaaaaaagaaaaaagataactacgtgaggtgatggatatgttaattagctggattgtggtaatcattttggaatgtatatgtatatcaaaacatgtagtacaccctaaatatatataatttttatttgtcaaatatacctcaataaagatggaaaaaaatcgaaattcaaagttatc

SEQ ID NO: 379909 - DNA, 4005 bp, Homo sapiens
atctttatcagtgctaaccagtgtgcatgttcttgcttggaaaaaccttgcgggaggccaggaggcaaaaggcggcaaggcctcgactttccttctatcattgccccacgtcacatttcccctattcaagaagagcagcagagagacttaatctgtcttcctgcagagcagggggcaagagggaatggtaatacaatgggtataccagcacaggatttcttacctggcattacagcatacctctagaaaagtggatgattttccatatccctctttgaggctttgatgaggccattggattccctccattgtaagaataatcaacttttcaggtagagagtgagaaggccatttttaaacaataaaacgagcaccactggttgatgccacaggtttgcagagatttggattaacaagggtaagattcatgggaggcagggacatgcttgctgtgtgtccagaggtaaccctgagcactagagaaactctctttgctgccttccacctaatggctcatgaaaaagggcccagtagatccatttttcagagagtggccagggcagactcacacttcccacaaagggttatttcttctccacgtagtatttggtacaaaggataaaaatcaaatattctgggcaaatgaactatactaaggtaccacttctgtgtggatacagtccctgtgtgaacacaaactgtgcagtcacataaggaggccctggtcctgccccagagcacaatttgtccttgacttctcctgtaaccagtggttgtgggccccacatctccttagagaagctagcgttagctcatactggaccctctttgcctgtgattattcaatatccaagccacacacttaagcaacttttcagcttctcagaatacccttcctctgccagctggatctttaataccactgagattaaatactgatttctggggctttatgataaagacttcacgtctgagcctgctcttcccactttcctcgactcccattctgactcaagcaacatacaccaataacttccagtccatgtgtttctgcaccttgtcccatcagagcctctttcctgagtgcttctgttggctgttccaatctctctgtccattcaagtcattggtccatctcaacctcctctctttcaaccctgtaatttagtaacactcttctccttcccaggtacaccttttctccaggcctcctcagttcctagtgatttccactaaaacaaatccaacccctctgtgcatctgcatgtcattcaaagtcaatatagacattcttatatcaggtgggaattaggcctatctagcaatatagatccacaagatttctgcagtgttctctccctaaaagttttccaacatcactttttgattgagtgattgacagtgacatggtgggcacatttccacaagacaactgaactgatcatttctctctcttctgggcagtttggcattactggatccctctcaattatctctggaaaacaatcaactaagccctttgacctgagcagcttgacctcaaatgcagtgagttctgttactgcaggagcaggcctcttcctccttgctgacagcatggtagccctgaggactgcctctcaacattgtggctcagaaatggattatctatcctcattgccttattcggagtactattatccaatatatgaaatcaaagattgtctcctgaccagtgtcagtttaacaggtgtcctagtggtgatgctcatcttcactgtgctggagctcttattagctgcatacagttctgtcttttggtggaaacagctctactccaacaaccctgggagttcattttcctcgacccagtcacaagatcatatccaacaggtcaaaaagagttcttcacggtcttggatataagtaactcttggcctcagaggaaggaaaagcaactcaacactcatggtcaagtgtgattagactttcctgaaatctctgccattttagatactgtgaaacaaactaaaaaaaaaaaagcttttgttttgtatttgtttactatgagtcgttatttaatttctcttgaaaataatttcctcaaagcccaagtcagtaaaatgttatcagccagtcttccaaaatggtcataaactttataaactgctttgggtaaactgagcagaaggtgatacacagaagggaaaatgtgcactcatgctagtgtgaatttggtaagtcgcgtgactctgcaggctgtttctgtattattttcacactcatattgcttaaatattacatattagggattgtaagaaaactttaattaaaaattaaagactatatataattaaactactctgccctggacactctctgagaaacagatctactgggccctttttcatgagccattaggtggaagacagcaaagagatcttctcaagtgcttaggattacctctcaacacacagcaagcatgtccctgcctcccatgaatcttaccatgtaaatccaaatctctgcaatcctgtggcaccaaccagtggtgctcattctattgtttaaaaatggccttcttggctgggcgcggtggctcactcctgtaatcccagcactttggtaggccgaggtggacggatcacccgaggtcaggagtttgagaccagcctggccaacaaggtgaaaccctgtctctactaaaaatacaaaaaattagccaggcatggtggtgcgcacctgtagttccagctacttgggaggctgaggcagaagaatcacttgaacccgggaaggggaggttgcagtgagcggagactgcaccactgcattccagcccggcctacaagaacaaaactccatctcaaaataaataaaaaaataaataaaaataaaaatagactatatatagtctttgaattcatttattttaaataaatgaataaaataaaataaaaaagaatattcagtcgttggcacataaactatgttctcttctgtcatttcagggtaggagtcaatgaagacatcttagtcttaacaagttacagataatctctgactggcatgttttctgcttctagcttggagctaaatgctgctcatgctgaaaagaataatgtctatttctttgtttgggtattagctctattttgatctatagcacagttttgtaattcagatcatcacccctgcactttgtaccacatgggcgtattctttcttcccagtcattgctgcaattatcttgtctgttctttgtgtaatatgttctgtgtgagcctctgcattaaactcgatttcttgggcaattatggaaattccagtgtggctgcagtttaactttgcactctctatgcatatgaggtttcctaaataaatgaggagtagcatagtttaaaatatatatatcttataactttctacaacaaagaattattgagtccaaatgtcatcagtgctcattttgagataccctgctatcgatggtcgctacaaaccaggaaatactcaagttattatgtgtatacattggttttagttttatgaaacaatttaccttcatgatctcatagttaaaattgtaataaatttaggaatataaaggatcaatatgggaagcaaaatttctaaaggcagtttctgttgttttaattagtatttgtgtagttcaaaccaggaaggatttgactatcattagattttgcttaactttatgaaagctaaaatattctctgttataaaggggcaactccatctggtcctatagcatctttactactgatttttttttgtttaatttgaaaatgcaaagaattgttaaatgttcttaaatgttctcactacaaaaaaagaaaaaagataactacgtgaggtgatggatatgttaattagctggattgtggtaatcattttggaatgtatatgtatatcaaaacatgtagtacaccctaaatatatataatttttatttgtcaaatatacctcaataaagatggaaaaaaatcgaaattcaaagttatc

SEQ ID NO: 379910 - DNA, 3135 bp, Homo sapiens
tttagagcaagctaacagctaaacttcagttcttccacttgcgaaataattattattaaaatccaatgatgaacaaaataagatgaattacagcagaagagatgacctgctcttcccactttcctcgactcccattctgactcaagcaacatacaccaataacttccagtccatgtgtttctgcaccttgtcccatcagagcctctttcctgagtgcttctgttggctgttccaatctctctgtccattcaagtcattggtccatctcaacctcctctctttcaaccctgtaatttagtaacactcttctccttcccaggtacaccttttctccaggcctcctcagttcctagtgatttccactaaaacaaatccaacccctctgtgcatctgcatgtcattcaaagtcaatatagacattcttatatcaggtgggaattaggcctatctagcaatatagatccacaagatttctgcagtgttctctccctaaaagttttccaacatcactttttgattgagtgattgacagtgacatggtgggcacatttccacaagacaactgaactgatcatttctctctcttctgggcagtttggcattactggatccctctcaattatctctggaaaacaatcaactaagccctttgacctgagcagcttgacctcaaatgcagtgagttctgttactgcaggagcaggcctcttcctccttgctgacagcatggtagccctgaggactgcctctcaacattgtggctcagaaatggattatctatcctcattgccttattcggagtactattatccaatatatgaaatcaaagattgtctcctgaccagtgtcagtttaacaggtgtcctagtggtgatgctcatcttcactgtgctggagctcttattagctgcatacagttctgtcttttggtggaaacagctctactccaacaaccctgggagttcattttcctcgacccagtcacaagatcatatccaacaggtcaaaaagagttcttcacggtcttggatataagtaactcttggcctcagaggaaggaaaagcaactcaacactcatggtcaagtgtgattagactttcctgaaatctctgccattttagatactgtgaaacaaactaaaaaaaaaaaagcttttgttttgtatttgtttactatgagtcgttatttaatttctcttgaaaataatttcctcaaagcccaagtcagtaaaatgttatcagccagtcttccaaaatggtcataaactttataaactgctttgggtaaactgagcagaaggtgatacacagaagggaaaatgtgcactcatgctagtgtgaatttggtaagtcgcgtgactctgcaggctgtttctgtattattttcacactcatattgcttaaatattacatattagggattgtaagaaaactttaattaaaaattaaagactatatataattaaactactctgccctggacactctctgagaaacagatctactgggccctttttcatgagccattaggtggaagacagcaaagagatcttctcaagtgcttaggattacctctcaacacacagcaagcatgtccctgcctcccatgaatcttaccatgtaaatccaaatctctgcaatcctgtggcaccaaccagtggtgctcattctattgtttaaaaatggccttcttggctgggcgcggtggctcactcctgtaatcccagcactttggtaggccgaggtggacggatcacccgaggtcaggagtttgagaccagcctggccaacaaggtgaaaccctgtctctactaaaaatacaaaaaattagccaggcatggtggtgcgcacctgtagttccagctacttgggaggctgaggcagaagaatcacttgaacccgggaaggggaggttgcagtgagcggagactgcaccactgcattccagcccggcctacaagaacaaaactccatctcaaaataaataaaaaaataaataaaaataaaaatagactatatatagtctttgaattcatttattttaaataaatgaataaaataaaataaaaaagaatattcagtcgttggcacataaactatgttctcttctgtcatttcagggtaggagtcaatgaagacatcttagtcttaacaagttacagataatctctgactggcatgttttctgcttctagcttggagctaaatgctgctcatgctgaaaagaataatgtctatttctttgtttgggtattagctctattttgatctatagcacagttttgtaattcagatcatcacccctgcactttgtaccacatgggcgtattctttcttcccagtcattgctgcaattatcttgtctgttctttgtgtaatatgttctgtgtgagcctctgcattaaactcgatttcttgggcaattatggaaattccagtgtggctgcagtttaactttgcactctctatgcatatgaggtttcctaaataaatgaggagtagcatagtttaaaatatatatatcttataactttctacaacaaagaattattgagtccaaatgtcatcagtgctcattttgagataccctgctatcgatggtcgctacaaaccaggaaatactcaagttattatgtgtatacattggttttagttttatgaaacaatttaccttcatgatctcatagttaaaattgtaataaatttaggaatataaaggatcaatatgggaagcaaaatttctaaaggcagtttctgttgttttaattagtatttgtgtagttcaaaccaggaaggatttgactatcattagattttgcttaactttatgaaagctaaaatattctctgttataaaggggcaactccatctggtcctatagcatctttactactgatttttttttgtttaatttgaaaatgcaaagaattgttaaatgttcttaaatgttctcactacaaaaaaagaaaaaagataactacgtgaggtgatggatatgttaattagctggattgtggtaatcattttggaatgtatatgtatatcaaaacatgtagtacaccctaaatatatataatttttatttgtcaaatatacctcaataaagatggaaaaaaatcgaaattcaaagttatc

SEQ ID NO: 379911 - DNA, 2827 bp, Homo sapiens
attcacatcctgtgtaatcataaatactgctctaagaaagggacaggaagtctcagaggctggagagcagagcaccaagatcgttctggcaggaacagccagtgggaggttccagctgagcgctccccagaggtgagctgatccccagccacagcacacaggaccaggctgcgagaacagcatcatcagcatcatgctattacaatcccaaaccatgggggtttctcacagctttacaccaaagggcatcactatccctcaaagagagaaacctggacacatgtaccaaaacgaagattacctgcagaacgggctgccaacagaaaccaccgttcttgggtttggcattactggatccctctcaattatctctggttctgttactgcaggagcaggcctcttcctccttgctgacagcatggtagccctgaggactgcctctcaacattgtggctcagaaatggattatctatcctcattgccttattcggagtactattatccaatatatgaaatcaaagattgtctcctgaccagtgtcagtttaacaggtgtcctagtggtgatgctcatcttcactgtgctggagctcttattagctgcatacagttctgtcttttggtggaaacagctctactccaacaaccctgggagttcattttcctcgacccagtcacaagatcatatccaacaggtcaaaaagagttcttcacggtcttggatataagtaactcttggcctcagaggaaggaaaagcaactcaacactcatggtcaagtgtgattagactttcctgaaatctctgccattttagatactgtgaaacaaactaaaaaaaaaaaagcttttgttttgtatttgtttactatgagtcgttatttaatttctcttgaaaataatttcctcaaagcccaagtcagtaaaatgttatcagccagtcttccaaaatggtcataaactttataaactgctttgggtaaactgagcagaaggtgatacacagaagggaaaatgtgcactcatgctagtgtgaatttggtaagtcgcgtgactctgcaggctgtttctgtattattttcacactcatattgcttaaatattacatattagggattgtaagaaaactttaattaaaaattaaagactatatataattaaactactctgccctggacactctctgagaaacagatctactgggccctttttcatgagccattaggtggaagacagcaaagagatcttctcaagtgcttaggattacctctcaacacacagcaagcatgtccctgcctcccatgaatcttaccatgtaaatccaaatctctgcaatcctgtggcaccaaccagtggtgctcattctattgtttaaaaatggccttcttggctgggcgcggtggctcactcctgtaatcccagcactttggtaggccgaggtggacggatcacccgaggtcaggagtttgagaccagcctggccaacaaggtgaaaccctgtctctactaaaaatacaaaaaattagccaggcatggtggtgcgcacctgtagttccagctacttgggaggctgaggcagaagaatcacttgaacccgggaaggggaggttgcagtgagcggagactgcaccactgcattccagcccggcctacaagaacaaaactccatctcaaaataaataaaaaaataaataaaaataaaaatagactatatatagtctttgaattcatttattttaaataaatgaataaaataaaataaaaaagaatattcagtcgttggcacataaactatgttctcttctgtcatttcagggtaggagtcaatgaagacatcttagtcttaacaagttacagataatctctgactggcatgttttctgcttctagcttggagctaaatgctgctcatgctgaaaagaataatgtctatttctttgtttgggtattagctctattttgatctatagcacagttttgtaattcagatcatcacccctgcactttgtaccacatgggcgtattctttcttcccagtcattgctgcaattatcttgtctgttctttgtgtaatatgttctgtgtgagcctctgcattaaactcgatttcttgggcaattatggaaattccagtgtggctgcagtttaactttgcactctctatgcatatgaggtttcctaaataaatgaggagtagcatagtttaaaatatatatatcttataactttctacaacaaagaattattgagtccaaatgtcatcagtgctcattttgagataccctgctatcgatggtcgctacaaaccaggaaatactcaagttattatgtgtatacattggttttagttttatgaaacaatttaccttcatgatctcatagttaaaattgtaataaatttaggaatataaaggatcaatatgggaagcaaaatttctaaaggcagtttctgttgttttaattagtatttgtgtagttcaaaccaggaaggatttgactatcattagattttgcttaactttatgaaagctaaaatattctctgttataaaggggcaactccatctggtcctatagcatctttactactgatttttttttgtttaatttgaaaatgcaaagaattgttaaatgttcttaaatgttctcactacaaaaaaagaaaaaagataactacgtgaggtgatggatatgttaattagctggattgtggtaatcattttggaatgtatatgtatatcaaaacatgtagtacaccctaaatatatataatttttatttgtcaaatatacctcaataaagatggaaaaaaatcgaaattcaaagttatc

SEQ ID NO: 379912 - DNA, 2914 bp, Homo sapiens
attcacatcctgtgtaatcataaatactgctctaagaaagggacaggaagtctcagaggctggagagcagagcaccaagatcgttctggcaggaacagccagtgggaggttccagctgagcgctccccagagcatcatcagcatcatgctattacaatcccaaaccatgggggtttctcacagctttacaccaaagggcatcactatccctcaaagagagaaacctggacacatgtaccaaaacgaagattacctgcagaacgggctgccaacagaaaccaccgttcttgggactgtccagatcctgtgttgcctgttgatttcaagtctgggggccatcttggtttttgctccctacccctcccacttcaatccagcaatttccaccactttgatgtctgggtacccatttttaggagctctgtgttttggcattactggatccctctcaattatctctggttctgttactgcaggagcaggcctcttcctccttgctgacagcatggtagccctgaggactgcctctcaacattgtggctcagaaatggattatctatcctcattgccttattcggagtactattatccaatatatgaaatcaaagattgtctcctgaccagtgtcagtttaacaggtgtcctagtggtgatgctcatcttcactgtgctggagctcttattagctgcatacagttctgtcttttggtggaaacagctctactccaacaaccctgggagttcattttcctcgacccagtcacaagatcatatccaacaggtcaaaaagagttcttcacggtcttggatataagtaactcttggcctcagaggaaggaaaagcaactcaacactcatggtcaagtgtgattagactttcctgaaatctctgccattttagatactgtgaaacaaactaaaaaaaaaaaagcttttgttttgtatttgtttactatgagtcgttatttaatttctcttgaaaataatttcctcaaagcccaagtcagtaaaatgttatcagccagtcttccaaaatggtcataaactttataaactgctttgggtaaactgagcagaaggtgatacacagaagggaaaatgtgcactcatgctagtgtgaatttggtaagtcgcgtgactctgcaggctgtttctgtattattttcacactcatattgcttaaatattacatattagggattgtaagaaaactttaattaaaaattaaagactatatataattaaactactctgccctggacactctctgagaaacagatctactgggccctttttcatgagccattaggtggaagacagcaaagagatcttctcaagtgcttaggattacctctcaacacacagcaagcatgtccctgcctcccatgaatcttaccatgtaaatccaaatctctgcaatcctgtggcaccaaccagtggtgctcattctattgtttaaaaatggccttcttggctgggcgcggtggctcactcctgtaatcccagcactttggtaggccgaggtggacggatcacccgaggtcaggagtttgagaccagcctggccaacaaggtgaaaccctgtctctactaaaaatacaaaaaattagccaggcatggtggtgcgcacctgtagttccagctacttgggaggctgaggcagaagaatcacttgaacccgggaaggggaggttgcagtgagcggagactgcaccactgcattccagcccggcctacaagaacaaaactccatctcaaaataaataaaaaaataaataaaaataaaaatagactatatatagtctttgaattcatttattttaaataaatgaataaaataaaataaaaaagaatattcagtcgttggcacataaactatgttctcttctgtcatttcagggtaggagtcaatgaagacatcttagtcttaacaagttacagataatctctgactggcatgttttctgcttctagcttggagctaaatgctgctcatgctgaaaagaataatgtctatttctttgtttgggtattagctctattttgatctatagcacagttttgtaattcagatcatcacccctgcactttgtaccacatgggcgtattctttcttcccagtcattgctgcaattatcttgtctgttctttgtgtaatatgttctgtgtgagcctctgcattaaactcgatttcttgggcaattatggaaattccagtgtggctgcagtttaactttgcactctctatgcatatgaggtttcctaaataaatgaggagtagcatagtttaaaatatatatatcttataactttctacaacaaagaattattgagtccaaatgtcatcagtgctcattttgagataccctgctatcgatggtcgctacaaaccaggaaatactcaagttattatgtgtatacattggttttagttttatgaaacaatttaccttcatgatctcatagttaaaattgtaataaatttaggaatataaaggatcaatatgggaagcaaaatttctaaaggcagtttctgttgttttaattagtatttgtgtagttcaaaccaggaaggatttgactatcattagattttgcttaactttatgaaagctaaaatattctctgttataaaggggcaactccatctggtcctatagcatctttactactgatttttttttgtttaatttgaaaatgcaaagaattgttaaatgttcttaaatgttctcactacaaaaaaagaaaaaagataactacgtgaggtgatggatatgttaattagctggattgtggtaatcattttggaatgtatatgtatatcaaaacatgtagtacaccctaaatatatataatttttatttgtcaaatatacctcaataaagatggaaaaaaatcgaaattcaaagttatc

SEQ ID NO: 379913 - DNA, 1045 bp, Homo sapiens
attcacatcctgtgtaatcataaatactgctctaagaaagggacaggaagtctcagaggctggagagcagagcaccaagatcgttctggcaggaacagccagtgggaggttccagctgagcgctccccagaggtgagctgatccccagccacagcacacaggaccaggctgcgagaacagcatcatcagcatcatgctattacaatcccaaaccatgggggtttctcacagctttacaccaaagggcatcactatccctcaaagagagaaacctggacacatgtaccaaaacgaagattacctgcagaacgggctgccaacagaaaccaccgttcttgggactgtccagatcctgtgttgcctgttgatttcaagtctgggggccatcttggtttttgctccctacccctcccacttcaatccagcaatttccaccactttgatgtctgggtacccatttttaggagctctgtgttttggcattactggatccctctcaattatctctggaaaacaatcaactaagccctttgacctgagcagcttgacctcaaatgcagtgagttctgttactgcaggagcaggcctcttcctccttgctgacagcatggtagccctgaggactgcctctcaacattgtggctcagaaatggattatctatcctcattgccttattcggagtactattatccaatatatgaaatcaaagattgtctcctgaccagtgtcagtttaacaggtgtcctagtggtgatgctcatcttcactgtgctggagctcttattagctgcatacagttctgtcttttggtggaaacagctctactccaacaaccctgggagttcattttcctcgacccagtcacaagatcatatccaacaggtcaaaaagagttcttcacggtcttggatataagtaactcttggcctcagaggaaggaaaagcaactcaacactcatggtcaagtgtgattagactttcctgaaatctctgccattttagatactgtgaaacaaactaaaaaaaaaaaagcttttgttttgt

SEQ ID NO: 379914 - DNA, 3903 bp, Homo sapiens
atctttatcagtgctaaccagtgtgcatgttcttgcttggaaaaaccttgcgggaggccaggaggcaaaaggcggcaaggcctcgactttccttctatcattgccccacgtcacatttcccctattcaagaagagcagcagagagacttaatctgtcttcctgcagagcagggggcaagagggaatggtaatacaatgggtataccagcacaggatttcttacctggcattacagcatacctctagaaaagtggatgattttccatatccctctttgaggctttgatgaggccattggattccctccattgtaagaataatcaacttttcaggtagagagtgagaaggccatttttaaacaataaaacgagcaccactggttgatgccacaggtttgcagagatttggattaacaagggtaagattcatgggaggcagggacatgcttgctgtgtgtccagaggtaaccctgagcactagagaaactctctttgctgccttccacctaatggctcatgaaaaagggcccagtagatccatttttcagagagtggccagggcagactcacacttcccacaaagggttatttcttctccacgtagtatttggtacaaaggataaaaatcaaatattctgggcaaatgaactatactaaggtaccacttctgtgtggatacagtccctgtgtgaacacaaactgtgcagtcacataaggaggccctggtcctgccccagagcacaatttgtccttgacttctcctgtaaccagtggttgtgggccccacatctccttagagaagctagcgttagctcatactggaccctctttgcctgtgattattcaatatccaagccacacacttaagcaacttttcagcttctcagaatacccttcctctgccagctggatctttaataccactgagattaaatactgatttctggggctttatgataaagacttcacgtctgagcctgctcttcccactttcctcgactcccattctgactcaagcaacatacaccaataacttccagtccatgtgtttctgcaccttgtcccatcagagcctctttcctgagtgcttctgttggctgttccaatctctctgtccattcaagtcattggtccatctcaacctcctctctttcaaccctgtaatttagtaacactcttctccttcccaggtacaccttttctccaggcctcctcagttcctagtgatttccactaaaacaaatccaacccctctgtgcatctgcatgtcattcaaagtcaatatagacattcttatatcaggtgggaattaggcctatctagcaatatagatccacaagatttctgcagtgttctctccctaaaagttttccaacatcactttttgattgagtgattgacagtgacatggtgggcacatttccacaagacaactgaactgatcatttctctctcttctgggcagtttggcattactggatccctctcaattatctctggaaaacaatcaactaagccctttgacctgagcagcttgacctcaaatgcagtgagttctgttactgcaggagcaggcctcttcctccttgctgacagcatggtagccctgaggactgcctctcaacattgtggctcagaaatggattatctatcctcattgccttattcggagtactattatccaatatatgaaatcaaagattgtctcctgaccagtgtcagtttaacaagttcattttcctcgacccagtcacaagatcatatccaacaggtcaaaaagagttcttcacggtcttggatataagtaactcttggcctcagaggaaggaaaagcaactcaacactcatggtcaagtgtgattagactttcctgaaatctctgccattttagatactgtgaaacaaactaaaaaaaaaaaagcttttgttttgtatttgtttactatgagtcgttatttaatttctcttgaaaataatttcctcaaagcccaagtcagtaaaatgttatcagccagtcttccaaaatggtcataaactttataaactgctttgggtaaactgagcagaaggtgatacacagaagggaaaatgtgcactcatgctagtgtgaatttggtaagtcgcgtgactctgcaggctgtttctgtattattttcacactcatattgcttaaatattacatattagggattgtaagaaaactttaattaaaaattaaagactatatataattaaactactctgccctggacactctctgagaaacagatctactgggccctttttcatgagccattaggtggaagacagcaaagagatcttctcaagtgcttaggattacctctcaacacacagcaagcatgtccctgcctcccatgaatcttaccatgtaaatccaaatctctgcaatcctgtggcaccaaccagtggtgctcattctattgtttaaaaatggccttcttggctgggcgcggtggctcactcctgtaatcccagcactttggtaggccgaggtggacggatcacccgaggtcaggagtttgagaccagcctggccaacaaggtgaaaccctgtctctactaaaaatacaaaaaattagccaggcatggtggtgcgcacctgtagttccagctacttgggaggctgaggcagaagaatcacttgaacccgggaaggggaggttgcagtgagcggagactgcaccactgcattccagcccggcctacaagaacaaaactccatctcaaaataaataaaaaaataaataaaaataaaaatagactatatatagtctttgaattcatttattttaaataaatgaataaaataaaataaaaaagaatattcagtcgttggcacataaactatgttctcttctgtcatttcagggtaggagtcaatgaagacatcttagtcttaacaagttacagataatctctgactggcatgttttctgcttctagcttggagctaaatgctgctcatgctgaaaagaataatgtctatttctttgtttgggtattagctctattttgatctatagcacagttttgtaattcagatcatcacccctgcactttgtaccacatgggcgtattctttcttcccagtcattgctgcaattatcttgtctgttctttgtgtaatatgttctgtgtgagcctctgcattaaactcgatttcttgggcaattatggaaattccagtgtggctgcagtttaactttgcactctctatgcatatgaggtttcctaaataaatgaggagtagcatagtttaaaatatatatatcttataactttctacaacaaagaattattgagtccaaatgtcatcagtgctcattttgagataccctgctatcgatggtcgctacaaaccaggaaatactcaagttattatgtgtatacattggttttagttttatgaaacaatttaccttcatgatctcatagttaaaattgtaataaatttaggaatataaaggatcaatatgggaagcaaaatttctaaaggcagtttctgttgttttaattagtatttgtgtagttcaaaccaggaaggatttgactatcattagattttgcttaactttatgaaagctaaaatattctctgttataaaggggcaactccatctggtcctatagcatctttactactgatttttttttgtttaatttgaaaatgcaaagaattgttaaatgttcttaaatgttctcactacaaaaaaagaaaaaagataactacgtgaggtgatggatatgttaattagctggattgtggtaatcattttggaatgtatatgtatatcaaaacatgtagtacaccctaaatatatataatttttatttgtcaaatatacctcaataaagatggaaaaaaatcgaaattcaaagttatc

SEQ ID NO: 379915 - DNA, 3092 bp, Homo sapiens
aagaatcaattattgttcatgaggtgcatgtggaaggccacttttataattaaaaaaatgagtttaacagtgaaaccccatctctactaaaaatatgaaaaactagccaggtgcagtggcacacgcctgtagtcccagctagttgggaggctgaggcaggagaattgcttgaacccaggaagtggaggttgcagtgagctgagatcacaccactgcactgcagcctgggtgacagagtgagactcagtctcaaaaaaaaaaaagagtttgtataaatgggctccttctggaggacactctggtcatctgggatcagctggtgtctactgggaagcagaccagttagagaattgcttaatatgaagctagttggttttagaaatcacatagcccaacccctcatgaaagaaccacggcttggataaaattacatagaaaatgaatgacacagactattgggctgagaatgagaacgcgtatcccctcacttttatcgggaacacagctacctgcctcccgagagagtctccctagccaagtttccttgttaatgtgatgagactttactagaatgtctctgtcctgtttatgcttccctgtgctcttccttacatccccttagctcttgatgttataattttaaaatattttcatttcccctaaaggctacaacaacaaaagaaatgtttatagaatttggatgaattatgatttaactatgatcctatttaaaatagtaaaataattagcagactggagaattgcattatttttaattaatattgctgcaattacatattatggcaaagttggaagaactagtactacacaaaacttggggaaaaggtattatgagttatcttttttaatctccgaaatcaaagtttaaaaattctaaccaattatgtattttctagagttcattttcctcgacccagtcacaagatcatatccaacaggtcaaaaagagttcttcacggtcttggatataagtaactcttggcctcagaggaaggaaaagcaactcaacactcatggtcaagtgtgattagactttcctgaaatctctgccattttagatactgtgaaacaaactaaaaaaaaaaaagcttttgttttgtatttgtttactatgagtcgttatttaatttctcttgaaaataatttcctcaaagcccaagtcagtaaaatgttatcagccagtcttccaaaatggtcataaactttataaactgctttgggtaaactgagcagaaggtgatacacagaagggaaaatgtgcactcatgctagtgtgaatttggtaagtcgcgtgactctgcaggctgtttctgtattattttcacactcatattgcttaaatattacatattagggattgtaagaaaactttaattaaaaattaaagactatatataattaaactactctgccctggacactctctgagaaacagatctactgggccctttttcatgagccattaggtggaagacagcaaagagatcttctcaagtgcttaggattacctctcaacacacagcaagcatgtccctgcctcccatgaatcttaccatgtaaatccaaatctctgcaatcctgtggcaccaaccagtggtgctcattctattgtttaaaaatggccttcttggctgggcgcggtggctcactcctgtaatcccagcactttggtaggccgaggtggacggatcacccgaggtcaggagtttgagaccagcctggccaacaaggtgaaaccctgtctctactaaaaatacaaaaaattagccaggcatggtggtgcgcacctgtagttccagctacttgggaggctgaggcagaagaatcacttgaacccgggaaggggaggttgcagtgagcggagactgcaccactgcattccagcccggcctacaagaacaaaactccatctcaaaataaataaaaaaataaataaaaataaaaatagactatatatagtctttgaattcatttattttaaataaatgaataaaataaaataaaaaagaatattcagtcgttggcacataaactatgttctcttctgtcatttcagggtaggagtcaatgaagacatcttagtcttaacaagttacagataatctctgactggcatgttttctgcttctagcttggagctaaatgctgctcatgctgaaaagaataatgtctatttctttgtttgggtattagctctattttgatctatagcacagttttgtaattcagatcatcacccctgcactttgtaccacatgggcgtattctttcttcccagtcattgctgcaattatcttgtctgttctttgtgtaatatgttctgtgtgagcctctgcattaaactcgatttcttgggcaattatggaaattccagtgtggctgcagtttaactttgcactctctatgcatatgaggtttcctaaataaatgaggagtagcatagtttaaaatatatatatcttataactttctacaacaaagaattattgagtccaaatgtcatcagtgctcattttgagataccctgctatcgatggtcgctacaaaccaggaaatactcaagttattatgtgtatacattggttttagttttatgaaacaatttaccttcatgatctcatagttaaaattgtaataaatttaggaatataaaggatcaatatgggaagcaaaatttctaaaggcagtttctgttgttttaattagtatttgtgtagttcaaaccaggaaggatttgactatcattagattttgcttaactttatgaaagctaaaatattctctgttataaaggggcaactccatctggtcctatagcatctttactactgatttttttttgtttaatttgaaaatgcaaagaattgttaaatgttcttaaatgttctcactacaaaaaaagaaaaaagataactacgtgaggtgatggatatgttaattagctggattgtggtaatcattttggaatgtatatgtatatcaaaacatgtagtacaccctaaatatatataatttttatttgtcaaatatacctcaataaagatggaaaaaaatcgaaattcaaagttatc

SEQ ID NO: 379916 - DNA, 2181 bp, Homo sapiens
ctcctagagtatccccacgtaatatgtaaccaagatcatatccaacaggtcaaaaagagttcttcacggtcttggatataagtaactcttggcctcagaggaaggaaaagcaactcaacactcatggtcaagtgtgattagactttcctgaaatctctgccattttagatactgtgaaacaaactaaaaaaaaaaaagcttttgttttgtatttgtttactatgagtcgttatttaatttctcttgaaaataatttcctcaaagcccaagtcagtaaaatgttatcagccagtcttccaaaatggtcataaactttataaactgctttgggtaaactgagcagaaggtgatacacagaagggaaaatgtgcactcatgctagtgtgaatttggtaagtcgcgtgactctgcaggctgtttctgtattattttcacactcatattgcttaaatattacatattagggattgtaagaaaactttaattaaaaattaaagactatatataattaaactactctgccctggacactctctgagaaacagatctactgggccctttttcatgagccattaggtggaagacagcaaagagatcttctcaagtgcttaggattacctctcaacacacagcaagcatgtccctgcctcccatgaatcttaccatgtaaatccaaatctctgcaatcctgtggcaccaaccagtggtgctcattctattgtttaaaaatggccttcttggctgggcgcggtggctcactcctgtaatcccagcactttggtaggccgaggtggacggatcacccgaggtcaggagtttgagaccagcctggccaacaaggtgaaaccctgtctctactaaaaatacaaaaaattagccaggcatggtggtgcgcacctgtagttccagctacttgggaggctgaggcagaagaatcacttgaacccgggaaggggaggttgcagtgagcggagactgcaccactgcattccagcccggcctacaagaacaaaactccatctcaaaataaataaaaaaataaataaaaataaaaatagactatatatagtctttgaattcatttattttaaataaatgaataaaataaaataaaaaagaatattcagtcgttggcacataaactatgttctcttctgtcatttcagggtaggagtcaatgaagacatcttagtcttaacaagttacagataatctctgactggcatgttttctgcttctagcttggagctaaatgctgctcatgctgaaaagaataatgtctatttctttgtttgggtattagctctattttgatctatagcacagttttgtaattcagatcatcacccctgcactttgtaccacatgggcgtattctttcttcccagtcattgctgcaattatcttgtctgttctttgtgtaatatgttctgtgtgagcctctgcattaaactcgatttcttgggcaattatggaaattccagtgtggctgcagtttaactttgcactctctatgcatatgaggtttcctaaataaatgaggagtagcatagtttaaaatatatatatcttataactttctacaacaaagaattattgagtccaaatgtcatcagtgctcattttgagataccctgctatcgatggtcgctacaaaccaggaaatactcaagttattatgtgtatacattggttttagttttatgaaacaatttaccttcatgatctcatagttaaaattgtaataaatttaggaatataaaggatcaatatgggaagcaaaatttctaaaggcagtttctgttgttttaattagtatttgtgtagttcaaaccaggaaggatttgactatcattagattttgcttaactttatgaaagctaaaatattctctgttataaaggggcaactccatctggtcctatagcatctttactactgatttttttttgtttaatttgaaaatgcaaagaattgttaaatgttcttaaatgttctcactacaaaaaaagaaaaaagataactacgtgaggtgatggatatgttaattagctggattgtggtaatcattttggaatgtatatgtatatcaaaacatgtagtacaccctaaatatatataatttttatttgtcaaatatacctcaataaagatggaaaaaaatcgaaattcaaagttatc

SEQ ID NO: 379917 - DNA, 1425 bp, Homo sapiens
  misc_feature (4)..(4): n is a, c, g, or t
  misc_feature (17)..(17): n is a, c, g, or t
  misc_feature (19)..(19): n is a, c, g, or t
  misc_feature (23)..(23): n is a, c, g, or t
cagnagcgcgccattgngntggnaccccggaattcggccattatggccggggagagcagagcaccaagatcgttctggcaggaacagccagtgggaggttccagctgagcgctccccagaggtgagctgatccccagccacagcacacaggaccaggctgcgagaacagcatcatcagcatcatgctattacaatcccaaaccatgggggtttctcacagctttacaccaaagggcatcactatccctcaaagagagaaacctggacacatgtaccaaaacgaagattacctgcagaacgggctgccaacagaaaccaccgttcttgggactgtccagatcctgtgttgcctgttgatttcaagtctgggggccatcttggtttttgctccctacccctcccacttcaatccagcaatttccaccactttgatgtctgggtacccatttttaggagctctgtgtggtaggagtcaatgaagacatcttagtcttaacaagttacagataatctctgactggcatgttttctgcttctagcttggagctaaatgctgctcatgctgcacagttttgtaattcagatcatcacccctgcactttgtaccacatgggcgtattctttcttcccagtcattgctgcaattatcttgtctgttctttgtgtaatatgttctgtgtgagcctctgcattaaactcgatttcttgggcaattatggaaattccagtgtggctgcagtttaactttgcactctctatgcatatgaggtttcctaaataaatgaggagtagcatagtttaaaatatatatatcttataactttctacaacaaagaattattgagtccaaatgtcatcagtgctcattttgagataccctgctatcgatggtcgctacaaaccaggaaatactcaagttattatgtgtatacattggttttagttttatgaaacaatttaccttcatgatctcatagttaaaattgtaataaatttaggaatataaaggatcaatatgggaagcaaaatttctaaaggcagtttctgttgttttaattagtatttgtgtagttcaaaccaggaaggatttgactatcattagattttgcttaactttatgaaagctaaaatattctctgttataaaggggcaactccatctggtcctatagcatctttactactgatttttttttgtttaatttgaaaatgcaaagaattgttaaatgttcttaaatgttctcactacaaaaaaagaaaaaagataactacgtgaggtgatggatatgttaattagctggattgtggtaatcattttggaatgtatatgtatatcaaaacatgtagtacaccctaaatatatataatttttatttgtcaaatatacctcaataaagatggaaaaaaatcgaaattcaaagttatc

SEQ ID NO: 379918 - DNA, 1883 bp, Homo sapiens
atctttatcagtgctaaccagtgtgcatgttcttgcttggaaaaaccttgcgggaggccaggaggcaaaaggcggcaaggcctcgactttccttctatcattgccccacgtcacatttcccctattcaagaagagcagcagagagacttaatctgtcttcctgcagagcagggggcaagagggaatggtaatacaatgggtataccagcacaggatttcttacctggcattacagcatacctctagaaaagtggatgattttccatatccctctttgaggctttgatgaggccattggattccctccattgtaagaataatcaacttttcaggtagagagtgagaaggccatttttaaacaataaaacgagcaccactggttgatgccacaggtttgcagagatttggattaacaagggtaagattcatgggaggcagggacatgcttgctgtgtgtccagaggtaaccctgagcactagagaaactctctttgctgccttccacctaatggctcatgaaaaagggcccagtagatccatttttcagagagtggccagggcagactcacacttcccacaaagggttatttcttctccacgtagtatttggtacaaaggataaaaatcaaatattctgggcaaatgaactatactaaggtaccacttctgtgtggatacagtccctgtgtgaacacaaactgtgcagtcacataaggaggccctggtcctgccccagagcacaatttgtccttgacttctcctgtaaccagtggttgtgggccccacatctccttagagaagctagcgttagctcatactggaccctctttgcctgtgattattcaatatccaagccacacacttaagcaacttttcagcttctcagaatacccttcctctgccagctggatctttaataccactgagattaaatactgatttctggggctttatgataaagacttcacgtctgagcctgctcttcccactttcctcgactcccattctgactcaagcaacatacaccaataacttccagtccatgtgtttctgcaccttgtcccatcagagcctctttcctgagtgcttctgttggctgttccaatctctctgtccattcaagtcattggtccatctcaacctcctctctttcaaccctgtaatttagtaacactcttctccttcccaggtacaccttttctccaggcctcctcagttcctagtgatttccactaaaacaaatccaacccctctgtgcatctgcatgtcattcaaagtcaatatagacattcttatatcaggtgggaattaggcctatctagcaatatagatccacaagatttctgcagtgttctctccctaaaagttttccaacatcactttttgattgagtgattgacagtgacatggtgggcacatttccacaagacaactgaactgatcatttctctctcttctgggcagtttggcattactggatccctctcaattatctctggaaaacaatcaactaagccctttgtaagtataaggaccatcaaatctcagctggttggaattgaaggaacgtcagagttaattcttctagtttaaaaatccctattttacaatttagagagaaaaagcttagaacaggctaggaagcccaggttttcctggctgtcccattggtagaaccaagagtagagcccaaatttcttgccttctagaccagtgctctttcgtctacacaatgttgctcctggattatattccaagcttggaggaggtttacctcagttatttaaagagtgtacatttttaaatgtaccatggactctttatagcttgtaaccttgaccttgaatatggtcgccaatcccggggagagcctacagatcctt

SEQ ID NO: 379919 - DNA, 890 bp, Homo sapiens
attcacatcctgtgtaatcataaatactgctctaagaaagggacaggaagtctcagaggctggagagcagagcaccaagatcgttctggcaggaacagccagtgggaggttccagctgagcgctccccagaggtgagctgatccccagccacagcacacaggaccaggctgcgagaacagcatcatcagcatcatgctattacaatcccaaaccatgggggtttctcacagctttacaccaaagggcatcactatccctcaaagagagaaacctggacacatgtaccaaaacgaagattacctgcagaacgggctgccaacagaaaccaccgttcttgggactgtccagatcctgtgttgcctgttgatttcaagtctgggggccatcttggtttttgctccctacccctcccacttcaatccagcaatttccaccactttgatgtctgggtacccatttttaggagctctgtgttttggcattactggatccctctcaattatctctggaaaacaatcaactaagccctttgacctgagcagcttgacctcaaatgcagtgagttctgttactgcaggagcaggcctcttcctccttgctgacagcatggtagccctgaggactgcctctcaacattgtggctcagaaatggattatctatcctcattgccttattcggagtactattatccaatatatgaaatcaaagattgtctcctgaccagtgtcagtttaacagtgagtagtttcagactgaatatcctgtcatgtgaaagctctgtgtctcccctttgcatactctctgcttttctggcagtctctggttggtcggtctgaatgcctggagacagacagaaataaacaaaaacttgtggttggaaaaaaaaag

SEQ ID NO: 379920 - DNA, 1932 bp, Homo sapiens
atctttatcagtgctaaccagtgtgcatgttcttgcttggaaaaaccttgcgggaggccaggaggcaaaaggcggcaaggcctcgactttccttctatcattgccccacgtcacatttcccctattcaagaagagcagcagagagacttaatctgtcttcctgcagagcagggggcaagagggaatggtaatacaatgggtataccagcacaggatttcttacctggcattacagcatacctctagaaaagtggatgattttccatatccctctttgaggctttgatgaggccattggattccctccattgtaagaataatcaacttttcaggtagagagtgagaaggccatttttaaacaataaaacgagcaccactggttgatgccacaggtttgcagagatttggattaacaagggtaagattcatgggaggcagggacatgcttgctgtgtgtccagaggtaaccctgagcactagagaaactctctttgctgccttccacctaatggctcatgaaaaagggcccagtagatccatttttcagagagtggccagggcagactcacacttcccacaaagggttatttcttctccacgtagtatttggtacaaaggataaaaatcaaatattctgggcaaatgaactatactaaggtaccacttctgtgtggatacagtccctgtgtgaacacaaactgtgcagtcacataaggaggccctggtcctgccccagagcacaatttgtccttgacttctcctgtaaccagtggttgtgggccccacatctccttagagaagctagcgttagctcatactggaccctctttgcctgtgattattcaatatccaagccacacacttaagcaacttttcagcttctcagaatacccttcctctgccagctggatctttaataccactgagattaaatactgatttctggggctttatgataaagacttcacgtctgagcctgctcttcccactttcctcgactcccattctgactcaagcaacatacaccaataacttccagtccatgtgtttctgcaccttgtcccatcagagcctctttcctgagtgcttctgttggctgttccaatctctctgtccattcaagtcattggtccatctcaacctcctctctttcaaccctgtaatttagtaacactcttctccttcccaggtacaccttttctccaggcctcctcagttcctagtgatttccactaaaacaaatccaacccctctgtgcatctgcatgtcattcaaagtcaatatagacattcttatatcaggtgggaattaggcctatctagcaatatagatccacaagatttctgcagtgttctctccctaaaagttttccaacatcactttttgattgagtgattgacagtgacatggtgggcacatttccacaagacaactgaactgatcatttctctctcttctgggcagtttggcattactggatccctctcaattatctctggaaaacaatcaactaagccctttgacctgagcagcttgacctcaaatgcagtgagttctgttactgcaggagcaggcctcttcctccttgctgacagcatggtagccctgaggactgcctctcaacattgtggctcagaaatggattatctatcctcattgccttattcggagtactattatccaatatatgaaatcaaagattgtctcctgaccagtgtcagtttaacaagttcattttcctcgacccagtcacaagatcatatccaacaggtcaaaaagagttcttcacggtcttggatataagtaactcttggcctcagaggaaggaaaagcaactcaacactcatggtcaagtgtgattagactttcctgaaatctctgccattttagatactgtgaaacaaactaaaaaaaaaaaagcttttgttttgt

SEQ ID NO: 379921 - DNA, 1558 bp, Homo sapiens
atctttatcagtgctaaccagtgtgcatgttcttgcttggaaaaaccttgcgggaggccaggaggcaaaaggcggcaaggcctcgactttccttctatcattgccccacgtcacatttcccctattcaagaagagcagcagagagacttaatctgtcttcctgcagagcagggggcaagagggaatggtaatacaatgggtataccagcacaggatttcttacctggcattacagcatacctctagaaaagtggatgattttccatatccctctttgaggctttgatgaggccattggattccctccattgtaagaataatcaacttttcaggtagagagtgagaaggccatttttaaacaataaaacgagcaccactggttgatgccacaggtttgcagagatttggattaacaagggtaagattcatgggaggcagggacatgcttgctgtgtgtccagaggtaaccctgagcactagagaaactctctttgctgccttccacctaatggctcatgaaaaagggcccagtagatccatttttcagagagtggccagggcagactcacacttcccacaaagggttatttcttctccacgtagtatttggtacaaaggataaaaatcaaatattctgggcaaatgaactatactaaggtaccacttctgtgtggatacagtccctgtgtgaacacaaactgtgcagtcacataaggaggccctggtcctgccccagagcacaatttgtccttgacttctcctgtaaccagtggttgtgggccccacatctccttagagaagctagcgttagctcatactggaccctctttgcctgtgattattcaatatccaagccacacacttaagcaacttttcagcttctcagaatacccttcctctgccagctggatctttaataccactgagattaaatactgatttctggggctttatgataaagacttcacgtctgagcctgctcttcccactttcctcgactcccattctgactcaagcaacatacaccaataacttccagtccatgtgtttctgcaccttgtcccatcagagcctctttcctgagtgcttctgttggctgttccaatctctctgtccattcaagtcattggtccatctcaacctcctctctttcaaccctgtaatttagtaacactcttctccttcccaggtacaccttttctccaggcctcctcagttcctagtgatttccactaaaacaaatccaacccctctgtgcatctgcatgtcattcaaagtcaatatagacattcttatatcaggtgggaattaggcctatctagcaatatagatccacaagatttctgcagtgttctctccctaaaagttttccaacatcactttttgattgagtgattgacagtgacatggtgggcacatttccacaagacaactgaactgatcatttctctctcttctgggcagtttggcattactggatccctctcaattatctctggaaaacaatcaactaagccctttgacctgagcagcttgagatggaccaatgacgtcgacg

SEQ ID NO: 379922 - DNA, 734 bp, Homo sapiens
  misc_feature (4)..(4): n is a, c, g, or t
  misc_feature (17)..(17): n is a, c, g, or t
  misc_feature (19)..(19): n is a, c, g, or t
  misc_feature (23)..(23): n is a, c, g, or t
cagnagcgcgccattgngntggnaccccggaattcggccattatggccggggagagcagagcaccaagatcgttctggcaggaacagccagtgggaggttccagctgagcgctccccagaggtgagctgatccccagccacagcacacaggaccaggctgcgagaacagcatcatcagcatcatgctattacaatcccaaaccatgggggtttctcacagctttacaccaaagggcatcactatccctcaaagagagaaacctggacacatgtaccaaaacgaagattacctgcagaacgggctgccaacagaaaccaccgttcttggggtaagtccacctcattataaggggaatactgagaaaatactttgtaaatgtatctagactacagatctacagtgggtctgggaaactctttcactcttttctggctgactccaggctaatgaggacatgaaatggagctttaagggaagactcttaaagctctgcagcagtttctagaaactaaaaccactagatctttttcactagcatgcttcacaattaacaggttagtctttcttattttatttatttatatatttatttattttgagacagaatctccctctgtcacccagcatggagtgcagtggcacgatctcagctcactgcaacctccgcctcctgggttcaagtgattcttctgcctcagcctcccgagtagctgggactatgggtgcacgccac

SEQ ID NO: 379923 - DNA, 471 bp, Homo sapiens
cccatttttaggagctctgtgtgtgagtagaatggggactctaagaggggacatgctttataaatgctaaccaggtgcatagtcgtggagtgactcagactccaagaggccaggaggcaaaaggcggcaaggcctcgactttccttctatcattgccccacgtcacatttcccctattcaagaagagcagcagagagacttaatctgtcttcctgcagagcagggggcaagagggaatggtaatacaatgggtataccagcacaggatttcttacctggcattacagcatacctctagaaaagtggatgattttccatatccctctttgaggctttgatgaggccattggattccctccattgtaagaataatcaacttttcaggtagagagtgagaaggccatttttaaacaataaaacgagcaccactggttgatgccacaggtttgcagagatttggattaacaaggg

SEQ ID NO: 379924 - DNA, 3016 bp, Homo sapiens
attcacatcctgtgtaatcataaatactgctctaagaaagggacaggaagtctcagaggctggagagcagagcaccaagatcgttctggcaggaacagccagtgggaggttccagctgagcgctccccagaggtgagctgatccccagccacagcacacaggaccaggctgcgagaacagcatcatcagcatcatgctattacaatcccaaaccatgggggtttctcacagctttacaccaaagggcatcactatccctcaaagagagaaacctggacacatgtaccaaaacgaagattacctgcagaacgggctgccaacagaaaccaccgttcttgggactgtccagatcctgtgttgcctgttgatttcaagtctgggggccatcttggtttttgctccctacccctcccacttcaatccagcaatttccaccactttgatgtctgggtacccatttttaggagctctgtgttttggcattactggatccctctcaattatctctggaaaacaatcaactaagccctttgacctgagcagcttgacctcaaatgcagtgagttctgttactgcaggagcaggcctcttcctccttgctgacagcatggtagccctgaggactgcctctcaacattgtggctcagaaatggattatctatcctcattgccttattcggagtactattatccaatatatgaaatcaaagattgtctcctgaccagtgtcagtttaacaggtgtcctagtggtgatgctcatcttcactgtgctggagctcttattagctgcatacagttctgtcttttggtggaaacagctctactccaacaaccctgggagttcattttcctcgacccagtcacaagatcatatccaacaggtcaaaaagagttcttcacggtcttggatataagtaactcttggcctcagaggaaggaaaagcaactcaacactcatggtcaagtgtgattagactttcctgaaatctctgccattttagatactgtgaaacaaactaaaaaaaaaaaagcttttgttttgtatttgtttactatgagtcgttatttaatttctcttgaaaataatttcctcaaagcccaagtcagtaaaatgttatcagccagtcttccaaaatggtcataaactttataaactgctttgggtaaactgagcagaaggtgatacacagaagggaaaatgtgcactcatgctagtgtgaatttggtaagtcgcgtgactctgcaggctgtttctgtattattttcacactcatattgcttaaatattacatattagggattgtaagaaaactttaattaaaaattaaagactatatataattaaactactctgccctggacactctctgagaaacagatctactgggccctttttcatgagccattaggtggaagacagcaaagagatcttctcaagtgcttaggattacctctcaacacacagcaagcatgtccctgcctcccatgaatcttaccatgtaaatccaaatctctgcaatcctgtggcaccaaccagtggtgctcattctattgtttaaaaatggccttcttggctgggcgcggtggctcactcctgtaatcccagcactttggtaggccgaggtggacggatcacccgaggtcaggagtttgagaccagcctggccaacaaggtgaaaccctgtctctactaaaaatacaaaaaattagccaggcatggtggtgcgcacctgtagttccagctacttgggaggctgaggcagaagaatcacttgaacccgggaaggggaggttgcagtgagcggagactgcaccactgcattccagcccggcctacaagaacaaaactccatctcaaaataaataaaaaaataaataaaaataaaaatagactatatatagtctttgaattcatttattttaaataaatgaataaaataaaataaaaaagaatattcagtcgttggcacataaactatgttctcttctgtcatttcagggtaggagtcaatgaagacatcttagtcttaacaagttacagataatctctgactggcatgttttctgcttctagcttggagctaaatgctgctcatgctgaaaagaataatgtctatttctttgtttgggtattagctctattttgatctatagcacagttttgtaattcagatcatcacccctgcactttgtaccacatgggcgtattctttcttcccagtcattgctgcaattatcttgtctgttctttgtgtaatatgttctgtgtgagcctctgcattaaactcgatttcttgggcaattatggaaattccagtgtggctgcagtttaactttgcactctctatgcatatgaggtttcctaaataaatgaggagtagcatagtttaaaatatatatatcttataactttctacaacaaagaattattgagtccaaatgtcatcagtgctcattttgagataccctgctatcgatggtcgctacaaaccaggaaatactcaagttattatgtgtatacattggttttagttttatgaaacaatttaccttcatgatctcatagttaaaattgtaataaatttaggaatataaaggatcaatatgggaagcaaaatttctaaaggcagtttctgttgttttaattagtatttgtgtagttcaaaccaggaaggatttgactatcattagattttgcttaactttatgaaagctaaaatattctctgttataaaggggcaactccatctggtcctatagcatctttactactgatttttttttgtttaatttgaaaatgcaaagaattgttaaatgttcttaaatgttctcactacaaaaaaagaaaaaagataactacgtgaggtgatggatatgttaattagctggattgtggtaatcattttggaatgtatatgtatatcaaaacatgtagtacaccctaaatatatataatttttatttgtcaaatatacctcaataaagatggaaaaaaatcgaaattcaaagttatc

SEQ ID NO: 379925 - DNA, 3438 bp, Homo sapiens
  misc_feature (3352)..(3352): n is a, c, g, or t
  misc_feature (3414)..(3414): n is a, c, g, or t
attcacatcctgtgtaatcataaatactgctctaagaaagggacaggaagtctcagaggctggagagcagagcaccaagatcgttctggcaggaacagccagtgggaggttccagctgagcgctccccagaggtgagctgatccccagccacagcacacaggaccaggctgcgagaacagcatcatcagcatcatgctattacaatcccaaaccatgggggtttctcacagctttacaccaaagggcatcactatccctcaaagagagaaacctggacacatgtaccaaaacgaagattacctgcagaacgggctgccaacagaaaccaccgttcttgggactgtccagatcctgtgttgcctgttgatttcaagtctgggggccatcttggtttttgctccctacccctcccacttcaatccagcaatttccaccactttgatgtctgggtacccatttttaggagctctgtgttttggcattactggatccctctcaattatctctggaaaacaatcaactaagccctttgacctgagcagcttgacctcaaatgcagtgagttctgttactgcaggagcaggcctcttcctccttgctgacagcatggtagccctgaggactgcctctcaacattgtggctcagaaatggattatctatcctcattgccttattcggagtactattatccaatatatgaaatcaaagattgtctcctgaccagtgtcagtttaacaggtgtcctagtggtgatgctcatcttcactgtgctggagctcttattagctgcatacagttctgtcttttggtggaaacagctctactccaacaaccctgggagttcattttcctcgacccagtcacaagatcatatccaacaggtcaaaaagagttcttcacggtcttggatataagtaactcttggcctcagaggaaggaaaagcaactcaacactcatggtcaagtgtgattagactttcctgaaatctctgccattttagatactgtgaaacaaactaaaaaaaaaaaagcttttgttttgtatttgtttactatgagtcgttatttaatttctcttgaaaataatttcctcaaagcccaagtcagtaaaatgttatcagccagtcttccaaaatggtcataaactttataaactgctttgggtaaactgagcagaaggtgatacacagaagggaaaatgtgcactcatgctagtgtgaatttggtaagtcgcgtgactctgcaggctgtttctgtattattttcacactcatattgcttaaatattacatattagggattgtaagaaaactttaattaaaaattaaagactatatataattaaactactctgccctggacactctctgagaaacagatctactgggccctttttcatgagccattaggtggaagacagcaaagagatcttctcaagtgcttaggattacctctcaacacacagcaagcatgtccctgcctcccatgaatcttaccatgtaaatccaaatctctgcaatcctgtggcaccaaccagtggtgctcattctattgtttaaaaatggccttcttggctgggcgcggtggctcactcctgtaatcccagcactttggtaggccgaggtggacggatcacccgaggtcaggagtttgagaccagcctggccaacaaggtgaaaccctgtctctactaaaaatacaaaaaattagccaggcatggtggtgcgcacctgtagttccagctacttgggaggctgaggcagaagaatcacttgaacccgggaaggggaggttgcagtgagcggagactgcaccactgcattccagcccggcctacaagaacaaaactccatctcaaaataaataaaaaaataaataaaaataaaaatagactatatatagtctttgaattcatttattttaaataaatgaataaaataaaataaaaaagaatattcagtcgttggcacataaactatgttctcttctgtcatttcagggtaggagtcaatgaagacatcttagtcttaacaagttacagataatctctgactggcatgttttctgcttctagcttggagctaaatgctgctcatgctgaaaagaataatgtctatttctttgtttgggtattagctctattttgatctatagcacagttttgtaattcagatcatcacccctgcactttgtaccacatgggcgtattctttcttcccagtcattgctgcaattatcttgtctgttctttgtgtaatatgttctgtgtgagcctctgcattaaactcgatttcttgggcaattatggaaattccagtgtggctgcagtttaactttgcactctctatgcatatgaggtttcctaaataaatgaggagtagcatagtttaaaatatatatatcttataactttctacaacaaagaattattgagtccaaatgtcatcagtgctcattttgagataccctgctatcgatggtcgctacaaaccaggaaatactcaagttattatgtgtatacattggttttagttttatgaaacaatttaccttcatgatctcatagttaaaattgtaataaatttaggaatataaaggatcaatatgggaagcaaaatttctaaaggcagtttctgttgttttaattagtatttgtgtagttcaaaccaggaaggatttgactatcattagattttgcttaactttatgaaagctaaaatattctctgttataaaggggcaactccatctggtcctatagcatctttactactgatttttttttgtttaatttgaaaatgcaaagaattgttaaatgttcttaaatgttctcactacaaaaaaagaaaaaaaaaaaaaaaaaaaaaaactcgagactagttctctcctcgtgccgaattcggcacgagacccactccaccttactaccagacaaccttagccaaaccatttacccaaataaagtataggcgatagaaattgaaacctggcgcaatagatatagtaccgcaagggaaagatgaaaaattataaccaagcataatatagcaaggactaacccctataccttctgcataatgaattaactagaaataactttgcaaggagagccaaagctaagacccccgaaaccagacgagctacctaagaacagctaaaagagcacacccgtctatgtagcaaaatagtgggaagatttataggtagaggcgacaaacctaccgagcctggtgatagcttggttgtccaagatagattcttagttcaactttaaatttgcccacagaaccctctaaatccccttggtatttaactggttagtccaaagaggaacagctctttggacactangaaaaaaccttgtgaggagagtaatttaacacccatagtaggcctatagcagccaccattanggcggtaagctaacacccactcct

SEQ ID NO: 379926 - DNA, 2870 bp, Homo sapiens
  misc_feature (4)..(4): n is a, c, g, or t
  misc_feature (17)..(17): n is a, c, g, or t
  misc_feature (19)..(19): n is a, c, g, or t
  misc_feature (23)..(23): n is a, c, g, or t
cagnagcgcgccattgngntggnaccccggaattcggccattatggccggggagagcagagcaccaagatcgttctggcaggaacagccagtgggaggttccagctgagcgctccccagaggtgagctgatccccagccacagcacacaggaccaggctgcgagaacagcatcatcagcatcatgctattacaatcccaaaccatgggggtttctcacagctttacaccaaagggcatcactatccctcaaagagagaaacctggacacatgtaccaaaacgaagattacctgcagaacgggctgccaacagaaaccaccgttcttgggtttggcattactggatccctctcaattatctctggaaaacaatcaactaagccctttgacctgagcagcttgacctcaaatgcagtgagttctgttactgcaggagcaggcctcttcctccttgctgacagcatggtagccctgaggactgcctctcaacattgtggctcagaaatggattatctatcctcattgccttattcggagtactattatccaatatatgaaatcaaagattgtctcctgaccagtgtcagtttaacaggtgtcctagtggtgatgctcatcttcactgtgctggagctcttattagctgcatacagttctgtcttttggtggaaacagctctactccaacaaccctgggagttcattttcctcgacccagtcacaagatcatatccaacaggtcaaaaagagttcttcacggtcttggatataagtaactcttggcctcagaggaaggaaaagcaactcaacactcatggtcaagtgtgattagactttcctgaaatctctgccattttagatactgtgaaacaaactaaaaaaaaaaaagcttttgttttgtatttgtttactatgagtcgttatttaatttctcttgaaaataatttcctcaaagcccaagtcagtaaaatgttatcagccagtcttccaaaatggtcataaactttataaactgctttgggtaaactgagcagaaggtgatacacagaagggaaaatgtgcactcatgctagtgtgaatttggtaagtcgcgtgactctgcaggctgtttctgtattattttcacactcatattgcttaaatattacatattagggattgtaagaaaactttaattaaaaattaaagactatatataattaaactactctgccctggacactctctgagaaacagatctactgggccctttttcatgagccattaggtggaagacagcaaagagatcttctcaagtgcttaggattacctctcaacacacagcaagcatgtccctgcctcccatgaatcttaccatgtaaatccaaatctctgcaatcctgtggcaccaaccagtggtgctcattctattgtttaaaaatggccttcttggctgggcgcggtggctcactcctgtaatcccagcactttggtaggccgaggtggacggatcacccgaggtcaggagtttgagaccagcctggccaacaaggtgaaaccctgtctctactaaaaatacaaaaaattagccaggcatggtggtgcgcacctgtagttccagctacttgggaggctgaggcagaagaatcacttgaacccgggaaggggaggttgcagtgagcggagactgcaccactgcattccagcccggcctacaagaacaaaactccatctcaaaataaataaaaaaataaataaaaataaaaatagactatatatagtctttgaattcatttattttaaataaatgaataaaataaaataaaaaagaatattcagtcgttggcacataaactatgttctcttctgtcatttcagggtaggagtcaatgaagacatcttagtcttaacaagttacagataatctctgactggcatgttttctgcttctagcttggagctaaatgctgctcatgctgaaaagaataatgtctatttctttgtttgggtattagctctattttgatctatagcacagttttgtaattcagatcatcacccctgcactttgtaccacatgggcgtattctttcttcccagtcattgctgcaattatcttgtctgttctttgtgtaatatgttctgtgtgagcctctgcattaaactcgatttcttgggcaattatggaaattccagtgtggctgcagtttaactttgcactctctatgcatatgaggtttcctaaataaatgaggagtagcatagtttaaaatatatatatcttataactttctacaacaaagaattattgagtccaaatgtcatcagtgctcattttgagataccctgctatcgatggtcgctacaaaccaggaaatactcaagttattatgtgtatacattggttttagttttatgaaacaatttaccttcatgatctcatagttaaaattgtaataaatttaggaatataaaggatcaatatgggaagcaaaatttctaaaggcagtttctgttgttttaattagtatttgtgtagttcaaaccaggaaggatttgactatcattagattttgcttaactttatgaaagctaaaatattctctgttataaaggggcaactccatctggtcctatagcatctttactactgatttttttttgtttaatttgaaaatgcaaagaattgttaaatgttcttaaatgttctcactacaaaaaaagaaaaaagataactacgtgaggtgatggatatgttaattagctggattgtggtaatcattttggaatgtatatgtatatcaaaacatgtagtacaccctaaatatatataatttttatttgtcaaatatacctcaataaagatggaaaaaaatcgaaattcaaagttatc

SEQ ID NO: 379927 - DNA, 2893 bp, Homo sapiens
atgacacagaattgtgccaaggggcaggacagaaggaggagtcagcccccggagcagcatcatcagcatcatgctattacaatcccaaaccatgggggtttctcacagctttacaccaaagggcatcactatccctcaaagagagaaacctggacacatgtaccaaaacgaagattacctgcagaacgggctgccaacagaaaccaccgttcttgggactgtccagatcctgtgttgcctgttgatttcaagtctgggggccatcttggtttttgctccctacccctcccacttcaatccagcaatttccaccactttgatgtctgggtacccatttttaggagctctgtgttttggcattactggatccctctcaattatctctggaaaacaatcaactaagccctttgacctgagcagcttgacctcaaatgcagtgagttctgttactgcaggagcaggcctcttcctccttgctgacagcatggtagccctgaggactgcctctcaacattgtggctcagaaatggattatctatcctcattgccttattcggagtactattatccaatatatgaaatcaaagattgtctcctgaccagtgtcagtttaacaggtgtcctagtggtgatgctcatcttcactgtgctggagctcttattagctgcatacagttctgtcttttggtggaaacagctctactccaacaaccctgggagttcattttcctcgacccagtcacaagatcatatccaacaggtcaaaaagagttcttcacggtcttggatataagtaactcttggcctcagaggaaggaaaagcaactcaacactcatggtcaagtgtgattagactttcctgaaatctctgccattttagatactgtgaaacaaactaaaaaaaaaaaagcttttgttttgtatttgtttactatgagtcgttatttaatttctcttgaaaataatttcctcaaagcccaagtcagtaaaatgttatcagccagtcttccaaaatggtcataaactttataaactgctttgggtaaactgagcagaaggtgatacacagaagggaaaatgtgcactcatgctagtgtgaatttggtaagtcgcgtgactctgcaggctgtttctgtattattttcacactcatattgcttaaatattacatattagggattgtaagaaaactttaattaaaaattaaagactatatataattaaactactctgccctggacactctctgagaaacagatctactgggccctttttcatgagccattaggtggaagacagcaaagagatcttctcaagtgcttaggattacctctcaacacacagcaagcatgtccctgcctcccatgaatcttaccatgtaaatccaaatctctgcaatcctgtggcaccaaccagtggtgctcattctattgtttaaaaatggccttcttggctgggcgcggtggctcactcctgtaatcccagcactttggtaggccgaggtggacggatcacccgaggtcaggagtttgagaccagcctggccaacaaggtgaaaccctgtctctactaaaaatacaaaaaattagccaggcatggtggtgcgcacctgtagttccagctacttgggaggctgaggcagaagaatcacttgaacccgggaaggggaggttgcagtgagcggagactgcaccactgcattccagcccggcctacaagaacaaaactccatctcaaaataaataaaaaaataaataaaaataaaaatagactatatatagtctttgaattcatttattttaaataaatgaataaaataaaataaaaaagaatattcagtcgttggcacataaactatgttctcttctgtcatttcagggtaggagtcaatgaagacatcttagtcttaacaagttacagataatctctgactggcatgttttctgcttctagcttggagctaaatgctgctcatgctgaaaagaataatgtctatttctttgtttgggtattagctctattttgatctatagcacagttttgtaattcagatcatcacccctgcactttgtaccacatgggcgtattctttcttcccagtcattgctgcaattatcttgtctgttctttgtgtaatatgttctgtgtgagcctctgcattaaactcgatttcttgggcaattatggaaattccagtgtggctgcagtttaactttgcactctctatgcatatgaggtttcctaaataaatgaggagtagcatagtttaaaatatatatatcttataactttctacaacaaagaattattgagtccaaatgtcatcagtgctcattttgagataccctgctatcgatggtcgctacaaaccaggaaatactcaagttattatgtgtatacattggttttagttttatgaaacaatttaccttcatgatctcatagttaaaattgtaataaatttaggaatataaaggatcaatatgggaagcaaaatttctaaaggcagtttctgttgttttaattagtatttgtgtagttcaaaccaggaaggatttgactatcattagattttgcttaactttatgaaagctaaaatattctctgttataaaggggcaactccatctggtcctatagcatctttactactgatttttttttgtttaatttgaaaatgcaaagaattgttaaatgttcttaaatgttctcactacaaaaaaagaaaaaagataactacgtgaggtgatggatatgttaattagctggattgtggtaatcattttggaatgtatatgtatatcaaaacatgtagtacaccctaaatatatataatttttatttgtcaaatatacctcaataaagatggaaaaaaatcgaaattcaaagttatc

SEQ ID NO: 379928 - DNA, 2819 bp, Homo sapiens
  misc_feature (4)..(4): n is a, c, g, or t
  misc_feature (17)..(17): n is a, c, g, or t
  misc_feature (19)..(19): n is a, c, g, or t
  misc_feature (23)..(23): n is a, c, g, or t
cagnagcgcgccattgngntggnaccccggaattcggccattatggccggggagagcagagcaccaagatcgttctggcaggaacagccagtgggaggttccagctgagcgctccccagaggtgagctgatccccagccacagcacacaggaccaggctgcgagaacagctttacaccaaagggcatcactatccctcaaagagagaaacctggacacatgtaccaaaacgaagattacctgcagaacgggctgccaacagaaaccaccgttcttgggtttggcattactggatccctctcaattatctctggaaaacaatcaactaagccctttgacctgagcagcttgacctcaaatgcagtgagttctgttactgcaggagcaggcctcttcctccttgctgacagcatggtagccctgaggactgcctctcaacattgtggctcagaaatggattatctatcctcattgccttattcggagtactattatccaatatatgaaatcaaagattgtctcctgaccagtgtcagtttaacaggtgtcctagtggtgatgctcatcttcactgtgctggagctcttattagctgcatacagttctgtcttttggtggaaacagctctactccaacaaccctgggagttcattttcctcgacccagtcacaagatcatatccaacaggtcaaaaagagttcttcacggtcttggatataagtaactcttggcctcagaggaaggaaaagcaactcaacactcatggtcaagtgtgattagactttcctgaaatctctgccattttagatactgtgaaacaaactaaaaaaaaaaaagcttttgttttgtatttgtttactatgagtcgttatttaatttctcttgaaaataatttcctcaaagcccaagtcagtaaaatgttatcagccagtcttccaaaatggtcataaactttataaactgctttgggtaaactgagcagaaggtgatacacagaagggaaaatgtgcactcatgctagtgtgaatttggtaagtcgcgtgactctgcaggctgtttctgtattattttcacactcatattgcttaaatattacatattagggattgtaagaaaactttaattaaaaattaaagactatatataattaaactactctgccctggacactctctgagaaacagatctactgggccctttttcatgagccattaggtggaagacagcaaagagatcttctcaagtgcttaggattacctctcaacacacagcaagcatgtccctgcctcccatgaatcttaccatgtaaatccaaatctctgcaatcctgtggcaccaaccagtggtgctcattctattgtttaaaaatggccttcttggctgggcgcggtggctcactcctgtaatcccagcactttggtaggccgaggtggacggatcacccgaggtcaggagtttgagaccagcctggccaacaaggtgaaaccctgtctctactaaaaatacaaaaaattagccaggcatggtggtgcgcacctgtagttccagctacttgggaggctgaggcagaagaatcacttgaacccgggaaggggaggttgcagtgagcggagactgcaccactgcattccagcccggcctacaagaacaaaactccatctcaaaataaataaaaaaataaataaaaataaaaatagactatatatagtctttgaattcatttattttaaataaatgaataaaataaaataaaaaagaatattcagtcgttggcacataaactatgttctcttctgtcatttcagggtaggagtcaatgaagacatcttagtcttaacaagttacagataatctctgactggcatgttttctgcttctagcttggagctaaatgctgctcatgctgaaaagaataatgtctatttctttgtttgggtattagctctattttgatctatagcacagttttgtaattcagatcatcacccctgcactttgtaccacatgggcgtattctttcttcccagtcattgctgcaattatcttgtctgttctttgtgtaatatgttctgtgtgagcctctgcattaaactcgatttcttgggcaattatggaaattccagtgtggctgcagtttaactttgcactctctatgcatatgaggtttcctaaataaatgaggagtagcatagtttaaaatatatatatcttataactttctacaacaaagaattattgagtccaaatgtcatcagtgctcattttgagataccctgctatcgatggtcgctacaaaccaggaaatactcaagttattatgtgtatacattggttttagttttatgaaacaatttaccttcatgatctcatagttaaaattgtaataaatttaggaatataaaggatcaatatgggaagcaaaatttctaaaggcagtttctgttgttttaattagtatttgtgtagttcaaaccaggaaggatttgactatcattagattttgcttaactttatgaaagctaaaatattctctgttataaaggggcaactccatctggtcctatagcatctttactactgatttttttttgtttaatttgaaaatgcaaagaattgttaaatgttcttaaatgttctcactacaaaaaaagaaaaaagataactacgtgaggtgatggatatgttaattagctggattgtggtaatcattttggaatgtatatgtatatcaaaacatgtagtacaccctaaatatatataatttttatttgtcaaatatacctcaataaagatggaaaaaaatcgaaattcaaagttatc

SEQ ID NO: 379929 - DNA, 1367 bp, Homo sapiens
atgacacagaattgtgccaaggggcaggacagaaggaggagtcagcccccggagcagcatcatcagcatcatgctattacaatcccaaaccatgggggtttctcacagctttacaccaaagggcatcactatccctcaaagagagaaacctggacacatgtaccaaaacgaagattacctgcagaacgggctgccaacagaaaccaccgttcttgggactgtccagatcctgtgttgcctgttgatttcaagtctgggggccatcttggtttttgctccctacccctcccacttcaatccagcaatttccaccactttgatgtctgggtacccatttttaggagctctgtgtggtaggagtcaatgaagacatcttagtcttaacaagttacagataatctctgactggcatgttttctgcttctagcttggagctaaatgctgctcatgctgaaaagaataatgtctatttctttgtttgggtattagctctattttgatctatagcacagttttgtaattcagatcatcacccctgcactttgtaccacatgggcgtattctttcttcccagtcattgctgcaattatcttgtctgttctttgtgtaatatgttctgtgtgagcctctgcattaaactcgatttcttgggcaattatggaaattccagtgtggctgcagtttaactttgcactctctatgcatatgaggtttcctaaataaatgaggagtagcatagtttaaaatatatatatcttataactttctacaacaaagaattattgagtccaaatgtcatcagtgctcattttgagataccctgctatcgatggtcgctacaaaccaggaaatactcaagttattatgtgtatacattggttttagttttatgaaacaatttaccttcatgatctcatagttaaaattgtaataaatttaggaatataaaggatcaatatgggaagcaaaatttctaaaggcagtttctgttgttttaattagtatttgtgtagttcaaaccaggaaggatttgactatcattagattttgcttaactttatgaaagctaaaatattctctgttataaaggggcaactccatctggtcctatagcatctttactactgatttttttttgtttaatttgaaaatgcaaagaattgttaaatgttcttaaatgttctcactacaaaaaaagaaaaaagataactacgtgaggtgatggatatgttaattagctggattgtggtaatcattttggaatgtatatgtatatcaaaacatgtagtacaccctaaatatatataatttttatttgtcaaatatacctcaataaagatggaaaaaaatcgaaattcaaagttatc

SEQ ID NO: 379930 - DNA, 881 bp, Homo sapiens
  misc_feature (4)..(4): n is a, c, g, or t
  misc_feature (17)..(17): n is a, c, g, or t
  misc_feature (19)..(19): n is a, c, g, or t
  misc_feature (23)..(23): n is a, c, g, or t
cagnagcgcgccattgngntggnaccccggaattcggccattatggccggggagagcagagcaccaagatcgttctggcaggaacagccagtgggaggttccagctgagcgctccccagaggtgagctgatccccagccacagcacacaggaccaggctgcgagaacaggtagacaccttggtttagatcatgacttttggggaagattgtgtgcttttgaaaagacagccagggaattggattatcatcctgtctctgattctgaccacctgtgtgagttggagcgtcagctcagtcccctttttgggtctcagtttactcacttgtcaaataagaaaattgggtaaaaccattcttaggtttccctcattgaggtgattttcctcaatgttctgcattctcctggtgtgtcactcagtcttacagagtctactctcaacaaatactgtgcaattagactgaatcttgcattagaaccccatggtcctactctaattctgtaatacagaaaattgctgggcagagctgttgacctccatgtcatgatttatcttcaaagcacggattttagagctgtcttgaaagctgtgggtccctccagtctatctcctcaaggcgaatgtggaaggacaaagcatcctctcagactgtggtgtttggagatgatagcatcagtctggagacttttgtgaaacataaagaatcttggttatataggattccttctaaaagtagcaacgtgtatctaaattcaagtgtcatagatttaaatgtaataattccacttccatacatcactgtgagataattaaatgcaggaggtatcacaaaagtgcaaagatgttcattattgcattgttcatagtggcaaaaagaaaaa

SEQ ID NO: 379931 - DNA, 2031 bp, Homo sapiens
ctcttaatacatcacctaatatttccaaagcccccccccccagtcactgtcatctggtcatcctctatcttctcacaatactttttcctcatagcactaaatagtacctgtcctcatattaagtgtctgtttattatctgcctccttccctggaatgtaagcttcatgagggcaggagtgcagttttgtttattactgtaacctcagagtagagaagcctggccacatagtagatgctagtattcgtttcctagggctgctgtaacagataccatacatgagttacttaaaacaacagaaatttattctttcacagtttaggtggccagaagtcccaaaccaagatataacaaattatatctgcaaagcctttatttccacagaaccacattctgaggttctgggtggacattaatttggcagggagtagtggggggacactaacctactacagtgctcagtaaatatttattgggtgaatgaaaattcagagtgtattctaagctgtaaaccccttggatgttttcatcacagtcttctcttaataactgctacagaacataaggattagtttgtggtcccagattttttaggctccaattctgcttctaccacttttctacttgtgagctcttaggcaagctattttaactttgtaagccttcagtttcttctgtaaaatggtgacaataagaaataacagtaagtgcccaataagttttaactattattatgtgtctatagctattttaaagcactttctatatgtaatcctcataacaaccgtattaggtgagcctattacacttctcattttatgacaaaggaaactagatttgtttcaagaatgaaaaacctagaaaattatatgtcactttatgaagtgcctggcacatagtacatagaatagcttagctacaataatatagatatgtgactttacctcataactttaagacatctcaaattgattcacaaatcagaaaaaaaatctgaggcatcagatgtgaggtgaggtgaggtgaggcatctcagtttttgcacatatggttactgttattgagggagctccatgtcattgagggagctccacgtcattgagggaggactgggtgggatgctggccaaaggtaggggcatatttaggcagtgaaattgcagttatgggacccctctatagcactagatgtgtgagaggactaaaaataaaattcctttgaaatttcttacagggtcatatattacctccttcccaatgactactgtggtatattagagtaggggattgatgtcccagaaatattatgtacatcaaacagaagatctacacaaattgttttatcagatactgaatatatcaatgggctagagtgtattatagtacatatgggtatgttgttttcccccttttgactaaataaactctcccctctctgcaacaggtaaatttccagtttacctttttcttgctgtttttaattttttttattttgaaggctttgtatctttatatctcagctgaaaatattacattctaactccccaaagctattctcacattatttgcaagtattttttcatagtttacatgtttgtgtatttgtttaatacattccacaagactgaaagtcttggtgagggcaggaactctgtctaggttgttcatctggcagccagcaaacccaaaataagtattagttgaatgaatagctaaatagatgagccatggggtagcatatctgttttagctactgcttgcctgttatcatcctgggatgctgcttgcttctccgtgatctcttcttgttcttaaattgtcttcagttgtagtactaagtactaatttgatctgtaatgtgatatgtggctgaagtttgctctgtaaaatcaccgtttcctgaggtatattcaatacctttaatttttccataaatctcttcaaggtttgtgtgtgttttcttttaaattatctaactagttggatgtatgcttgaagtgctagacaataaaagtttcaataggctagaaatg

SEQ ID NO: 379932 - DNA, 1556 bp, Homo sapiens
agtgcgcacgctccgactcggccgtggcggacctgactgaaggaggccgcggacctgactgaaggaggccacggccacttctggttggcctcggggcgcgctggctcggctcttcctccgccctcgaggcccccgcagtcccatcattcagttccgtagggtcaccggcgcggcagtggcctcgcagggcgctgggtccctctccccagctctcctccccctggccccgtcgccccgccctcgccgggctgggctgcggggtcaggggccgagcggagagggtagagacggggtttcaccgtgttagccaagatggtctcgatctcctgacctcgtgatccgcccgcctcggcctcccaaagtgctgggattacaggcgtgagccactgcgcccggcctgttatcatttaacatggaagaagatgagttcattggagaaaaaacattccaacgttattgtgcagaattcattaaacattcacaacagataggtgatagttgggaatggagaccatcaaaggactgttctgatggctacatgtgcaaaatacactttcaaattaagaatgggtctgtgatgtcacatctaggagcatctacccatggacagacatgtcttcccatggaggtgaagtcttgctctgtcacccaggctggagtgcagttgcgtgatctcagctcactgcaacctccgccttctgggttcaagcagttctcctgcctcagccttccgagtaactgggactacaggggttcaccactacacctggctaattttttgtatttttagtagagataaggtttcaccatgttggtcaggctggtcttgaactcctgacatcaagtaatccatccgcctcagcctcccaaagtgctgagattacaggcatgagccactgtgcctggccctgagcttaaaataaaagttaaattaaaaaaaaaataatgttgatgttttcatttttgcaatcaatagcttagttagactcaaattgcaaactgtcattgcctgtagtaggcagtggcatagaactcaattcagctcttttaacctgagttttaagctgctttcagattgccccacacatacatggttcaggagtcagccagagacttgggctgagtttaaacatagaatctggggttgtcctcttctggctgtcttctttcttgggcatctgcatcattctctagcacctatggtttttccaggctctttcccccagtttcctccagtcagaaagatggcaagagtttttgctgcctgccctcccccagtccttgtgccaacaccaccaccattgcagctgcctccagggaaaaactgcaaaaaccaaatcacttgctccaggtgttgactcctcttcaaaatctatttttgttaaatctccaaagcctcaaataggttttcttcctagaatttatatctgttatttgtagcaggattggtctgtaaggcactcagtcttctacatcatgggtcagcagattacagcccttgggttaaatccagccacctgcttgttttattaataaagttttgttggaactaaacc

SEQ ID NO: 379933 - DNA, 185 bp, Homo sapiens
tggcatatgaaaatttattactacagtgttttcaccattaatatttatgatcttggtctttccttcttgcctttgtatagggccaaaagagaaacattggctactttgacaaccttaaagcggaaagaccaagatcataaatattaatggtgaaaacactgtagtaataaactttcatatgccga

SEQ ID NO: 379934 - DNA, 1684 bp, Homo sapiens
agtgcgcacgctccgactcggccgtggcggacctgactgaaggaggccgcggacctgactgaaggaggccacggccacttctggttggcctcggggcgcgctggctcggctcttcctccgccctcgaggcccccgcagtcccatcattcagttccgtagggtcaccggcgcggcagtggcctcgcagggcgctgggtccctctccccagctctcctccccctggccccgtcgccccgccctcgccgggctgggctgcggggtcaggggccgagcggagagggttatcatttaacatggaagaagatgagttcattggagaaaaaacattccaacgttattgtgcagaattcattaaacattcacaacagataggtgatagttgggaatggagaccatcaaaggactgttctgatggctacatgtgcaaaatacactttcaaattaagaatgggtctgtgatgtcacatctaggagcatctacccatggacagacatgtcttcccatggaggaggctttcgagctacccttggatgattgtgaagtgattgaaactgcagcagcgtccgaagtgattaaatatgagtatcatgtcttatattcctgtagctaccaagtgcctgtactttactttagggcaagctttttagatgggagacctttaactctgaaggacatatgggaaggagttcatgagtgctataagatgcgactgctacagggaccatgggacactattacgcaacaggaacatccaatacttgggcaacccttttttgtacttcatccctgcaagacgaatgaattcatgactcctgtattaaagaattctcagaaaatcaataagaatgtcaactatatcacatcatggctgagcattgtagggccagttgttgggctgaatctacctctgagttatgccaaagcaacgtctcaggatgaacgaaatgtccattaacaagattcttctattgagtttaggaattgcggcacgaagaatgccaagagtttacctggccagccctggctttaataggactgataccatggaatatttcatctcaccaagatgtgacatggattatttttcccttggacacaaatgtctacagcaactgatgtttgataggctgaatgtttagaagaaacacttcaaagggatacatcatggccaggcatggtggctcacacctgtaatccaagcactttgggaggccaaggtgggagcatcacttgatcctgggagttcgagaccagcctgggcaacatggtgaaaccctgtcggtacaaaaaaatacaaaaatttgcctgtttatggtggtgtgttcctgtagtcccagctccccaggaggctgaggtgggaggttggctttaacccaggaggcagaggttgcagtgagctgagactgtgccactgcagtccagcctgggtgacagagccagacactgtctcgggaaaaaaaaaaaaaaaaaaaagacacatcactataaatagcaaaaaaacaaatctaacttattaatactaggaataccaacattattagggcacttgcaggttattcttttctaggccaagtacttcacttccatttgtctgacatggagattgagggagaaatgtatttgtgtgttcattttaatgtaagatatataaaaattaaattactggatttacctgtccctga

SEQ ID NO: 379935 - DNA, 2336 bp, Homo sapiens
agtgcgcacgctccgactcggccgtggcggacctgactgaaggaggccgcggacctgactgaaggaggccacggccacttctggttggcctcggggcgcgctggctcggctcttcctccgccctcgaggcccccgcagtcccatcattcagttccgtagggtcaccggcgcggcagtggcctcgcagggcgctgggtccctctccccagctctcctccccctggccccgtcgccccgccctcgccgggctgggctgcggggtcaggggccgagcggagagggttatcatttaacatggaagaagatgagttcattggagaaaaaacattccaacgttattgtgcagaattcattaaacattcacaacagataggtgatagttgggaatggagaccatcaaaggactgttctgatggctacatgtgcaaaatacactttcaaattaagaatgggtctgtgatgtcacatctaggagcatctacccatggacagacatgtcttcccatggaggaggctttcgagctacccttggatgattgtgaagtgattgaaactgcagcagcgtccgaagtgattaaatatgagtatcatgtcttatattcctgtagctaccaagtgcctgtactttactttagggcaagctttttagatgggagacctttaactctgaaggacatatgggaaggagttcatgagtgctataagatgcgactgctacagggaccatgggacactattacgcaacaggaacatccaatacttgggcaacccttttttgtacttcatccctgcaagacgaatgaattcatgactcctgtattaaagaattctcagaaaatcaataagtaagaaacaccatcaagatacattggcttctactctgattttacaaagtgaatgtcaactatatcacatcatggctgagcattgtagggccagttgttgggctgaatctacctctgagttatgccaaagcaacgtctcaggatgaacgaaatgtccattaacaagattcttctattgagtttaggaattgcggcacgaagaatgccaagagtttacctggccagccctggctttaataggactgataccatggaatatttcatctcaccaagatgtgacatggattatttttcccttggacacaaatgtctacagcaactgatgtttgataggctgaatgtttagaagaaacacttcaaagggatacatcatggccaggcatggtggctcacacctgtaatccaagcactttgggaggccaaggtgggagcatcacttgatcctgggagttcgagaccagcctgggcaacatggtgaaaccctgtcggtacaaaaaaatacaaaaatttgcctgtttatggtggtgtgttcctgtagtcccagctccccaggaggctgaggtgggaggttggctttaacccaggaggcagaggttgcagtgagctgagactgtgccactgcagtccagcctgggtgacagagccagacactgtctcgggaaaaaaaaaaaaaaaaaaaagacacatcactataaatagcaaaaaaacaaatctaacttattaatactaggaataccaacattattagggcacttgcaggttattcttttctaggccaagtacttcacttccatttgtctgacatggagattgagggagaaatgtatttgtgtgttcattttaatgtaagatatataaaaattaaattactggatttacctgtccctgaaactggtgttataaacatgacctatcttaagtgattttcccacaatcaaactcaggaacaatagattatttctgttttactccaaaagagagagagagagtgagtgtgagtgtgtgtgtgtgtgtgtgtatgtgtgggtgtttgtgtagatagttgtaaaacaaagaaaaaacacaatattttactgtgagataatatgttttaccagcaaagtgtggcatagtaattagaagttttctaaaaagctataggagatatttaaacattaaaatttctttttgacctatagtaataaaacaatggtcattttacccctctgcttctcaaccccacagctgctctgctgtactctttgagggctcttgagcgagtcttcatgtccctgagacttattttcctcatctttaatttgaaactaacaagctacctcatagggttgctgtgagaaccacatgagatcattaatgcatgataagatattgtaaagtattatacgaatattcattaaatgctcacctttcttgtatataattggtattcactaaggctgtaaataagtttcatagccagttaagtattaagataaacctaacctggaacaa

SEQ ID NO: 379936 - DNA, 1766 bp, Homo sapiens
agtgcgcacgctccgactcggccgtggcggacctgactgaaggaggccgcggacctgactgaaggaggccacggccacttctggttggcctcggggcgcgctggctcggctcttcctccgccctcgaggcccccgcagtcccatcattcagttccgtagggtcaccggcgcggcagtggcctcgcagggcgctgggtccctctccccagctctcctccccctggccccgtcgccccgccctcgccgggctgggctgcggggtcaggggccgagcggagagggttatcatttaacatggaagaagatgagttcattggagaaaaaacattccaacgttattgtgcagaattcattaaacattcacaacagataggtgatagttgggaatggagaccatcaaaggactgttctgatggctacatgtgcaaaatacactttcaaattaagaatgggtctgtgatgtcacatctaggagcatctacccatggacagacatgtcttcccatggaggaggctttcgagctacccttggatgattgtgaagtgattgaaactgcagcagcgtccgaagtgattaaatatgagtatcatgtcttatattcctgtagctaccaagtgcctgtactttactttagggcaagctttttagatgggagacctttaactctgaaggacatatgggaaggagttcatgagtgctataagatgcgactgctacagggaccatgggacactattacgcaacaggaacatccaatacttgggcaacccttttttgtacttcatccctgcaagacgaatgaattcatgactcctgtattaaagaattctcagaaaatcaataagtaagaaacaccatcaagatacattggcttctactctgattttacaaagtgaatgtcaactatatcacatcatggctgagcattgtagggccagttgttgggctgaatctacctctgagttatgccaaagcaacgtctcaggatgaacgaaatgtccattaacaagattcttctattgagtttaggaattgcggcacgaagaatgccaagagtttacctggccagccctggctttaataggactgataccatggaatatttcatctcaccaagatgtgacatggattatttttcccttggacacaaatgtctacagcaactgatgtttgataggctgaatgtttagaagaaacacttcaaagggatacatcatggccaggcatggtggctcacacctgtaatccaagcactttgggaggccaaggtgggagcatcacttgatcctgggagttcgagaccagcctgggcaacatggtgaaaccctgtcggtacaaaaaaatacaaaaatttgcctgttaaaaaaaaagaaaaaagaaaagaaaaaaaaaaaaaacagaaaaaaaaagaaaaaaagaaaaggaaaaaagcaggcgagaaacaaacaaagaagacaaacaaggaaaaatacgaagaaaaaagaaacagagaaagaaaggagacagaaaaaggcggagggggcggcgtcgagaaataagtatcccaccaccagggggcgcggccaaacaagtcgacgaccgaccaacaccttgtataaggacgagaaagggccgcccactaaaggggggggttgctaaatcatacagagcacgggcgggggcgggtgataacaagaaggatgtgaggacagcacgcactccttcgcgcgagtactgctgtgggcaccaacctccttgggggggagaaacaggggaacagcacacg

SEQ ID NO: 379937 - DNA, 1851 bp, Homo sapiens
atgtggtatacagacatcttgcttatgcagactgctctctagctgtggtttcttatcttcagaactctgcagatgctggtcagttattctctggtcatgaaagttgcagtggcttgtgaggctggactgatggttctcagttttgaggctttcgagctacccttggatgattgtgaagtgattgaaactgcagcagcgtccgaagtgattaaatatgggagacctttaactctgaaggacatatgggaaggagttcatgagtgctataagatgcgactgctacagggaccatgggacactattacgcaacaggaacatccaatacttgggcaacccttttttgtacttcatccctgcaagacgaatgaattcatgactcctgtattaaagaattctcagaaaatcaataagaatgtcaactatatcacatcatggctgagcattgtagggccagttgttgggctgaatctacctctgagttatgccaaagcaacgtctcaggatgaacgaaatgtccattaacaagattcttctattgagtttaggaattgcggcacgaagaatgccaagagtttacctggccagccctggctttaataggactgataccatggaatatttcatctcaccaagatgtgacatggattatttttcccttggacacaaatgtctacagcaactgatgtttgataggctgaatgtttagaagaaacacttcaaagggatacatcatggccaggcatggtggctcacacctgtaatccaagcactttgggaggccaaggtgggagcatcacttgatcctgggagttcgagaccagcctgggcaacatggtgaaaccctgtcggtacaaaaaaatacaaaaatttgcctgtttatggtggtgtgttcctgtagtcccagctccccaggaggctgaggtgggaggttggctttaacccaggaggcagaggttgcagtgagctgagactgtgccactgcagtccagcctgggtgacagagccagacactgtctcgggaaaaaaaaaaaaaaaaaaaagacacatcactataaatagcaaaaaaacaaatctaacttattaatactaggaataccaacattattagggcacttgcaggttattcttttctaggccaagtacttcacttccatttgtctgacatggagattgagggagaaatgtatttgtgtgttcattttaatgtaagatatataaaaattaaattactggatttacctgtccctgaaactggtgttataaacatgacctatcttaagtgattttcccacaatcaaactcaggaacaatagattatttctgttttactccaaaagagagagagagagtgagtgtgagtgtgtgtgtgtgtgtgtgtatgtgtgggtgtttgtgtagatagttgtaaaacaaagaaaaaacacaatattttactgtgagataatatgttttaccagcaaagtgtggcatagtaattagaagttttctaaaaagctataggagatatttaaacattaaaatttctttttgacctatagtaataaaacaatggtcattttacccctctgcttctcaaccccacagctgctctgctgtactctttgagggctcttgagcgagtcttcatgtccctgagacttattttcctcatctttaatttgaaactaacaagctacctcatagggttgctgtgagaaccacatgagatcattaatgcatgataagatattgtaaagtattatacgaatattcattaaatgctcacctttcttgtatataattggtattcactaaggctgtaaataagtttcatagccagttaagtattaagataaacctaacctggaacaa

SEQ ID NO: 379938 - DNA, 1316 bp, Homo sapiens
gcgtccgggccgagcggagagggtagagacggggtttcaccgtgttagccaagatggtctcgatctcctgacctcgtgatccgcccgcctcggcctcccaaagtgctgggattacaggcgtgagccactgcgcccggcctgttatcatttaacatggaagaagatgagttcattggagaaaaaacattccaacgttattgtgcagaattcattaaacattcacaacagataggtgatagttgggaatggagaccatcaaaggactgttctgatggctacatgtgcaaaatacactttcaaattaagaatgggtctgtgatgtcacatctaggagcatctacccatggacagacatgtcttcccatggaggaggctttcgagctacccttggatgattgtgaagtgattgaaactgcagcagcgtccgaagtgattaaatatgagtatcatgtcttatattcctgtagctaccaagtgcctgtactttactttagggcaagctttttagatgggagacctttaactctgaaggacatatgggaaggagttcatgagtgctataagatgcgactgctacagggaccatgggacactattacgcaacagggccaaaagagaaacattggctactttgacaaccttaaagcggactccaggaatatcaccaacagcatgacctttgcgaccaaatccagcaaccagaacttcatcattttcctggaataaaataagaagtttatttctggtgttggtggcgatcacaaaaatactttcatgtgaggaaactcccttgcatcagataaaaatgtgagggaggccaccccaacaacagaaggtacgatagagttgaaatactcacctcaataaagttcaagcaaccgtcattgggtacaaaggctgtgattttcttgccattcttgatcagctggacccttacacacttcctaatggcagaatttggctgtttggcttcaactcctctgaaatacaaaaggcacagcactgtgagctggctttctgaaaaagattatcttttcatattaactagagaactaatgagaaactgtttctatcttttcaatctaacctcaaatggctgagctgaactcctgtgatgtcaacctagttttctgccagtcttaatttcattagcacaatgggggaaatttctagaccttttacagttataaaagtagactggagtggcagcgtgggcctgtagtcccaactacttgcgaggctgacgtgggaggatctatgcctagaacgtcaagatggccagcctgtgtgacaagggaccctatctcaaaaaaaaa

SEQ ID NO: 379939 - DNA, 790 bp, Homo sapiens
tggcatatgaaaatttattactacagtgttttcaccattaatatttatgatcttggtctttccttcttgcctttgtatagggccaaaagagaaacattggctactttgacaaccttaaagcggactccaggaatatcaccaacagcatgacctttgcgaccaaatccagcaaccagaacttcatcattttcctggaataaaataagaagtttatttctggtgttggtggcgatcacaaaaatactttcatgtgaggaaactcccttgcatcagataaaaatgtgagggaggccaccccaacaacagaaggtacgatagagttgaaatactcacctcaataaagttcaagcaaccgtcattgggtacaaaggctgtgattttcttgccattcttgatcagctggacccttacacacttcctaatggcagaatttggctgtttggcttcaactcctctgaaatacaaaaggcacagcactgtgagctggctttctgaaaaagattatcttttcatattaactagagaactaatgagaaactgtttctatcttttcaatctaacctcaaatggctgagctgaactcctgtgatgtcaacctagttttctgccagtcttaatttcattagcacaatgggggaaatttctagaccttttacagttataaaagtagactggagtggcagcgtgggcctgtagtcccaactacttgcgaggctgacgtgggaggatctatgcctagaacgtcaagatggccagcctgtgtgacaagggaccctatctcaaaaaaaaa

SEQ ID NO: 379940 - DNA, 605 bp, Homo sapiens
gcgtccgggccgagcggagagggtagagacggggtttcaccgtgttagccaagatggtctcgatctcctgacctcgtgatccgcccgcctcggcctcccaaagtgctgggattacaggcgtgagccactgcgcccggcctgttatcatttaacatggaagaagatgagttcattggagaaaaaacattccaacgttattgtgcagaattcattaaacattcacaacagataggtgatagttgggaatggagaccatcaaaggactgttctgatggctacatgtgcaaaatacactttcaaattaagaatgggtctgtgatgtcacatctaggagcatctacccatggacagacatgtcttcccatggaggaggctttcgagctacccttggatgattgtgaagtgattgaaactgcagcagcgtccgaagtgattaaatatgagtatcatgtcttatattcctgtagctaccaagtgcctgtactttactttagggcaagctttttaggtaagaacatgtctgaagctaaaagtaaatttataacatttacatataaagcaaaaagcatatttggaaaattattctccagaggaaaaaaaataga

SEQ ID NO: 379941 - DNA, 832 bp, Homo sapiens
gcgtccgggccgagcggagagggtagagacggggtttcaccgtgttagccaagatggtctcgatctcctgacctcgtgatccgcccgcctcggcctcccaaagtgctgggattacaggcgtgagccactgcgcccggcctgttatcatttaacatggaagaagatgagttcattggagaaaaaacattccaacgttattgtgcagaattcattaaacattcacaacagataggtgatagttgggaatggagaccatcaaaggtaagaatggaaatgtttgttttctgtctcaaaagaggattttttgttttgttttgttttggtttgttgacaggtaaaacctccataattgaaattaaggtatgaaaactggtttgatttagtaaaagtcttaaattgaagaatgtcttacaacagatgtccattttcttacttcaactatatatattgattattatcaggctaatgaagtattattttgaaaagtccttacgtaacctgcttaatttaatagataaaaattagcatattaattatctgaatgtaaacagatgtttctgtggtgcttcaaatcatcaatcctaagttaatattcttaggaaactactttcgtctggagagtaaaaagacaatcttgaaaccaaaccataaacaatcacaaattctgaaatattgaggactgtattaattgggaatttcctattaatataaacatatttcaaaatattttttcttttttgagatcatctcactctgtcccccacgctggagtgcagtgagacgagatcgggtcattggattccaacctgggggacagagtgagattggttcc

SEQ ID NO: 379942 - DNA, 404 bp, Homo sapiens
aacggtgccaccatgatttagaacttcccacaggctaatgaagtattattttgaaaagtccttacgtaacctgcttaatttaatagataaaaattagcatattaattatctgaatgtaaacagatgtttctgtggtgcttcaaatcatcaatcctaagttaatattcttaggaaactactttcgtctggagagtaaaaagacaatcttgaaaccaaaccataaacaatcacaaattctgaaatattgaggactgtattaattgggaatttcctattaatataaacatatttcaaaatattttttcttttttgagatcatctcactctgtcccccacgctggagtgcagtgagacgagatcgggtcattggattccaacctgggggacagagtgagattggttcc

SEQ ID NO: 379943 - DNA, 614 bp, Homo sapiens
gcctggctaactgtattttagtttgtatatagacagagtcttgctgtgttgaccaggctggtctcgaactcctgggttcaagctgtcctcctgctttggcctcccaaattgctgggattacagatgtgagccaccacgcctggccaaaaccattttttagtggccttgaggccattctacatcccaaattttggtttattgacagaaataaatcaattggcagaattcctttcaatataattctaaagttgatgctaatacttagtttttgttatcatttaacatggaagaagatgagttcattggagaaaaaacattccaacgttattgtgcagaattcattaaacattcacaacagataggtgatagttgggaatggagaccatcaaaggtaagaatggaaatgtttgttttctgtctcaaaagaggattttttgttttgttttgttttggtttgttgacaggtaaaacctccataattgaaattaaggtatgaaaactggtttgatttagtaaaagtcttaaattgaagaatgtcttacaacagatgtccattttcttacttcaactatatatattgattattatcaggctaatgaagtattattttgaaa

SEQ ID NO: 379944 - DNA, 454 bp, Homo sapiens
acaggaatggatagttttattttagtactgatattcttaaataagtctttactgctcagttatttttcttttattctcttggcttttgttttatgttcttcagattcttctattgagtttaggaattgcggcacgaagaatgccaagagtttacctggccagccctggctttaataggactgataccatggaatatttcatctcaccaagatgtgacatggattatttttcccttggacacaaatgtctacagcaactgatgtttgataggctgaatgtttagaagaaacacttcaaagggatacatcatggccaggcatggtggctcacacctgtaatccaagcactttgggaggccaaggtgggagcatcacttgatcctgggagttcgagaccagcctgggcaacatggtgaaaccctgtcggtacaaaaaaatacaaaaatttgcctgtt

SEQ ID NO: 379945 - DNA, 1438 bp, Homo sapiens
agtgcgcacgctccgactcggccgtggcggacctgactgaaggaggccgcggacctgactgaaggaggccacggccacttctggttggcctcggggcgcgctggctcggctcttcctccgccctcgaggcccccgcagtcccatcattcagttccgtagggtcaccggcgcggcagtggcctcgcagggcgctgggtccctctccccagctctcctccccctggccccgtcgccccgccctcgccgggctgggctgcggggtcaggggccgagcggagagggttatcatttaacatggaagaagatgagttcattggagaaaaaacattccaacgttattgtgcagaattcattaaacattcacaacagataggtgatagttgggaatggagaccatcaaaggactgttctgatggctacatgtgcaaaatacactttcaaattaagaatgggtctgtgatgtcacatctaggagcatctacccatggacagacatgtcttcccatggaggtgaagtcttgctctgtcacccaggctggagtgcagttgcgtgatctcagctcactgcaacctccgccttctgggttcaagcagttctcctgcctcagccttccgagtaactgggactacaggggttcaccactacacctggctaattttttgtatttttagtagagataaggtttcaccatgttggtcaggctggtcttgaactcctgacatcaagtaatccatccgcctcagcctcccaaagtgctgagattacaggcatgagccactgtgcctggccctgagcttaaaataaaagttaaattaaaaaaaaaataatgttgatgttttcatttttgcaatcaatagcttagttagactcaaattgcaaactgtcattgcctgtagtaggcagtggcatagaactcaattcagctcttttaacctgagttttaagctgctttcagattgccccacacatacatggttcaggagtcagccagagacttgggctgagtttaaacatagaatctggggttgtcctcttctggctgtcttctttcttgggcatctgcatcattctctagcacctatggtttttccaggctctttcccccagtttcctccagtcagaaagatggcaagagtttttgctgcctgccctcccccagtccttgtgccaacaccaccaccattgcagctgcctccagggaaaaactgcaaaaaccaaatcacttgctccaggtgttgactcctcttcaaaatctatttttgttaaatctccaaagcctcaaataggttttcttcctagaatttatatctgttatttgtagcaggattggtctgtaaggcactcagtcttctacatcatgggtcagcagattacagcccttgggttaaatccagccacctgcttgttttattaataaagttttgttggaactaaacc

SEQ ID NO: 379946 - DNA, 2286 bp, Homo sapiens
agtgcgcacgctccgactcggccgtggcggacctgactgaaggaggccgcggacctgactgaaggaggccacggccacttctggttggcctcggggcgcgctggctcggctcttcctccgccctcgaggcccccgcagtcccatcattcagttccgtagggtcaccggcgcggcagtggcctcgcagggcgctgggtccctctccccagctctcctccccctggccccgtcgccccgccctcgccgggctgggctgcggggtcaggggccgagcggagagggttatcatttaacatggaagaagatgagttcattggagaaaaaacattccaacgttattgtgcagaattcattaaacattcacaacagataggtgatagttgggaatggagaccatcaaaggactgttctgatggctacatgtgcaaaatacactttcaaattaagaatgggtctgtgatgtcacatctaggagcatctacccatggacagacatgtcttcccatggaggaggctttcgagctacccttggatgattgtgaagtgattgaaactgcagcagcgtccgaagtgattaaatatgagtatcatgtcttatattcctgtagctaccaagtgcctgtactttactttagggcaagctttttagatgggagacctttaactctgaaggacatatgggaaggagttcatgagtgctataagatgcgactgctacagggaccatgggacactattacgcaacaggaacatccaatacttgggcaacccttttttgtacttcatccctgcaagacgaatgaattcatgactcctgtattaaagaattctcagaaaatcaataagaatgtcaactatatcacatcatggctgagcattgtagggccagttgttgggctgaatctacctctgagttatgccaaagcaacgtctcaggatgaacgaaatgtccattaacaagattcttctattgagtttaggaattgcggcacgaagaatgccaagagtttacctggccagccctggctttaataggactgataccatggaatatttcatctcaccaagatgtgacatggattatttttcccttggacacaaatgtctacagcaactgatgtttgataggctgaatgtttagaagaaacacttcaaagggatacatcatggccaggcatggtggctcacacctgtaatccaagcactttgggaggccaaggtgggagcatcacttgatcctgggagttcgagaccagcctgggcaacatggtgaaaccctgtcggtacaaaaaaatacaaaaatttgcctgtttatggtggtgtgttcctgtagtcccagctccccaggaggctgaggtgggaggttggctttaacccaggaggcagaggttgcagtgagctgagactgtgccactgcagtccagcctgggtgacagagccagacactgtctcgggaaaaaaaaaaaaaaaaaaaagacacatcactataaatagcaaaaaaacaaatctaacttattaatactaggaataccaacattattagggcacttgcaggttattcttttctaggccaagtacttcacttccatttgtctgacatggagattgagggagaaatgtatttgtgtgttcattttaatgtaagatatataaaaattaaattactggatttacctgtccctgaaactggtgttataaacatgacctatcttaagtgattttcccacaatcaaactcaggaacaatagattatttctgttttactccaaaagagagagagagagtgagtgtgagtgtgtgtgtgtgtgtgtgtatgtgtgggtgtttgtgtagatagttgtaaaacaaagaaaaaacacaatattttactgtgagataatatgttttaccagcaaagtgtggcatagtaattagaagttttctaaaaagctataggagatatttaaacattaaaatttctttttgacctatagtaataaaacaatggtcattttacccctctgcttctcaaccccacagctgctctgctgtactctttgagggctcttgagcgagtcttcatgtccctgagacttattttcctcatctttaatttgaaactaacaagctacctcatagggttgctgtgagaaccacatgagatcattaatgcatgataagatattgtaaagtattatacgaatattcattaaatgctcacctttcttgtatataattggtattcactaaggctgtaaataagtttcatagccagttaagtattaagataaacctaacctggaacaa

SEQ ID NO: 379947 - DNA, 1543 bp, Homo sapiens
gcgtccgggccgagcggagagggtagagacggggtttcaccgtgttagccaagatggtctcgatctcctgacctcgtgatccgcccgcctcggcctcccaaagtgctgggattacaggcgtgagccactgcgcccggcctgttatcatttaacatggaagaagatgagttcattggagaaaaaacattccaacgttattgtgcagaattcattaaacattcacaacagataggtgatagttgggaatggagaccatcaaaggactgttctgatggctacatgtgcaaaatacactttcaaattaagaatgggtctgtgatgtcacatctaggagcatctacccatggacagacatgtcttcccatggaggaggctttcgagctacccttggatgattgtgaagtgattgaaactgcagcagcgtccgaagtgattaaatatgagtatcatgtcttatattcctgtagctaccaagtgcctgtactttactttagggcaagctttttagatgggagacctttaactctgaaggacatatgggaaggagttcatgagtgctataagatgcgactgctacagggaccatgggacactattacgcaacaggaacatccaatacttgggcaacccttttttgtacttcatccctgcaagacgaatgaattcatgactcctgtattaaagaattctcagaaaatcaataagaatgtcaactatatcacatcatggctgagcattgtagggccagttgttgggctgaatctacctctgagttatgccaaagcaacgtctcaggatgaacgaaatgtccattaacaagattcttctattgagtttaggaattgcggcacgaagaatgccaagagtttacctggccagccctggctttaataggactgataccatggaatatttcatctcaccaagatgtgacatggattatttttcccttggacacaaatgtctacagcaactgatgtttgataggctgaatgtttagaagaaacacttcaaagggatacatcatggccaggcatggtggctcacacctgtaatccaagcactttgggaggccaaggtgggagcatcacttgatcctgggagttcgagaccagcctgggcaacatggtgaaaccctgtcggtacaaaaaaatacaaaaatttgcctgtttatggtggtgtgttcctgtagtcccagctccccaggaggctgaggtgggaggttggctttaacccaggaggcagaggttgcagtgagctgagactgtgccactgcagtccagcctgggtgacagagccagacactgtctcgggaaaaaaaaaaaaaaaaaaaagacacatcactataaatagcaaaaaaacaaatctaacttattaatactaggaataccaacattattagggcacttgcaggttattcttttctaggccaagtacttcacttccatttgtctgacatggagattgagggagaaatgtatttgtgtgttcattttaatgtaagatatataaaaattaaattactggatttacctgtccctga

SEQ ID NO: 379948 - DNA, 2006 bp, Homo sapiens
gcgtccgggccgagcggagagggtagagacggggtttcaccgtgttagccaagatggtctcgatctcctgacctcgtgatccgcccgcctcggcctcccaaagtgctgggattacaggcgtgagccactgcgcccggcctgttatcatttaacatggaagaagatgagttcattggagaaaaaacattccaacgttattgtgcagaattcattaaacattcacaacagataggtgatagttgggaatggagaccatcaaaggactgttctgatggctacatgtgcaaaatacactttcaaattaagaatgggtctgtgatgtcacatctaggagcatctacccatggacagacatgtcttcccatggagatgggagacctttaactctgaaggacatatgggaaggagttcatgagtgctataagatgcgactgctacagggaccatgggacactattacgcaacaggaacatccaatacttgggcaacccttttttgtacttcatccctgcaagacgaatgaattcatgactcctgtattaaagaattctcagaaaatcaataagaatgtcaactatatcacatcatggctgagcattgtagggccagttgttgggctgaatctacctctgagttatgccaaagcaacgtctcaggatgaacgaaatgtccattaacaagattcttctattgagtttaggaattgcggcacgaagaatgccaagagtttacctggccagccctggctttaataggactgataccatggaatatttcatctcaccaagatgtgacatggattatttttcccttggacacaaatgtctacagcaactgatgtttgataggctgaatgtttagaagaaacacttcaaagggatacatcatggccaggcatggtggctcacacctgtaatccaagcactttgggaggccaaggtgggagcatcacttgatcctgggagttcgagaccagcctgggcaacatggtgaaaccctgtcggtacaaaaaaatacaaaaatttgcctgtttatggtggtgtgttcctgtagtcccagctccccaggaggctgaggtgggaggttggctttaacccaggaggcagaggttgcagtgagctgagactgtgccactgcagtccagcctgggtgacagagccagacactgtctcgggaaaaaaaaaaaaaaaaaaaagacacatcactataaatagcaaaaaaacaaatctaacttattaatactaggaataccaacattattagggcacttgcaggttattcttttctaggccaagtacttcacttccatttgtctgacatggagattgagggagaaatgtatttgtgtgttcattttaatgtaagatatataaaaattaaattactggatttacctgtccctgaaactggtgttataaacatgacctatcttaagtgattttcccacaatcaaactcaggaacaatagattatttctgttttactccaaaagagagagagagagtgagtgtgagtgtgtgtgtgtgtgtgtgtatgtgtgggtgtttgtgtagatagttgtaaaacaaagaaaaaacacaatattttactgtgagataatatgttttaccagcaaagtgtggcatagtaattagaagttttctaaaaagctataggagatatttaaacattaaaatttctttttgacctatagtaataaaacaatggtcattttacccctctgcttctcaaccccacagctgctctgctgtactctttgagggctcttgagcgagtcttcatgtccctgagacttattttcctcatctttaatttgaaactaacaagctacctcatagggttgctgtgagaaccacatgagatcattaatgcatgataagatattgtaaagtattatacgaatattcattaaatgctcacctttcttgtatataattggtattcactaaggctgtaaataagtttcatagccagttaagtattaagataaacctaacctggaacaa

SEQ ID NO: 379949 - DNA, 1555 bp, Homo sapiens
agtgcgcacgctccgactcggccgtggcggacctgactgaaggaggccgcggacctgactgaaggaggccacggccacttctggttggcctcggggcgcgctggctcggctcttcctccgccctcgaggcccccgcagtcccatcattcagttccgtagggtcaccggcgcggcagtggcctcgcagggcgctgggtccctctccccagctctcctccccctggccccgtcgccccgccctcgccgggctgggctgcggggtcaggggccgagcggagagggttatcatttaacatggaagaagatgagttcattggagaaaaaacattccaacgttattgtgcagaattcattaaacattcacaacagataggtgatagttgggaatggagaccatcaaaggactgttctgatggctacatgtgcaaaatacactttcaaattaagaatgggtctgtgatgtcacatctaggagcatctacccatggacagacatgtcttcccatggaggaggctttcgagctacccttggatgattgtgaagtgattgaaactgcagcagcgtccgaagtgattaaatatgagtatcatgtcttatattcctgtagctaccaagtgcctgtactttactttagggcaagctttttagatgggagacctttaactctgaaggacatatgggaaggagttcatgagtgctataagatgcgactgctacagggaccatgggacactattacgcaacaggaacatccaatacttgggcaacccttttttgtacttcatccctgcaagacgaatgaattcatgactcctgtattaaagaattctcagaaaatcaataaggccaaaagagaaacattggctactttgacaaccttaaagcggactccaggaatatcaccaacagcatgacctttgcgaccaaatccagcaaccagaacttcatcattttcctggaataaaataagaagtttatttctggtgttggtggcgatcacaaaaatactttcatgtgaggaaactcccttgcatcagataaaaatgtgagggaggccaccccaacaacagaaggtacgatagagttgaaatactcacctcaataaagttcaagcaaccgtcattgggtacaaaggctgtgattttcttgccattcttgatcagctggacccttacacacttcctaatggcagaatttggctgtttggcttcaactcctctgaaatacaaaaggcacagcactgtgagctggctttctgaaaaagattatcttttcatattaactagagaactaatgagaaactgtttctatcttttcaatctaacctcaaatggctgagctgaactcctgtgatgtcaacctagttttctgccagtcttaatttcattagcacaatgggggaaatttctagaccttttacagttataaaagtagactggagtggcagcgtgggcctgtagtcccaactacttgcgaggctgacgtgggaggatctatgcctagaacgtcaagatggccagcctgtgtgacaagggaccctatctcaaaaaaaaa

SEQ ID NO: 379950 - DNA, 984 bp, Homo sapiens
atgtggtatacagacatcttgcttatgcagactgctctctagctgtggtttcttatcttcagaactctgcagatgctgatgggagacctttaactctgaaggacatatgggaaggagttcatgagtgctataagatgcgactgctacagggaccatgggacactattacgcaacaggaacatccaatacttgggcaacccttttttgtacttcatccctgcaagacgaatgaattcatgactcctgtattaaagaattctcagaaaatcaataaggccaaaagagaaacattggctactttgacaaccttaaagcggactccaggaatatcaccaacagcatgacctttgcgaccaaatccagcaaccagaacttcatcattttcctggaataaaataagaagtttatttctggtgttggtggcgatcacaaaaatactttcatgtgaggaaactcccttgcatcagataaaaatgtgagggaggccaccccaacaacagaaggtacgatagagttgaaatactcacctcaataaagttcaagcaaccgtcattgggtacaaaggctgtgattttcttgccattcttgatcagctggacccttacacacttcctaatggcagaatttggctgtttggcttcaactcctctgaaatacaaaaggcacagcactgtgagctggctttctgaaaaagattatcttttcatattaactagagaactaatgagaaactgtttctatcttttcaatctaacctcaaatggctgagctgaactcctgtgatgtcaacctagttttctgccagtcttaatttcattagcacaatgggggaaatttctagaccttttacagttataaaagtagactggagtggcagcgtgggcctgtagtcccaactacttgcgaggctgacgtgggaggatctatgcctagaacgtcaagatggccagcctgtgtgacaagggaccctatctcaaaaaaaaa

SEQ ID NO: 379951 - DNA, 388 bp, Homo sapiens
cacgatgatctctgtggtcagggaccacgcagaagactcacatcatgttggtggtgggcccaacaatatgtcacaatgttttctgagaagaaggtcaaggaaagacagacctggaaataccccagtaaaaggctaatcagaatctcagaaaaattgcaaccattagtcctttatctacctatgacctggcagctcccgccctgcttcgagttctcccactttcctggacaatgtacaccttccatatatcgattaatgtctcctgactcctaaaatgtataaaatcaagctgtgacccaaccaccttaggcccgcgttgtcacgacctcgtgaggcggtgtcacgggtgtgtctttaatcttggcaaaataaactttctaaattgaga

SEQ ID NO: 379952 - DNA, 694 bp, Homo sapiens
gaggcagcaggtctcctctgctgtctggagaatgctccagggaagtggcctggctggaggacgtgaaggcggtggagacagtgatcaggagcttgagctttggggcccacagggtgcttaggagggccctaaggcagagtcaacacccagagctgtgagtgccaggccccgtgtacccattgcccagtgggtattgctaatatttgaaaggacttgagaaagaacagtagcgtgggtcttgtggaaagtcttattttcctgcataaccccagccccctgaggctctgtgaggccattgggccttctgaggacacggtcaggacattttggggatcagaggcgagctgagagaagaacatttaaaaagcatttgcagccgggcgcagtgacccacacctgtaatcccaggacttggggaggccagggtgggcagatcacctggggtcaggagttcgagaccagcctggccaacatggtgaaaccctgtctctaccaaaaatacaaaaattagccgggcgtggtggtgggcgcctgtaatcccagctacatgagaggctgaggcaggagaattgcttgagcccgggaggtggaagttacagtgagccaatatcgcaccatagcactttagcttgggtggcagagcaagactccatctcaaaaaaataaaataaataaaaagcatttgcttctgaaa

SEQ ID NO: 379953 - DNA, 414 bp, Homo sapiens
tcccgggtcacccccaaactagggagccaccagactgacacctgaggcagacggtgctttcccaattccaaaaggaagtcactttcattacaggacattggaaaatggagaaaaatgtgaagacaagaaattacccatcacttcaagaacaagagagaaatcactgtgggatgttttgctcccttctttacctacctcatttatataagtgagtattatatatacacacaatgtatgtgacgtgtattgtgtatacacacattatatatgtgcacaacatatactgctctttcacgtacgtaatgagcatttcacaatttcagatccgtgtaagcatgtgtgtcaggcaaacacactgctaaactatcactaattgaatcacgttcttattgtagggttggaataggggttgga

SEQ ID NO: 379954 - DNA, 399 bp, Homo sapiens
gaaactgcttggaacagattcagaggcatcccctgcaggcagcctctggaggagtgtgtgggagggcagtgcaggggatgccactgaaataaaactcccaaaaagaaaccaaaaactcggccaggcgcggtggctcatgcctgtaatcccagcactttgggaggctgaggcagatggatcacgaggtcaggagatcaagaccatcctggccaacatggtgaaatcccatctctactaaaaatataaaaattagctggctgtggtggcacgtgtctgtaatcccagctactcaggaggctgaggcaggagaatcatttgaaccagggagtcagaggttgcagtgagccgacatcgtgccactgcactccagcctggcgacagagcaagactctgtcttaa

SEQ ID NO: 379955 - DNA, 560 bp, Homo sapiens
cacattagttttacagacttttttccctgtgtatgtgcatatatgtattcatattctcttggcatgcacacacacattttgttattttttagttttgctgaaccatttaagactcagtatggacatcatgaacctttactcttaaatatttaaatgtgtgtcccctaagaacaaggactatcactttctcttacataaccatagttcaattatcaaatttaggaaatttaacattcatacaatactattatctaatatacaatccatagtcagattttatcagttgtcccagtaatgtcctttataacaatcttcccctccccattccttcaccctttgccttcatccaagccagtccataatcacatattacagtttgttgtgacctccttggtctcctttaacctggagtggttctttagtctttttgcattttgtttttcatgagctctgaagttttttgagggatagttctttaataactttctcatattgttccaggtttctggtcttcactctagcactaattgaaaaaaaaaaaatttgttttccgagaactg

SEQ ID NO: 379956 - DNA, 402 bp, Homo sapiens
atttgtaaagctctgtataacttggctctaaagcaggctatcattattattagacagtatttagtttttagactttacttgtcctggccatcccattgtgctggtattataaaacatagctactgtgcagttaccaaattgattgtggcaatgttagtaatactgtgtataattataatttttcctttttagtagagggaaaggaaatgtcacaaaaaggtctcacctggtatgctgtatttttacatccttaggaacagtttaactgaaaagtagtagtttaattaccactatttcacagcatagaaatacacataaggttttgaagtttgcatctggtaattactctgttagcactcagacttggggagatgatatttcttccttgcaaggagttatata

SEQ ID NO: 379957 - DNA, 389 bp, Homo sapiens
gccacgaattagaagacttaatattgttaagatgtcagttcttctgaaattgatcaacagattacttgtaatcccaataaaaatttcagcaggctgtttttgttttggtataaattagtaacatgattttaaaattctaagctgtggctgggcaaggtatctcacgcctgtagtcccggcactttgggaggctgaggcgggcagttcaccttgggtcgggagcttgagaccagcctggccaacatggcaaaaccctgtttctactaaaggtacaaaaattggctgggcgtggtgttgggcacttgtggtcccagctacttgggaggctgaggcaggagaatcacttgaacccgggaggcagaggttacagtgagccgagttcgtgccac

SEQ ID NO: 379958 - DNA, 322 bp, Homo sapiens
gcggaggttgtggcgagccatgatcgcgctgttgcactccagcctgggcaacaagagcgaaactccatctcaaaaaaaaaacaaaagacaaaacaaacaaaaaaaaaccttttatcttctgatttaatgtggcaaatatgagaagaaattgaaatgccaaccaaaatgccattgtagagtttataatcccatgttttttggccgtcccctgttacctctcctagataaacaggagttgaatgtcttgtgtcctggatttttatgggtctcttaggttactacaataacaagatcactcaatcccgtggagtctgtcctatta

SEQ ID NO: 379959 - DNA, 333 bp, Homo sapiens
tgatggggctagtcgccctcataactctctcttttcagtatttttctagctgttcttttgtgttcatttttctatatgagaattttagagtcaatgcatgtagctctctaagcaaaagtgttttctctggtccctttacatccaagtttcttaaaagactgtttaatactgattttaattcctctccatttccttctttagtcctctcaaagattcctttgtccattgtgatagcattaaatttgtaaatttgagtacaattaaaataactctgccaaaaatatgtcagtaactgattcctctgcagtgattatgatttaatcagattgacgt

SEQ ID NO: 379960 - DNA, 447 bp, Homo sapiens
agtttccaaattctagagaaaacaggtagagagagactaatatgctccaaagtttgttcacaggaatatactttactcaatttttaaaagctataaatagctcaaaggaaaagttttcttgattccaaagtcagccaattgtggtgcttcggtctatttcctttgggttgggagtctcctcagtttagttgcttcatggtttgccaggaagatgttactggaaaggggtcctgatccagaccccaagagagggttgttggacctcacacaagaaagaagttggggagagtccattgagaaaagtgaaagcaagtttattaagaaagtaaaggaataaagaagggctactccataggcagagcagccaggagtttctttttgggtgatgaaaatgttctgaaattaatggcaatggttgcacagttctgttaatgtaccaaaaaaaaa

SEQ ID NO: 379961 - DNA, 420 bp, Homo sapiens
agccaccgtgcctggcctgcttgttgttttcatctcatcctgatttccaaatacaggagagaagctgaattggtgttcactaacaagcacaggagctttgttatatttacagtgtcattcttggcaaaacctgaagggtgtgttcgtggggtgatgaggttcagtcacctgtgatctgtgcatctggccagcactgtggtgacatccttaggaatccatggggagagagaaagcattcaggagttagtgggtcacgtttgacaagggccaataaagaaatatgcaaagacaaaaaacaagaagaacattgtcatattttctaccttttgtttatataaatttatatcaatgattttagcttatgttaatatgcaatgtatataatatgctaacatttacaatatatgtttatagtttaaa

SEQ ID NO: 379962 - DNA, 282 bp, Homo sapiens
ccacaacttaaaataaacccatggtactgattgttggtccaagaaagcccatctgttagagactatgaagagaagagaaaattcaaatgttcccattcttgttagcatctctaaatttggaggaagatgaggttcaaactataagctaaaatgaggtttttggattattagccccacctgggtttgaatcctggctttcctgatttactagatgatagatgagtatcttttctttctttttttttcttttttttttggagacagtgtcttgctctgtcactc

SEQ ID NO: 379963 - DNA, 411 bp, Homo sapiens
ttgaaccttgtctttgacatataggtaactacacaaataagttcatatgtagctgtgcactttcatcctcttatttgttcggtttggttcatttttaataagtttacacaagcttaaatgagaatcccatgtcctttttagaattggttgcacccagcaacatttgccatcccaggaggttgggcttctcaccacacctctctagggagatgagtttgcccaaggcctagccgaaagtgtttaaagctgccaccttgctgctctggcatccataagatacttcagaggtctagctagtcctcagcatggttgacagagtcttagagataagtacatttagttcagcaaagtcctatgaaaaacacaattttaggcaggtgcagtggctcacgcctgtaaccccagcacttt

SEQ ID NO: 379964 - DNA, 544 bp, Homo sapiens
ttgaaccttgtctttgacatataggtaactacacaaataagttcatatgtagctgtgcactttcatcctcttatttgttcggtttggttcatttttaataagtttacacaagcttaaatgagaatcccatgtcctttttagaattggttgcacccagcaacatttgccatcccaggaggttgggcttctcaccacacctctctagggagatgagtttgcccaaggcctagccgaaagtgtttaaagctgccaccttgctgctctggcatccataagatacttcagaggtctagctagtcctcagcatggttgacagagtcttagagataagtacatttagttcagcaaatgctgggattgcaggagtgagccaccgtgcccagcacccactcccagtcttctagtccaaatcactggcttcaagcccttttcattgcagcccacaatgagaagcacatcttacaatcagacccagggtatgccttcccacccgcccccaccacacacacagatagttgttttgttgttgttgttgttgttgttt

SEQ ID NO: 379965 - DNA, 496 bp, Homo sapiens
cagtaatgcgttttcatttactggatgattttaaagcgtgggaactaaccaggcacggtggccatgcctggaatcccagcattttgggaggctgaggccagaggatcgcttgagcccaggagttccagaccagcctgggcaacatagtgagtcactgtctctacaaaatataaaatgaaaaataaaaattagccaacccagtcggacgcggtggctcatgcttgtaatcccagcactttgggaggccacgttaggaggatcacacgaggccaggaattcaaaaccagcctggccaacatggcaaaaccctagctctactaaaaataaaaaaataaaaaatagctgggtttggtagtaaacgtctgtaatcccaggtacttgagaggctgaggcacaagaattacttgaacctggaaggcggaggctgcagtgaaccgagatcatgccactgcattccagcctgggctacagagggagattctgtcaaagcaaaaac

SEQ ID NO: 379966 - DNA, 805 bp, Homo sapiens
cgggttactgagcgctcggggccttttcaaatcgggatccgttaccgcttccccggcagccgccattgtcgcgctcggagcccctcagctcaggcggccgaggcggaggcagcggcggcgggatggcggacgccaacaaggccgaggtgcccggggccactggtggcgacagcccgcacctgcagcccgcagagccgccgggcgagccgcggcgagagccgcaccccgcggaggcggagaagcagcagccgcagcacagcagcagctccaatggcgttaaaatggagaatgatgaatcagcaaaagaagagaaatctgacttaaaggaaaaatctacaggaagtaagaaggccaatagatttcatccttattcaaaagacaagaattcgggcactggagaaaagaagggtccaaatcgtaacagagttttcattagcaacatcccatatgacatgaaatggcaagctattaaagatctaatgagagagaaaggtgtggttgaattcaaagatgaagaatttgtaaagaaagccctagaaactatgaacaaatatgatcttagtggaagaccccttaatattaaagaggatcctgatggagaaaatgctcgtagggcattgcagcgaacaggaggatcatttccaggaggacacgtccctgatatgggatcagggttgatgaatttaccaccttccatactcaataatccaaacattcctcctgaagtcatcagtaatttgcaggccggtagacttggttccacaatttttgttgccaatgtaagttcaagctttagtctaaaatt

SEQ ID NO: 379967 - DNA, 280 bp, Homo sapiens
acaatccagttaagcagtgagcacccattgtattttatttggcttttcaacacggcaatacaaacatattatgaaatgagtgaaaagccaaataaaatacaatccagttaagcagtgagcacccattgttttcccaaaaatagagctccttgctttgtttttgtttttttgttcttttttttttttattatggaatggaattcaatataaagagtttattgtggaccccatggaatgtgattaaattattagcataataaaaagacatcctatgaatttg

SEQ ID NO: 379968 - DNA, 5334 bp, Homo sapiens
cgggttactgagcgctcggggccttttcaaatcgggatccgttaccgcttccccggcagccgccattgtcgcgctcggagcccctcagctcaggcggccgaggcggaggcagcggcggcgggatggcggacgccaacaaggccgaggtgcccggggccactggtggcgacagcccgcacctgcagcccgcagagccgccgggcgagccgcggcgagagccgcaccccgcggaggcggagaagcagcagccgcagcacagcagcagctccaatggcgttaaaatggagaatgatgaatcagcaaaagaagagaaatctgacttaaaggaaaaatctacaggaagtaagaaggccaatagatttcatccttattcaaaagacaagaattcgggcactggagaaaagaagggtccaaatcgtaacagagttttcattagcaacatcccatatgacatgaaatggcaagctattaaagatctaatgagagagaaagttggtgaggttacatacgtggagctctttaaggatgcggaaggaaaatcaaggggttgtggtgtggttgaattcaaagatgaagaatttgtaaagaaagccctagaaactatgaacaaatatgatcttagtggaagaccccttaatattaaagaggatcctgatggagaaaatgctcgtagggcattgcagcgaacaggaggatcatttccaggaggacacgtccctgatatgggatcagggttgatgaatttaccaccttccatactcaataatccaaacattcctcctgaagtcatcagtaatttgcaggccggtagacttggttccacaatttttgttgccaatcttgacttcaaagttggttggaagaagctaaaggaagtgttcagcatagctggaactgtgaaagcgggcagatattaaagaagacaaagatggcaagagcagaggaatgggcactgtcacttttgagcaagcaattgaagcagttcaagcaatttctatgttcaatgggcagtttttatttgatagacctatgcatgtgaaaatggatgacaagtctgttcctcatgaagagtaccgttcacatgatggtaaaacaccacaattaccacgtggtcttggaggcattgggatgggacttggtccgggtggacagcctattagtgccagccagttgaacataggtggagtaatgggaaatttaggtccaggtggtatgggaatggatggtccaggttttggaggaatgaatagaattggaggaggaatagggtttggtggtctggaagcaatgaatagcatgggaggatttggaggagttggccgaatgggagagctgtaccgtggtgcgatgactagtagcatggagcgagattttggacgtggtgatattggaataaatcgaggctttggagattcctttggtagacttggtggtggaatgggtagcatgaacagtgtgactggaggaatggggatgggactggaccggatgagttccagctttgatagaatgggaccaggtataggagctatactggaaaggagcatcgatatggatcgaggatttttatcgggtccaatgggaagcggaatgagagagagaataggctccaaaggcaaccagatatttgtcagaaatctaccttttgacttgacttggcagaaactaaaagagaaattcagtcagtgtggtcatgtaatgtttgcagaaataaaaatggagaatggaaagtcaaaaggctgtggaacagtcagatttgactccccagaatcagctgaaaaagcctgcagaataatgaatggcataaaaatcagtggcagagaaattgatgttcgcttggatcgtaatgcataatttcaagccatggttggaacattcctacatctgttttgctgaatctcctagtaaaagtcatttttttaaagtaatattgtatgcttacaaaagctgtaaaaatgaacttttaaaactcccaccagcttttaacagtataatgttaaaaatatactgtaatttttgttaatctcaagtttgggtttttaaagacagcaagtctggtcattcagtttaaatgaatggttatactgtttttaatgaaataagccattttcttgttgttttcagtactacatagttggatttgtttgttctagtttctccagtttttgtcaacttattgtatggtaaaacatagattttttccccccaaacttctgttttataatatgtaatttttcatgaaaagaaagggctcagaaaaattaggatgtgattttggttggttttaaattactgtaagttttagattctaaggttcaagatttttaaaatttgatttaaatgaagaaatggatttttctctctgcccctccctgccattcatattttctgcataacactattaataatatcaacctccacagccccttattttattatttccaataattccaagttcatatagaactgataatgtagcaagccccaagtatgataataggcagactattcccaactttctgtctagtttccagccattgaagtgaactgctaaaaaaagaaaaataattgaaatgttgagagagatggttatgtaagttagtcctctgctgtttacttctgcaggagctgatccatttataaatgcagttttaataaaccatggaataccaaggcacaacatatcaaacacattggatcccacgatgttagacatagccatatctcctttccctacaaaagaaaagcatactgttaaaatgtgcttaccaatactgtgttttattaataatcttcataagaaaagaaacactggatacttttttgttgttgattcgttttgaaaaattgttgttagagcaaaagtcttactgaatttgtatttttaaatttttcttgggttagtatttaaagtcttaacatttatttaataattatatttattaaaccatttttcaataaggtatatagcttatttgttgcttttcattgtaatttaacatggttaatggttaattactatttaacacacatttcaaatgaatattatttgggggattagattgagtgaaattaacctgctattaaatagtaaacttttcctctggagtcacttttttcccccttcaaagtatgttactgaggaagtaaacttttttttttttttttggtttttgttttttgagacacagtctcgctctgttgcccaggctgctggagtgccgtggcgcaatctcggctcactgcaacctccgcctcctggattcaaacaattctcctgcctcagcctcctgagtagctgggattacaggcacatgccaccacgcccggctaatttttgtatttttagtagagactgggtttcaccatgttggtcaggctggtctcaaactcctgacctcgtgatccacccgcctcggcctcccaaaatcctgggattacaggcgcgagccaccacacccggctggaagtaaacatttttaaagctacttttactcattctagccttgtagaatgaccattgcagcttgagggacctagttcttaccttttcttgcaaccaacacacttgcaattgtgtctggtatgcttgttcctgctgctaataaagtaaggcccattactgtatcgggaatttctagtgtttcccctgtaataaacagatatttcaagttacaaatcttaaagattcactaaccatcctttgcagttattttggatatttccttcgtgaacaaaaataaaataggcacatttagaattcagagccaatatgtgcttgcttattagttttttagctagcaacatatttgaatcaggctggtaattcgggtaacccaggtagcacagatttttaatgacatatctaaagatacgtaacagctaaaattctgccagtgagaaattttcctgtttgatattcttacaaaagatgtttatgtccaccattatctcatcagggctgtgctgaatatttgataatgagactgatcattccgctttttctttcttaaaaatattagtcagagttaagcaaattaattatagctatctttaagctataaatgtgttaacatgtatatataccatttattatgttctactttagtgatataccttaatttagtgggctttggcagggcgggggagggggaacgttcattaatctctgaggaaaacaaaacctgttttctacttgagtctaacatatggtcccaatttattaatacttctgttaaatttgatgtcaggtcaacatttttcagaaatgtatttattctcagaaacagaaccagagagaagttaaacaaaaggttatgtaactgttcctttaatgttgtaattgaaaacttggtttagcgtcttttttttctttctctttttttttcttaaaatgccaactaaaataattagaaagtagcttatttattgcatgcttatacattgatattggaattggaattggttgttaatttctgttactggctttgctagaattcatatgtgcataaataacactaatatttatcatcttgggggctgttctgtgatctattacatgatttttgctctctttttatttttctagtatcaaatgtgttctggctgagtgaatttggatagatataatatgcaagctaattggactttttcatttttctcattaaaaaaaggaagaagtagtccactttttgctagcatactattctgagacttacattaatttgggaaaagtcaagggtcaacaaatttttgtgtctgtgaggggccagatagtaattatttaggctttgcaggctgtgtgatttctgttgcagttattcagctttgccaatgtagtgtgaaaacaatcatagataatatgtaaaaccttactaataaaaacaagctgggttatgttggcacacaggcagtagtttgttcacctctgctgtaagttaatttgggttaacctttgtaggagaaattacagattatttttgtctttgttcatagtttttttgtttagggactgtagtggattatggccaagcagcagtagctagttaagtcttaatcatgaaggtagtagaaacctagaataaaattattatgcccttttcactcatttcataatatgtttgtattgccgtgttgaaaagccaaataaaatacaatccagttaagcagtgagcacccattgttttcccaaaaatagagctccttgctttgtttttgtttttttgttcttttttttttttattatggaatggaattcaatataaagagtttattgtggaccccatggaatgtgattaaattattagcataataaaaagacatcctatgaatttg

SEQ ID NO: 379969 - DNA, 3256 bp, Homo sapiens
cgggttactgagcgctcggggccttttcaaatcgggatccgttaccgcttccccggcagccgccattgtcgcgctcggagcccctcagctcaggcggccgaggcggaggcagcggcggcgggatggcggacgccaacaaggccgaggtgcccggggccactggtggcgacagcccgcacctgcagcccgcagagccgccgggcgagccgcggcgagagccgcaccccgcggaggcggagaagcagcagccgcagcacagcagcagctccaatggcgttaaaatggagaatgatgaatcagcaaaagaagagaaatctgacttaaaggaaaaatctacaggaagtaagaaggccaatagatttcatccttattcaaaagacaagaattcgggcactggagaaaagaagggtccaaatcgtaacagagttttcattagcaacatcccatatgacatgaaatggcaagctattaaagatctaatgagagagaaagttggtgaggttacatacgtggagctctttaaggatgcggaaggaaaatcaaggggttgtggtgtggttgaattcaaagatgaagaatttgtaaagaaagccctagaaactatgaacaaatatgatcttagtggaagaccccttaatattaaagaggatcctgatggagaaaatgctcgtagggcattgcagcgaacaggaggatcatttccaggaggacacgtccctgatatgggatcagggttgatgaatttaccaccttccatactcaataatccaaacattcctcctgaagtcatcagtaatttgcaggccggtagacttggttccacaatttttgttgccaatcttgacttcaaagttggttggaagaagctaaaggaagtgttcagcatagctggaactgtgaaagcgggcagatattaaagaagacaaagatggcaagagcagaggaatgggcactgtcacttttgagcaagcaattgaagcagttcaagcaatttctatgttcaatgggcagtttttatttgatagacctatgcatgtgaaaatggatgacaagtctgttcctcatgaagagtaccgttcacatgatggtaaaacaccacaattaccacgtggtcttggaggcattgggatgggacttggtccgggtggacagcctattagtgccagccagttgaacataggtggagtaatgggaaatttaggtccaggtggtatgggaatggatggtccaggttttggaggaatgaatagaattggaggaggtatgtataaagatttgtttttttgtatgtacccatcaccatttttaataaactagaaactgtgttgagaattccatgaaaaaaaagtcatggtttattgttggctcatgttctaaaggctgctagcagaaattgagcctggtacatacttaaaggaaggtgatgtgttaagaagtagctgcacaaggtagggtggatgaagagcttactggtgagatttaacatttacaaaacgtacctttcagctacatgactgacagttggatctcaaaattaatctttattccataggaatagggtttggtggtctggaagcaatgaatagcatgggaggatttggaggagttggccgaatgggagagctgtaccgtggtgcgatgactagtagcatggagcgagattttggacgtggtgatattggaataaatcgaggctttggagattcctttggtagacttggtggtggaatgggtagcatgaacagtgtgactggaggaatggggatgggactggaccggatgagttccagctttgatagaatgggaccaggtataggagctatactggaaaggagcatcgatatggatcgaggatttttatcgggtccaatgggaagcggaatgagagagagaataggctccaaaggcaaccagatatttgtcagaaatctaccttttgacttgacttggcagaaactaaaagagaaattcagtcagtgtggtcatgtaatgtttgcagaaataaaaatggagaatggaaagtcaaaaggctgtggaacagtcagatttgactccccagaatcagctgaaaaagcctgcagaataatgaatggcataaaaatcagtggcagagaaattgatgttcgcttggatcgtaatgcataatttcaagccatggttggaacattcctacatctgttttgctgaatctcctagtaaaagtcatttttttaaagtaatattgtatgcttacaaaagctgtaaaaatgaacttttaaaactcccaccagcttttaacagtataatgttaaaaatatactgtaatttttgttaatctcaagtttgggtttttaaagacagcaagtctggtcattcagtttaaatgaatggttatactgtttttaatgaaataagccattttcttgttgttttcagtactacatagttggatttgtttgttctagtttctccagtttttgtcaacttattgtatggtaaaacatagattttttccccccaaacttctgttttataatatgtaatttttcatgaaaagaaagggctcagaaaaattaggatgtgattttggttggttttaaattactgtaagttttagattctaaggttcaagatttttaaaatttgatttaaatgaagaaatggatttttctctctgcccctccctgccattcatattttctgcataacactattaataatatcaacctccacagccccttattttattatttccaataattccaagttcatatagaactgataatgtagcaagccccaagtatgataataggcagactattcccaactttctgtctagtttccagccattgaagtgaactgctaaaaaaagaaaaataattgaaatgttgagagagatggttatgtaagttagtcctctgctgtttacttctgcaggagctgatccatttataaatgcagttttaataaaccatggaataccaaggcacaacatatcaaacacattggatcccacgatgttagacatagccatatctcctttccctacaaaagaaaagcatactgttaaaatgtgcttaccaatactgtgttttattaataatcttcataagaaaagaaacactggatacttttttgttgttgattcgttttgaaaaattgttgttagagcaaaagtcttactgaatttgtatttttaaatttttcttgggttagtatttaaagtcttaacatttatttaataattatatttattaaaccatttttcaataaggta

SEQ ID NO: 379970 - DNA, 5179 bp, Homo sapiens
cgggttactgagcgctcggggccttttcaaatcgggatccgttaccgcttccccggcagccgccattgtcgcgctcggagcccctcagctcaggcggccgaggcggaggcagcggcggcgggatggcggacgccaacaaggccgaggtgcccggggccactggtggcgacagcccgcacctgcagcccgcagagccgccgggcgagccgcggcgagagccgcaccccgcggaggcggagaagcagcagccgcagcacagcagcagctccaatggcgttaaaatggagaatgatgaatcagcaaaagaagagaaatctgacttaaaggaaaaatctacaggaagtaagaaggccaatagatttcatccttattcaaaagacaagaattcgggcactggagaaaagaagggtccaaatcgtaacagagttttcattagcaacatcccatatgacatgaaatggcaagctattaaagatctaatgagagagaaaggatcctgatggagaaaatgctcgtagggcattgcagcgaacaggaggatcatttccaggaggacacgtccctgatatgggatcagggttgatgaatttaccaccttccatactcaataatccaaacattcctcctgaagtcatcagtaatttgcaggccggtagacttggttccacaatttttgttgccaatcttgacttcaaagttggttggaagaagctaaaggaagtgttcagcatagctggaactgtgaaagcgggcagatattaaagaagacaaagatggcaagagcagaggaatgggcactgtcacttttgagcaagcaattgaagcagttcaagcaatttctatgttcaatgggcagtttttatttgatagacctatgcatgtgaaaatggatgacaagtctgttcctcatgaagagtaccgttcacatgatggtaaaacaccacaattaccacgtggtcttggaggcattgggatgggacttggtccgggtggacagcctattagtgccagccagttgaacataggtggagtaatgggaaatttaggtccaggtggtatgggaatggatggtccaggttttggaggaatgaatagaattggaggaggaatagggtttggtggtctggaagcaatgaatagcatgggaggatttggaggagttggccgaatgggagagctgtaccgtggtgcgatgactagtagcatggagcgagattttggacgtggtgatattggaataaatcgaggctttggagattcctttggtagacttggtggtggaatgggtagcatgaacagtgtgactggaggaatggggatgggactggaccggatgagttccagctttgatagaatgggaccaggtataggagctatactggaaaggagcatcgatatggatcgaggatttttatcgggtccaatgggaagcggaatgagagagagaataggctccaaaggcaaccagatatttgtcagaaatctaccttttgacttgacttggcagaaactaaaagagaaattcagtcagtgtggtcatgtaatgtttgcagaaataaaaatggagaatggaaagtcaaaaggctgtggaacagtcagatttgactccccagaatcagctgaaaaagcctgcagaataatgaatggcataaaaatcagtggcagagaaattgatgttcgcttggatcgtaatgcataatttcaagccatggttggaacattcctacatctgttttgctgaatctcctagtaaaagtcatttttttaaagtaatattgtatgcttacaaaagctgtaaaaatgaacttttaaaactcccaccagcttttaacagtataatgttaaaaatatactgtaatttttgttaatctcaagtttgggtttttaaagacagcaagtctggtcattcagtttaaatgaatggttatactgtttttaatgaaataagccattttcttgttgttttcagtactacatagttggatttgtttgttctagtttctccagtttttgtcaacttattgtatggtaaaacatagattttttccccccaaacttctgttttataatatgtaatttttcatgaaaagaaagggctcagaaaaattaggatgtgattttggttggttttaaattactgtaagttttagattctaaggttcaagatttttaaaatttgatttaaatgaagaaatggatttttctctctgcccctccctgccattcatattttctgcataacactattaataatatcaacctccacagccccttattttattatttccaataattccaagttcatatagaactgataatgtagcaagccccaagtatgataataggcagactattcccaactttctgtctagtttccagccattgaagtgaactgctaaaaaaagaaaaataattgaaatgttgagagagatggttatgtaagttagtcctctgctgtttacttctgcaggagctgatccatttataaatgcagttttaataaaccatggaataccaaggcacaacatatcaaacacattggatcccacgatgttagacatagccatatctcctttccctacaaaagaaaagcatactgttaaaatgtgcttaccaatactgtgttttattaataatcttcataagaaaagaaacactggatacttttttgttgttgattcgttttgaaaaattgttgttagagcaaaagtcttactgaatttgtatttttaaatttttcttgggttagtatttaaagtcttaacatttatttaataattatatttattaaaccatttttcaataaggtatatagcttatttgttgcttttcattgtaatttaacatggttaatggttaattactatttaacacacatttcaaatgaatattatttgggggattagattgagtgaaattaacctgctattaaatagtaaacttttcctctggagtcacttttttcccccttcaaagtatgttactgaggaagtaaacttttttttttttttttggtttttgttttttgagacacagtctcgctctgttgcccaggctgctggagtgccgtggcgcaatctcggctcactgcaacctccgcctcctggattcaaacaattctcctgcctcagcctcctgagtagctgggattacaggcacatgccaccacgcccggctaatttttgtatttttagtagagactgggtttcaccatgttggtcaggctggtctcaaactcctgacctcgtgatccacccgcctcggcctcccaaaatcctgggattacaggcgcgagccaccacacccggctggaagtaaacatttttaaagctacttttactcattctagccttgtagaatgaccattgcagcttgagggacctagttcttaccttttcttgcaaccaacacacttgcaattgtgtctggtatgcttgttcctgctgctaataaagtaaggcccattactgtatcgggaatttctagtgtttcccctgtaataaacagatatttcaagttacaaatcttaaagattcactaaccatcctttgcagttattttggatatttccttcgtgaacaaaaataaaataggcacatttagaattcagagccaatatgtgcttgcttattagttttttagctagcaacatatttgaatcaggctggtaattcgggtaacccaggtagcacagatttttaatgacatatctaaagatacgtaacagctaaaattctgccagtgagaaattttcctgtttgatattcttacaaaagatgtttatgtccaccattatctcatcagggctgtgctgaatatttgataatgagactgatcattccgctttttctttcttaaaaatattagtcagagttaagcaaattaattatagctatctttaagctataaatgtgttaacatgtatatataccatttattatgttctactttagtgatataccttaatttagtgggctttggcagggcgggggagggggaacgttcattaatctctgaggaaaacaaaacctgttttctacttgagtctaacatatggtcccaatttattaatacttctgttaaatttgatgtcaggtcaacatttttcagaaatgtatttattctcagaaacagaaccagagagaagttaaacaaaaggttatgtaactgttcctttaatgttgtaattgaaaacttggtttagcgtcttttttttctttctctttttttttcttaaaatgccaactaaaataattagaaagtagcttatttattgcatgcttatacattgatattggaattggaattggttgttaatttctgttactggctttgctagaattcatatgtgcataaataacactaatatttatcatcttgggggctgttctgtgatctattacatgatttttgctctctttttatttttctagtatcaaatgtgttctggctgagtgaatttggatagatataatatgcaagctaattggactttttcatttttctcattaaaaaaaggaagaagtagtccactttttgctagcatactattctgagacttacattaatttgggaaaagtcaagggtcaacaaatttttgtgtctgtgaggggccagatagtaattatttaggctttgcaggctgtgtgatttctgttgcagttattcagctttgccaatgtagtgtgaaaacaatcatagataatatgtaaaaccttactaataaaaacaagctgggttatgttggcacacaggcagtagtttgttcacctctgctgtaagttaatttgggttaacctttgtaggagaaattacagattatttttgtctttgttcatagtttttttgtttagggactgtagtggattatggccaagcagcagtagctagttaagtcttaatcatgaaggtagtagaaacctagaataaaattattatgcccttttcactcatttcataatatgtttgtattgccgtgttgaaaagccaaataaaatacaatccagttaagcagtgagcacccattgttttcccaaaaatagagctccttgctttgtttttgtttttttgttcttttttttttttattatggaatggaattcaatataaagagtttattgtggaccccatggaatgtgattaaattattagcataataaaaagacatcctatgaatttg

SEQ ID NO: 379971 - DNA, 4029 bp, Homo sapiens
agtaagcaaccgtttattctaaaaataattttgtttaaatatgtaagtttgttatagggcatggtgagttggcggcattttgtgctagcttgacttattgcttataaaattaacctcaggaattagggatttaacataaataaaatacattaaatcctaagaaaatctttcctgattccaattttgtatattctaatatgtatatatttattactttgtatgaattgtattttagtccaaatataatgcttatattatttattttaaataattaatgtttttaatcaaattaattatcacaattggctatgaggaatttcaaacctataaagtgaaatagaacttatttaaactgactagtaattctgtaacttttattttacaggtcatgtaatgtttgcagaaataaaaatggagaatggaaagtcaaaaggctgtggaacagtcagatttgactccccagaatcagctgaaaaagcctgcagaataatgaatggcataaaaatcagtggcagagaaattgatgttcgcttggatcgtaatgcataatttcaagccatggttggaacattcctacatctgttttgctgaatctcctagtaaaagtcatttttttaaagtaatattgtatgcttacaaaagctgtaaaaatgaacttttaaaactcccaccagcttttaacagtataatgttaaaaatatactgtaatttttgttaatctcaagtttgggtttttaaagacagcaagtctggtcattcagtttaaatgaatggttatactgtttttaatgaaataagccattttcttgttgttttcagtactacatagttggatttgtttgttctagtttctccagtttttgtcaacttattgtatggtaaaacatagattttttccccccaaacttctgttttataatatgtaatttttcatgaaaagaaagggctcagaaaaattaggatgtgattttggttggttttaaattactgtaagttttagattctaaggttcaagatttttaaaatttgatttaaatgaagaaatggatttttctctctgcccctccctgccattcatattttctgcataacactattaataatatcaacctccacagccccttattttattatttccaataattccaagttcatatagaactgataatgtagcaagccccaagtatgataataggcagactattcccaactttctgtctagtttccagccattgaagtgaactgctaaaaaaagaaaaataattgaaatgttgagagagatggttatgtaagttagtcctctgctgtttacttctgcaggagctgatccatttataaatgcagttttaataaaccatggaataccaaggcacaacatatcaaacacattggatcccacgatgttagacatagccatatctcctttccctacaaaagaaaagcatactgttaaaatgtgcttaccaatactgtgttttattaataatcttcataagaaaagaaacactggatacttttttgttgttgattcgttttgaaaaattgttgttagagcaaaagtcttactgaatttgtatttttaaatttttcttgggttagtatttaaagtcttaacatttatttaataattatatttattaaaccatttttcaataaggtatatagcttatttgttgcttttcattgtaatttaacatggttaatggttaattactatttaacacacatttcaaatgaatattatttgggggattagattgagtgaaattaacctgctattaaatagtaaacttttcctctggagtcacttttttcccccttcaaagtatgttactgaggaagtaaacttttttttttttttttggtttttgttttttgagacacagtctcgctctgttgcccaggctgctggagtgccgtggcgcaatctcggctcactgcaacctccgcctcctggattcaaacaattctcctgcctcagcctcctgagtagctgggattacaggcacatgccaccacgcccggctaatttttgtatttttagtagagactgggtttcaccatgttggtcaggctggtctcaaactcctgacctcgtgatccacccgcctcggcctcccaaaatcctgggattacaggcgcgagccaccacacccggctggaagtaaacatttttaaagctacttttactcattctagccttgtagaatgaccattgcagcttgagggacctagttcttaccttttcttgcaaccaacacacttgcaattgtgtctggtatgcttgttcctgctgctaataaagtaaggcccattactgtatcgggaatttctagtgtttcccctgtaataaacagatatttcaagttacaaatcttaaagattcactaaccatcctttgcagttattttggatatttccttcgtgaacaaaaataaaataggcacatttagaattcagagccaatatgtgcttgcttattagttttttagctagcaacatatttgaatcaggctggtaattcgggtaacccaggtagcacagatttttaatgacatatctaaagatacgtaacagctaaaattctgccagtgagaaattttcctgtttgatattcttacaaaagatgtttatgtccaccattatctcatcagggctgtgctgaatatttgataatgagactgatcattccgctttttctttcttaaaaatattagtcagagttaagcaaattaattatagctatctttaagctataaatgtgttaacatgtatatataccatttattatgttctactttagtgatataccttaatttagtgggctttggcagggcgggggagggggaacgttcattaatctctgaggaaaacaaaacctgttttctacttgagtctaacatatggtcccaatttattaatacttctgttaaatttgatgtcaggtcaacatttttcagaaatgtatttattctcagaaacagaaccagagagaagttaaacaaaaggttatgtaactgttcctttaatgttgtaattgaaaacttggtttagcgtcttttttttctttctctttttttttcttaaaatgccaactaaaataattagaaagtagcttatttattgcatgcttatacattgatattggaattggaattggttgttaatttctgttactggctttgctagaattcatatgtgcataaataacactaatatttatcatcttgggggctgttctgtgatctattacatgatttttgctctctttttatttttctagtatcaaatgtgttctggctgagtgaatttggatagatataatatgcaagctaattggactttttcatttttctcattaaaaaaaggaagaagtagtccactttttgctagcatactattctgagacttacattaatttgggaaaagtcaagggtcaacaaatttttgtgtctgtgaggggccagatagtaattatttaggctttgcaggctgtgtgatttctgttgcagttattcagctttgccaatgtagtgtgaaaacaatcatagataatatgtaaaaccttactaataaaaacaagctgggttatgttggcacacaggcagtagtttgttcacctctgctgtaagttaatttgggttaacctttgtaggagaaattacagattatttttgtctttgttcatagtttttttgtttagggactgtagtggattatggccaagcagcagtagctagttaagtcttaatcatgaaggtagtagaaacctagaataaaattattatgcccttttcactcatttcataatatgtttgtattgccgtgttgaaaagccaaataaaatacaatccagttaagcagtgagcacccattgttttcccaaaaatagagctccttgctttgtttttgtttttttgttcttttttttttttattatggaatggaattcaatataaagagtttattgtggaccccatggaatgtgattaaattattagcataataaaaagacatcctatgaatttg

SEQ ID NO: 379972 - DNA, 2009 bp, Homo sapiens
cctcactcctcccctccttcgctcgctcaacctcttttgtccagtagtacaaagctggtctcaaactcctgacctcgtgatccacccgcctcggcctcccaaaatcctgggattacaggcgcgagccaccacacccggctggaagtaaacatttttaaagctacttttactcattctagccttgtagaatgaccattgcagcttgagggacctagttcttaccttttcttgcaaccaacacacttgcaattgtgtctggtatgcttgttcctgctgctaataaagtaaggcccattactgtatcgggaatttctagtgtttcccctgtaataaacagatatttcaagttacaaatcttaaagattcactaaccatcctttgcagttattttggatatttccttcgtgaacaaaaataaaataggcacatttagaattcagagccaatatgtgcttgcttattagttttttagctagcaacatatttgaatcaggctggtaattcgggtaacccaggtagcacagatttttaatgacatatctaaagatacgtaacagctaaaattctgccagtgagaaattttcctgtttgatattcttacaaaagatgtttatgtccaccattatctcatcagggctgtgctgaatatttgataatgagactgatcattccgctttttctttcttaaaaatattagtcagagttaagcaaattaattatagctatctttaagctataaatgtgttaacatgtatatataccatttattatgttctactttagtgatataccttaatttagtgggctttggcagggcgggggagggggaacgttcattaatctctgaggaaaacaaaacctgttttctacttgagtctaacatatggtcccaatttattaatacttctgttaaatttgatgtcaggtcaacatttttcagaaatgtatttattctcagaaacagaaccagagagaagttaaacaaaaggttatgtaactgttcctttaatgttgtaattgaaaacttggtttagcgtcttttttttctttctctttttttttcttaaaatgccaactaaaataattagaaagtagcttatttattgcatgcttatacattgatattggaattggaattggttgttaatttctgttactggctttgctagaattcatatgtgcataaataacactaatatttatcatcttgggggctgttctgtgatctattacatgatttttgctctctttttatttttctagtatcaaatgtgttctggctgagtgaatttggatagatataatatgcaagctaattggactttttcatttttctcattaaaaaaaggaagaagtagtccactttttgctagcatactattctgagacttacattaatttgggaaaagtcaagggtcaacaaatttttgtgtctgtgaggggccagatagtaattatttaggctttgcaggctgtgtgatttctgttgcagttattcagctttgccaatgtagtgtgaaaacaatcatagataatatgtaaaaccttactaataaaaacaagctgggttatgttggcacacaggcagtagtttgttcacctctgctgtaagttaatttgggttaacctttgtaggagaaattacagattatttttgtctttgttcatagtttttttgtttagggactgtagtggattatggccaagcagcagtagctagttaagtcttaatcatgaaggtagtagaaacctagaataaaattattatgcccttttcactcatttcataatatgtttgtattgccgtgttgaaaagccaaataaaatacaatccagttaagcagtgagcacccattgttttcccaaaaatagagctccttgctttgtttttgtttttttgttcttttttttttttattatggaatggaattcaatataaagagtttattgtggaccccatggaatgtgattaaattattagcataataaaaagacatcctatgaatttg

SEQ ID NO: 379973 - DNA, 2037 bp, Homo sapiens
  misc_feature (1964)..(1964): n is a, c, g, or t
  misc_feature (2018)..(2018): n is a, c, g, or t
  misc_feature (2023)..(2023): n is a, c, g, or t
cgggttactgagcgctcggggccttttcaaatcgggatccgttaccgcttccccggcagccgccattgtcgcgctcggagcccctcagctcaggcggccgaggcggaggcagcggcggcgggatggcggacgccaacaaggccgaggtgcccggggccactggtggcgacagcccgcacctgcagcccgcagagccgccgggcgagccgcggcgagagccgcaccccgcggaggcggagaagcagcagccgcagcacagcagcagctccaatggcgttaaaatggagaatgatgaatcagcaaaagaagagaaatctgacttaaaggaaaaatctacaggaagtaagaaggccaatagatttcatccttattcaaaagacaagaattcgggcactggagaaaagaagggtccaaatcgtaacagagttttcattagcaacatcccatatgacatgaaatggcaagctattaaagatctaatgagagagaaagttggtgaggttacatacgtggagctctttaaggatgcggaaggaaaatcaaggggttgtggtgtggttgaattcaaagatgaagaatttgtaaagaaagccctagaaactatgaacaaatatgatcttagtggaagaccccttaatattaaagaggatcctgatggagaaaatgctcgtagggcattgcagcgaacaggaggatcatttccaggaggacacgtccctgatatgggatcagggttgatgaatttaccaccttccatactcaataatccaaacattcctcctgaagtcatcagtaatttgcaggccggtagacttggttccacaatttttgttgccaatcttgacttcaaagttggttggaagaagctaaaggaagtgttcagcatagctggaactgtgaaagcgggcagatattaaagaagacaaagatggcaagagcagaggaatgggcactgtcacttttgagcaagcaattgaagcagttcaagcaatttctatgttcaatgggcagtttttatttgatagacctatgcatgtgaaaatggatgacaagtctgttcctcatgaagagtaccgttcacatgatggtaaaacaccacaattaccacgtggtcttggaggcattgggatgggacttggtccgggtggacagcctattagtgccagccagttgaacataggtggagtaatgggaaatttaggtccaggtggtatgggaatggatggtccaggttttggaggaatgaatagaattggaggaggtatgtataaagatttgtttttttgtatgtacccatcaccatttttaataaactagaaactgtgttgagaattccatgaaaaaaaagtcatggtttattgttggctcatgttctaaaggctgctagcagaaattgagcctggtacatacttaaaggaaggtgatgtgttaagaagtagctgcacaaggtagggtggatgaagagcttactggtgagatttaacatttacaaaacgtacctttcagctacatgactgacagttggatctcaaaattaatctttattccataggaatagggtttggtggtctggaagcaatgaatagcatgggaggatttggaggagttggccgaatgggagagctgtaccgtggtgcgatgactagtagcatggagcgagattttggacgtggtgatattggaataaatcgaggctttggagattcctttggtagacttggtggtggaatgggtagcatgaacagtgtgactggaggaatggggatgggactggaccggatgagttccagctttgatagaatgggaccaggtataggagctatactggaaaggagcatcgatatggatcgaggatttttatcgggtccaatgggaagcggaatgagagagagaataggctccaaaggcaaccagatatttgtcagaaatctacctttttgaccttgaccttggcaagaaaactnaaaaggagaaaattcaagtccagtggtgggccaaaggtaaatggttttgccaanaaaantaaaaaaatggggg

SEQ ID NO: 379974 - DNA, 251 bp, Homo sapiens
atggaatggaattcaatataaagagtttattgtggaccccatggaatgtgattaaattattagcataataaaaagacatcctatgaatttgatttcatttataagatctcttgaattgtaccccaggctaaataacagtggaaaatacagtttatatataatatgcaactcacaaactccagtgatcttgttatagtaatacttaatcattttgtaaatggtactaatcttcaatcttgctgaaaagaaat

SEQ ID NO: 379975 - DNA, 5406 bp, Homo sapiens
cgggttactgagcgctcggggccttttcaaatcgggatccgttaccgcttccccggcagccgccattgtcgcgctcggagcccctcagctcaggcggccgaggcggaggcagcggcggcgggatggcggacgccaacaaggccgaggtgcccggggccactggtggcgacagcccgcacctgcagcccgcagagccgccgggcgagccgcggcgagagccgcaccccgcggaggcggagaagcagcagccgcagcacagcagcagctccaatggcgttaaaatggagaatgatgaatcagcaaaagaagagaaatctgacttaaaggaaaaatctacaggaagtaagaaggccaatagatttcatccttattcaaaagacaagaattcgggcactggagaaaagaagggtccaaatcgtaacagagttttcattagcaacatcccatatgacatgaaatggcaagctattaaagatctaatgagagagaaagttggtgaggttacatacgtggagctctttaaggatgcggaaggaaaatcaaggggttgtggtgtggttgaattcaaagatgaagaatttgtaaagaaagccctagaaactatgaacaaatatgatcttagtggaagaccccttaatattaaagaggatcctgatggagaaaatgctcgtagggcattgcagcgaacaggaggatcatttccaggaggacacgtccctgatatgggatcagggttgatgaatttaccaccttccatactcaataatccaaacattcctcctgaagtcatcagtaatttgcaggccggtagacttggttccacaatttttgttgccaatcttgacttcaaagttggttggaagaagctaaaggaagtgttcagcatagctggaactgtgaaagcgggcagatattaaagaagacaaagatggcaagagcagaggaatgggcactgtcacttttgagcaagcaattgaagcagttcaagcaatttctatgttcaatgggcagtttttatttgatagacctatgcatgtgaaaatggatgacaagtctgttcctcatgaagagtaccgttcacatgatggtaaaacaccacaattaccacgtggtcttggaggcattgggatgggacttggtccgggtggacagcctattagtgccagccagttgaacataggtggagtaatgggaaatttaggtccaggtggtatgggaatggatggtccaggttttggaggaatgaatagaattggaggaggaatagggtttggtggtctggaagcaatgaatagcatgggaggatttggaggagttggccgaatgggagagctgtaccgtggtgcgatgactagtagcatggagcgagattttggacgtggtgatattggaataaatcgaggctttggagattcctttggtagacttggcagtgcaatgattggagggtttgcaggaagaataggatcttctaacatgggtccagtaggatctggaataagtggtggaatgggtagcatgaacagtgtgactggaggaatggggatgggactggaccggatgagttccagctttgatagaatgggaccaggtataggagctatactggaaaggagcatcgatatggatcgaggatttttatcgggtccaatgggaagcggaatgagagagagaataggctccaaaggcaaccagatatttgtcagaaatctaccttttgacttgacttggcagaaactaaaagagaaattcagtcagtgtggtcatgtaatgtttgcagaaataaaaatggagaatggaaagtcaaaaggctgtggaacagtcagatttgactccccagaatcagctgaaaaagcctgcagaataatgaatggcataaaaatcagtggcagagaaattgatgttcgcttggatcgtaatgcataatttcaagccatggttggaacattcctacatctgttttgctgaatctcctagtaaaagtcatttttttaaagtaatattgtatgcttacaaaagctgtaaaaatgaacttttaaaactcccaccagcttttaacagtataatgttaaaaatatactgtaatttttgttaatctcaagtttgggtttttaaagacagcaagtctggtcattcagtttaaatgaatggttatactgtttttaatgaaataagccattttcttgttgttttcagtactacatagttggatttgtttgttctagtttctccagtttttgtcaacttattgtatggtaaaacatagattttttccccccaaacttctgttttataatatgtaatttttcatgaaaagaaagggctcagaaaaattaggatgtgattttggttggttttaaattactgtaagttttagattctaaggttcaagatttttaaaatttgatttaaatgaagaaatggatttttctctctgcccctccctgccattcatattttctgcataacactattaataatatcaacctccacagccccttattttattatttccaataattccaagttcatatagaactgataatgtagcaagccccaagtatgataataggcagactattcccaactttctgtctagtttccagccattgaagtgaactgctaaaaaaagaaaaataattgaaatgttgagagagatggttatgtaagttagtcctctgctgtttacttctgcaggagctgatccatttataaatgcagttttaataaaccatggaataccaaggcacaacatatcaaacacattggatcccacgatgttagacatagccatatctcctttccctacaaaagaaaagcatactgttaaaatgtgcttaccaatactgtgttttattaataatcttcataagaaaagaaacactggatacttttttgttgttgattcgttttgaaaaattgttgttagagcaaaagtcttactgaatttgtatttttaaatttttcttgggttagtatttaaagtcttaacatttatttaataattatatttattaaaccatttttcaataaggtatatagcttatttgttgcttttcattgtaatttaacatggttaatggttaattactatttaacacacatttcaaatgaatattatttgggggattagattgagtgaaattaacctgctattaaatagtaaacttttcctctggagtcacttttttcccccttcaaagtatgttactgaggaagtaaacttttttttttttttttggtttttgttttttgagacacagtctcgctctgttgcccaggctgctggagtgccgtggcgcaatctcggctcactgcaacctccgcctcctggattcaaacaattctcctgcctcagcctcctgagtagctgggattacaggcacatgccaccacgcccggctaatttttgtatttttagtagagactgggtttcaccatgttggtcaggctggtctcaaactcctgacctcgtgatccacccgcctcggcctcccaaaatcctgggattacaggcgcgagccaccacacccggctggaagtaaacatttttaaagctacttttactcattctagccttgtagaatgaccattgcagcttgagggacctagttcttaccttttcttgcaaccaacacacttgcaattgtgtctggtatgcttgttcctgctgctaataaagtaaggcccattactgtatcgggaatttctagtgtttcccctgtaataaacagatatttcaagttacaaatcttaaagattcactaaccatcctttgcagttattttggatatttccttcgtgaacaaaaataaaataggcacatttagaattcagagccaatatgtgcttgcttattagttttttagctagcaacatatttgaatcaggctggtaattcgggtaacccaggtagcacagatttttaatgacatatctaaagatacgtaacagctaaaattctgccagtgagaaattttcctgtttgatattcttacaaaagatgtttatgtccaccattatctcatcagggctgtgctgaatatttgataatgagactgatcattccgctttttctttcttaaaaatattagtcagagttaagcaaattaattatagctatctttaagctataaatgtgttaacatgtatatataccatttattatgttctactttagtgatataccttaatttagtgggctttggcagggcgggggagggggaacgttcattaatctctgaggaaaacaaaacctgttttctacttgagtctaacatatggtcccaatttattaatacttctgttaaatttgatgtcaggtcaacatttttcagaaatgtatttattctcagaaacagaaccagagagaagttaaacaaaaggttatgtaactgttcctttaatgttgtaattgaaaacttggtttagcgtcttttttttctttctctttttttttcttaaaatgccaactaaaataattagaaagtagcttatttattgcatgcttatacattgatattggaattggaattggttgttaatttctgttactggctttgctagaattcatatgtgcataaataacactaatatttatcatcttgggggctgttctgtgatctattacatgatttttgctctctttttatttttctagtatcaaatgtgttctggctgagtgaatttggatagatataatatgcaagctaattggactttttcatttttctcattaaaaaaaggaagaagtagtccactttttgctagcatactattctgagacttacattaatttgggaaaagtcaagggtcaacaaatttttgtgtctgtgaggggccagatagtaattatttaggctttgcaggctgtgtgatttctgttgcagttattcagctttgccaatgtagtgtgaaaacaatcatagataatatgtaaaaccttactaataaaaacaagctgggttatgttggcacacaggcagtagtttgttcacctctgctgtaagttaatttgggttaacctttgtaggagaaattacagattatttttgtctttgttcatagtttttttgtttagggactgtagtggattatggccaagcagcagtagctagttaagtcttaatcatgaaggtagtagaaacctagaataaaattattatgcccttttcactcatttcataatatgtttgtattgccgtgttgaaaagccaaataaaatacaatccagttaagcagtgagcacccattgttttcccaaaaatagagctccttgctttgtttttgtttttttgttcttttttttttttattatggaatggaattcaatataaagagtttattgtggaccccatggaatgtgattaaattattagcataataaaaagacatcctatgaatttg

SEQ ID NO: 379976 - DNA, 2965 bp, Homo sapiens
cgggttactgagcgctcggggccttttcaaatcgggatccgttaccgcttccccggcagccgccattgtcgcgctcggagcccctcagctcaggcggccgaggcggaggcagcggcggcgggatggcggacgccaacaaggccgaggtgcccggggccactggtggcgacagcccgcacctgcagcccgcagagccgccgggcgagccgcggcgagagccgcaccccgcggaggcggagaagcagcagccgcagcacagcagcagctccaatggcgttaaaatggagaatgatgaatcagcaaaagaagagaaatctgacttaaaggaaaaatctacaggaagtaagaaggccaatagatttcatccttattcaaaagacaagaattcgggcactggagaaaagaagggtccaaatcgtaacagagttttcattagcaacatcccatatgacatgaaatggcaagctattaaagatctaatgagagagaaagttggtgaggttacatacgtggagctctttaaggatgcggaaggaaaatcaaggggttgtggtgtggttgaattcaaagatgaagaatttgtaaagaaagccctagaaactatgaacaaatatgatcttagtggaagaccccttaatattaaagaggatcctgatggagaaaatgctcgtagggcattgcagcgaacaggaggatcatttccaggaggacacgtccctgatatgggatcagggttgatgaatttaccaccttccatactcaataatccaaacattcctcctgaagtcatcagtaatttgcaggccggtagacttggttccacaatttttgttgccaatcttgacttcaaagttggttggaagaagctaaaggaagtgttcagcatagctggaactgtgaaagcgggcagatattaaagaagacaaagatggcaagagcagaggaatgggcactgtcacttttgagcaagcaattgaagcagttcaagcaatttctatgttcaatgggcagtttttatttgatagacctatgcatgtgaaaatggatgacaagtctgttcctcatgaagagtaccgttcacatgatggtaaaacaccacaattaccacgtggtcttggaggcattgggatgggacttggtccgggtggacagcctattagtgccagccagttgaacataggtggagtaatgggaaatttaggtccaggtggtatgggaatggatggtccaggttttggaggaatgaatagaattggaggaggaatagggtttggtggtctggaagcaatgaatagcatgggaggatttggaggagttggccgaatgggagagctgtaccgtggtgcgatgactagtagcatggagcgagattttggacgtggtgatattggaataaatcgaggctttggagattcctttggtagacttggtggtggaatgggtagcatgaacagtgtgactggaggaatggggatgggactggaccggatgagttccagctttgatagaatgggaccaggtataggagctatactggaaaggagcatcgatatggatcgaggatttttatcgggtccaatgggaagcggaatgagagagagaataggctccaaaggcaaccagatatttgtcagaaatctaccttttgacttgacttggcagaaactaaaagagaaattcagtcagtgtggtcatgtaatgtttgcagaaataaaaatggagaatggaaagtcaaaaggctgtggaacagtcagatttgactccccagaatcagctgaaaaagcctgcagaataatgaatggcataaaaatcagtggcagagaaattgatgttcgcttggatcgtaatgcataatttcaagccatggttggaacattcctacatctgttttgctgaatctcctagtaaaagtcatttttttaaagtaatattgtatgcttacaaaagctgtaaaaatgaacttttaaaactcccaccagcttttaacagtataatgttaaaaatatactgtaatttttgttaatctcaagtttgggtttttaaagacagcaagtctggtcattcagtttaaatgaatggttatactgtttttaatgaaataagccattttcttgttgttttcagtactacatagttggatttgtttgttctagtttctccagtttttgtcaacttattgtatggtaaaacatagattttttccccccaaacttctgttttataatatgtaatttttcatgaaaagaaagggctcagaaaaattaggatgtgattttggttggttttaaattactgtaagttttagattctaaggttcaagatttttaaaatttgatttaaatgaagaaatggatttttctctctgcccctccctgccattcatattttctgcataacactattaataatatcaacctccacagccccttattttattatttccaataattccaagttcatatagaactgataatgtagcaagccccaagtatgataataggcagactattcccaactttctgtctagtttccagccattgaagtgaactgctaaaaaaagaaaaataattgaaatgttgagagagatggttatgtaagttagtcctctgctgtttacttctgcaggagctgatccatttataaatgcagttttaataaaccatggaataccaaggcacaacatatcaaacacattggatcccacgatgttagacatagccatatctcctttccctacaaaagaaaagcatactgttaaaatgtgcttaccaatactgtgttttattaataatcttcataagaaaagaaacactggatacttttttgttgttgattcgttttgaaaaattgttgttagagcaaaagtcttactgaatttgtatttttaaatttttcttgggttagtatttaaagtcttaacatttatttaataattatatttattaaaccatttttcaataaggta

SEQ ID NO: 379977 - DNA, 5274 bp, Homo sapiens
cgggttactgagcgctcggggccttttcaaatcgggatccgttaccgcttccccggcagccgccattgtcgcgctcggagcccctcagctcaggcggccgaggcggaggcagcggcggcgggatggcggacgccaacaaggccgaggtgcccggggccactggtggcgacagcccgcacctgcagcccgcagagccgccgggcgagccgcggcgagagccgcaccccgcggaggcggagaagcagcagccgcagcacagcagcagctccaatggcgttaaaatggagaatgatgaatcagcaaaagaagagaaatctgacttaaaggaaaaatctacaggaagtaagaaggccaatagatttcatccttattcaaaagacaagaattcgggcactggagaaaagaagggtccaaatcgtaacagagttttcattagcaacatcccatatgacatgaaatggcaagctattaaagatctaatgagagagaaaggtgtggttgaattcaaagatgaagaatttgtaaagaaagccctagaaactatgaacaaatatgatcttagtggaagaccccttaatattaaagaggatcctgatggagaaaatgctcgtagggcattgcagcgaacaggaggatcatttccaggaggacacgtccctgatatgggatcagggttgatgaatttaccaccttccatactcaataatccaaacattcctcctgaagtcatcagtaatttgcaggccggtagacttggttccacaatttttgttgccaatcttgacttcaaagttggttggaagaagctaaaggaagtgttcagcatagctggaactgtgaaagcgggcagatattaaagaagacaaagatggcaagagcagaggaatgggcactgtcacttttgagcaagcaattgaagcagttcaagcaatttctatgttcaatgggcagtttttatttgatagacctatgcatgtgaaaatggatgacaagtctgttcctcatgaagagtaccgttcacatgatggtaaaacaccacaattaccacgtggtcttggaggcattgggatgggacttggtccgggtggacagcctattagtgccagccagttgaacataggtggagtaatgggaaatttaggtccaggtggtatgggaatggatggtccaggttttggaggaatgaatagaattggaggaggaatagggtttggtggtctggaagcaatgaatagcatgggaggatttggaggagttggccgaatgggagagctgtaccgtggtgcgatgactagtagcatggagcgagattttggacgtggtgatattggaataaatcgaggctttggagattcctttggtagacttggtggtggaatgggtagcatgaacagtgtgactggaggaatggggatgggactggaccggatgagttccagctttgatagaatgggaccaggtataggagctatactggaaaggagcatcgatatggatcgaggatttttatcgggtccaatgggaagcggaatgagagagagaataggctccaaaggcaaccagatatttgtcagaaatctaccttttgacttgacttggcagaaactaaaagagaaattcagtcagtgtggtcatgtaatgtttgcagaaataaaaatggagaatggaaagtcaaaaggctgtggaacagtcagatttgactccccagaatcagctgaaaaagcctgcagaataatgaatggcataaaaatcagtggcagagaaattgatgttcgcttggatcgtaatgcataatttcaagccatggttggaacattcctacatctgttttgctgaatctcctagtaaaagtcatttttttaaagtaatattgtatgcttacaaaagctgtaaaaatgaacttttaaaactcccaccagcttttaacagtataatgttaaaaatatactgtaatttttgttaatctcaagtttgggtttttaaagacagcaagtctggtcattcagtttaaatgaatggttatactgtttttaatgaaataagccattttcttgttgttttcagtactacatagttggatttgtttgttctagtttctccagtttttgtcaacttattgtatggtaaaacatagattttttccccccaaacttctgttttataatatgtaatttttcatgaaaagaaagggctcagaaaaattaggatgtgattttggttggttttaaattactgtaagttttagattctaaggttcaagatttttaaaatttgatttaaatgaagaaatggatttttctctctgcccctccctgccattcatattttctgcataacactattaataatatcaacctccacagccccttattttattatttccaataattccaagttcatatagaactgataatgtagcaagccccaagtatgataataggcagactattcccaactttctgtctagtttccagccattgaagtgaactgctaaaaaaagaaaaataattgaaatgttgagagagatggttatgtaagttagtcctctgctgtttacttctgcaggagctgatccatttataaatgcagttttaataaaccatggaataccaaggcacaacatatcaaacacattggatcccacgatgttagacatagccatatctcctttccctacaaaagaaaagcatactgttaaaatgtgcttaccaatactgtgttttattaataatcttcataagaaaagaaacactggatacttttttgttgttgattcgttttgaaaaattgttgttagagcaaaagtcttactgaatttgtatttttaaatttttcttgggttagtatttaaagtcttaacatttatttaataattatatttattaaaccatttttcaataaggtatatagcttatttgttgcttttcattgtaatttaacatggttaatggttaattactatttaacacacatttcaaatgaatattatttgggggattagattgagtgaaattaacctgctattaaatagtaaacttttcctctggagtcacttttttcccccttcaaagtatgttactgaggaagtaaacttttttttttttttttggtttttgttttttgagacacagtctcgctctgttgcccaggctgctggagtgccgtggcgcaatctcggctcactgcaacctccgcctcctggattcaaacaattctcctgcctcagcctcctgagtagctgggattacaggcacatgccaccacgcccggctaatttttgtatttttagtagagactgggtttcaccatgttggtcaggctggtctcaaactcctgacctcgtgatccacccgcctcggcctcccaaaatcctgggattacaggcgcgagccaccacacccggctggaagtaaacatttttaaagctacttttactcattctagccttgtagaatgaccattgcagcttgagggacctagttcttaccttttcttgcaaccaacacacttgcaattgtgtctggtatgcttgttcctgctgctaataaagtaaggcccattactgtatcgggaatttctagtgtttcccctgtaataaacagatatttcaagttacaaatcttaaagattcactaaccatcctttgcagttattttggatatttccttcgtgaacaaaaataaaataggcacatttagaattcagagccaatatgtgcttgcttattagttttttagctagcaacatatttgaatcaggctggtaattcgggtaacccaggtagcacagatttttaatgacatatctaaagatacgtaacagctaaaattctgccagtgagaaattttcctgtttgatattcttacaaaagatgtttatgtccaccattatctcatcagggctgtgctgaatatttgataatgagactgatcattccgctttttctttcttaaaaatattagtcagagttaagcaaattaattatagctatctttaagctataaatgtgttaacatgtatatataccatttattatgttctactttagtgatataccttaatttagtgggctttggcagggcgggggagggggaacgttcattaatctctgaggaaaacaaaacctgttttctacttgagtctaacatatggtcccaatttattaatacttctgttaaatttgatgtcaggtcaacatttttcagaaatgtatttattctcagaaacagaaccagagagaagttaaacaaaaggttatgtaactgttcctttaatgttgtaattgaaaacttggtttagcgtcttttttttctttctctttttttttcttaaaatgccaactaaaataattagaaagtagcttatttattgcatgcttatacattgatattggaattggaattggttgttaatttctgttactggctttgctagaattcatatgtgcataaataacactaatatttatcatcttgggggctgttctgtgatctattacatgatttttgctctctttttatttttctagtatcaaatgtgttctggctgagtgaatttggatagatataatatgcaagctaattggactttttcatttttctcattaaaaaaaggaagaagtagtccactttttgctagcatactattctgagacttacattaatttgggaaaagtcaagggtcaacaaatttttgtgtctgtgaggggccagatagtaattatttaggctttgcaggctgtgtgatttctgttgcagttattcagctttgccaatgtagtgtgaaaacaatcatagataatatgtaaaaccttactaataaaaacaagctgggttatgttggcacacaggcagtagtttgttcacctctgctgtaagttaatttgggttaacctttgtaggagaaattacagattatttttgtctttgttcatagtttttttgtttagggactgtagtggattatggccaagcagcagtagctagttaagtcttaatcatgaaggtagtagaaacctagaataaaattattatgcccttttcactcatttcataatatgtttgtattgccgtgttgaaaagccaaataaaatacaatccagttaagcagtgagcacccattgttttcccaaaaatagagctccttgctttgtttttgtttttttgttcttttttttttttattatggaatggaattcaatataaagagtttattgtggaccccatggaatgtgattaaattattagcataataaaaagacatcctatgaatttg

SEQ ID NO: 379978 - DNA, 361 bp, Homo sapiens
gggggtcgtaggttgcagtgagccgagattgtaccactgcactccagcctggcgacagagtgagactctgtctcaaaaaaaaaaaaaaaaaagaatttgggttgatggggattcataggatctttttatcttggggaatcccagcatctgctctatcagctaaggcagttacatctactcataaagaaaattccttcaaaagttttgttgagtaaaaagtaaaactgtaagagttaaaagacaaagctcttttgctgtgaaacgctcagtgagctttggactgcagtcagtggaacttgtgacactggtttttctctgctgctgagataattggaaggataaaaatattgagtgccttgtt

SEQ ID NO: 379979 - DNA, 331 bp, Homo sapiens
  misc_feature (314)..(314): n is a, c, g, or t
tgattttattaacagtttatagctgccaatcactgacacaactagttacctaaaatagtcaatgctgttctcatataatgaacagttacttgcaaaaagaattaagctgatcaaagtaaatcaacaaaaatcttggtaatagaaattttatgtaaggtccaggatcacaaaagccacagaaaaatgcagagctagaacccccatatgctgcacttttattgcagggactttgactcttagggaagaggcacacatgaggggcaaggctgctgggcagacgtctccattgtccttatgttgtctgtgttgtattnttttttttttattgacc

SEQ ID NO: 379980 - DNA, 382 bp, Homo sapiens
  misc_feature (11)..(11): n is a, c, g, or t
  misc_feature (39)..(39): n is a, c, g, or t
cccaccctcangccaacaaagtaagcctgggcctacaanccccgtgtcacccacacccaagcccaactttgaaacccctgtctctcctaaaaatacaaataattagacaggcatggtgacacacgcttgtaatcccaggtactctgagactgaggcaggagaataacttgaaccaaggaggaggaggttgcagtgagccactgcacgtccttctgtctcaaaaaaaaaaaaaaaaaaaaaatgttagctttttaggtggttgggttagcagactgtgttttaatttttgatggatatgattcataacctcctatgaggatcatataaacatcttgccttgtagacctgaaatatttattgattaaaaaggggacttaggtta

SEQ ID NO: 379981 - DNA, 643 bp, Homo sapiens
atgtgtaatattttaaatattcatcccagtgtcatcccagttagtcatactctagctgtgtgattttaggcagtttacttaatctctccgtggctcagtttccttctttgtaaaatgtggattattataatacttagctcatgatgattggaaagattaaatgttatttcatataaagtgaacagaacagtacctgaaacataacagttaatagctcaataaatgttagcaattataggatcacagtccaccattcaaactcttagggtctaataggttatggaattaggaattttttttttatatgggcaaggtagtaatgtgtagccttccaatagagtccagtgcaatatcccccttcaaaagtgttactgtttctgcaacaaaatgtatgaatgttcgcactaaataggataaagactgtaaatagcttcatatcagtttgggtaaggtttaccacaagatgagttattttgggtttcagaagttttttggatttttggaattgaagataaggaacctataaaatattaattttgagtcctattttataatattaaaacatcttttcatggtattttatagttttatagtgcatggtaaattaaagtcaattaaaatgaaataatggaaaatgtccacc

SEQ ID NO: 379982 - DNA, 480 bp, Homo sapiens
gaatggataggaggctagaaaaaaaaaaaaaagccttgcttcaggcttgtgaattcctagacacaaccctacccaaagacttccttcaccaacatatttttctttctagataataggcacaaaaaccatttagaagtttgagatggaaatcatgcaatgcactctgctctttatatatgttactgaggaatctggaagcttttccgggttgaaatgcaattcctaggaaattattcttgctcttttcctgtggctgtttttaacacagcagcaatgcaatttcagtggctctgctccttcacaaagacctttgagagggaactatgctgagagatgcaaattcaaggttttctgaaaacacctcagaattgtccagttctgcccccagataaaaccactagaataaaggtcaggaaatctccagatgttcttgggacttgcgcagtcatctcaggtaattcaattagcttttgtgtctgt

SEQ ID NO: 379983 - DNA, 2474 bp, Homo sapiens
  misc_feature (969)..(969): n is a, c, g, or t
  misc_feature (1087)..(1087): n is a, c, g, or t
  misc_feature (1089)..(1089): n is a, c, g, or t
  misc_feature (1093)..(1093): n is a, c, g, or t
  misc_feature (1986)..(1987): n is a, c, g, or t
  misc_feature (2042)..(2042): n is a, c, g, or t
  misc_feature (2046)..(2046): n is a, c, g, or t
  misc_feature (2052)..(2052): n is a, c, g, or t
cccacgcgtccgggcggcgacggcttctcggaagtaatttaagtgcacaagacattggtcaaaatggtttccaaaagaagactgtcaaaatctgaggataaagagagcctgacagaagatgcctccaaaaccaggaagcaaccactttccaaaaagacaaagaaatctcatattgctaatgaagttgaagaaaatgacagcatctttgtaaagcttcttaagatatcaggaattattcttaaaacgggagagagtcagaatcaactagctgtggatcaaatagctttccaaaagaagctctttcagaccctgaggagacacccttcctatcccaaaataatagaagaatttgttagtggcctggagtcttacattgaggatgaagacagtttcaggaactgccttttgtcttgtgagcgtctgcaggatgaggaagccagtatgggtgcatcttattctaagagtctcatcaaactgcttctggggattgacatactgcagcctgccattatcaaaaccttatttgagaagttgccagaatatttttttgaaaacaagaacagtgatgaaatcaacatacctcgactcattgtcagtcaactaaaatggcttgacagagttgtggatggcaaggacctcaccaccaagatcatgcagctgatcagtattgctccagagaacctgcagcatgacatcatcaccagcctacctgagatcctaggggattcccagcacgctgatgtggggaaagaactcaggtggataaaccctctgtcatcatctaagtgaggctcagctatgggggttctatcactgcagtatgcaaagagcagtagtaatatggtctcttctatctaaaaagaggatgataccccccttcatgagtagggtatgggatttgacttaaaaaaaaaaggtatatatttgaatagatccacatactttctttttttttttttttttttctgngacagtcttgctctgtcgcccaggctggagtgcagtggtgcgatctcagctcactgcaacctccgcctcctgggttcaccccattctcctgcctcagcctcccaagtagctgggactngnggcncctgctaccatgcccgactaatttttttggtatttttagtagagacggggtttcaccatgttagccaggatggtctcgatctcctgaccttgtgatccgccctcctcggcctcccagagtgctgggattacaggcatgagccaccgtgcctggccccatgtactttcttttaaatggtatacctgttatgagcgtgaagtctggcttaggattagatatctaaatttggccagtggagaagttgaccatgatcccttaagtttcattaacttgttcttcagggggtccttaaccctggctgcacattaaaatcatttgtggagcctattaaacatctaccttctttgggttcctaggtgattcattctaatgcacagtcctgcatcagaccgcttgcggagacccattgcttactgtcattcatttgaaaaatagtaattggtagggaagtattgaagaaggggagaacaatatccctaggtaataaagtttccatcttaatgcaactttttattgtactagaagtattttttttaaattcagtttgtaatacttccttttgtatagttgtctgcaaagctacctccaaaacatccagtgatttcttgccctcatccttttgggcaggatgctccttctgggcaaagtactacgccatccactttacctgcctgatgccagctcatctccttttgtatagtctttttttttttttagcatctgtcaccgtctgttgggcgcagtggctcatgcctttaatcccagcatgttgggcggctgaagtgggtgggtcacttgagcccaggagtttgagaccagcctggacaacatggtgaaaagccgtctttcaaaaacatacaaaaattaggtgggcgtggtggtacgcacttatnnttctagctactcaggaggctgagatgggaggatcaattgagcgtggaaggtcgangctncagtgngctgtgatgacaccactgtaactgtactcaagcctgggcatcagagtaagaccctgtctcaaaaaacaaacaaacaaaaaaaaaagcaatctatcactgtccttctcactatgttgtgctcctgtagcaccacctacatgtgtctctcatacttatcagatttcattgtaaatgttttgggttttctttttcctttttgcggggaaggatacataccaaactaaatagtggtgttctctgggtagtggggattgtgatggaaggcttcttgtttctacttttattatttgaatttttataatgagcatgtattattttttgcagtcaaaacaatttttaaagaaacatactataaacggtaacttaatggcaactaagtatgtcctttattttcatactctaataaatgattttctcaagtc

SEQ ID NO: 379984 - DNA, 4667 bp, Homo sapiens
gtaagtggagcaatggtcgtagtctctcgaggccccgctcccctgcggcctaatctctaagtccgggccgcggtcggcgttctcctctggggctccgcgccccgaaccttggcttcctcatctgccctgagatgggataatccccacaggaagtaatttaagtgcacaagacattggtcaaaatggtttccaaaagaagactgtcaaaatctgaggataaagagagcctgacagaagatgcctccaaaaccaggaagcaaccactttccaaaaagacaaagaaatctcatattgctaatgaagttgaagaaaatgacagcatctttgtaaagcttcttaagatatcaggaattattcttaaaacgggagagagtcagaatcaactagctgtggatcaaatagctttccaaaagaagctctttcagaccctgaggagacacccttcctatcccaaaataatagaagaatttgttagtggcctggagtcttacattgaggatgaagacagtttcaggaactgccttttgtcttgtgagcgtctgcaggatgaggaagccagtatgggtgcatcttattctaagagtctcatcaaactgcttctggggattgacatactgcagcctgccattatcaaaaccttatttgagaagttgccagaatatttttttgaaaacaagaacagtgatgaaatcaacatacctcgactcattgtcagtcaactaaaatggcttgacagagttgtggatggcaaggacctcaccaccaagatcatgcagctgatcagtattgctccagagaacctgcagcatgacatcatcaccagcctacctgagatcctaggggattcccagcacgctgatgtggggaaagaactcagtgacctactgatagagaatacttcactcactgtcccaatcctggatgtcctttcaagcctccgacttgacccaaacttcctattgaaggttcgccagttggtgatggataagttgtcgtctattagattggaggatttacctgtgataataaagttcattcttcattccgtaacagccatggatacacttgaggtaatttctgagcttcgggagaagttggatctgcagcattgtgttttgccatcacggttacaggcttcccaagtaaagttgaaaagtaaaggacgagcaagttcctcaggaaatcaagaaagcagcggtcagagctgtattattctcctctttgatgtaataaagtcagctattagatatgagaaaaccatttcagaagcctggattaaggcaattgaaaacactgcctcagtatctgaacacaaggtgtttgacctggtgatgcttttcatcatctatagcaccaatactcagacaaagaagtacattgacagggtgctaagaaataagattcgatcaggctgcattcaagaacagctgctccagagtacattctctgttcattacttagttcttaaggatatgtgttcatccattctgtcgctggctcagagtttgcttcactctctagaccagagtataatttcatttggcagtctcctatacaaatatgcatttaagttttttgacacgtactgccagcaggaagtggttggtgccttagtgacccatatctgcagtgggaatgaagctgaagttgatactgccttagatgtccttctagagttggtagtgttaaacccatctgctatgatgatgaatgctgtctttgtaaagggcattttagattatctggataacatatcccctcagcaaatacgaaaactcttctatgttctcagcacactggcatttagcaaacagaatgaagccagcagccacatccaggatgacatgcacttggtgataagaaagcagctctctagcaccgtattcaagtacaagctcattgggattattggtgctgtgaccatggctggcatcatggcggcagacagaagtgaatcacctagtttgacccaagagagagccaacctgagcgatgagcagtgcacacaggtgacctccttgttgcagttggttcattcctgcagtgagcagtctcctcaggcctctgcactttactatgatgaatttgccaacctgatccaacatgaaaagctggatccaaaagccctggaatgggttgggcataccatctgtaatgatttccaggatgccttcgtagtggactcctgtgttgttccggaaggtgactttccatttcctgtgaaagcactgtacggactggaagaatacgacactcaggatgggattgccataaacctcctgccgctgctgttttctcaggactttgcaaaagatgggggtccggtgacctcacaggaatcaggccaaaaattggtgtctccgctgtgcctggctccgtatttccggttactgagactttgtgtggagagacagcataacggaaacttggaggagattgatggtctactagattgtcctatattcctaactgacctggagcctggagagaagttggagtccatgtctgctaaagagcgttcattcatgtgttctctcatatttcttactctcaactggttccgagagattgtaaatgccttctgccaggaaacatcacctgagatgaaggggaaggtgctcactcggttaaagcacattgtagaattgcaaataatcctggaaaagtacttggcagtcaccccagactatgtccctcctcttggaaactttgatgtggaaactttagatataacacctcatactgttactgctatttcagcaaaaatcagaaagaaaggaaaaatagaaaggaaacaaaaaacagatggcagcaagacatcctcctctgacacactttcagaagagaaaaattcagaatgtgaccctacgccatctcatagaggccagctaaacaaggagttcacagggaaggaagaaaagacatcattgttactacataattcccatgcttttttccgagagctggacattgaggtcttctctattctacattgtggacttgtgacgaagttcatcttagatactgaaatgcacactgaagctacagaagttgtgcaacttgggccccctgagctgcttttcttgctggaagatctctcccagaagctggagagtatgctgacacctcctattgccaggagagtcccctttctcaagaacaaaggaagccggaatattggattctcacatctccaacagagatctgcccaagaaattgttcattgtgtttttcaactgctgaccccaatgtgtaaccacctggagaacattcacaactattttcagtgtttagctgctgagaatcacggtgtagttgatggaccaggagtgaaagttcaggagtaccacataatgtcttcctgctatcagaggctgctgcagatttttcatgggctttttgcttggagtggattttctcaacctgaaaatcagaatttactgtattcagccctccatgtccttagtagccgactgaaacagggagaacacagccagcctttggaggaactactcagccagagcgtccattacttgcagaatttccatcaaagcattcccagtttccagtgtgctctttatctcatcagacttttgatggttattttggagaaatcaacagcttctgctcagaacaaagaaaaaattgcttcccttgccagacaattcctctgtcgggtgtggccaagtggggataaagagaagagcaacatctctaatgaccagctccatgctctgctctgtatctacctggagcacacagagagcattctgaaggccatagaggagattgctggtgttggtgtcccagaactgatcaactctcctaaagatgcatcttcctccacattccctacactgaccaggcatacttttgttgttttcttccgtgtgatgatggctgaactagagaagacggtgaaaaaaattgagcctggcacagcagcagactcgcagcagattcatgaagagaaactcctctactggaacatggctgttcgagacttcagtatcctcatcaacttgataaaggtatttgatagtcatcctgttctgcatgtatgtttgaagtatgggcgtctctttgtggaagcatttctgaagcaatgtatgccgctcctagacttcagttttagaaaacaccgggaagatgttctgagcttactggaaaccttccagttggacacaaggctgcttcatcacctgtgtgggcattccaagattcaccaggacacgagactcacccaacatgtgcctctgctcaaaaagaccctggaacttttagtttgcagagtcaaagctatgctcactctcaacaattgtagagaggctttctggctgggcaatctaaaaaaccgggacttgcagggtgaagagattaagtcccaaaattcccaggagagcacagcagatgagagtgaggatgacatgtcatcccaggcctccaagagcaaagccactgaggatggtgaagaagacgaagtaagtgctggagaaaaggagcaagatagtgatgagagttatgatgactctgattagaccccagataaattgttgcctgcttctgtgtctctgccagcctgtgatcatttgtgttagagtttgaaatccgctgtttgcctttcttactggtaggatcctttttttgtcacctcgggtaccgagctc

SEQ ID NO: 379985 - DNA, 4475 bp, Homo sapiens
agtcgaaaactacgggcggcgacggcttctcggaagtaatttaagtgcacaagacattggtcaaaatggtttccaaaagaagactgtcaaaatctgaggataaagagagcctgacagaagatgcctccaaaaccaggaagcaaccactttccaaaaagacaaagaaatctcatattgctaatgaagttgaagaaaatgacagcatctttgtaaagcttcttaagatatcaggaattattcttaaaacgggagagagtcagaatcaactagctgtggatcaaatagctttccaaaagaagctctttcagaccctgaggagacacccttcctatcccaaaataatagaagaatttgttagtggcctggagtcttacattgaggatgaagacagtttcaggaactgccttttgtcttgtgagcgtctgcaggatgaggaagccagtatgggtgcatcttattctaagagtctcatcaaactgcttctggggattgacatactgcagcctgccattatcaaaaccttatttgagaagttgccagaatatttttttgaaaacaagaacagtgatgaaatcaacatacctcgactcattgtcagtcaactaaaatggcttgacagagttgtggatggcaaggacctcaccaccaagatcatgcagctgatcagtattgctccagagaacctgcagcatgacatcatcaccagcctacctgagatcctaggggattcccagcacgctgatgtggggaaagaactcagtgacctactgatagagaatacttcactcactgtcccaatcctggatgtcctttcaagcctccgacttgacccaaacttcctattgaaggttcgccagttggtgatggataagttgtcgtctattagattggaggatttacctgtgataataaagttcattcttcattccgtaacagccatggatacacttgaggtaatttctgagcttcgggagaagttggatctgcagcattgtgttttgccatcacggttacaggcttcccaagtaaagttgaaaagtaaaggacgagcaagttcctcaggaaatcaagaaagcagcggtcagagctgtattattctcctctttgatgtaataaagtcagctattagatatgagaaaaccatttcagaagcctggattaaggcaattgaaaacactgcctcagtatctgaacacaaggtgtttgacctggtgatgcttttcatcatctatagcaccaatactcagacaaagaagtacattgacagggtgctaagaaataagattcgatcaggctgcattcaagaacagctgctccagagtacattctctgttcattacttagttcttaaggatatgtgttcatccattctgtcgctggctcagagtttgcttcactctctagaccagagtataatttcatttggcagtctcctatacaaatatgcatttaagttttttgacacgtactgccagcaggaagtggttggtgccttagtgacccatatctgcagtgggaatgaagctgaagttgatactgccttagatgtccttctagagttggtagtgttaaacccatctgctatgatgatgaatgctgtctttgtaaagggcattttagattatctggataacatatcccctcagcaaatacgaaaactcttctatgttctcagcacactggcatttagcaaacagaatgaagccagcagccacatccaggatgacatgcacttggtgataagaaagcagctctctagcaccgtattcaagtacaagctcattgggattattggtgctgtgaccatggctggcatcatggcggcagacagaagtgaatcacctagtttgacccaagagagagccaacctgagcgatgagcagtgcacacaggtgacctccttgttgcagttggttcattcctgcagtgagcagtctcctcaggcctctgcactttactatgatgaatttgccaacctgatccaacatgaaaagctggatccaaaagccctggaatgggttgggcataccatctgtaatgatttccaggatgccttcgtagtggactcctgtgttgttccggaaggtgactttccatttcctgtgaaagcactgtacggactggaagaatacgacactcaggatgggattgccataaacctcctgccgctgctgttttctcaggactttgcaaaagatgggggtccggtgacctcacaggaatcaggccaaaaattggtgtctccgctgtgcctggctccgtatttccggttactgagactttgtgtggagagacagcataacggaaacttggaggagattgatggtctactagattgtcctatattcctaactgacctggagcctggagagaagttggagtccatgtctgctaaagagcgttcattcatgtgttctctcatatttcttactctcaactggttccgagagattgtaaatgccttctgccaggaaacatcacctgagatgaaggggaaggtgctcactcggttaaagcacattgtagaattgcaaataatcctggaaaagtacttggcagtcaccccagactatgtccctcctcttggaaactttgatgtggaaactttagatataacacctcatactgttactgctatttcagcaaaaatcagaaagaaaggaaaaatagaaaggaaacaaaaaacagatggcagcaagacatcctcctctgacacactttcagaagagaaaaattcagaatgtgaccctacgccatctcatagaggccagctaaacaaggagttcacagggaaggaagaaaagacatcattgttactacataattcccatgcttttttccgagagctggacattgaggtcttctctattctacattgtggacttgtgacgaagttcatcttagatactgaaatgcacactgaagctacagaagttgtgcaacttgggccccctgagctgcttttcttgctggaagatctctcccagaagctggagagtatgctgacacctcctattgccaggagagtcccctttctcaagaacaaaggaagccggaatattggattctcacatctccaacagagatctgcccaagaaattgttcattgtgtttttcaactgctgaccccaatgtgtaaccacctggagaacattcacaactattttcagtgtttagctgctgagaatcacggtgtagttgatggaccaggagtgaaagttcaggagtaccacataatgtcttcctgctatcagaggctgctgcagatttttcatgggctttttgcttggagtggattttctcaacctgaaaatcagaatttactgtattcagccctccatgtccttagtagccgactgaaacagggagaacacagccagcctttggaggaactactcagccagagcgtccattacttgcagaatttccatcaaagcattcccagtttccagtgtgctctttatctcatcagacttttgatggttattttggagaaatcaacagcttctgctcagaacaaagaaaaaattgcttcccttgccagacaattcctctgtcgggtgtggccaagtggggataaagagaagagcaacatctctaatgaccagctccatgctctgctctgtatctacctggagcacacagagagcattctgaaggccatagaggagattgctggtgttggtgtcccagaactgatcaactctcctaaagatgcatcttcctccacattccctacactgaccaggcatacttttgttgttttcttccgtgtgatgatggctgaactagagaagacggtgaaaaaaattgagcctggcacagcagcagactcgcagcagattcatgaagagaaactcctctactggaacatggctgttcgagacttcagtatcctcatcaacttgataaaggtatttgatagtcatcctgttctgcatgtatgtttgaaggaagatgttctgagcttactggaaaccttccagttggacacaaggctgcttcatcacctgtgtgggcattccaagattcaccaggacacgagactcacccaacatgtgcctctgctcaaaaagaccctggaacttttagtttgcagagtcaaagctatgctcactctcaacaattgtagagaggctttctggctgggcaatctaaaaaaccgggacttgcagggtgaagagattaagtcccaaaattcccaggagagcacagcagatgagagtgaggatgacatgtcatcccaggcctccaagagcaaagccactgaggatggtgaagaagacgaagtaagtgctggagaaaaggagcaagatagtgatgagagttatgatgactctgattagaccccagataaattgttgcctgcttctgtgtctctgccagcctgtgatcatttgtgttagagtttgaaatccgctgtttgcctttcttactggtaggatcctttttttgtcacctcgggtaccgagctc

SEQ ID NO: 379986 - DNA, 4849 bp, Homo sapiens
agtcgaaaactacgggcggcgacggcttctcggaagtaatttaagtgcacaagacattggtcaaaatggtttccaaaagaagactgtcaaaatctgaggataaagagagcctgacagaagatgcctccaaaaccaggaagcaaccactttccaaaaagacaaagaaatctcatattgctaatgaagttgaagaaaatgacagcatctttgtaaagcttcttaagatatcaggaattattcttaaaacgggagagagtcagaatcaactagctgtggatcaaatagctttccaaaagaagctctttcagaccctgaggagacacccttcctatcccaaaataatagaagaatttgttagtggcctggagtcttacattgaggatgaagacagtttcaggaactgccttttgtcttgtgagcgtctgcaggatgaggaagccagtatgggtgcatcttattctaagagtctcatcaaactgcttctggggattgacatactgcagcctgccattatcaaaaccttatttgagaagttgccagaatatttttttgaaaacaagaacagtgatgaaatcaacatacctcgactcattgtcagtcaactaaaatggcttgacagagttgtggatggcaaggacctcaccaccaagatcatgcagctgatcagtattgctccagagaacctgcagcatgacatcatcaccagcctacctgagatcctaggggattcccagcacgctgatgtggggaaagaactcagtgacctactgatagagaatacttcactcactgtcccaatcctggatgtcctttcaagcctccgacttgacccaaacttcctattgaaggttcgccagttggtgatggataagttgtcgtctattagattggaggatttacctgtgataataaagttcattcttcattccgtaacagccatggatacacttgaggtaatttctgagcttcgggagaagttggatctgcagcattgtgttttgccatcacggttacaggcttcccaagtaaagttgaaaagtaaaggacgagcaagttcctcaggaaatcaagaaagcagcggtcagagctgtattattctcctctttgatgtaataaagtcagctattagatatgagaaaaccatttcagaagcctggattaaggcaattgaaaacactgcctcagtatctgaacacaaggtgtttgacctggtgatgcttttcatcatctatagcaccaatactcagacaaagaagtacattgacagggtgctaagaaataagattcgatcaggctgcattcaagaacagctgctccagagtacattctctgttcattacttagttcttaaggatatgtgttcatccattctgtcgctggctcagagtttgcttcactctctagaccagagtataatttcatttggcagtctcctatacaaatatgcatttaagttttttgacacgtactgccagcaggaagtggttggtgccttagtgacccatatctgcagtgggaatgaagctgaagttgatactgccttagatgtccttctagagttggtagtgttaaacccatctgctatgatgatgaatgctgtctttgtaaagggcattttagattatctggataacatatcccctcagcaaatacgaaaactcttctatgttctcagcacactggcatttagcaaacagaatgaagccagcagccacatccaggatgacatgcacttggtgataagaaagcagctctctagcaccgtattcaagtacaagctcattgggattattggtgctgtgaccatggctggcatcatggcggcagacagaagtgaatcacctagtttgacccaagagagagccaacctgagcgatgagcagtgcacacaggtgacctccttgttgcagttggttcattcctgcagtgagcagtctcctcaggcctctgcactttactatgatgaatttgccaacctgatccaacatgaaaagctggatccaaaagccctggaatgggttgggcataccatctgtaatgatttccaggatgccttcgtagtggactcctgtgttgttccggaagggtaggtattgtttacctgctggcttggttgcactggtgaagttacatcaattctgtcagtagctgatacaaacttcagaatacccttcacctcagccacagctgcccagtcccacagcttctttcctcccaaccccagcacccctgcacccttagctccaaaattcctaaaaggttcactgtttgttcttctaatttctccccatgatgttgtgtttgaaattggtttgctctagtggttttccctgtagccttgcgtattcctgagctgcaacatcagattctggtttttctccgcagtgactttccatttcctgtgaaagcactgtacggactggaagaatacgacactcaggatgggattgccataaacctcctgccgctgctgttttctcaggactttgcaaaagatgggggtccggtgacctcacaggaatcaggccaaaaattggtgtctccgctgtgcctggctccgtatttccggttactgagactttgtgtggagagacagcataacggaaacttggaggagattgatggtctactagattgtcctatattcctaactgacctggagcctggagagaagttggagtccatgtctgctaaagagcgttcattcatgtgttctctcatatttcttactctcaactggttccgagagattgtaaatgccttctgccaggaaacatcacctgagatgaaggggaaggtgctcactcggttaaagcacattgtagaattgcaaataatcctggaaaagtacttggcagtcaccccagactatgtccctcctcttggaaactttgatgtggaaactttagatataacacctcatactgttactgctatttcagcaaaaatcagaaagaaaggaaaaatagaaaggaaacaaaaaacagatggcagcaagacatcctcctctgacacactttcagaagagaaaaattcagaatgtgaccctacgccatctcatagaggccagctaaacaaggagttcacagggaaggaagaaaagacatcattgttactacataattcccatgcttttttccgagagctggacattgaggtcttctctattctacattgtggacttgtgacgaagttcatcttagatactgaaatgcacactgaagctacagaagttgtgcaacttgggccccctgagctgcttttcttgctggaagatctctcccagaagctggagagtatgctgacacctcctattgccaggagagtcccctttctcaagaacaaaggaagccggaatattggattctcacatctccaacagagatctgcccaagaaattgttcattgtgtttttcaactgctgaccccaatgtgtaaccacctggagaacattcacaactattttcagtgtttagctgctgagaatcacggtgtagttgatggaccaggagtgaaagttcaggagtaccacataatgtcttcctgctatcagaggctgctgcagatttttcatgggctttttgcttggagtggattttctcaacctgaaaatcagaatttactgtattcagccctccatgtccttagtagccgactgaaacagggagaacacagccagcctttggaggaactactcagccagagcgtccattacttgcagaatttccatcaaagcattcccagtttccagtgtgctctttatctcatcagacttttgatggttattttggagaaatcaacagcttctgctcagaacaaagaaaaaattgcttcccttgccagacaattcctctgtcgggtgtggccaagtggggataaagagaagagcaacatctctaatgaccagctccatgctctgctctgtatctacctggagcacacagagagcattctgaaggccatagaggagattgctggtgttggtgtcccagaactgatcaactctcctaaagatgcatcttcctccacattccctacactgaccaggcatacttttgttgttttcttccgtgtgatgatggctgaactagagaagacggtgaaaaaaattgagcctggcacagcagcagactcgcagcagattcatgaagagaaactcctctactggaacatggctgttcgagacttcagtatcctcatcaacttgataaaggtatttgatagtcatcctgttctgcatgtatgtttgaagtatgggcgtctctttgtggaagcatttctgaagcaatgtatgccgctcctagacttcagttttagaaaacaccgggaagatgttctgagcttactggaaaccttccagttggacacaaggctgcttcatcacctgtgtgggcattccaagattcaccaggacacgagactcacccaacatgtgcctctgctcaaaaagaccctggaacttttagtttgcagagtcaaagctatgctcactctcaacaattgtagagaggctttctggctgggcaatctaaaaaaccgggacttgcagggtgaagagattaagtcccaaaattcccaggagagcacagcagatgagagtgaggatgacatgtcatcccaggcctccaagagcaaagccactgaggatggtgaagaagacgaagtaagtgctggagaaaaggagcaagatagtgatgagagttatgatgactctgattagaccccagataaattgttgcctgcttctgtgtctctgccagcctgtgatcatttgtgttagagtttgaaatccgctgtttgcctttcttactggtaggatcctttttttgtcacctcgggtaccgagctc

SEQ ID NO: 379987 - DNA, 1721 bp, Homo sapiens
agtcgaaaactacgggcggcgacggcttctcggaagtaatttaagtgcacaagacattggtcaaaatggtttccaaaagaagactgtcaaaatctgaggataaagagagcctgacagaagatgcctccaaaaccaggaagcaaccactttccaaaaagacaaagaaatctcatattgctaatgaagttgaagaaaatgacagcatctttgtaaagcttcttaagatatcaggaattattcttaaaacgggagagagtcagaatcaactagctgtggatcaaatagctttccaaaagaagctctttcagaccctgaggagacacccttcctatcccaaaataatagaagaatttgttagtggcctggagtcttacattgaggatgaagacagtttcaggaactgccttttgtcttgtgagcgtctgcaggatgaggaagccagtatgggtgcatcttattctaagagtctcatcaaactgcttctggggattgacatactgcagcctgccattatcaaaaccttatttgagaagttgccagaatatttttttgaaaacaagaacagtgatgaaatcaacatacctcgactcattgtcagtcaactaaaatggcttgacagagttgtggatggcaaggacctcaccaccaagatcatgcagctgatcagtattgctccagagaacctgcagcatgacatcatcaccagcctacctgagatcctaggggattcccagcacgctgatgtggggaaagaactcagtgacctactgatagagaatacttcactcactgtcccaatcctggatgtcctttcaagcctccgacttgacccaaacttcctattgaaggttcgccagttggtgatggataagttgtcgtctattagattggaggatttacctgtgataataaagttcattcttcattccgtaacagccatggatacacttgaggtaatttctgagcttcgggagaagttggatctgcagcattgtgttttgccatcacggttacaggcttcccaagtaaagttgaaaagtaaaggacgagcaagttcctcaggaaatcaagaaagcagcggtcagagctgtattattctcctctttgatgtaataaagtcagctattagatatgagaaaaccatttcagaagcctggattaaggcaattgaaaacactgcctcagtatctgaacacaaggtgtttgacctggtgatgcttttcatcatctatagcaccaatactcagacaaagaagtacattgacagggtgctaagaaataagattcgatcaggctgcattcaagaacagctgctccagagtacattctctgttcattacttagttcttaaggatatgtgttcatccattctgtcgctggctcagagtttgcttcactctctagaccagagtataatttcatttggcagtctcctatacaaatatgcatttaagttttttgacacgtactgccagcaggaagtggttggtgccttagtgacccatatctgcagtgggaatgaagctgaagttgatactgccttagatgtccttctagagttggtagtgttaaacccatctgctatgatgatgaatgctgtctttgtaaaggtatcttattggcttcttgtactttagatattgaatactataattggtgggaggtggtgggaaggaggtgagatgatgggcaagtaatataaataaaaagtgactattcta

SEQ ID NO: 379988 - DNA, 874 bp, Homo sapiens
tgagacggagtctcgctttgtagcccaggccggagtgcagtggcacaatctctgctcactgcaagttccgcctcccggctggacagtgaatgtttaaggaattctcttagctaaacagggctactctattgtttaatatcagtaaaatatatattcaagaatattttaggtaaattcattgaagatcggccagtaagaggttatgaagaggaactagaggtgttggtggtatgtcttctaggctttgaattctttagctgccattctctttggattactctgccaaactattcctgtttgatggaacataccgttggcccatactggcagggcttgtgttcttattcaacattcaaaggtttctataagaaatgtgaaggcatgatgataaactcacaaaagatggatgttatttatttccattcagattcaccaggacacgagactcacccaacatgtgcctctgctcaaaaagaccctggaacttttagtttgcagagtcaaagctatgctcactctcaacaattgtagagaggctttctggctgggcaatctaaaaaaccgggacttgcagggtgaagagattaagtcccaaaattcccaggagagcacagcagatgagagtgaggatgacatgtcatcccaggcctccaagagcaaagccactgaggatggtgaagaagacgaagtaagtgctggagaaaaggagcaagatagtgatgagagttatgatgactctgattagaccccagataaattgttgcctgcttctgtgtctctgccagcctgtgatcatttgtgttagagtttgaaatccgctgtttgcctttcttactggtaggatcctttttttgtcacctcgggtaccgagctc

SEQ ID NO: 379989 - DNA, 374 bp, Homo sapiens
ctaatctctaagtccgggccgcggtcggcgttctcctctggggctccgcgccccgaaccttggcttcctcatctgccctgagatgggataatccccacaggtacctttctgcgtcattaaaatgcggaaacgagaaaggcttttaccctcacccgcttcccgatgaactaatccaggcagtcggcctcatctcacttctgttgggcttttctggaagccagatggtatcgcacgtgttaaaggcgggtgcctggaagccggacgtgctgacaagacttagtttttccatctgcaagatggctgataatggttatccgtattaaccgaagcggcgataaataaaaagtttagcacagggcccggtacctcgtaaa

SEQ ID NO: 379990 - DNA, 212 bp, Homo sapiens
attaaactaaaaattttattcttttttattttttaaatctccttaagataatagaagaatttgttagtggcctggagtcttacattgaggatgaagacagtttcaggaactgccttttgtcttgtgagcgtctgcaggatgaggaagccaggtgtggagaggaggcatggaatcttgctgaaattcagtctgttttgccaacttcatggggc

SEQ ID NO: 379991 - DNA, 5191 bp, Homo sapiens
  misc_feature (5186)..(5186): n is a, c, g, or t
agtcgaaaactacgggcggcgacggcttctcggaagtaatttaagtgcacaagacattggtcaaaatggtttccaaaagaagactgtcaaaatctgaggataaagagagcctgacagaagatgcctccaaaaccaggaagcaaccactttccaaaaagacaaagaaatctcatattgctaatgaagttgaagaaaatgacagcatctttgtaaagcttcttaagatatcaggaattattcttaaaacgggagagagtcagaatcaactagctgtggatcaaatagctttccaaaagaagctctttcagaccctgaggagacacccttcctatcccaaaataatagaagaatttgttagtggcctggagtcttacattgaggatgaagacagtttcaggaactgccttttgtcttgtgagcgtctgcaggatgaggaagccagtatgggtgcatcttattctaagagtctcatcaaactgcttctggggattgacatactgcagcctgccattatcaaaaccttatttgagaagttgccagaatatttttttgaaaacaagaacagtgatgaaatcaacatacctcgactcattgtcagtcaactaaaatggcttgacagagttgtggatggcaaggacctcaccaccaagatcatgcagctgatcagtattgctccagagaacctgcagcatgacatcatcaccagcctacctgagatcctaggggattcccagcacgctgatgtggggaaagaactcagtgacctactgatagagaatacttcactcactgtcccaatcctggatgtcctttcaagcctccgacttgacccaaacttcctattgaaggttcgccagttggtgatggataagttgtcgtctattagattggaggatttacctgtgataataaagttcattcttcattccgtaacagccatggatacacttgaggtaatttctgagcttcgggagaagttggatctgcagcattgtgttttgccatcacggttacaggcttcccaagtaaagttgaaaagtaaaggacgagcaagttcctcaggaaatcaagaaagcagcggtcagagctgtattattctcctctttgatgtaataaagtcagctattagatatgagaaaaccatttcagaagcctggattaaggcaattgaaaacactgcctcagtatctgaacacaaggtgtttgacctggtgatgcttttcatcatctatagcaccaatactcagacaaagaagtacattgacagggtgctaagaaataagattcgatcaggctgcattcaagaacagctgctccagagtacattctctgttcattacttagttcttaaggatatgtgttcatccattctgtcgctggctcagagtttgcttcactctctagaccagagtataatttcatttggcagtctcctatacaaatatgcatttaagttttttgacacgtactgccagcaggaagtggttggtgccttagtgacccatatctgcagtgggaatgaagctgaagttgatactgccttagatgtccttctagagttggtagtgttaaacccatctgctatgatgatgaatgctgtctttgtaaagggcattttagattatctggataacatatcccctcagcaaatacgaaaactcttctatgttctcagcacactggcatttagcaaacagaatgaagccagcagccacatccaggatgacatgcacttggtgataagaaagcagctctctagcaccgtattcaagtacaagctcattgggattattggtgctgtgaccatggctggcatcatggcggcagacagaagtgaatcacctagtttgacccaagagagagccaacctgagcgatgagcagtgcacacaggtgacctccttgttgcagttggttcattcctgcagtgagcagtctcctcaggcctctgcactttactatgatgaatttgccaacctgatccaacatgaaaagctggatccaaaagccctggaatgggttgggcataccatctgtaatgatttccaggatgccttcgtagtggactcctgtgttgttccggaaggtgactttccatttcctgtgaaagcactgtacggactggaagaatacgacactcaggatgggattgccataaacctcctgccgctgctgttttctcaggactttgcaaaagatgggggtccggtgacctcacaggaatcaggccaaaaattggtgtctccgctgtgcctggctccgtatttccggttactgagactttgtgtggagagacagcataacggaaacttggaggagattgatggtctactagattgtcctatattcctaactgacctggagcctggagagaagttggagtccatgtctgctaaagagcgttcattcatgtgttctctcatatttcttactctcaactggttccgagagattgtaaatgccttctgccaggaaacatcacctgagatgaaggggaaggtgctcactcggttaaagcacattgtagaattgcaaataatcctggaaaagtacttggcagtcaccccagactatgtccctcctcttggaaactttgatgtggaaactttagatataacacctcatactgttactgctatttcagcaaaaatcagaaagaaaggaaaaatagaaaggaaacaaaaaacagatggcagcaagacatcctcctctgacacactttcagaagagaaaaattcagaatgtgaccctacgccatctcatagaggccagctaaacaaggagttcacagggaaggaagaaaagacatcattgttactacataattcccatgcttttttccgagagctggacattgaggtcttctctattctacattgtggacttgtgacgaagttcatcttagatactgaaatgcacactgaagctacagaagttgtgcaacttgggccccctgagctgcttttcttgctggaagatctctcccagaagctggagagtatgctgacacctcctattgccaggagagtcccctttctcaagaacaaaggaagccggaatattggattctcacatctccaacagagatctgcccaagaaattgttcattgtgtttttcaactgctgaccccaatgtgtaaccacctggagaacattcacaactattttcagtgtttagctgctgagaatcacggtgtagttgatggaccaggagtgaaagttcaggagtaccacataatgtcttcctgctatcagaggctgctgcagatttttcatgggctttttgcttggagtggattttctcaacctgaaaatcagaatttactgtattcagccctccatgtccttagtagccgactgaaacagggagaacacagccagcctttggaggaactactcagccagagcgtccattacttgcagaatttccatcaaagcattcccagtttccagtgtgctctttatctcatcagacttttgatggttattttggagaaatcaacagcttctgctcagaacaaagaaaaaattgcttcccttgccagacaattcctctgtcgggtgtggccaagtggggataaagagaagagcaacatctctaatgaccagctccatgctctgctctgtatctacctggagcacacagagagcattctgaaggccatagaggagattgctggtgttggtgtcccagaactgatcaactctcctaaagatgcatcttcctccacattccctacactgaccaggcatacttttgttgttttcttccgtgtgatgatggctgaactagagaagacggtgaaaaaaattgagcctggcacagcagcagactcgcagcagattcatgaagagaaactcctctactggaacatggctgttcgagacttcagtatcctcatcaacttgataaaggtatttgatagtcatcctgttctgcatgtatgtttgaagtatgggcgtctctttgtggaagcatttctgaagcaatgtatgccgctcctagacttcagttttagaaaacaccgggaagatgttctgagcttactggaaaccttccagttggacacaaggctgcttcatcacctgtgtgggcattccaagattcaccaggacacgagactcacccaacatgtgcctctgctcaaaaagaccctggaacttttagtttgcagagtcaaagctatgctcactctcaacaattgtagagaggctttctggctgggcaatctaaaaaaccgggacttgcagggtgaagagattaagtcccaaaattcccaggagagcacagcagatgagagtgaggatgacatgtcatcccaggcctccaagagcaaagccactgaggtatctctacaaaacccaccagagtctggcactgatggttgcattttgttaattgttctaagttggtggagcagaactttgcctacttatgtttattgtcaaatgcttctatgcccatttccattccctccataacagcttctgtgcttatataatttttgggacccagaagaaacaacgacacaatcttagaatcactcctgagtatctcgagttgtggcatttgttatagagttgacaattttctgcattatagcctctcattttccatgaattcatatctgaaaccattttagaagggagaagtcatcgaagtattttctgagtgttgagaagaatgagttaaaccatttaaacacatttgaaacatacaaaaatagaaatgtgaaagcatttggtgaaagccaaagcacagagtcagaagctgccaccttagagaactgaaataaaaatagaagttcttacgcttttttgtggtacagatgctttcgacaatttaaagaaagctaaataaaaatgtagacatggctggcgcagtggctcatgcttgtaatcctagcactttttgaggccaaggtaggaggattgcttgagtccgggagctcaaggcaaagctgcacaacataacaagaccctatctccacaaaaaaaatgaaaaataaacctgggtgcggtggctcacacctgtaatcccagcactttgggaggccgatgtgggcagatcacaaggtcaggagttcaagaccagcctggccaacatagtgaaaccccatctctactgaaaatacaaaaattagctgggtgtggtggcacgtgcctgttatctcagctacttgggangctga

SEQ ID NO: 379992 - DNA, 4550 bp, Homo sapiens
agtcgaaaactacgggcggcgacggcttctcggaagtaatttaagtgcacaagacattggtcaaaatggtttccaaaagaagactgtcaaaatctgaggataaagagagcctgacagaagatgcctccaaaaccaggaagcaaccactttccaaaaagacaaagaaatctcatattgctaatgaagttgaagaaaatgacagcatctttgtaaagcttcttaagatatcaggaattattcttaaaacgggagagagtcagaatcaactagctgtggatcaaatagctttccaaaagaagctctttcagaccctgaggagacacccttcctatcccaaaataatagaagaatttgttagtggcctggagtcttacattgaggatgaagacagtttcaggaactgccttttgtcttgtgagcgtctgcaggatgaggaagccagtatgggtgcatcttattctaagagtctcatcaaactgcttctggggattgacatactgcagcctgccattatcaaaaccttatttgagaagttgccagaatatttttttgaaaacaagaacagtgatgaaatcaacatacctcgactcattgtcagtcaactaaaatggcttgacagagttgtggatggcaaggacctcaccaccaagatcatgcagctgatcagtattgctccagagaacctgcagcatgacatcatcaccagcctacctgagatcctaggggattcccagcacgctgatgtggggaaagaactcagtgacctactgatagagaatacttcactcactgtcccaatcctggatgtcctttcaagcctccgacttgacccaaacttcctattgaaggttcgccagttggtgatggataagttgtcgtctattagattggaggatttacctgtgataataaagttcattcttcattccgtaacagccatggatacacttgaggtaatttctgagcttcgggagaagttggatctgcagcattgtgttttgccatcacggttacaggcttcccaagtaaagttgaaaagtaaaggacgagcaagttcctcaggaaatcaagaaagcagcggtcagagctgtattattctcctctttgatgtaataaagtcagctattagatatgagaaaaccatttcagaagcctggattaaggcaattgaaaacactgcctcagtatctgaacacaaggtgtttgacctggtgatgcttttcatcatctatagcaccaatactcagacaaagaagtacattgacagggtgctaagaaataagattcgatcaggctgcattcaagaacagctgctccagagtacattctctgttcattacttagttcttaaggatatgtgttcatccattctgtcgctggctcagagtttgcttcactctctagaccagagtataatttcatttggcagtctcctatacaaatatgcatttaagttttttgacacgtactgccagcaggaagtggttggtgccttagtgacccatatctgcagtgggaatgaagctgaagttgatactgccttagatgtccttctagagttggtagtgttaaacccatctgctatgatgatgaatgctgtctttgtaaagggcattttagattatctggataacatatcccctcagcaaatacgaaaactcttctatgttctcagcacactggcatttagcaaacagaatgaagccagcagccacatccaggatgacatgcacttggtgataagaaagcagctctctagcaccgtattcaagtacaagctcattgggattattggtgctgtgaccatggctggcatcatggcggcagacagaagtgaatcacctagtttgacccaagagagagccaacctgagcgatgagcagtgcacacaggtgacctccttgttgcagttggttcattcctgcagtgagcagtctcctcaggcctctgcactttactatgatgaatttgccaacctgatccaacatgaaaagctggatccaaaagccctggaatgggttgggcataccatctgtaatgatttccaggatgccttcgtagtggactcctgtgttgttccggaaggtgactttccatttcctgtgaaagcactgtacggactggaagaatacgacactcaggatgggattgccataaacctcctgccgctgctgttttctcaggactttgcaaaagatgggggtccggtgacctcacaggaatcaggccaaaaattggtgtctccgctgtgcctggctccgtatttccggttactgagactttgtgtggagagacagcataacggaaacttggaggagattgatggtctactagattgtcctatattcctaactgacctggagcctggagagaagttggagtccatgtctgctaaagagcgttcattcatgtgttctctcatatttcttactctcaactggttccgagagattgtaaatgccttctgccaggaaacatcacctgagatgaaggggaaggtgctcactcggttaaagcacattgtagaattgcaaataatcctggaaaagtacttggcagtcaccccagactatgtccctcctcttggaaactttgatgtggaaactttagatataacacctcatactgttactgctatttcagcaaaaatcagaaagaaaggaaaaatagaaaggaaacaaaaaacagatggcagcaagacatcctcctctgacacactttcagaagagaaaaattcagaatgtgaccctacgccatctcatagaggccagctaaacaaggagttcacagggaaggaagaaaagacatcattgttactacataattcccatgcttttttccgagagctggacattgaggtcttctctattctacattgtggacttgtgacgaagttcatcttagatactgaaatgcacactgaagctacagaagttgtgcaacttgggccccctgagctgcttttcttgctggaagatctctcccagaagctggagagtatgctgacacctcctattgccaggagagtcccctttctcaagaacaaaggaagccggaatattggattctcacatctccaacagagatctgcccaagaaattgttcattgtgtttttcaactgctgaccccaatgtgtaaccacctggagaacattcacaactattttcagtgtttagctgctgagaatcacggtgtagttgatggaccaggagtgaaagttcaggagtaccacataatgtcttcctgctatcagaggctgctgcagatttttcatgggctttttgcttggagtggattttctcaacctgaaaatcagaatttactgtattcagccctccatgtccttagtagccgactgaaacagggagaacacagccagcctttggaggaactactcagccagagcgtccattacttgcagaatttccatcaaagcattcccagtttccagtgtgctctttatctcatcagacttttgatggttattttggagaaatcaacagcttctgctcagaacaaagaaaaaattgcttcccttgccagacaattcctctgtcgggtgtggccaagtggggataaagagaagagcaacatctctaatgaccagctccatgctctgctctgtatctacctggagcacacagagagcattctgaaggccatagaggagattgctggtgttggtgtcccagaactgatcaactctcctaaagatgcatcttcctccacattccctacactgaccaggcatacttttgttgttttcttccgtgtgatgatggctgaactagagaagacggtgaaaaaaattgagcctggcacagcagcagactcgcagcagattcatgaagagaaactcctctactggaacatggctgttcgagacttcagtatcctcatcaacttgataaaggtatttgatagtcatcctgttctgcatgtatgtttgaagtatgggcgtctctttgtggaagcatttctgaagcaatgtatgccgctcctagacttcagttttagaaaacaccgggaagatgttctgagcttactggaaaccttccagttggacacaaggctgcttcatcacctgtgtgggcattccaagattcaccaggacacgagactcacccaacatgtgcctctgctcaaaaagaccctggaacttttagtttgcagagtcaaagctatgctcactctcaacaattgtagagaggctttctggctgggcaatctaaaaaaccgggacttgcagggtgaagagattaagtcccaaaattcccaggagagcacagcagatgagagtgaggatgacatgtcatcccaggcctccaagagcaaagccactgaggatggtgaagaagacgaagtaagtgctggagaaaaggagcaagatagtgatgagagttatgatgactctgattagaccccagataaattgttgcctgcttctgtgtctctgccagcctgtgatcatttgtgttagagtttgaaatccgctgtttgcctttcttactggtaggatcctttttttgtcacctcgggtaccgagctc

SEQ ID NO: 379993 - DNA, 4548 bp, Homo sapiens
cccacgcgtccgggcggcgacggcttctcggaagtaatttaagtgcacaagacattggtcaaaatggtttccaaaagaagactgtcaaaatctgaggataaagagagcctgacagaagatgcctccaaaaccaggaagcaaccactttccaaaaagacaaagaaatctcatattgctaatgaagttgaagaaaatgacagcatctttgtaaagcttcttaagatatcaggaattattcttaaaacgggagagagtcagaatcaactagctgtggatcaaatagctttccaaaagaagctctttcagaccctgaggagacacccttcctatcccaaaataatagaagaatttgttagtggcctggagtcttacattgaggatgaagacagtttcaggaactgccttttgtcttgtgagcgtctgcaggatgaggaagccagtatgggtgcatcttattctaagagtctcatcaaactgcttctggggattgacatactgcagcctgccattatcaaaaccttatttgagaagttgccagaatatttttttgaaaacaagaacagtgatgaaatcaacatacctcgactcattgtcagtcaactaaaatggcttgacagagttgtggatggcaaggacctcaccaccaagatcatgcagctgatcagtattgctccagagaacctgcagcatgacatcatcaccagcctacctgagatcctaggggattcccagcacgctgatgtggggaaagaactcagtgacctactgatagagaatacttcactcactgtcccaatcctggatgtcctttcaagcctccgacttgacccaaacttcctattgaaggttcgccagttggtgatggataagttgtcgtctattagattggaggatttacctgtgataataaagttcattcttcattccgtaacagccatggatacacttgaggtaatttctgagcttcgggagaagttggatctgcagcattgtgttttgccatcacggttacaggcttcccaagtaaagttgaaaagtaaaggacgagcaagttcctcaggaaatcaagaaagcagcggtcagagctgtattattctcctctttgatgtaataaagtcagctattagatatgagaaaaccatttcagaagcctggattaaggcaattgaaaacactgcctcagtatctgaacacaaggtgtttgacctggtgatgcttttcatcatctatagcaccaatactcagacaaagaagtacattgacagggtgctaagaaataagattcgatcaggctgcattcaagaacagctgctccagagtacattctctgttcattacttagttcttaaggatatgtgttcatccattctgtcgctggctcagagtttgcttcactctctagaccagagtataatttcatttggcagtctcctatacaaatatgcatttaagttttttgacacgtactgccagcaggaagtggttggtgccttagtgacccatatctgcagtgggaatgaagctgaagttgatactgccttagatgtccttctagagttggtagtgttaaacccatctgctatgatgatgaatgctgtctttgtaaagggcattttagattatctggataacatatcccctcagcaaatacgaaaactcttctatgttctcagcacactggcatttagcaaacagaatgaagccagcagccacatccaggatgacatgcacttggtgataagaaagcagctctctagcaccgtattcaagtacaagctcattgggattattggtgctgtgaccatggctggcatcatggcggcagacagaagtgaatcacctagtttgacccaagagagagccaacctgagcgatgagcagtgcacacaggtgacctccttgttgcagttggttcattcctgcagtgagcagtctcctcaggcctctgcactttactatgatgaatttgccaacctgatccaacatgaaaagctggatccaaaagccctggaatgggttgggcataccatctgtaatgatttccaggatgccttcgtagtggactcctgtgttgttccggaaggtgactttccatttcctgtgaaagcactgtacggactggaagaatacgacactcaggatgggattgccataaacctcctgccgctgctgttttctcaggactttgcaaaagatgggggtccggtgacctcacaggaatcaggccaaaaattggtgtctccgctgtgcctggctccgtatttccggttactgagactttgtgtggagagacagcataacggaaacttggaggagattgatggtctactagattgtcctatattcctaactgacctggagcctggagagaagttggagtccatgtctgctaaagagcgttcattcatgtgttctctcatatttcttactctcaactggttccgagagattgtaaatgccttctgccaggaaacatcacctgagatgaaggggaaggtgctcactcggttaaagcacattgtagaattgcaaataatcctggaaaagtacttggcagtcaccccagactatgtccctcctcttggaaactttgatgtggaaactttagatataacacctcatactgttactgctatttcagcaaaaatcagaaagaaaggaaaaatagaaaggaaacaaaaaacagatggcagcaagacatcctcctctgacacactttcagaagagaaaaattcagaatgtgaccctacgccatctcatagaggccagctaaacaaggagttcacagggaaggaagaaaagacatcattgttactacataattcccatgcttttttccgagagctggacattgaggtcttctctattctacattgtggacttgtgacgaagttcatcttagatactgaaatgcacactgaagctacagaagttgtgcaacttgggccccctgagctgcttttcttgctggaagatctctcccagaagctggagagtatgctgacacctcctattgccaggagagtcccctttctcaagaacaaaggaagccggaatattggattctcacatctccaacagagatctgcccaagaaattgttcattgtgtttttcaactgctgaccccaatgtgtaaccacctggagaacattcacaactattttcagtgtttagctgctgagaatcacggtgtagttgatggaccaggagtgaaagttcaggagtaccacataatgtcttcctgctatcagaggctgctgcagatttttcatgggctttttgcttggagtggattttctcaacctgaaaatcagaatttactgtattcagccctccatgtccttagtagccgactgaaacagggagaacacagccagcctttggaggaactactcagccagagcgtccattacttgcagaatttccatcaaagcattcccagtttccagtgtgctctttatctcatcagacttttgatggttattttggagaaatcaacagcttctgctcagaacaaagaaaaaattgcttcccttgccagacaattcctctgtcgggtgtggccaagtggggataaagagaagagcaacatctctaatgaccagctccatgctctgctctgtatctacctggagcacacagagagcattctgaaggccatagaggagattgctggtgttggtgtcccagaactgatcaactctcctaaagatgcatcttcctccacattccctacactgaccaggcatacttttgttgttttcttccgtgtgatgatggctgaactagagaagacggtgaaaaaaattgagcctggcacagcagcagactcgcagcagattcatgaagagaaactcctctactggaacatggctgttcgagacttcagtatcctcatcaacttgataaaggtatttgatagtcatcctgttctgcatgtatgtttgaagtatgggcgtctctttgtggaagcatttctgaagcaatgtatgccgctcctagacttcagttttagaaaacaccgggaagatgttctgagcttactggaaaccttccagttggacacaaggctgcttcatcacctgtgtgggcattccaagattcaccaggacacgagactcacccaacatgtgcctctgctcaaaaagaccctggaacttttagtttgcagagtcaaagctatgctcactctcaacaattgtagagaggctttctggctgggcaatctaaaaaaccgggacttgcagggtgaagagattaagtcccaaaattcccaggagagcacagcagatgagagtgaggatgacatgtcatcccaggcctccaagagcaaagccactgaggatggtgaagaagacgaagtaagtgctggagaaaaggagcaagatagtgatgagagttatgatgactctgattagaccccagataaattgttgcctgcttctgtgtctctgccagcctgtgatcatttgtgttagagtttgaaatccgctgtttgcctttcttactggtaggatcctttttttgtcacctcgggtaccgagctc

SEQ ID NO: 379994 - DNA, 4441 bp, Homo sapiens
agtcgaaaactacgggcggcgacggcttctcggaagtaatttaagtgcacaagacattggtcaaaatggtttccaaaagaagactgtcaaaatctgaggataaagagagcctgacagaagatgcctccaaaaccaggaagcaaccactttccaaaaagacaaagaaatctcatattgctaatgaagttgaagaaaatgacagcatctttgtaaagcttcttaagatatcaggaattattcttaaaacgggagagagtcagaatcaactagctgtggatcaaatagctttccaaaagaagctctttcagaccctgaggagacacccttcctatcccaaaataatagaagaatttgttagtggcctggagtcttacattgaggatgaagacagtttcaggaactgccttttgtcttgtgagcgtctgcaggatgaggaagccagtatgggtgcatcttattctaagagtctcatcaaactgcttctggggattgacatactgcagcctgccattatcaaaaccttatttgagaagttgccagaatatttttttgaaaacaagaacagtgatgaaatcaacatacctcgactcattgtcagtcaactaaaatggcttgacagagttgtggatggcaaggacctcaccaccaagatcatgcagctgatcagtattgctccagagaacctgcagcatgacatcatcaccagcctacctgagatcctaggggattcccagcacgctgatgtggggaaagaactcagtgacctactgatagagaatacttcactcactgtcccaatcctggatgtcctttcaagcctccgacttgacccaaacttcctattgaaggttcgccagttggtgatggataagttgtcgtctattagattggaggatttacctgtgataataaagttcattcttcattccgtaacagccatggatacacttgaggtaatttctgagcttcgggagaagttggatctgcagcattgtgttttgccatcacggttacaggcttcccaagtaaagttgaaaagtaaaggacgagcaagttcctcaggaaatcaagaaagcagcggtcagagctgtattattctcctctttgatgtaataaagtcagctattagatatgagaaaaccatttcagaagcctggattaaggcaattgaaaacactgcctcagtatctgaacacaaggtgtttgacctggtgatgcttttcatcatctatagcaccaatactcagacaaagaagtacattgacagggtgctaagaaataagattcgatcaggctgcattcaagaacagctgctccagagtacattctctgttcattacttagttcttaaggatatgtgttcatccattctgtcgctggctcagagtttgcttcactctctagaccagagtataatttcatttggcagtctcctatacaaatatgcatttaagttttttgacacgtactgccagcaggaagtggttggtgccttagtgacccatatctgcagtgggaatgaagctgaagttgatactgccttagatgtccttctagagttggtagtgttaaacccatctgctatgatgatgaatgctgtctttgtaaagggcattttagattatctggataacatatcccctcagcaaatacgaaaactcttctatgttctcagcacactggcatttagcaaacagaatgaagccagcagccacatccaggatgacatgcacttggtgataagaaagcagctctctagcaccgtattcaagtacaagctcattgggattattggtgctgtgaccatggctggcatcatggcggcagacagaagtgaatcacctagtttgacccaagagagagccaacctgagcgatgagcagtgcacacaggtgacctccttgttgcagttggttcattcctgcagtgagcagtctcctcaggcctctgcactttactatgatgaatttgccaacctgatccaacatgaaaagctggatccaaaagccctggaatgggttgggcataccatctgtaatgatttccaggatgccttcgtagtggactcctgtgttgttccggaaggtgactttccatttcctgtgaaagcactgtacggactggaagaatacgacactcaggatgggattgccataaacctcctgccgctgctgttttctcaggactttgcaaaagatgggggtccggtgacctcacaggaatcaggccaaaaattggtgtctccgctgtgcctggctccgtatttccggttactgagactttgtgtggagagacagcataacggaaacttggaggagattgatggtctactagattgtcctatattcctaactgacctggagcctggagagaagttggagtccatgtctgctaaagagcgttcattcatgtgttctctcatatttcttactctcaactggttccgagagtcaccccagactatgtccctcctcttggaaactttgatgtggaaactttagatataacacctcatactgttactgctatttcagcaaaaatcagaaagaaaggaaaaatagaaaggaaacaaaaaacagatggcagcaagacatcctcctctgacacactttcagaagagaaaaattcagaatgtgaccctacgccatctcatagaggccagctaaacaaggagttcacagggaaggaagaaaagacatcattgttactacataattcccatgcttttttccgagagctggacattgaggtcttctctattctacattgtggacttgtgacgaagttcatcttagatactgaaatgcacactgaagctacagaagttgtgcaacttgggccccctgagctgcttttcttgctggaagatctctcccagaagctggagagtatgctgacacctcctattgccaggagagtcccctttctcaagaacaaaggaagccggaatattggattctcacatctccaacagagatctgcccaagaaattgttcattgtgtttttcaactgctgaccccaatgtgtaaccacctggagaacattcacaactattttcagtgtttagctgctgagaatcacggtgtagttgatggaccaggagtgaaagttcaggagtaccacataatgtcttcctgctatcagaggctgctgcagatttttcatgggctttttgcttggagtggattttctcaacctgaaaatcagaatttactgtattcagccctccatgtccttagtagccgactgaaacagggagaacacagccagcctttggaggaactactcagccagagcgtccattacttgcagaatttccatcaaagcattcccagtttccagtgtgctctttatctcatcagacttttgatggttattttggagaaatcaacagcttctgctcagaacaaagaaaaaattgcttcccttgccagacaattcctctgtcgggtgtggccaagtggggataaagagaagagcaacatctctaatgaccagctccatgctctgctctgtatctacctggagcacacagagagcattctgaaggccatagaggagattgctggtgttggtgtcccagaactgatcaactctcctaaagatgcatcttcctccacattccctacactgaccaggcatacttttgttgttttcttccgtgtgatgatggctgaactagagaagacggtgaaaaaaattgagcctggcacagcagcagactcgcagcagattcatgaagagaaactcctctactggaacatggctgttcgagacttcagtatcctcatcaacttgataaaggtatttgatagtcatcctgttctgcatgtatgtttgaagtatgggcgtctctttgtggaagcatttctgaagcaatgtatgccgctcctagacttcagttttagaaaacaccgggaagatgttctgagcttactggaaaccttccagttggacacaaggctgcttcatcacctgtgtgggcattccaagattcaccaggacacgagactcacccaacatgtgcctctgctcaaaaagaccctggaacttttagtttgcagagtcaaagctatgctcactctcaacaattgtagagaggctttctggctgggcaatctaaaaaaccgggacttgcagggtgaagagattaagtcccaaaattcccaggagagcacagcagatgagagtgaggatgacatgtcatcccaggcctccaagagcaaagccactgaggatggtgaagaagacgaagtaagtgctggagaaaaggagcaagatagtgatgagagttatgatgactctgattagaccccagataaattgttgcctgcttctgtgtctctgccagcctgtgatcatttgtgttagagtttgaaatccgctgtttgcctttcttactggtaggatcctttttttgtcacctcgggtaccgagctc

SEQ ID NO: 379995 - DNA, 1902 bp, Homo sapiens
  misc_feature (1414)..(1415): n is a, c, g, or t
  misc_feature (1470)..(1470): n is a, c, g, or t
  misc_feature (1474)..(1474): n is a, c, g, or t
  misc_feature (1480)..(1480): n is a, c, g, or t
gtaagtggagcaatggtcgtagtctctcgaggccccgctcccctgcggcctaatctctaagtccgggccgcggtcggcgttctcctctggggctccgcgccccgaaccttggcttcctcatctgccctgagatgggataatccccacaggaagtaatttaagtgcacaagacattggtcaaaatggtttccaaaagaagactgtcaaaatctgaggataaagagagcctgacagaagatgcctccaaaaccaggaagcaaccactttccaaaaagacaaagaaatctcatattgctaatgaagttgaagaaaatgacagcatctttgtaaagcttcttaagatatcaggaattattcttaaaacgggagagagtcagaatcaactagctgtggatcaaatagctttccaaaagaagctctttcagaccctgaggagacacccttcctatcccaaaataatagaagaatttgttagtggcctggagtcttacattgaggatgaagacagtttcaggaactgccttttgtcttgtgagcgtctgcaggatgaggaagccagtatgggtgcatcttattctaagagtctcatcaaactgcttctggggattgacatactgcagcctgccattatcaaaaccttatttgagaagttgccagaatatttttttgaaaacaagaacagtgatgaaatcaacatacctcgactcattgtcagtcaactaaaatggcttgacagagttgtggatggcaaggacctcaccaccaagatcatgcagctgatcagtattgctccagagaacctgcagcatgacatcatcaccagcctacctgagatcctaggggattcccagcacgctgatgtggggaaagaactcaggtgattcattctaatgcacagtcctgcatcagaccgcttgcggagacccattgcttactgtcattcatttgaaaaatagtaattggtagggaagtattgaagaaggggagaacaatatccctaggtaataaagtttccatcttaatgcaactttttattgtactagaagtattttttttaaattcagtttgtaatacttccttttgtatagttgtctgcaaagctacctccaaaacatccagtgatttcttgccctcatccttttgggcaggatgctccttctgggcaaagtactacgccatccactttacctgcctgatgccagctcatctccttttgtatagtctttttttttttttagcatctgtcaccgtctgttgggcgcagtggctcatgcctttaatcccagcatgttgggcggctgaagtgggtgggtcacttgagcccaggagtttgagaccagcctggacaacatggtgaaaagccgtctttcaaaaacatacaaaaattaggtgggcgtggtggtacgcacttatnnttctagctactcaggaggctgagatgggaggatcaattgagcgtggaaggtcgangctncagtgngctgtgatgacaccactgtaactgtactcaagcctgggcatcagagtaagaccctgtctcaaaaaacaaacaaacaaaaaaaaaagcaatctatcactgtccttctcactatgttgtgctcctgtagcaccacctacatgtgtctctcatacttatcagatttcattgtaaatgttttgggttttctttttcctttttgcggggaaggatacataccaaactaaatagtggtgttctctgggtagtggggattgtgatggaaggcttcttgtttctacttttattatttgaatttttataatgagcatgtattattttttgcagtcaaaacaatttttaaagaaacatactataaacggtaacttaatggcaactaagtatgtcctttattttcatactctaataaatgattttctcaagtc

SEQ ID NO: 379996 - DNA, 803 bp, Homo sapiens
actgttctgagatctttgcctccctcaggctcccgagaatcatggctcattccaagcagcctagtcacttccagagtctgatgcttctgcagtggcctttgagctaccttgccatcttttggatcttgcagccattgttcgtctacctgctgtttacatccttgtggccgctaccagtgctttactttgcctggttgttcctggactggaagaccccagagcgaggtggcaggcgttcggcctgggtaaggaactggtgtgtctggacccacatcagggactatttccccattacgatcctgaagacaaaggacctatcacctgagcacaactacctcatgggggttcacccccatggcctcctgacctttggcgccttctgcaacttctgcactgaggccacaggcttctcgaagaccttcccaggcatcactcctcacttggccacactgtcctggttcttcaagatcccctttgttagggagtacctcatggccaaaggtgcttctgaccatacttactggagcttctggtccatgtttctgcttggaaatgcacccttttaaattccatcccctcctccccccacccgcccccatgtcattatggcatagtagtcaaaagcatatgttctagagctaagctgcctggcattgaaccctcctagctctaccacttgtgtggtcttgagcaaactagcctcagtttcctcatccataaagtggtacagatgaaaatagtctgacatcagttgtgggatgatgactaaaagtgagatgatgcaagtaaagaattcgacactg

SEQ ID NO: 379997 - DNA, 800 bp, Homo sapiens
gcaatctcactggccttgaaaatttcatgacaagagacattaaatagggaaaccctgtttagtgcaagaaaaaatgctttatgtcaccaggatttcatcaaaatagatgagggcctggcaagcaaacaaatgttcttccagggtgggtctcatcctagcttgtgtttagaaaataaattggagttttcctacagggctcatctggtccccaccttcacttttggggaaactgaggtgtatgatcaggtgctgttccataaggatagcaggatgtacaagttccagagctgcttccgccgtatctttggtttctactgttgtgtcttctatggacaaagcttctgtcaaggctccactgggctcctgccatactccaggcctattgtcactgtggttggggagcctctgccactgccccaaattgaaaagccaagccaggagatggtggacaaataccatgcactttatatggatgctctgcacaaactgttcgaccagcataagacccactatggctgctcagagacccaaaagctgtttttcctgtgaatgaaggtactgcatgcccaggagcacaggagtgcctgccttgaagaagagactcatctgccactaaccaaagacaggcaggagatgagggaggttatatgtggtaggggagggcatgaggaattccttctttgccttcttgccacagggtccttacaggaattctttctgaagagctgcacacagtcattcctcaaaggagggcatcctagtgcccctcatgctggggcctgatgcctggtcatcatttg

SEQ ID NO: 379998 - DNA, 1279 bp, Homo sapiens
actgttctgagatctttgcctccctcaggctcccgagaatcatggctcattccaagcagcctagtcacttccagagtctgatgcttctgcagtggcctttgagctaccttgccatcttttggatcttgcagccattgttcgtctacctgctgtttacatccttgtggccgctaccagtgctttactttgcctggttgttcctggactggaagaccccagagcgaggtggcaggcgttcggcctgggtaaggaactggtgtgtctggacccacatcagggactatttccccattacgatcctgaagacaaaggacctatcacctgagcacaactacctcatgggggttcacccccatggcctcctgacctttggcgccttctgcaacttctgcactgaggccacaggcttctcgaagaccttcccaggcatcactcctcacttggccacactgtcctggttcttcaagatcccctttgttagggagtacctcatggccaaaggtgtgtgctctgtgagccagccagccatcaactatctgctgagccatggcactggcaacctcgtgggcattgtagtgggaggtgtgggtgaggccctgcaaagtgtgcccaacaccaccaccctcatcctccagaagcgcaaggggttcgtgcgcacagccctccagcatggggctcatctggtccccaccttcacttttggggaaactgaggtgtatgatcaggtgctgttccataaggatagcaggatgtacaagttccagagctgcttccgccgtatctttggtttctactgttgtgtcttctatggacaaagcttctgtcaaggctccactgggctcctgccatactccaggcctattgtcactgtggttggggagcctctgccactgccccaaattgaaaagccaagccaggagatggtggacaaataccatgcactttatatggatgctctgcacaaactgttcgaccagcataagacccactatggctgctcagagacccaaaagctgtttttcctgtgaatgaaggtactgcatgcccaggagcacaggagtgcctgccttgaagaagagactcatctgccactaaccaaagacaggcaggagatgagggaggttatatgtggtaggggagggcatgaggaattccttctttgccttcttgccacagggtccttacaggaattctttctgaagagctgcacacagtcattcctcaaaggagggcatcctagtgcccctcatgctggggcctgatgcctggtcatcatttg

SEQ ID NO: 379999 - DNA, 414 bp, Homo sapiens
tgggagccttatgtcccacgttgtgcccaatccttcaccacagctagctgaagcccaaaaataccagaacacatcctctccaaattctgagctattaggaatacctccttggccatctcttgagtgatccagtaagaaagagaagaagagcagcatctgacatccagccacgggccaggcactcacagcgaggccatgtaattttcctactgaatcttcagtggagcctcccttatgccttttccacaccctggaatcaagctgccctgcacttggagttttttgcaaccatggcttcctcctggacttgttcctgtggtcccacccagaagccattcaatgcacaggaggacaatttcccgtaccccaagattgcaccctcagccagtcagcagcaagcacccattgcctagc

SEQ ID NO: 380000 - DNA, 430 bp, Homo sapiens
tttcactcaacatttctaaccaggggtcacatggcctagatgctaccctagatgagaaagagtccaatggttatcaacaagttctgaaaggcaaggcctaaggtactgaaaattatattactcaaagctgaaggcagcaaatctgttcatgtttacacagttgggaaagtggacttgtgttttttacaagcaaaccagtgaccagccaatggcaggagaccttccccacccctaaaggtgatgctcacctaccgtcatgggtaaaaggaagctctggctcgaattcctcatgtattattcatgtgtgatgccacccaacgtgattcagagaagaaaattctcagtgtgttcaccagaggtgattacatgagaataaagcacggcctgattttttttcttgttcacaggaaaaaaaaaagaaaagaatgta

SEQ ID NO: 380001 - DNA, 430 bp, Homo sapiens
acctggtggtctttctctacccaccctggtagccaaagataaatgacataatctcttgggaagactatggccctgcccatcacaggaggaacctgagtacttatccagataatcctagggcaagcttgtatcctccctataccaccgcagctgatgctgtcttgaaagcgccatcttctgactaaaccaacacaaaaccaccaaaggccaaccaacacaaaactaccgaactaaacaaaattagaaccataccctcacagagtccacttcactcccctgctactttttaaattaaactaaaaagcttatacacagtgaaagaatcaacagagtaaacagacaacctacagaatgagagaaaaactttgcgaaccatgcatctgacaaaggactaatatccagaatctacaagaaactcaaacaaatcagc

SEQ ID NO: 380002 - DNA, 302 bp, Homo sapiens
cggcttgtgtgatgtatcgttcgggaccatgataagagtggtaaatgaactggcacacggtacctgccctaatgagtccgcacccttgggagaggcaggcaggggacagtgctaaagacaaagggcaggtcctcaatgctgggacaaggggagccagctgtgaggggagaatggtatatggccaacctgtgaggtcagacccagcgtcttgggaagaggagttgaaactgagccccaggaggcggaggaggagctcaccaggctccaggttgggccgggagctccagaggcttcgccagctg

SEQ ID NO: 380003 - DNA, 1822 bp, Homo sapiens
agcggacacgtgctggctccccgccgcctcgggctcggctctctccgcgcagaggtttcatggcttgcttcaatcttttgatatcttagagtaattgcttccaatttttgggcatcgccgcctcagtttacagaatagtatggatctggtgccagagccgggaaaacgatgcgcatcgtaaaccgcaaaacactgagcatccaggacagaagccaaggcgcttggcttggttgaaggccagtgcgcatgcgcgagtttacccttcgcggactgggcgagctcttgccactcctacctccgggcttcagtcttcgccgcctgttctggtcctttcccgggccgctattggaagaaccgtgaactatggaaggcccctctggattggctgggctggcccaagagtaaggagagccctcttcctggcggtggggaagggacggcggcgattggcggacgctcctggcaggagagcgcggattggtcaggcacggagcaggaggcggggctgatagcccagcagcagcagcggcggcggcggctgcggagcgggtgtgaggcggctggaccgcgctgcaggcatccgcagggcgcggcaagatggaggtgacgggggtgtcggcacccacggtgaccgttttcatcagcagctccctcaacaccttccgctccgagaagcgatacagccgcagcctcaccatcgctgagttcaagtgtaaactggagttgctggtgggcagccctgcttcctgcatggaactggagctgtatggagttgacgacaagttctacagcaagctggatcaagaggatgcgctcctgggctcctaccctgtagatgacggctgccgcatccacgtcattgaccacagtggcgcccgccttggtgagtatgaggacgtgtcccgggtggagaagtacacgatctcacaagaagcctacgaccagaggcaagacacggtccgctctttcctgaagcgcagcaagctcggccggtacaacgaggaggagcgggctcagcaggaggccgaggccgcccagcgcctggccgaggagaaggcccaggccagctccatccccgtgggcagccgctgtgaggtgcgggcggcgggacaatcccctcgccggggcaccgtcatgtatgtaggtctcacagatttcaagcctggctactggattggtgtccgctatgatgagccactggggaaaaatgatggcagtgtgaatgggaaacgctacttcgaatgccaggccaagtatggcgcctttgtcaagccagcagtcgtgacggtgggggacttcccggaggaggactacgggttggacgagatatgacacctaaggaattcccctgcttcagctcctagctcagccactgactgcccctcctgtgtgtgcccatggcccttttctcctgaccccattttaattttattcattttttcctttgccattgatttttgagactcatgcattaaattcactagaaacccaaaaaaaaaaaaaaaaaaaaaaaaaaaaaaaaaaaaaaaaaaaaaaaaaaaaaaaaaaaaaaaaaaaaaaaaaaaaaaaaaaaaaaaaattaaaaaaaaaaaaaaaaaaaaaaaaaaaaaaaattcggcccgattggcccaatggaatttaaaactggaaaaagttaaacaatgggcccaaatttggggctaattggacaaattcccctaaaagggaggcgaataaaaataaatgggccgagtttaaaaaaggtggaaattggaaaaacctggggttacccaaactaaacgccttggaaaaaaaaccccttttccaaagatggggaaaaacc

SEQ ID NO: 380004 - DNA, 1247 bp, Homo sapiens
agcggacacgtgctggctccccgccgcctcgggctcggctctctccgcgcagaggtttcatggcttgcttcaatcttttgatatcttagagtaattgcttccaatttttgggcatcgccgcctcagtttacagaatagtatggatctggtgccagagccgggaaaacgatgcgcatcgtaaaccgcaaaacactgagcatccaggacagaagccaaggcgcttggcttggttgaaggccagtgcgcatgcgcgagtttacccttcgcggactgggcgagctcttgccactcctacctccgggcttcagtcttcgccgcctgttctggtcctttcccgggccgctattggaagaaccgtgaactatggaaggcccctctggattggctgggctggcccaagagtaaggagagccctcttcctggcggtggggaagggacggcggcgattggcggacgctcctggcaggagagcgcggattggtcaggcacggagcaggaggcggggctgatagcccagcagcagcagcggcggcggcggctgcggagcgggtgtgaggcggctggaccgcgctgcaggcatccgcagggcgcggcaagatggaggtgacgggggtgtcggcacccacggtgaccgttttcatcagcagctccctcaacaccttccgctccgagaagcgatacagccgcagcctcaccatcgctgagttcaagtgtaaactggagttgctggtgggcagccctgcttcctgcatggaactggagctgtatggagttgacgacaagttctacagcaagctggatcaagaggatgcgctcctgggctcctaccctgtagatgacggctgccgcatccacgtcattgaccacagtggcgcccgccttggtgagtatgaggacgtgtcccgggtggagaagtacacgatctcacaagaagcctacgaccagaggcaagacacggtccgctctttcctgaagcgcagcaagctcggccggtacaacgaggaggagcgggctcagcaggaggccgaggccgcccagcgcctggccgaggagaaggcccaggccagctccatccccgtgggcagccgctgtgaggtgcgggcggcgggacaatcccctcgccggggcaccgtcatgtatgtagaacccaattttggttcaagattcagctggtctggtgggtcctttataacatgggaaatttggaggtattggaacctcttccttcaagcattttggcttggaac

SEQ ID NO: 380005 - DNA, 1352 bp, Homo sapiens
ctggggacccggtcgcggcggggcgggtccggagagaactcgagagtgcagagatgagggccgggtccagcgaaaaatccgacggtccagagggcgggggcaagaggcgaggggctggattgcggccccgtgcgtcctgactggggggtcttttggaggaaaagggacgtggcgatggtcattgatgcaaggggcggggcctccgtggcctccttcttctcaccctgcctcctcctcacagtgtaaactggagttgctggtgggcagccctgcttcctgcatggaactggagctgtatggagttgacgacaagttctacagcaagctggatcaagaggatgcgctcctgggctcctaccctgtagatgacggctgccgcatccacgtcattgaccacagtggcgcccgccttggtgagtatgaggacgtgtcccgggtggagaagtacacgatctcacaagaagcctacgaccagaggcaagacacggtccgctctttcctgaagcgcagcaagctcggccggtacaacgaggaggagcgggctcagcaggaggccgaggccgcccagcgcctggccgaggagaaggcccaggccagctccatccccgtgggcagccgctgtgaggtgcgggcggcgggacaatcccctcgccggggcaccgtcatgtatgtaggtctcacagatttcaagcctggctactggattggtgtccgctatgatgagccactggggaaaaatgatggcagtgtgaatgggaaacgctacttcgaatgccaggccaagtatggcgcctttgtcaagccagcagtcgtgacggtgggggacttcccggaggaggactacgggttggacgagatatgacacctaaggaattcccctgcttcagctcctagctcagccactgactgcccctcctgtgtgtgcccatggcccttttctcctgaccccattttaattttattcattttttcctttgccattgatttttgagactcatgcattaaattcactagaaacccaaaaaaaaaaaaaaaaaaaaaaaaaaaaaaaaaaaaaaaaaaaaaaaaaaaaaaaaaaaaaaaaaaaaaaaaaaaaaaaaaaaaaaaaattaaaaaaaaaaaaaaaaaaaaaaaaaaaaaaaattcggcccgattggcccaatggaatttaaaactggaaaaagttaaacaatgggcccaaatttggggctaattggacaaattcccctaaaagggaggcgaataaaaataaatgggccgagtttaaaaaaggtggaaattggaaaaacctggggttacccaaactaaacgccttggaaaaaaaaccccttttccaaagatggggaaaaacc

SEQ ID NO: 380006 - DNA, 1240 bp, Homo sapiens
ctggggacccggtcgcggcggggcgggtccggagagaactcgagagtgcagagatgagggccgggtccagcgaaaaatccgacggtccagagggcgggggcaagaggcgaggggctggattgcggcccctgtaaactggagttgctggtgggcagccctgcttcctgcatggaactggagctgtatggagttgacgacaagttctacagcaagctggatcaagaggatgcgctcctgggctcctaccctgtagatgacggctgccgcatccacgtcattgaccacagtggcgcccgccttggtgagtatgaggacgtgtcccgggtggagaagtacacgatctcacaagaagcctacgaccagaggcaagacacggtccgctctttcctgaagcgcagcaagctcggccggtacaacgaggaggagcgggctcagcaggaggccgaggccgcccagcgcctggccgaggagaaggcccaggccagctccatccccgtgggcagccgctgtgaggtgcgggcggcgggacaatcccctcgccggggcaccgtcatgtatgtaggtctcacagatttcaagcctggctactggattggtgtccgctatgatgagccactggggaaaaatgatggcagtgtgaatgggaaacgctacttcgaatgccaggccaagtatggcgcctttgtcaagccagcagtcgtgacggtgggggacttcccggaggaggactacgggttggacgagatatgacacctaaggaattcccctgcttcagctcctagctcagccactgactgcccctcctgtgtgtgcccatggcccttttctcctgaccccattttaattttattcattttttcctttgccattgatttttgagactcatgcattaaattcactagaaacccaaaaaaaaaaaaaaaaaaaaaaaaaaaaaaaaaaaaaaaaaaaaaaaaaaaaaaaaaaaaaaaaaaaaaaaaaaaaaaaaaaaaaaaaattaaaaaaaaaaaaaaaaaaaaaaaaaaaaaaaattcggcccgattggcccaatggaatttaaaactggaaaaagttaaacaatgggcccaaatttggggctaattggacaaattcccctaaaagggaggcgaataaaaataaatgggccgagtttaaaaaaggtggaaattggaaaaacctggggttacccaaactaaacgccttggaaaaaaaaccccttttccaaagatggggaaaaacc

SEQ ID NO: 380007 - DNA, 1803 bp, Homo sapiens
agcggacacgtgctggctccccgccgcctcgggctcggctctctccgcgcagaggtttcatggcttgcttcaatcttttgatatcttagagtaattgcttccaatttttgggcatcgccgcctcagtttacagaatagtatggatctggtgccagagccgggaaaacgatgcgcatcgtaaaccgcaaaacactgagcatccaggacagaagccaaggcgcttggcttggttgaaggccagtgcgcatgcgcgagtttacccttcgcggactgggcgagctcttgccactcctacctccgggcttcagtcttcgccgcctgttctggtcctttcccgggccgctattggaagaaccgtgaactatggaaggcccctctggattggctgggctggcccaagagtaaggagagccctcttcctggcggtggggaagggacggcggcgattggcggacgctcctggcaggagagcgcggattggtcaggcacggagcaggaggcggggctgatagcccagcagcagcagcggcggcggcggctgcggagcgggtgtgaggcggctggaccgcgctgcaggcatccgcagggcgcggcaagatggaggtgacgggggtgtcggcacccacggtgaccgttttcatcagcagctccctcaacaccttccgctccgagaagcgatacagccgcagcctcaccatcgctgagttcaagtgtaaactggagttgctggtgggcagccctgcttcctgcatggaactggagctgtatggagttgacgacaagttctacagcaagctggatcaagaggatgcgctcctgggctcctaccctgtagatgacggctgccgcatccacgtcattgaccacagtggcgcccgccttggtgagtatgaggacgtgtcccgggtggagaagtacacgatctcacaagaaacacggtccgctctttcctgaagcgcagcaagctcggccggtacaacgaggaggagcgggctcagcaggaggccgaggccgcccagcgcctggccgaggagaaggcccaggccagctccatccccgtgggcagccgctgtgaggtgcgggcggcgggacaatcccctcgccggggcaccgtcatgtatgtaggtctcacagatttcaagcctggctactggattggtgtccgctatgatgagccactggggaaaaatgatggcagtgtgaatgggaaacgctacttcgaatgccaggccaagtatggcgcctttgtcaagccagcagtcgtgacggtgggggacttcccggaggaggactacgggttggacgagatatgacacctaaggaattcccctgcttcagctcctagctcagccactgactgcccctcctgtgtgtgcccatggcccttttctcctgaccccattttaattttattcattttttcctttgccattgatttttgagactcatgcattaaattcactagaaacccaaaaaaaaaaaaaaaaaaaaaaaaaaaaaaaaaaaaaaaaaaaaaaaaaaaaaaaaaaaaaaaaaaaaaaaaaaaaaaaaaaaaaaaaattaaaaaaaaaaaaaaaaaaaaaaaaaaaaaaaattcggcccgattggcccaatggaatttaaaactggaaaaagttaaacaatgggcccaaatttggggctaattggacaaattcccctaaaagggaggcgaataaaaataaatgggccgagtttaaaaaaggtggaaattggaaaaacctggggttacccaaactaaacgccttggaaaaaaaaccccttttccaaagatggggaaaaacc

SEQ ID NO: 380008 - DNA, 1781 bp, Homo sapiens
agcggacacgtgctggctccccgccgcctcgggctcggctctctccgcgcagaggtttcatggcttgcttcaatcttttgatatcttagagtaattgcttccaatttttgggcatcgccgcctcagtttacagaatagtatggatctggtgccagagccgggaaaacgatgcgcatcgtaaaccgcaaaacactgagcatccaggacagaagccaaggcgcttggcttggttgaaggccagtgcgcatgcgcgagtttacccttcgcggactgggcgagctcttgccactcctacctccgggcttcagtcttcgccgcctgttctggtcctttcccgggccgctattggaagaaccgtgaactatggaaggcccctctggattggctgggctggcccaagagtaaggagagccctcttcctggcggtggggaagggacggcggcgattggcggacgctcctggcaggagagcgcggattggtcaggcacggagcaggaggcggggctgatagcccagcagcagcagcggcggcggcggctgcggagcgggtgtgaggcggctggaccgcgctgcaggcatccgcagggcgcggcaagatggaggtgacgggggtgtcggcacccacggtgaccgttttcatcagcagctccctcaacaccttccgctccgagaagcgatacagccgcagcctcaccatcgctgagttcaagtgtaaactggagttgctggtgggcagccctgcttcctgcatggaactggagctgtatggagttgacgacaagttctacagcaagctggatcaagaggatgcgctcctgggctcctaccctgtagatgacggctgccgcatccacgtcattgaccacagtggcgcccgccttggtgagtatgaggacgtgtcccgggtggagaagtacacgatctcacaagaagcctacgaccagaggcaagacacggtccgctctttcctgaagcgcagcaagctcggccggtacaacgaggaggagcgggctcagcaggaggccgaggccgcccagcgcctggccgaggagaaggcccaggccagctccatccccgtgggcagccgctgtgaggtgcgggcggcgggacaatcccctcgccggggcaccgtcatgtatgtaggtctcacagatttcaagcctggctactggattggtgtccgctatgatgagccactggggaaaaatgatggcaggcgcctttgtcaagccagcagtcgtgacggtgggggacttcccggaggaggactacgggttggacgagatatgacacctaaggaattcccctgcttcagctcctagctcagccactgactgcccctcctgtgtgtgcccatggcccttttctcctgaccccattttaattttattcattttttcctttgccattgatttttgagactcatgcattaaattcactagaaacccaaaaaaaaaaaaaaaaaaaaaaaaaaaaaaaaaaaaaaaaaaaaaaaaaaaaaaaaaaaaaaaaaaaaaaaaaaaaaaaaaaaaaaaaattaaaaaaaaaaaaaaaaaaaaaaaaaaaaaaaattcggcccgattggcccaatggaatttaaaactggaaaaagttaaacaatgggcccaaatttggggctaattggacaaattcccctaaaagggaggcgaataaaaataaatgggccgagtttaaaaaaggtggaaattggaaaaacctggggttacccaaactaaacgccttggaaaaaaaaccccttttccaaagatggggaaaaacc

SEQ ID NO: 380009 - DNA, 1670 bp, Homo sapiens
agcggacacgtgctggctccccgccgcctcgggctcggctctctccgcgcagaggtttcatggcttgcttcaatcttttgatatcttagagtaattgcttccaatttttgggcatcgccgcctcagtttacagaatagtatggatctggtgccagagccgggaaaacgatgcgcatcgtaaaccgcaaaacactgagcatccaggacagaagccaaggcgcttggcttggttgaaggccagtgcgcatgcgcgagtttacccttcgcggactgggcgagctcttgccactcctacctccgggcttcagtcttcgccgcctgttctggtcctttcccgggccgctattggaagaaccgtgaactatggaaggcccctctggattggctgggctggcccaagagtaaggagagccctcttcctggcggtggggaagggacggcggcgattggcggacgctcctggcaggagagcgcggattggtcaggcacggagcaggaggcggggctgatagcccagcagcagcagcggcggcggcggctgcggagcgggtgtgaggcggctggaccgcgctgcaggcatccgcagggcgcggcaagatggaggtgacgggggtgtcggcacccacggtgaccgttttcatcagcagctccctcaacaccttccgctccgagaagcgatacagccgcagcctcaccatcgctgagttcaagtgtaaactggagttgctggtgggcagccctgcttcctgcatggaactggagctgtatggagttgacgacaagttctacagcaagctggatcaagaggatgcgctcctgggctcctaccctgtagatgacggctgccgcatccacgtcattgaccacagtggcgcccgccttggtgagtatgaggacgtgtcccgggtggagaagtacacgatctcacaagaagcctacgaccagaggcaagacacggtccgctctttcctgaagcgcagcaagctcggccggtacaacgaggaggagcgggctcagcaggaggccgaggccgcccagcgcctggccgaggagaaggcccaggccagctccatccccgtgggcagccgctgtgaggtgcgggcggcgggacaatcccctcgccggggcaccgtcatgtatgtaggtctcacagatttcaagcctggctactggattggtgtccgctatgatgagccactggggaaaaatgatggcagccactgactgcccctcctgtgtgtgcccatggcccttttctcctgaccccattttaattttattcattttttcctttgccattgatttttgagactcatgcattaaattcactagaaacccaaaaaaaaaaaaaaaaaaaaaaaaaaaaaaaaaaaaaaaaaaaaaaaaaaaaaaaaaaaaaaaaaaaaaaaaaaaaaaaaaaaaaaaaattaaaaaaaaaaaaaaaaaaaaaaaaaaaaaaaattcggcccgattggcccaatggaatttaaaactggaaaaagttaaacaatgggcccaaatttggggctaattggacaaattcccctaaaagggaggcgaataaaaataaatgggccgagtttaaaaaaggtggaaattggaaaaacctggggttacccaaactaaacgccttggaaaaaaaaccccttttccaaagatggggaaaaacc

SEQ ID NO: 380010 - DNA, 1936 bp, Homo sapiens
agcggacacgtgctggctccccgccgcctcgggctcggctctctccgcgcagaggtttcatggcttgcttcaatcttttgatatcttagagtaattgcttccaatttttgggcatcgccgcctcagtttacagaatagtatggatctggtgccagagccgggaaaacgatgcgcatcgtaaaccgcaaaacactgagcatccaggacagaagccaaggcgcttggcttggttgaaggccagtgcgcatgcgcgagtttacccttcgcggactgggcgagctcttgccactcctacctccgggcttcagtcttcgccgcctgttctggtcctttcccgggccgctattggaagaaccgtgaactatggaaggcccctctggattggctgggctggcccaagagtaaggagagccctcttcctggcggtggggaagggacggcggcgattggcggacgctcctggcaggagagcgcggattggtcaggcacggagcaggaggcggggctgatagcccagcagcagcagcggcggcggcggctgcggagcgggtgtgaggcggctggaccgcgctgcaggcatccgcagggcgcggcaagatggaggtgacgggggtgtcggcacccacggtgaccgttttcatcagcagctccctcaacaccttccgctccgagaagcgatacagccgcagcctcaccatcgctgagttcaagtgtaaactggagttgctggtgggcagccctgcttcctgcatggaactggagctgtatggagttgacgacaagttctacagcaagctggatcaagaggatgcgctcctgggctcctaccctgtagatgacggctgccgcatccacgtcattgaccacagtggcgcccgccttggtgagtatgaggacgtgtcccgggtggagaagtacacgatctcacaagaagcctacgaccagaggcaagacacggtccgctctttcctgaagcgcagcaagctcggccggtacaacgaggaggagcgggctcagcaggaggccgaggccgcccagcgcctggccgaggagaaggcccaggccagctccatccccgtgggcagccgctgtgaggtgcgggcggcgggacaatcccctcgccggggcaccgtcatgtatgtagtctcactccgtcacccaggctggagtgcagtggtgctctcagctcactgcatcctctgcctcccgggttcaagcaattctcatgcctcagcctcccgagtagctgggattataggtctcacagatttcaagcctggctactggattggtgtccgctatgatgagccactggggaaaaatgatggcagtgtgaatgggaaacgctacttcgaatgccaggccaagtatggcgcctttgtcaagccagcagtcgtgacggtgggggacttcccggaggaggactacgggttggacgagatatgacacctaaggaattcccctgcttcagctcctagctcagccactgactgcccctcctgtgtgtgcccatggcccttttctcctgaccccattttaattttattcattttttcctttgccattgatttttgagactcatgcattaaattcactagaaacccaaaaaaaaaaaaaaaaaaaaaaaaaaaaaaaaaaaaaaaaaaaaaaaaaaaaaaaaaaaaaaaaaaaaaaaaaaaaaaaaaaaaaaaaattaaaaaaaaaaaaaaaaaaaaaaaaaaaaaaaattcggcccgattggcccaatggaatttaaaactggaaaaagttaaacaatgggcccaaatttggggctaattggacaaattcccctaaaagggaggcgaataaaaataaatgggccgagtttaaaaaaggtggaaattggaaaaacctggggttacccaaactaaacgccttggaaaaaaaaccccttttccaaagatggggaaaaacc

SEQ ID NO: 380011 - DNA, 1768 bp, Homo sapiens
agcggacacgtgctggctccccgccgcctcgggctcggctctctccgcgcagaggtttcatggcttgcttcaatcttttgatatcttagagtaattgcttccaatttttgggcatcgccgcctcagtttacagaatagtatggatctggtgccagagccgggaaaacgatgcgcatcgtaaaccgcaaaacactgagcatccaggacagaagccaaggcgcttggcttggttgaaggccagtgcgcatgcgcgagtttacccttcgcggactgggcgagctcttgccactcctacctccgggcttcagtcttcgccgcctgttctggtcctttcccgggccgctattggaagaaccgtgaactatggaaggcccctctggattggctgggctggcccaagagtaaggagagccctcttcctggcggtggggaagggacggcggcgattggcggacgctcctggcaggagagcgcggattggtcaggcacggagcaggaggcggggctgatagcccagcagcagcagcggcggcggcggctgcggagcgggtgtgaggcggctggaccgcgctgcaggcatccgcagggcgcggcaagatggaggtgacgggggtgtcggcacccacggtgaccgttttcatcagcagctccctcaacaccttccgctccgagaagcgatacagccgcagcctcaccatcgctgagttcaagtgtaaactggagttgctggtgggcagccctgcttcctgcatggaactggagctgtatggagttgacgacaagttctacagcaagctggatcaagaggatgcgctcctgggctcctaccctgtagatgacggctgccgcatccacgtcattgaccacagtggcgcccgccttggtgagtatgaggacgtgtcccgggtggagaagtacacgatctcacaagaagcctacgaccagaggcaagacacggtccgctctttcctgaagcgcagcaagctcggccggtacaacgaggaggagcgggctcagcaggaggccgaggccgcccagcgcctggccgaggagaaggcccaggccagctccatccccgtgggcagccgctgtctcacagatttcaagcctggctactggattggtgtccgctatgatgagccactggggaaaaatgatggcagtgtgaatgggaaacgctacttcgaatgccaggccaagtatggcgcctttgtcaagccagcagtcgtgacggtgggggacttcccggaggaggactacgggttggacgagatatgacacctaaggaattcccctgcttcagctcctagctcagccactgactgcccctcctgtgtgtgcccatggcccttttctcctgaccccattttaattttattcattttttcctttgccattgatttttgagactcatgcattaaattcactagaaacccaaaaaaaaaaaaaaaaaaaaaaaaaaaaaaaaaaaaaaaaaaaaaaaaaaaaaaaaaaaaaaaaaaaaaaaaaaaaaaaaaaaaaaaaattaaaaaaaaaaaaaaaaaaaaaaaaaaaaaaaattcggcccgattggcccaatggaatttaaaactggaaaaagttaaacaatgggcccaaatttggggctaattggacaaattcccctaaaagggaggcgaataaaaataaatgggccgagtttaaaaaaggtggaaattggaaaaacctggggttacccaaactaaacgccttggaaaaaaaaccccttttccaaagatggggaaaaacc

SEQ ID NO: 380012 - DNA, 220 bp, Homo sapiens
atgccagcttctagagtggagccatgtgagggtcctctgaccacacccacccctatcctttcctgcagtgtgaatgggaaacgctacttcgaatgccaggccaagtatggcgcctttgtcaagccagcagtcgtgacggtgggggacttcccggaggaggactacgggttggacgagatatgacacctaaggaattcccctgcttcagctcctagctcag

SEQ ID NO: 380013 - DNA, 1707 bp, Homo sapiens
agcggacacgtgctggctccccgccgcctcgggctcggctctctccgcgcagaggtttcatggcttgcttcaatcttttgatatcttagagtaattgcttccaatttttgggcatcgccgcctcagtttacagaatagtatggatctggtgccagagccgggaaaacgatgcgcatcgtaaaccgcaaaacactgagcatccaggacagaagccaaggcgcttggcttggttgaaggccagtgcgcatgcgcgagtttacccttcgcggactgggcgagctcttgccactcctacctccgggcttcagtcttcgccgcctgttctggtcctttcccgggccgctattggaagaaccgtgaactatggaaggcccctctggattggctgggctggcccaagagtaaggagagccctcttcctggcggtggggaagggacggcggcgattggcggacgctcctggcaggagagcgcggattggtcaggcacggagcaggaggcggggctgatagcccagcagcagcagcggcggcggcggctgcggagcgggtgtgaggcggctggaccgcgctgcaggcatccgcagggcgcggcaagatggaggtgacgggggtgtcggcacccacggtgaccgttttcatcagcagctccctcaacaccttccgctccgagaagcgatacagccgcagcctcaccatcgctgagttcaagtgtaaactggagttgctggtgggcagccctgcttcctgcatggaactggagctgtatggagttgacgacaagttctacagcaagctggatcaagaggatgcgctcctgggctcctaccctgtagatgacggctgccgcatccacgtcattgaccacagtggcgcccgccttggtgagtatgaggacgtgtcccgggtggagaagtacacgatctcacaagaagcctacgaccagaggcaagctccatccccgtgggcagccgctgtgaggtgcgggcggcgggacaatcccctcgccggggcaccgtcatgtatgtaggtctcacagatttcaagcctggctactggattggtgtccgctatgatgagccactggggaaaaatgatggcagtgtgaatgggaaacgctacttcgaatgccaggccaagtatggcgcctttgtcaagccagcagtcgtgacggtgggggacttcccggaggaggactacgggttggacgagatatgacacctaaggaattcccctgcttcagctcctagctcagccactgactgcccctcctgtgtgtgcccatggcccttttctcctgaccccattttaattttattcattttttcctttgccattgatttttgagactcatgcattaaattcactagaaacccaaaaaaaaaaaaaaaaaaaaaaaaaaaaaaaaaaaaaaaaaaaaaaaaaaaaaaaaaaaaaaaaaaaaaaaaaaaaaaaaaaaaaaaaattaaaaaaaaaaaaaaaaaaaaaaaaaaaaaaaattcggcccgattggcccaatggaatttaaaactggaaaaagttaaacaatgggcccaaatttggggctaattggacaaattcccctaaaagggaggcgaataaaaataaatgggccgagtttaaaaaaggtggaaattggaaaaacctggggttacccaaactaaacgccttggaaaaaaaaccccttttccaaagatggggaaaaacc

SEQ ID NO: 380014 - DNA, 1425 bp, Homo sapiens
agcggacacgtgctggctccccgccgcctcgggctcggctctctccgcgcagaggtttcatggcttgcttcaatcttttgatatcttagagtaattgcttccaatttttgggcatcgccgcctcagtttacagaatagtatggatctggtgccagagccgggaaaacgatgcgcatcgtaaaccgcaaaacactgagcatccaggacagaagccaaggcgcttggcttggttgaaggccagtgcgcatgcgcgagtttacccttcgcggactgggcgagctcttgccactcctacctccgggcttcagtcttcgccgcctgttctggtcctttcccgggccgctattggaagaaccgtgaactatggaaggcccctctggattggctgggctggcccaagagtaaggagagccctcttcctggcggtggggaagggacggcggcgattggcggacgctcctggcaggagagcgcggattggtcaggcacggagcaggaggcggggctgatagcccagcagcagcagcggcggcggcggctgcggagcgggtgtgaggcggctggaccgcgctgcaggcatccgcagggcgcggcaagatggaggtgacgggggtgtcggcacccacggtgaccgttttcatcagcagctccctcaacaccttccgctccgagaagcgatacagccgcagcctcaccatcgctgagttcaagtgtaaactggagttgctggtgggcagccctgcttcctgcatggaactggagctgtatggagttgacgacaagttctacagcaagctggatcaagaggatgcgctcctgggctcctaccctgtagatgacggctgccgcatccacgtgaggactctctatctgggacactcccccaccccacctttcatttggttattcaacagacacttgctgggctttgccctcagtcatacccgagataggtcctgccttcgtggagcctccagtgcagcctgacgagagacagacccatcattagacagggacagcctagagtggtctgggctgggatcaggaaatcccaggggactggagccaccaagaagaggtgcctgactccacctgggagaatcagagagggcttcctggaggaagggatgtctgagctgagggatgaggaaagggtgacttaagagaaagaggtggaaaggagggagcagggtgtacagaggcctagaatgtgaggtaggtcacagtgagcgaccaggctggacagcttgggagaaaccagaacacaggatctctttgtgcatccactcagtacatcctttctgtctttttttgagacagagtctcactctgtcacccaacctggaatggagtgcagtggcactatcgggctcactgcagccttcacctcctgggttcaagtgatccttgtgccccagcctcccg

SEQ ID NO: 380015 - DNA, 1489 bp, Homo sapiens
ctggggacccggtcgcggcggggcgggtccggagagaactcgagagtgcagagatgagggccgggtccagcgaaaaatccgacggtccagagggcgggggcaagaggcgaggggctggattgcggccccgtgcgtcctgactggggggtcttttggaggaaaagggacgtggcgatggtcattgatgcaaggggcggggcctccgtggcctccttcttctcaccctgcctcctcctcacagtgtaaactggagttgctggtgggcagccctgcttcctgcatggaactggagctgtatggagttgacgacaagttctacagcaagctggatcaagaggatgcgctcctgggctcctaccctgtagatgacggctgccgcatccacaaattagctgggcgtggtggcagatgcctgtaatcctagctactcaggaggctgaggcaggaggatcacttgaacccaggagctggaagttgcagtgagctgagatcacaccactgcactccagtttggatgatagagtcattgaccacagtggcgcccgccttggtgagtatgaggacgtgtcccgggtggagaagtacacgatctcacaagaagcctacgaccagaggcaagacacggtccgctctttcctgaagcgcagcaagctcggccggtacaacgaggaggagcgggctcagcaggaggccgaggccgcccagcgcctggccgaggagaaggcccaggccagctccatccccgtgggcagccgctgtgaggtgcgggcggcgggacaatcccctcgccggggcaccgtcatgtatgtaggtctcacagatttcaagcctggctactggattggtgtccgctatgatgagccactggggaaaaatgatggcagtgtgaatgggaaacgctacttcgaatgccaggccaagtatggcgcctttgtcaagccagcagtcgtgacggtgggggacttcccggaggaggactacgggttggacgagatatgacacctaaggaattcccctgcttcagctcctagctcagccactgactgcccctcctgtgtgtgcccatggcccttttctcctgaccccattttaattttattcattttttcctttgccattgatttttgagactcatgcattaaattcactagaaacccaaaaaaaaaaaaaaaaaaaaaaaaaaaaaaaaaaaaaaaaaaaaaaaaaaaaaaaaaaaaaaaaaaaaaaaaaaaaaaaaaaaaaaaaattaaaaaaaaaaaaaaaaaaaaaaaaaaaaaaaattcggcccgattggcccaatggaatttaaaactggaaaaagttaaacaatgggcccaaatttggggctaattggacaaattcccctaaaagggaggcgaataaaaataaatgggccgagtttaaaaaaggtggaaattggaaaaacctggggttacccaaactaaacgccttggaaaaaaaaccccttttccaaagatggggaaaaacc

SEQ ID NO: 380016 - DNA, 1376 bp, Homo sapiens
agcggacacgtgctggctccccgccgcctcgggctcggctctctccgcgcagaggtttcatggcttgcttcaatcttttgatatcttagagtaattgcttccaatttttgggcatcgccgcctcagtttacagaatagtatggatctggtgccagagccgggaaaacgatgcgcatcgtaaaccgcaaaacactgagcatccaggacagaagccaaggcgcttggcttggttgaaggccagtgcgcatgcgcgagtttacccttcgcggactgggcgagctcttgccactcctacctccgggcttcagtcttcgccgcctgttctggtcctttcccgggccgctattggaagaaccgtgaactatggaaggcccctctggattggctgggctggcccaagagtaaggagagccctcttcctggcggtggggaagggacggcggcgattggcggacgctcctggcaggagagcgcggattggtcaggcacggagcaggaggcggggctgatagcccagcagcagcagcggcggcggcggctgcggagcgggtgtgaggcggctggaccgcgctgcaggcatccgcagggcgcggcaagatggaggtgacgggggtgtcggcacccacggtgaccgttttcatcagcagctccctcaacaccttccgctccgagaagcgatacagccgcagcctcaccatcgctgagttcaagtgtaaactggagttgctggtgggcagccctgcttcctgcatggaactggagctgtatggagttgacgacaagttctacagcaagctggatcaagaggatgcgctcctgggctcctaccctgtagatgacggctgccgcatccacgtcattgaccacagtggcgcccgccttggtgagtatgaggacgtgtcccgggtggagaagtacacgatctcacaagaagcctacgaccagaggcaagacacggtccgctctttcctgaagcgcagcaagctcggccggtacaacgaggaggagcgggctcagcaggaggccgaggccgcccagcgcctggccgaggagaaggcccaggccagctccatccccgtgggcagccgctgtgaggtgcgggcggcgggacaatcccctcgccggggcaccgtcatgtatgtaggtctcacagatttcaagcctggctactggattggtgtccgctatgatgagccactggggaaaaatgatggcagtgtgaatgggaaacgctacttcgaatgccaggccaagtatggcgcctttgtcaagccagcagtcgtgacggtgggggacttcccggaggaggactacgggttggctgagctaggagctgaagcaggcgattccttaggtgtcatatctcgtccgtcgac

SEQ ID NO: 380017 - DNA, 2280 bp, Homo sapiens
agcggacacgtgctggctccccgccgcctcgggctcggctctctccgcgcagaggtttcatggcttgcttcaatcttttgatatcttagagtaattgcttccaatttttgggcatcgccgcctcagtttacagaatagtatggatctggtgccagagccgggaaaacgatgcgcatcgtaaaccgcaaaacactgagcatccaggacagaagccaaggcgcttggcttggttgaaggccagtgcgcatgcgcgagtttacccttcgcggactgggcgagctcttgccactcctacctccgggcttcagtcttcgccgcctgttctggtcctttcccgggccgctattggaagaaccgtgaactatggaaggcccctctggattggctgggctggcccaagagtaaggagagccctcttcctggcggtggggaagggacggcggcgattggcggacgctcctggcaggagagcgcggattggtcaggcacggagcaggaggcggggctgatagcccagcagcagcagcggcggcggcggctgcggagcgggtgtgaggcggctggaccgcgctgcaggcatccgcagggcgcggcaagatggaggtgacgggggtgtcggcacccacggtgaccgttttcatcagcagctccctcaacaccttccgctccgagaagcgatacagccgcagcctcaccatcgctgagttcaagtgtaaactggagttgctggtgggcagccctgcttcctgcatggaactggagctgtatggagttgacgacaagttctacagcaagctggatcaagaggatgcgctcctgggctcctaccctgtagatgacggctgccgcatccacgtcattgaccacagtggcgcccgccttggtgagtatgaggacgtgtcccgggtggagaagtacacgatctcacaagaagcctacgaccagaggcaagacacggtccgctctttcctgaagcgcagcaagctcggccggtacaacgaggaggagcgggctcagcaggaggccgaggccgcccagcgcctggccgaggagaaggcccaggccagctccatccccgtgggcagccgctgtgaggtgcgggcggcgggacaatcccctcgccggggcaccgtcatgtatgtagtaggtgcgtggctcgcgggcccggtcccgggctccagggctccaaggccgggaggaaatgttgggggcacagtggagcctcggagaccacgctctgcctaggggcgcggggttgggggggactcgaaacgatctcagtccctggaggtgacggaaccatctgccgacactgacggcccagagtgtttgtggagggaagtgggaggcgcaggcggagtgatctgtccagcgagggaggaagcagaagccagaggcacgcggcctgtgcgcttcgaagcgtggggcagtgtcagtcgcggtggggaaacgggcggcgtgaccaaggcaggagtgagggaacacagggggctgtgtgagcccagaggaagcacctggaggctgggagcatctgaaggaaaggaggcagcagccaggtgaaaagggaggaagagttcccgccagaaggagtagcgggtgcaggtctcacagatttcaagcctggctactggattggtgtccgctatgatgagccactggggaaaaatgatggcagtgtgaatgggaaacgctacttcgaatgccaggccaagtatggcgcctttgtcaagccagcagtcgtgacggtgggggacttcccggaggaggactacgggttggacgagatatgacacctaaggaattcccctgcttcagctcctagctcagccactgactgcccctcctgtgtgtgcccatggcccttttctcctgaccccattttaattttattcattttttcctttgccattgatttttgagactcatgcattaaattcactagaaacccaaaaaaaaaaaaaaaaaaaaaaaaaaaaaaaaaaaaaaaaaaaaaaaaaaaaaaaaaaaaaaaaaaaaaaaaaaaaaaaaaaaaaaaaattaaaaaaaaaaaaaaaaaaaaaaaaaaaaaaaattcggcccgattggcccaatggaatttaaaactggaaaaagttaaacaatgggcccaaatttggggctaattggacaaattcccctaaaagggaggcgaataaaaataaatgggccgagtttaaaaaaggtggaaattggaaaaacctggggttacccaaactaaacgccttggaaaaaaaaccccttttccaaagatggggaaaaacc

SEQ ID NO: 380018 - DNA, 1684 bp, Homo sapiens
agcggacacgtgctggctccccgccgcctcgggctcggctctctccgcgcagaggtttcatggcttgcttcaatcttttgatatcttagagtaattgcttccaatttttgggcatcgccgcctcagtttacagaatagtatggatctggtgccagagccgggaaaacgatgcgcatcgtaaaccgcaaaacactgagcatccaggacagaagccaaggcgcttggcttggttgaaggccagtgcgcatgcgcgagtttacccttcgcggactgggcgagctcttgccactcctacctccgggcttcagtcttcgccgcctgttctggtcctttcccgggccgctattggaagaaccgtgaactatggaaggcccctctggattggctgggctggcccaagagtaaggagagccctcttcctggcggtggggaagggacggcggcgattggcggacgctcctggcaggagagcgcggattggtcaggcacggagcaggaggcggggctgatagcccagcagcagcagcggcggcggcggctgcggagcgggtgtgaggcggctggaccgcgctgcaggcatccgcagggcgcggcaagatggaggtgacgggggtgtcggcacccacggtgaccgttttcatcagcagctccctcaacaccttccgctccgagaagcgatacagccgcagcctcaccatcgctgagttcaagtgtaaactggagttgctggtgggcagccctgcttcctgcatggaactggagctgtatggagttgacgacaagttctacagcaagctggatcaagaggatgcgctcctgggctcctaccctgtagatgacggctgccgcatccacgtcattgaccacagtggcgcccgccttggtgagtatgaggacgtgtcccgggtggagaagtacacgatctcacaagaagcctacgaccagaggcaaggtgaggtgcgggcggcgggacaatcccctcgccggggcaccgtcatgtatgtaggtctcacagatttcaagcctggctactggattggtgtccgctatgatgagccactggggaaaaatgatggcagtgtgaatgggaaacgctacttcgaatgccaggccaagtatggcgcctttgtcaagccagcagtcgtgacggtgggggacttcccggaggaggactacgggttggacgagatatgacacctaaggaattcccctgcttcagctcctagctcagccactgactgcccctcctgtgtgtgcccatggcccttttctcctgaccccattttaattttattcattttttcctttgccattgatttttgagactcatgcattaaattcactagaaacccaaaaaaaaaaaaaaaaaaaaaaaaaaaaaaaaaaaaaaaaaaaaaaaaaaaaaaaaaaaaaaaaaaaaaaaaaaaaaaaaaaaaaaaaattaaaaaaaaaaaaaaaaaaaaaaaaaaaaaaaattcggcccgattggcccaatggaatttaaaactggaaaaagttaaacaatgggcccaaatttggggctaattggacaaattcccctaaaagggaggcgaataaaaataaatgggccgagtttaaaaaaggtggaaattggaaaaacctggggttacccaaactaaacgccttggaaaaaaaaccccttttccaaagatggggaaaaacc

SEQ ID NO: 380019 - DNA, 371 bp, Homo sapiens
tcatatgtttgttggccatttgtatctcttcttttgagaattgtctattcatgtcctcagcccactgttttgatgggattctttttttcttactgatttgtttgagttcttattagattctggatattagtcctttgtcagatgtacagattgtgaagactctctcccactctgtgggttgtctgtttactctgctgacggttccttttgccatgcaacaactccttagtttaattaggtcccagctatccatctttgtttttattgcatttgctttttggtcatgaaatccttgcctaagccaatttctagaaggatttttccaatgttatcttctagaatttttattgtttcaggttttaggtttaagt

SEQ ID NO: 380020 - DNA, 428 bp, Homo sapiens
attgatttaaaccggaaacgagtattcccaggaatcttttctgagccaagaaggctcacatctagattgttaagattcatatgaaaagcccgagcgaaggcgtcccgggggtgtgattgagctcaccttccccacgcacccgtggtgacagcagccgagtggtgtctggtgtgtggaccgaggtacaaagtgggccctgaccgagagaagggcttcttgggaattattcacctgagtcagttgtccttcaccaccttgagctggccccacttcctgtcccccccatccgtgtctgctcctggagttggaaaggaaataataagacagaggattctgggaaaggtggagggtctgttttttccttcaggctccaaaacagctcttcaggcatgtctatgttgatgccaagaagctgccagaaggaaaag

SEQ ID NO: 380021 - DNA, 211 bp, Homo sapiens
tttctacaacctaattcgctcctaaacttggctagtccccacctttggtgggggggtgtttttgcgtccccgtcctcttaggacacctaaaccaaaatgagaggcggaggaagagcaggaattaggatggcaggccttcgcctctcggtccccacttggcccagcagtcgaaacccagaaaacaaaaaaaccttcccaggtcccgacccac

SEQ ID NO: 380022 - DNA, 581 bp, Homo sapiens
tgaaggcctatgtgaaattttgcaattattttctgtattcacctaaaatggcattgcactggaaatatagtatgcttcttttgtgatttctacatatctctgtttttttctcatatcagattctactttacccctcagtgacagtcattttacacccctctctgtctcaatgtccgaggcaccctgggaccatcctggctggaaggcatagtgacattgctggcctgagctgaagtgccgattaaaataaattgaaagctgaattaccttatgaacagctgctttacccaggaacaaatgtggagaggaactccttgaaactgtgttctcaagtagaccacttttgagaaattatacatttatcataacatctcaagtcctgctctacatagaatgaccattattatcaagaaaagttctccattccctgtaattcataaggcaatgcaggcctaaccagaaaacaggaactgcgacaaccttgcatcagacacattcgatctctctattcatagttgcattctctttttttttgtttacaaagccaatcaccaataactcggaaaacaaaaacaaaaaaa

SEQ ID NO: 380023 - DNA, 2754 bp, Homo sapiens
  misc_feature (1628)..(1628): n is a, c, g, or t
  misc_feature (1954)..(1954): n is a, c, g, or t
atttattttgatgtcggcggggtgtgcagatgaccctttcctcacgccgtctccgatattggtgttcaccaaaacatctttatccagtagtgcaaaatgtcatgctaaccttgtcttagtttcacgtctttaattctgaaacttgaaacaaaaacaatgcatcagtgggccatggagacttcttcttctgtgtatgggatactgtgtcttttattcttctattctggtatgtcctccctgatttctagtcatttttgaattatttatagacagtaaacattgcccaatatattatgaaaatgtgtttccactttattgttgcctctgaaaacattttgaacagaagcttttataagcaaggcttgaatttttcttttttatgttgtcttaggtttgtgtgagtttccacctttgtgtaacacatttttccttttaacagaaccattttatcactgtctctcttccttcttgggaaaaagaaaaccatctttttcttttcatttgcattacttacaactatgaattgatttatagagtgctaaaatatttgtaaaatcgagcagattcttctgtgtgcctttttctcctggtgatttatttaaatggatttctaaggtgttttcccgtcagtattgatttgttttggtgagtacgattttatgtgcgctatttgtctctctgtttctgaactatagcaacatttttgtgcattctctcttactctccactgaatgatgaacccttgtgaacttccaattgttttctcttcatttcttaatgtttctgagaagaccgacatattatttgtaagtgattttaaaatttgtctccttttctatgttttttcgttgtcttcagagtgtcttcagagtgcattcgtatttttgttgaattggctttgctagagaacacatgatggctttaagtatgagtgaagagagtagacattttttattcctgatttcaaggtaaaaacctaaagaggttcacctgtaaataaaataaattgtctttacaaaaccagatactcattccaagaagatctctctattctagtatacttttttttctaaacatacaatagtataggttctcatactgtgagacttcttatttctttatacacaatatatttgaaaagtcattggttttttagtgattactaatgtactgttacatggttttgaaaagtgttggattcaaagtttccttcatttaagcctcttttttctcccttccccatataaaaagttgatgatggccaggaatagaggttcacacatataatcccagcactttgggaggctgagatgggagcatcttttgagcccaggagttcaagaccagcctgggcaacatagcaaaaccccctctctacaatgaaatgaaaaattagccaggcttgttggcacatacctgctgtcccacctgcttgggaggctgaggcaggaggattgcttgaggccaggaggcggagcctgcagtgagccgtggtcacaccactgcactccagcctgggtgacagaggaagaccctgtctcaaaacaaaacaaaaatggttcctcgactttagttaggatttgaaaagcttagaactggaaggcagcctctgaaattatcaagaatgncacagcagtttgtggaacacacctgggtgggtagacccactttttagacactctctagcccaaatctgatcacagtcattcttcctcacctcttagggtctccctcacagaaggtgttgggggccttggacgagatgttgatgggatgggaataaacaggagcaaataatgtgcaggcgaagttggagttcctgctcagtctgggaggagaattgatttatgaatttctttctttctctctttgtatctatctcttctttctctctctctctctctctccccccagccaccttctgatctctaatccattcatgtgagagaagagngatgtgaaaatggtcagcaatttgctttttctgatgagatcctggtgagagtcatgttcaataaagtatttagtcacgtggggctccagtgatttctctgtttacaagctcattccttcctcattttctcagaactttggtgttaacagcctgtttcctatttgtaggggctgactttgacttagcagatgcctttcgtgatggaggaaataacgacccagcacctcttaattcacccaagctgaagccaaatgcgaaccctgagcagcctggattcattggggatgactttgacttagcagatgccttacatgacaaaggaaactacgagccagcaccactgaacccacccaaaccaaagccaaatccaaaccccaagcagcctgattccaccggggatgactttgatttcacagatgtttcttcatggtgaacgaaacagggagttgcctcgattctgatgtgtttgcttcggtgctctgtgtattgtattcatcccactcttcaattcataaactctggagattcttcaattcactgggcaaaccatatgcctaagtctatcctctgatggaggctcgtacatgcaaaatccaatagcaacctgggaagatttcagtcaagacccaagaggaggctggcatcaggctctcggtcaccgatcttcacattcaggtttcctgatgcactttgcgactctttgggcaacctctggactccttgttcccagggtccacatttagttttatctttactgcattgcttttatgaaaaagaataaaattggatgaaacagatac

SEQ ID NO: 380024 - DNA, 536 bp, Homo sapiens
cagtacgatagaggggagggcactgggaatttatacctcccaggaaaaataaatcatggtaaacaggcagagatctttccagattccagttcttgggggtaaaaggtccccaagatgcccagtttgtgacaacctgttttgaactattcagctcaaggtttccattttttctcccaggggagttgcctcgattctgatgtgtttgcttcggtgctctgtgtattgtattcatcccactcttcaattcataaactctggagattcttcaattcactgggcaaaccatatgcctaagtctatcctctgatggaggctcgtacatgcaaaatccaatagcaacctgggaagatttcagtcaagacccaagaggaggctggcatcaggctctcggtcaccgatcttcacattcaggtttcctgatgcactttgcgactctttgggcaacctctggactccttgttcccagggtccacatttagttttatctttactgcattgcttttatgaaaaagaataaaattggatgaaacagatac

SEQ ID NO: 380025 - DNA, 1072 bp, Homo sapiens
aactccttaaactctccactgtggctgacttgcttattatcaccaaattattattgtttccaaaaaacgtatctcttgtgaatgataaatgaaacctgtttgcacagtggaaagttagggagtaggtgtgttgttgtttgttttggatattgttggactttgtttttgtttttaccagtatgcatagttttattttaaaactctcacagtctttggaatgatgtaaggcaaatctgactcccctggccaagttaggcttcatgagtgtgtgacttgttcgatcacccagggacccatgcttacaagggtgccatattggtttatgagtctttagttgtcatcttgaaattcttaatattcagttgagcaaggatttctgcattttcattttacacagtaccttgccaattctgtagctgatctgaaaagctgcctgataggttttattgaaaatgctttatcagtactgtagctggaagatgttggaaggatattggcaggaggctgtgtgtatgggtatccccaccatgacaaagaacaaggtccaatttttatatgtttagtgaacgtctgcatgcaaattgatgtttcattttcttcacttcaaggcactcataatctcaactctcatcttttacaaacagacgagccagcaccactgaacccacccaaaccaaagccaaatccaaaccccaagcagcctgattccaccggggagttgcctcgattctgatgtgtttgcttcggtgctctgtgtattgtattcatcccactcttcaattcataaactctggagattcttcaattcactgggcaaaccatatgcctaagtctatcctctgatggaggctcgtacatgcaaaatccaatagcaacctgggaagatttcagtcaagacccaagaggaggctggcatcaggctctcggtcaccgatcttcacattcaggtttcctgatgcactttgcgactctttgggcaacctctggactccttgttcccagggtccacatttagttttatctttactgcattgcttttatgaaaaagaataaaattggatgaaacagatac

SEQ ID NO: 380026 - DNA, 487 bp, Homo sapiens
gttcatttctacacccaaaccaagcagcctgatccaccgggatgactttgatttcacagatgtttcttcatggtgaacgaaacagcaccctgggaccatcctggctggaaggcatagtgacattgctggcctgagctgaagtgccgattaaaataaattgaaagctgaattaccttatgaacagctgctttacccaggaacaaatgtggagaggaactccttgaaactgtgttctcaagtagaccacttttgagaaattatacatttatcataacatctcaagtcctgctctacatagaatgaccattattatcaagaaaagttctccattccctgtaattcataaggcaatgcaggcctaaccagaaaacaggaactgcgacaaccttgcatcagacacattcgatctctctattcatagttgcattctctttttttttgtttacaaagccaatcaccaataactcggaaaacaaaaacaaaaaaa

SEQ ID NO: 380027 - DNA, 1001 bp, Homo sapiens
cccacgcgtccgctctgctcgccttgggcgcgccgtggcgcgcggggccgtgctggcgctgcggctcctcggcctgctccgccgtctggtggccgccccgggctgactttgacttagcgatgcctttcctgatggaggaaacagtgacccagcaccacctaatgcccccaaaccaaagccagatccaaaccccaaccgacctggtttcactggtgacccagcaccacctaatccccccaaaccaaagccagatccaaatcccaactgacctggtttcactgataagagcctctaaccctacggggtggtctctatgtagtgtttacctggcagtgatgtccgtgtcatctgagaagaggagatttcaggggctgactttgacttagcagatgcctttcgtgatggaggaaataacgacccagcacctcttaattcacccaagctgaagccaaatgcgaaccctgagcagcctggattcattggggatgactttgacttagcagatgccttacatgacaaaggaaactacgagccagcaccactgaacccacccaaaccaaagccaaatccaaaccccaagcagcctgattccaccggggatgactttgatttcacagatgtttcttcatggtgaacgaaacagggagttgcctcgattctgatgtgtttgcttcggtgctctgtgtattgtattcatcccactcttcaattcataaactctggagattcttcaattcactgggcaaaccatatgcctaagtctatcctctgatggaggctcgtacatgcaaaatccaatagcaacctgggaagatttcagtcaagacccaagaggaggctggcatcaggctctcggtcaccgatcttcacattcaggtttcctgatgcactttgcgactctttgggcaacctctggactccttgttcccagggtccacatttagttttatctttactgcattgcttttatgaaaaagaataaaattggatgaaacagatac

SEQ ID NO: 380028 - DNA, 1118 bp, Homo sapiens
aactccttaaactctccactgtggctgacttgcttattatcaccaaattattattgtttccaaaaaacgtatctcttgtgaatgataaatgaaacctgtttgcacagtggaaagttagggagtaggtgtgttgttgtttgttttggatattgttggactttgtttttgtttttaccagtatgcatagttttattttaaaactctcacagtctttggaatgatgtaaggcaaatctgactcccctggccaagttaggcttcatgagtgtgtgacttgttcgatcacccagggacccatgcttacaagggtgccatattggtttatgagtctttagttgtcatcttgaaattcttaatattcagttgagcaaggatttctgcattttcattttacacagtaccttgccaattctgtagctgatctgaaaagctgcctgataggttttattgaaaatgctttatcagtactgtagctggaagatgttggaaggatattggcaggaggctgtgtgtatgggtatccccaccatgacaaagaacaaggtccaatttttatatgtttagtgaacgtctgcatgcaaattgatgtttcattttcttcacttcaaggcactcataatctcaactctcatcttttacaaacagacgagccagcaccactgaacccacccaaaccaaagccaaatccaaaccccaagcagcctgattccaccggggatgactttgatttcacagatgtttcttcatggtgaacgaaacagggagttgcctcgattctgatgtgtttgcttcggtgctctgtgtattgtattcatcccactcttcaattcataaactctggagattcttcaattcactgggcaaaccatatgcctaagtctatcctctgatggaggctcgtacatgcaaaatccaatagcaacctgggaagatttcagtcaagacccaagaggaggctggcatcaggctctcggtcaccgatcttcacattcaggtttcctgatgcactttgcgactctttgggcaacctctggactccttgttcccagggtccacatttagttttatctttactgcattgcttttatgaaaaagaataaaattggatgaaacagatac

SEQ ID NO: 380029 - DNA, 806 bp, Homo sapiens
cccacgcgtccgctctgctcgccttgggcgcgccgtggcgcgcggggccgtgctggcgctgcggctcctcggcctgctccgccgtctggtggccgccccgggctgactttgacttagcgatgcctttcctgatggaggaaacagtgacccagcaccacctaatgcccccaaaccaaagccagatccaaaccccaaccgacctggtttcactggtgacccagcaccacctaatccccccaaaccaaagccagatccaaatcccaactgacctggtttcactgataagagcctctaaccctacggggtggtctctatgtagtgtttacctggcagtgatgtccgtgtcatctgagaagaggagatttcaggggctgactttgacttagcagatgcctttcgtgatggaggaaataacgacccagcacctcttaattcacccaagctgaagccaaatgcgaaccctgagcagcctggattcattgacgagccagcaccactgaacccacccaaaccaaagccaaatccaaaccccaagcagcctgattccaccggggatgactttgatttcacagatgtttcttcatggtgaacgaaacagggagttgcctcgattctgatgtgtttgcttcggtgctctgtgtattgtattcatcccactcttcaattcataaactctggagattcttcaattcactgggcaaaccatatgcctaagtctatcctctgatggaggctcgtacatgcaaaatccaatagcaacctgggcgacagagcgagacttcttctcaaaaaaacaacaaacaaaa

SEQ ID NO: 380030 - DNA, 349 bp, Homo sapiens
cagaccatttccaggagcccgtttggcatgcagaccacagattcaagccagaatattaaaagagtgtttgccaaaaattatacatttttcgtaaattccttttttgtttcttaggatttttgtgtggtgctggtattttgagtaaaactatgcacaatgtttgctttctactttaaacccctttttagtaggttcacttcatttaatgtgttcggaccttggactgtcttgctttccttgtagcactagaaagcagggtgtgtttgaaaaacatctttaatgcatacacttggacgactgttgtcaaagtctcttcagaggtctacatgaatgtaagcaaaagggtgac

SEQ ID NO: 380031 - DNA, 379 bp, Homo sapiens
tatttttttacaaaaaaccgagatgaggtctcactgtattgcccaggctgggcttgcactcctggccctcaagcaatcctccctcttgggcttcccaaagtgctgagccaccatacccagctgaattttttcatttttagtagagatggggtctccctatgttacccaggctggtcgcaaactcctgggctcaagtgattcctccgcctcgatctcccaaagtgctgagattacaaccatgagccactgcactcagcctgccccaattttttaaatgggaggaaacattggagaaagtgaactattaatacattgttaacctgtcagcccacgtttttgccactgtgcttttatttttttcctttcatattctgggctc

SEQ ID NO: 380032 - DNA, 354 bp, Homo sapiens
tttttttgagagagacaagagtcttactctgccgcccagaatggagtgcagcagcatgatctaggctcactacaacctccgcctcccgggttcaagcagttcttctgcctcagcttcctgagtagctgggactacaggcgtgcaccaccatgcccagctaatttctgtatttttagtagatatggggtttcaccatgttggctaggctggtcctgaactcctgatctcaggtgatccgcccacctcggcctcccaaagtgctgggattacagacgtgagccaccgtgcctggccaggaacacattcacatgcattatgcagtagcttaacaaaagaaaaacttcacttggggct

SEQ ID NO: 380033 - DNA, 341 bp, Homo sapiens
tttttgagatggagtttcgctcttgttgcccaagctggagtgcaatggcgtgatctcagctcaccgtaacctccgcctcccggcttcaagtgattttcctgcctcagcctcccaagttgctgggattacaggcatgcgccaccatgcctggctaattttttctactttgagacagggtttctccatgatggtcaggctggtctccaactcccgaccttaggtgttccacccacctcggcctcccaaagtgctgggattacaggtgtgagccaccgcgcccggctgagtttcataattttaaggctcttaaaaaggggagtacattagatatgcaacactcg

SEQ ID NO: 380034 - DNA, 1178 bp, Homo sapiens
  misc_feature (1099)..(1099): n is a, c, g, or t
gatgcatttcactgggctgtaacccgcaggggcacaggtatctttggcaaggctaccagttggacgtaagcccctcatgctgactcagggtgggccctgcatgtgatgactgggcccttccagagggagctctttggccaggggtgttcagatgtcatccagcatccaagtgtggcatggcctgctgtataccccaccccagtactccacagcaccttgtacagtaggcatgggggcgtgcctgtgtgggggacagggagggccctgcatggattttcctccttcctatgctatgtagccttgttccctcaggtaaaatttaggaccctgctagctgtgcagaacccaattgccctttgcacagaaaccaacccctgacccagcggtaccggccaagcacaaacgtcctttttgctgcacacgtctctgcccttcacttcttctcttctgtccccacctcctcttgggaattctaggttacacgttggaccttctctactacttcactgggcactagacttttctattggcctgtgccatcgcccagtattagcacaagttagggaggaagaggcaggcgatgagtctagtagcacccaggacggcttgtagctatgcatcattttcctacggcgttagcactttaagcacatcccctaggggagggggtgagtgaggggcccagagccctctttgtggcttccccacgtttggccttctgggattcactgtgagtgtcctgagctctcggggttgatggtttttctctcagcatgtctcctccaccacgggaccccagccctgaccaacccatggttgcctcatcagcaggaaggtgcccttcctggaggatggtcgccacaggcacataattcaacagtgtggaagctttaggggaacatggagaaagaaggagaccacataccccaaagtgacctaagaacactttaaaaagcaacatgtaaatgattggaaattaatatagtacagaatatatttttcccttgttgagatcttcttttgtaatgtttttcatgttactgcctagggcggtgctgagcacacagcaagtttaataaacttgactgaattcataaanaaaataaataaaaaaaatacttaagggggggccccggtacccaattagccccttttgtgaagtcgtattaccaaattac

SEQ ID NO: 380035 - DNA, 287 bp, Homo sapiens
ggtgtgtgcctctttgtattgtagcctggagtcagtgctcgcttctgcgcctgcaggatgtccatgtgtctgctggcagcctagggcctaggcccgggccaccatggcgctgcctccaggcccagccgccctccggcacacactgctgctcctgccagcccttctgagctcaggtacacccctgttcagtcgttgaccaagtccttctgggttccaaagccccctctctcccctgtctgcacttctgtttgggtacccactccaggccccaagccctggagtccctg

SEQ ID NO: 380036 - DNA, 1982 bp, Homo sapiens
cggccgcccacctgccgggtaagggcccctcgggcccgtggtcgggcatcgattggccccgcctggcgcagcccccgcccctgcagcggactgcggtgctcatcagacctgagcagttgctccggcggcgctcggggagggagccagcagcctagggcctaggcccgggccaccatggcgctgcctccaggcccagccgccctccggcacacactgctgctcctgccagcccttctgagctcaggttggggggagttggagccacaaatagatggtcagacctgggctgagcgggcacttcgggagaatgaacgccacgccttcacctgccgggtggcaggggggcctggcacccccagattggcctggtatctggatggacagctgcaggaggccagcacctcaagactgctgagcgtgggaggggaggccttctctggaggcaccagcaccttcactgtcactgcccatcgggcccagcatgagctcaactgctctctgcaggaccccagaagtggccgatcagccaacgcctctgtcatccttaatgtgcaattcaagccagagattgcccaagtcggcgccaagtaccaggaagctcagggcccaggcctcctggttgtcctgtttgccctggtgcgtgccaacccgccggccaatgtcacctggatcgaccaggatgggccagtgactgtcaacacctctgacttcctggtgctggatgcgcagaactacccctggctcaccaaccacacggtgcagctgcagctccgcagcctggcacacaacctctcggtggtggccaccaatgacgtgggtgtcaccagtgcgtcgcttccagccccagggcttctggctacccgggtggaagtgccactgctgggcattgttgtggctgctgggcttgcactgggcaccctcgtggggttcagcaccttggtggcctgcctggtctgcagaaaagagaagaaaaccaaaggcccctcccggcacccatctctgatatcaagtgactccaacaacctaaaactcaacaacgtgcgcctgccacgggagaacatgtccctcccatccaaccttcagctcaatgacctcactccagattccagagcagtgaaaccagcagaccggcagatggctcagaacaacagccggccagagcttctggacccggagcccggcggcctcctcaccagccaagcatgtctcctccaccacgggaccccagccctgaccaacccatggttgcctcatcagcaggaaggtgcccttcctggaggatggtcgccacaggcacataattcaacagtgtggaagctttaggggaacatggagaaagaaggagaccacataccccaaagtgacctaagaacactttaaaaagcaacatgtaaatgattggaaattaatatagtacagaatatatttttcccttgttgagatcttcttttgtaatgtttttcatgttactgcctagggcggtgctgagcacacagcaagtttaataaacttgactgaattcataacaaaaaaaaaaaaaagacacaaaaacaaaaaaaaacgaaacaaaacaacaaaaaaaagcggggggcgcgcaaccagagagaatatccaccaggaggagggccccacacccccagacgcagcatcgccgcgagctagtgtgacaacacagcgggagcacaaaacgaggaggcgacgaacacaacaatatacagacagcgagaggcgcaacgacgggcgcccaggaagacacaaccagccagagagcacaagccaagcaggagagagaaaaaaaaacagagagacgagaaacgccgcagggaacacactccggagacacagccgcaagaagcacaccccaaacaatgcaaccacgggagggcgggggaagacaaaaaagagaggggggcacacaaccgaacacaccccaacacaaccacacaaacaaaaggcgcccccacaatagagacagcacacta

SEQ ID NO: 380037 - DNA, 1551 bp, Homo sapiens
cggccgcccacctgccgggtaagggcccctcgggcccgtggtcgggcatcgattggccccgcctggcgcagcccccgcccctgcagcggactgcggtgctcatcagacctgagcagttgctccggcggcgctcggggagggagccagcagcctagggcctaggcccgggccaccatggcgctgcctccaggcccagccgccctccggcacacactgctgctcctgccagcccttctgagctcaggttggggggagttggagccacaaatagatggtcagacctgggctgagcgggcacttcgggagaatgaacgccacgccttcacctgccgggtggcaggggggcctggcacccccagattggcctggtatctggatggacagctgcaggaggccagcacctcaagactgctgagcgtgggaggggaggccttctctggaggcaccagcaccttcactgtcactgcccatcgggcccagcatgagctcaactgctctctgcaggaccccagaagtggccgatcagccaacgcctctgtcatccttaatgtgcaattcaagccagagattgcccaagtcggcgccaagtaccaggaagctcagggcccaggcctcctggttgtcctgtttgccctggtgcgtgccaacccgccggccaatgtcacctggatcgaccaggatgggccagtgactgtcaacacctctgacttcctggtgctggatgcgcagaactacccctggctcaccaaccacacggtgcagctgcagctccgcagcctggcacacaacctctcggtggtggccaccaatgacgtgggtgtcaccagtgcgtcgcttccagccccaggcccctcccggcacccatctctgatatcaagtgactccaacaacctaaaactcaacaacgtgcgcctgccacgggagaacatgtccctcccatccaaccttcagctcaatgacctcactccagattccagagcagtgaaaccagcagaccggcagatggctcagaacaacagccggccagagcttctggacccggagcccggcggcctcctcaccagccaaggaagaagaaatcaggacaaagacgcataacagagggaagaccatgggaagacacagaagatggccaagaagagacccctcagaagaaatcaatcttggtggggcgtggtggcttcacgcctgtaataccagcactgtgggaggttgaggtgggcagatcgcctgagcctaggagttcgagaccagcctgggcaacatggtgaaattccatctctacaaaaaaattagccgggtgtggtgttgagtatctgtagtcccagctacttgggaggctggggtgggaggactgcttgagtccagcaggttgaggctgcagtgagctgagattgagctactgcactccagcctgggcatagagtaataccctgtaaaaaaaaaggaaggaagggagggagggaatcaaccatgccaacaaattgatcttggactactactggactactagcctccagaactatgaaataatacatttctgatgtctaa

SEQ ID NO: 380038 - DNA, 1886 bp, Homo sapiens
cggccgcccacctgccgggtaagggcccctcgggcccgtggtcgggcatcgattggccccgcctggcgcagcccccgcccctgcagcggactgcggtgctcatcagacctgagcagttgctccggcggcgctcggggagggagccagcagcctagggcctaggcccgggccaccatggcgctgcctccaggcccagccgccctccggcacacactgctgctcctgccagcccttctgagctcaggggggcctggcacccccagattggcctggtatctggatggacagctgcaggaggccagcacctcaagactgctgagcgtgggaggggaggccttctctggaggcaccagcaccttcactgtcactgcccatcgggcccagcatgagctcaactgctctctgcaggaccccagaagtggccgatcagccaacgcctctgtcatccttaatgtgcaattcaagccagagattgcccaagtcggcgccaagtaccaggaagctcagggcccaggcctcctggttgtcctgtttgccctggtgcgtgccaacccgccggccaatgtcacctggatcgaccaggatgggccagtgactgtcaacacctctgacttcctggtgctggatgcgcagaactacccctggctcaccaaccacacggtgcagctgcagctccgcagcctggcacacaacctctcggtggtggccaccaatgacgtgggtgtcaccagtgcgtcgcttccagccccagggcttctggctacccgggtggaagtgccactgctgggcattgttgtggctgctgggcttgcactgggcaccctcgtggggttcagcaccttggtggcctgcctggtctgcagaaaagagaagaaaaccaaaggcccctcccggcacccatctctgatatcaagtgactccaacaacctaaaactcaacaacgtgcgcctgccacgggagaacatgtccctcccatccaaccttcagctcaatgacctcactccagattccagagcagtgaaaccagcagaccggcagatggctcagaacaacagccggccagagcttctggacccggagcccggcggcctcctcaccagccaagcatgtctcctccaccacgggaccccagccctgaccaacccatggttgcctcatcagcaggaaggtgcccttcctggaggatggtcgccacaggcacataattcaacagtgtggaagctttaggggaacatggagaaagaaggagaccacataccccaaagtgacctaagaacactttaaaaagcaacatgtaaatgattggaaattaatatagtacagaatatatttttcccttgttgagatcttcttttgtaatgtttttcatgttactgcctagggcggtgctgagcacacagcaagtttaataaacttgactgaattcataacaaaaaaaaaaaaaagacacaaaaacaaaaaaaaacgaaacaaaacaacaaaaaaaagcggggggcgcgcaaccagagagaatatccaccaggaggagggccccacacccccagacgcagcatcgccgcgagctagtgtgacaacacagcgggagcacaaaacgaggaggcgacgaacacaacaatatacagacagcgagaggcgcaacgacgggcgcccaggaagacacaaccagccagagagcacaagccaagcaggagagagaaaaaaaaacagagagacgagaaacgccgcagggaacacactccggagacacagccgcaagaagcacaccccaaacaatgcaaccacgggagggcgggggaagacaaaaaagagaggggggcacacaaccgaacacaccccaacacaaccacacaaacaaaaggcgcccccacaatagagacagcacacta

SEQ ID NO: 380039 - DNA, 1683 bp, Homo sapiens
cggccgcccacctgccgggtaagggcccctcgggcccgtggtcgggcatcgattggccccgcctggcgcagcccccgcccctgcagcggactgcggtgctcatcagacctgagcagttgctccggcggcgctcggggagggagccagcagcctagggcctaggcccgggccaccatggcgctgcctccaggcccagccgccctccggcacacactgctgctcctgccagcccttctgagctcaggttggggggagttggagccacaaatagatggtcagacctgggctgagcgggcacttcgggagaatgaacgccacgccttcacctgccgggtggcaggggggcctggcacccccagattggcctggtatctggatggacagctgcaggaggccagcacctcaagactgctgagcgtgggaggggaggccttctctggaggcaccagcaccttcactgtcactgcccatcgggcccagcatgagctcaactgctctctgcaggaccccagaagtggccgatcagccaacgcctctgtcatccttaatgtgcaattcaagccagagattgcccaagtcggcgccaagtaccaggaagctcagggcccaggcctcctggttgtcctgtttgccctggtgcgtgccaacccgccggccaatgtcacctggatcgaccaggatgggccagtgactgtcaacacctctgacttcctggtgctggatgcgcagaactacccctggctcaccaaccacacggtgcagctgcagctccgcagcctggcacacaacctctcggtggtggccaccaatgacgtgggtgtcaccagtgcgtcgcttccagccccagggcttctggctacccgggtggaagtgccactgctgggcattgttgtggctgctgggcttgcactgggcaccctcgtggggttcagcaccttggtggcctgcctggtctgcagaaaagagaagaaaaccaaaggcccctcccggcacccatctctgatatcaagtgactccaacaacctaaaactcaacaacgtgcgcctgccacgggagaacatgtccctcccatccaaccttcagctcaatgacctcactccagattccagagcagtgaaaccagcagaccggcagatggctcagaacaacagccggccagagcttctggacccggagcccggcggcctcctcaccagccaaggaagaagaaatcaggacaaagacgcataacagagggaagaccatgggaagacacagaagatggccaagaagagacccctcagaagaaatcaatcttggtggggcgtggtggcttcacgcctgtaataccagcactgtgggaggttgaggtgggcagatcgcctgagcctaggagttcgagaccagcctgggcaacatggtgaaattccatctctacaaaaaaattagccgggtgtggtgttgagtatctgtagtcccagctacttgggaggctggggtgggaggactgcttgagtccagcaggttgaggctgcagtgagctgagattgagctactgcactccagcctgggcatagagtaataccctgtaaaaaaaaaggaaggaagggagggagggaatcaaccatgccaacaaattgatcttggactactactggactactagcctccagaactatgaaataatacatttctgatgtctaa

SEQ ID NO: 380040 - DNA, 1850 bp, Homo sapiens
cggccgcccacctgccgggtaagggcccctcgggcccgtggtcgggcatcgattggccccgcctggcgcagcccccgcccctgcagcggactgcggtgctcatcagacctgagcagttgctccggcggcgctcggggagggagccagcagcctagggcctaggcccgggccaccatggcgctgcctccaggcccagccgccctccggcacacactgctgctcctgccagcccttctgagctcaggttggggggagttggagccacaaatagatggtcagacctgggctgagcgggcacttcgggagaatgaacgccacgccttcacctgccgggtggcaggggggcctggcacccccagattggcctggtatctggatggacagctgcaggaggccagcacctcaagactgctgagcgtgggaggggaggccttctctggaggcaccagcaccttcactgtcactgcccatcgggcccagcatgagctcaactgctctctgcaggaccccagaagtggccgatcagccaacgcctctgtcatccttaatgtgcaattcaagccagagattgcccaagtcggcgccaagtaccaggaagctcagggcccaggcctcctggttgtcctgtttgccctggtgcgtgccaacccgccggccaatgtcacctggatcgaccaggatgggccagtgactgtcaacacctctgacttcctggtgctggatgcgcagaactacccctggctcaccaaccacacggtgcagctgcagctccgcagcctggcacacaacctctcggtggtggccaccaatgacgtgggtgtcaccagtgcgtcgcttccagccccaggcccctcccggcacccatctctgatatcaagtgactccaacaacctaaaactcaacaacgtgcgcctgccacgggagaacatgtccctcccatccaaccttcagctcaatgacctcactccagattccagagcagtgaaaccagcagaccggcagatggctcagaacaacagccggccagagcttctggacccggagcccggcggcctcctcaccagccaagcatgtctcctccaccacgggaccccagccctgaccaacccatggttgcctcatcagcaggaaggtgcccttcctggaggatggtcgccacaggcacataattcaacagtgtggaagctttaggggaacatggagaaagaaggagaccacataccccaaagtgacctaagaacactttaaaaagcaacatgtaaatgattggaaattaatatagtacagaatatatttttcccttgttgagatcttcttttgtaatgtttttcatgttactgcctagggcggtgctgagcacacagcaagtttaataaacttgactgaattcataacaaaaaaaaaaaaaagacacaaaaacaaaaaaaaacgaaacaaaacaacaaaaaaaagcggggggcgcgcaaccagagagaatatccaccaggaggagggccccacacccccagacgcagcatcgccgcgagctagtgtgacaacacagcgggagcacaaaacgaggaggcgacgaacacaacaatatacagacagcgagaggcgcaacgacgggcgcccaggaagacacaaccagccagagagcacaagccaagcaggagagagaaaaaaaaacagagagacgagaaacgccgcagggaacacactccggagacacagccgcaagaagcacaccccaaacaatgcaaccacgggagggcgggggaagacaaaaaagagaggggggcacacaaccgaacacaccccaacacaaccacacaaacaaaaggcgcccccacaatagagacagcacacta

SEQ ID NO: 380041 - DNA, 1552 bp, Homo sapiens
cggccgcccacctgccgggtaagggcccctcgggcccgtggtcgggcatcgattggccccgcctggcgcagcccccgcccctgcagcggactgcggtgctcatcagacctgagcagttgctccggcggcgctcggggagggagccagcagcctagggcctaggcccgggccaccatggcgctgcctccaggcccagccgccctccggcacacactgctgctcctgccagcccttctgagctcaggttggggggagttggagccacaaatagatggtcagacctgggctgagcgggcacttcgggagaatgaacgccacgccttcacctgccgggtggcaggggggcctggcacccccagattggcctggtatctggatggacagctgcaggaggccagcacctcaagactgctgagcgtgggaggggaggccttctctggaggcaccagcaccttcactgtcactgcccatcgggcccagcatgagctcaactgctctctgcaggaccccagaagtggccgatcagccaacgcctctgtcatccttaatgtgcaattcaagccagagattgcccaagtcggcgccaagtaccaggaagctcagggcccaggcctcctggttgtcctgtttgccctggtgcgtgccaacccgccggccaatgtcacctggatcgaccaggatgggccagtgactgtcaacacctctgacttcctggtgctggatgcgcagaactacccctggctcaccaaccacacggtgcagctgcagctccgcagcctggcacacaacctctcggtggtggccaccaatgacgtgggtgtcaccagtgcgtcgcttccagccccagggcttctggctacccgggtggaagtgccactgctgggcattgttgtggctgctgggcttgcactgggcaccctcgtggggttcagcaccttggtggcctgcctggtctgcagaaaagagaagaaaaccaaaggcccctcccggcacccatctctgatatcaagtgactccaacaacctaaaactcaacaacgtgcgcctgccacgggagaacatgtccctcccatccaaccttcagctcaatgacctcactccagattccagagcagtgaaaccagcagaccggcagatggctcagaacaacagccggccagagcttctggacccggagcccggcggcctcctcaccagccaaggaagaagaaatcaggacaaagacgcataacagagggaagaccatgggaagacacagaagatggccaagaagagacccctcagaagaaatcaatcttggtggggcgtggtggcttcacgcctgtaataccagcactgtgggaggttgagagaagagtctcctattgttgcccagaccggtcctgaactcctggcctcaagtgatcgtcccacctcagcctcccaaagtgctgggatttacaggtatgagctaccgtgcctggcccagtttcctttccttattgatatataagagctctttgcttggacagtaattttttctattacatacatatataaaatattttttctca

SEQ ID NO: 380042 - DNA, 336 bp, Homo sapiens
gttgtcttaactggttgtgataattttatgtgtcagtttaactaggcaaacggtacctagataactggtgaaacaaaatttctgtgaaacatctgtgaagatgtttctaaaagagattagcatttgcatcagtagacggggtaaagatgaccctgaccaatgtgagtaggcatcatccaatctgttgagggcctgaataaaacaaaaaggcagaggaagtgaatttgctctctctgctttagcttggcatatccaatttttccgggcttctgacattggcactcctggttctcagaccttcaaacttgaactgggatttataccatcagccttcca

SEQ ID NO: 380043 - DNA, 476 bp, Homo sapiens
tgcagtgttctagtgaaaacactagaatagtgttgagtatataattgaggtttgataggtattttctaactaaataaatgaatgcgtgaacctgactgtcccattatatcttattaacaataccttgaaacaacttagaatgactatttgcttccaatgtttggaaggaatgaaacacaaatttgaatatggcagtggtatgttattatctaagtgaaccttaattataaccaaaacatggtttcaggtgctacttcgataagtttctgcccccacctcccactcccgtataatatatgtactttaacaattagccaagactattcactaagcaaagaacattactgagcaaacagcatcagagaccatactaaataaacaaaccaccaaatggactgctctataatgagattaagctttgcacagttccaaaaaaattgaagttctagtataatactttgtatcaaccctataaa

SEQ ID NO: 380044 - DNA, 392 bp, Homo sapiens
tttagagacagggttttgccatgttgccaaggctggtctccaacttctgagttcaggcagtgctcccatctcagcctcccaaagtgctgagattataggcatgagccaccacgcccagcccacattaagacttcttatatccattttagtctctgctctttgtccttaatttttaagggttgtgttaaaatgcaaggtaaacacaaatgctgaaataagtgatgagcaagtaccctaaagttaggaggcagagattactgaactgtgtggcagttgttattgtcactgctttgaaaaccttaatcttaaagatactttaccaaactagatgggtcctgtaagtgaacacacgctccaaagtgcactgcggcccgacagcattcttttccgtg

SEQ ID NO: 380045 - DNA, 451 bp, Homo sapiens
agactttggacttttcagttaatgctggaaggagttaagactttgggggactgttgggaaggcatgattgtgtcttgacatgtgagaataatatgagatttgggagaggctggggagaatgatatggtttggctctgtacccccatccaaatctcatgttgaattgtaattcccagtgttgggaggggacctggtaggaggtgattggatcatgggagcaaatttccccttgctgctctcgtgatagtgagttctcacaagatctgatggtttaaaagtgtgtggcacattccccttcacatgctgtttctcctgtcactatgtgaagatgtgcttgcttcccctttgccttctaccatgactgtaagattcctgaggcctcccccgccatgcttcctgtacagcctgcagaactgagtcaattaaacattgcttctttataaactaccca

SEQ ID NO: 380046 - DNA, 447 bp, Homo sapiens
ctgaaccaaatttctacttctgctctctgtttttctaaaaaacactaaataaaagactatgcttgcttgaatctcctttaaaaccatgatgaattgtgggaaatggttagctgacctgctctagcaagacagaaacctcaacaaaacaccccaaaccacacaaaaaaaaacaaaaccctcacagagaaaaaaaaaaagaaaaaaaaaatttgggaggccgaggcgggtggatcacgaggtcaggagatcgagaccatcctggctaacacggtgaaaccccgtctctactaaaaaatacgaaaaattatccgggctaattttgtattttgtaaaaatacaaaaaattaggtggcgggcacctgtagtcccagctactggggaggctgaggcaggagaatggcgtatcccgggaggcggagcttgcagtgagccgagatcgcgccactg

SEQ ID NO: 380047 - DNA, 169 bp, Homo sapiens
gcccaggctggagtgaagtggtgcgctgttagctcgctgcaacctccgctcccgggttcaagcaattctcctgcctcagcttccctagtagctgggattacagtgacagatgaagaaacattccaggttgctgtttgcagaacttctgtgcaagtaaggagttattaca

SEQ ID NO: 380048 - DNA, 455 bp, Homo sapiens
cagcatagctactaaggaaagactgatatctttaaagaccttaggcaagtaatctttggggatgcagaaaaaaaaccctgagaagagactctcataacaccactaagctaaaatcctaggagagtaaacatcctttctctgtcccaggcagctgataaagtcactttgcactggacccttagtcagcaaaagctacagaaccacagggtcattatttttggaacagaaacagaatagattctggaaagttcctgtgatcaatgtgagaataatgaggcctctccccaccatcaccccacctctgctttggtcctgagctccagcccagggtgtgacagctgtggccagctgaggtctgaagtgggcggctctgcagcctgtagggtgggatggaggtggggccaggaggagcaggaatgagtattccagcacaagttctgccagtgtcctggggg

SEQ ID NO: 380049 - DNA, 392 bp, Homo sapiens
tccaatcagctgagctgctgccatggagattttctacaataaaaagcagaaactgtcaccttcctgtttagaacccttcattcgttcagaagtttaaaccctgtattttagaatacagaacacaattttagcatctgccttctactcacttcccccacagataccattcagcctatctgggctctcccggcagtttctcacatgttgtgcgtgagcatcacagggctccggggaccctagctgacaatgttccccccatgacacttgagtgtcctgcatttgctttcctagctcctcttctggatccatcaccgagagcactcattcacactccacagtaattgttggtttacttctcagattatcaagatgggactgtagattaagctctg

SEQ ID NO: 380050 - DNA, 216 bp, Homo sapiens
cctgaacttaaaagttaaataaaattacagggggaaatttctttttagcaatattaagtcttctgacttaagcaagaaaaaaaagtgagtgttgctgggattacaggtgtgagctactgcacctggcccgataggcaagtctgacacaaagaatgattccctaaaatcttatccaatgcagtaataattcctcctaacgctaccctcagcaacact

SEQ ID NO: 380051 - DNA, 1004 bp, Homo sapiens
agctgtgtggcatttttcaccctgccgggttcccttgccagacatgatgtcggttatctggcaaaagccattttatgtcggccacgaggcaggtgttcactgtgcatcattcattcaccccatgatgttctggaagtaaaccttggttgtctttcgttggccagaggaattgggatctcaagggcatttccctttgcccacctcaccttttcatatttggtaaactgtatgcatttgcctccagcccaagattataaatatgaactgattatgatctgcatgttctctctttgggttcaagcatttccttacagaagagccaccgtggaagtcatgggtaaatatgtgttgaattggtaactccctcttggagaatttcttgtgaattacacagcaataggggaactcatttaactggagacataatctcaatttgtaaagtgtggcccattttctaacatttttattttgcataccctcccctctcttctcgattgatgaaactaacaaagaggttaataaaagcccatctcgtcatgtacagggactcatgcctttaattccagtgttttgggagactaaggcaagaacatcctggaggccaggagttcgacactgtataacagatatatctgacagcagtaactcaagcacaccctaagaatgaccctgtggtctaagaagagtgttggttcagcgttccaaacgaagaaatccaggagtggccaacctggaggtttctgaacccctggcctgttccttggaatgaggccctttgttttgagctaggcggagggtgataagtgaaaatactatataaactgcatgcttctttcaaatgatagtggtttttttgtccagcctgccgctcctggactgccctgtatctaagtcctcaataaaccctatgtctcattttctttctttctttcttttttgagatggagtttcgctcctgttgcccaggctggagtgcagtggcgtgatctcggctcactgcaacc

SEQ ID NO: 380052 - DNA, 1218 bp, Homo sapiens
ggcatcatctggctgcaaagaagagaacacactgtgtttgagggaggaggaaggaggatcagagtttaaactcctgccataatgcagcagggcactgtggcatttgaagatgtggctgtgaacttttcccaggaggagtggagtctccttagtgaggttcagagatgcctttaccatgacgtgatgctggagaactgggtacttatatcctccctgggttgttggtgtggatcagaagatgaggaggcaccttctaagaagagcatttctatacaaagagtgtctcagaatgtccgtctgtctgcccaggctggagtggcacgatctcagctcactgcagcctccacctccagggttcaagcgattctcctgcctcagcctcccggggatctcaagggcatttccctttgcccacctcaccttttcatatttggtaaactgtatgcatttgcctccagcccaagattataaatatgaactgattatgatctgcatgttctctctttgggttcaagcatttccttacagaagagccaccgtggaagtcatgggtaaatatgtgttgaattggtaactccctcttggagaatttcttgtgaattacacagcaataggggaactcatttaactggagacataatctcaatttgtaaagtgtggcccattttctaacatttttattttgcataccctcccctctcttctcgattgatgaaactaacaaagaggttaataaaagcccatctcgtcatgtacagggactcatgcctttaattccagtgttttgggagactaaggcaagaacatcctggaggccaggagttcgacactgtataacagatatatctgacagcagtaactcaagcacaccctaagaatgaccctgtggtctaagaagagtgttggttcagcgttccaaacgaagaaatccaggagtggccaacctggaggtttctgaacccctggcctgttccttggaatgaggccctttgttttgagctaggcggagggtgataagtgaaaatactatataaactgcatgcttctttcaaatgatagtggtttttttgtccagcctgccgctcctggactgccctgtatctaagtcctcaataaaccctatgtctcattttctttctttctttcttttttgagatggagtttcgctcctgttgcccaggctggagtgcagtggcgtgatctcggctcactgcaacc

SEQ ID NO: 380053 - DNA, 209 bp, Homo sapiens
gaacttttcccaggaggagtggagtctccttagtgaggttcagagatgcctttaccatgacgtgatgctggagaactgggtacttatatcctccctgggtaagttcctcacaccctaccctatttcctgaatagatctctgcccttccccttttctcccattggcaagactgtcttttatcatgtcaggaccatgggcacagcttcctt

SEQ ID NO: 380054 - DNA, 911 bp, Homo sapiens
ggcatcatctggctgcaaagaagagaacacactgtgtttgagggaggaggaaggaggatcagagtttaaactcctgccataatgcagcagggcactgtggcatttgaagatgtggctgtgaacttttcccaggaggagtggagtctccttagtgaggttcagagatgcctttaccatgacgtgatgctggagaactgggtacttatatcctccctgggttgttggtgtggatcagaagatgaggaggcaccttctaagaagagcatttctatacaaagagtgtctcaggtcagcactcctggggcaggtgtgtctcccaagaaggctcactcttgtgaaatgtgtggcgcgatcttgggagacattttgcacttggcagatcatcaggggacacatcacaagcagaaactgcacaggtgtgaggcatgggggaataaattgtatgatagttcaaaccgtccgcaccagaatcagtaccttggagagaaaccctatagaagcagtgttgaggaagcattgtttgtgaagaggtgtaagttccatgtgtcagaggagtcatctatcttcattcagagtggaaaggactttttgcccagctcaggattactgctgcaggaggccactcacactggggagaagtcaaacagcaaacctgagtgtgagtctccctttcagtggggagatactcattacagctgtggagaatgcatgaaacattctagcaccaaacacgtatttgttcaacagcagagacttccctctagagaggaatgttattgctgggaatgtgggaaatcctttagcaaatatgatagcgtcagtaatcatcagagagttcacactgggaaaagaccttatgaatgtggagaatgtgggaaatcttttagtcataagggcagccttgttcagca

SEQ ID NO: 380055 - DNA, 923 bp, Homo sapiens
atctgcgtttctctccactgatctggacgttagagtttttcactccggggtccaaaggggagcgccaaaaggaaacccttgccctccctgtatccgtcgcagtctggcgcggccctcggtgacggcactcactcctctcaggaccccatgcaggccccgccccgtctcagctcgtgcagactctcgcgagttttgaagccgcggggccgggcggctgcaatatggcggaggcggaaggggaaagcctggagtcctggctcaataaagccaccaatccttccaaccgccaggaggactgggaatacataattggcttctgtgatcagatcaacaaggagctggaagggccacagatcgccgtccgactgctggcccacaagatccagtccccacaggaatgggaggcgctccaggccctgacgtacctgggggacagggtgtctgagaaagtgaagaccaaggttattgagctgctgtacagctggaccatggccctgccagaagaagcaaagatcaaagacgcctaccacatgctgaagagacagggcatagtgcagtctgacccaccaattcctgtggataggacgctgatcccctctccaccacctcgtcccaaaaaccctgtttttgatgatgaggagaagtccaagcttttagccaagctgctgaaaagcaaaaacccagatgacctgcaggaggccaacaagctcatcaagtccatggtgaaggaagacgaggcacggatccagaaggtgaccaagcgtctgcacacgttagaggaagttaacaacaacgtgagactgctcagtgagatgctgcttcattacagccaggaggactcttcggacggggacagagagctgatgaaggtgggaccgccgacggcaaaggctgcctcccggggctgcgctgcccttcaggag

SEQ ID NO: 380056 - DNA, 3945 bp, Homo sapiens
atctgcgtttctctccactgatctggacgttagagtttttcactccggggtccaaaggggagcgccaaaaggaaacccttgccctccctgtatccgtcgcagtctggcgcggccctcggtgacggcactcactcctctcaggaccccatgcaggccccgccccgtctcagctcgtgcagactctcgcgagttttgaagccgcggggccgggcggctgcaatatggcggaggcggaaggggaaagcctggagtcctggctcaataaagccaccaatccttccaaccgccaggaggactgggaatacataattggcttctgtgatcagatcaacaaggagctggaagggccacagatcgccgtccgactgctggcccacaagatccagtccccacaggaatgggaggcgctccaggccctgacggtgctggaggcatgcatgaagaactgtgggaggagatttcataacgaagtggggaagttccgctttttgaatgagttaatcaaagtcgtctctccaaagtacctgggggacagggtgtctgagaaagtgaagaccaaggttattgagctgctgtacagctggaccatggccctgccagaagaagcaaagatcaaagacgcctaccacatgctgaagagacagggcatagtgcagtctgacccaccaattcctgtggataggacgctgatcccctctccaccacctcgtcccaaaaaccctgtttttgatgatgaggagaagtccaagcttttagccaagctgctgaaaagcaaaaacccagatgacctgcaggaggccaacaagctcatcaagtccatggtgaaggaagacgaggcacggatccagaaggtgaccaagcgtctgcacacgttagaggaagttaacaacaacgtgagactgctcagtgagatgctgcttcattacagccaggaggactcttcggacggggacagagagctgatgaaggagctgtttgatcagtgtgagaacaagaggcggactttatttaaactcgccagtgagactgaggacaatgataacagtttgggggacatcctgcaagccagtgacaacctctcccgggtcatcaactcttacaaaacaattattgaagggcaggtcatcaatggcgaggtggctaccttaaccctgcctgactcggaaggaaacagtcagtgcagtaaccaaggcacgctcatcgaccttgcggagctggacacgaccaacagtttgtcctccgtgttggccccagcacctactccaccctcctcaggcatcccaatcctccctccaccaccccaggcctcaggacctccacggagccgctcctctagccaggccgaggccaccctggggcccagcagcacaagcaacgccctctcctggctggacgaggagctactctgcttgggcctcgccgacccagcccctaatgttcctcccaaagagtcagctgggaacagccagtggcacctgctccagagggaacagtccgacctggacttcttcagccccaggccggggaccgctgcctgtggcgcctccgatgctcctctgctccagccctcagccccctcctcaagcagctcccaagctccactgccgcctcccttcccagctcctgtggtcccagccagtgttcctgcccccagtgcgggctcctccttgttttctactggagtggccccagccttggccccaaaagttgagcccgcagtccctgggcaccatggcttggcgttgggcaacagcgcgctgcaccacctggatgccctcgatcagcttctagaagaggccaaagtgacctcgggcttggtgaaacccactacctcccctctcatccccaccaccaccccagccaggcccctcctgcccttctccacggggcccggcagcccgctcttccagccactgagtttccagtcccagggcagccccccgaaggggcctgagctctccctggccagcatccacgtgcccctggaatcgatcaagcctagcagtgcccttcctgtgacagcctacgataaaaacggcttccgcatcctcttccactttgccaaggagtgtcccccaggacgacctgacgtgctggtggtggtggtgtccatgctgaacacggctcccttacctgtcaagagcatcgtgctgcaggctgcagtgcccaagtcaatgaaagtgaagttgcagccaccttctgggacagaactctctccatttagccccatccagccacctgcagccatcacccaggtcatgttgctggccaatccactgaaggagaaggtgcggcttcggtataagctgaccttcgccctgggggagcagctgagcacagaggtgggcgaggtggaccagttccctcctgtggaacagtgggggaacctatgaccccagaggacgctgtgatctccaccttgaagccaggcaggctgccctgagacgaggagggctctggtcccgtcactctccatgccctgacaacagtgcttgtagctttgatgtggaacaggggccctgggcatttctgctgagaaccaaactgctgctgtgataacctctcctttggcccctaaaaggacctgtttttatctacctgtgtgacttgaagtggccatatgctgtcaggggtgcggagtggcccctgacttcactgctgtcccgggaacatggacccccaggcttggcatgcacggcccaaggggctgcagccctgttgcaattccatgcttcccccgccaaccagctcctgctgccatccccagggaggtggcccaggaaggtgcctggcccagaataaggaactggcatactgcaaagtccccagccctgcctctggtggacagcatcgtcctggaatggccacggagtgatgagttgtgtgcttgtccctggcagtggcaggctgtgtcctatggacatcttggcaggacatggaatttggcctcatgacaggcccaactagggataggaaggaaaatgaagagagccagtatttccccttctccagaagcaggtactcagctttctgggaaaagcgtgcctccagccgtggggacaggccatcctactgactacctcttgcttggcatgaaataaactgctatcctccccttggaatctaccgccactctacatcctactgctttggcctccctctcctctcaccagatggcatgtggtgtggcacctgtggctggacacaggaggcctcaggatcacaaatgttacactagacatatgtcctaatgtgctgcccagaaacctcaactgttccccagctactgaggggcactgtcagcgagatgttgggtctggaggtgatgagatcgggccacacttgagctgagtcaccagaccctattgcttcaacagtgcttggcccccgccagcttgtcccagccactctagctgctggatgtgatcctgggacatgtactccaagcctccgtcacaaaaaaaaaatcaccagctgccatagacacgggggaagcttgcggagcccaggtgaacaagctcagcaatcggacatctctggggaaaggaaggtggcacagaccatgttccctggttcctccctgccccttgccaggcttccttattccttactatgggaagaggtcatatcccttccctgcccctcgctgtctttagcaagcaggtttcactgcttcattagaagaggacaagtcaaaagtgaatcatttttcactacttaaggaataaatccaagagctttccagagactggctgctgcagccctgggaatgtctgtggaattactatgtggaaatggaactttgtgttatgctctagacattacagttatttgagtgttactcgttactgttgaggtcagtgcttcgtggcaaatggctgtactggatatcccagctctgctgcccttgttttgctgcatgttaaataaaaccattttcactgt

SEQ ID NO: 380057 - DNA, 3968 bp, Homo sapiens
atctgcgtttctctccactgatctggacgttagagtttttcactccggggtccaaaggggagcgccaaaaggaaacccttgccctccctgtatccgtcgcagtctggcgcggccctcggtgacggcactcactcctctcaggaccccatgcaggccccgccccgtctcagctcgtgcagactctcgcgagttttgaagccgcggggccgggcggctgcaatatggcggaggcggaaggggaaagcctggagtcctggctcaataaagccaccaatccttccaaccgccaggaggactgggaatacataattggcttctgtgatcagatcaacaaggagctggaagggccacagatcgccgtccgactgctggcccacaagatccagtccccacaggaatgggaggcgctccaggccctgacggtgctggaggcatgcatgaagaactgtgggaggagatttcataacgaagtggggaagttccgctttttgaatgagttaatcaaagtcgtctctccaaagtacctgggggacagggtgtctgagaaagtgaagaccaaggttattgagctgctgtacagctggaccatggccctgccagaagaagcaaagatcaaagacgcctaccacatgctgaagagacaggcttttagccaagctgctgaaaagcaaaaacccagatgacctgcaggaggccaacaagctcatcaagtccatggtgaaggaagacgaggcacggatccagaaggtgaccaagcgtctgcacacgttagaggaagttaacaacaacgtgagactgctcagtgagatgctgcttcattacagccaggaggactcttcggacggggacagagagctgatgaaggagctgtttgatcagtgtgagaacaagaggcggactttatttaaactcgccagtgagactgaggacaatgataacagtttgggggacatcctgcaagccagtgacaacctctcccgggtcatcaactcttacaaaacaattattgaagggcaggtcatcaatggcgaggtggctaccttaaccctgcctgactcggaaggaaacagtcagtgcagtaaccaaggcacgctcatcgaccttgcggagctggacacgaccaacagtttgtcctccgtgttggccccagcacctactccaccctcctcaggcatcccaatcctccctccaccaccccaggcctcaggacctccacggagccgctcctctagccaggccgaggccaccctggggcccagcagcacaagcaacgccctctcctggctggacgaggagctactctgcttgggcctcgccgacccagcccctaatgttcctcccaaagagtcagctgggaacagccagtggcacctgctccagagggaacagtccgacctggacttcttcagccccaggccggggaccgctgcctgtggcgcctccgatgctcctctgctccagccctcagccccctcctcaagcagctcccaagctccactgccgcctcccttcccagctcctgtggtcccagccagtgttcctgcccccagtgcgggctcctccttgttttctactggagtggccccagccttggccccaaaagttgagcccgcagtccctgggcaccatggcttggcgttgggcaacagcgcgctgcaccacctggatgccctcgatcagcttctagaagaggccaaagtgacctcgggcttggtgaaacccactacctcccctctcatccccaccaccaccccagccaggcccctcctgcccttctccacggggcccggcagcccgctcttccagccactgagtttccagtcccagggcagccccccgaaggggcctgagctctccctggccagcatccacgtgcccctggaatcgatcaagcctagcagtgcccttcctgtgacagcctacgataaaaacggcttccgcatcctcttccactttgccaaggagtgtcccccaggacgacctgacgtgctggtggtggtggtgtccatgctgaacacggctcccttacctgtcaagagcatcgtgctgcaggctgcagtgcccaagtcaatgaaagtgaagttgcagccaccttctgggacagaactctctccatttagccccatccagccacctgcagccatcacccaggtcatgttgctggccaatccactgaaggagaaggtgcggcttcggtataagctgaccttcgccctgggggagcagctgagcacagaggtgggcgaggtggaccagttccctcctgtggaacagtgggggaacctatgaccccagaggacgctgtgatctccaccttgaagccaggcaggctgccctgagacgaggagggctctggtcccgtcactctccatgccctgacaacagtgcttgtagctttgatgtggaacaggggccctgggcatttctgctgagaaccaaactgctgctgtgataacctctcctttggcccctaaaaggacctgtttttatctacctgtgtgacttgaagtggccatatgctgtcaggggtgcggagtggcccctgacttcactgctgtcccgggaacatggacccccaggcttggcgtaggtgtttgcttccttctactggcattcactgaagccactggggtggggggtggggggtgggagtctctaaagagagactgtcatgggtcattccccacaagagccacatcctcacacctgacagatgcacggcccaaggggctgcagccctgttgcaattccatgcttcccccgccaaccagctcctgctgccatccccagggaggtggcccaggaaggtgcctggcccagaataaggaactggcatactgcaaagtccccagccctgcctctggtggacagcatcgtcctggaatggccacggagtgatgagttgtgtgcttgtccctggcagtggcaggctgtgtcctatggacatcttggcaggacatggaatttggcctcatgacaggcccaactagggataggaaggaaaatgaagagagccagtatttccccttctccagaagcaggtactcagctttctgggaaaagcgtgcctccagccgtggggacaggccatcctactgactacctcttgcttggcatgaaataaactgctatcctccccttggaatctaccgccactctacatcctactgctttggcctccctctcctctcaccagatggcatgtggtgtggcacctgtggctggacacaggaggcctcaggatcacaaatgttacactagacatatgtcctaatgtgctgcccagaaacctcaactgttccccagctactgaggggcactgtcagcgagatgttgggtctggaggtgatgagatcgggccacacttgagctgagtcaccagaccctattgcttcaacagtgcttggcccccgccagcttgtcccagccactctagctgctggatgtgatcctgggacatgtactccaagcctccgtcacaaaaaaaaaatcaccagctgccatagacacgggggaagcttgcggagcccaggtgaacaagctcagcaatcggacatctctggggaaaggaaggtggcacagaccatgttccctggttcctccctgccccttgccaggcttccttattccttactatgggaagaggtcatatcccttccctgcccctcgctgtctttagcaagcaggtttcactgcttcattagaagaggacaagtcaaaagtgaatcatttttcactacttaaggaataaatccaagagctttccagagactggctgctgcagccctgggaatgtctgtggaattactatgtggaaatggaactttgtgttatgctctagacattacagttatttgagtgttactcgttactgttgaggtcagtgcttcgtggcaaatggctgtactggatatcccagctctgctgcccttgttttgctgcatgttaaataaaaccattttcactgt

SEQ ID NO: 380058 - DNA, 4170 bp, Homo sapiens
atctgcgtttctctccactgatctggacgttagagtttttcactccggggtccaaaggggagcgccaaaaggaaacccttgccctccctgtatccgtcgcagtctggcgcggccctcggtgacggcactcactcctctcaggaccccatgcaggccccgccccgtctcagctcgtgcagactctcgcgagttttgaagccgcggggccgggcggctgcaatatggcggaggcggaaggggaaagcctggagtcctggctcaataaagccaccaatccttccaaccgccaggaggactgggaatacataattggcttctgtgatcagatcaacaaggagctggaagggccacagatcgccgtccgactgctggcccacaagatccagtccccacaggaatgggaggcgctccaggccctgacggtgctggaggcatgcatgaagaactgtgggaggagatttcataacgaagtggggaagttccgctttttgaatgagttaatcaaagtcgtctctccaaagtacctgggggacagggtgtctgagaaagtgaagaccaaggttattgagctgctgtacagctggaccatggccctgccagaagaagcaaagatcaaagacgcctaccacatgctgaagagacagggcatagtgcagtctgacccaccaattcctgtggataggacgctgatcccctctccaccacctcgtcccaaaaaccctgtttttgatgatgaggagaagtccaagcttttagccaagctgctgaaaagcaaaaacccagatgacctgcaggaggccaacaagctcatcaagtccatggtgaaggaagacgaggcacggatccagaaggtgaccaagcgtctgcacacgttagaggaagttaacaacaacgtgagactgctcagtgagatgctgcttcattacagccaggaggactcttcggacggggacagagagctgatgaaggagctgtttgatcagtgtgagaacaagaggcggactttatttaaactcgccagtgagactgaggacaatgataacagtttgggtgagtgaaagagcgacggtcagggataagccaggcatttggatatgtgggtgggaactgtcacaacaggagtgagaagtctctctttcctgctccaggggacatcctgcaagccagtgacaacctctcccgggtcatcaactcttacaaaacaattattgaagggcaggtcatcaatggcgaggtggctaccttaaccctgcctgactcggaaggaaacagtcagtgcagtaaccaaggcacgctcatcgaccttgcggagctggacacgaccaacagtttgtcctccgtgttggccccagcacctactccaccctcctcaggcatcccaatcctccctccaccaccccaggcctcaggacctccacggagccgctcctctagccaggccgaggccaccctggggcccagcagcacaagcaacgccctctcctggctggacgaggagctactctgcttgggcctcgccgacccagcccctaatgttcctcccaaagagtcagctgggaacagccagtggcacctgctccagagggaacagtccgacctggacttcttcagccccaggccggggaccgctgcctgtggcgcctccgatgctcctctgctccagccctcagccccctcctcaagcagctcccaagctccactgccgcctcccttcccagctcctgtggtcccagccagtgttcctgcccccagtgcgggctcctccttgttttctactggagtggccccagccttggccccaaaagttgagcccgcagtccctgggcaccatggcttggcgttgggcaacagcgcgctgcaccacctggatgccctcgatcagcttctagaagaggccaaagtgacctcgggcttggtgaaacccactacctcccctctcatccccaccaccaccccagccaggcccctcctgcccttctccacggggcccggcagcccgctcttccagccactgagtttccagtcccagggcagccccccgaaggggcctgagctctccctggccagcatccacgtgcccctggaatcgatcaagcctagcagtgcccttcctgtgacagcctacgataaaaacggcttccgcatcctcttccactttgccaaggagtgtcccccaggacgacctgacgtgctggtggtggtggtgtccatgctgaacacggctcccttacctgtcaagagcatcgtgctgcaggctgcagtgcccaagtcaatgaaagtgaagttgcagccaccttctgggacagaactctctccatttagccccatccagccacctgcagccatcacccaggtcatgttgctggccaatccactgaaggagaaggtgcggcttcggtataagctgaccttcgccctgggggagcagctgagcacagaggtgggcgaggtggaccagttccctcctgtggaacagtgggggaacctatgaccccagaggacgctgtgatctccaccttgaagccaggcaggctgccctgagacgaggagggctctggtcccgtcactctccatgccctgacaacagtgcttgtagctttgatgtggaacaggggccctgggcatttctgctgagaaccaaactgctgctgtgataacctctcctttggcccctaaaaggacctgtttttatctacctgtgtgacttgaagtggccatatgctgtcaggggtgcggagtggcccctgacttcactgctgtcccgggaacatggacccccaggcttggcgtaggtgtttgcttccttctactggcattcactgaagccactggggtggggggtggggggtgggagtctctaaagagagactgtcatgggtcattccccacaagagccacatcctcacacctgacagatgcacggcccaaggggctgcagccctgttgcaattccatgcttcccccgccaaccagctcctgctgccatccccagggaggtggcccaggaaggtgcctggcccagaataaggaactggcatactgcaaagtccccagccctgcctctggtggacagcatcgtcctggaatggccacggagtgatgagttgtgtgcttgtccctggcagtggcaggctgtgtcctatggacatcttggcaggacatggaatttggcctcatgacaggcccaactagggataggaaggaaaatgaagagagccagtatttccccttctccagaagcaggtactcagctttctgggaaaagcgtgcctccagccgtggggacaggccatcctactgactacctcttgcttggcatgaaataaactgctatcctccccttggaatctaccgccactctacatcctactgctttggcctccctctcctctcaccagatggcatgtggtgtggcacctgtggctggacacaggaggcctcaggatcacaaatgttacactagacatatgtcctaatgtgctgcccagaaacctcaactgttccccagctactgaggggcactgtcagcgagatgttgggtctggaggtgatgagatcgggccacacttgagctgagtcaccagaccctattgcttcaacagtgcttggcccccgccagcttgtcccagccactctagctgctggatgtgatcctgggacatgtactccaagcctccgtcacaaaaaaaaaatcaccagctgccatagacacgggggaagcttgcggagcccaggtgaacaagctcagcaatcggacatctctggggaaaggaaggtggcacagaccatgttccctggttcctccctgccccttgccaggcttccttattccttactatgggaagaggtcatatcccttccctgcccctcgctgtctttagcaagcaggtttcactgcttcattagaagaggacaagtcaaaagtgaatcatttttcactacttaaggaataaatccaagagctttccagagactggctgctgcagccctgggaatgtctgtggaattactatgtggaaatggaactttgtgttatgctctagacattacagttatttgagtgttactcgttactgttgaggtcagtgcttcgtggcaaatggctgtactggatatcccagctctgctgcccttgttttgctgcatgttaaataaaaccattttcactgt

SEQ ID NO: 380059 - DNA, 1205 bp, Homo sapiens
atctgcgtttctctccactgatctggacgttagagtttttcactccggggtccaaaggggagcgccaaaaggaaacccttgccctccctgtatccgtcgcagtctggcgcggccctcggtgacggcactcactcctctcaggaccccatgcaggccccgccccgtctcagctcgtgcagactctcgcgagttttgaagccgcggggccgggcggctgcaatatggcggaggcggaaggggaaagcctggagtcctggctcaataaagccaccaatccttccaaccgccaggaggactgggaatacataattggcttctgtgatcagatcaacaaggagctggaagggccacagatcgccgtccgactgctggcccacaagatccagtccccacaggaatgggaggcgctccaggccctgacggtgctggaggcatgcatgaagaactgtgggaggagatttcataacgaagtggggaagttccgctttttgaatgagttaatcaaagtcgtctctccaaagtacctgggggacagggtgtctgagaaagtgaagaccaaggttattgagctgctgtacagctggaccatggccctgccagaagaagcaaagatcaaagacgcctaccacatgctgaagagacagggcatagtgcagtctgacccaccaattcctgtggataggacgctgatcccctctccaccacctcgtcccaaaaaccctgtttttgatgatgaggagaagtccaagcttttagccaagctgctgaaaagcaaaaacccagatgacctgcaggaggccaacaagctcatcaagtccatggtgaaggaagacgaggcacggatccagaaggtgaccaagcgtctgcacacgttagaggaagttaacaacaacgtgagactgctcagtgagatgctgcttcattacagccaggaggactcttcggacggggacagagagctgatgaaggagctgtttgatcagtgtgagaacaagaggcggactttatttaaactcgccagtgagactgaggacaatgataacagtttgggggacatcctgcaagccagtgacaacctctcccgggtcatcaactcttacaaaacaattattgaagggcaggtcatcaatggcgaggtggctaccttaaccctgcctgactcggaaggaaacagtcagtgcagtatctgcacttctcctgagtgg

SEQ ID NO: 380060 - DNA, 377 bp, Homo sapiens
gctctgttgggtgtctctggtgctgctcctcccacactcacgtcacgttcttacaggcagtgcccttcctgtgacagcctacgataaaaacggcttccgcatcctcttccactttgccaaggagtgtcccccaggacgacctgacgtgctggtggtggtggtgtccatgctgaacacggctcccttacctgtcaagagcatcgtgctgcaggctgcagtgcccaaggtaccagtgtctccctggggccaaaacggccttatcttgaccctgttgtgtagaggcctttgcagccagcaggtggcagtgtgtgtgtgcactgcaggttccatctgggggcacctaccagttctcttcaaaggagtttctctctctttag

SEQ ID NO: 380061 - DNA, 240 bp, Homo sapiens
cttgggtgagagtcctgcagctctggctggctctctgacgtgctttccatccttcccacctcccaggacctcgggcttggtgaaacccactacctcccctctcatccccaccaccaccccagccaggcccctcctgcccttctccacggggcccggcagcccgctcttccagccactgagtttccagtcccagggcagccccccgaaggggcctgagctctccctggccagcatccacgt

SEQ ID NO: 380062 - DNA, 288 bp, Homo sapiens
cctttgctgccttaggttaagtgtctgagcatggttgggggttgcggggaaaagggaccattcctctagcacagagagggtagcagaatagagggcgtcctgccaaggggccgcctgggctggatctcacttgctgccctctgtcacaggagaaggtgcggcttcggtataagctgaccttcgccctgggggagcagctgagcacagaggtgggcgaggtggaccagttccctcctgtggaacagtgggggaacctatgaccccagaggacgctgtgatctccacctt

SEQ ID NO: 380063 - DNA, 3973 bp, Homo sapiens
atctgcgtttctctccactgatctggacgttagagtttttcactccggggtccaaaggggagcgccaaaaggaaacccttgccctccctgtatccgtcgcagtctggcgcggccctcggtgacggcactcactcctctcaggaccccatgcaggccccgccccgtctcagctcgtgcagactctcgcgagttttgaagccgcggggccgggcggctgcaatatggcggaggcggaaggggaaagcctggagtcctggctcaataaagccaccaatccttccaaccgccaggaggactgggaatacataattggcttctgtgatcagatcaacaaggagctggaagggccacagatcgccgtccgactgctggcccacaagatccagtccccacaggaatgggaggcgctccaggccctgacgtacctgggggacagggtgtctgagaaagtgaagaccaaggttattgagctgctgtacagctggaccatggccctgccagaagaagcaaagatcaaagacgcctaccacatgctgaagagacagggcatagtgcagtctgacccaccaattcctgtggataggacgctgatcccctctccaccacctcgtcccaaaaaccctgtttttgatgatgaggagaagtccaagcttttagccaagctgctgaaaagcaaaaacccagatgacctgcaggaggccaacaagctcatcaagtccatggtgaaggaagacgaggcacggatccagaaggtgaccaagcgtctgcacacgttagaggaagttaacaacaacgtgagactgctcagtgagatgctgcttcattacagccaggaggactcttcggacggggacagagagctgatgaaggagctgtttgatcagtgtgagaacaagaggcggactttatttaaactcgccagtgagactgaggacaatgataacagtttgggggacatcctgcaagccagtgacaacctctcccgggtcatcaactcttacaaaacaattattgaagggcaggtcatcaatggcgaggtggctaccttaaccctgcctgactcggaaggaaacagtcagtgcagtaaccaaggcacgctcatcgaccttgcggagctggacacgaccaacagtttgtcctccgtgttggccccagcacctactccaccctcctcaggcatcccaatcctccctccaccaccccaggcctcaggacctccacggagccgctcctctagccaggccgaggccaccctggggcccagcagcacaagcaacgccctctcctggctggacgaggagctactctgcttgggcctcgccgacccagcccctaatgttcctcccaaagagtcagctgggaacagccagtggcacctgctccagagggaacagtccgacctggacttcttcagccccaggccggggaccgctgcctgtggcgcctccgatgctcctctgctccagccctcagccccctcctcaagcagctcccaagctccactgccgcctcccttcccagctcctgtggtcccagccagtgttcctgcccccagtgcgggctcctccttgttttctactggagtggccccagccttggccccaaaagttgagcccgcagtccctgggcaccatggcttggcgttgggcaacagcgcgctgcaccacctggatgccctcgatcagcttctagaagaggccaaagtgacctcgggcttggtgaaacccactacctcccctctcatccccaccaccaccccagccaggcccctcctgcccttctccacggggcccggcagcccgctcttccagccactgagtttccagtcccagggcagccccccgaaggggcctgagctctccctggccagcatccacgtgcccctggaatcgatcaagcctagcagtgcccttcctgtgacagcctacgataaaaacggcttccgcatcctcttccactttgccaaggagtgtcccccaggacgacctgacgtgctggtggtggtggtgtccatgctgaacacggctcccttacctgtcaagagcatcgtgctgcaggctgcagtgcccaagtcaatgaaagtgaagttgcagccaccttctgggacagaactctctccatttagccccatccagccacctgcagccatcacccaggtcatgttgctggccaatccactgaaggagaaggtgcggcttcggtataagctgaccttcgccctgggggagcagctgagcacagaggtgggcgaggtggaccagttccctcctgtggaacagtgggggaacctatgaccccagaggacgctgtgatctccaccttgaagccaggcaggctgccctgagacgaggagggctctggtcccgtcactctccatgccctgacaacagtgcttgtagctttgatgtggaacaggggccctgggcatttctgctgagaaccaaactgctgctgtgataacctctcctttggcccctaaaaggacctgtttttatctacctgtgtgacttgaagtggccatatgctgtcaggggtgcggagtggcccctgacttcactgctgtcccgggaacatggacccccaggcttggcgtaggtgtttgcttccttctactggcattcactgaagccactggggtggggggtggggggtgggagtctctaaagagagactgtcatgggtcattccccacaagagccacatcctcacacctgacagatgcacggcccaaggggctgcagccctgttgcaattccatgcttcccccgccaaccagctcctgctgccatccccagggaggtggcccaggaaggtgcctggcccagaataaggaactggcatactgcaaagtccccagccctgcctctggtggacagcatcgtcctggaatggccacggagtgatgagttgtgtgcttgtccctggcagtggcaggctgtgtcctatggacatcttggcaggacatggaatttggcctcatgacaggcccaactagggataggaaggaaaatgaagagagccagtatttccccttctccagaagcaggtactcagctttctgggaaaagcgtgcctccagccgtggggacaggccatcctactgactacctcttgcttggcatgaaataaactgctatcctccccttggaatctaccgccactctacatcctactgctttggcctccctctcctctcaccagatggcatgtggtgtggcacctgtggctggacacaggaggcctcaggatcacaaatgttacactagacatatgtcctaatgtgctgcccagaaacctcaactgttccccagctactgaggggcactgtcagcgagatgttgggtctggaggtgatgagatcgggccacacttgagctgagtcaccagaccctattgcttcaacagtgcttggcccccgccagcttgtcccagccactctagctgctggatgtgatcctgggacatgtactccaagcctccgtcacaaaaaaaaaatcaccagctgccatagacacgggggaagcttgcggagcccaggtgaacaagctcagcaatcggacatctctggggaaaggaaggtggcacagaccatgttccctggttcctccctgccccttgccaggcttccttattccttactatgggaagaggtcatatcccttccctgcccctcgctgtctttagcaagcaggtttcactgcttcattagaagaggacaagtcaaaagtgaatcatttttcactacttaaggaataaatccaagagctttccagagactggctgctgcagccctgggaatgtctgtggaattactatgtggaaatggaactttgtgttatgctctagacattacagttatttgagtgttactcgttactgttgaggtcagtgcttcgtggcaaatggctgtactggatatcccagctctgctgcccttgttttgctgcatgttaaataaaaccattttcactgt

SEQ ID NO: 380064 - DNA, 4072 bp, Homo sapiens
atctgcgtttctctccactgatctggacgttagagtttttcactccggggtccaaaggggagcgccaaaaggaaacccttgccctccctgtatccgtcgcagtctggcgcggccctcggtgacggcactcactcctctcaggaccccatgcaggccccgccccgtctcagctcgtgcagactctcgcgagttttgaagccgcggggccgggcggctgcaatatggcggaggcggaaggggaaagcctggagtcctggctcaataaagccaccaatccttccaaccgccaggaggactgggaatacataattggcttctgtgatcagatcaacaaggagctggaagggccacagatcgccgtccgactgctggcccacaagatccagtccccacaggaatgggaggcgctccaggccctgacggtgctggaggcatgcatgaagaactgtgggaggagatttcataacgaagtggggaagttccgctttttgaatgagttaatcaaagtcgtctctccaaagtacctgggggacagggtgtctgagaaagtgaagaccaaggttattgagctgctgtacagctggaccatggccctgccagaagaagcaaagatcaaagacgcctaccacatgctgaagagacagggcatagtgcagtctgacccaccaattcctgtggataggacgctgatcccctctccaccacctcgtcccaaaaaccctgtttttgatgatgaggagaagtccaagcttttagccaagctgctgaaaagcaaaaacccagatgacctgcaggaggccaacaagctcatcaagtccatggtgaaggaagacgaggcacggatccagaaggtgaccaagcgtctgcacacgttagaggaagttaacaacaacgtgagactgctcagtgagatgctgcttcattacagccaggaggactcttcggacggggacagagagctgatgaaggagctgtttgatcagtgtgagaacaagaggcggactttatttaaactcgccagtgagactgaggacaatgataacagtttgggggacatcctgcaagccagtgacaacctctcccgggtcatcaactcttacaaaacaattattgaagggcaggtcatcaatggcgaggtggctaccttaaccctgcctgactcggaaggaaacagtcagtgcagtaaccaaggcacgctcatcgaccttgcggagctggacacgaccaacagtttgtcctccgtgttggccccagcacctactccaccctcctcaggcatcccaatcctccctccaccaccccaggcctcaggacctccacggagccgctcctctagccaggccgaggccaccctggggcccagcagcacaagcaacgccctctcctggctggacgaggagctactctgcttgggcctcgccgacccagcccctaatgttcctcccaaagagtcagctgggaacagccagtggcacctgctccagagggaacagtccgacctggacttcttcagccccaggccggggaccgctgcctgtggcgcctccgatgctcctctgctccagccctcagccccctcctcaagcagctcccaagctccactgccgcctcccttcccagctcctgtggtcccagccagtgttcctgcccccagtgcgggctcctccttgttttctactggagtggccccagccttggccccaaaagttgagcccgcagtccctgggcaccatggcttggcgttgggcaacagcgcgctgcaccacctggatgccctcgatcagcttctagaagaggccaaagtgacctcgggcttggtgaaacccactacctcccctctcatccccaccaccaccccagccaggcccctcctgcccttctccacggggcccggcagcccgctcttccagccactgagtttccagtcccagggcagccccccgaaggggcctgagctctccctggccagcatccacgtgcccctggaatcgatcaagcctagcagtgcccttcctgtgacagcctacgataaaaacggcttccgcatcctcttccactttgccaaggagtgtcccccaggacgacctgacgtgctggtggtggtggtgtccatgctgaacacggctcccttacctgtcaagagcatcgtgctgcaggctgcagtgcccaagtcaatgaaagtgaagttgcagccaccttctgggacagaactctctccatttagccccatccagccacctgcagccatcacccaggtcatgttgctggccaatccactgaaggagaaggtgcggcttcggtataagctgaccttcgccctgggggagcagctgagcacagaggtgggcgaggtggaccagttccctcctgtggaacagtgggggaacctatgaccccagaggacgctgtgatctccaccttgaagccaggcaggctgccctgagacgaggagggctctggtcccgtcactctccatgccctgacaacagtgcttgtagctttgatgtggaacaggggccctgggcatttctgctgagaaccaaactgctgctgtgataacctctcctttggcccctaaaaggacctgtttttatctacctgtgtgacttgaagtggccatatgctgtcaggggtgcggagtggcccctgacttcactgctgtcccgggaacatggacccccaggcttggcgtaggtgtttgcttccttctactggcattcactgaagccactggggtggggggtggggggtgggagtctctaaagagagactgtcatgggtcattccccacaagagccacatcctcacacctgacagatgcacggcccaaggggctgcagccctgttgcaattccatgcttcccccgccaaccagctcctgctgccatccccagggaggtggcccaggaaggtgcctggcccagaataaggaactggcatactgcaaagtccccagccctgcctctggtggacagcatcgtcctggaatggccacggagtgatgagttgtgtgcttgtccctggcagtggcaggctgtgtcctatggacatcttggcaggacatggaatttggcctcatgacaggcccaactagggataggaaggaaaatgaagagagccagtatttccccttctccagaagcaggtactcagctttctgggaaaagcgtgcctccagccgtggggacaggccatcctactgactacctcttgcttggcatgaaataaactgctatcctccccttggaatctaccgccactctacatcctactgctttggcctccctctcctctcaccagatggcatgtggtgtggcacctgtggctggacacaggaggcctcaggatcacaaatgttacactagacatatgtcctaatgtgctgcccagaaacctcaactgttccccagctactgaggggcactgtcagcgagatgttgggtctggaggtgatgagatcgggccacacttgagctgagtcaccagaccctattgcttcaacagtgcttggcccccgccagcttgtcccagccactctagctgctggatgtgatcctgggacatgtactccaagcctccgtcacaaaaaaaaaatcaccagctgccatagacacgggggaagcttgcggagcccaggtgaacaagctcagcaatcggacatctctggggaaaggaaggtggcacagaccatgttccctggttcctccctgccccttgccaggcttccttattccttactatgggaagaggtcatatcccttccctgcccctcgctgtctttagcaagcaggtttcactgcttcattagaagaggacaagtcaaaagtgaatcatttttcactacttaaggaataaatccaagagctttccagagactggctgctgcagccctgggaatgtctgtggaattactatgtggaaatggaactttgtgttatgctctagacattacagttatttgagtgttactcgttactgttgaggtcagtgcttcgtggcaaatggctgtactggatatcccagctctgctgcccttgttttgctgcatgttaaataaaaccattttcactgt

SEQ ID NO: 380065 - DNA, 4363 bp, Homo sapiens
atctgcgtttctctccactgatctggacgttagagtttttcactccggggtccaaaggggagcgccaaaaggaaacccttgccctccctgtatccgtcgcagtctggcgcggccctcggtgacggcactcactcctctcaggaccccatgcaggccccgccccgtctcagctcgtgcagactctcgcgagttttgaagccgcggggccgggcggctgcaatatggcggaggcggaaggggaaagcctggagtcctggctcaataaagccaccaatccttccaaccgccaggaggactgggaatacataattggcttctgtgatcagatcaacaaggagctggaagggccacagatcgccgtccgactgctggcccacaagatccagtccccacaggaatgggaggcgctccaggccctgacggtgctggaggcatgcatgaagaactgtgggaggagatttcataacgaagtggggaagttccgctttttgaatgagttaatcaaagtcgtctctccaaagtacctgggggacagggtgtctgagaaagtgaagaccaaggttattgagctgctgtacagctggaccatggccctgccagaagaagcaaagatcaaagacgcctaccacatgctgaagagacagggcatagtgcagtctgacccaccaattcctgtggataggacgctgatcccctctccaccacctcgtcccaaaaaccctgtttttgatgatgaggagaagtccaagcttttagccaagctgctgaaaagcaaaaacccagatgacctgcaggaggccaacaagctcatcaagtccatggtgaaggaagacgaggcacggatccagaaggtgaccaagcgtctgcacacgttagaggaagttaacaacaacgtgagactgctcagtgagatgctgcttcattacagccaggaggactcttcggacggggacagagagctgatgaaggagctgtttgatcagtgtgagaacaagaggcggactttatttaaactcgccagtgagactgaggacaatgataacagtttgggggacatcctgcaagccagtgacaacctctcccgggtcatcaactcttacaaaacaattattgaagggcaggtcatcaatggcgaggtggctaccttaaccctgcctgactcggaaggaaacagtcagtgcagtaaccaaggcacgctcatcgaccttgcggagctggacacgaccaacagtttgtcctccgtgttggccccagcacctactccaccctcctcaggcatcccaatcctccctccaccaccccaggcctcaggacctccacggagccgctcctctagccaggccgaggccaccctggggcccagcagcacaagcaacgccctctcctggctggacgaggagctactctgcttgggcctcgccgacccagcccctaatgttcctcccaaagagtcagctgggaacagccagtggcacctgctccagagggaacagtccgacctggacttcttcagccccaggccggggaccgctgcctgtggcgcctccgatgctcctctgctccagccctcagccccctcctcaagcagctcccaagctccactgccgcctcccttcccagctcctgtggtcccagccagtgttcctgcccccagtgcgggctcctccttgttttctactggagtggccccagccttggccccaaaagttgagcccgcagtccctgggcaccatggcttggcgttgggcaacagcgcgctgcaccacctggatgccctcgatcagcttctagaagaggccaaagtgacctcgggcttggtgaaacccactacctcccctctcatccccaccaccaccccagccaggcccctcctgcccttctccacggggcccggcagcccgctcttccagccactgagtttccagtcccagggcagccccccgaaggggcctgagctctccctggccagcatccacgtgcccctggaatcgatcaagcctagtaggtgttggaggattgaggtgggtggggcggtggggcctatagccacggagctgtaggacatgcgacagggatggatccaggcactctttgcagggggtcccttaaagccaggcaggcctccctgcctgcattctcagtcttaagctcctcactgagcgcctctcccagattccgttaggaagcactggactcatcatgaccacggagtagcccttttctcctcaccgccggggctctgttgggtgtctctggtgctgctcctcccacactcacgtcacgttcttacaggcagtgcccttcctgtgacagcctacgataaaaacggcttccgcatcctcttccactttgccaaggagtgtcccccaggacgacctgacgtgctggtggtggtggtgtccatgctgaacacggctcccttacctgtcaagagcatcgtgctgcaggctgcagtgcccaagtcaatgaaagtgaagttgcagccaccttctgggacagaactctctccatttagccccatccagccacctgcagccatcacccaggtcatgttgctggccaatccactgaaggagaaggtgcggcttcggtataagctgaccttcgccctgggggagcagctgagcacagaggtgggcgaggtggaccagttccctcctgtggaacagtgggggaacctatgaccccagaggacgctgtgatctccaccttgaagccaggcaggctgccctgagacgaggagggctctggtcccgtcactctccatgccctgacaacagtgcttgtagctttgatgtggaacaggggccctgggcatttctgctgagaaccaaactgctgctgtgataacctctcctttggcccctaaaaggacctgtttttatctacctgtgtgacttgaagtggccatatgctgtcaggggtgcggagtggcccctgacttcactgctgtcccgggaacatggacccccaggcttggcgtaggtgtttgcttccttctactggcattcactgaagccactggggtggggggtggggggtgggagtctctaaagagagactgtcatgggtcattccccacaagagccacatcctcacacctgacagatgcacggcccaaggggctgcagccctgttgcaattccatgcttcccccgccaaccagctcctgctgccatccccagggaggtggcccaggaaggtgcctggcccagaataaggaactggcatactgcaaagtccccagccctgcctctggtggacagcatcgtcctggaatggccacggagtgatgagttgtgtgcttgtccctggcagtggcaggctgtgtcctatggacatcttggcaggacatggaatttggcctcatgacaggcccaactagggataggaaggaaaatgaagagagccagtatttccccttctccagaagcaggtactcagctttctgggaaaagcgtgcctccagccgtggggacaggccatcctactgactacctcttgcttggcatgaaataaactgctatcctccccttggaatctaccgccactctacatcctactgctttggcctccctctcctctcaccagatggcatgtggtgtggcacctgtggctggacacaggaggcctcaggatcacaaatgttacactagacatatgtcctaatgtgctgcccagaaacctcaactgttccccagctactgaggggcactgtcagcgagatgttgggtctggaggtgatgagatcgggccacacttgagctgagtcaccagaccctattgcttcaacagtgcttggcccccgccagcttgtcccagccactctagctgctggatgtgatcctgggacatgtactccaagcctccgtcacaaaaaaaaaatcaccagctgccatagacacgggggaagcttgcggagcccaggtgaacaagctcagcaatcggacatctctggggaaaggaaggtggcacagaccatgttccctggttcctccctgccccttgccaggcttccttattccttactatgggaagaggtcatatcccttccctgcccctcgctgtctttagcaagcaggtttcactgcttcattagaagaggacaagtcaaaagtgaatcatttttcactacttaaggaataaatccaagagctttccagagactggctgctgcagccctgggaatgtctgtggaattactatgtggaaatggaactttgtgttatgctctagacattacagttatttgagtgttactcgttactgttgaggtcagtgcttcgtggcaaatggctgtactggatatcccagctctgctgcccttgttttgctgcatgttaaataaaaccattttcactgt

SEQ ID NO: 380066 - DNA, 1263 bp, Homo sapiens
ctgtcaagaagtgccctggcagtttcaatgcggatgaggacgatcgggtggacatctgggcccccagccggagtcgcaccagcaactctctgccagctcccacaccgactacgcttccatccccaggtagctggggcagcctctgccaggcttgggtgtgcctggcctgggactgaggctgcccacggagtgatgagttgtgtgcttgtccctggcagtggcaggctgtgtcctatggacatcttggcaggacatggaatttggcctcatgacaggcccaactagggataggaaggaaaatgaagagagccagtatttccccttctccagaagcaggtactcagctttctgggaaaagcgtgcctccagccgtggggacaggccatcctactgactacctcttgcttggcatgaaataaactgctatcctccccttggaatctaccgccactctacatcctactgctttggcctccctctcctctcaccagatggcatgtggtgtggcacctgtggctggacacaggaggcctcaggatcacaaatgttacactagacatatgtcctaatgtgctgcccagaaacctcaactgttccccagctactgaggggcactgtcagcgagatgttgggtctggaggtgatgagatcgggccacacttgagctgagtcaccagaccctattgcttcaacagtgcttggcccccgccagcttgtcccagccactctagctgctggatgtgatcctgggacatgtactccaagcctccgtcacaaaaaaaaaatcaccagctgccatagacacgggggaagcttgcggagcccaggtgaacaagctcagcaatcggacatctctggggaaaggaaggtggcacagaccatgttccctggttcctccctgccccttgccaggcttccttattccttactatgggaagaggtcatatcccttccctgcccctcgctgtctttagcaagcaggtttcactgcttcattagaagaggacaagtcaaaagtgaatcatttttcactacttaaggaataaatccaagagctttccagagactggctgctgcagccctgggaatgtctgtggaattactatgtggaaatggaactttgtgttatgctctagacattacagttatttgagtgttactcgttactgttgaggtcagtgcttcgtggcaaatggctgtactggatatcccagctctgctgcccttgttttgctgcatgttaaataaaaccattttcactgt

SEQ ID NO: 380067 - DNA, 1022 bp, Homo sapiens
atctgcgtttctctccactgatctggacgttagagtttttcactccggggtccaaaggggagcgccaaaaggaaacccttgccctccctgtatccgtcgcagtctggcgcggccctcggtgacggcactcactcctctcaggaccccatgcaggccccgccccgtctcagctcgtgcagactctcgcgagttttgaagccgcggggccgggcggctgcaatatggcggaggcggaaggggaaagcctggagtcctggctcaataaagccaccaatccttccaaccgccaggaggactgggaatacataattggcttctgtgatcagatcaacaaggagctggaagggccacagatcgccgtccgactgctggcccacaagatccagtccccacaggaatgggaggcgctccaggccctgacggtgctggaggcatgcatgaagaactgtgggaggagatttcataacgaagtggggaagttccgctttttgaatgagttaatcaaagtcgtctctccaaagtacctgggggacagggtgtctgagaaagtgaagaccaaggttattgagctgctgtacagctggaccatggccctgccagaagaagcaaagatcaaagacgcctaccacatgctgaagagacagggcatagtgcagtctgacccaccaattcctgtggataggacgctgatcccctctccaccacctcgtcccaaaaaccctgtttttgatgatgaggagaagtccaagcttttagccaagctgctgaaaagcaaaaacccagatgacctgcaggaggccaacaagctcatcaagtccatggtgaaggaagacgaggcacggatccagaaggtgaccaagcgtctgcacacgttagaggaagttaacaacaacgtgagactgctcagtgagatgctgcttcattacagccaggaggactcttcggacggggacagagagctgatgaaggtgggaccgccgacggcaaaggctgcctcccggggctgcgctgcccttcaggag

SEQ ID NO: 380068 - DNA, 394 bp, Homo sapiens
ctaagttaccccagttacctccaagtttcctgaaaaggggcagtgtttgggataagcaggttaaatatctgtttcattttctccaagttctaccctgtgatcacatatgaaatcacccagaagttagttttcaggcatagaccaggaggagaaagagtcttcaaactaaaagttagaaaatgctatgctttgtattttattaaacattgtgtgaacgacacacatcgtttggttacctgatctttttttacaccagactaggaaatacttttttgagaggtgatgacagtggtcatcaatggtttagcatcaatctgcttgactggattatgttgattgtattattggccatcacctggcaaggcacaattatagctgagatagatctggaagt

SEQ ID NO: 380069 - DNA, 1751 bp, Homo sapiens
gttgcagcttcaccctcgcagattcggcttagcgagcgagtcggtgcttccgcggatcaaaattattagccgttttattagagcccattaaacgttgcataaacatggttcagagctgcctgggagaagaaaagccaaaggatgccaccctctcgatttatcccaccctcgggagtctgaaagccgacgccaggagaaatcccgcgaaggccgcccgggatcctggtagaggcgacgctgtgtgcgtttatggagcgcttgcggtgcgtggcactaggctgggtgtggtgggtgctgccgaaaaaagggttcctcccatccatttgcacgtcacccttcccacctcctgcccagatggacagaagtgaggacattcatcggccgcattttactaatggcaaggagatagcgactgaagggcaagaacctagggtttcctgtctttgatatttctcatctttgaggtaagtacacctggacagtcccttccttcctcctcagggctcatgctttcttgcctatccgtgtaattaatatgatctggctatctttgtctttgttccgaaacttcagctgcaaatgaaagtgtaagttaggtctgagtctgcactatagacctagctatcctaggttaaaggggataaaataggaatcaagaagcctggcccgcttgggctcccagctcaagtgcattctgcaatccagtttatattaggcctccatgtgggtggctatcctttatcaagatcccccccagggagaggaggattattagtcacattatcaaactcccctccaacccctttctctgcttagaggtatgtgtaatgtgtagtagaaagaccgaatccccacccaaaagtccttactgctactcatgtttttaaccttctgttctttaccctactccctaataatgaccgccatcatttatctactgcttaatggatactaggcactgtgctaagggttttatgttttacttcaatcttttcatcggctttattttgatagtttgttttatagaggaggaaacagacttaggtaagttacaagatgacaaggttactaccttgttcagttagtagtcagcagctagtatatccaaagatagtacgagtcagaactaggattataaactcagggctacctgaaactcacaacttcaggcatctttgatttcttcttttcacccacagccaattcttcaactaaattgtatccattctgttttcaccgtctcttgtactggtctcctttctattgtaactgtcatcatcctaactcaagatccttctgtagctttccccggttattggaatatccttattacgactgccaccttttctaatccagtctgtttactactgccgggttaatttccccaaactgcatgtctggggaataaccttgtggttatgacagaattcccaaaggaaagcaaacttggcaaggtgcaaagactatgaagacttagaacttaagagttctatggagatcttcagaaatataaattagctactcaacatatctgttattctgccctgattgcactgtaaagcaaaaggagagaggccattatggggaaaaagatccaaaaggactcatctaaaacacaagttgggtagaggagataggtgagtactattatattatgttcatggaaaatgagttcatgggctttcctctaatttttattttaaaaataaatgtaaatattaaataaaattttttaaatgaaaaaaaaaaaa

SEQ ID NO: 380070 - DNA, 563 bp, Homo sapiens
gttgcagcttcaccctcgcagattcggcttagcgagcgagtcggtgcttccgcggatcaaaattattagccgttttattagagcccattaaacgttgcataaacatggttcagagctgcctgggagaagaaaagccaaaggatgccaccctctcgatttatcccaccctcgggagtctgaaagccgacgccaggagaaatcccgcgaaggccgcccgggatcctggtagaggcgacgctgtgtgcgtttatggagcgcttgcgatggacagaagtgaggacattcatcggccgcattttactaatggcaaggagatagcgactgaagggcaagaacctagggtttcctgtctttgatatttctcatctttgagcaaaaggagagaggccattatggggaaaaagatccaaaaggactcatctaaaacacaagttgggtagaggagataggtgagtactattatattatgttcatggaaaatgagttcatgggctttcctctaatttttattttaaaaataaatgtaaatattaaataaaattttttaaatgaaaaaaaaaaaa

SEQ ID NO: 380071 - DNA, 1698 bp, Homo sapiens
gttgcagcttcaccctcgcagattcggcttagcgagcgagtcggtgcttccgcggatcaaaattattagccgttttattagagcccattaaacgttgcataaacatggttcagagctgcctgggagaagaaaagccaaaggatgccaccctctcgatttatcccaccctcgggagtctgaaagccgacgccaggagaaatcccgcgaaggccgcccgggatcctggtagaggcgacgctgtgtgcgtttatggagcgcttgcggtgcgtggcactaggctgggtgtggtgggtgctgccgaatggacagaagtgaggacattcatcggccgcattttactaatggcaaggagatagcgactgaagggcaagaacctagggtttcctgtctttgatatttctcatctttgaggtaagtacacctggacagtcccttccttcctcctcagggctcatgctttcttgcctatccgtgtaattaatatgatctggctatctttgtctttgttccgaaacttcagctgcaaatgaaagtgtaagttaggtctgagtctgcactatagacctagctatcctaggttaaaggggataaaataggaatcaagaagcctggcccgcttgggctcccagctcaagtgcattctgcaatccagtttatattaggcctccatgtgggtggctatcctttatcaagatcccccccagggagaggaggattattagtcacattatcaaactcccctccaacccctttctctgcttagaggtatgtgtaatgtgtagtagaaagaccgaatccccacccaaaagtccttactgctactcatgtttttaaccttctgttctttaccctactccctaataatgaccgccatcatttatctactgcttaatggatactaggcactgtgctaagggttttatgttttacttcaatcttttcatcggctttattttgatagtttgttttatagaggaggaaacagacttaggtaagttacaagatgacaaggttactaccttgttcagttagtagtcagcagctagtatatccaaagatagtacgagtcagaactaggattataaactcagggctacctgaaactcacaacttcaggcatctttgatttcttcttttcacccacagccaattcttcaactaaattgtatccattctgttttcaccgtctcttgtactggtctcctttctattgtaactgtcatcatcctaactcaagatccttctgtagctttccccggttattggaatatccttattacgactgccaccttttctaatccagtctgtttactactgccgggttaatttccccaaactgcatgtctggggaataaccttgtggttatgacagaattcccaaaggaaagcaaacttggcaaggtgcaaagactatgaagacttagaacttaagagttctatggagatcttcagaaatataaattagctactcaacatatctgttattctgccctgattgcactgtaaagcaaaaggagagaggccattatggggaaaaagatccaaaaggactcatctaaaacacaagttgggtagaggagataggtgagtactattatattatgttcatggaaaatgagttcatgggctttcctctaatttttattttaaaaataaatgtaaatattaaataaaattttttaaatgaaaaaaaaaaaa

SEQ ID NO: 380072 - DNA, 346 bp, Homo sapiens
attcaggacctattagagaagttccctggctctttaaaactgctttatttctgaaatcaaggggaagcaactcatgatcatacagtgaatgtacttttttggcttcaaaggtaaaaatagctcttaatggttcttaagctcactaaaaattcaggctgaacatatacctcttgagtcatctcctcaaagactaaaaggggcaagaaatggaaagagaacaaggcaccaataggaaaaaagctctaaactgtttacttggttgagatcagatttccttatctcagatttcctcataaatttagttactcaagagtaattgcggctcttcatccagattgcaaatatg

SEQ ID NO: 380073 - DNA, 345 bp, Homo sapiens
gtcagttgttgggttatgtattttgcatttgatatttaatttaatctttgtaatagccagagacttggatcttattggcatcattttccagatgagcagagctaataaatggcagaactagaattcaaatctgaggctctctggcattgaaaacaacaacaaaacatgtttctactcttcaaagagactttttctcctggattgtcacttgtccttttctttctctttctctcctgacattggtatttaaaatgagaacctaggaaacttgtttcttctaacctaatgtttttgaagcagttttaggtccttggagatgtgccttgatgtgtctatacaatatag

SEQ ID NO: 380074 - DNA, 311 bp, Homo sapiens
gaagccactttaatccacaaggaacttatcactgaataaaccaaattaagatggacacacattgaacataatacaaggcagccattgggctcagaagagggggctcaggaatgtctacaataaggaggtgaagtttgagatggactttgaagaacccataaaaagtgaagtggccaggtgcagtggctcaagcctgtaatcccagcactttgggaggccgaggcgggtggatcatctgaggtcaggagttcaagaccagcctggccaacatgggaaaaccccgtctctactaaaaatacaaaatttagcct

SEQ ID NO: 380075 - DNA, 2623 bp, Homo sapiens
gaattccgcagagggagggaaggaaaccgccagttaaccacatggtagctgaggggctgctcagcaggattcattttacgcttcttctgaatcgctgtgtattcctcattagaatctatgactgaagaggatcggctaagagtggttcctcgcagcttaaagggaggcacttttcacactctgtcttaaaatcagaagttgaattcatgaacacatatgatttagatagaagtcatgggatgcagcagttcttcaacgaaaaccaggagatctgacacatcactgagagctgcgttgatcatccagaactggtaccgaggttacaaagctcgactgaaggccagacaacactatgccctcaccatcttccagtccatcgaatatgctgatgaacaaggccaaatgcagttatccaccttcttttccttcatgttggaaaactacacacatatacataaggaagagctagaattaagaaatcagtctcttgaaagcgaacaggacatgagggatagatgggattatgtggactcgatagatgtcccagactcctataatggtcctcggctacaatttcctctcacttgtacggatattgatttacttcttgaggccttcaaggaacaacagatacttcatgcccattatgtcttagaggtgctatttgaaaccaagaaagtcctgaagcaaatgccgaatttcactcacatacaaacttctccctccaaagaggtaacaatctgtggtgatttgcatgggaaactggatgatctttttttgatcttctacaagaatggtctcccctcagagaggaacccgtatgtttttaatggtgactttgtagatcgaggaaagaattccatagagatcctaatgatcctgtgtgtgagttttcttgtctaccccaatgacctgcacttgaacagagggaaccacgaagattttatgatgaatctgaggtatggcttcacgaaagaaattttgcataaatataagctacatggaaaaagaatcttacaaatcttggaagaattctatgcctggctcccaatcggtacaatcgttgacaatgaaatcctggtcatccatggtgggatatcagagaccacagacttgaatttactccaccgtgtagagaggaacaagatgaaatctgtgctgataccaccaacggaaacaaacagagaccatgacactgactcgaagcacaataaagtaggtgtgacttttaatgcacatggaagaatcaaaacaaatggatctcctactgaacacttaacagagcatgaatgggaacagattattgatattctgtggagtgatcccagaggcaaaaatggctgttttccaaatacgtgccgaggagggggctgctattttggaccagatgttacttccaagattcttaataaataccagttgaagatgctcatcaggtctcatgaatgtaagcccgaagggtatgaaatctgtcatgatgggaaggtggtgactatattttctgcttctaattattatgaagaaggcagcaatcgaggagcttacatcaaactatgttctggtacaactcctcgatttttccagtaccaagtaactaaagcaacgtgctttcagcctcttcgccaaagagtggatactatggaaaacagcgccatcaagatattaagagagagagtgatttcacgaaaaagtgaccttactcgtgctttccaacttcaagaccacagaaaatcaggaaaactttctgtgagccagtgggctttttgcatggagaacattttggggctgaacttaccatggagatccctcagttcgaatctggtaaacatagaccaaaatggaaacgttgaatacatgtccagcttccagaatatccgcattgaaaaacctgtacaagaggctcattctactctagttgaaactctgtacagatacagatctgacctggaaatcatatttaatgccattgacactgatcactcaggcctgatctccgtggaagaatttcgtgccatgtggaaactttttagttctcactacaatgttcacattgatgattcccaagtcaataagcttgccaacataatggacttgaacaaagatggaagcattgactttaatgagtttttaaaggctttctatgtagtgcatagatatgaagacttgatgaaacctgatgtcaccaaccttggctaaacacaaatgagagcttccctcaggctccctgaaacagctaggcccaaatcacaagtacagtcctttccaacacccctgaaattcatagtcagtagcagagaaaagcagatcccaattcatcccacaaacagatgcatagtatgggttttggaagtccctagcaagctgttattggtaagattaggttaaatgtcagtaataggatttggtttcagcattagtacctacatattgccagtgagaaactgggttggacctagtggtgttgtcgtgagtgccacctaaccaggaggccagagcggtttgaaaacatcctgaaaggaactcatacagcacaagagaaaactactaagcttgacatctgtgagtgactgagggagacaggaggaataccaggttattcatggaataaagtctttccatcttt

SEQ ID NO: 380076 - DNA, 3037 bp, Homo sapiens
  misc_feature (2980)..(2980): n is a, c, g, or t
tgccgtgaagattacaaatgagactgggaaaccctcttcaataagacctgtgtgatgatagattgtgtcctgagcccgcaggtcaggctgaaagagtcaacaaccagcaaagtgaagatctaggagtctgttccccttgaacctgtgtggacctgatcaaacctcgagggaaaggctgggagaacacatccctggtcagctgtaggaaagccagagagcatttgagaagaggctgaagcttgaattttgcaaacacacaagccctctgcatttccccagagagaaggtttttttctcgtcttcatttcctttgaaacacctggggtgaggaaaaacctctacattggccaagcagaagaaacagaatctatgactgaagaggatcggctaagagtggttcctcgcagcttaaagggaggcacttttcacactctgtcttaaaatcagaagttgaattcatgaacacatatgatttagatagaagtcatgggatgcagcagttcttcaacgaaaaccaggagatctgacacatcactgagagctgcgttgatcatccagaactggtaccgaggttacaaagctcgactgaaggccagacaacactatgccctcaccatcttccagtccatcgaatatgctgatgaacaaggccaaatgcagttatccaccttcttttccttcatgttggaaaactacacacatatacataaggaagagctagaattaagaaatcagtctcttgaaagcgaacaggacatgagggatagatgggattatgtggactcgatagatgtcccagactcctataatggtcctcggctacaatttcctctcacttgtacggatattgatttacttcttgaggccttcaaggaacaacagatacttcatgcccattatgtcttagaggtgctatttgaaaccaagaaagtcctgaagcaaatgccgaatttcactcacatacaaacttctccctccaaagaggtaacaatctgtggtgatttgcatgggaaactggatgatctttttttgatcttctacaagaatggtctcccctcagagaggaacccgtatgtttttaatggtgactttgtagatcgaggaaagaattccatagagatcctaatgatcctgtgtgtgagttttcttgtctaccccaatgacctgcacttgaacagagggaaccacgaagattttatgatgaatctgaggtatggcttcacgaaagaaattttgcataaatataagctacatggaaaaagaatcttacaaatcttggaagaattctatgcctggctcccaatcggtacaatcgttgacaatgaaatcctggtcatccatggtgggatatcagagaccacagacttgaatttactccaccgtgtagagaggaacaagatgaaatctgtgctgataccaccaacggaaacaaacagagaccatgacactgactcgaagcacaataaagtaggtgtgacttttaatgcacatggaagaatcaaaacaaatggatctcctactgaacacttaacagagcatgaatgggaacagattattgatattctgtggagtgatcccagaggcaaaaatggctgttttccaaatacgtgccgaggagggggctgctattttggaccagatgttacttccaagattcttaataaataccagttgaagatgctcatcaggtctcatgaatgtaagcccgaagggtatgaaatctgtcatgatgggaaggtggtgactatattttctgcttctaattattatgaagaaggcagcaatcgaggagcttacatcaaactatgttctggtacaactcctcgatttttccagtaccaagtaactaaagcaacgtgctttcagcctcttcgccaaagagtggatactatggaaaacagcgccatcaagatattaagagagagagtgatttcacgaaaaagtgaccttactcgtgctttccaacttcaagaccacagaaaatcaggaaaactttctgtgagccagtgggctttttgcatggagaacattttggggctgaacttaccatggagatccctcagttcgaatctggtaaacatagaccaaaatggaaacgttgaatacatgtccagcttccagaatatccgcattgaaaaacctgtacaagaggctcattctactctagttgaaactctgtacagatacagatctgacctggaaatcatatttaatgccattgacactgatcactcaggcctgatctccgtggaagaatttcgtgccatgtggaaactttttagttctcactacaatgttcacattgatgattcccaagtcaataagcttgccaacataatggacttgaacaaagatggaagcattgactttaatgagtttttaaaggctttctatgtagtgcatagatatgaagacttgatgaaacctgatgtcaccaaccttggctaaacacaaatgagagcttccctcaggctccctgaaacagctaggcccaaatcacaagtacagtcctttccaacacccctgaaattcatagtcagtagcagagaaaagcagatcccaattcatcccacaaacagatgcatagtatgggttttggaagtccctagcaagctgttattggtaagattaggttaaatgtcagtaataggatttggtttcagcattagtacctacatattgccagtgagaaactgggttggacctagtggtgttgtcgtgagtgccacctaaccaggaggccagagcggtttgaaaacatcctgaaaggaactcatacagcacaagagaaaactactaagcttgacatctgtgagtgactgagggagacaggaggaataccaggttattcatggaataaagtctttccatctttaaaactgtgatcttctttggagattttataagccagtgatcctcaattaagggatccacccttcagggatgaggaaccatattgggttcttggggggaatctgtngggagtgtattgtttgaaaaagcgtatttttgtgtgtgtgtatgttggagatacaaa

SEQ ID NO: 380077 - DNA, 2873 bp, Homo sapiens
  misc_feature (2816)..(2816): n is a, c, g, or t
tgccgtgaagattacaaatgagactgggaaaccctcttcaataagacctgtgtgatgatagattgtgtcctgagcccgcaggtcaggctgaaagagtcaacaaccagcaaagtgaagatctaggagtctgttccccttgaacctgtgtggacctgatcaaacctcgagggaaaggctgggagaacacatccctggtcagctgtaggaaagccagagagcatttgagaagaggctgaagcttgaattttgcaaacacacaagccctctgcatttccccagagagaaggtttttttctcgtcttcatttcctttgaaacacctggggtgaggaaaaacctctacattggccaagcagaagaaacagaatctatgactgaagaggatcggctaagagtggttcctcgcagcttaaagggaggcacttttcacactctgtcttaaaatcagaagttgaattcatgaacacatatgatttagatagaagtcatgggatgcagcagttcttcaacgaaaaccaggagatctgacacatcactgagagctgcgttgatcatccagaactggtaccgaggttacaaagctcgactgaaggccagacaacactatgccctcaccatcttccagtccatcgaatatgctgatgaacaaggccaaatgcagttatccaccttcttttccttcatgttggaaaactacacacatatacataaggaagagctagaattaagaaatcagtctcttgaaagcgaacaggacatgagggatagatgggattatgtggactcgatagatgtcccagactcctataatggtcctcggctacaatttcctctcacttgtacggatattgatttacttcttgaggccttcaaggaacaacagatacttcatgcccattatgtcttagaggtgctatttgaaaccaagaaagtcctgaagcaaatgccgaatttcactcacatacaaacttctccctccaaagaggtaacaatctgtggtgatttgcatgggaaactggatgatctttttttgatcttctacaagaatggtctcccctcagagaggaacccgtatgtttttaatggtgactttgtagatcgaggaaagaattccatagagatcctaatgatcctgtgtgtgagttttcttgtctaccccaatgacctgcacttgaacagagggaaccacgaagattttatgatgaatctgaggtatggcttcacgaaagaaattttgcataaatataagctacatggaaaaagaatcttacaaatcttggaagaattctatgcctggctcccaatcggtacaatcgttgacaatgaaatcctggtcatccatggtgggatatcagagaccacagacttgaatttactccaccgtgtagagaggaacaagatgaaatctgtgctgataccaccaacggaaacaaacagagaccatgacactgactcgaagcacaataaagtaggtgtgacttttaatgcacatggaagaatcaaaacaaatggatctcctactgaacacttaacagagcatgaatgggaacagattattgatattctgtggagtgatcccagaggcaaaaatggctgttttccaaatacgtgccgaggagggggctgctattttggaccagatgttacttccaagattcttaataaataccagttgaagatgctcatcaggtctcatgaatgtaagcccgaagggtatgaaatctgtcatgatgggaaggtggtgactatattttctgcttctaattattatgaagaaggcagcaatcgaggagcttacatcaaactatgttctggtacaactcctcgatttttccagtaccaagtaactaaagcaacgtgctttcagcctcttcgccaaagagtggatactatggaaaacagcgccatcaagatattaagagagagagtgatttcacgaaaaagtgaccttactcgtgctttccaacttcaagaccacagaaaatcaggctcattctactctagttgaaactctgtacagatacagatctgacctggaaatcatatttaatgccattgacactgatcactcaggcctgatctccgtggaagaatttcgtgccatgtggaaactttttagttctcactacaatgttcacattgatgattcccaagtcaataagcttgccaacataatggacttgaacaaagatggaagcattgactttaatgagtttttaaaggctttctatgtagtgcatagatatgaagacttgatgaaacctgatgtcaccaaccttggctaaacacaaatgagagcttccctcaggctccctgaaacagctaggcccaaatcacaagtacagtcctttccaacacccctgaaattcatagtcagtagcagagaaaagcagatcccaattcatcccacaaacagatgcatagtatgggttttggaagtccctagcaagctgttattggtaagattaggttaaatgtcagtaataggatttggtttcagcattagtacctacatattgccagtgagaaactgggttggacctagtggtgttgtcgtgagtgccacctaaccaggaggccagagcggtttgaaaacatcctgaaaggaactcatacagcacaagagaaaactactaagcttgacatctgtgagtgactgagggagacaggaggaataccaggttattcatggaataaagtctttccatctttaaaactgtgatcttctttggagattttataagccagtgatcctcaattaagggatccacccttcagggatgaggaaccatattgggttcttggggggaatctgtngggagtgtattgtttgaaaaagcgtatttttgtgtgtgtgtatgttggagatacaaa

SEQ ID NO: 380078 - DNA, 429 bp, Homo sapiens
ttaccatgttcatgaacacaaaaatagttgataaggaggcaatggtgacaaaaagaaagctggaatctgcctttcaataagcaagaaatagtcctctcatccaggtcatgtcgtccacattccattggcaggtattgtcatatctgcatcctacattgtgaggtcaccaaggcaacctattaatcattctagaatctacctgccgtgaagattacaaatgagactgggaaaccctcttcaataagacctgtgtgatgatagattgtgtcctgagcccgcaggtcaggctgaaagagtcaacaaccagcaaagtgaagatctaggagtctgttccccttgaacctgtgtggacctgatcaaacctcgagggaaaggtaagagaagagcacttagtggaccaggtgaatggagtatgatccgggtaggcat

SEQ ID NO: 380079 - DNA, 2875 bp, Homo sapiens
tgccgtgaagattacaaatgagactgggaaaccctcttcaataagacctgtgtgatgatagattgtgtcctgagcccgcaggtcaggctgaaagagtcaacaaccagcaaagtgaagatctaggagtctgttccccttgaacctgtgtggacctgatcaaacctcgagggaaaggctgggagaacacatccctggtcagctgtaggaaagccagagagcatttgagaagaggctgaagcttgaattttgcaaacacacaagccctctgcatttccccagagagaaggtttttttctcgtcttcatttcctttgaaacacctggggtgaggaaaaacctctacattggccaagcagaagaaacagaatctatgactgaagaggatcggctaagagtggttcctcgcagcttaaagggaggcacttttcacactctgtcttaaaatcagaagttgaattcatgaacacatatgatttagatagaagtcatgggatgcagcagttcttcaacgaaaaccaggagatctgacacatcactgagagctgcgttgatcatccagaactggtaccgaggttacaaagctcgactgaaggccagacaacactatgccctcaccatcttccagtccatcgaatatgctgatgaacaaggccaaatgcagttatccaccttcttttccttcatgttggaaaactacacacatatacataaggaagagctagaattaagaaatcagtctcttgaaagcgaacaggacatgagggatagatgggattatgtggactcgatagatgtcccagactcctataatggtcctcggctacaatttcctctcacttgtacggatattgatttacttcttgaggccttcaaggaacaacagatacttcatgcccattatgtcttagaggtgctatttgaaaccaagaaagtcctgaagcaaatgccgaatttcactcacatacaaacttctccctccaaagaggtaacaatctgtggtgatttgcatgggaaactggatgatctttttttgatcttctacaagaatggtctcccctcagagaggaacccgtatgtttttaatggtgactttgtagatcgaggaaagaattccatagagatcctaatgatcctgtgtgtgagttttcttgtctaccccaatgacctgcacttgaacagagggaaccacgaagattttatgatgaatctgaggtatggcttcacgaaagaaattttgcataaatataagctacatggaaaaagaatcttacaaatcttggaagaattctatgcctggctcccaatcggtacaatcgttgacaatgaaatcctggtcatccatggtgggatatcagagaccacagacttgaatttactccaccgtgtagagaggaacaagatgaaatctgtgctgataccaccaacggaaacaaacagagaccatgacactgactcgaagcacaataaagtaggtgtgacttttaatgcacatggaagaatcaaaacaaatggatctcctactgaacacttaacagagcatgaatgggaacagattattgatattctgtggagtgatcccagaggcaaaaatggctgttttccaaatacgtgccgaggagggggctgctattttggaccagatgttacttccaagattcttaataaataccagttgaagatgctcatcaggtctcatgaatgtaagcccgaagggtatgaaatctgtcatgatgggaaggtggtgactatattttctgcttctaattattatgaagaaggcagcaatcgaggagcttacatcaaactatgttctggtacaactcctcgatttttccagtaccaagtaactaaagcaacgtgctttcagcctcttcgccaaagagtggatactatggaaaacagcgccatcaagatattaagagagagagtgatttcacgaaaaagtgaccttactcgtgctttccaacttcaagaccacagaaaatcaggaaaactttctgtgagccagtgggctttttgcatggagaacattttggggctgaacttaccatggagatccctcagttcgaatctggtaaacatagaccaaaatggaaacgttgaatacatgtccagcttccagaatatccgcattgaaaaacctgtacaagaggctcattctactctagttgaaactctgtacagatacagatctgacctggaaatcatatttaatgccattgacactgatcactcaggcctgatctccgtggaagaatttcgtgccatgtggaaactttttagttctcactacaatgttcacattgatgattcccaagtcaataagcttgccaacataatggacttgaacaaagatggaagcattgactttaatgagtttttaaaggctttctatgtagtgcatagatatgaagacttgatgaaacctgatgtcaccaaccttggctaaacacaaatgagagcttccctcaggctccctgaaacagctaggcccaaatcacaagtacagtcctttccaacacccctgaaattcatagtcagtagcagagaaaagcagatcccaattcatcccacaaacagatgcatagtatgggttttggaagtccctagcaagctgttattggtaagattaggttaaatgtcagtaataggatttggtttcagcattagtacctacatattgccagtgagaaactgggttggacctagtggtgttgtcgtgagtgccacctaaccaggaggccagagcggtttgaaaacatcctgaaaggaactcatacagcacaagagaaaactactaagcttgacatctgtgagtgactgagggagacaggaggaataccaggttattcatggaataaagtctttccatcttt

SEQ ID NO: 380080 - DNA, 945 bp, Homo sapiens
  misc_feature (923)..(923): n is a, c, g, or t
ggaacagagcagggctggggcagagagctgtgctcacggccagtgcattgtctcccagattcgtggctctgggcttgccttcccggctgaaaggcaaagcagcctggccctgttctagttatttctttgtgtatatatgtttgtttatttatttaagcaagagctctctctgcagagtggggtgtgtgtgtgtgtgtgtgtgtgtgtgtgtgtgtgtgtgtgtttgtgtggggtgcttcagagagggctgaaattgtacctcttttctttcagccctctgcatttccccagagagaaggtttttttctcgtcttcatttcctttgaaacacctggggtgaggaaaaacctctacattggccaagcagaagaaacagaatctatgactgaagaggatcggctaagagtggttcctcgcagcttaaagggaggcacttttcacactctgtcttaaaatcagaagttgaattcatgaacacatatgatttagatagaagtcatgggatgcagcagttcttcaacgaaaaccaggagatctgacacatcactgagagctgcgttgatcatccagaactggtaccgaggttacaaagctcgactgaaggccagacaacactatgccctcaccatcttccagtccatcgaatatgctgatgaacaaggccaaatgcagttatccaccttcttttccttcatgttggaaaactacacacatatacataaggaagagctagaattaagaaatcagtctcttgaaagcgaacaggacatgagggatagatgggattatgtggactcgatagatgtcccagactcctataatggtcctcggctacaatttcctctcacttgtacggatattgatttacttcttgaggccttcaaggaacaacagcagatactcatgccattatgtctagaggngtattgaaacaagaaagtctga

SEQ ID NO: 380081 - DNA, 929 bp, Homo sapiens
gaattccgcagagggagggaaggaaaccgccagttaaccacatggtagctgaggggctgctcagcaggattcattttacgcttcttctgaatcgctgtgtattcctcattagaatctatgactgaagaggatcggctaagagtggttcctcgcagcttaaagggaggcacttttcacactctgtcttaaaatcagaagttgaattcatgaacacatatgatttagatagaagtcatgggatgcagcagttcttcaacgaaaaccaggagatctgacacatatacttcatgcccattatgtcttagaggtgctatttgaaaccaagaaagtcctgaagcaaatgccgaatttcactcacatacaaacttctccctccaaagaggtaacaatctgtggtgatttgcatgggaaactggatgatctttttttgatcttctacaagaatggtctcccctcagagaggaacccgtatgtttttaatggtgactttgtagatcgaggaaagaattccatagagatcctaatgatcctgtgtgtgagttttcttgtctaccccaatgacctgcacttgaacagagggaaccacgaagattttatgatgaatctgaggtatggcttcacgaaagaaattttgcataaatataagctacatggaaaaagaatcttacaaatcttggaagaattctatgcctggctcccaatcggtacaatcgttgacaatgaaatcctggtcatccatggtgggatatcagagaccacagacttgaatttactccaccgtgtagagaggaacaagatgaatctggtgctgataacaccaacggaacaaagagaacatgacatgatcgaaagccataaagtacgtgttgctttaatggactggagaatcaaaaatggttctctatgaaattaacgagctgttgggacga

SEQ ID NO: 380082 - DNA, 425 bp, Homo sapiens
caaaaatatcaccatggaatatttttgtttatcttggcctggctgtgcttcatttggctcaagcctgggtctgggattctgtgactctaactcaatgtcaaataccataggcttctttctgccgatgctgtcatccctacttgtgtggggcagtcactcaatccacagcttccctgtaaaaggtactccttaacttcttaaggggcaaagggatactcatcttcaggcaaatttgtaataatttatcaaatgtatatctttgcctcaagatcttggggctagtcaagggttcatatcagaaaccctttgccccagccacactagggcccttaagggtaccatccacaggtcacttgtagtcaacagcacagacaatggccatcgtctcaggaataatgacctcagaccagcagaccaaagtgtcc

SEQ ID NO: 380083 - DNA, 368 bp, Homo sapiens
ctcccgggttcacgccattcttctgcctcagcctcctgagtagctgggactacaagcacccaccaccacgcctggctaatttttttgtatttttagtagagatggggtttcaccgtgttagccaagatggtcttgatctcctcaccttgtgatccgcccgcctcggcctcccaaagtgctgggattacaggtgtgagccaccacacccggcctaaaaatccaagttttaggcaccagctactagtgcagtagccacgtgtggttagagcctccagttctttacagtctcattgtgtggcccaggctggagtgcagtggcacagtcatacatagttcactgcagccttgaactgcctggctcaagggat

SEQ ID NO: 380084 - DNA, 448 bp, Homo sapiens
cattggcattgccagcctcattccatgccactatgagtcaactcaggaaaactgcgagtgcatttgaggcttaggggtagtcattccatctttagattatccttggacttcagctaccagcacagcatgcattagccttggtcctgtaggttaactgaagttcaaacatcagtgccagcttgcctccatccttttcacatattatgcaggccaattgacatataatttgttcttaaaaataggggcatgaaatatgtgatctggaaaagattgtactttctggactcttttcccactcttgcctctttgtgctgctgtttcgtatcctcctcacaccgtgtatttcccacccactcagggtcacagcctactaattcctcaaacttctctccctggactaggagaaaggctaaagaatgtcagtaaataaaagagctttcatccaaaa

SEQ ID NO: 380085 - DNA, 324 bp, Homo sapiens
gggaagttgttaggtttctagtggaggaattacagaaggtagagagctgagccagtcatccattacaggaaattcagaaataagaattttgctttgactgtaatgtttaaaatttgcagaaacaaaatttacttttatccattacatcaatagagagggttgctgtaagtcttaaaaaggaaggggagtatagatatctaacatgtagccaactgctggctattgtagctgtgacaataagcatgtattgatgacaaaggtagaatatacagtttgaattaactacttaaaataccacaggcccacaagtgacatttgttgtgg

SEQ ID NO: 380086 - DNA, 268 bp, Homo sapiens
tccactttcacagagtttatattctaatggagagagaccaccaacattaaacaaatacatacaaagaattgtaacctttattaaatgttcccaagataagaaaacagtaataacagctgggtgcggtggcttacgcctgtagtcccagcactttgggaggctgaggcgggcggattaccattggtcgggagttcgagaccagcctgaccaacatggagaaaccccgtctctactaaaaatacaaaattagccaggcgtggtggcacat

SEQ ID NO: 380087 - DNA, 4890 bp, Homo sapiens
gtggcgggggcggccatcgtgctgcgcagctgggcgcttggggagccgcccacttcgccgggtcgcgccccgacggccggagcgtggatgcggcggcgcccggagccggggcggacgcggggcggccgggcccgggagacgcgccggcagccccggcaccgcagcggtcgcaggatggccgaggctatcagctgtactctgaactgtagttgccaaagtttcaaacccgggaaaataaaccaccgtcagtgtgaccaatgcaagcatggatgggtggcccacgctctaagtaagctaaggatcccccccatgtatccaacaagccaggtggagattgtccagtccaatgtagtgtttgatattagcagcctcatgctctatgggacccaggccatccccgttcgcctaaaaatcctactggaccggctcttcagtgtgttgaagcaagatgaggttctccagatcctccatgccttggactggacacttcaggattatatccgtggatacgtactgcaggatgcatcaggaaaggtgttggatcactggtgcatcatgaccagtgaggaagaagtggccaccttgcagcagttccttcgttttggagagaccaaatctatagttgaactcatggcaattcaagagaaagaagagcaatccatcatcataccaccttccacagcaaatgtagatatcagggctttcatcgagagctgcagtcacaggagttctagcctccccactcctgtggacaaaggaaaccccagcagtatacacccctttgagaacctcataagcaacatgactttcatgctgcctttccagttcttcaaccctctgcctcctgcactgatagggtcattgcccgaacaatatatgttggagcagggtcatgaccaaagtcaggaccccaaacaggaagtccatgggcccaaccctgacagcagcttcttaacttccagttccacaccatttcaggttgaaaaagatcagtgtttaaactgtccggatgctattactaaaaaagaagacagcacccatttaagtgactccagctcatacaacattgtcactaagtttgaaaggacacagttatcccctgaggccaaagtgaagcctgagaggaatagccttggtacaaagaagggccgggtgttctgcactgcatgtgagaagaccttctatgacaaaggcaccctcaaaatccactacaatgccgtccacttgaagatcaagcataagtgcaccatcgaagggtgtaacatggtgttcagctccctaaggacgcggaatcgccatagcgccaaccccaaccctcggctgcacatgccaatgaacagaaataaccgggacaaagacctcaggaacagcctgaacctggccagctctgagaactacaagtgcccaggtttcacagtgacgtccccagactgtaggcctcctcccagctaccctggttcaggagaggattccaaaggccaaccagccttcccaaacattgggcaaaatggtgtgctttttcccaacctaaagacagtccagccagtccttcctttctaccgcagtccagccacgcctgccgaggtagcaaacacgcctgggatactcccttccctcccgctgttgtcctcttcaatcccagaacagctcatttcaaacgaaatgccatttgatgcccttcccaagaagaaatccaggaagtccagtatgcctatcaaaatagagaaagaagctgtggaaatagctaatgagaaaagacacaacctcagctcagatgaagacatgcccctacaggtggtcagtgaagatgagcaggaggcctgcagtcctcagtcacacagagtatctgaggagcagcatgtacagtcaggaggcttagggaagcctttccctgaaggggagaggccctgccatcgtgaatcagtaattgagtccagtggagccatcagccaaacccctgagcaggccacacacaattcagagagggagactgagcatacaccagcattgatcatggtgccaagggaggtcgaggatggtggccatgaacactacttcacacctgggatggaaccccaagttcctttttctgactacatggaactgcagcagcgcctgctggctgggggactcttcagtgctttgtccaacaggggaatggcttttccttgtcttgaagattctaaagaactggagcacgtgggtcagcatgcattagcaaggcagatagaagaaaatcgcttccagtgtgacatctgcaagaagacctttaaaaatgcttgtagtgtgaaaattcatcacaagaatatgcatgtcaaagaaatgcacacatgcacagtggagggctgtaatgctacctttccctcccgcaggagcagagacagacacagctcaaacctaaacctccaccaaaaagcattgagccaggaagcattggagagtagtgaagatcatttccgtgcagcttaccttctgaaagatgtggctaaggaagcctatcaggatgtggcttttacacagcaagcctcccagacatctgtcatcttcaaaggaacaagtcgaatgggcagtctggtttacccaataacgcaagtccacagtgccagcctggagagctacaactctggccccttgagcgagggcaccatcctggatttgagcactacctcgagcatgaagtcagagagtagcagccattcttcctgggactctgacggggtgagtgaggaaggcactgtgcttatggaggacagtgatgggaactgtgaagggtcgagccttgtccctggggaagatgagtaccccatctgtgtcctgatggagaaggctgaccagagccttgctagcctgccttctgggttgcccataacctgtcatctctgccaaaagacatacagtaacaaagggacctttagggcccactacaaaactgtgcacctccggcagctccacaaatgcaaagtaccaggctgcaacaccatgttttcgtctgttcgcagtcgaaacagacacagccagaatcccaacctgcacaaaagcctggcctcatctccaagtcacctccagtaacaagatggcaaaccaagtatgctcagataagcttttttcataattcaggaataaagtagtccatagaaatgtttctgtttcatatcatttggggcgagtcaggcaaaagtatttgatttgactttatagttttccacagcacaatgagcaaaagacaaacctcgtgggaagatgacactggggcagcccttcctattatttttcttagcccaagaggtctttcactgatacaaggaaaacttgcagaaatgtgatttttcccagatttgtttacatgttccctgggacagatccaggtctgcagatcgacaccagtgggcccaggacctgggggtggctttaaatgaggcttgcagtgttaaaggtcttggataagaagggtcctggggaagaagactctgtggacaagataccagtccccaaaacagcattttcagttccttcttcaattagtttgaaatccagacctgagtttggaagactgattttttgagaccatccctgtgtttggagtggataattgtccctcccctcagccctgcaccagaggtctcatatgttaccccagggagttctcagaggattgggttggcctctaacatgttccttgttaattcttgttctgtaacatgcattcaagaagctaggggaaaaatatctcatgcacttaaataatggtcttcaatttaatttaaaaatattttgacaatatttaatttgtgcttatgtggtgtttggtgtgagtgcagatattgcactgtgtcacctctggatctctgctcagaagcagaacaagtgatgacctaaatgtcaaaatcactgctcgttttcatttggtgaacttcaaactctgttctttttggtcacctgtggaatgaatgcaagcatgattttggcaggaacatttgtacatattctgccgtagataatgtggttctgatggttgttgtgtattttcagtatcactggatccctcagtcttcaccgttttataaacgtataagattaggatgaacttttgaatttacttggtaggaaaaaaagtaggacattattgccatattgtatgtcttaatatttaacttattcggaaatatattccacactgttacatacattttccatggtagaaaggaagttcagtcagtcctgtggaatgaaaccatctcctaaaattcagcatttgcagcattctaaaagcctgtgtaggtacaaggacattgattttgtattcagaattcaagttaactatcttttaaattcgtggttgatgtaagtaataaaaaacattcttaaagttgagggttataagagagattatttctgtggtctaaaggttaaaaagccaacaacctgttaccaattatttcagctttttttgttttaataagtgtgacaacttaaaacttgtttctatttaaagtgaaatgtatctttcaactgtttagttacccagctgtttaatattccagtcttcccaaagtgaaaagatttgtatacaaatgttttctatgatttaataaaaatatatggcacaaaaaaccacttcgccgggtcgcgccccgacggccgggcccgggagacgcgccggcagccccggcaccttgccaaagtttcaaacccgggaaaataaacgtaagctaaggatcccccccatgtatccaacctcatgctctatgggacccaggccatccccgtgaggttctccagatcctccatgccttggacgaaaggtgttggatcactggtgcatcatgacaccaaatctatagttgaactcatggcaattcagatatcagggctttcatcgagagctgcagt

SEQ ID NO: 380088 - DNA, 359 bp, Homo sapiens
tgggcaattttaaggaggtagacagtgcaataaagaatgatgaggatgtctaccccacatcaaacgcaaatcagaatacccctcctcaatatctttattcatatggaaattctgcattttatactgcttaatcaataacttattaacagagaagttctaaggcagacctaaataaatggaaagatacttcatattcatggactgaaagacccacattgtaaagacgttaattctcccccaagttgagctactgaatcttaaccaaaatcctgaaagtttttgtttctctttatgggacttgacaagcaaattgtaaaatttacatggaagggccgggcgcggtggctcacgcctgtaat

SEQ ID NO: 380089 - DNA, 540 bp, Homo sapiens
aatttaggtggccctctagtttatgaagttccagatcgataggacatggttcttgataccttctgatgtaacacaaatatcatggtgttagaaccatcattgcttacaatctccttccatcatcctttcaaaatgactgttgtccaaaaaaggagactgttgcataatacctggttgacattagcccctgtgattgcaatgggaactcacaagcttggccattcaacatggcatatttctgaaaatactgactttgggggtgattgtatttattctcctatatctgccaagtgagaccacagtgcctctacccggattcatgaggaaggtctatctagaaagaggcaaatacagcagcctctttaattgtagaaatttatgagtgactgtatcagtgaaaagccaagaaagttagaaaataatttaataaaagagagaattcctaaggtattctaaataatgagttttcttcttttatgtaatccatcttgcttatatgtcattttatgcttcagttactttgaatgtttaaaaaaaaaa

SEQ ID NO: 380090 - DNA, 432 bp, Homo sapiens
gtcctgtagaatgggcctttccctacctggaagagggcagctctcatgctgggaccgaataccttgagaggagagcctcttggttgcactgtgacccaggacagggcacagaggaagaagccccattctggtgctccatccctccagtttgcccaaaggttgcacccaaaggccgatgctgggcacagactggcaccttctaactttctctccaagctcccatcctggctggagagacagcaggtgtctgagaactattccttctcttctcagtgagaatctatagccaattagctgagcccagggaggtggaaaatgtctctttccagccctggagctaacagcgaatccagtctttcttgtagacgtctctgtgaagggcgagaacggagtaacctccaggactccaaggagctggtttcaggctgtcag

SEQ ID NO: 380091 - DNA, 411 bp, Homo sapiens
attaatagctggagctcaatggagactgtcggagaactaatttgatagagagaggggtgggagttgcctaaaacccaaactgccctaattgtaaccgtatgagttcctgagaagtttttgcctcccatgacccgctttggcagtctggagaaccctacataccccttcacagaatagtgtttttaaatgctagagataaattatattggattataaattatttcaatgacattgaaatagagttgtcaccatattaagaaaacaaatttttgataaggaagtattttgctttattattaacacatgaaatgacagggtctagaattactgaaagtagtgatacatacagatgatacttttatatatatttgtgaaaactctaacaagataatctgcaacttctaggtatga

SEQ ID NO: 380092 - DNA, 351 bp, Homo sapiens
cttctaaaaaatagaactaaggtgaacgagtgggggtttcatgaaggtaatttggggtccatatgaacaaaagttttttaacacaatcattttaaaatagaaagggctgccttaggaagtaataaattttttaacattaaaaatgttctgacagaagctagctcaccagtagccagaaatatacctgaatattcatctgtagagtggagataattatccaaacggattgttatgaggtttaaatgagataatgcgtgtatggcagttagcatagtgattgacatattgcaaatatgtgcagtgaatgatgaatggtaattgttgatactaccactatcatgaccgcctcca

SEQ ID NO: 380093 - DNA, 486 bp, Homo sapiens
catgcttggcatgggggggcacctggtttttgtgtccttggagctcatctctggtgggggaggaggagcagcaggagatgcgagggctgtagttctcagtcctggccgcacattggaatcctatgggggagctttaaaattatacaccaaactcggccaggtgcggtagctcacgcctgttatcccaacactttgggaggccgaggagggtggatcacatgaggccaggagttcaagaccagcctggccaatatgctgaaacctcgtatctaataaaaattacacaagttagccaggcatggtggcgcacgcctgtaatctcagctgcacgggaggctgaggcaggagaattgcttgaacccaggatgtggaggttgcagtgagctgagattgagccactgcactccagcctgagcaacagagtgagactctgtctcaaaaaaaaaaaaaaaaaaaaatacacacacacacacacacacacacaca

SEQ ID NO: 380094 - DNA, 715 bp, Homo sapiens
tgccctcctcatagggatgtactgcaaaacacataacaaagggttggaaatgcatcaacttctggctgaattatctgttattgtgtattggaccatccccaaactcagtggcataaaacagccatatatttttttctctcactgctgtgagctaactgggattagtgggcaatgcttgcttggggcctcttccccagttgcagccatatggctgaagaagtgggtgttagctaaggcctggctgggctgggggatgcacacgatggtcccttcactcctatgcctggtgcctctgtgtcctccaggtgactctctctctggcagaatagcccagactttttacccactggggtcaagtttccatggacaaggaaagaagcttgcagccttcttaaaagctaggcctggacttggcacagcatcactctcgctgtattctattcatcaaagcacttgaaaccaacccagatatgttcaatggggagcatccatgtatagccccaatttgagacaagctactatcctttaaaagacaggacttgcaagtgatgggaaagaataaaaacccttccacagccatgtctatacatattaattattattttcatctctccccgatatgtatatgttagtttaatgtgttgaataatataaaaccatttatttttttcaaaattgtagaattgaaagaaagggtaataggaggccatgctga

SEQ ID NO: 380095 - DNA, 474 bp, Homo sapiens
agttcttctgaaatcaattcatatattcaacttaattcctgccaaaatttcagtgatacacacacacacacacacacacacacacacggcaaaattgttctaaagtaaattcagaaaataatagagatgagaaaattacaaaaactagtgcaaatactaaaatttgcagatatactaacagatctaacatattacaacatgttatatagcctctgaaataaaaacgatttgttactaggctaaaaataaaatctgcagcccagaagtagaacatattacatatagcactatagtttcataaaggagatggcattggtcaatcagaaacctgaaggtttagtcagtaagtgctctatgagggatcagttagcaatttacaaagaaaaattaatttagagcctcatctcatttcataggccaaaatatattttagataaagaagtaaacattaaaaattaaacaacagaaaccagt

SEQ ID NO: 380096 - DNA, 486 bp, Homo sapiens
tatgcaccaccatacccagctaattttgtattttcagtagagacggggtttctccatgttggccaggctggtctagagctcccgacctcaggtgatccacccaccttggcctcccaaagtgctgggattacaggtgtgaacctaatcctttttgaagatagacccagatgactgtgaaaataatattttaacatgttaacatagatcaggcaatgtatatattaatagcaggcagtgagccgggcactttttaaattgccatttaatccgcagattaactctgagggaagagccaattttctccatttataagtgaaaaaactgatgcttagagaggactcaaaccttggtgtgactctacctaatgctgcttaactttggcaccgcctctttcccaacttccccttcacttttggaatgaaagactgaacaattctgttgcattttctgccttcaaaggataagtgtttgaaatcaagacagaaa

SEQ ID NO: 380097 - DNA, 2173 bp, Homo sapiens
atttttttttttgcttctggaagctttgttctttaatgagccatggggtgatttgttcatcaagctgcttttgtgtagccatacagtgcatattttgagtgacacaaactgcactttatacagatggtatcttgttacccctcaaccccccagcaaagaaaaaaaaacaaaaaggaaattacaaagtgcctattgattgcatccggaatgtaatcagttccgtgggtgagataaatcattcttcttatagaattattctattaaacagtaaaatgttatatttcacaggatatgtccttttataatacagtttttaaaaaaaatttacactcagcatacttataaattacttaaaatccattaaaataatataatacgaatctgtagtccacacctttcccatagtaaatacaaatacttggttcaaaaggtgcaacttttatatgacctcagagggctgataaataggcattaagaatggatgactagcaaggtgacaggcccattgttggggcttttttgaaaatagtttcaaccaggggaccaacatgagacctaatagatccatctccacaatcatcattttgctgttaccctttcaatacccaatcaaatgtgggagtcattccagagaaaagtggttaaaagtagtctagggcatagaaaaagaggactctcacagataccaaggagttttactaccaaggccagcatggtattgcaggacagtgctggggagttgtcacaagagtatgggtggacataacacatttgtccatacagaatgatgcatgccccgcatccagcttcccaccaagaagaaaaaagagaggaggatgaggaaagccatggagtgagtatgtatgtttctttttaaaatgaaaactctcttagctttgaacacatcctgagaatcctttcttctttctagtttaccaaagtgcttgttacagtgaaaaacacagcccacaggcactgaggtgggactacagaaccttgctggaccacatcttttcagcacatttctgtgaccctctgtttttgatggagaaaacaacgctactgttatgaaacacagaatggagtcttcattaatcttccagcagggtaagcgctctggcaggtttccaaagcatgagaagatgggggctctagtattccatcccaggacctctggcccttttgtctctctctgcaaggctcatagttggagggctgtatctccctttgtgttttcagaagcccagagtggcaaaataatttaaatggcaggaggtacaaagtacgttgtaaactaagcctccctgaatcctgctgtatttgctgttgatttgcttcaatttgtgatacagaatgaaatcacacttctctgcttttgttacattttccataataagtacatactaaattacagggatacattcactttaatgggcagagttgaaaattcaggttttgtttggggctgggaatgtgtgctgtgagaagagtgctctgcattttggagtatgggctccaaatgtggagctgccccactgctgccatgcagagatcaaacaagcaaaggagaagcactatggaaccacaaatgtgatgcatattaagggctaacagtttcataagtgattgtaatgcggcatcactttgtggtgacataactttaccatgcagagggccagtgagaacagatggatgcagacacagcgtttggttctgaaggtttttaagagttatggcttcatctcttgatcaggccaacaagcgcctactaccctatgtaaacaacggctttccctcaaagggagggccccacactgctctccactcttatcattttgtggctctctcctcctcacccacccaccccaatgcctggcagattaaattactgagaaatccacaaatctagcaactgaaaaaacaagtttttttaattgaattttatccaaactggagtttcaggtccctggagaaaaattataaagtctcttaacatccatcacctagttcctttaaagtgacctacatcagtcgttttttaactgccaaaaaacttattttgccaaaaaagccccacaaagatttagaaggaagaacatgtgccaacatatgttcttctggccattcctctgggccacaggaaattattccataagggcaaactctttttttc

SEQ ID NO: 380098 - DNA, 1859 bp, Homo sapiens
atttttttttttgcttctggaagctttgttctttaatgagccatggggtgatttgttcatcaagctgcttttgtgtagccatacagtgcatattttgagtgacacaaactgcactttatacagatggtatcttgttacccctcaaccccccagcaaagaaaaaaaaacaaaaaggaaattacaaagtgcctattgattgcatccggaatgtaatcagttccgtgggtgagataaatcattcttcttatagaattattctattaaacagtaaaatgttatatttcacaggatatgtccttttataatacagtttttaaaaaaaatttacactcagcatacttataaattacttaaaatccattaaaataatataatacgaatctgtagtccacacctttcccatagtaaatacaaatacttggttcaaaaggtgcaacttttatatgacctcagagggctgataaataggcattaagaatggatgactagcaaggtgacaggcccattgttggggcttttttgaaaatagtttcaaccaggggaccaacatgagacctaatagatccatctccacaatcatcattttgctgttaccctttcaatacccaatcaaatgtgggagtcattccagagaaaagtggttaaaagtagtctagggcatagaaaaagaggactctcacagataccaaggagttttactaccaaggccagcatggtattgcaggacagtgctggggagttgtcacaagagtatgggtggacataacacatttgtccatacagaatgatgcatgccccgcatccagcttcccaccaagaagaaaaaagagaggaggatgaggaaagccatggagtgagtatgtatgtttctttttaaaatgaaaactctcttagctttgaacacatcctgagaatcctttcttctttctagtttaccaaagtgcttgttacagtgaaaaacacagcccacaggcactgaggtgggactacagaaccttgctggaccacatcttttcagcacatttctgtgaccctctgtttttgatggagaaaacaacgctactgttatgaaacacagaatggagtcttcattaatcttccagcagggtaagcgctctggcaggtttccaaagcatgagaagatgggggctctagtattccatcccaggacctctggcccttttgtctctctctgcaaggctcatagttggagggctgtatctccctttgtgttttcagaagcccagagtggcaaaataatttaaatggcaggaggtacaaagtacgttgtaaactaagcctccctgaatcctgctgtatttgctgttgatttgcttcaatttgtgatacagaatgaaatcacacttctctgcttttgttacattttccataataagtacatactaaattacagggatacattcactttaatgggcagagttgaaaattcaggttttgtttggggctgggaatgtgtgctgtgagaagagtgctctgcattttggagtatgggctccaaatgtggagctgccccactgctgccatgcagagatcaaacaagcaaaggagaagcactatggaaccacaaatgtgatgcatattaagggctaacagtttcataagtgattgtaatgcggcatcactttgtggtgacataactttaccatgcagagggccagtgagaacagatggatgcagacacagcgtttggttctgaaggtttttaagagttatggcttcatctcttgatcaggccaacaagcgcctactaccctatgtaaacaacggctttccctcaaagggaggggggacaactcgatttccagatttatggggatccatctagagacagacatagc

SEQ ID NO: 380099 - DNA, 1702 bp, Homo sapiens
atttttttttttgcttctggaagctttgttctttaatgagccatggggtgatttgttcatcaagctgcttttgtgtagccatacagtgcatattttgagtgacacaaactgcactttatacagatggtatcttgttacccctcaaccccccagcaaagaaaaaaaaacaaaaaggaaattacaaagtgcctattgattgcatccggaatgtaatcagttccgtgggtgagataaatcattcttcttatagaattattctattaaacagtaaaatgttatatttcacaggatatgtccttttataatacagtttttaaaaaaaatttacactcagcatacttataaattacttaaaatccattaaaataatataatacgaatctgtagtccacacctttcccatagtaaatacaaatacttggttcaaaaggtgcaacttttatatgacctcagagggctgataaataggcattaagaatggatgactagcaaggtgacaggcccattgttggggcttttttgaaaatagtttcaaccaggggaccaacatgagacctaatagatccatctccacaatcatcattttgctgttaccctttcaatacccaatcaaatgtgggagtcattccagagaaaagtggttaaaagtagtctagggcatagaaaaagaggactctcacagataccaaggagttttactaccaaggccagcatggtattgcaggacagtgctggggagttgtcacaagagtatgggtggacataacacatttgtccatacagaatgatgcatgccccgcatccagcttcccaccaagaagaaaaaagagaggaggatgaggaaagccatggagtgagtatgtatgtttctttttaaaatgaaaactctcttagctttgaacacatcctgagaatcctttcttctttctagtttaccaaagtgcttgttacagtgaaaaacacagcccacaggcactgaggtgggactacagaaccttgctggaccacatcttttcagcacatttctgtgaccctctgtttttgatggagaaaacaacgctactgttatgaaacacagaatggagtcttcattaatcttccagcaggcatttccgaatcatctccaaggaaatctggtgtttgactatgccatcagcggaggcctagaacagtcactatcatttcaaaaactgccaggatatgcaggtaagtcctacatctccctgagacatgccacccagttaaacacctcctttgtatatgtatatagtcccacctcacagtggggcacaatgcctgccaccctcagaaaatgggttatgggtcagtaagacaacatatattgtgattattggcttttctctgtggtaagtacaggataaaacattaaattaccaaaaaacaaaacaaaacaaaacaaaaaacaaaaaactcaatcacgttgaagagttggtttgataaacaatgtatatggaagctttacaaagacaacaggaaaaaaaagaccttccgtggaagtcaggaatctaagtagcaaagacaactatatttcttatccccttatatttcttatccccatccaggtcactacctgtatgccaaacgatgaaggctaaaattatatggataaaaggacaaaattcctcaagactttgttacttgctgatgtacagtcagtaaattcttaaaagactttgtctta

SEQ ID NO: 380100 - DNA, 1608 bp, Homo sapiens
cgaactagaggatcccgatcagagcataccctttcaatacccaatcaaatgtgggagtcattccagagaaaagtggttaaaagtagtctagggcatagaaaaagaggactctcacagataccaaggagttttactaccaaggccagcatggtattgcaggacagtgctggggagttgtcacaagagtatgggtggacataacacatttgtccatacagaatgatgcatgccccgcatccagcttcccaccaagaagaaaaaagagaggaggatgaggaaagccatggagtgagtatgtatgtttctttttaaaatgaaaactctcttagctttgaacacatcctgagaatcctttcttctttctagtttaccaaagtgcttgttacagtgaaaaacacagcccacaggcactgaggtgggactacagaaccttgctggaccacatcttttcagcacatttctgtgaccctctgtttttgatggagaaaacaacgctactgttatgaaacacagaatggagtcttcattaatcttccagcagggtaagcgctctggcaggtttccaaagcatgagaagatgggggctctagtattccatcccaggacctctggcccttttgtctctctctgcaaggctcatagttggagggctgtatctccctttgtgttttcagaagcccagagtggcaaaataatttaaatggcaggaggtacaaagtacgttgtaaactaagcctccctgaatcctgctgtatttgctgttgatttgcttcaatttgtgatacagaatgaaatcacacttctctgcttttgttacattttccataataagtacatactaaattacagggatacattcactttaatgggcagagttgaaaattcaggttttgtttggggctgggaatgtgtgctgtgagaagagtgctctgcattttggagtatgggctccaaatgtggagctgccccactgctgccatgcagagatcaaacaagcaaaggagaagcactatggaaccacaaatgtgatgcatattaagggctaacagtttcataagtgattgtaatgcggcatcactttgtggtgacataactttaccatgcagagggccagtgagaacagatggatgcagacacagcgtttggttctgaaggtttttaagagttatggcttcatctcttgatcaggccaacaagcgcctactaccctatgtaaacaacggctttccctcaaagggagggccccacactgctctccactcttatcattttgtggctctctcctcctcacccacccaccccaatgcctggcagattaaattactgagaaatccacaaatctagcaactgaaaaaacaagtttttttaattgaattttatccaaactggagtttcaggtccctggagaaaaattataaagtctcttaacatccatcacctagttcctttaaagtgacctacatcagtcgttttttaactgccaaaaaacttattttgccaaaaaagccccacaaagatttagaaggaagaacatgtgccaacatatgttcttctggccattcctctgggccacaggaaattattccataagggcaaactctttttttc

SEQ ID NO: 380101 - DNA, 1617 bp, Homo sapiens
caaccacccagcttctctccagatggcatcccatcatccgcagcatctctcaacctttatctcctatctcctgcctcatctccttcctaagtaaagaacaccttccaactcaacataaggcagctacaggttggagtgcaatggcgcaatcttggctcacgacaacctccgcctcccgggtataagtgattctcctgcctcggcctcccgagtagctgagattacagaatgatgcatgccccgcatccagcttcccaccaagaagaaaaaagagaggaggatgaggaaagccatggagtgagtatgtatgtttctttttaaaatgaaaactctcttagctttgaacacatcctgagaatcctttcttctttctagtttaccaaagtgcttgttacagtgaaaaacacagcccacaggcactgaggtgggactacagaaccttgctggaccacatcttttcagcacatttctgtgaccctctgtttttgatggagaaaacaacgctactgttatgaaacacagaatggagtcttcattaatcttccagcagggtaagcgctctggcaggtttccaaagcatgagaagatgggggctctagtattccatcccaggacctctggcccttttgtctctctctgcaaggctcatagttggagggctgtatctccctttgtgttttcagaagcccagagtggcaaaataatttaaatggcaggaggtacaaagtacgttgtaaactaagcctccctgaatcctgctgtatttgctgttgatttgcttcaatttgtgatacagaatgaaatcacacttctctgcttttgttacattttccataataagtacatactaaattacagggatacattcactttaatgggcagagttgaaaattcaggttttgtttggggctgggaatgtgtgctgtgagaagagtgctctgcattttggagtatgggctccaaatgtggagctgccccactgctgccatgcagagatcaaacaagcaaaggagaagcactatggaaccacaaatgtgatgcatattaagggctaacagtttcataagtgattgtaatgcggcatcactttgtggtgacataactttaccatgcagagggccagtgagaacagatggatgcagacacagcgtttggttctgaaggtttttaagagttatggcttcatctcttgatcaggccaacaagcgcctactaccctatgtaaacaacggctttccctcaaagggagggccccacactgctctccactcttatcattttgtggctctctcctcctcacccacccaccccaatgcctggcagattaaattactgagaaatccacaaatctagcaactgaaaaaacaagtttttttaattgaattttatccaaactggagtttcaggtccctggagaaaaattataaagtctcttaacatccatcacctagttcctttaaagtgacctacatcagtcgttttttaactgccaaaaaacttattttgccaaaaaagccccacaaagatttagaaggaagaacatgtgccaacatatgttcttctggccattcctctgggccacaggaaattattccataagggcaaactctttttttc

SEQ ID NO: 380102 - DNA, 1469 bp, Homo sapiens
caaccacccagcttctctccagatggcatcccatcatccgcagcatctctcaacctttatctcctatctcctgcctcatctccttcctaagtaaagaacaccttccaactcaacataaggcagctacaggttggagtgcaatggcgcaatcttggctcacgacaacctccgcctcccgggtataagtgattctcctgcctcggcctcccgagtagctgagattacagtttaccaaagtgcttgttacagtgaaaaacacagcccacaggcactgaggtgggactacagaaccttgctggaccacatcttttcagcacatttctgtgaccctctgtttttgatggagaaaacaacgctactgttatgaaacacagaatggagtcttcattaatcttccagcagggtaagcgctctggcaggtttccaaagcatgagaagatgggggctctagtattccatcccaggacctctggcccttttgtctctctctgcaaggctcatagttggagggctgtatctccctttgtgttttcagaagcccagagtggcaaaataatttaaatggcaggaggtacaaagtacgttgtaaactaagcctccctgaatcctgctgtatttgctgttgatttgcttcaatttgtgatacagaatgaaatcacacttctctgcttttgttacattttccataataagtacatactaaattacagggatacattcactttaatgggcagagttgaaaattcaggttttgtttggggctgggaatgtgtgctgtgagaagagtgctctgcattttggagtatgggctccaaatgtggagctgccccactgctgccatgcagagatcaaacaagcaaaggagaagcactatggaaccacaaatgtgatgcatattaagggctaacagtttcataagtgattgtaatgcggcatcactttgtggtgacataactttaccatgcagagggccagtgagaacagatggatgcagacacagcgtttggttctgaaggtttttaagagttatggcttcatctcttgatcaggccaacaagcgcctactaccctatgtaaacaacggctttccctcaaagggagggccccacactgctctccactcttatcattttgtggctctctcctcctcacccacccaccccaatgcctggcagattaaattactgagaaatccacaaatctagcaactgaaaaaacaagtttttttaattgaattttatccaaactggagtttcaggtccctggagaaaaattataaagtctcttaacatccatcacctagttcctttaaagtgacctacatcagtcgttttttaactgccaaaaaacttattttgccaaaaaagccccacaaagatttagaaggaagaacatgtgccaacatatgttcttctggccattcctctgggccacaggaaattattccataagggcaaactctttttttc

SEQ ID NO: 380103 - DNA, 714 bp, Homo sapiens
ataatgaatagatgccactgttcacacatgaaattgggtgggataagattcagagggtccaggatgacttactatgggcacagtcacagtaagagctcaccatccatttctctatgtagcatttccgaatcatctccaaggaaatctggtgtttgactatgccatcagcggaggcctagaacagtcactatcatttcaaaaactgccaggatatgcaggtaagtcctacatctccctgagacatgccacccagttaaacacctcctttgtatatgtatatagtcccacctcacagtggggcacaatgcctgccaccctcagaaaatgggttatgggtcagtaagacaacatatattgtgattattggcttttctctgtggtaagtacaggataaaacattaaattaccaaaaaacaaaacaaaacaaaacaaaaaacaaaaaactcaatcacgttgaagagttggtttgataaacaatgtatatggaagctttacaaagacaacaggaaaaaaaagaccttccgtggaagtcaggaatctaagtagcaaagacaactatatttcttatccccttatatttcttatccccatccaggtcactacctgtatgccaaacgatgaaggctaaaattatatggataaaaggacaaaattcctcaagactttgttacttgctgatgtacagtcagtaaattcttaaaagactttgtctta

SEQ ID NO: 380104 - DNA, 695 bp, Homo sapiens
caaccacccagcttctctccagatggcatcccatcatccgcagcatctctcaacctttatctcctatctcctgcctcatctccttcctaagtaaagaacaccttccaactcaacataaggcagctacaggttggagtgcaatggcgcaatcttggctcacgacaacctccgcctcccgggtataagtgattctcctgcctcggcctcccgagtagctgagattacagaatgatgcatgccccgcatccagcttcccaccaagaagaaaaaagagaggaggatgaggaaagccatggagtgatttaccaaagtgcttgttacagtgaaaaacacagcccacaggcactgaggtgggactacagaaccttgctggaccacatcttttcagcacatttctgtgaccctctgtttttgatggagaaaacaacgctactgttatgaaacacagaatggagtcttcattaatcttccagcaggcatttccgaatcatctccaaggaaatctggtgtttgactatgccatcagcggaggcctagaacagtcactatcatttcaaaaactgccaggatatgcaggtcactacctgtatgccaaacgatgaaggctaaaattatatggataaaaggacaaaattcctcaagactttgttacttgctgatgtacagtcagtaaattcttaaaagactttgtctta

SEQ ID NO: 380105 - DNA, 325 bp, Homo sapiens
atgtgtcatgggccttgggtgagactcattgctgggctggcttcaggtgtgacccagagcatccccagctgtggtggccatggagaagggattccttctgtttgaagaaaggaaagggaagaataaagggaactttgccttgcagcttgggtaccagcttggccacagtgacgtagagcactaagtggacccctggggtttctgattctagactttggttcctggatgaaatgtttggtcccatcctgggccaaagggaggatactgcccttaacggagaggcacagggctgtcagcattcaccacaagctgaccgaagagccct

SEQ ID NO: 380106 - DNA, 521 bp, Homo sapiens
gttacattgttttgtttaattgcatctgacatccctttaaaattacttatcaagtcattacatctacctgcacttggatgtcctctcctttcctaagtcaacatgtcccaaactgaatccttcctcctcttgcctcgattttccctggcatgacttcatttctgcaaatgacactgcaatttccccaggcagccaggctcaaaccttcatctttcagtgattccctatcaaattcatcatccattctccagtacaaaatttaccagttctttctaccaaactccttctgtagttatttctttcctgcctcttcagctttgcacagggttctccttcataaccttttagtctttggttcaccaacctcctaactaccccctcatccttgaatcagctcaccgtcaacaatgggtcgtcttcctactgtgacagcacaaaccccaattcctgcctttcattcctcatttccctgcctcctcccctggcaatgattccctctagtttaaaaaatatatatatta

SEQ ID NO: 380107 - DNA, 480 bp, Homo sapiens
ccatgctattttgtttagtacagctctgtagcacaatttgaagtcagtggtatggtttggcttttagtatagctttgtagtacaatttgaagtcagtgatatggtttggccgtgtccccatccaaaatctcatctggaattataatccccataatccccaagtgtcaatggggggaccagatggagggaattggatcacgggagtggtttcccccatgctgttcttgttatagtgagtgagtgagtctcacaagatctgatggttttataggtgtttggcatttcccctgcttgcactcactctgtcctgctgccctgtaaagaaggtgcctgcttctcctttgccttctgccatgattgcaagtttcctgaggcctccccagcaatgcggaactgtgagtcaattaaacttctttcctttataaattacccagtctcaggtatttcttcataacagcgtgagaatggactaatagagtc

SEQ ID NO: 380108 - DNA, 539 bp, Homo sapiens
tatagaacccaacactcaataggaagattgtcagagttacattgtaagaagagcatgtagttgggagatatcattgtggccattttgggaaagatgcaacatgtcacaatgtcatgttctccatcgtctccccgttccaccttgtactggtttccaagggtagtcgtttaaaagtaccacaaaaactgggtggcttggaacaacagaaatttattgtttcacagttctggaggccagaagttcaaaatgaagtgttggcagaaacatgctgcctctaaagggactgggaaaggatctgttccaggcttccctcctatcttctggttgttccttgccttctggctgcgtaactctagtcttcatttggtgttctccctgcatgcatggctttgtgtccaaatttcctttttttcatgaggccatcagtcatactggattagggacccactctactactgcaggatgacctcaccttcccaaattacatctgcaacaaccctatttccaaagaaggccacattctgaggtactgggggtta

SEQ ID NO: 380109 - DNA, 366 bp, Homo sapiens
gtccttccctctccctgcgtcctcgagagaaaatattgaatagacaggaattcctgaagtctacacgcctcccatgatgacaggagtgttactgaaagagaacaaagcaaggagatacaatcttcaaggagttagcggggagtgactgtggagcggtcaggagatggctgaaaggctaatatactagacgctaatagtatgaggctaaatctaagagcttaaataatgggccaggaaaaatggtttgggagaggcattgagtggggcaccagcccctggtacaaccagacactgttgtaccactggtttggcaagaaaaacaaccacagtttaagtgtttaagagggctgtaagagttaaagagaa

SEQ ID NO: 380110 - DNA, 378 bp, Homo sapiens
ttttttgagatagagtcttgctttcttgccccggctggagtgcaatggcgcaatctctgctcactgcaatctctgcctcccaggctcaagcaattctcctgcctcagcctcccgagtagctgggattacaggcgcccaccaccacacccggctcatttttgtatttttagcagaggcggcgtttcaccatcttggccaggctggcttcaaactcctgacctcaaatgatctgcctgccttggcctcccaaactgctgggattacaagcgtgagccatcgcaccccacctactgtgctgtagtttaactgcccacttgtttgtatgaattatccaactccttgagggaaaggactatgctttattggctattgcatctc

SEQ ID NO: 380111 - DNA, 410 bp, Homo sapiens
atccatgaccacaacacagaagatttgtctcatttactccagagagaatgattcctctcaaagacaattctcacagctcttccttctcccttagaatatttagaagcaaattagggagctgtcaggtctctgagcccaagcctgcacgtatacatccagatggcctgaagcaactgaagaaccacaaaagaagtgaaaataaccaattcctgccttaactgatgacattccaccactgtgatttgttcctgccccaccttaactgatcaattagccttgtgacattccttctcctggacaattagactcaggagctccccaccagagcaccttgtgacccccgcccctgcccgctagagaataacccactttgaccgtaatttcccactaccaacccaaatcctataaaa

SEQ ID NO: 380112 - DNA, 837 bp, Homo sapiens
aaggggattactgctaaacagacaggcttaccagctgagaaagagaaaaggtaaggctggatcaggccagggattggtgaagggttcccccttaacatccgtttacggagggccagtcaggtgccatgccccaagctgggtcctggtcaggtgtcagtgaacaagactgtcttcacagagcctctggtctaggtgagcagatgttgctcaagaactacaaaagtaaaagtctaatgacagattgaggtacactctgaaaaagcacgtttcatgacaatcttaacagactggacccctgtcacacacacccacacatacacataccccttcccagcatctgcaagcatcacagatgtaccagaattgccctagcccccttgctcctcctccctgtgccaagacatctccagggagaacacacacatgggctcctgtctgcactctcagcagaggagcatgtgcgtgcacacctgcttatctgcagaggctggcctttgagcccctggatctgcgtgtgggttctagtcagtgtgtctgtgggtatggacacgggccctgtccacaatccaagcaggatagcacatcctgcgcaaccacagcctggcctcactttggggcaggagcagctcaaactaccagcctctgtggcctctgtttccttctccctttcttggccctcctctgctcctccccacaccctgcaggcaaaagaaacccccagcttcccccctccccgggagccaggtgggaaaagtgggtgtgatttttagattttgtattgtggactgattttgcctcacattaaaaactcatcccatggccagggcgggccactgt

SEQ ID NO: 380113 - DNA, 1599 bp, Homo sapiens
tgggaggcacgaggaacccttcctgttgccttaggggaacgtggctttccctgcagagccggtgtctccgcctgcgtccctgctgcagcaaccggagctggagtcggatcccgaacgcaccctcgccatggactcggccctcagcgatccgcataacggcagtgccgaggcaggcggccccaccaacagcactacgcggccgccttccacgcccgagggcatcgcgctggcctacggcagcctcctgctcatggcgctgctgcccatcttcttcggcgccctgcgctccgtacgctgcgcccgcggcaagaatgcttcagacatgcctgaaacaatcaccagccgggatgccgcccgcttccccatcatcgccagctgcacactcttggggctctacctctttttcaaaatattctcccaggagtacatcaacctcctgctgtccatgtatttcttcgtgctgggaatcctggccctgtcccacaccatcagccccttcatgaataagttttttccagccagctttccaaatcgacagtaccagctgctcttcacacagggttctggggaaaacaaggaagagatcatcaattatgaatttgacaccaaggacctggtgtgcctgggcctgagcagcatcgttggcgtctggtacctgctgaggaagcactggattgccaacaacctttttggcctggccttctcccttaatggagtagagctcctgcacctcaacaatgtcagcactggctgcatcctgctgggcggactcttcatctacgatgtcttctgggtatttggcaccaatgtgatggtgacagtggccaagtccttcgaggcaccaataaaattggtgtttccccaggatctgctggagaaaggcctcgaagcaaacaactttgccatgctgggacttggagatgtcgtcattccagggatcttcattgccttgctgctgcgctttgacatcagcttgaagaagaatacccacacctacttctacaccagctttgcagcctacatcttcggcctgggccttaccatcttcatcatgcacatcttcaagcatgctcagcctgccctcctatacctggtccccgcctgcatcggttttcctgtcctggtggcgctggccaagggagaagtgacagagatgttcagttatgaggagtcaaatcctaaggatccagcggcagtgacagaatccaaagagggaacagaggcatcagcatcgaaggggctggagaagaaagagaaatgatgcagctggtgcccgagcctctcagggccagaccagacagatgggggctgggcccacacaggcgtgcaccggtagagggcacaggaggccaagggcagctccaggacagggcagggggcagcaggatacctccagccaggcctctgtggcctctgtttccttctccctttcttggccctcctctgctcctccccacaccctgcaggcaaaagaaacccccagcttcccccctccccgggagccaggtgggaaaagtgggtgtgatttttagattttgtattgtggactgattttgcctcacattaaaaactcatcccatggccagggcgggccactgt

SEQ ID NO: 380114 - DNA, 1353 bp, Homo sapiens
  misc_feature (36)..(36): n is a, c, g, or t
aaatgagcgatagtagaggcccgggttatttagagnatgagggaaagcggtgcccggtaaaagagccggtgtctccgcctgcgtccctgctgcagcaaccggagctggagtcggatcccgaacgcaccctcgccatggactcggccctcagcgatccgcataacggcagtgccgaggcaggcggccccaccaacagcactacgcggccgccttccacgcccgagggcatcgcgctggcctacggcagcctcctgctcatggcgctgctgcccatcttcttcggcgccctgcgctccgtacgctgcgcccgcggcaagaatgcttcagacatgcctgaaacaatcaccagccgggatgccgcccgcttccccatcatcgccagctgcacactcttggggctctacctctttttcaaaatattctcccaggagtacatcaacctcctgctgtccatgtatttcttcgtgctgggaatcctggccctgtcccacaccatcagtcagaaggcatctctctgcaacatttgaagcagctttctcgggaaccagtacagggtcttggatgagaacatgacttttggcatcattcagagccaggtttgaatcctggctataaaactcaagggactctttcccctgcacactgtagatgactaggacaagaacaatgacctctctgggccacagtttccttatagacatgatgaggatctggtgggtgtttccaccaccacagctgttgggaaagtgatttgtgagcagtaatgtcatgttagttgtgacagtactcaggtgagtaacaccagtaccacctgccgggtgttgtggcctagctgtgtgctaagtgccatgttgggctcctcacacatgatcgtgtttcgtaaggagccagaggcagcatagtgaaaagttaggagcgtgggctctggcatttgactaccttactttgagtccagactctgccacttaatagctctgtgatcttgggcaagttacttaatctctctggcctcaatttcctggtgaatgtggagaaaaataatagtgcccttcccatggggtcatgtggaaagcttttagcacagtatctggtgatttaaagtgttcagtaactattagctgttactgtcattatctgtgttaacctgccagacaaccttatatgggttgcttttgctttcacacctgtatgatagtcatggaaactgaagcccagagaggttaagaaatttgctaggatcacaccactaataagcaacagagcccggattcaaaccggtgtggtccagaggccatcctcttcccactgctaccctaactcaaactgccacatgctcgtgtcctttcagtgggg

SEQ ID NO: 380115 - DNA, 1181 bp, Homo sapiens
gatgagcaacttggacagcaacagggacaacgaggtggacttccaagagtactgtgtcttcctgtcctgcatcgccatgatgtgtaacgaattctttgaaggcttcccagataagcagcccaggaagaaatgaaaactcctctgatgtggttggggggtctgccactggggcagcgggcagccacttcgtgggcagcgctgcccacgaagtgacagagatgttcagttatgaggagtcaaatcctaaggatccagcggcagtgacagaatccaaagagggaacagaggcatcagcatcgaaggggctggagaagaaagagaaatgatgcagctggtgcccgagcctctcagggccagaccagacagatgggggctgggcccacacaggcgtgcaccggtagagggcacaggaggccaagggcagctccaggacagggcagggggcagcaggatacctccagccaggcctctgtggcctctgtttccttctccctttcttggccctcctctgctcctccccacaccctgcaggcaaaagaaacccccagcttcccccctccccgggagccaggtgggaaaagtgggtgtgatttttagattttgtattgtggactgattttgcctcacattaaaaactcatcccatggccagggcgggccactgtaaaaaagcaataatgatgtaatatgaaaacacaggcaagctcaaagagaatagcgacagaaagggcggggcgcgagcttatgagaagattaatccccgcagagggggcacaacagattatgctgacacccgagttttgtttgctacaagaggttggcacccacatagaagagagcgcttataattcgaacaggcgagacagacgaggtcaccgcgtgtattatacaaacacgtcctatagcgagggaaaaacaaacggagtgacaagtgggagaccactattgaaaaaagcagcccaccacctcaaacattgtgggtggggtgtaggccaaaaaggatggtggggaaacaaccttcaccacgaagagtaagtataaagacggcctagggcagaaacataattaagatctttgatggaataataatggtgttgaaccaaagacgcgccataaaaatcgtgagcacgcactaaagatatgtgccgccgagagtttattgtcctgacaaacttttaacgg

SEQ ID NO: 380116 - DNA, 785 bp, Homo sapiens
aaggggattactgctaaacagacaggcttaccagctgagaaagagaaaaggtaaggctggatcaggccagggattggtgaagggttcccccttaacatccgtttacggagggccagtcaggtgccatgccccaagctgggtcctggtcaggtgtcagtgaacaagactgtcttcacagagcctctggtctaggtgagcagatgttgctcaagaactacaaaagtaaaagtctaatgacagattgaggtacactctgaaaaagcacgtttcatgacaatcttaacagactggacccctgtcacacacacccacacatacacataccccttcccagcatctgcaagcatcacagatgtaccagaattgccctagcccccttgctcctcctccctgtgccaagacatctccagggagaacacacacatgggctcctgtctgcactctcagcagaggagcatgtgcgtgcacacctgcttatctgcagaggctggcctttgagcccctggatctgcgtgtgggttctagtcagtgtgtctgtgggtatggacacgggccctgtccacaatccaagcaggatagcacatcctgcgcaaccacagcctggcctcactttggggcaggagcagctcaaactaccagtcaggaaagagactaagggcaaagctgagctgctgaagtggctgaggctcgggtgtgtctgcttatctgggcccagttgtgacaggggcagtgaacccaagggacatacttgtcttcctagcctcagagtgagagggttagaagct

SEQ ID NO: 380117 - DNA, 725 bp, Homo sapiens
cttggggacaggtctcagggagctttgggagcaggcatggcacccgatccctgagcttagcacccatccttcaccctccctctgcttcccatccagcccaggtttccctgcccctccccttggggtaaccacccaatgctattgtgccctcatcaggcaaagctctgaatacacaaggcagagggtgcccctggcctttacctgcttggtgctaaatgctctgccatacaggtaccctgcccccactgtttgccctccactcccaccctggacattcttagattggggtaaaaagcaagtgatctctctctctctctctctccctcctttctccccatttctctcccaattctccacctttttacttttcccttctattctcctcctttttttattgatttacttatttttatattggtaccacattcacatagtaggccagcagtgttacacagacattcagacacctgtgcactgatgtgtgtatactttttcttgcacagacggtggcattcttggagcattctgcacattgggtttctacggtatttcttagaggtgtttccacagcagcacatacacttctagagcatgcttgttcttctgcacagtggcctgatgtgcctttgtctaggtgcatctttcttttttcattctccaaataatatcagcttctttccataaaatctggaagtgcaaaaataggtaaaaacaagacagttctg

SEQ ID NO: 380118 - DNA, 1789 bp, Homo sapiens
tgggaggcacgaggaacccttcctgttgccttaggggaacgtggctttccctgcagagccggtgtctccgcctgcgtccctgctgcagcaaccggagctggagtcggatcccgaacgcaccctcgccatggactcggccctcagcgatccgcataacggcagtgccgaggcaggcggccccaccaacagcactacgcggccgccttccacgcccgagggcatcgcgctggcctacggcagcctcctgctcatggcgctgctgcccatcttcttcggcgccctgcgctccgtacgctgcgcccgcggcaagaatgcttcagacatgcctgaaacaatcaccagccgggatgccgcccgcttccccatcatcgccagctgcacactcttggggctctacctctttttcaaaatattctcccaggagtacatcaacctcctgctgtccatgtatttcttcgtgctgggaatcctggccctgtcccacaccatcagccccttcatgaataagttttttccagccagctttccaaatcgacagtaccagctgctcttcacacagggttctggggaaaacaaggaagagatcatcaattatgaatttgacaccaaggacctggtgtgcctgggcctgagcagcatcgttggcgtctggtacctgctgaggaagcactggattgccaacaacctttttggcctggccttctcccttaatggagtagagctcctgcacctcaacaatgtcagcactggctgcatcctgctgggcggactcttcatctacgatgtcttctgggtatttggcaccaatgtgatggtgacagtggccaagtccttcgaggcaccaataaaattggtgtttccccaggatctgctggagaaaggcctcgaagcaaacaactttgccatgctgggacttggagatgtcgtcattccagggatcttcattgccttgctgctgcgctttgacatcagcttgaagaagaatacccacacctacttctacaccagctttgcagcctacatcttcggcctgggccttaccatcttcatcatgcacatcttcaagcatgctcagcctgccctcctatacctggtccccgcctgcatcggttttcctgtcctggtggcgctggccaagggagaagtgacagagatgttcagttatgaggagtcaaatcctaaggatccagcggcagtgacagaatccaaagagggaacagaggcatcagcatcgaaggggctggagaagaaagagaaatgatgcagctggtgcccgagcctctcagggccagaccagacagatgggggctgggcccacacaggcgtgcaccggtagagggcacaggaggccaagggcagctccaggacagggcagggggcagcaggatacctccagccaggcctctgtggcctctgtttccttctccctttcttggccctcctctgctcctccccacaccctgcaggcaaaagaaacccccagcttcccccctccccgggagccaggtgggaaaagtgggtgtgatttttagattttgtattgtggactgattttgcctcacattaaaaactcatcccatggccagggcgggccactgtgccactgtgctcctggaaaaaatctgtttaagcacccagtgtcttgccctgggttttctaggtctcacctgcccacccaaaatcttttctgcaagccccttaagggtgcccaccccagtgcctggccagccctgcacccgtaaaacaccttttagccagtagagggggcccacgagccctctctcaccag

SEQ ID NO: 380119 - DNA, 1746 bp, Homo sapiens
tgggaggcacgaggaacccttcctgttgccttaggggaacgtggctttccctgcagagccggtgtctccgcctgcgtccctgctgcagcaaccggagctggagtcggatcccgaacgcaccctcgccatggactcggccctcagcgatccgcataacggcagtgccgaggcaggcggccccaccaacagcactacgcggccgccttccacgcccgagggcatcgcgctggcctacggcagcctcctgctcatggcgctgctgcccatcttcttcggcgccctgcgctccgtacgctgcgcccgcggcaagaatgcttcagacatgcctgaaacaatcaccagccgggatgccgcccgcttccccatcatcgccagctgcacactcttggggctctacctctttttcaaaatattctcccaggagtacatcaacctcctgctgtccatgtatttcttcgtgctgggaatcctggccctgtcccacaccatcagccccttcatgaataagttttttccagccagctttccaaatcgacagtaccagctgctcttcacacagggttctggggaaaacaaggaagagatcatcaattatgaatttgacaccaaggacctggtgtgcctgggcctgagcagcatcgttggcgtctggtacctgctgaggaagcactggattgccaacaacctttttggcctggccttctcccttaatggagtagagctcctgcacctcaacaatgtcagcactggctgcatcctgctgggcggactcttcatctacgatgtcttctgggtatttggcaccaatgtgatggtgacagtggccaagtccttcgaggcaccaataaaattggtgtttccccaggatctgctggagaaaggcctcgaagcaaacaactttgccatgctgggacttggagatgtcgtcattccagggatcttcattgccttgctgctgcgctttgacatcagcttgaagaagaatacccacacctacttctacaccagctttgcagcctacatcttcggcctgggccttaccatcttcatcatgcacatcttcaagcatgctcagcctgccctcctatacctggtccccgcctgcatcggttttcctgtcctggtggcgctggccaagggagaagtgacagagatgttcagctacgagtcctcggcggaaatcctgcctcataccccgaggctcacccacttccccacagtctcgggctccccagccagcctggccgactccatgcagcagaagctagctggccctcgccgccggcgcccgcagaatcccagcgccatttatgaggagtcaaatcctaaggatccagcggcagtgacagaatccaaagagggaacagaggcatcagcatcgaaggggctggagaagaaagagaaatgatgcagctggtgcccgagcctctcagggccagaccagacagatgggggctgggcccacacaggcgtgcaccggtagagggcacaggaggccaagggcagctccaggacagggcagggggcagcaggatacctccagccaggcctctgtggcctctgtttccttctccctttcttggccctcctctgctcctccccacaccctgcaggcaaaagaaacccccagcttcccccctccccgggagccaggtgggaaaagtgggtgtgatttttagattttgtattgtggactgattttgcctcacattaaaaactcatcccatggccagggcgggccactgt

SEQ ID NO: 380120 - DNA, 1802 bp, Homo sapiens
tgggaggcacgaggaacccttcctgttgccttaggggaacgtggctttccctgcagagccggtgtctccgcctgcgtccctgctgcagcaaccggagctggagtcggatcccgaacgcaccctcgccatggactcggccctcagcgatccgcataacggcagtgccgaggcaggcggccccaccaacagcactacgcggccgccttccacgcccgagggcatcgcgctggcctacggcagcctcctgctcatggcgctgctgcccatcttcttcggcgccctgcgctccgtacgctgcgcccgcggcaagaatgcttcagacatgcctgaaacaatcaccagccgggatgccgcccgcttccccatcatcgccagctgcacactcttggggctctacctctttttcaaaatattctcccaggagtacatcaacctcctgctgtccatgtatttcttcgtgctgggaatcctggccctgtcccacaccatcagccccttcatgaataagttttttccagccagctttccaaatcgacagtaccagctgctcttcacacagggttctggggaaaacaaggaagagatcatcaattatgaatttgacaccaaggacctggtgtgcctgggcctgagcagcatcgttggcgtctggtacctgctgaggaagcactggattgccaacaacctttttggcctggccttctcccttaatggagtagagctcctgcacctcaacaatgtcagcactggctgcatcctgctgggcggactcttcatctacgatgtcttctgggtatttggcaccaatgtgatggtgacagtggccaagtccttcgaggcaccaataaaattggtgtttccccaggatctgctggagaaaggcctcgaagcaaacaactttgccatgctgggacttggagatgtcgtcattccagggatcttcattgccttgctgctgcgctttgacatcagcttgaagaagaatacccacacctacttctacaccagctttgcagcctacatcttcggcctgggccttaccatcttcatcatgcacatcttcaagcatgctcagcctgccctcctatacctggtccccgcctgcatcggttttcctgtcctggtggcgctggccaagggagaagtgacagagatgttcagctacgagtcctcggcggaaatcctgcctcataccccgaggctcacccacttccccacagtctcgggctccccagccagcctggccgactccatgcagcagaagctagctggccctcgccgccggcgcccgcagaatcccagcgccatgtaatgcccagcgggtgcccacctgcccgcttccccctactgccccggggcccaagttatgaggagtcaaatcctaaggatccagcggcagtgacagaatccaaagagggaacagaggcatcagcatcgaaggggctggagaagaaagagaaatgatgcagctggtgcccgagcctctcagggccagaccagacagatgggggctgggcccacacaggcgtgcaccggtagagggcacaggaggccaagggcagctccaggacagggcagggggcagcaggatacctccagccaggcctctgtggcctctgtttccttctccctttcttggccctcctctgctcctccccacaccctgcaggcaaaagaaacccccagcttcccccctccccgggagccaggtgggaaaagtgggtgtgatttttagattttgtattgtggactgattttgcctcacattaaaaactcatcccatggccagggcgggccactgt

SEQ ID NO: 380121 - DNA, 1513 bp, Homo sapiens
tgggaggcacgaggaacccttcctgttgccttaggggaacgtggctttccctgcagagccggtgtctccgcctgcgtccctgctgcagcaaccggagctggagtcggatcccgaacgcaccctcgccatggactcggccctcagcgatccgcataacggcagtgccgaggcaggcggccccaccaacagcactacgcggccgccttccacgcccgagggcatcgcgctggcctacggcagcctcctgctcatggcgctgctgcccatcttcttcggcgccctgcgctccgtacgctgcgcccgcggcaagaatgcttcagacatgcctgaaacaatcaccagccgggatgccgcccgcttccccatcatcgccagctgcacactcttggggctctacctctttttcaaaatattctcccaggagtacatcaacctcctgctgtccatgtatttcttcgtgctgggaatcctggccctgtcccacaccatcagccccttcatgaataagttttttccagccagctttccaaatcgacagtaccagctgctcttcacacagggttctggggaaaacaaggaagagatcatcaattatgaatttgacaccaaggacctggtgtgcctgggcctgagcagcatcgttggcgtctggtacctgctgaggaagcactggattgccaacaacctttttggcctggccttctcccttaatggagtagagctcctgcacctcaacaatgtcagcactggctgcatcctgctgggcggactcttcatctacgatgtcttctgggtatttggcaccaatgtgatggtgacagtggccaagtccttcgaggcaccaataaaattggtgtttccccaggatctgctggagaaaggcctcgaagcaaacaactttgccatgctgggacttggagatgtcgtcattccagggatcttcattgccttgctgctgcgctttgacatcagcttgaagaagaatacccacacctacttctacaccagctttgcagcctacatcttcggcctgggccttaccatcttcatcatgcacatcttcaagcatgctcagttatgaggagtcaaatcctaaggatccagcggcagtgacagaatccaaagagggaacagaggcatcagcatcgaaggggctggagaagaaagagaaatgatgcagctggtgcccgagcctctcagggccagaccagacagatgggggctgggcccacacaggcgtgcaccggtagagggcacaggaggccaagggcagctccaggacagggcagggggcagcaggatacctccagccaggcctctgtggcctctgtttccttctccctttcttggccctcctctgctcctccccacaccctgcaggcaaaagaaacccccagcttcccccctccccgggagccaggtgggaaaagtgggtgtgatttttagattttgtattgtggactgattttgcctcacattaaaaactcatcccatggccagggcgggccactgt

SEQ ID NO: 380122 - DNA, 1500 bp, Homo sapiens
tgggaggcacgaggaacccttcctgttgccttaggggaacgtggctttccctgcagagccggtgtctccgcctgcgtccctgctgcagcaaccggagctggagtcggatcccgaacgcaccctcgccatggactcggccctcagcgatccgcataacggcagtgccgaggcaggcggccccaccaacagcactacgcggccgccttccacgcccgagggcatcgcgctggcctacggcagcctcctgctcatggcgctgctgcccatcttcttcggcgccctgcgctccgtacgctgcgcccgcggcaagaatgcttcagacatgcctgaaacaatcaccagccgggatgccgcccgcttccccatcatcgccagctgcacactcttggggctctacctctttttcaaaatattctcccaggagtacatcaacctcctgctgtccatgtatttcttcgtgctgggaatcctggccctgtcccacaccatcagccccttcatgaataagttttttccagccagctttccaaatcgacagtaccagctgctcttcacacagggttctggggaaaacaaggaagagatcatcaattatgaatttgacaccaaggacctggtgtgcctgggcctgagcagcatcgttggcgtctggtacctgctgaggaagcactggattgccaacaacctttttggcctggccttctcccttaatggagtagagctcctgcacctcaacaatgtcagcactggctgcatcctgctgggcggactcttcatctacgatgtcttctgggtatttggcaccaatgtgatggtgacagtggccaagtccttcgaggcaccaataaaattggtgtttccccaggatctgctggagaaaggcctcgaagcaaacaactttgccatgctgggacttggagatgtcgtcattccagggatcttcattgccttgctgctgcgctttgacatcagcttgaagaagaatacccacacctacttctacaccagctttgcagcctacatcttcggcctgggccttaccatcttcatcatgcacatcttcaagcatgctcagcctgccctcctatacctggtccccgcctgcatcggttttcctgtcctggtggcgctggccaagggagaagtgacagagatgttcagttatgaggagtcaaatcctaaggatccagcggcagtgacagaatccaaagagggaacagaggcatcagcatcgaaggggctggagaagaaagagaaatgatgcagctggtgcccgagcctctcagggccagaccagacagatgggggctgggcccacacaggcgtgcaccggtagagggcacaggaggccaagggcagctccaggagcaaaagaaacccccagcttcccccctccccgggagccaggtgggaaaagtgggtgtgatttttagattttgtattgtggactgattttgcctcacattaaaaactcatcccatggccagggcgggccactgt

SEQ ID NO: 380123 - DNA, 1731 bp, Homo sapiens
  misc_feature (1722)..(1722): n is a, c, g, or t
  misc_feature (1724)..(1724): n is a, c, g, or t
  misc_feature (1726)..(1730): n is a, c, g, or t
tgggaggcacgaggaacccttcctgttgccttaggggaacgtggctttccctgcagagccggtgtctccgcctgcgtccctgctgcagcaaccggagctggagtcggatcccgaacgcaccctcgccatggactcggccctcagcgatccgcataacggcagtgccgaggcaggcggccccaccaacagcactacgcggccgccttccacgcccgagggcatcgcgctggcctacggcagcctcctgctcatggcgctgctgcccatcttcttcggcgccctgcgctccgtacgctgcgcccgcggcaagaatgcttcagacatgcctgaaacaatcaccagccgggatgccgcccgcttccccatcatcgccagctgcacactcttggggctctacctctttttcaaaatattctcccaggagtacatcaacctcctgctgtccatgtatttcttcgtgctgggaatcctggccctgtcccacaccatcagccccttcatgaataagttttttccagccagctttccaaatcgacagtaccagctgctcttcacacagggttctggggaaaacaaggaagagatcatcaattatgaatttgacaccaaggacctggtgtgcctgggcctgagcagcatcgttggcgtctggtacctgctgaggaagcactggattgccaacaacctttttggcctggccttctcccttaatggagtagagctcctgcacctcaacaatgtcagcactggctgcatcctgctgggcggactcttcatctacgatgtcttctgggtatttggcaccaatgtgatggtgacagtggccaagtccttcgaggcaccaataaaattggtgtttccccaggatctgctggagaaaggcctcgaagcaaacaactttgccatgctgggacttggagatgtcgtcattccagggatcttcattgccttgctgctgcgctttgacatcagcttgaagaagaatacccacacctacttctacaccagctttgcagcctacatcttcggcctgggccttaccatcttcatcatgcacatcttcaagcatgctcagcctgccctcctatacctggtccccgcctgcatcggttttcctgtcctggtggcgctggccaagggagaagtgacagagatgttcaggtaaggcagagtggggggcagatgtcctcatgggcaccagtgtgcctgctggcagtcagtggaacctgctgggggtatctttacacctctccaggggaacattgttcctgccaccagccccaccccttgcctttttcagcagtacatgggtacctggcctgtggacaccagtgggaaccttaccctgggccaggagccaggggagcgcaaggcatcagagccctctaggcatcccccatccaaatgttagctggatcttaagaatagctgttgtggatttttctctgcctactgtcagaagtcctaggtgactctgcccccaggtgacttcaggcatgtcttcccctcccatggcctcagttttcacatgtgagtaatagaacagggggcgtgtgggatgccctagtgtggtagaaagtgccccgagtagaaggcaggtgtcagtccctgttcattcacctctgtggctttaacccacagctcactgctttctctatatctgtatctcacacagataccccttccccagggccatatccacacctatcacaccccatcctnanannnnna

SEQ ID NO: 380124 - DNA, 1508 bp, Homo sapiens
tgggaggcacgaggaacccttcctgttgccttaggggaacgtggctttccctgcagagccggtgtctccgcctgcgtccctgctgcagcaaccggagctggagtcggatcccgaacgcaccctcgccatggactcggccctcagcgatccgcataacggcagtgccgaggcaggcggccccaccaacagcactacgcggccgccttccacgcccgagggcatcgcgctggcctacggcagcctcctgctcatggcgctgctgcccatcttcttcggcgccctgcgctccgtacgctgcgcccgcggcaagaatgcttcagacatgcctgaaacaatcaccagccgggatgccgcccgcttccccatcatcgccagctgcacactcttggggctctacctctttttcaaaatattctcccaggagtacatcaacctcctgctgtccatgtatttcttcgtgctgggaatcctggccctgtcccacaccatcagccccttcatgaataagttttttccagccagctttccaaatcgacagtaccagctgctcttcacacagggttctggggaaaacaaggaagagatcatcaattatgaatttgacaccaaggacctggtgtgcctgggcctgagcagcatcgttggcgtctggtacctgctgaggaagcactggattgccaacaacctttttggcctggccttctcccttaatggagtagagctcctgcacctcaacaatgtcagcactggctgcatcctgctgggcggactcttcatctacgatgtcttctgggtatttggcaccaatgtgatggtgacagtggccaagtccttcgaggcaccaataaaattggtgtttccccaggatctgctggagaaaggcctcgaagcaaacaactttgccatgctgggacttggagatgtcgtcattccagggatcttcattgccttgctgctgcgctttgacatcagcttgaagaagaatacccacacctacttctacaccagctttgcagcctacatcttcggcctgggccttaccatcttcatcatgcacatcttcaagcatgctcagcctgccctcctatacctggtccccgcctgcatcggttttcctgtcctggtggcgctggccaagggagaagtgacagagatgttcagttaaaaattccaaagctgtaacagagagagcaccctcatgctccagctaccccacagaggccagcagtgttacacagacattcagacacctgtgcactgatgtgtgtatactttttcttgcacagacggtggcattcttggagcattctgcacattgggtttctacggtatttcttagaggtgtttccacagcagcacatacacttctagagcatgcttgttcttctgcacagtggcctgatgtgcctttgtctaggtgcatctttcttttttcattctccaaataatatcagcttctttccataaaatctggaagtgcaaaaataggtaaaaacaagacagttctg

SEQ ID NO: 380125 - DNA, 1397 bp, Homo sapiens
tgggaggcacgaggaacccttcctgttgccttaggggaacgtggctttccctgcagagccggtgtctccgcctgcgtccctgctgcagcaaccggagctggagtcggatcccgaacgcaccctcgccatggactcggccctcagcgatccgcataacggcagtgccgaggcaggcggccccaccaacagcactacgcggccgccttccacgcccgagggcatcgcgctggcctacggcagcctcctgctcatggcgctgctgcccatcttcttcggcgccctgcgctccgtacgctgcgcccgcggcaagaatgcttcagacatgcctgaaacaatcaccagccgggatgccgcccgcttccccatcatcgccagctgcacactcttggggctctacctctttttcaaaatattctcccaggagtacatcaacctcctgctgtccatgtatttcttcgtgctgggaatcctggccctgtcccacaccatcagccccttcatgaataagttttttccagccagctttccaaatcgacagtaccagctgctcttcacacagggttctggggaaaacaaggaagagatcatcaattatgaatttgacaccaaggacctggtgtgcctgggcctgagcagcatcgttggcgtctggtacctgctgaggaagcactggattgccaacaacctttttggcctggccttctcccttaatggagtagagctcctgcacctcaacaatgtcagcactggctgcatcctgctgggcggactcttcatctacgatgtcttctgggtatttggcaccaatgtgatggtgacagtggccaagtccttcgaggcaccaataaaattggtgtttccccaggatctgctggagaaaggcctcgaagcaaacaactttgccatgctgggacttggagatgtcgtcattccagggatcttcattgccttgctgctgcgctttgacatcagcttgaagaagaatacccacacctacttctacaccagctttgcagcctacatcttcggcctgggccttaccatcttcatcatgcacatcttcaagcatgctcagttatgaggagtcaaatcctaaggatccagcggcagtgacagaatccaaagagggaacagaggcatcagcatcgaaggggctggagaagaaagagaaatgatgcagctggtgcccgagcctctcagggccagaccagacagatgggggctgggcccacacaggcgtgcaccggtagagggcacaggaggccaagggcagctccaggacaaccggagctggagtcggatcccgaacgcaccctcgccatggactcggccctcagcgatccgcataagcgcagtgccgaggcaggcggccctcaccaagcagcactaccggttcc

SEQ ID NO: 380126 - DNA, 1998 bp, Homo sapiens
tgggaggcacgaggaacccttcctgttgccttaggggaacgtggctttccctgcagagccggtgtctccgcctgcgtccctgctgcagcaaccggagctggagtcggatcccgaacgcaccctcgccatggactcggccctcagcgatccgcataacggcagtgccgaggcaggcggccccaccaacagcactacgcggccgccttccacgcccgagggcatcgcgctggcctacggcagcctcctgctcatggcgctgctgcccatcttcttcggcgccctgcgctccgtacgctgcgcccgcggcaagaatgcttcagacatgcctgaaacaatcaccagccgggatgccgcccgcttccccatcatcgccagctgcacactcttggggctctacctctttttcaaaatattctcccaggagtacatcaacctcctgctgtccatgtatttcttcgtgctgggaatcctggccctgtcccacaccatcagccccttcatgaataagttttttccagccagctttccaaatcgacagtaccagctgctcttcacacagggttctggggaaaacaaggaagagatcatcaattatgaatttgacaccaaggacctggtgtgcctgggcctgagcagcatcgttggcgtctggtacctgctgaggaagcactggattgccaacaacctttttggcctggccttctcccttaatggagtagagctcctgcacctcaacaatgtcagcactggctgcatcctgctgggcggactcttcatctacgatgtcttctgggtatttggcaccaatgtgatggtgacagtggccaagtccttcgaggcaccaataaaattggtgtttccccaggatctgctggagaaaggcctcgaagcaaacaactttgccatgctgggacttggagatgtcgtcattccagggatcttcattgccttgctgctgcgctttgacatcagcttgaagaagaatacccacacctacttctacaccagctttgcagcctacatcttcggcctgggccttaccatcttcatcatgcacatcttcaagcatgctcagggtgggcaggacggtatcagagtgtcaggaatgcctcactgcaaatagagggacttacagagggatttatttgtaaatgcaagcagtccagagataggcactccccactggtgttggagcagtcatgtctgtgattctcttggccttccatttgtggttgcaagatggctgccactgctctaggcagcatgggcacgttagaggcaagaaggagggaaaagcgtaacagccatgcctgctgccttcatcaggaaggcaggaactttcccagaaccctttcagcatctcatgggccagactggggtcctaaagccaccctggctacaggagagtccaggaaagaggatttggcttctcagccttggtagtgggaagcaggcagagaagaacaggattggagtgggtgttgggtattggggcgtccctccccctactccctagtagaccaggctctgcctccttctcccaccaagatgaggatggagtactgagctgccacagaatgaagcaacatagcacaaagactgggagccctcagtgtggcctggagaggggaagattcaggggaaagtgagcagacaggattgccctactttctactggaaataataagagctcctgtttgttaagcacttccacatgtcaggctctgcactcatgaggatccttgtgaacaggtggggaaactggagttcaggtgacacactgcaagtatgtggtaaagccaggattcaaacctgggtcagcatggaaaccacacccaggctctcaagccctggccatgggaaacgcagcattgaacaggggctaagggagccctgttgtgaatcccagcaccacccagtaaccatggaactctgggcttgctgcttctgtcccctttccccttccccagggcccaaatacagacgagccatctttga

SEQ ID NO: 380127 - DNA, 1500 bp, Homo sapiens
tgggaggcacgaggaacccttcctgttgccttaggggaacgtggctttccctgcagagccggtgtctccgcctgcgtccctgctgcagcaaccggagctggagtcggatcccgaacgcaccctcgccatggactcggccctcagcgatccgcataacggcagtgccgaggcaggcggccccaccaacagcactacgcggccgccttccacgcccgagggcatcgcgctggcctacggcagcctcctgctcatggcgctgctgcccatcttcttcggcgccctgcgctccgtacgctgcgcccgcggcaagatattctcccaggagtacatcaacctcctgctgtccatgtatttcttcgtgctgggaatcctggccctgtcccacaccatcagccccttcatgaataagttttttccagccagctttccaaatcgacagtaccagctgctcttcacacagggttctggggaaaacaaggaagagatcatcaattatgaatttgacaccaaggacctggtgtgcctgggcctgagcagcatcgttggcgtctggtacctgctgaggaagcactggattgccaacaacctttttggcctggccttctcccttaatggagtagagctcctgcacctcaacaatgtcagcactggctgcatcctgctgggcggactcttcatctacgatgtcttctgggtatttggcaccaatgtgatggtgacagtggccaagtccttcgaggcaccaataaaattggtgtttccccaggatctgctggagaaaggcctcgaagcaaacaactttgccatgctgggacttggagatgtcgtcattccagggatcttcattgccttgctgctgcgctttgacatcagcttgaagaagaatacccacacctacttctacaccagctttgcagcctacatcttcggcctgggccttaccatcttcatcatgcacatcttcaagcatgctcagcctgccctcctatacctggtccccgcctgcatcggttttcctgtcctggtggcgctggccaagggagaagtgacagagatgttcagttatgaggagtcaaatcctaaggatccagcggcagtgacagaatccaaagagggaacagaggcatcagcatcgaaggggctggagaagaaagagaaatgatgcagctggtgcccgagcctctcagggccagaccagacagatgggggctgggcccacacaggcgtgcaccggtagagggcacaggaggccaagggcagctccaggacagggcagggggcagcaggatacctccagccaggcctctgtggcctctgtttccttctccctttcttggccctcctctgctcctccccacaccctgcaggcaaaagaaacccccagcttcccccctccccgggagccaggtgggaaaagtgggtgtgatttttagattttgtattgtggactgattttgcctcacattaaaaactcatcccatggccagggcgggccactgt

SEQ ID NO: 380128 - DNA, 1704 bp, Homo sapiens
tgggaggcacgaggaacccttcctgttgccttaggggaacgtggctttccctgcagagccggtgtctccgcctgcgtccctgctgcagcaaccggagctggagtcggatcccgaacgcaccctcgccatggactcggccctcagcgatccgcataacggcagtgccgaggcaggcggccccaccaacagcactacgcggccgccttccacgcccgagggcatcgcgctggcctacggcagcctcctgctcatggcgctgctgcccatcttcttcggcgccctgcgctccgtacgctgcgcccgcggcaagaatgcttcagacatgcctgaaacaatcaccagccgggatgccgcccgcttccccatcatcgccagctgcacactcttggggctctacctctttttcaaaatattctcccaggagtacatcaacctcctgctgtccatgtatttcttcgtgctgggaatcctggccctgtcccacaccatcagtcagaaggcatctctctgcaacatttgaagcagctttctcgggaaccagtacagggtcttggatgagaacatgacttttggcatcattcagagccaggtttgaatccccttcatgaataagttttttccagccagctttccaaatcgacagtaccagctgctcttcacacagggttctggggaaaacaaggaagagatcatcaattatgaatttgacaccaaggacctggtgtgcctgggcctgagcagcatcgttggcgtctggtacctgctgaggaagcactggattgccaacaacctttttggcctggccttctcccttaatggagtagagctcctgcacctcaacaatgtcagcactggctgcatcctgctgggcggactcttcatctacgatgtcttctgggtatttggcaccaatgtgatggtgacagtggccaagtccttcgaggcaccaataaaattggtgtttccccaggatctgctggagaaaggcctcgaagcaaacaactttgccatgctgggacttggagatgtcgtcattccagggatcttcattgccttgctgctgcgctttgacatcagcttgaagaagaatacccacacctacttctacaccagctttgcagcctacatcttcggcctgggccttaccatcttcatcatgcacatcttcaagcatgctcagcctgccctcctatacctggtccccgcctgcatcggttttcctgtcctggtggcgctggccaagggagaagtgacagagatgttcagttatgaggagtcaaatcctaaggatccagcggcagtgacagaatccaaagagggaacagaggcatcagcatcgaaggggctggagaagaaagagaaatgatgcagctggtgcccgagcctctcagggccagaccagacagatgggggctgggcccacacaggcgtgcaccggtagagggcacaggaggccaagggcagctccaggacagggcagggggcagcaggatacctccagccaggcctctgtggcctctgtttccttctccctttcttggccctcctctgctcctccccacaccctgcaggcaaaagaaacccccagcttcccccctccccgggagccaggtgggaaaagtgggtgtgatttttagattttgtattgtggactgattttgcctcacattaaaaactcatcccatggccagggcgggccactgt

SEQ ID NO: 380129 - DNA, 1877 bp, Homo sapiens
cgtctggcaggccgcgtggcgcccgcgccggccttcctgcaggggactccaccggagccttgccaattccgtttgtttccctgttgtcgcccgcttcaccctggatcatgttcaagaagtttgatgaaaaggaaagtgtgtccaactgcatccagttgaaaacgtcagttattaagggcattaagagccaactggtagagcaatttccagggccccccacaaaagcagcctcggggactccggcctttccttgagacctgcatctcttcccttcttcatcgcctgctagtgaactgaggctgccgctaaccttcttcatcctttggtggcaaagtagaaagattccagaattaactcgacctttctaaagacctgggctcagaggcagctggcactgactgagcacccactatgtgccaggcactgtgctgaatgcattgtaaggactgtcttacttattcccccacagcagccctaagaaggggtgctgttatcccctttttacagataagaaaactgaagctcagagagggcactgccttccccaaggtcacccagctacaagtaacaaagcctgtgcttctaacaccaaagaccacttcccgctgacactgtgccaggcttgtaagtctctctctgggcctccattccctcctgtaggaaattggaggggttggggtggctccagtgagctctccccttctgaaactcatactaatctggggcagccaaggcttagccccgccagcctgtgaacctctcacagtgcccacagccatgccctcctccgtccaggggctgacaggtgggaggggtagccctgcctcagggagtggacttacctggcctctctgctcagagatcatcaattatgaatttgacaccaaggacctggtgtgcctgggcctgagcagcatcgttggcgtctggtacctgctgaggaagcactggattgccaacaacctttttggcctggccttctcccttaatggagtagagctcctgcacctcaacaatgtcagcactggctgcatcctgctgggcggactcttcatctacgatgtcttctgggtatttggcaccaatgtgatggtgacagtggccaagtccttcgaggcaccaataaaattggtgtttccccaggatctgctggagaaaggcctcgaagcaaacaactttgccatgctgggacttggagatgtcgtcattccagggatcttcattgccttgctgctgcgctttgacatcagcttgaagaagaatacccacacctacttctacaccagctttgcagcctacatcttcggcctgggccttaccatcttcatcatgcacatcttcaagcatgctcagcctgccctcctatacctggtccccgcctgcatcggttttcctgtcctggtggcgctggccaagggagaagtgacagagatgttcagttatgaggagtcaaatcctaaggatccagcggcagtgacagaatccaaagagggaacagaggcatcagcatcgaaggggctggagaagaaagagaaatgatgcagctggtgcccgagcctctcagggccagaccagacagatgggggctgggcccacacaggcgtgcaccggtagagggcacaggaggccaagggcagctccaggacagggcagggggcagcaggatacctccagccaggcctctgtggcctctgtttccttctccctttcttggccctcctctgctcctccccacaccctgcaggcaaaagaaacccccagcttcccccctccccgggagccaggtgggaaaagtgggtgtgatttttagattttgtattgtggactgattttgcctcacattaaaaactcatcccatggccagggcgggccactgt

SEQ ID NO: 380130 - DNA, 1666 bp, Homo sapiens
cgtctggcaggccgcgtggcgcccgcgccggccttcctgcaggggactccaccggagccttgccaattccgtttgtttccctgttgtcgcccgcttcaccctggatcatgttcaagaagtttgatgaaaaggaaagtgtgtccaactgcatccagttgaaaacgtcagttattaagggcattaagagccaactggtagagcaatttccaggtattgaaccatggcttaatcaaatcatgcctaagaaagatcctgtcaaaatagtccgatgccacgaacatacagaaatccttaccataagaaaactgaagctcagagagggcactgccttccccaaggtcacccagctacaagtaacaaagcctgtgcttctaacaccaaagaccacttcccgctgacactgtgccaggcttgtaagtctctctctgggcctccattccctcctgtaggaaattggaggggttggggtggctccagtgagctctccccttctgaaactcatactaatctggggcagccaaggcttagccccgccagcctgtgaacctctcacagtgcccacagccatgccctcctccgtccaggggctgacaggtgggaggggtagccctgcctcagggagtggacttacctggcctctctgctcagagatcatcaattatgaatttgacaccaaggacctggtgtgcctgggcctgagcagcatcgttggcgtctggtacctgctgaggaagcactggattgccaacaacctttttggcctggccttctcccttaatggagtagagctcctgcacctcaacaatgtcagcactggctgcatcctgctgggcggactcttcatctacgatgtcttctgggtatttggcaccaatgtgatggtgacagtggccaagtccttcgaggcaccaataaaattggtgtttccccaggatctgctggagaaaggcctcgaagcaaacaactttgccatgctgggacttggagatgtcgtcattccagggatcttcattgccttgctgctgcgctttgacatcagcttgaagaagaatacccacacctacttctacaccagctttgcagcctacatcttcggcctgggccttaccatcttcatcatgcacatcttcaagcatgctcagcctgccctcctatacctggtccccgcctgcatcggttttcctgtcctggtggcgctggccaagggagaagtgacagagatgttcagttatgaggagtcaaatcctaaggatccagcggcagtgacagaatccaaagagggaacagaggcatcagcatcgaaggggctggagaagaaagagaaatgatgcagctggtgcccgagcctctcagggccagaccagacagatgggggctgggcccacacaggcgtgcaccggtagagggcacaggaggccaagggcagctccaggacagggcagggggcagcaggatacctccagccaggcctctgtggcctctgtttccttctccctttcttggccctcctctgctcctccccacaccctgcaggcaaaagaaacccccagcttcccccctccccgggagccaggtgggaaaagtgggtgtgatttttagattttgtattgtggactgattttgcctcacattaaaaactcatcccatggccagggcgggccactgt

SEQ ID NO: 380131 - DNA, 1473 bp, Homo sapiens
tgggaggcacgaggaacccttcctgttgccttaggggaacgtggctttccctgcagagccggtgtctccgcctgcgtccctgctgcagcaaccggagctggagtcggatcccgaacgcaccctcgccatggactcggccctcagcgatccgcataacggcagtgccgaggcaggcggccccaccaacagcactacgcggccgccttccacgcccgagggcatcgcgctggcctacggcagcctcctgctcatggcgctgctgcccatcttcttcggcgccctgcgctccgtacgctgcgcccgcggcaagaatgcttcagacatgcctgaaacaatcaccagccgggatgccgcccgcttccccatcatcgccagctgcacactcttggggctctacctctttttcaaaatattctcccaggagtacatcaacctcctgctgtccatgtatttcttcgtgctgggaatcctggccctgtcccacaccatcagccccttcatgaataagttttttccagccagctttccaaatcgacagtaccagctgctcttcacacagggttctggggaaaacaaggaagagatcatcaattatgaatttgacaccaaggacctggtgtgcctgggcctgagcagcatcgttggcgtctggtacctgctgaggaaggtatttggcaccaatgtgatggtgacagtggccaagtccttcgaggcaccaataaaattggtgtttccccaggatctgctggagaaaggcctcgaagcaaacaactttgccatgctgggacttggagatgtcgtcattccagggatcttcattgccttgctgctgcgctttgacatcagcttgaagaagaatacccacacctacttctacaccagctttgcagcctacatcttcggcctgggccttaccatcttcatcatgcacatcttcaagcatgctcagcctgccctcctatacctggtccccgcctgcatcggttttcctgtcctggtggcgctggccaagggagaagtgacagagatgttcagttatgaggagtcaaatcctaaggatccagcggcagtgacagaatccaaagagggaacagaggcatcagcatcgaaggggctggagaagaaagagaaatgatgcagctggtgcccgagcctctcagggccagaccagacagatgggggctgggcccacacaggcgtgcaccggtagagggcacaggaggccaagggcagctccaggacagggcagggggcagcaggatacctccagccaggcctctgtggcctctgtttccttctccctttcttggccctcctctgctcctccccacaccctgcaggcaaaagaaacccccagcttcccccctccccgggagccaggtgggaaaagtgggtgtgatttttagattttgtattgtggactgattttgcctcacattaaaaactcatcccatggccagggcgggccactgt

SEQ ID NO: 380132 - DNA, 917 bp, Homo sapiens
gattatgaaggggctgatggtgtgcgacaggttcaggatcccagcacgaagaaatacatggacactggctgcatcctgctgggcggactcttcatctacgatgtcttctgggtatttggcaccaatgtgatggtgacagtggccaagtccttcgaggcaccaataaaattggtgtttccccaggatctgctggagaaaggcctcgaagcaaacaactttgccatgctgggacttggagatgtcgtcattccagggatcttcattgccttgctgctgcgctttgacatcagcttgaagaagaatacccacacctacttctacaccagctttgcagcctacatcttcggcctgggccttaccatcttcatcatgcacatcttcaagcatgctcagcctgccctcctatacctggtccccgcctgcatcggttttcctgtcctggtggcgctggccaagggagaagtgacagagatgttcagttatgaggagtcaaatcctaaggatccagcggcagtgacagaatccaaagagggaacagaggcatcagcatcgaaggggctggagaagaaagagaaatgatgcagctggtgcccgagcctctcagggccagaccagacagatgggggctgggcccacacaggcgtgcaccggtagagggcacaggaggccaagggcagctccaggacagggcagggggcagcaggatacctccagccaggcctctgtggcctctgtttccttctccctttcttggccctcctctgctcctccccacaccctgcaggcaaaagaaacccccagcttcccccctccccgggagccaggtgggaaaagtgggtgtgatttttagattttgtattgtggactgattttgcctcacattaaaaactcatcccatggccagggcgggccactgt

SEQ ID NO: 380133 - DNA, 2582 bp, Homo sapiens
  misc_feature (2356)..(2356): n is a, c, g, or t
tgggaggcacgaggaacccttcctgttgccttaggggaacgtggctttccctgcagagccggtgtctccgcctgcgtccctgctgcagcaaccggagctggagtcggatcccgaacgcaccctcgccatggactcggccctcagcgatccgcataacggcagtgccgaggcaggcggccccaccaacagcactacgcggccgccttccacgcccgagggcatcgcgctggcctacggcagcctcctgctcatggcgctgctgcccatcttcttcggcgccctgcgctccgtacgctgcgcccgcggcaagaatgcttcagacatgcctgaaacaatcaccagccgggatgccgcccgcttccccatcatcgccagctgcacactcttggggctctacctctttttcaaaatattctcccaggagtacatcaacctcctgctgtccatgtatttcttcgtgctgggaatcctggccctgtcccacaccatcagccccttcatgaataagttttttccagccagctttccaaatcgacagtaccagctgctcttcacacagggttctggggaaaacaaggaagagatcatcaattatgaatttgacaccaaggacctggtgtgcctgggcctgagcagcatcgttggcgtctggtacctgctgaggaagcactggattgccaacaacctttttggcctggccttctcccttaatggagtagagctcctgcacctcaacaatgtcagcactggctgcatcctgctgggcggactcttcatctacgatgtcttctgggtatttggcaccaatgtgatggtgacagtggccaagtccttcgaggcaccaataaaatgtaagtgaccaccctgccacagggaaccccttcccccacccctgccgggccatgcccccacagcccgtttcagtcagtgcatctccctatctcttccccatgtacctcttcctcctgtggctccccagcctggtttccttatcctcaattgattcatctggctgtgttcatcctgcccaggtcccggcccctggccacttggtcgtggtgcagcatggcgtgaaatgagccaaaatgggagcgagcatggaggggaagtgtttaacccagcccggggggcacgcgcaggggctttccaggagagaaaacctctaagccgagacccctcactggggtccccttggcacctgagtgtcgggtgctgtctatcccgtgcctctcaaactgccttggttttgttcttcagtgtatccactgtttataagtaatagaaaatccacctacaggttgagcatctctaatccgaaaatctgaaatccagaatgttccaagacccaaaagtttttgagcactgacatgacaccacaagtggaaaattccacacataaggacttaacacatgtgaactgtgtttcatgcaggaaatagcattttaagattgtataaaactctttaggaggctgaggcgggaggatcacttgaggccagcagttcaagaccagcctgggtaacagcaagaccctatctctacaaaaaattaaaatattagctaggagtggtaacacacatctgtagtcctagctacttgggaggatctgaagcaggaggatcacttgagcctgggagttccaggctgaagtgagctatgatcatgtccctgcattccagcctggatgacagaatgaggccctgtctttaaaatttatatatgtataaatatatatgtgtgtgtacatatataaaactaccttcaagctattatgtataatgtgaatttcatatttaaacttaggttttatccccaaaacatttcattatgtatatgcaaatattccagaattcaaacaaagtttgaaacatttctggttgaaccatttcagatatgggatactcaacctgtataactgtctttaaacaagggggaaattttgtcatctcacactacagcaagcccaggggtagaaggctcagagtgagttaatgaccctctcttcaccaagagccaaggttacttcaggactcccaccccagcattctcagcatgtccacctgccccttaggtcatcccttcatggtcccaagatggctgccacagctcccagcactgactcctcacatagctgtgtccagaaaaagaaaggggaaattatgtctcagggagggatggtttttcccaagtctcctgtgcagtctccctcatactttattggccaaaactgtgtcacaggcccaagtctaaaccattcaccagtgagggggataggaaacatgattggcttagagtttaagctttagactagtggagaatcacctgcatggtattacaaggctcagagaggggaacnagaatccgtcaggcatgctagcaaggaagagaggaagatgctgccgggagggcaggcaacagtgagtgcatgccatggaagcactggctcgctggcgatcaggctagtcgttgggggagactgggggagattccactcaggggatcaagaaacagctgtctttctcgtgactcactctaccactgcggacagcctttctccctgcgttgaggagagcttcatggcc

SEQ ID NO: 380134 - DNA, 677 bp, Homo sapiens
ggagccctgggttcaggcccagccactgacttgctatggtcctggaccagtcactgtccttcagtccagcccagaaggggtttggggtgctgggcacggccctgaggcagtgccgtgcccagcatggcttcaccagcctgtgtcctctcatagcctgccctcctatacctggtccccgcctgcatcggttttcctgtcctggtggcgctggccaagggagaagtgacagagatgttcagttatgaggagtcaaatcctaaggatccagcggcagtgacagaatccaaagagggaacagaggcatcagcatcgaaggggctggagaagaaagagaaatgatgcagctggtgcccgagcctctcagggccagaccagacagatgggggctgggcccacacaggcgtgcaccggtagagggcacaggaggccaagggcagctccaggacagggcagggggcagcaggatacctccagccaggcctctgtggcctctgtttccttctccctttcttggccctcctctgctcctccccacaccctgcaggcaaaagaaacccccagcttcccccctccccgggagccaggtgggaaaagtgggtgtgatttttagattttgtattgtggactgattttgcctcacattaaaaactcatcccatggccagggcgggccactgt

SEQ ID NO: 380135 - DNA, 1346 bp, Homo sapiens
tgggaggcacgaggaacccttcctgttgccttaggggaacgtggctttccctgcagagccggtgtctccgcctgcgtccctgctgcagcaaccggagctggagtcggatcccgaacgcaccctcgccatggactcggccctcagcgatccgcataacggcagtgccgaggcaggcggccccaccaacagcactacgcggccgccttccacgcccgagggcatcgcgctggcctacggcagcctcctgctcatggcgctgctgcccatcttcttcggcgccctgcgctccgtacgctgcgcccgcggcaagaatgcttcagacatgcctgaaacaatcaccagccgggatgccgcccgcttccccatcatcgccagctgcacactcttggggctctacctctttttcaaaatattctcccaggagtacatcaacctcctgctgtccatgtatttcttcgtgctgggaatcctggccctgtcccacaccatcagtcagaaggcatctctctgcaacatttgaagcagctttctcgggaaccagtacagggtcttggatgagaacatgacttttggcatcattcagagccaggtttgaatcctggctataaaactcaagggactctttcccctgcacactgtagatgactaggacaagaacaatgacctctctgggccacagtttccttatagacatgatgaggatctggtgggtgtttccaccaccacagctgttgggaaagtgatttgtgagcagtaatgtcatgttagttgtgacagtactcaggtgagtaacaccagtaccacctgccgggtgttgtggcctagctgtgtgctaagtgccatgttgggctcctcacacatgatcgtgtttcgtaaggagccagaggcagcatagtgaaaagttaggagcgtgggctctggcatttgactaccttactttgagtccagactctgccacttaatagctctgtgatcttgggcaagttacttaatctctctggcctcaatttcctggtgaatgtggagaaaaataatagtgcccttcccatggggtcatgtggaaagcttttagcacagtatctggtgatttaaagtgttcagtaactattagctgttactgtcattatctgtgttaacctgccagacaaccttatatgggttgcttttgctttcacacctgtatgatagtcatggaaactgaagcccagagaggttaagaaatttgctaggatcacaccactaataagcaacagagcccggattcaaaccggtgtggtccagaggccatcctcttcccactgctaccctaactcaaactgccacatgctcgtgtcctttcagtgggg

SEQ ID NO: 380136 - DNA, 1996 bp, Homo sapiens
  misc_feature (1770)..(1770): n is a, c, g, or t
tgggaggcacgaggaacccttcctgttgccttaggggaacgtggctttccctgcagagccggtgtctccgcctgcgtccctgctgcagcaaccggagctggagtcggatcccgaacgcaccctcgccatggactcggccctcagcgatccgcataacggcagtgccgaggcaggcggccccaccaacagcactacgcggccgccttccacgcccgagggcatcgcgctggcctacggcagcctcctgctcatggcgctgctgcccatcttcttcggcgccctgcgctccgtacgctgcgcccgcggcaagaatgcttcagacatgcctgaaacaatcaccagccgggatgccgcccgcttccccatcatcgccagctgcacactcttggggctctacctctttttcaaagtttattttcccaataaaagttatgcaggctcagtgttgaaaacctggaaaacacagaaaagtaaaaagggaaaaacagcagtcatccaaaaccccactaccagagacagtcacagtttcccttcggagatattctcccaggagtacatcaacctcctgctgtccatgtatttcttcgtgctgggaatcctggccctgtcccacaccatcagtgctcttcatttacgatgtcttctgggtatttggcaccaatgtgatggtgacagtggccaagtccttcgaggcaccaataaaatctacaggttgagcatctctaatccgaaaatctgaaatccagaatgttccaagacccaaaagtttttgagcactgacatgacaccacaagtggaaaattccacacataaggacttaacacatgtgaactgtgtttcatgcaggaaatagcattttaagattgtataaaactctttaggaggctgaggcgggaggatcacttgaggccagcagttcaagaccagcctgggtaacagcaagaccctatctctacaaaaaattaaaatattagctaggagtggtaacacacatctgtagtcctagctacttgggaggatctgaagcaggaggatcacttgagcctgggagttccaggctgaagtgagctatgatcatgtccctgcattccagcctggatgacagaatgaggccctgtctttaaaatttatatatgtataaatatatatgtgtgtgtacatatataaaactaccttcaagctattatgtataatgtgaatttcatatttaaacttaggttttatccccaaaacatttcattatgtatatgcaaatattccagaattcaaacaaagtttgaaacatttctggttgaaccatttcagatatgggatactcaacctgtataactgtctttaaacaagggggaaattttgtcatctcacactacagcaagcccaggggtagaaggctcagagtgagttaatgaccctctcttcaccaagagccaaggttacttcaggactcccaccccagcattctcagcatgtccacctgccccttaggtcatcccttcatggtcccaagatggctgccacagctcccagcactgactcctcacatagctgtgtccagaaaaagaaaggggaaattatgtctcagggagggatggtttttcccaagtctcctgtgcagtctccctcatactttattggccaaaactgtgtcacaggcccaagtctaaaccattcaccagtgagggggataggaaacatgattggcttagagtttaagctttagactagtggagaatcacctgcatggtattacaaggctcagagaggggaacnagaatccgtcaggcatgctagcaaggaagagaggaagatgctgccgggagggcaggcaacagtgagtgcatgccatggaagcactggctcgctggcgatcaggctagtcgttgggggagactgggggagattccactcaggggatcaagaaacagctgtctttctcgtgactcactctaccactgcggacagcctttctccctgcgttgaggagagcttcatggcc

SEQ ID NO: 380137 - DNA, 821 bp, Homo sapiens
tgggaggcacgaggaacccttcctgttgccttaggggaacgtggctttccctgcagagccggtgtctccgcctgcgtccctgctgcagcaaccggagctggagtcggatcccgaacgcaccctcgccatggactcggccctcagcgatccgcataacggcagtgccgaggcaggcggccccaccaacagcactacgcggccgccttccacgcccgagggcatcgcgctggcctacggcagcctcctgctcatggcgctgctgcccatcttcttcggcgccctgcgctccgtacgctgcgcccgcggcaagaatgcttcagacatgcctgaaacaatcaccagccgggatgccgcccgcttccccatcatcgccagctgcacactcttggggctctacctctttttcaaaatattctcccaggagtacatcaacctcctgctgtccatgtatttcttcgtgctgggaatcctggccctgtcccacaccatcagtcccaaaaggggcgccccctttcccaagttggcaaacatttaaaacggggtttttaataaatatttccccccaaggggcccccaaaagggggcccttttttttttttcccccccaaaaagaagtttcccccggggggaaaacgcatcaacaggggggctttaataaatcaccccaaagaagggggcccctttggggcggatttccccccgttattttcccccagaaatttctataaaacttccaaaacagcgcgggcagcgcggcgcgcatctatattgaccccccttgtgggggggccggaagcgggcggaatcccacgtatagccgc

SEQ ID NO: 380138 - DNA, 407 bp, Homo sapiens
cggcgccctgcgctccgtacgctgcgcccgcggcaaggtagggtcagcgggaaaaccgggcactttccacccccataccgaacacggccgacatggacccttcctaggcgggacagacacctctccccggacactgactcttcccagccctgatcaccaccgttccctctgtctcgggcccacattccggggctggcatttcctaccccgggatctgggcaccgacccccgaccagggtatgataccttccccaataggaacttgcttctgctcccgacccggaccctgacacttccctccctgtgcatcatgccgcggctgggaacgctgtcagcccgtcccccactgcgactcgggcactgattgttctgagcctgttgggcccaggcagatcagccccatcatg

SEQ ID NO: 380139 - DNA, 751 bp, Homo sapiens
ctggggctgagctgtttgattcatgctgtgtgccctgggaggcagcctatctccatctcttgtagccttgtcatggccacccctttttccacgctacagcagaaggttcaggaagcttgaaatcagcccacacaagcccaggcccaacctctcttccattggctgctgcccttgctgcctcctggtacccccaggctcagagaaagcagagcagcctgcctgaggagggcatgtggtagggctggggccaggcgctgttaggtgctgggcagtggacacagggctgacgctctgcatgtgaccaggcgctttcctaggatgggggtgggggaaggggacaaccaaggttctgctcaccctctcctctaaatgaatttttattgttgtttttttttttttggtcagttatgaggagtcaaatcctaaggatccagcggcagtgacagaatccaaagagggaacagaggcatcagcatcgaaggggctggagaagaaagagaaatgatgcagctggtgcccgagcctctcagggccagaccagacagatgggggctgggcccacacaggcgtgcaccggtagagggcacaggaggccaagggcagctccaggacagggcagggggcagcaggatacctccagccaggcctctgtggcctctgtttccttctccctttcttggccctcctctgctcctccccacaccctgcaggcaaaagaaacccccagcttcccccctccccgggagccagg

SEQ ID NO: 380140 - DNA, 282 bp, Homo sapiens
  misc_feature (56)..(56): n is a, c, g, or t
ccagggagcccattaaccctacctgcatggtattacaaggctcagagaggggaacnagaatccgtcaggcatgctagcaaggaagagaggaagatgctgccgggagggcaggcaacagtgagtgcatgccatggaagcactggctcgctggcgatcaggctagtcgttgggggagactgggggagattccactcaggggatcaagaaacagctgtctttctcgtgactcactctaccactgcggacagcctttctccctgcgttgaggagagcttcatggcc

SEQ ID NO: 380141 - DNA, 2085 bp, Homo sapiens
  misc_feature (1613)..(1613): n is a, c, g, or t
  misc_feature (1625)..(1625): n is a, c, g, or t
  misc_feature (1627)..(1627): n is a, c, g, or t
tgggaggcacgaggaacccttcctgttgccttaggggaacgtggctttccctgcagagccggtgtctccgcctgcgtccctgctgcagcaaccggagctggagtcggatcccgaacgcaccctcgccatggactcggccctcagcgatccgcataacggcagtgccgaggcaggcggccccaccaacagcactacgcggccgccttccacgcccgagggcatcgcgctggcctacggcagcctcctgctcatggcgctgctgcccatcttcttcggcgccctgcgctccgtacgctgcgcccgcggcaagaatgcttcagacatgcctgaaacaatcaccagccgggatgccgcccgcttccccatcatcgccagctgcacactcttggggctctacctctttttcaaaatattctcccaggagtacatcaacctcctgctgtccatgtatttcttcgtgctgggaatcctggccctgtcccacaccatcagccccttcatgaataagttttttccagccagctttccaaatcgacagtaccagctgctcttcacacagggttctggggaaaacaaggaagagatcatcaattatgaatttgacaccaaggacctggtgtgcctgggcctgagcagcatcgttggcgtctggtacctgctgaggaagcactggattgccaacaacctttttggcctggccttctcccttaatggagtagagctcctgcacctcaacaatgtcagcactggctgcatcctgctgggcggactcttcatctacgatgtcttctgggtatttggcaccaatgtgatggtgacagtggccaagtccttcgaggcaccaataaaattggtgtttccccaggatctgctggagaaaggcctcgaagcaaacaactttgccatgctgggacttggagatgtcgtcattccagggatcttcattgccttgctgctgcgctttgacatcagcttgaagaagaatacccacacctacttctacaccagctttgcagcctacatcttcggcctgggccttaccatcttcatcatgcacatcttcaagcatgctcagcctgccctcctatacctggtccccgcctgcatcggttttcctgtcctggtggcgctggccaagggagaagtgacagagatgttcagttatgaggagtcaaatcctaaggatccagcggcagtgacagaatccaaagagggaacagaggcatcagcatcgaaggggctggagaagaaagagaaatgatgcagctggtgcccgagcctctcagggccagaccagacagatgggggctgggcccacacaggcgtgcaccggtagagggcacaggaggccaagggcagctccaggacagggcagggggcagcaggatacctccagccaggcctctgtggcctctgtttccttctccctttcttggccctcctctgctcctccccacaccctgcaggcaaaagaaacccccagcttcccccctccccgggagccaggtgggaaaagtgggtgtgatttttagattttgtattgtggactgattttgcctcacattaaaaactcatcccatggccagggcgggccactgtaaaaaaaaaaaaanaaaaaaaaaaananaaaaaaaaaaaaaaaaaaaaggggggggggccaaaaatcccccggggggggccacatattgcacgcaccaccccacttgttcggtgatcaaaggggggcccccaataggggggctcgtaattaaaagccaggagggcaagcggcagccgtgcagtataaaacacctgcggtagtgcggggaaaaactggtgtacaacggtgtgggcgtatcttgtgggagcacagagagaaaccatatctcgtggtggggggggagaagaccataatggtgggacaaacaactactcccgcagaggaagataataacagaccggcgctaaggaggaaaaaatataaaaatctttgaacaggggatatcaaattgggtgtagaacaccaggcggtaaattattggtgtgggatatagaaagttgtttgcctcgagaggattgttactttgagaacaatgtttatccggg

SEQ ID NO: 380142 - DNA, 2116 bp, Homo sapiens
tgggaggcacgaggaacccttcctgttgccttaggggaacgtggctttccctgcagagccggtgtctccgcctgcgtccctgctgcagcaaccggagctggagtcggatcccgaacgcaccctcgccatggactcggccctcagcgatccgcataacggcagtgccgaggcaggcggccccaccaacagcactacgcggccgccttccacgcccgagggcatcgcgctggcctacggcagcctcctgctcatggcgctgctgcccatcttcttcggcgccctgcgctccgtacgctgcgcccgcggcaagaatgcttcagacatgcctgaaacaatcaccagccgggatgccgcccgcttccccatcatcgccagctgcacactcttggggctctacctctttttcaaaatattctcccaggagtacatcaacctcctgctgtccatgtatttcttcgtgctgggaatcctggccctgtcccacaccatcagccccttcatgaataagttttttccagccagctttccaaatcgacagtaccagctgctcttcacacagggttctggggaaaacaaggaagagatcatcaattatgaatttgacaccaaggacctggtgtgcctgggcctgagcagcatcgttggcgtctggtacctgctgaggaagcactggattgccaacaacctttttggcctggccttctcccttaatggagtagagctcctgcacctcaacaatgtcagcactggctgcatcctgctgggcggactcttcatctacgatgtcttctgggtatttggcaccaatgtgatggtgacagtggccaagtccttcgaggcaccaataaaattggtgtttccccaggatctgctggagaaaggcctcgaagcaaacaactttgccatgctgggacttggagatgtcgtcattccagggatcttcattgccttgctgctgcgctttgacatcagcttgaagaagaatacccacacctacttctacaccagctttgcagcctacatcttcggcctgggccttaccatcttcatcatgcacatcttcaagcatgctcagcctgccctcctatacctggtccccgcctgcatcggttttcctgtcctggtggcgctggccaagggagaagtgacagagatgttcagttatgaggagtcaaatcctaaggatccagcggcagtgacagaatccaaagagggaacagaggcatcagcatcgaaggggctggagaagaaagagaaatgatgcagctggtgcccgagcctctcagggccagaccagacagatgggggctgggcccacacaggcgtgcaccggtagagggcacaggaggccaagggcagctccaggacagggcagggggcagcaggatacctccagccaggcctctgtggcctctgtttccttctccctttcttggccctcctctgctcctccccacaccctgcaggcaaaagaaacccccagcttcccccctccccgggagccaggtgggaaaagtgggtgtgatttttagattttgtattgtggactgattttgcctcacattaaaaactcatcccatggccagggcgggccactgtaaaaaagcaataatgatgtaatatgaaaacacaggcaagctcaaagagaatagcgacagaaagggcggggcgcgagcttatgagaagattaatccccgcagagggggcacaacagattatgctgacacccgagttttgtttgctacaagaggttggcacccacatagaagagagcgcttataattcgaacaggcgagacagacgaggtcaccgcgtgtattatacaaacacgtcctatagcgagggaaaaacaaacggagtgacaagtgggagaccactattgaaaaaagcagcccaccacctcaaacattgtgggtggggtgtaggccaaaaaggatggtggggaaacaaccttcaccacgaagagtaagtataaagacggcctagggcagaaacataattaagatctttgatggaataataatggtgttgaaccaaagacgcgccataaaaatcgtgagcacgcactaaagatatgtgccgccgagagtttattgtcctgacaaacttttaacgg

SEQ ID NO: 380143 - DNA, 2115 bp, Homo sapiens
  misc_feature (1643)..(1643): n is a, c, g, or t
  misc_feature (1655)..(1655): n is a, c, g, or t
  misc_feature (1657)..(1657): n is a, c, g, or t
tgggaggcacgaggaacccttcctgttgccttaggggaacgtggctttccctgcagagccggtgtctccgcctgcgtccctgctgcagcaaccggagctggagtcggatcccgaacgcaccctcgccatggactcggccctcagcgatccgcataacggcagtgccgaggcaggcggccccaccaacagcactacgcggccgccttccacgcccgagggcatcgcgctggcctacggcagcctcctgctcatggcgctgctgcccatcttcttcggcgccctgcgctccgtacgctgcgcccgcggcaagaatgcttcagacatgcctgaaacaatcaccagccgggatgccgcccgcttccccatcatcgccagctgcacactcttggggctctacctctttttcaaaatattctcccaggagtacatcaacctcctgctgtccatgtatttcttcgtgctgggaatcctggccctgtcccacaccatcagccccttcatgaataagttttttccagccagctttccaaatcgacagtaccagctgctcttcacacagggttctggggaaaacaaggaagagatcatcaattatgaatttgacaccaaggacctggtgtgcctgggcctgagcagcatcgttggcgtctggtacctgctgaggaagcactggattgccaacaacctttttggcctggccttctcccttaatggagtagagctcctgcacctcaacaatgtcagcactggctgcatcctgctgggcggactcttcatctacgatgtcttctgggtatttggcaccaatgtgatggtgacagtggccaagtccttcgaggcaccaataaaattggtgtttccccaggatctgctggagaaaggcctcgaagcaaacaactttgccatgctgggacttggagatgtcgtcattccagggatcttcattgccttgctgctgcgctttgacatcagcttgaagaagaatacccacacctacttctacaccagctttgcagcctacatcttcggcctgggccttaccatcttcatcatgcacatcttcaagcatgctcagcctgccctcctatacctggtccccgcctgcatcggttttcctgtcctggtggcgctggccaagggagaagtgacagagatgttcagttatgaggagtcaaatcctaaggatccagcggcagtgacagaatccaaagagggaacagaggcatcagcatcgaaggggctggagaagaaagagaaatgatgcagctggtgcccgagcctctcagggccagaccagacagatgggggctgggcccacacaggcgtgcaccggtagagggcacaggaggccaagggcagctccaggacagggcagggggcagcaggatacctccagccaggcctctgtggcctctgtttccttctccctttcttggccctcctctgctcctccccacaccctgcaggcaaaagaaacccccagcttcccccctccccgggagccaggtgggaaaagtgggtgtgatttttagattttgtattgtggactgattttgcctcacattaaaaactcatcccatggccagggcgggccactgtacaaaaaaaaaaaacaaaaaacgaacaaacaaaaaaaaaaaaanaaaaaaaaaaananaaaaaaaaaaaaaaaaaaaaggggggggggccaaaaatcccccggggggggccacatattgcacgcaccaccccacttgttcggtgatcaaaggggggcccccaataggggggctcgtaattaaaagccaggagggcaagcggcagccgtgcagtataaaacacctgcggtagtgcggggaaaaactggtgtacaacggtgtgggcgtatcttgtgggagcacagagagaaaccatatctcgtggtggggggggagaagaccataatggtgggacaaacaactactcccgcagaggaagataataacagaccggcgctaaggaggaaaaaatataaaaatctttgaacaggggatatcaaattgggtgtagaacaccaggcggtaaattattggtgtgggatatagaaagttgtttgcctcgagaggattgttactttgagaacaatgtttatccggg

SEQ ID NO: 380144 - DNA, 1728 bp, Homo sapiens
tgggaggcacgaggaacccttcctgttgccttaggggaacgtggctttccctgcagagccggtgtctccgcctgcgtccctgctgcagcaaccggagctggagtcggatcccgaacgcaccctcgccatggactcggccctcagcgatccgcataacggcagtgccgaggcaggcggccccaccaacagcactacgcggccgccttccacgcccgagggcatcgcgctggcctacggcagcctcctgctcatggcgctgctgcccatcttcttcggcgccctgcgctccgtacgctgcgcccgcggcaagaatgcttcagacatgcctgaaacaatcaccagccgggatgccgcccgcttccccatcatcgccagctgcacactcttggggctctacctctttttcaaagtttattttcccaataaaagttatgcaggctcagtgttgaaaacctggaaaacacagaaaagtaaaaagggaaaaacagcagtcatccaaaaccccactaccagagacagtcacagtttcccttcggagatattctcccaggagtacatcaacctcctgctgtccatgtatttcttcgtgctgggaatcctggccctgtcccacaccatcagccccttcatgaataagttttttccagccagctttccaaatcgacagtaccagctgctcttcacacagggttctggggaaaacaaggaagagatcatcaattatgaatttgacaccaaggacctggtgtgcctgggcctgagcagcatcgttggcgtctggtacctgctgaggaagcactggattgccaacaacctttttggcctggccttctcccttaatggagtagagctcctgcacctcaacaatgtcagcactggctgcatcctgctgggcggactcttcatctacgatgtcttctgggtatttggcaccaatgtgatggtgacagtggccaagtccttcgaggcaccaataaaattggtgtttccccaggatctgctggagaaaggcctcgaagcaaacaactttgccatgctgggacttggagatgtcgtcattccagggatcttcattgccttgctgctgcgctttgacatcagcttgaagaagaatacccacacctacttctacaccagctttgcagcctacatcttcggcctgggccttaccatcttcatcatgcacatcttcaagcatgctcagcctgccctcctatacctggtccccgcctgcatcggttttcctgtcctggtggcgctggccaagggagaagtgacagagatgttcagttatgaggagtcaaatcctaaggatccagcggcagtgacagaatccaaagagggaacagaggcatcagcatcgaaggggctggagaagaaagagaaatgatgcagctggtgcccgagcctctcagggccagaccagacagatgggggctgggcccacacaggcgtgcaccggtagagggcacaggaggccaagggcagctccaggacagggcagggggcagcaggatacctccagccaggcctctgtggcctctgtttccttctccctttcttggccctcctctgctcctccccacaccctgcaggcaaaagaaacccccagcttcccccctccccgggagccaggtgggaaaagtgggtgtgatttttagattttgtattgtggactgattttgcctcacattaaaaactcatcccatggccagggcgggccactgt

SEQ ID NO: 380145 - DNA, 2650 bp, Homo sapiens
cgtctggcaggccgcgtggcgcccgcgccggccttcctgcaggggactccaccggagccttgccaattccgtttgtttccctgttgtcgcccgcttcaccctggatcatgttcaagaagtttgatgaaaaggaaagtgtgtccaactgcatccagttgaaaacgtcagttattaagggcattaagagccaactggtagagcaatttccaggtattgaaccatggcttaatcaaatcatgcctaagaaagatcctgtcaaaatagtccgatgccacgaacatacagaaatccttaccgtaagtggggaattattgttttttagacaaagaaaggggcctttttgtccaactctaaggttgcttcacaaatacccttttatcctgccacaccagcaggttgataaaggagctatcaaatttgtactcagtggcgcaaatattatgtgtccaggtttaacttctcctggagctaagctgtaccctgctgcagtagatacgattgtagcagtcacagcggaaggaaaacagcatgctctgtgtgttggggtcatgaagatgtctgcagaagatattgagaaagtcaacaaaggaattggcattgaaaatatccattatttaaatgatgggctgtggcacatgaagacatataaatgagcctcagaaggaatgcatttggggggctaaatgtggatattgattgtgtcgtatgtgtgtttgtgtctgtgtgtgacagcgtgaatacaatgcctctgtggttatgctaaataagtttaacagatactttatagaaaacaaatcagggtgctcttaccacagatgaaaaaacaaattaggggacaagcagcaagcagtctgctaacactctggaatgtgaaaggagtgtctggactctgtgactcccggcaaactccacagcctctagttgtcttcttaggaagcttggaagcaattgagaatggtctaacatcaagatgtctaccacagggccccccacaaaagcagcctcggggactccggcctttccttgagacctgcatctcttcccttcttcatcgcctgctagtgaactgaggctgccgctaaccttcttcatcctttggtggcaaagtagaaagattccagaattaactcgacctttctaaagacctgggctcagaggcagctggcactgactgagcacccactatgtgccaggcactgtgctgaatgcattgtaaggactgtcttacttattcccccacagcagccctaagaaggggtgctgttatcccctttttacagataagaaaactgaagctcagagagggcactgccttccccaaggtcacccagctacaagtaacaaagcctgtgcttctaacaccaaagaccacttcccgctgacactgtgccaggcttgtaagtctctctctgggcctccattccctcctgtaggaaattggaggggttggggtggctccagtgagctctccccttctgaaactcatactaatctggggcagccaaggcttagccccgccagcctgtgaacctctcacagtgcccacagccatgccctcctccgtccaggggctgacaggtgggaggggtagccctgcctcagggagtggacttacctggcctctctgctcagagatcatcaattatgaatttgacaccaaggacctggtgtgcctgggcctgagcagcatcgttggcgtctggtacctgctgaggaagcactggattgccaacaacctttttggcctggccttctcccttaatggagtagagctcctgcacctcaacaatgtcagcactggctgcatcctgctgggcggactcttcatctacgatgtcttctgggtatttggcaccaatgtgatggtgacagtggccaagtccttcgaggcaccaataaaattggtgtttccccaggatctgctggagaaaggcctcgaagcaaacaactttgccatgctgggacttggagatgtcgtcattccagggatcttcattgccttgctgctgcgctttgacatcagcttgaagaagaatacccacacctacttctacaccagctttgcagcctacatcttcggcctgggccttaccatcttcatcatgcacatcttcaagcatgctcagcctgccctcctatacctggtccccgcctgcatcggttttcctgtcctggtggcgctggccaagggagaagtgacagagatgttcagttatgaggagtcaaatcctaaggatccagcggcagtgacagaatccaaagagggaacagaggcatcagcatcgaaggggctggagaagaaagagaaatgatgcagctggtgcccgagcctctcagggccagaccagacagatgggggctgggcccacacaggcgtgcaccggtagagggcacaggaggccaagggcagctccaggacagggcagggggcagcaggatacctccagccaggcctctgtggcctctgtttccttctccctttcttggccctcctctgctcctccccacaccctgcaggcaaaagaaacccccagcttcccccctccccgggagccaggtgggaaaagtgggtgtgatttttagattttgtattgtggactgattttgcctcacattaaaaactcatcccatggccagggcgggccactgt

SEQ ID NO: 380146 - DNA, 1189 bp, Homo sapiens
aacttacgctaggtacgagcctgcggtgaaatcggccgaggattcttcgtgctgggaatctggccctgtcccacaccatcagccccttcatgaataagttttttccagccagctttccaaatcgacagtaccagctgctcttcacacagggttctggggaaaacaaggaagagatcatcaattatgaatttgacaccaaggacctggtgtgcctgggcctgagcagcatcgttggcgtctggtacctgctgaggaagcactggattgccaacaacctttttggcctggccttctcccttaatggagtagagctcctgcacctcaacaatgtcagcactggctgcatcctgctgggcggactcttcatctacgatgtcttctgggtatttggcaccaatgtgatggtgacagtggccaagtccttcgaggcaccaataaaattggtgtttccccaggatctgctggagaaaggcctcgaagcaaacaactttgccatgctgggacttggagatgtcgtcattccagggatcttcattgccttgctgctgcgctttgacatcagcttgaagaagaatacccacacctacttctacaccagctttgcagcctacatcttcggcctgggccttaccatcttcatcatgcacatcttcaagcatgctcagcctgccctcctatacctggtccccgcctgcatcggttttcctgtcctggtggcgctggccaagggagaagtgacagagatgttcagttatgaggagtcaaatcctaaggatccagcggcagtgacagaatccaaagagggaacagaggcatcagcatcgaaggggctggagaagaaagagaaatgatgcagctggtgcccgagcctctcagggccagaccagacagatgggggctgggcccacacaggcgtgcaccggtagagggcacaggaggccaagggcagctccaggacagggcagggggcagcaggatacctccagccaggcctctgtggcctctgtttccttctccctttcttggccctcctctgctcctccccacaccctgcaggcaaaagaaacccccagcttcccccctccccgggagccaggtgggaaaagtgggtgtgatttttagattttgtattgtggactgattttgcctcacattaaaaactcatcccatggccagggcgggccactgt

SEQ ID NO: 380147 - DNA, 1451 bp, Homo sapiens
tgggaggcacgaggaacccttcctgttgccttaggggaacgtggctttccctgcagagccggtgtctccgcctgcgtccctgctgcagcaaccggagctggagtcggatcccgaacgcaccctcgccatggactcggccctcagcgatccgcataacggcagtgccgaggcaggcggccccaccaacagcactacgcggccgccttccacgcccgagggcatcgcgctggcctacggcagcctcctgctcatggcgctgctgcccatcttcttcggcgccctgcgctccgtacgctgcgcccgcggcaagaatgcttcagacatgcctgaaacaatcaccagccgggatgccgcccgcttccccatcatcccagctttccaaatcgacagtaccagctgctcttcacacagggttctggggaaaacaaggaagagatcatcaattatgaatttgacaccaaggacctggtgtgcctgggcctgagcagcatcgttggcgtctggtacctgctgaggaagcactggattgccaacaacctttttggcctggccttctcccttaatggagtagagctcctgcacctcaacaatgtcagcactggctgcatcctgctgggcggactcttcatctacgatgtcttctgggtatttggcaccaatgtgatggtgacagtggccaagtccttcgaggcaccaataaaattggtgtttccccaggatctgctggagaaaggcctcgaagcaaacaactttgccatgctgggacttggagatgtcgtcattccagggatcttcattgccttgctgctgcgctttgacatcagcttgaagaagaatacccacacctacttctacaccagctttgcagcctacatcttcggcctgggccttaccatcttcatcatgcacatcttcaagcatgctcagcctgccctcctatacctggtccccgcctgcatcggttttcctgtcctggtggcgctggccaagggagaagtgacagagatgttcagttatgaggagtcaaatcctaaggatccagcggcagtgacagaatccaaagagggaacagaggcatcagcatcgaaggggctggagaagaaagagaaatgatgcagctggtgcccgagcctctcagggccagaccagacagatgggggctgggcccacacaggcgtgcaccggtagagggcacaggaggccaagggcagctccaggacagggcagggggcagcaggatacctccagccaggcctctgtggcctctgtttccttctccctttcttggccctcctctgctcctccccacaccctgcaggcaaaagaaacccccagcttcccccctccccgggagccaggtgggaaaagtgggtgtgatttttagattttgtattgtggactgattttgcctcacattaaaaactcatcccatggccagggcgggccactgt

SEQ ID NO: 380148 - DNA, 1642 bp, Homo sapiens
cgtctggcaggccgcgtggcgcccgcgccggccttcctgcaggggactccaccggagccttgccaattccgtttgtttccctgttgtcgcccgcttcaccctggatcatgttcaagaagtttgatgaaaaggaaagtgtgtccaactgcatccagttgaaaacgtcagttattaagggcattaagagccaactggtagagcaatttccagggccccccacaaaagcagcctcggggactccggcctttccttgagacctgcatctcttcccttcttcatcgcctgctagtgaactgaggctgccgctaaccttcttcatcctttggtggcaaagtagaaagattccagaattaactcgacctttctaaagacctgggctcagaggcagctggcactgactgagcacccactatgtgccaggcactgtgctgaatgcattgtaaggactgtcttacttattcccccacagcagccctaagaaggggtgctgttatcccctttttacagataagaaaactgaagctcagagagggcactgccttccccaaggtcacccagctacaagtaacaaagcctgtgcttctaacaccaaagaccacttcccgctgacactgtgccaggcttagatcatcaattatgaatttgacaccaaggacctggtgtgcctgggcctgagcagcatcgttggcgtctggtacctgctgaggaagcactggattgccaacaacctttttggcctggccttctcccttaatggagtagagctcctgcacctcaacaatgtcagcactggctgcatcctgctgggcggactcttcatctacgatgtcttctgggtatttggcaccaatgtgatggtgacagtggccaagtccttcgaggcaccaataaaattggtgtttccccaggatctgctggagaaaggcctcgaagcaaacaactttgccatgctgggacttggagatgtcgtcattccagggatcttcattgccttgctgctgcgctttgacatcagcttgaagaagaatacccacacctacttctacaccagctttgcagcctacatcttcggcctgggccttaccatcttcatcatgcacatcttcaagcatgctcagcctgccctcctatacctggtccccgcctgcatcggttttcctgtcctggtggcgctggccaagggagaagtgacagagatgttcagttatgaggagtcaaatcctaaggatccagcggcagtgacagaatccaaagagggaacagaggcatcagcatcgaaggggctggagaagaaagagaaatgatgcagctggtgcccgagcctctcagggccagaccagacagatgggggctgggcccacacaggcgtgcaccggtagagggcacaggaggccaagggcagctccaggacagggcagggggcagcaggatacctccagccaggcctctgtggcctctgtttccttctccctttcttggccctcctctgctcctccccacaccctgcaggcaaaagaaacccccagcttcccccctccccgggagccaggtgggaaaagtgggtgtgatttttagattttgtattgtggactgattttgcctcacattaaaaactcatcccatggccagggcgggccactgt

SEQ ID NO: 380149 - DNA, 1345 bp, Homo sapiens
cgtctggcaggccgcgtggcgcccgcgccggccttcctgcaggggactccaccggagccttgccaattccgtttgtttccctgttgtcgcccgcttcaccctggatcatgttcaagaagtttgatgaaaaggaaagtgtgtccaactgcatccagttgaaaacgtcagttattaagggcattaagagccaactggtagagcaatttccagataagaaaactgaagctcagagagggcactgccttccccaaggtcacccagctacaagtaacaaagcctgtgcttctaacaccaaagaccacttcccgctgacactgtgccaggcttagatcatcaattatgaatttgacaccaaggacctggtgtgcctgggcctgagcagcatcgttggcgtctggtacctgctgaggaagcactggattgccaacaacctttttggcctggccttctcccttaatggagtagagctcctgcacctcaacaatgtcagcactggctgcatcctgctgggcggactcttcatctacgatgtcttctgggtatttggcaccaatgtgatggtgacagtggccaagtccttcgaggcaccaataaaattggtgtttccccaggatctgctggagaaaggcctcgaagcaaacaactttgccatgctgggacttggagatgtcgtcattccagggatcttcattgccttgctgctgcgctttgacatcagcttgaagaagaatacccacacctacttctacaccagctttgcagcctacatcttcggcctgggccttaccatcttcatcatgcacatcttcaagcatgctcagcctgccctcctatacctggtccccgcctgcatcggttttcctgtcctggtggcgctggccaagggagaagtgacagagatgttcagttatgaggagtcaaatcctaaggatccagcggcagtgacagaatccaaagagggaacagaggcatcagcatcgaaggggctggagaagaaagagaaatgatgcagctggtgcccgagcctctcagggccagaccagacagatgggggctgggcccacacaggcgtgcaccggtagagggcacaggaggccaagggcagctccaggacagggcagggggcagcaggatacctccagccaggcctctgtggcctctgtttccttctccctttcttggccctcctctgctcctccccacaccctgcaggcaaaagaaacccccagcttcccccctccccgggagccaggtgggaaaagtgggtgtgatttttagattttgtattgtggactgattttgcctcacattaaaaactcatcccatggccagggcgggccactgt

SEQ ID NO: 380150 - DNA, 2524 bp, Homo sapiens
cgtctggcaggccgcgtggcgcccgcgccggccttcctgcaggggactccaccggagccttgccaattccgtttgtttccctgttgtcgcccgcttcaccctggatcatgttcaagaagtttgatgaaaaggaaagtgtgtccaactgcatccagttgaaaacgtcagttattaagggcattaagagccaactggtagagcaatttccaggtattgaaccatggcttaatcaaatcatgcctaagaaagatcctgtcaaaatagtccgatgccacgaacatacagaaatccttaccgtaagtggggaattattgttttttagacaaagaaaggggcctttttgtccaactctaaggttgcttcacaaatacccttttatcctgccacaccagcaggttgataaaggagctatcaaatttgtactcagtggcgcaaatattatgtgtccaggtttaacttctcctggagctaagctgtaccctgctgcagtagatacgattgtagcagtcacagcggaaggaaaacagcatgctctgtgtgttggggtcatgaagatgtctgcagaagatattgagaaagtcaacaaaggaattggcattgaaaatatccattatttaaatgatgggctgtggcacatgaagacatataaatgagcctcagaaggaatgcatttggggggctaaatgtggatattgattgtgtcgtatgtgtgtttgtgtctgtgtgtgacagcgtgaatacaatgcctctgtggttatgctaaataagtttaacagatactttatagaaaacaaatcagggtgctcttaccacagatgaaaaaacaaattaggggacaagcagcaagcagtctgctaacactctggaatgtgaaaggagtgtctggactctgtgactcccggcaaactccacagcctctagttgtcttcttaggaagcttggaagcaattgagaatggtctaacatcaagatgtctaccacagggccccccacaaaagcagcctcggggactccggcctttccttgagacctgcatctcttcccttcttcatcgcctgctagtgaactgaggctgccgctaaccttcttcatcctttggtggcaaagtagaaagattccagaattaactcgacctttctaaagacctgggctcagaggcagctggcactgactgagcacccactatgtgccaggcactgtgctgaatgcattgtaaggactgtcttacttattcccccacagcagccctaagaaggggtgctgttatcccctttttacagataagaaaactgaagctcagagagggcactgccttccccaaggtcacccagctacaagtaacaaagcctgtgcttctaacaccaaagaccacttcccgctgacactgtgccaggcttgtaagtctctctctgggcctccattccctcctgtaggaaattggaggggttggggtggctccagtgagctctccccttctgaaactcatactaatctggggcagccaaggcttagccccgccagcctgtgaacctctcacagtgcccacagccatgccctcctccgtccaggggctgacaggtgggaggggtagccctgcctcagggagtggacttacctggcctctctgctcagagatcatcaattatgaatttgacaccaaggacctggtgtgcctgggcctgagcagcatcgttggcgtctggtacctgctgaggaaggtatttggcaccaatgtgatggtgacagtggccaagtccttcgaggcaccaataaaattggtgtttccccaggatctgctggagaaaggcctcgaagcaaacaactttgccatgctgggacttggagatgtcgtcattccagggatcttcattgccttgctgctgcgctttgacatcagcttgaagaagaatacccacacctacttctacaccagctttgcagcctacatcttcggcctgggccttaccatcttcatcatgcacatcttcaagcatgctcagcctgccctcctatacctggtccccgcctgcatcggttttcctgtcctggtggcgctggccaagggagaagtgacagagatgttcagttatgaggagtcaaatcctaaggatccagcggcagtgacagaatccaaagagggaacagaggcatcagcatcgaaggggctggagaagaaagagaaatgatgcagctggtgcccgagcctctcagggccagaccagacagatgggggctgggcccacacaggcgtgcaccggtagagggcacaggaggccaagggcagctccaggacagggcagggggcagcaggatacctccagccaggcctctgtggcctctgtttccttctccctttcttggccctcctctgctcctccccacaccctgcaggcaaaagaaacccccagcttcccccctccccgggagccaggtgggaaaagtgggtgtgatttttagattttgtattgtggactgattttgcctcacattaaaaactcatcccatggccagggcgggccactgt

SEQ ID NO: 380151 - DNA, 1324 bp, Homo sapiens
tgggaggcacgaggaacccttcctgttgccttaggggaacgtggctttccctgcagagccggtgtctccgcctgcgtccctgctgcagcaaccggagctggagtcggatcccgaacgcaccctcgccatggactcggccctcagcgatccgcataacggcagtgccgaggcaggcggccccaccaacagcactacgcggccgccttccacgcccgagggcatcgcgctggcctacggcagcctcctgctcatggcgctgctgcccatcttcttcggcgccctgcgctccgtacgctgcgcccgcggcaagaatgcttcagacatgcctgaaacaatcaccagccgggatgccgcccgcttccccatcatcgccagctgcacactcttggggctctacctctttttcaaaatattctcccaggagtacatcaacctcctgctgtccatgtatttcttcgtgctgggaatcctggccctgtcccacaccatcagtgctcttcatttacgatgtcttctgggtatttggcaccaatgtgatggtgacagtggccaagtccttcgaggcaccaataaaattggtgtttccccaggatctgctggagaaaggcctcgaagcaaacaactttgccatgctgggacttggagatgtcgtcattccagggatcttcattgccttgctgctgcgctttgacatcagcttgaagaagaatacccacacctacttctacaccagctttgcagcctacatcttcggcctgggccttaccatcttcatcatgcacatcttcaagcatgctcagcctgccctcctatacctggtccccgcctgcatcggttttcctgtcctggtggcgctggccaagggagaagtgacagagatgttcagttatgaggagtcaaatcctaaggatccagcggcagtgacagaatccaaagagggaacagaggcatcagcatcgaaggggctggagaagaaagagaaatgatgcagctggtgcccgagcctctcagggccagaccagacagatgggggctgggcccacacaggcgtgcaccggtagagggcacaggaggccaagggcagctccaggacagggcagggggcagcaggatacctccagccaggcctctgtggcctctgtttccttctccctttcttggccctcctctgctcctccccacaccctgcaggcaaaagaaacccccagcttcccccctccccgggagccaggtgggaaaagtgggtgtgatttttagattttgtattgtggactgattttgcctcacattaaaaactcatcccatggccagggcgggccactgt

SEQ ID NO: 380152 - DNA, 898 bp, Homo sapiens
ggtgaggtgctgggtcattgtagtcccaggccaaagcaaaatcctgggcccctctcattgttctaggtagagaaatgggactttctgctgtcacttgagagtattggccacacccttggtctccaatgattgctccaagatggaacaccaggttggggaccaggacccagtctcctgttagttcactgccctgctgcttccctgccactctctaaccccagctttctcccacagggatcttcattgccttgctgctgcgctttgacatcagcttgaagaagaatacccacacctacttctacaccagctttgcagcctacatcttcggcctgggccttaccatcttcatcatgcacatcttcaagcatgctcagcctgccctcctatacctggtccccgcctgcatcggttttcctgtcctggtggcgctggccaagggagaagtgacagagatgttcagttatgaggagtcaaatcctaaggatccagcggcagtgacagaatccaaagagggaacagaggcatcagcatcgaaggggctggagaagaaagagaaatgatgcagctggtgcccgagcctctcagggccagaccagacagatgggggctgggcccacacaggcgtgcaccggtagagggcacaggaggccaagggcagctccaggacagggcagggggcagcaggatacctccagccaggcctctgtggcctctgtttccttctccctttcttggccctcctctgctcctccccacaccctgcaggcaaaagaaacccccagcttcccccctccccgggagccaggtgggaaaagtgggtgtgatttttagattttgtattgtggactgattttgcctcacattaaaaactcatcccatggccagggcgggccactgt

SEQ ID NO: 380153 - DNA, 1169 bp, Homo sapiens
tgggaggcacgaggaacccttcctgttgccttaggggaacgtggctttccctgcagagccggtgtctccgcctgcgtccctgctgcagcaaccggagctggagtcggatcccgaacgcaccctcgccatggactcggccctcagcgatccgcataacggcagtgccgaggcaggcggccccaccaacagcactacgcggccgccttccacgcccgagggcatcgcgctggcctacggcagcctcctgctcatggcgctgctgcccatcttcttcggcgccctgcgctccgtacgctgcgcccgcggcaagaatgcttcagacatgcctgaaacaatcaccagccgggatgccgcccgcttccccatcatcgccagctgcacactcttggggctctacctctttttcaaaatattctcccaggagtacatcaacctcctgctgtccatgtatttcttcgtgctgggaatcctggccctgtcccacaccatcagccccttcatgaataagttttttccagccagctttccaaatcgacagtaccagctgctcttcacacagggttctggggaaaacaaggaagagatcatcaattatgaatttgacaccaaggacctggtgtgcctgggcctgagcagcatcgttggcgtctggtacctgctgaggaagcactggattgccaacaacctttttggcctggccttctcccttaatggagtagagctcctgcacctcaacaatgtcagcactggctgcatcctgctgggcggactcttcatctacgatgtcttctgggtgagtcaggcagggatgccaaggatgtctggctccggggccatctcatctcatcaccctgcctctctggcccaagttgcagtcatctgacggagaagagctgttttgggctgaagttccggaccgcagagcaagtcctctctgggcccatctgtgagatggagccagagagagcagattctacctctttctgagagcacactcatgcccggtgccttccgaccacctgcctctcttccttgctagcaggggtgttacctaatcccatgtctccttggcaagggagttgagactcaaagaagttcaggtaggggtggaagaatgttgatgaatgggcccagcaagggcattcacattcactctgagaggcatcaca

SEQ ID NO: 380154 - DNA, 664 bp, Homo sapiens
gatgagcaacttggacagcaacagggacaacgaggtggacttccaagagtactgtgtcttcctgtcctgcatcgccatgatgtgtaacgaattctttgaaggcttcccagataagcagcccaggaagaaatgaaaactcctctgatgtggttggggggtctgccactggggcagcgggcagccacttcgtgggcagcgctgcccacgaagtgacagagatgttcagttatgaggagtcaaatcctaaggatccagcggcagtgacagaatccaaagagggaacagaggcatcagcatcgaaggggctggagaagaaagagaaatgatgcagctggtgcccgagcctctcagggccagaccagacagatgggggctgggcccacacaggcgtgcaccggtagagggcacaggaggccaagggcagctccaggacagggcagggggcagcaggatacctccagccaggcctctgtggcctctgtttccttctccctttcttggccctcctctgctcctccccacaccctgcaggcaaaagaaacccccagcttcccccctccccgggagccaggtgggaaaagtgggtgtgatttttagattttgtattgtggactgattttgcctcacattaaaaactcatcccatggccagggcgggccactgt

SEQ ID NO: 380155 - DNA, 1285 bp, Homo sapiens
tgggaggcacgaggaacccttcctgttgccttaggggaacgtggctttccctgcagagccggtgtctccgcctgcgtccctgctgcagcaaccggagctggagtcggatcccgaacgcaccctcgccatggactcggccctcagcgatccgcataacggcagtgccgaggcaggcggccccaccaacagcactacgcggccgccttccacgcccgagggcatcgcgctggcctacggcagcctcctgctcatggcgctgctgcccatcttcttcggcgccctgcgctccgtacgctgcgcccgcggcaagaatgcttcagacatgcctgaaacaatcaccagccgggatgccgcccgcttccccatcatcgccagctgcacactcttggggctctacctctttttcaaaatattctcccaggagtacatcaacctcctgctgtccatgtatttcttcgtgctgggaatcctggccctgtcccacaccatcagtcagaaggcatctctctgcaacatttgaagcagctttctcgggaaccagtacagggtcttggatgagaacatgacttttggcatcattcagagccaggtttgaataatgacctctctgggccacagtttccttatagacatgatgaggatctggtgggtgtttccaccaccacagctgttgggaaagtgatttgtgagcagtaatgtcatgttagttgtgacagtactcaggtgagtaacaccagtaccacctgccgggtgttgtggcctagctgtgtgctaagtgccatgttgggctcctcacacatgatcgtgtttcgtaaggagccagaggcagcatagtgaaaagttaggagcgtgggctctggcatttgactaccttactttgagtccagactctgccacttaatagctctgtgatcttgggcaagttacttaatctctctggcctcaatttcctggtgaatgtggagaaaaataatagtgcccttcccatggggtcatgtggaaagcttttagcacagtatctggtgatttaaagtgttcagtaactattagctgttactgtcattatctgtgttaacctgccagacaaccttatatgggttgcttttgctttcacacctgtatgatagtcatggaaactgaagcccagagaggttaagaaatttgctaggatcacaccactaataagcaacagagcccggattcaaaccggtgtggtccagaggccatcctcttcccactgctaccctaactcaaactgccacatgctcgtgtcctttcagtgggg

SEQ ID NO: 380156 - DNA, 263 bp, Homo sapiens
aacttacgctaggtacgagcctgcggtgaaatcggccgaggattcttcgtgctgggaatctggccctgtcccacaccatcagccccttcatgaataagttttttccagccagctttccaaatcgacagtaccagctgctcttcacacagggttctggggaaaacaaggaagagatcatcaattatgaatcccacaccatcagccccttcatgaataagttttttccagccagctttccaaatcgggcaaagtgcaggaattgg

SEQ ID NO: 380157 - DNA, 438 bp, Homo sapiens
agtctgtttctcactggagcgcaggtttgggagcagcagcaacaccacatccttcggcacgctcgcgagtcagaatgcccccactttcggatcactgtcccaacagacttctggttttgggacccagagtagcggattctctggttttggatcaggcacaggagggttcagctttgggtcaaataactcgtctgtccagggttttggtggctggcgaagctgagggcgtgtcagcaggcctttcgatccctgggaccaaccgcatcctcagcttcttccccgagaaatgctggagcaggctgttcagaccgacgttgccatcaaaacacatacacccagaaagaaacaacagaaaccaaaactcacaaggcgcatgattacttgttttatatttcatgttgggttttccctcccactattaaacagtctgtttccgta

SEQ ID NO: 380158 - DNA, 344 bp, Homo sapiens
agcggccgctcgcgatctagaactacccacgcgtccggcggattctctggttttggatcaggcacaggagggttcagctttgggtcaaataactcgtctgtccagggttttggtggctggcgaagctgagggcgtgtcagcaggcctttcgatccctgggaccaaccgcatcctcagcttcttccccgagaaatgctggagcaggctgttcagaccgacgttgccatcaaaacacatacacccagaaagaaacaacagaaaccaaaactcacaaggcgcatgattacttgttttatatttcatgttgggttttccctcccactattaaacagtctgtttccgta

SEQ ID NO: 380159 - DNA, 6519 bp, Homo sapiens
gtcaactgcgcgccgctggcgctgaggggaggaagtttgctgtcgagcggcctgggttccgtgggcaaggccgtgggaggcagcgttggctgcttcgacacactgagggcggcgcgatgggagacgagatggatgccatgattcccgagcgggagatgaaggattttcagtttagagcgctaaagaaggtgagaatctttgactcccctgaggaattgcccaaggaacgctcgagtctgcttgctgtgtccaacaaatatggtctggtcttcgctggtggagccagtggcttgcagatttttcctactaaaaatcttcttattcaaaataaacccggagatgatcccaacaaaatagttgataaagtccaaggcttgctagttcctatgaaattcccaatccatcacctggccttgagctgtgataacctcacactctctgcgtgcatgatgtccagtgaatatggttccattattgctttttttgatgttcgcacattctcaaatgaggctaaacagcaaaaacgcccatttgcctatcataagcttttgaaagatgcaggaggcatggtgattgatatgaagtggaaccccactgtcccctccatggtggcagtttgtctggctgatggtagtattgctgtcctgcaagtcacggaaacagtgaaagtatgtgcaactcttccttccacggtagcagtaacctctgtgtgctggagccccaaaggaaagcagctggcagtgggaaaacagaatggaactgtggtccagtatcttcctactttgcaggaaaaaaaagtcattccttgtcctccgttttatgagtcagatcatcctgtcagagttctggatgtgctgtggattggtacctacgtcttcgccatagtgtatgctgctgcagatgggaccctggaaacgtctccagatgtggtgatggctctactaccgaaaaaagaagaaaagcacccagagatatttgtgaactttatggagccctgttatggcagctgcacggagagacagcatcattactacctcagttacattgaggaatgggatttagtgctggcagcatctgcggcttcaacagaagttagtatccttgctcgacaaagtgatcagattaattgggaatcttggctactggaggattctagtcgagctgaattgcctgtgacagacaagagtgatgactccttgcccatgggagttgtcgtagactatacaaaccaagtggaaatcaccatcagtgatgaaaagactcttcctcctgctccagttctcatgttactttcaacagatggtgtgctttgtccattttatatgattaatcaaaatcctggggttaagtctctcatcaaaacaccagagcgactttcattagaaggagagcgacagcccaagtcaccaggaagtactcccactaccccaacctcctctcaagccccacagaaactggatgcttctgcagctgcagcccctgcctctctgccaccttcatcacctgctgctcccattgccactttttctttgcttcctgctggtggagcccccactgtgttctcctttggttcttcatctttgaagtcatctgctacggtcactggggagcccccttcatattccagtggctccgacagctccaaagcagccccaggccctggcccatcaaccttctcttttgttcccccttctaaagcctccctagcccccacccctgcagcgtctcctgtggctccatcagctgcttcattctcctttggatcatctggttttaagcctaccctggaaagcacaccagtgccaagtgtgtctgctccaaatatagcaatgaagtcctccttcccaccctcaacctctgctgtcaaagtcaaccttagtgaaaagtttactgctgcagctacctctactcctgttagtagctcccagagcgcacccccgatgtcgccattctcttctgcctccaagccagctgcttctggaccactcagccaccccacacctctctcagcaccacctagttccgtgccattgaagtcctcagtcttgccctcaccatcaggacgatctgctcagggcagttcaagcccagtgccctcaatggtacagaaatcacccaggataacccctccagcggcaaagccaggctctccccaggcaaagtcacttcagcctgctgttgcagaaaagcagggacatcagtggaaagattcagatcctgtaatggctggaattggggaggagattgcacactttcagaaggagttggaagagttaaaagcccgaacttccaaagcctgtttccaagtgggcacttctgaggagatgaagatgctgcgaacagaatcagatgacttgcatacctttcttttggagattaaagagaccacagagtcgcttcatggagatataagtagcctgaaaacaactttacttgagggctttgctggtgttgaggaagccagagaacaaaatgaaagaaatcgtgactctggttatctgcatttgctttataaaagaccactggatcccaagagtgaagctcagcttcaggaaattcggcgccttcatcagtatgtgaaatttgctgtccaagatgtgaatgatgttctagacttggagtgggatcagcatctggaacaaaagaaaaaacaaaggcacctgcttgtgccagagcgagagacactgtttaacaccctagccaacaatcgggaaatcatcaaccaacagaggaagaggctgaatcacctggtggatagtcttcagcagctccgcctttacaaacagacttccctgtggagcctgtcctcggctgttccttcccagagcagcattcacagttttgacagtgacctggaaagcctgtgcaatgctttgttgaaaaccaccatagaatctcacaccaaatccttgcccaaagtaccagccaaactgtcccccatgaaacaggcacaactgagaaacttcttggccaagaggaagaccccaccagtgagatccactgctccagccagcctgtctcgatcagcctttctgtctcagagatattatgaagacttggatgaagtcagctcaacgtcatctgtctcccagtctctggagagtgaagatgcacggacgtcctgtaaagatgacgaggcagtggttcaggcccctcggcacgcccccgtggttcgcactccttccatccagcccagtctcttgccccatgcagcaccttttgctaaatctcacctggttcatggttcttcacctggtgtgatgggaacttcagtggctacatctgctagcaaaattattcctcaaggggccgatagcacaatgcttgccacgaaaaccgtgaaacatggtgcacctagtccttcccaccccatctcagccccgcaggcagctgccgcagcagcactcaggcggcagatggccagtcaggcaccagctgtaaacactttgactgaatcaacgttgaagaatgtccctcaagtggtaaatgtgcaggaattgaagaataaccctgcaaccccttctacagccatgggttcttcagtgccctactccacagccaaaacacctcacccagtgttgaccccagtggctgctaaccaagccaagcaggggtctctaataaattcccttaagccatctgggcctacaccagcatccggtcagttatcatctggtgacaaagcttcaggactggctttaattttgggataatcacaccaacaccgtcttctaatttcactgctgcacaaggggcaacaccctccactaaagagtcaagccagccggacgcattctcatctggtgggggaagcaaaccttcttatgaggccattcctgaaagctcacctccctcaggaatcacatccgcatcaaacaccaccccaggagaacctgccgcatctagcagcagacctgtggcaccttctggaactgctctttccaccacctctagtaagctggaaaccccaccgtccaagctgggagagcttctgtttccaagttctttggctggagagactctgggaagtttttcaggactgcgggttggccaagcagatgattctacaaaaccaaccaataaggcttcatccacaagcctaactagtacccagccaaccaagacgtcaggcgtgccctcagggtttaattttactgcccccccggtgttagggaagcacacggagccccctgtgacatcctctgcaaccaccacctcagtagtaccaccagcagccaccagcacttcctcaactgccgtttttggcagtctgccagtcaccagtgcaggatcctctggggtcatcagttttggtgggacatctctaagtgctggcaagactagtttttcatttggaagccaacagaccaatagcacagtgcccccatctgccccaccaccaactacagctgccactccccttccaacatcattccccacattgtcatttggtagcctcctgagttcagcaactaccccctccctgcctatgtccgctggcagaagcacagaagaggccacttcatcagctttgcctgagaagccaggtgacagtgaggtctcagcatcagcagcctcacttctagaggagcaacagtcagcccagcttccccaggctcctccgcaaacttctgactctgttaaaaaagaacctgttcttgcccagcctgcagtcagcaactctggcactgcagcatctagtactagtcttgtagcactttctgcagaggctaccccagccaccacgggggtccctgatgccaggacggaggcagtaccacctgcttcctccttttctgtgcctgggcagactgctgtcacagcagctgctatctcaagtgcaggccctgtggccgtcgaaacatcaagtacccccatagcctccagcaccacgtccattgttgctcccggcccatctgcagaggcagcagcatttggtaccgtcacttctggctcatccgtctttgctcagcctcctgctgccagttctagctcagctttcaaccagctcaccaacaacacagccactgccccctctgccacgcccgtgtttgggcaagtggcagccagcaccgcaccaagtctgtttgggcagcagactggtagcacagccagcacagcagctgccacaccacaggtcagcagctcagggtttagcagcccagcttttggtaccacagccccaggggtctttggacagacaaccttcgggcaggcctcagtctttgggcagtcggcgagcagtgctgcaagtgtcttttccttcagtcagcctgggttcagttccgtgcctgccttcggtcagcctgcttcctccactcccacatccaccagtggaagtgtctttggtgccgcctcaagtaccagtagctccagttccttctcatttggacagtcttctcccaacacaggaggggggctgtttggccaaagcaacgctcctgcttttgggcagagtcctggctttggacagggaggctctgtctttggtggtacctcagctgccaccacaacagcagcaacctctgggttcagcttttgccaagcttcaggttttgggtctagtaatactggttctgtgtttggtcaagcagccagtactggtggaatagtctttggccagcaatcatcctcttccagtggtagcgtgtttgggtctggaaacactggaagagggggaggtttcttcagtggccttggaggaaaacccagtcaggatgcagccaacaaaaacccattcagctcggccagtgggggctttggatccacagctacctcaaatacctctaacctatttggaaacagtggggccaagacatttggtggatttgccagctcgtcgtttggagagcagaaacccactggcactttcagctctggaggaggaagtgtggcatcccaaggctttgggttttcctctccaaacaaaacaggtggcttcggtgctgctccagtgtttggcagccctcctacttttgggggatcccctgggtttggaggggtgccagcattcggttcagccccagcctttacaagccctctgggctcgacgggaggcaaagtgttcggagagggcactgcagctgccagcgcaggaggattcgggtttgggagcagcagcaacaccacatccttcggcacgctcgcgagtcagaatgcccccactttcggatcactgtcccaacagacttctggttttgggacccagagtagcggattctctggttttggatcaggcacaggagggttcagctttgggtcaaataactcgtctgtccagggttttggtggctggcgaagctgagggcgtgtcagcaggcctttcgatccctgggaccaaccgcatcctcagcttcttccccgagaaatgctggagcaggctgttcagaccgacgttgccatcaaaacacatacacccagaaagaaacaacagaaaccaaaactcacaaggcgcatgattacttgttttatatttcatgttgggttttccctcccactattaaacagtctgtttccgta

SEQ ID NO: 380160 - DNA, 7582 bp, Homo sapiens
gtcaactgcgcgccgctggcgctgaggggaggaagtttgctgtcgagcggcctgggttccgtgggcaaggccgtgggaggcagcgttggctgcttcgacacactgagggcggcgcgatgggagacgagatggatgccatgattcccgagcgggagatgaaggattttcagtttagagcgctaaagaaggtgagaatctttgactcccctgaggaattgcccaaggaacgctcgagtctgcttgctgtgtccaacaaatatggtctggtcttcgctggtggagccagtggcttgcagatttttcctactaaaaatcttcttattcaaaataaacccggagatgatcccaacaaaatagttgataaagtccaaggcttgctagttcctatgaaattcccaatccatcacctggccttgagctgtgataacctcacactctctgcgtgcatgatgtccagtgaatatggttccattattgctttttttgatgttcgcacattctcaaatgaggctaaacagcaaaaacgcccatttgcctatcataagcttttgaaagatgcaggaggcatggtgattgatatgaagtggaaccccactgtcccctccatggtggcagtttgtctggctgatggtagtattgctgtcctgcaagtcacggaaacagtgaaagtatgtgcaactcttccttccacggtagcagtaacctctgtgtgctggagccccaaaggaaagcagctggcagtgggaaaacagaatggaactgtggtccagtatcttcctactttgcaggaaaaaaaagtcattccttgtcctccgttttatgagtcagatcatcctgtcagagttctggatgtgctgtggattggtacctacgtcttcgccatagtgtatgctgctgcagatgggaccctggaaacgtctccagatgtggtgatggctctactaccgaaaaaagaagaaaagcacccagagatatttgtgaactttatggagccctgttatggcagctgcacggagagacagcatcattactacctcagttacattgaggaatgggatttagtgctggcagcatctgcggcttcaacagaagttagtatccttgctcgacaaagtgatcagattaattgggaatcttggctactggaggattctagtcgagctgaattgcctgtgacagacaagagtgatgactccttgcccatgggagttgtcgtagactatacaaaccaagtggaaatcaccatcagtgatgaaaagactcttcctcctgctccagttctcatgttactttcaacagatggtgtgctttgtccattttatatgattaatcaaaatcctggggttaagtctctcatcaaaacaccagagcgactttcattagaaggagagcgacagcccaagtcaccaggaagtactcccactaccccaacctcctctcaagccccacagaaactggatgcttctgcagctgcagcccctgcctctctgccaccttcatcacctgctgctcccattgccactttttctttgcttcctgctggtggagcccccactgtgttctcctttggttcttcatctttgaagtcatctgctacggtcactggggagcccccttcatattccagtggctccgacagctccaaagcagccccaggccctggcccatcaaccttctcttttgttcccccttctaaagcctccctagcccccacccctgcagcgtctcctgtggctccatcagctgcttcattctcctttggatcatctggttttaagcctaccctggaaagcacaccagtgccaagtgtgtctgctccaaatatagcaatgaagtcctccttcccaccctcaacctctgctgtcaaagtcaaccttagtgaaaagtttactgctgcagctacctctactcctgttagtagctcccagagcgcacccccgatgtcgccattctcttctgcctccaagccagctgcttctggaccactcagccaccccacacctctctcagcaccacctagttccgtgccattgaagtcctcagtcttgccctcaccatcaggacgatctgctcagggcagttcaagcccagtgccctcaatggtacagaaatcacccaggataacccctccagcggcaaagccaggctctccccaggcaaagtcacttcagcctgctgttgcagaaaagcagggacatcagtggaaagattcagatcctgtaatggctggaattggggaggagattgcacactttcagaaggagttggaagagttaaaagcccgaacttccaaagcctgtttccaagtgggcacttctgaggagatgaagatgctgcgaacagaatcagatgacttgcatacctttcttttggagattaaagagaccacagagtcgcttcatggagatataagtagcctgaaaacaactttacttgagggctttgctggtgttgaggaagccagagaacaaaatgaaagaaatcgtgactctggttatctgcatttgctttataaaagaccactggatcccaagagtgaagctcagcttcaggaaattcggcgccttcatcagtatgtgaaatttgctgtccaagatgtgaatgatgttctagacttggagtgggatcagcatctggaacaaaagaaaaaacaaaggcacctgcttgtgccagagcgagagacactgtttaacaccctagccaacaatcgggaaatcatcaaccaacagaggaagaggctgaatcacctggtggatagtcttcagcagctccgcctttacaaacagacttccctgtggagcctgtcctcggctgttccttcccagagcagcattcacagttttgacagtgacctggaaagcctgtgcaatgctttgttgaaaaccaccatagaatctcacaccaaatccttgcccaaagtaccagccaaactgtcccccatgaaacaggcacaactgagaaacttcttggccaagaggaagaccccaccagtgagatccactgctccagccagcctgtctcgatcagcctttctgtctcagagatattatgaagacttggatgaagtcagctcaacgtcatctgtctcccagtctctggagagtgaagatgcacggacgtcctgtaaagatgacgaggcagtggttcaggcccctcggcacgcccccgtggttcgcactccttccatccagcccagtctcttgccccatgcagcaccttttgctaaatctcacctggttcatggttcttcacctggtgtgatgggaacttcagtggctacatctgctagcaaaattattcctcaaggggccgatagcacaatgcttgccacgaaaaccgtgaaacatggtgcacctagtccttcccaccccatctcagccccgcaggcagctgccgcagcagcactcaggcggcagatggccagtcaggcaccagctgtaaacactttgactgaatcaacgttgaagaatgtccctcaagtggtaaatgtgcaggaattgaagaataaccctgcaaccccttctacagccatgggttcttcagtgccctactccacagccaaaacacctcacccagtgttgaccccagtggctgctaaccaagccaagcaggggtctctaataaattcccttaagccatctgggcctacaccagcatccggtcagttatcatctggtgacaaagcttcagggacagccaagatagaaacagctgtgacttcaaccccatctgcttctgggcagttcagcaagcctttctcattttctccatcagggactggctttaattttgggataatcacaccaacaccgtcttctaatttcactgctgcacaaggggcaacaccctccactaaagagtcaagccagccggacgcattctcatctggtgggggaagcaaaccttcttatgaggccattcctgaaagctcacctccctcaggaatcacatccgcatcaaacaccaccccaggagaacctgccgcatctagcagcagacctgtggcaccttctggaactgctctttccaccacctctagtaagctggaaaccccaccgtccaagctgggagagcttctgtttccaagttctttggctggagagactctgggaagtttttcaggactgcgggttggccaagcagatgattctacaaaaccaaccaataaggcttcatccacaagcctaactagtacccagccaaccaagacgtcaggcgtgccctcagggtttaattttactgcccccccggtgttagggaagcacacggagccccctgtgacatcctctgcaaccaccacctcagtagtaccaccagcagccaccagcacttcctcaactgccgtttttggcagtctgccagtcaccagtgcaggatcctctggggtcatcagttttggtgggacatctctaagtgctggcaagactagtttttcatttggaagccaacagaccaatagcacagtgcccccatctgccccaccaccaactacagctgccactccccttccaacatcattccccacattgtcatttggtagcctcctgagttcagcaactaccccctccctgcctatgtccgctggcagaagcacagaagaggccacttcatcagctttgcctgagaagccaggtgacagtgaggtctcagcatcagcagcctcacttctagaggagcaacagtcagcccagcttccccaggctcctccgcaaacttctgactctgttaaaaaagaacctgttcttgcccagcctgcagtcagcaactctggcactgcagcatctagtactagtcttgtagcactttctgcagaggctaccccagccaccacgggggtccctgatgccaggacggaggcagtaccacctgcttcctccttttctgtgcctgggcagactgctgtcacagcagctgctatctcaagtgcaggccctgtggccgtcgaaacatcaagtacccccatagcctccagcaccacgtccattgttgctcccggcccatctgcagaggcagcagcatttggtaccgtcacttctggctcatccgtctttgctcagcctcctgctgccagttctagctcagctttcaaccagctcaccaacaacacagccactgccccctctgccacgcccgtgtttgggcaagtggcagccagcaccgcaccaagtctgtttgggcagcagactggtagcacagccagcacagcagctgccacaccacaggtcagcagctcagggtttagcagcccagcttttggtaccacagccccaggggtctttggacagacaaccttcgggcaggcctcagtctttgggcagtcggcgagcagtgctgcaagtgtcttttccttcagtcagcctgggttcagttccgtgcctgccttcggtcagcctgcttcctccactcccacatccaccagtggaagtgtctttggtgccgcctcaagtaccagtagctccagttccttctcatttggacagtcttctcccaacacaggaggggggctgtttggccaaagcaacgctcctgcttttgggcagagtcctggctttggacagggaggctctgtctttggtggtacctcagctgccaccacaacagcagcaacctctgggttcagcttttgccaagcttcaggttttgggtctagtaatactggttctgtgtttggtcaagcagccagtactggtggaatagtctttggccagcaatcatcctcttccagtggtagcgtgtttgggtctggaaacactggaagagggggaggtttcttcagtggccttggaggaaaacccagtcaggatgcagccaacaaaaacccattcagctcggccagtgggggctttggatccacagctacctcaaatacctctaacctatttggaaacagtggggccaagacatttggtggatttgccagctcgtcgtttggagagcagaaacccactggcactttcagctctggaggaggaagtgtggcatcccaaggctttgggttttcctctccaaacaaaacaggtggcttcggtgctgctccagtgtttggcagccctcctacttttgggggatcccctgggtttggaggggtgccagcattcggttcagccccagcctttacaagccctctgggctcgacgggaggcaaagtgttcggagagggcactgcagctgccagcgcaggaggattcgggtttgggagcagcagcaacaccacatccttcggcacgctcgcgagtcagaatgcccccactttcggatcactgtcccaacagacttctggttttgggacccagagtagcggattctctggttttggatcaggcacaggagggttcagctttgggtcaaataactcgtctgtccagggttttggtggctggcgaagctgagggcgtgtcagcaggcctttcgatccctgggaccaaccgcatcctcagcttcttccccgagaaatgctggagcaggctgttcagaccgacgttgccatcaaaacacatacacccagaaagaaacaacagaaaccaaaactcacaaggcgcatgattacttgttttatatttcatgttgggttttccctcccactattaaacagtctgtttccgtaacagaacgtatgtgggttttttcagatcacagccaagaagattgccccgtttctgtggctctgagaagccagcagagcctccatcagccagaacactgtgtcttcaaggatggcatcagaagtcaccagcgtcgggtgttgataaacagcatcgaatgtgccgtggtctcacttggacctagcgccctccacatagggaagaggttgaatgctggtgggtcatctttttgaggctgaaacttggttatctcctctccttgttcttttagccattgtgtatcaggaccatccaaggacgcactctgcgattgagtggaggcagaggaagccactcatgccagcagcagttgagtttcagaagcagccatagcgcttttcagtacagtacaatagtagccagcgtgaggcaggacagtgctgcgccttagccggccttggctctcatctccatgtggctcttgggtgccatgtgtcctactccagagaggagggggccggtcacttgagaagacagcctttatattctgtatgtggcagtgacattggtagccacacctacccagtgtctactaaccacagtgcagatagcccttgggtagacccaggaagtgtgaagacagacactgctgttgccagacaacactagcagaacgatgctggatttgacaacagtgtttgctaggacggcccagagctcatcactgcagttttattagagtgcttctttatctttaatgcagtatctttgaggcctgtaacatcctagatagttgccatcaaacaaggaccgtctcgcattgaaaacagatgtaagaatttctctttcaggcccagaatctgacagtgctttggcttgggtcatgagcagcggggagttgggaagagatttttttttttagagttttacatattggcaggttgtatttttttaatgttttaataaaagtttgacatgacattaattcatcatgttgcaga

SEQ ID NO: 380161 - DNA, 6537 bp, Homo sapiens
gtcaactgcgcgccgctggcgctgaggggaggaagtttgctgtcgagcggcctgggttccgtgggcaaggccgtgggaggcagcgttggctgcttcgacacactgagggcggcgcgatgggagacgagatggatgccatgattcccgagcgggagatgaaggattttcagtttagagcgctaaagaaggtgagaatctttgactcccctgaggaattgcccaaggaacgctcgagtctgcttgctgtgtccaacaaatatggtctggtcttcgctggtggagccagtggcttgcagatttttcctactaaaaatcttcttattcaaaataaacccggagatgatcccaacaaaatagttgataaagtccaaggcttgctagttcctatgaaattcccaatccatcacctggccttgagctgtgataacctcacactctctgcgtgcatgatgtccagtgaatatggttccattattgctttttttgatgttcgcacattctcaaatgaggctaaacagcaaaaacgcccatttgcctatcataagcttttgaaagatgcaggaggcatggtgattgatatgaagtggaaccccactgtcccctccatggtggcagtttgtctggctgatggtagtattgctgtcctgcaagtcacggaaacagtgaaagtatgtgcaactcttccttccacggtagcagtaacctctgtgtgctggagccccaaaggaaagcagctggcagtgggaaaacagaatggaactgtggtccagtatcttcctactttgcaggaaaaaaaagtcattccttgtcctccgttttatgagtcagatcatcctgtcagagttctggatgtgctgtggattggtacctacgtcttcgccatagtgtatgctgctgcagatgggaccctggaaacgtctccagatgtggtgatggctctactaccgaaaaaagaagaaaagcacccagagatatttgtgaactttatggagccctgttatggcagctgcacggagagacagcatcattactacctcagttacattgaggaatgattaattgggaatcttggctactggaggattctagtcgagctgaattgcctgtgacagacaagagtgatgactccttgcccatgggagttgtcgtagactatacaaaccaagtggaaatcaccatcagtgatgaaaagactcttcctcctgctccagttctcatgttactttcaacagatggtgtgctttgtccattttatatgattaatcaaaatcctggggttaagtctctcatcaaaacaccagagcgactttcattagaaggagagcgacagcccaagtcaccaggaagtactcccactaccccaacctcctctcaagccccacagaaactggatgcttctgcagctgcagcccctgcctctctgccaccttcatcacctgctgctcccattgccactttttctttgcttcctgctggtggagcccccactgtgttctcctttggttcttcatctttgaagtcatctgctacggtcactggggagcccccttcatattccagtggctccgacagctccaaagcagccccaggccctggcccatcaaccttctcttttgttcccccttctaaagcctccctagcccccacccctgcagcgtctcctgtggctccatcagctgcttcattctcctttggatcatctggttttaagcctaccctggaaagcacaccagtgccaagtgtgtctgctccaaatatagcaatgaagtcctccttcccaccctcaacctctgctgtcaaagtcaaccttagtgaaaagtttactgctgcagctacctctactcctgttagtagctcccagagcgcacccccgatgtcgccattctcttctgcctccaagccagctgcttctggaccactcagccaccccacacctctctcagcaccacctagttccgtgccattgaagtcctcagtcttgccctcaccatcaggacgatctgctcagggcagttcaagcccagtgccctcaatggtacagaaatcacccaggataacccctccagcggcaaagccaggctctccccaggcaaagtcacttcagcctgctgttgcagaaaagcagggacatcagtggaaagattcagatcctgtaatggctggaattggggaggagattgcacactttcagaaggagttggaagagttaaaagcccgaacttccaaagcctgtttccaagtgggcacttctgaggagatgaagatgctgcgaacagaatcagatgacttgcatacctttcttttggagattaaagagaccacagagtcgcttcatggagatataagtagcctgaaaacaactttacttgagggctttgctggtgttgaggaagccagagaacaaaatgaaagaaatcgtgactctggttatctgcatttgctttataaaagaccactggatcccaagagtgaagctcagcttcaggaaattcggcgccttcatcagtatgtgaaatttgctgtccaagatgtgaatgatgttctagacttggagtgggatcagcatctggaacaaaagaaaaaacaaaggcacctgcttgtgccagagcgagagacactgtttaacaccctagccaacaatcgggaaatcatcaaccaacagaggaagaggctgaatcacctggtggatagtcttcagcagctccgcctttacaaacagacttccctgtggagcctgtcctcggctgttccttcccagagcagcattcacagttttgacagtgacctggaaagcctgtgcaatgctttgttgaaaaccaccatagaatctcacaccaaatccttgcccaaagtaccagccaaactgtcccccatgaaacaggcacaactgagaaacttcttggccaagaggaagaccccaccagtgagatccactgctccagccagcctgtctcgatcagcctttctgtctcagagatattatgaagacttggatgaagtcagctcaacgtcatctgtctcccagtctctggagagtgaagatgcacggacgtcctgtaaagatgacgaggcagtggttcaggcccctcggcacgcccccgtggttcgcactccttccatccagcccagtctcttgccccatgcagcaccttttgctaaatctcacctggttcatggttcttcacctggtgtgatgggaacttcagtggctacatctgctagcaaaattattcctcaaggggccgatagcacaatgcttgccacgaaaaccgtgaaacatggtgcacctagtccttcccaccccatctcagccccgcaggcagctgccgcagcagcactcaggcggcagatggccagtcaggcaccagctgtaaacactttgactgaatcaacgttgaagaatgtccctcaagtggtaaatgtgcaggaattgaagaataaccctgcaaccccttctacagccatgggttcttcagtgccctactccacagccaaaacacctcacccagtgttgaccccagtggctgctaaccaagccaagcaggggtctctaataaattcccttaagccatctgggcctacaccagcatccggtcagttatcatctggtgacaaagcttcagggacagccaagatagaaacagctgtgacttcaaccccatctgcttctgggcagttcagcaagcctttctcattttctccatcagggactggctttaattttgggataatcacaccaacaccgtcttctaatttcactgctgcacaaggggcaacaccctccactaaagagtcaagccagccggacgcattctcatctggtgggggaagcaaaccttcttatgaggccattcctgaaagctcacctccctcaggaatcacatccgcatcaaacaccaccccaggagaacctgccgcatctagcagcagacctgtggcaccttctggaactgctctttccaccacctctagtaagctggaaaccccaccgtccaagctgggagagcttctgtttccaagttctttggctggagagactctgggaagtttttcaggactgcgggttggccaagcagatgattctacaaaaccaaccaataaggcttcatccacaagcctaactagtacccagccaaccaagacgtcaggcgtgccctcagggtttaattttactgcccccccggtgttagggaagcacacggagccccctgtgacatcctctgcaaccaccacctcagtagtaccaccagcagccaccagcacttcctcaactgccgtttttggcagtctgccagtcaccagtgcaggatcctctggggtcatcagttttggtgggacatctctaagtgctggcaagactagtttttcatttggaagccaacagaccaatagcacagtgcccccatctgccccaccaccaactacagctgccactccccttccaacatcattccccacattgtcatttggtagcctcctgagttcagcaactaccccctccctgcctatgtccgctggcagaagcacagaagaggccacttcatcagctttgcctgagaagccaggtgacagtgaggtctcagcatcagcagcctcacttctagaggagcaacagtcagcccagcttccccaggctcctccgcaaacttctgactctgttaaaaaagaacctgttcttgcccagcctgcagtcagcaactctggcactgcagcatctagtactagtcttgtagcactttctgcagaggctaccccagccaccacgggggtccctgatgccaggacggaggcagtaccacctgcttcctccttttctgtgcctgggcagactgctgtcacagcagctgctatctcaagtgcaggccctgtggccgtcgaaacatcaagtacccccatagcctccagcaccacgtccattgttgctcccggcccatctgcagaggcagcagcatttggtaccgtcacttctggctcatccgtctttgctcagcctcctgctgccagttctagctcagctttcaaccagctcaccaacaacacagccactgccccctctgccacgcccgtgtttgggcaagtggcagccagcaccgcaccaagtctgtttgggcagcagactggtagcacagccagcacagcagctgccacaccacaggtcagcagctcagggtttagcagcccagcttttggtaccacagccccaggggtctttggacagacaaccttcgggcaggcctcagtctttgggcagtcggcgagcagtgctgcaagtgtcttttccttcagtcagcctgggttcagttccgtgcctgccttcggtcagcctgcttcctccactcccacatccaccagtggaagtgtctttggtgccgcctcaagtaccagtagctccagttccttctcatttggacagtcttctcccaacacaggaggggggctgtttggccaaagcaacgctcctgcttttgggcagagtcctggctttggacagggaggctctgtctttggtggtacctcagctgccaccacaacagcagcaacctctgggttcagcttttgccaagcttcaggttttgggtctagtaatactggttctgtgtttggtcaagcagccagtactggtggaatagtctttggccagcaatcatcctcttccagtggtagcgtgtttgggtctggaaacactggaagagggggaggtttcttcagtggccttggaggaaaacccagtcaggatgcagccaacaaaaacccattcagctcggccagtgggggctttggatccacagctacctcaaatacctctaacctatttggaaacagtggggccaagacatttggtggatttgccagctcgtcgtttggagagcagaaacccactggcactttcagctctggaggaggaagtgtggcatcccaaggctttgggttttcctctccaaacaaaacaggtggcttcggtgctgctccagtgtttggcagccctcctacttttgggggatcccctgggtttggaggggtgccagcattcggttcagccccagcctttacaagccctctgggctcgacgggaggcaaagtgttcggagagggcactgcagctgccagcgcaggaggattcgggtttgggagcagcagcaacaccacatccttcggcacgctcgcgagtcagaatgcccccactttcggatcactgtcccaacagacttctggttttgggacccagagtagcggattctctggttttggatcaggcacaggagggttcagctttgggtcaaataactcgtctgtccagggttttggtggctggcgaagctgagggcgtgtcagcaggcctttcgatccctgggaccaaccgcatcctcagcttcttccccgagaaatgctggagcaggctgttcagaccgacgttgccatcaaaacacatacacccagaaagaaacaacagaaaccaaaactcacaaggcgcatgattacttgttttatatttcatgttgggttttccctcccactattaaacagtctgtttccgta

SEQ ID NO: 380162 - DNA, 6102 bp, Homo sapiens
gtcaactgcgcgccgctggcgctgaggggaggaagtttgctgtcgagcggcctgggttccgtgggcaaggccgtgggaggcagcgttggctgcttcgacacactgagggcggcgcgatgggagacgagatggatgccatgattcccgagcgggagatgaaggattttcagtttagagcgctaaagaaggtgagaatctttgactcccctgaggaattgcccaaggaacgctcgagtctgcttgctgtgtccaacaaatatggtctggtcttcgctggtggagccagtggcttgcagatttttcctactaaaaatcttcttattcaaaataaacccggagatgatcccaacaaaatagttgataaagtccaaggcttgctagttcctatgaaattcccaatccatcacctggccttgagctgtgataacctcacactctctgcgtgcatgatgtccagtgaatatggttccattattgctttttttgatgttcgcacattctcaaatgaggctaaacagcaaaaacgcccatttgcctatcataagcttttgaaagatgcaggaggcatggtgattgatatgaagtggaaccccactgtcccctccatggtggcagtttgtctggctgatggtagtattgctgtcctgcaagtcacggaaacagtgaaagtatgtgcaactcttccttccacggtagcagtaacctctgtgtgctggagccccaaaggaaagcagctggcagtgggaaaacagaatggaactgtggtccagtatcttcctactttgcaggaaaaaaaagtcattccttgtcctccgttttatgagtcagatcatcctgtcagagttctggatgtgctgtggattggtacctacgtcttcgccatagtgtatgctgctgcagatgggaccctggaaacgtctccagatgtggtgatggctctactaccgaaaaaagaagaaaagcacccagagatatttgtgaactttatggagccctgttatggcagctgcacggagagacagcatcattactacctcagttacattgaggaatgggatttagtgctggcagcatctgcggcttcaacagaagttagtatccttgctcgacaaagtgatcagattaattgggaatcttggctactggaggattctagtcgagctgaattgcctgtgacagacaagagtgatgactccttgcccatgggagttgtcgtagactatacaaaccaagtggaaatcaccatcagtgatgaaaagactcttcctcctgctccagttctcatgttactttcaacagatggtgtgctttgtccattttatatgattaatcaaaatcctggggttaagtctctcatcaaaacaccagagcgactttcattagaaggagagcgacagcccaagtcaccaggaagtactcccactaccccaacctcctctcaagccccacagaaactggatgcttctgcagctgcagcccctgcctctctgccaccttcatcacctgctgctcccattgccactttttctttgcttcctgctggtggagcccccactgtgttctcctttggttcttcatctttgaagtcatctgctacggtcactggggagcccccttcatattccagtggctccgacagctccaaagcagccccaggccctggcccatcaaccttctcttttgttcccccttctaaagcctccctagcccccacccctgcagcgtctcctgtggctccatcagctgcttcattctcctttggatcatctggttttaagcctaccctggaaagcacaccagtgccaagtgtgtctgctccaaatatagcaatgaagtcctccttcccaccctcaacctctgctgtcaaagtcaaccttagtgaaaagtttactgctgcagctacctctactcctgttagtagctcccagagcgcacccccgatgtcgccattctcttctgcctccaagccagctgcttctggaccactcagccaccccacacctctctcagcaccacctagttccgtgccattgaagtcctcagtcttgccctcaccatcaggacgatctgctcagggcagttcaagcccagtgccctcaatggtacagaaatcacccaggataacccctccagcggcaaagccaggctctccccaggcaaagtcacttcagcctgctgttgcagaaaagcagggacatcagtggaaagattcagatcctgtaatggctggaattggggaggagattgcacactttcagaaggagttggaagagttaaaagcccgaacttccaaagcctgtttccaagtgggcacttctgaggagatgaagatgctgcgaacagaatcagatgacttgcatacctttcttttggagattaaagagaccacagagtcgcttcatggagatataagtagcctgaaaacaactttacttgagggctttgctggtgttgaggaagccagagaacaaaatgaaagaaatcgtgactctggttatctgcatttgctttataaaagaccactggatcccaagagtgaagctcagcttcaggaaattcggcgccttcatcagtatgtgaaatttgctgtccaagatgtgaatgatgttctagacttggagtgggatcagcatctggaacaaaagaaaaaacaaaggcacctgcttgtgccagagcgagagacactgtttaacaccctagccaacaatcgggaaatcatcaaccaacagaggaagaggctgaatcacctggtggatagtcttcagcagctccgcctttacaaacagacttccctgtggagcctgtcctcggctgttccttcccagagcagcattcacagttttgacagtgacctggaaagcctgtgcaatgctttgttgaaaaccaccatagaatctcacaccaaatccttgcccaaagtaccagccaaactgtcccccatgaaacaggcacaactgagaaacttcttggccaagaggaagaccccaccagtgagatccactgctccagccagcctgtctcgatcagcctttctgtctcagagatattatgaagacttggatgaagtcagctcaacgtcatctgtctcccagtctctggagagtgaagatgcacggacgtcctgtaaagatgacgaggcagtggttcaggcccctcggcacgcccccgtggttcgcactccttccatccagcccagtctcttgccccatgcagcaccttttgctaaatctcacctggttcatggttcttcacctggtgtgatgggaacttcagtggctacatctgctagcaaaattattcctcaaggggccgatagcacaatgcttgccacgaaaaccgtgaaacatggtgcacctagtccttcccaccccatctcagccccgcaggcagctgccgcagcagcactcaggcggcagatggccagtcaggcaccagctgtaaacactttgactgaatcaacgttgaagaatgtccctcaagtggtaaatgtgcaggaattgaagaataaccctgcaaccccttctacagccatgggttcttcagtgccctactccacagccaaaacacctcacccagtgttgaccccagtggctgctaaccaagccaagcaggggtctctaataaattcccttaagccatctgggcctacaccagcatccggtcagttatcatctggtgacaaagcttcagggacagccaagatagaaacagctgtgacttcaaccccatctgcttctgggcagttcagcaagcctttctcattttctccatcagggactggctttaattttgggataatcacaccaacaccgtcttctaatttcactgctgcacaaggggcaacaccctccactaaagagtcaagccagccggacgcattctcatctggtgggggaagcaaaccttcttatgaggccattcctgaaagctcacctccctcaggaatcacatccgcatcaaacaccaccccaggagaacctgccgcatctagcagcagacctgtggcaccttctggaactgctctttccaccacctctacctcctgagttcagcaactaccccctccctgcctatgtccgctggcagaagcacagaagaggccacttcatcagctttgcctgagaagccaggtgacagtgaggtctcagcatcagcagcctcacttctagaggagcaacagtcagcccagcttccccaggctcctccgcaaacttctgactctgttaaaaaagaacctgttcttgcccagcctgcagtcagcaactctggcactgcagcatctagtactagtcttgtagcactttctgcagaggctaccccagccaccacgggggtccctgatgccaggacggaggcagtaccacctgcttcctccttttctgtgcctgggcagactgctgtcacagcagctgctatctcaagtgcaggccctgtggccgtcgaaacatcaagtacccccatagcctccagcaccacgtccattgttgctcccggcccatctgcagaggcagcagcatttggtaccgtcacttctggctcatccgtctttgctcagcctcctgctgccagttctagctcagctttcaaccagctcaccaacaacacagccactgccccctctgccacgcccgtgtttgggcaagtggcagccagcaccgcaccaagtctgtttgggcagcagactggtagcacagccagcacagcagctgccacaccacaggtcagcagctcagggtttagcagcccagcttttggtaccacagccccaggggtctttggacagacaaccttcgggcaggcctcagtctttgggcagtcggcgagcagtgctgcaagtgtcttttccttcagtcagcctgggttcagttccgtgcctgccttcggtcagcctgcttcctccactcccacatccaccagtggaagtgtctttggtgccgcctcaagtaccagtagctccagttccttctcatttggacagtcttctcccaacacaggaggggggctgtttggccaaagcaacgctcctgcttttgggcagagtcctggctttggacagggaggctctgtctttggtggtacctcagctgccaccacaacagcagcaacctctgggttcagcttttgccaagcttcaggttttgggtctagtaatactggttctgtgtttggtcaagcagccagtactggtggaatagtctttggccagcaatcatcctcttccagtggtagcgtgtttgggtctggaaacactggaagagggggaggtttcttcagtggccttggaggaaaacccagtcaggatgcagccaacaaaaacccattcagctcggccagtgggggctttggatccacagctacctcaaatacctctaacctatttggaaacagtggggccaagacatttggtggatttgccagctcgtcgtttggagagcagaaacccactggcactttcagctctggaggaggaagtgtggcatcccaaggctttgggttttcctctccaaacaaaacaggtggcttcggtgctgctccagtgtttggcagccctcctacttttgggggatcccctgggtttggaggggtgccagcattcggttcagccccagcctttacaagccctctgggctcgacgggaggcaaagtgttcggagagggcactgcagctgccagcgcaggaggattcgggtttgggagcagcagcaacaccacatccttcggcacgctcgcgagtcagaatgcccccactttcggatcactgtcccaacagacttctggttttgggacccagagtagcggattctctggttttggatcaggcacaggagggttcagctttgggtcaaataactcgtctgtccagggttttggtggctggcgaagctgagggcgtgtcagcaggcctttcgatccctgggaccaaccgcatcctcagcttcttccccgagaaatgctggagcaggctgttcagaccgacgttgccatcaaaacacatacacccagaaagaaacaacagaaaccaaaactcacaaggcgcatgattacttgttttatatttcatgttgggttttccctcccactattaaacagtctgtttccgta

SEQ ID NO: 380163 - DNA, 6543 bp, Homo sapiens
gtcaactgcgcgccgctggcgctgaggggaggaagtttgctgtcgagcggcctgggttccgtgggcaaggccgtgggaggcagcgttggctgcttcgacacactgagggcggcgcgatgggagacgagatggatgccatgattcccgagcgggagatgaaggattttcagtttagagcgctaaagaaggtgagaatctttgactcccctgaggaattgcccaaggaacgctcgagtctgcttgctgtgtccaacaaatatggtctggtcttcgctggtggagccagtggcttgcagatttttcctactaaaaatcttcttattcaaaataaacccggagatgatcccaacaaaatagttgataaagtccaaggcttgctagttcctatgaaattcccaatccatcacctggccttgagctgtgataacctcacactctctgcgtgcatgatgtccagtgaatatggttccattattgctttttttgatgttcgcacattctcaaatgaggctaaacagcaaaaacgcccatttgcctatcataagcttttgaaagatgcaggaggcatggtgattgatatgaagtggaaccccactgtcccctccatggtggcagtttgtctggctgatggtagtattgctgtcctgcaagtcacggaaacagtgaaagtatgtgcaactcttccttccacggtagcagtaacctctgtgtgctggagccccaaaggaaagcagctggcagtgggaaaacagaatggaactgtggtccagtatcttcctactttgcaggaaaaaaaagtcattccttgtcctccgttttatgagtcagatcatcctgtcagagttctggatgtgctgtggattggtacctacgtcttcgccatagtgtatgctgctgcagatgggaccctggaaacgtctccagatgtggtgatggctctactaccgaaaaaagaagaaaagcacccagagatatttgtgaactttatggagccctgttatggcagctgcacggagagacagcatcattactacctcagttacattgaggaatgggatttagtgctggcagcatctgcggcttcaacagaagttagtatccttgctcgacaaagtgatcagattaattgggaatcttggctactggaggattctagtcgagctgaattgcctgtgacagacaagagtgatgactccttgcccatgggagttgtcgtagactatacaaaccaagtggaaatcaccatcagtgatgaaaagactcttcctcctgctccagttctcatgttactttcaacagatggtgtgctttgtccattttatatgattaatcaaaatcctggggttaagtctctcatcaaaacaccagagcgactttcattagaaggagagcgacagcccaagtcaccaggaagtactcccactaccccaacctcctctcaagccccacagaaactggatgcttctgcagctgcagcccctgcctctctgccaccttcatcacctgctgctcccattgccactttttctttgcttcctgctggtggagcccccactgtgttctcctttggttcttcatctttgaagtcatctgctacggtcactggggagcccccttcatattccagtggctccgacagctccaaagcagccccaggccctggcccatcaaccttctcttttgttcccccttctaaagcctccctagcccccacccctgcagcgtctcctgtggctccatcagctgcttcattctcctttggatcatctggttttaagcctaccctggaaagcacaccagtgccaagtgtgtctgctccaaatatagcaatgaagtcctccttcccaccctcaacctctgctgtcaaagtcaaccttagtgaaaagtttactgctgcagctacctctactcctgttagtagctcccagagcgcacccccgatgtcgccattctcttctgcctccaagccagctgcttctggaccactcagccaccccacacctctctcagcaccacctagttccgtgccattgaagtcctcagtcttgccctcaccatcaggacgatctgctcagggcagttcaagcccagtgccctcaatggtacagaaatcacccaggataacccctccagcggcaaagccaggctctccccaggcaaagtcacttcagcctgctgttgcagaaaagcagggacatcagtggaaagattcagatcctgtaatggctggaattggggaggagattgcacactttcagaaggagttggaagagttaaaagcccgaacttccaaagcctgtttccaagtgggcacttctgaggagatgaagatgctgcgaacagaatcagatgacttgcatacctttcttttggagattaaagagaccacagagtcgcttcatggagatataagtagcctgaaaacaactttacttgagggctttgctggtgttgaggaagccagagaacaaaatgaaagaaatcgtgactctggttatctgcatttgctttataaaagaccactggatcccaagagtgaagctcagcttcaggaaattcggcgccttcatcagtatgtgaaatttgctgtccaagatgtgaatgatgttctagacttggagtgggatcagcatctggaacaaaagaaaaaacaaaggcacctgcttgtgccagagcgagagacactgtttaacaccctagccaacaatcgggaaatcatcaaccaacagaggaagaggctgaatcacctggtggatagtcttcagcagctccgcctttacaaacagacttccctgtggagcctgtcctcggctgttccttcccagagcagcattcacagttttgacagtgacctggaaagcctgtgcaatgctttgttgaaaaccaccatagaatctcacaccaaatccttgcccaaagtaccagccaaactgtcccccatgaaacaggcacaactgagaaacttcttggccaagaggaagaccccaccagtgagatccactgctccagccagcctgtctcgatcagcctttctgtctcagagatattatgaagacttggatgaagtcagctcaacgtcatctgtctcccagtctctggagagtgaagatgcacggacgtcctgtaaagatgacgaggcagtggttcaggcccctcggcacgcccccgtggttcgcactccttccatccagcccagtctcttgccccatgcagcaccttttgctaaatctcacctggttcatggttcttcacctggtgtgatgggaacttcagtggctacatctgctagcaaaattattcctcaaggggccgatagcacaatgcttgccacgaaaaccgtgaaacatggtgcacctagtccttcccaccccatctcagccccgcaggcagctgccgcagcagcactcaggcggcagatggccagtcaggcaccagctgtaaacactttgactgaatcaacgttgaagaatgtccctcaagtggtaaatgtgcaggaattgaagaataaccctgcaaccccttctacagccatgggttcttcagtgccctactccacagccaaaacacctcacccagtgttgaccccagtggctgctaaccaagccaagcaggggtctctaataaattcccttaagccatctgggcctacaccagcatccggtcagttatcatctggtgacaaagcttcagggacagccaagatagaaacagctgtgacttcaaccccatctgcttctgggcagttcagcaagcctttctcattttctccatcagggactggctttaattttgggataatcacaccaacaccgtcttctaatttcactgctgcacaaggggcaacaccctccactaaagagtcaagccagccggacgcattctcatctggtgggggaagcaaaccttcttatgaggccattcctgaaagctcacctccctcaggaatcacatccgcatcaaacaccaccccaggagaacctgccgcatctagcagcagacctgtggcaccttctggaactgctctttccaccacctctagtaagctggaaaccccaccgtccaagctgggagagcttctgtttccaagttctttggctggagagactctgggaagtttttcaggactgcgggttggccaagcagatgattctacaaaaccaaccaataaggcttcatccacaagcctaactagtacccagccaaccaagacgtcaggcgtgccctcagggtttaattttactgcccccccggtgttagggaagcacacggagccccctgtgacatcctctgcaaccaccacctcagtagtaccaccagcagccaccagcacttcctcaactgccgtttttggcagtctgccagtcaccagtgcaggatcctctggggtcatcagttttggtgggacatctctaagtgctggcaagactagtttttcatttggaagccaacagaccaatagcacagtgcccccatctgccccaccaccaactacagctgccactccccttccaacatcattccccacattgtcatttggtagcctcctgagttcagcaactaccccctccctgcctatgtccgctggcagaagcacagaagaggccacttcatcagctttgcctgagaagccaggtgacagtgaggtctcagcatcagcagcctcacttctagaggagcaacagtcagcccagcttccccaggctcctccgcaaacttctgactctgttaaaaaagaacctgttcttgcccagcctgcagtcagcaactctggcactgcagcatctagtactagtcttgtagcactttctgcagaggctaccccagccaccacgggggtccctgatgccaggacggaggcagtaccacctgcttcctccttttctgtgcctgggcagactgctgtcacagcagctgctatctcaagtgcaggccctgtggccgtcgaaacatcaagtacccccatagcctccagcaccacgtccattgttgctcccggcccatctgcagaggcagcagcatttggtaccgtcacttctggctcatccgtctttgctcagcctcctgctgccagttctagctcagctttcaaccagctcaccaacaacacagccactgccccctctgccacgcccgtgtttgggcaagtggcagccagcaccgcaccaagtctgtttgggcagcagactggtagcacagccagcacagcagctgccacaccacaggtcagcagctcagggtttagcagcccagcttttggtaccacagccccaggggtctttggacagacaaccttcgggcaggcctcagtctttgggcagtcggcgagcagtgctgcaagtgtcttttccttcagtcagcctgggttcagttccgtgcctgccttcggtcagcctgcttcctccactcccacatccaccagtggaagtgtctttggtgccgcctcaagtaccagtagctccagttccttctcatttggacagtcttctcccaacacaggaggggggctgtttggccaaagcaacgctcctgcttttgggcagagtcctggctttggacagggaggctctgtctttggtggtacctcagctgccaccacaacagcagcaacctctgggttcagcttttgccaagcttcaggttttgggtctagtaatactggttctgtgtttggtcaagcagccagtactggtggaatagtctttggccagcaatcatcctcttccagtggtagcgtgtttgggtctggaaacactggaagagggggaggtttcttcagtggccttggaggaaaacccagtcaggatgcagccaacaaaaacccattcagctcggccagtgggggctttggatccacagctacctcaaatacctctaacctatttggaaacagtggggccaagacatttggtggatttgccagctcgtcgtttggagagcagaaacccactggcactttcagctctggaggaggaagtgtggcatcccaaggctttgggttttcctctccaaacaaaacaggtggcttcggtgctgctccagtgtttggcagccctcctacttttgggggatcccctgggtttggaggggtgccagcattcggttcagccccagcctttacaagccctctgggctcgacgggaggcaaagtgttcggagagggcactgcagctgccagcgcaggaggattcgggtttgggagcagcagcaacaccacatccttcggcacgctcgcgagtcagaatgcccccactttcggatcactgtcccaacagacttctggttttgggacccagagtagcggattctctggttttggatcaggcacaggagggttcagctttgggtcaaataactcgtctgtccagggttttggtggctggcgaagctgagggcgtgtcagcaggctgttcagaccgacgttgccatcaaaacacatacacccagaaagaaacaacagaaaccaaaactcacaaggcgcatgattacttgttttatatttcatgttgggttttccctcccactattaaacagtctgtttccgta

SEQ ID NO: 380164 - DNA, 5733 bp, Homo sapiens
gtcaactgcgcgccgctggcgctgaggggaggaagtttgctgtcgagcggcctgggttccgtgggcaaggccgtgggaggcagcgttggctgcttcgacacactgagggcggcgcgatgggagacgagatggatgccatgattcccgagcgggagatgaaggattttcagtttagagcgctaaagaaggtgagaatctttgactcccctgaggaattgcccaaggaacgctcgagtctgcttgctgtgtccaacaaatatggtctggtcttcgctggtggagccagtggcttgcagatttttcctactaaaaatcttcttattcaaaataaacccggagatgatcccaacaaaatagttgataaagtccaaggcttgctagttcctatgaaattcccaatccatcacctggccttgagctgtgataacctcacactctctgcgtgcatgatgtccagtgaatatggttccattattgctttttttgatgttcgcacattctcaaatgaggctaaacagcaaaaacgcccatttgcctatcataagcttttgaaagatgcaggaggcatggtgattgatatgaagtggaaccccactgtcccctccatggtggcagtttgtctggctgatggtagtattgctgtcctgcaagtcacggaaacagtgaaagtatgtgcaactcttccttccacggtagcagtaacctctgtgtgctggagccccaaaggaaagcagctggcagtgggaaaacagaatggaactgtggtccagtatcttcctactttgcaggaaaaaaaagtcattccttgtcctccgttttatgagtcagatcatcctgtcagagttctggatgtgctgtggattggtacctacgtcttcgccatagtgtatgctgctgcagatgggaccctggaaacgtctccagatgtggtgatggctctactaccgaaaaaagaagaaaagcacccagagatatttgtgaactttatggagccctgttatggcagctgcacggagagacagcatcattactacctcagttacattgaggaatgggatttagtgctggcagcatctgcggcttcaacagaagttagtatccttgctcgacaaagtgatcagattaattgggaatcttggctactggaggattctagtcgagctgaattgcctgtgacagacaagagtgatgactccttgcccatgggagttgtcgtagactatacaaaccaagtggaaatcaccatcagtgatgaaaagactcttcctcctgctccagttctcatgttactttcaacagatggtgtgctttgtccattttatatgattaatcaaaatcctggggttaagtctctcatcaaaacaccagagcgactttcattagaaggagagcgacagcccaagtcaccaggaagtactcccactaccccaacctcctctcaagccccacagaaactggatgcttctgcagctgcagcccctgcctctctgccaccttcatcacctgctgctcccattgccactttttctttgcttcctgctggtggagcccccactgtgttctcctttggttcttcatctttgaagtcatctgctacggtcactggggagcccccttcatattccagtggctccgacagctccaaagcagccccaggccctggcccatcaaccttctcttttgttcccccttctaaagcctccctagcccccacccctgcagcgtctcctgtggctccatcagctgcttcattctcctttggatcatctggttttaagcctaccctggaaagcacaccagtgccaagtgtgtctgctccaaatatagcaatgaagtcctccttcccaccctcaacctctgctgtcaaagtcaaccttagtgaaaagtttactgctgcagctacctctactcctgttagtagctcccagagcgcacccccgatgtcgccattctcttctgcctccaagccagctgcttctggaccactcagccaccccacacctctctcagcaccacctagttccgtgccattgaagtcctcagtcttgccctcaccatcaggacgatctgctcagggcagttcaagcccagtgccctcaatggtacagaaatcacccaggataacccctccagcggcaaagccaggctctccccaggcaaagtcacttcagcctgctgttgcagaaaagcagggacatcagtggaaagattcagatcctgtaatggctggaattggggaggagattgcacactttcagaaggagttggaagagttaaaagcccgaacttccaaagcctgtttccaagtgggcacttctgaggagatgaagatgctgcgaacagaatcagatgacttgcatacctttcttttggagattaaagagaccacagagtcgcttcatggagatataagtagcctgaaaacaactttacttgagggctttgctggtgttgaggaagccagagaacaaaatgaaagaaatcgtgactctggttatctgcatttgctttataaaagaccactggatcccaagagtgaagctcagcttcaggaaattcggcgccttcatcagtatgtgaaatttgctgtccaagatgtgaatgatgttctagacttggagtgggatcagcatctggaacaaaagaaaaaacaaaggcacctgcttgtgccagagcgagagacactgtttaacaccctagccaacaatcgggaaatcatcaaccaacagaggaagaggctgaatcacctggtggatagtcttcagcagctccgcctttacaaacagacttccctgtggagcctgtcctcggctgttccttcccagagcagcattcacagttttgacagtgacctggaaagcctgtgcaatgctttgttgaaaaccaccatagaatctcacaccaaatccttgcccaaagtaccagccaaactgtcccccatgaaacaggcacaactgagaaacttcttggccaagaggaagaccccaccagtgagatccactgctccagccagcctgtctcgatcagcctttctgtctcagagatattatgaagacttggatgaagtcagctcaacgtcatctgtctcccagtctctggagagtgaagatgcacggacgtcctgtaaagatgacgaggcagtggttcaggcccctcggcacgcccccgtggttcgcactccttccatccagcccagtctcttgccccatgcagcaccttttgctaaatctcacctggttcatggttcttcacctggtgtgatgggaacttcagtggctacatctgctagcaaaattattcctcaaggggccgatagcacaatgcttgccacgaaaaccgtgaaacatggtgcacctagtccttcccaccccatctcagccccgcaggcagctgccgcagcagcactcaggcggcagatggccagtcaggcaccagctgtaaacactttgactgaatcaacgttgaagaatgtccctcaagtggtaaatgtgcaggaattgaagaataaccctgcaaccccttctacagccatgggttcttcagtgccctactccacagccaaaacacctcacccagtgttgaccccagtggctgctaaccaagccaagcaggggtctctaataaattcccttaagccatctgggcctacaccagcatccggtcagttatcatctggtgacaaagcttcagggacagccaagatagaaacagctgtgacttcaaccccatctgcttctgggcagttcagcaagcctttctcattttctccatcagggactggctttaattttgggataatcacaccaacaccgtcttctaatttcactgctgcacaaggggcaacaccctccactaaagagtcaagccagccggacgcattctcatctggtgggggaagcaaaccttcttatgaggccattcctgaaagctcacctccctcaggaatcacatccgcatcaaacaccaccccaggagaacctgccgcatctagcagcagacctgtggcaccttctggaactgctctttccaccacctctagtaagctggaaaccccaccgtccaagctgggagagcttctgtttccaagttctttggctggagagactctgggaagtttttcaggactgcgggttggccaagcagatgattctacaaaaccaaccaataaggcttcatccacaagcctaactagtacccagccaaccaagacgtcaggcgtgccctcagggtttaattttactgcccccccggtgttagggaagcacacggagccccctgtgacatcctctgcaaccaccacctcagtagtaccaccagcagccaccagcacttcctcaactgccgtttttggcagtctgccagtcaccagtgcaggatcctctggggtcatcagttttggtgggacatctctaagtgctggcaagactagtttttcatttggaagccaacagaccaatagcacagtgcccccatctgccccaccaccaactacagctgccactccccttccaacatcattccccacattgtcatttggtagcctcctgagttcagcaactaccccctccctgcctatgtccgctggcagaagcacagaagaggccacttcatcagctttgcctgagaagccaggtgacagtgaggtctcagcatcagcagcctcacttctagaggagcaacagtcagcccagcttccccaggctcctccgcaaacttctgactctgttaaaaaagaacctgttcttgcccagcctgcagtcagcaactctggcactgcagcatctagtactagtcttgtagcactttctgcagaggctaccccagccaccacgggggtccctgatgccaggacggaggcagtaccacctgcttcctccttttctgtgcctgggcagactgctgtcacagcagctgctatctcaagtgcaggccctgtggccgtcgaaacatcaagtacccccatagcctccagcaccacgtccattgttgctcccggcccatctgcagaggcagcagcatttggtaccgtcacttctggctcatccgtctttgctcagcctcctgctgccagttctagctcagctttcaaccagctcaccaacaacacagccactgccccctctgccacgcccgtgtttgggcaagtggcagccagcaccgcaccaagtctgtttgggcagcagactggtagcacagccagcacagcagctgccacaccacaggtcagcagctcagggtttagcagcccagcttttggtaccacagccccaggggtctttggacagacaaccttcgggcaggcctcagtctttgggcagtcggcgagcagtgctgcaagtgtcttttccttcagtcagcctgggttcagttccgtgcctgccttcggtcagcctgcttcctccactcccacatccaccagtggaagtgtctttggtgccgcctcaagtaccagtagctccagttccttctcatttggacagtcttctcccaacacaggaggggggctgtttggccaaagcaacgctcctgcttttgggcagagtcctggctttggacagggaggctctgtctttggtggtacctcagctgccaccacaacagcagcaacctctgggttcagcttttgccaagcttcaggttttgggtctagtaatactggttctgtgtttggtcaagcagccagtactggtggaatagtctttggccagttgttgaacaaagctggtcatttgt

SEQ ID NO: 380165 - DNA, 4852 bp, Homo sapiens
gtcaactgcgcgccgctggcgctgaggggaggaagtttgctgtcgagcggcctgggttccgtgggcaaggccgtgggaggcagcgttggctgcttcgacacactgagggcggcgcgatgggagacgagatggatgccatgattcccgagcgggagatgaaggattttcagtttagagcgctaaagaaggtgagaatctttgactcccctgaggaattgcccaaggaacgctcgagtctgcttgctgtgtccaacaaatatggtctggtcttcgctggtggagccagtggcttgcagatttttcctactaaaaatcttcttattcaaaataaacccggagatgatcccaacaaaatagttgataaagtccaaggcttgctagttcctatgaaattcccaatccatcacctggccttgagctgtgataacctcacactctctgcgtgcatgatgtccagtgaatatggttccattattgctttttttgatgttcgcacattctcaaatgaggctaaacagcaaaaacgcccatttgcctatcataagcttttgaaagatgcaggaggcatggtgattgatatgaagtggaaccccactgtcccctccatggtggcagtttgtctggctgatggtagtattgctgtcctgcaagtcacggaaacagtgaaagtatgtgcaactcttccttccacggtagcagtaacctctgtgtgctggagccccaaaggaaagcagctggcagtgggaaaacagaatggaactgtggtccagtatcttcctactttgcaggaaaaaaaagtcattccttgtcctccgttttatgagtcagatcatcctgtcagagttctggatgtgctgtggattggtacctacgtcttcgccatagtgtatgctgctgcagatgggaccctggaaacgtctccagatgtggtgatggctctactaccgaaaaaagaagaaaagcacccagagatatttgtgaactttatggagccctgttatggcagctgcacggagagacagcatcattactacctcagttacattgaggaatgggatttagtgctggcagcatctgcggcttcaacagaagttagtatccttgctcgacaaagtgatcagattaattgggaatcttggctactggaggattctagtcgagctgaattgcctgtgacagacaagagtgatgactccttgcccatgggagttgtcgtagactatacaaaccaagtggaaatcaccatcagtgatgaaaagactcttcctcctgctccagttctcatgttactttcaacagatggtgtgctttgtccattttatatgattaatcaaaatcctggggttaagtctctcatcaaaacaccagagcgactttcattagaaggagagcgacagcccaagtcaccaggaagtactcccactaccccaacctcctctcaagccccacagaaactggatgcttctgcagctgcagcccctgcctctctgccaccttcatcacctgctgctcccattgccactttttctttgcttcctgctggtggagcccccactgtgttctcctttggttcttcatctttgaagtcatctgctacggtcactggggagcccccttcatattccagtggctccgacagctccaaagcagccccaggccctggcccatcaaccttctcttttgttcccccttctaaagcctccctagcccccacccctgcagcgtctcctgtggctccatcagctgcttcattctcctttggatcatctggttttaagcctaccctggaaagcacaccagtgccaagtgtgtctgctccaaatatagcaatgaagtcctccttcccaccctcaacctctgctgtcaaagtcaaccttagtgaaaagtttactgctgcagctacctctactcctgttagtagctcccagagcgcacccccgatgtcgccattctcttctgcctccaagccagctgcttctggaccactcagccaccccacacctctctcagcaccacctagttccgtgccattgaagtcctcagtcttgccctcaccatcaggacgatctgctcagggcagttcaagcccagtgccctcaatggtacagaaatcacccaggataacccctccagcggcaaagccaggctctccccaggcaaagtcacttcagcctgctgttgcagaaaagcagggacatcagtggaaagattcagatcctgtaatggctggaattggggaggagattgcacactttcagaaggagttggaagagttaaaagcccgaacttccaaagcctgtttccaagtgggcacttctgaggagatgaagatgctgcgaacagaatcagatgacttgcatacctttcttttggagattaaagagaccacagagtcgcttcatggagatataagtagcctgaaaacaactttacttgagggctttgctggtgttgaggaagccagagaacaaaatgaaagaaatcgtgactctggttatctgcatttgctttataaaagaccactggatcccaagagtgaagctcagcttcaggaaattcggcgccttcatcagtatgtgaaatttgctgtccaagatgtgaatgatgttctagacttggagtgggatcagcatctggaacaaaagaaaaaacaaaggcacctgcttgtgccagagcgagagacactgtttaacaccctagccaacaatcgggaaatcatcaaccaacagaggaagaggctgaatcacctggtggatagtcttcagcagctccgcctttacaaacagacttccctgtggagcctgtcctcggctgttccttcccagagcagcattcacagttttgacagtgacctggaaagcctgtgcaatgctttgttgaaaaccaccatagaatctcacaccaaatccttgcccaaagtaccagccaaactgtcccccatgaaacaggcacaactgagaaacttcttggccaagaggaagaccccaccagtgagatccactgctccagccagcctgtctcgatcagcctttctgtctcagagatattatgaagacttggatgaagtcagctcaacgtcatctgtctcccagtctctggagagtgaagatgcacggacgtcctgtaaagatgacgaggcagtggttcaggcccctcggcacgcccccgtggttcgcactccttccatccagcccagtctcttgccccatgcagcaccttttgctaaatctcacctggttcatggttcttcacctggtgtgatgggaacttcagtggctacatctgctagcaaaattattcctcaaggggccgatagcacaatgcttgccacgaaaaccgtgaaacatggtgcacctagtccttcccaccccatctcagccccgcaggcagctgccgcagcagcactcaggcggcagatggccagtcaggcaccagctgtaaacactttgactgaatcaacgttgaagaatgtccctcaagtggtaaatgtgcaggaattgaagaataaccctgcaaccccttctacagccatgggttcttcagtgccctactccacagccaaaacacctcacccagtgttgaccccagtggctgctaaccaagccaagcaggggtctctaataaattcccttaagccatctgggcctacaccagcatccggtcagttatcatctggtgacaaagcttcagggacagccaagatagaaacagctgtgacttcaaccccatctgcttctgggcagttcagcaagcctttctcattttctccatcagggactggctttaattttgggataatcacaccaacaccgtcttctaatttcactgctgcacaaggggcaacaccctccactaaagagtcaagccagccggacgcattctcatctggtgggggaagcaaaccttcttatgaggccattcctgaaagctcacctccctcaggaatcacatccgcatcaaacaccaccccaggagaacctgccgcatctagcagcagacctgtggcaccttctggaactgctctttccaccacctctagtaagctggaaaccccaccgtccaagctgggagagcttctgtttccaagttctttggctggagagactctgggaagtttttcaggactgcgggttggccaagcagatgattctacaaaaccaaccaataaggcttcatccacaagcctaactagtacccagccaaccaagacgtcaggcgtgccctcagggtttaattttactgcccccccggtgttagggaagcacacggagccccctgtgacatcctctgcaaccaccacctcagtagtaccaccagcagccaccagcacttcctcaactgccgtttttggcagtctgccagtcaccagtgcaggatcctctggggtcatcagttttggtgggacatctctaagtgctggcaagactagtttttcatttggaagccaacagaccaatagcacagtgcccccatctgccccaccaccaactacagctgccactccccttccaacatcattccccacattgtcatttggtagcctcctgagttcagcaactaccccctccctgcctatgtccgctggcagaagcacagaagaggccacttcatcagctttgcctgagaagccaggtgacagtgaggtctcagcatcagcagcctcacttctagaggagcaacagtcagcccagcttccccaggctcctccgcaaacttctgactctgttaaaaaagaacctgttcttgcccagcctgcagtcagcaactctggcactgcagcatctagtactactgaggtgtaagcgcttacacctcagtagtactcatgtttagtcgggagaggagtcatgaa

SEQ ID NO: 380166 - DNA, 3009 bp, Homo sapiens
gctgttacgacccggatattacgggcgtatggcgcctacagttgtgttgatcactgctacagcctacacactgaggaaggagggtgaacagctcgaatgactagaggacacgtcatgtgatcattcaaccccatctgcttctgggcagttcagcaagcctttctcattttctccatcagggactggctttaattttgggataatcacaccaacaccgtcttctaatttcactgctgcacaaggggcaacaccctccactaaagagtcaagccagccggacgcattctcatctggtgggggaagcaaaccttcttatgaggccattcctgaaagctcacctccctcaggaatcacatccgcatcaaacaccaccccaggagaacctgccgcatctagcagcagacctgtggcaccttctggaactgctctttccaccacctctagtaagctggaaaccccaccgtccaagctgggagagcttctgtttccaagttctttggctggagagactctgggaagtttttcaggactgcgggttggccaagcagatgattctacaaaaccaaccaataaggcttcatccacaagcctaactagtacccagccaaccaagacgtcaggcgtgccctcagggtttaattttactgcccccccggtgttagggaagcacacggagccccctgtgacatcctctgcaaccaccacctcagtagtaccaccagcagccaccagcacttcctcaactgccgtttttggcagtctgccagtcaccagtgcaggatcctctggggtcatcagttttggtgggacatctctaagtgctggcaagactagtttttcatttggaagccaacagaccaatagcacagtgcccccatctgccccaccaccaactacagctgccactccccttccaacatcattccccacattgtcatttggtagcctcctgagttcagcaactaccccctccctgcctatgtccgctggcagaagcacagaagaggccacttcatcagctttgcctgagaagccaggtgacagtgaggtctcagcatcagcagcctcacttctagaggagcaacagtcagcccagcttccccaggctcctccgcaaacttctgactctgttaaaaaagaacctgttcttgcccagcctgcagtcagcaactctggcactgcagcatctagtactagtcttgtagcactttctgcagaggctaccccagccaccacgggggtccctgatgccaggacggaggcagtaccacctgcttcctccttttctgtgcctgggcagactgctgtcacagcagctgctatctcaagtgcaggccctgtggccgtcgaaacatcaagtacccccatagcctccagcaccacgtccattgttgctcccggcccatctgcagaggcagcagcatttggtaccgtcacttctggctcatccgtctttgctcagcctcctgctgccagttctagctcagctttcaaccagctcaccaacaacacagccactgccccctctgccacgcccgtgtttgggcaagtggcagccagcaccgcaccaagtctgtttgggcagcagactggtagcacagccagcacagcagctgccacaccacaggtcagcagctcagggtttagcagcccagcttttggtaccacagccccaggggtctttggacagacaaccttcgggcaggcctcagtctttgggcagtcggcgagcagtgctgcaagtgtcttttccttcagtcagcctgggttcagttccgtgcctgccttcggtcagcctgcttcctccactcccacatccaccagtggaagtgtctttggtgccgcctcaagtaccagtagctccagttccttctcatttggacagtcttctcccaacacaggaggggggctgtttggccaaagcaacgctcctgcttttgggcagagtcctggctttggacagggaggctctgtctttggtggtacctcagctgccaccacaacagcagcaacctctgggttcagcttttgccaagcttcaggttttgggtctagtaatactggttctgtgtttggtcaagcagccagtactggtggaatagtctttggccagcaatcatcctcttccagtggtagcgtgtttgggtctggaaacactggaagagggggaggtttcttcagtggccttggaggaaaacccagtcaggatgcagccaacaaaaacccattcagctcggccagtgggggctttggatccacagctacctcaaatacctctaacctatttggaaacagtggggccaagacatttggtggatttgccagctcgtcgtttggagagcagaaacccactggcactttcagctctggaggaggaagtgtggcatcccaaggctttgggttttcctctccaaacaaaacaggtggcttcggtgctgctccagtgtttggcagccctcctacttttgggggatcccctgggtttggaggggtgccagcattcggttcagccccagcctttacaagccctctgggctcgacgggaggcaaagtgttcggagagggcactgcagctgccagcgcaggaggattcgggtttgggagcagcagcaacaccacatccttcggcacgctcgcgagtcagaatgcccccactttcggatcactgtcccaacagacttctggttttgggacccagagtagcggattctctggttttggatcaggcacaggagggttcagctttgggtcaaataactcgtctgtccagggttttggtggctggcgaagctgagggcgtgtcagcaggcctttcgatccctgggaccaaccgcatcctcagcttcttccccgagaaatgctggagcaggctgttcagaccgacgttgccatcaaaacacatacacccagaaagaaacaacagaaaccaaaactcacaaggcgcatgattacttgttttatatttcatgttgggttttccctcccactattaaacagtctgtttccgta

SEQ ID NO: 380167 - DNA, 2841 bp, Homo sapiens
  misc_feature (50)..(51): n is a, c, g, or t
  misc_feature (63)..(63): n is a, c, g, or t
agcggctgagctgccacaagcagatggggttgaagtcacagcaacaccgnnttctaattgcantgctgcacaaggggcaacaccctccactaaagagtcaagccagccggacgcattctcatctggtgggggaagcaaaccttcttatgaggccattcctgaaagctcacctccctcaggaatcacatccgcatcaaacaccaccccaggagaacctgccgcatctagcagcagacctgtggcaccttctggaactgctctttccaccacctctagtaagctggaaaccccaccgtccaagctgggagagcttctgtttccaagttctttggctggagagactctgggaagtttttcaggactgcgggttggccaagcagatgattctacaaaaccaaccaataaggcttcatccacaagcctaactagtacccagccaaccaagacgtcaggcgtgccctcagggtttaattttactgcccccccggtgttagggaagcacacggagccccctgtgacatcctctgcaaccaccacctcagtagtaccaccagcagccaccagcacttcctcaactgccgtttttggcagtctgccagtcaccagtgcaggatcctctggggtcatcagttttggtgggacatctctaagtgctggcaagactagtttttcatttggaagccaacagaccaatagcacagtgcccccatctgccccaccaccaactacagctgccactccccttccaacatcattccccacattgtcatttggtagcctcctgagttcagcaactaccccctccctgcctatgtccgctggcagaagcacagaagaggccacttcatcagctttgcctgagaagccaggtgacagtgaggtctcagcatcagcagcctcacttctagaggagcaacagtcagcccagcttccccaggctcctccgcaaacttctgactctgttaaaaaagaacctgttcttgcccagcctgcagtcagcaactctggcactgcagcatctagtactagtcttgtagcactttctgcagaggctaccccagccaccacgggggtccctgatgccaggacggaggcagtaccacctgcttcctccttttctgtgcctgggcagactgctgtcacagcagctgctatctcaagtgcaggccctgtggccgtcgaaacatcaagtacccccatagcctccagcaccacgtccattgttgctcccggcccatctgcagaggcagcagcatttggtaccgtcacttctggctcatccgtctttgctcagcctcctgctgccagttctagctcagctttcaaccagctcaccaacaacacagccactgccccctctgccacgcccgtgtttgggcaagtggcagccagcaccgcaccaagtctgtttgggcagcagactggtagcacagccagcacagcagctgccacaccacaggtcagcagctcagggtttagcagcccagcttttggtaccacagccccaggggtctttggacagacaaccttcgggcaggcctcagtctttgggcagtcggcgagcagtgctgcaagtgtcttttccttcagtcagcctgggttcagttccgtgcctgccttcggtcagcctgcttcctccactcccacatccaccagtggaagtgtctttggtgccgcctcaagtaccagtagctccagttccttctcatttggacagtcttctcccaacacaggaggggggctgtttggccaaagcaacgctcctgcttttgggcagagtcctggctttggacagggaggctctgtctttggtggtacctcagctgccaccacaacagcagcaacctctgggttcagcttttgccaagcttcaggttttgggtctagtaatactggttctgtgtttggtcaagcagccagtactggtggaatagtctttggccagcaatcatcctcttccagtggtagcgtgtttgggtctggaaacactggaagagggggaggtttcttcagtggccttggaggaaaacccagtcaggatgcagccaacaaaaacccattcagctcggccagtgggggctttggatccacagctacctcaaatacctctaacctatttggaaacagtggggccaagacatttggtggatttgccagctcgtcgtttggagagcagaaacccactggcactttcagctctggaggaggaagtgtggcatcccaaggctttgggttttcctctccaaacaaaacaggtggcttcggtgctgctccagtgtttggcagccctcctacttttgggggatcccctgggtttggaggggtgccagcattcggttcagccccagcctttacaagccctctgggctcgacgggaggcaaagtgttcggagagggcactgcagctgccagcgcaggaggattcgggtttgggagcagcagcaacaccacatccttcggcacgctcgcgagtcagaatgcccccactttcggatcactgtcccaacagacttctggttttgggacccagagtagcggattctctggttttggatcaggcacaggagggttcagctttgggtcaaataactcgtctgtccagggttttggtggctggcgaagctgagggcgtgtcagcaggcctttcgatccctgggaccaaccgcatcctcagcttcttccccgagaaatgctggagcaggctgttcagaccgacgttgccatcaaaacacatacacccagaaagaaacaacagaaaccaaaactcacaaggcgcatgattacttgttttatatttcatgttgggttttccctcccactattaaacagtctgtttccgta

SEQ ID NO: 380168 - DNA, 2375 bp, Homo sapiens
atataaaatgtgtattttaaacacagcagttgagctgagtgcattttctatagtactactgaggtgtaagccttagtagtaccaccagcagccaccagcacttcctcaactgccgtttttggcagtctgccagtcaccagtgcaggatcctctggggtcatcagttttggtgggacatctctaagtgctggcaagactagtttttcatttggaagccaacagaccaatagcacagtgcccccatctgccccaccaccaactacagctgccactccccttccaacatcattccccacattgtcatttggtagcctcctgagttcagcaactaccccctccctgcctatgtccgctggcagaagcacagaagaggccacttcatcagctttgcctgagaagccaggtgacagtgaggtctcagcatcagcagcctcacttctagaggagcaacagtcagcccagcttccccaggctcctccgcaaacttctgactctgttaaaaaagaacctgttcttgcccagcctgcagtcagcaactctggcactgcagcatctagtactagtcttgtagcactttctgcagaggctaccccagccaccacgggggtccctgatgccaggacggaggcagtaccacctgcttcctccttttctgtgcctgggcagactgctgtcacagcagctgctatctcaagtgcaggccctgtggccgtcgaaacatcaagtacccccatagcctccagcaccacgtccattgttgctcccggcccatctgcagaggcagcagcatttggtaccgtcacttctggctcatccgtctttgctcagcctcctgctgccagttctagctcagctttcaaccagctcaccaacaacacagccactgccccctctgccacgcccgtgtttgggcaagtggcagccagcaccgcaccaagtctgtttgggcagcagactggtagcacagccagcacagcagctgccacaccacaggtcagcagctcagggtttagcagcccagcttttggtaccacagccccaggggtctttggacagacaaccttcgggcaggcctcagtctttgggcagtcggcgagcagtgctgcaagtgtcttttccttcagtcagcctgggttcagttccgtgcctgccttcggtcagcctgcttcctccactcccacatccaccagtggaagtgtctttggtgccgcctcaagtaccagtagctccagttccttctcatttggacagtcttctcccaacacaggaggggggctgtttggccaaagcaacgctcctgcttttgggcagagtcctggctttggacagggaggctctgtctttggtggtacctcagctgccaccacaacagcagcaacctctgggttcagcttttgccaagcttcaggttttgggtctagtaatactggttctgtgtttggtcaagcagccagtactggtggaatagtctttggccagcaatcatcctcttccagtggtagcgtgtttgggtctggaaacactggaagagggggaggtttcttcagtggccttggaggaaaacccagtcaggatgcagccaacaaaaacccattcagctcggccagtgggggctttggatccacagctacctcaaatacctctaacctatttggaaacagtggggccaagacatttggtggatttgccagctcgtcgtttggagagcagaaacccactggcactttcagctctggaggaggaagtgtggcatcccaaggctttgggttttcctctccaaacaaaacaggtggcttcggtgctgctccagtgtttggcagccctcctacttttgggggatcccctgggtttggaggggtgccagcattcggttcagccccagcctttacaagccctctgggctcgacgggaggcaaagtgttcggagagggcactgcagctgccagcgcaggaggattcgggtttgggagcagcagcaacaccacatccttcggcacgctcgcgagtcagaatgcccccactttcggatcactgtcccaacagacttctggttttgggacccagagtagcggattctctggttttggatcaggcacaggagggttcagctttgggtcaaataactcgtctgtccagggttttggtggctggcgaagctgagggcgtgtcagcaggcctttcgatccctgggaccaaccgcatcctcagcttcttccccgagaaatgctggagcaggctgttcagaccgacgttgccatcaaaacacatacacccagaaagaaacaacagaaaccaaaactcacaaggcgcatgattacttgttttatatttcatgttgggttttccctcccactattaaacagtctgtttccgta

SEQ ID NO: 380169 - DNA, 2688 bp, Homo sapiens
gcagcgctgctcaacacggcgcaacgacttgcacggcccgcaccactcagcccacacatcaccagcaacggcaggtcgcccttgatctaggctggcatagtcgccttgtttcagctcgaaaggcttgttcagcaacacaggctgcttgcagcgcccgcatttaggcgcatcacccaggcgttcgccaggaatgcggttgagaccgttgcaatgcgggcaggggattacaagaggttcggacatggtgggctcctagggcgtggccaatgggtttaatttggagccggcaatgaggtttatcaagaccaggcgaaaaggatgaaacactgatcgttcccacgctccgcgtggtaatgcatcccgtggtactactgaggtgtaagccttagtagtaccaccagcagccaccagcacttcctcaactgccgtttttggcagtctgccagtcaccagtgcaggatcctctggggtcatcagttttggtgggacatctctaagtgctggcaagactagtttttcatttggaagccaacagaccaatagcacagtgcccccatctgccccaccaccaactacagctgccactccccttccaacatcattccccacattgtcatttggtagcctcctgagttcagcaactaccccctccctgcctatgtccgctggcagaagcacagaagaggccacttcatcagctttgcctgagaagccaggtgacagtgaggtctcagcatcagcagcctcacttctagaggagcaacagtcagcccagcttccccaggctcctccgcaaacttctgactctgttaaaaaagaacctgttcttgcccagcctgcagtcagcaactctggcactgcagcatctagtactagtcttgtagcactttctgcagaggctaccccagccaccacgggggtccctgatgccaggacggaggcagtaccacctgcttcctccttttctgtgcctgggcagactgctgtcacagcagctgctatctcaagtgcaggccctgtggccgtcgaaacatcaagtacccccatagcctccagcaccacgtccattgttgctcccggcccatctgcagaggcagcagcatttggtaccgtcacttctggctcatccgtctttgctcagcctcctgctgccagttctagctcagctttcaaccagctcaccaacaacacagccactgccccctctgccacgcccgtgtttgggcaagtggcagccagcaccgcaccaagtctgtttgggcagcagactggtagcacagccagcacagcagctgccacaccacaggtcagcagctcagggtttagcagcccagcttttggtaccacagccccaggggtctttggacagacaaccttcgggcaggcctcagtctttgggcagtcggcgagcagtgctgcaagtgtcttttccttcagtcagcctgggttcagttccgtgcctgccttcggtcagcctgcttcctccactcccacatccaccagtggaagtgtctttggtgccgcctcaagtaccagtagctccagttccttctcatttggacagtcttctcccaacacaggaggggggctgtttggccaaagcaacgctcctgcttttgggcagagtcctggctttggacagggaggctctgtctttggtggtacctcagctgccaccacaacagcagcaacctctgggttcagcttttgccaagcttcaggttttgggtctagtaatactggttctgtgtttggtcaagcagccagtactggtggaatagtctttggccagcaatcatcctcttccagtggtagcgtgtttgggtctggaaacactggaagagggggaggtttcttcagtggccttggaggaaaacccagtcaggatgcagccaacaaaaacccattcagctcggccagtgggggctttggatccacagctacctcaaatacctctaacctatttggaaacagtggggccaagacatttggtggatttgccagctcgtcgtttggagagcagaaacccactggcactttcagctctggaggaggaagtgtggcatcccaaggctttgggttttcctctccaaacaaaacaggtggcttcggtgctgctccagtgtttggcagccctcctacttttgggggatcccctgggtttggaggggtgccagcattcggttcagccccagcctttacaagccctctgggctcgacgggaggcaaagtgttcggagagggcactgcagctgccagcgcaggaggattcgggtttgggagcagcagcaacaccacatccttcggcacgctcgcgagtcagaatgcccccactttcggatcactgtcccaacagacttctggttttgggacccagagtagcggattctctggttttggatcaggcacaggagggttcagctttgggtcaaataactcgtctgtccagggttttggtggctggcgaagctgagggcgtgtcagcaggcctttcgatccctgggaccaaccgcatcctcagcttcttccccgagaaatgctggagcaggctgttcagaccgacgttgccatcaaaacacatacacccagaaagaaacaacagaaaccaaaactcacaaggcgcatgattacttgttttatatttcatgttgggttttccctcccactattaaacagtctgtttccgta

SEQ ID NO: 380170 - DNA, 3330 bp, Homo sapiens
gtcaactgcgcgccgctggcgctgaggggaggaagtttgctgtcgagcggcctgggttccgtgggcaaggccgtgggaggcagcgttggctgcttcgacacactgagggcggcgcgatgggagacgagatggatgccatgattcccgagcgggagatgaaggattttcagtttagagcgctaaagaaggtgagaatctttgactcccctgaggaattgcccaaggaacgctcgagtctgcttgctgtgtccaacaaatatggtctggtcttcgctggtggagccagtggcttgcagatttttcctactaaaaatcttcttattcaaaataaacccggagatgatcccaacaaaatagttgataaagtccaaggcttgctagttcctatgaaattcccaatccatcacctggccttgagctgtgataacctcacactctctgcgtgcatgatgtccagtgaatatggttccattattgctttttttgatgttcgcacattctcaaatgaggctaaacagcaaaaacgcccatttgcctatcataagcttttgaaagatgcaggaggcatggtgattgatatgaagtggaaccccactgtcccctccatggtggcagtttgtctggctgatggtagtattgctgtcctgcaagtcacggaaacagtgaaagtatgtgcaactcttccttccacggtagcagtaacctctgtgtgctggagccccaaaggaaagcagctggcagtgggaaaacagaatggaactgtggtccagtatcttcctactttgcaggaaaaaaaagtcattccttgtcctccgttttatgagtcagatcatcctgtcagagttctggatgtgctgtggattggtacctacgtcttcgccatagtgtatgctgctgcagatgggaccctggaaacgtctccagatgtggtgatggctctactaccgaaaaaagaagaaaagcacccagagatatttgtgaactttatggagccctgttatggcagctgcacggagagacagcatcattactacctcagttacattgaggaatgggatttagtgctggcagcatctgcggcttcaacagaagttagtatccttgctcgacaaagtgatcagattaattgggaatcttggctactggaggattctagtcgagctgaattgcctgtgacagacaagagtgatgactccttgcccatgggagttgtcgtagactatacaaaccaagtggaaatcaccatcagtgatgaaaagactcttcctcctgctccagttctcatgttactttcaacagatggtgtgctttgtccattttatatgattaatcaaaatcctggggttaagtctctcatcaaaacaccagagcgactttcattagaaggagagcgacagcccaagtcaccaggaagtactcccactaccccaacctcctctcaagccccacagaaactggatgcttctgcagctgcagcccctgcctctctgccaccttcatcacctgctgctcccattgccactttttctttgcttcctgctggtggagcccccactgtgttctcctttggttcttcatctttgaagtcatctgctacggtcactggggagcccccttcatattccagtggctccgacagctccaaagcagccccaggccctggcccatcaaccttctcttttgttcccccttctaaagcctccctagcccccacccctgcagcgtctcctgtggctccatcagctgcttcattctcctttggatcatctggttttaagcctaccctggaaagcacaccagtgccaagtgtgtctgctccaaatatagcaatgaagtcctccttcccaccctcaacctctgctgtcaaagtcaaccttagtgaaaagtttactgctgcagctacctctactcctgttagtagctcccagagcgcacccccgatgtcgccattctcttctgcctccaagccagctgcttctggaccactcagccaccccacacctctctcagcaccacctagttccgtgccattgaagtcctcagtcttgccctcaccatcaggacgatctgctcagggcagttcaagcccagtgccctcaatggtacagaaatcacccaggataacccctccagcggcaaagccaggctctccccaggcaaagtcacttcagcctgctgttgcagaaaagcagggacatcagtggaaagattcagatcctgtaatggctggaattggggaggagattgcacactttcagaaggagttggaagagttaaaagcccgaacttccaaagcctgtttccaagtgggcacttctgaggagatgaagatgctgcgaacagaatcagatgacttgcatacctttcttttggagattaaagagaccacagagtcgcttcatggagatataagtagcctgaaaacaactttacttgagggctttgctggtgttgaggaagccagagaacaaaatgaaagaaatcgtgactctggttatctgcatttgctttataaaagaccactggatcccaagagtgaagctcagcttcaggaaattcggcgccttcatcagtatgtgaaatttgctgtccaagatgtgaatgatgttctagacttggagtgggatcagcatctggaacaaaagaaaaaacaaaggcacctgcttgtgccagagcgagagacactgtttaacaccctagccaacaatcgggaaatcatcaaccaacagaggaagaggctgaatcacctggtggatagtcttcagcagctccgcctttacaaacagacttccctgtggagcctgtcctcggctgttccttcccagagcagcattcacagttttgacagtgacctggaaagcctgtgcaatgctttgttgaaaaccaccatagaatctcacaccaaatccttgcccaaagtaccagccaaactgtcccccatgaaacaggcacaactgagaaacttcttggccaagaggaagaccccaccagtgagatccactgctccagccagcctgtctcgatcagcctttctgtctcagagatattatgaagacttggatgaagtcagctcaacgtcatctgtctcccagtctctggagagtgaagatgcacggacgtcctgtaaagatgacgaggcagtggttcaggcccctcggcacgcccccgtggttcgcactccttccatccagcccagtctcttgccccatgcagcaccttttgctaaatctcacctggttcatggttcttcacctggtgtgatgggaacttcagctggcacatctgctagcaaaatattcctcgagggcagcgccactgcggggatcctct

SEQ ID NO: 380171 - DNA, 3414 bp, Homo sapiens
gtcaactgcgcgccgctggcgctgaggggaggaagtttgctgtcgagcggcctgggttccgtgggcaaggccgtgggaggcagcgttggctgcttcgacacactgagggcggcgcgatgggagacgagatggatgccatgattcccgagcgggagatgaaggattttcagtttagagcgctaaagaaggtgagaatctttgactcccctgaggaattgcccaaggaacgctcgagtctgcttgctgtgtccaacaaatatggtctggtcttcgctggtggagccagtggcttgcagatttttcctactaaaaatcttcttattcaaaataaacccggagatgatcccaacaaaatagttgataaagtccaaggcttgctagttcctatgaaattcccaatccatcacctggccttgagctgtgataacctcacactctctgcgtgcatgatgtccagtgaatatggttccattattgctttttttgatgttcgcacattctcaaatgaggctaaacagcaaaaacgcccatttgcctatcataagcttttgaaagatgcaggaggcatggtgattgatatgaagtggaaccccactgtcccctccatggtggcagtttgtctggctgatggtagtattgctgtcctgcaagtcacggaaacagtgaaagtatgtgcaactcttccttccacggtagcagtaacctctgtgtgctggagccccaaaggaaagcagctggcagtgggaaaacagaatggaactgtggtccagtatcttcctactttgcaggaaaaaaaagtcattccttgtcctccgttttatgagtcagatcatcctgtcagagttctggatgtgctgtggattggtacctacgtcttcgccatagtgtatgctgctgcagatgggaccctggaaacgtctccagatgtggtgatggctctactaccgaaaaaagaagaaaagcacccagagatatttgtgaactttatggagccctgttatggcagctgcacggagagacagcatcattactacctcagttacattgaggaatgggatttagtgctggcagcatctgcggcttcaacagaagttagtatccttgctcgacaaagtgatcagattaattgggaatcttggctactggaggattctagtcgagctgaattgcctgtgacagacaagagtgatgactccttgcccatgggagttgtcgtagactatacaaaccaagtggaaatcaccatcagtgatgaaaagactcttcctcctgctccagttctcatgttactttcaacagatggtgtgctttgtccattttatatgattaatcaaaatcctggggttaagtctctcatcaaaacaccagagcgactttcattagaaggagagcgacagcccaagtcaccaggaagtactcccactaccccaacctcctctcaagccccacagaaactggatgcttctgcagctgcagcccctgcctctctgccaccttcatcacctgctgctcccattgccactttttctttgcttcctgctggtggagcccccactgtgttctcctttggttcttcatctttgaagtcatctgctacggtcactggggagcccccttcatattccagtggctccgacagctccaaagcagccccaggccctggcccatcaaccttctcttttgttcccccttctaaagcctccctagcccccacccctgcagcgtctcctgtggctccatcagctgcttcattctcctttggatcatctggttttaagcctaccctggaaagcacaccagtgccaagtgtgtctgctccaaatatagcaatgaagtcctccttcccaccctcaacctctgctgtcaaagtcaaccttagtgaaaagtttactgctgcagctacctctactcctgttagtagctcccagagcgcacccccgatgtcgccattctcttctgcctccaagccagctgcttctggaccactcagccaccccacacctctctcagcaccacctagttccgtgccattgaagtcctcagtcttgccctcaccatcaggacgatctgctcagggcagttcaagcccagtgccctcaatggtacagaaatcacccaggataacccctccagcggcaaagccaggctctccccaggcaaagtcacttcagcctgctgttgcagaaaagcagggacatcagtggaaagattcagatcctgtaatggctggaattggggaggagattgcacactttcagaaggagttggaagagttaaaagcccgaacttccaaagcctgtttccaagtgggcacttctgaggagatgaagatgctgcgaacagaatcagatgacttgcatacctttcttttggagattaaagagaccacagagtcgcttcatggagatataagtagcctgaaaacaactttacttgagggctttgctggtgttgaggaagccagagaacaaaatgaaagaaatcgtgactctggttatctgcatttgctttataaaagaccactggatcccaagagtgaagctcagcttcaggaaattcggcgccttcatcagtatgtgaaatttgctgtccaagatgtgaatgatgttctagacttggagtgggatcagcatctggaacaaaagaaaaaacaaaggcacctgcttgtgccagagcgagagacactgtttaacaccctagccaacaatcgggaaatcatcaaccaacagaggaagaggctgaatcacctggtggatagtcttcagcagctccgcctttacaaacagacttccctgtggagcctgtcctcggctgttccttcccagagcagcattcacagttttgacagtgacctggaaagcctgtgcaatgctttgttgaaaaccaccatagaatctcacaccaaatccttgcccaaagtaccagccaaactgtcccccatgaaacaggcacaactgagaaacttcttggccaagaggaagaccccaccagtgagatccactgctccaggtaaagagaaccagtaactgggcctgtacatagtgatagggtgtggtggggtgtgtgtgtgtgcgcgcgcacatgcacgtgtgcatgtgtgagctagggtgctgtgtatgtgtgtgtaagtgtgtgtgtgttggttcttaataggggatagagaaaatgtctccagaatctgttgttaatctgaatagtggaataagaaccagcttatatatacttgatgaagcagcaaagtagtcgttttggcttttacactgttttctgcagtcctcaagttttatggcactgattcacaagggtttgagataggctgagctggatcctagcctctgctttagccagagaaggtttacttttctgatttgtgttgggttttgagtaagtttgcatctgggaaaaaggcatttt

SEQ ID NO: 380172 - DNA, 679 bp, Homo sapiens
tgaaaagcgctatggctgcttctgaaactcaactgctgctggcatgagtggcttcctctgcctccactcaatcgcagagtgcgtccttggatggtcctgatacacaatggctaaaagaacaaggagaggagataaccaagtttcagcctcaaaaagatgacccaccagcattcggttcagccccagcctttacaagccctctgggctcgacgggaggcaaagtgttcggagagggcactgcagctgccagcgcaggaggattcgggtttgggagcagcagcaacaccacatccttcggcacgctcgcgagtcagaatgcccccactttcggatcactgtcccaacagacttctggttttgggacccagagtagcggattctctggttttggatcaggcacaggagggttcagctttgggtcaaataactcgtctgtccagggttttggtggctggcgaagctgagggcgtgtcagcaggcctttcgatccctgggaccaaccgcatcctcagcttcttccccgagaaatgctggagcaggctgttcagaccgacgttgccatcaaaacacatacacccagaaagaaacaacagaaaccaaaactcacaaggcgcatgattacttgttttatatttcatgttgggttttccctcccactattaaacagtctgtttccgta

SEQ ID NO: 380173 - DNA, 1839 bp, Homo sapiens
gtcaactgcgcgccgctggcgctgaggggaggaagtttgctgtcgagcggcctgggttccgtgggcaaggccgtgggaggcagcgttggctgcttcgacacactgagggcggcgcgatgggagacgagatggatgccatgattcccgagcgggagatgaaggattttcagtttagagcgctaaagaaggtgagaatctttgactcccctgaggaattgcccaaggaacgctcgagtctgcttgctgtgtccaacaaatatggtctggtcttcgctggtggagccagtggcttgcagatttttcctactaaaaatcttcttattcaaaataaacccggagatgatcccaacaaaatagttgataaagtccaaggcttgctagttcctatgaaattcccaatccatcacctggccttgagctgtgataacctcacactctctgcgtgcatgatgtccagtgaatatggttccattattgctttttttgatgttcgcacattctcaaatgaggctaaacagcaaaaacgcccatttgcctatcataagcttttgaaagatgcaggaggcatggtgattgatatgaagtggaaccccactgtcccctccatggtggcagtttgtctggctgatggtagtattgctgtcctgcaagtcacggaaacagtgaaagtatgtgcaactcttccttccacggtagcagtaacctctgtgtgctggagccccaaaggaaagcagctggcagtgggaaaacagaatggaactgtggtccagtatcttcctactttgcaggaaaaaaaagtcattccttgtcctccgttttatgagtcagatcatcctgtcagagttctggatgtgctgtggattggtacctacgtcttcgccatagtgtatgctgctgcagatgggaccctggaaacgtctccagatgtggtgatggctctactaccgaaaaaagaagaaaagcacccagagatatttgtgaactttatggagccctgttatggcagctgcacggagagacagcatcattactacctcagttacattgaggaatgggatttagtgctggcagcatctgcggcttcaacagaagttagtatccttgctcgacaaagtgatcagattaattgggaatcttggctactggaggattctagtcgagctgaattgcctgtgacagacaagagtgatgactccttgcccatgggagttgtcgtagactatacaaaccaagtggaaatcaccatcagtgatgaaaagactcttcctcctgctccagttctcatgttactttcaacagatggtgtgctttgtccattttatatgattaatcaaaatcctggggttaagtctctcatcaaaacaccagagcgactttcattagaaggagagcgacagcccaagtcaccaggtatgtgcctctgcctgctttatcagtaagggaataccatgggcttgcacaagagtatttccaagaatgaacatggtgtgaagacacatagtgattatctttaccagcctggtctgtcttaggaaggcacacactaatcttttttttaaacatgcatgtacatatttgccttcccctaccctcaagctttattctgcagccattactttacttcggagatgaaggaaggtcaaccagatgatttgcatccagtcgtttaccaacagttttctaagaccctatattatgtgatgtgcatccaaaagacattgtgcttaatcatgggggttggttaaagaaatgattgtatagtcttacagtgaaatgccatgtaccaattataaatgttatatttattgacagggaaggagtgagtggaatacatcacca

SEQ ID NO: 380174 - DNA, 1612 bp, Homo sapiens
ctcctttctttctccctatttctgtttgtttgcctctgttttgctcaggtggcttcggtgctgctccagtgtttggcagccctcctacttttgggggatcccctgggtttggaggggtgccagcattcggttcagccccagcctttacaagccctctgggctcgacgggaggcaaagtgttcggagagggcactgcagctgccagcgcaggaggattcgggtttgggagcagcagcaacaccacatccttcggcacgctcgcgagtcagaatgcccccactttcggatcactgtcccaacagacttctggttttgggacccagagtagcggattctctggttttggatcaggcacaggagggttcagctttgggtcaaataactcgtctgtccagggttttggtggctggcgaagctgagggcgtgtcagcaggcctttcgatccctgggaccaaccgcatcctcagcttcttccccgagaaatgctggagcaggctgttcagaccgacgttgccatcaaaacacatacacccagaaagaaacaacagaaaccaaaactcacaaggcgcatgattacttgttttatatttcatgttgggttttccctcccactattaaacagtctgtttccgtaacagaacgtatgtgggttttttcagatcacagccaagaagattgccccgtttctgtggctctgagaagccagcagagcctccatcagccagaacactgtgtcttcaaggatggcatcagaagtcaccagcgtcgggtgttgataaacagcatcgaatgtgccgtggtctcacttggacctagcgccctccacatagggaagaggttgaatgctggtgggtcatctttttgaggctgaaacttggttatctcctctccttgttcttttagccattgtgtatcaggaccatccaaggacgcactctgcgattgagtggaggcagaggaagccactcatgccagcagcagttgagtttcagaagcagccatagcgcttttcagtacagtacaatagtagccagcgtgaggcaggacagtgctgcgccttagccggccttggctctcatctccatgtggctcttgggtgccatgtgtcctactccagagaggagggggccggtcacttgagaagacagcctttatattctgtatgtggcagtgacattggtagccacacctacccagtgtctactaaccacagtgcagatagcccttgggtagacccaggaagtgtgaagacagacactgctgttgccagacaacactagcagaacgatgctggatttgacaacagtgtttgctaggacggcccagagctcatcactgcagttttattagagtgcttctttatctttaatgcagtatctttgaggcctgtaacatcctagatagttgccatcaaacaaggaccgtctcgcattgaaaacagatgtaagaatttctctttcaggcccagaatctgacagtgctttggcttgggtcatgagcagcggggagttgggaagagatttttttttttagagttttacatattggcaggttgtatttttttaatgttttaataaaagtttgacatgacattaattcatcatgttgcaga

SEQ ID NO: 380175 - DNA, 711 bp, Homo sapiens
gcagcgctgctcaacacggcgcaacgacttgcacggcccgcaccactcagcccacacatcaccagcaacggcaggtcgcccttgatctaggctggcatagtcgccttgtttcagctcgaaaggcttgttcagcaacacaggctgcttgcagcgcccgcatttaggcgcatcacccaggcgttcgccaggaatgcggttgagaccgttgcaatgcgggcaggggattacaagaggttcggacatggtgggctcctagggcgtggccaatgggtttaatttggagccggcaatgaggtttatcaagaccaggcgaaaaggatgaaacactgatcgttcccacgctccgcgtggtaatgcatcccgtggtactactgaggtgtaagccttagtagtaccaccagcagccaccagcacttcctcaactgccgtttttggcagtctgccagtcaccagtgcaggatcctctggggtcatcagttttggtgggacatctctaagtgctggcaagactagtttttcatttggaagccaacagaccaatagcacagtgcccccatctgccccaccatgactaagtcaaaatataagtaaaataaaaaatcaaatccctgtatattggtaatgttacaaacaggcctaatcatctcccagagaatatctagaaaatacccctagtcttctggagtatctgtgtcagagtactactgatgt

SEQ ID NO: 380176 - DNA, 454 bp, Homo sapiens
gaaatcaaggttttttctatgatggcaggggccttattgtttttattgattgctgtatctccaatgcttaggactatgtctggcacatgataggcattgtggaaatgaatgaactttcaggtagcagaagtatcctcagaaaactctaaagatgctaggcagattctggctaggatgtaaaagaatatagaaaaccttcactgccataataacaccaagaaaaatccagatgatgtagaagtcacacttactctggcagtattggaattatttactgctgtataacaaattgcctcaaaacctagtagcctgcaacagctacttatttattatagtcttggattctgtaggtcataacttcagatggacttagtagggatggcttgtcttcacagtatctgtgatctcagctggaagaagggaagactggaggcaggagtcatctgaaggctca

SEQ ID NO: 380177 - DNA, 440 bp, Homo sapiens
gttcttgcatttgaattgctaacatcctcttttcccttttttcttcctattttgatttggtttctcattgctcaatgtcttctcttcctgtctcctcctttctttctccctatttctgtttgtttgcctctgttttgctcaggtggcttcggtgctgctccagtgtttggcagccctcctacttttgggggatcccctgggtttggaggggtgccagcattcggttcagccccagcctttacaagccctctgggctcgacgggaggcaaagtgttcggagagggcactgcagctgccagcgcaggaggattcgggtaagccccctggggagggcccttgggaacccacacgccagccaaaaagcactaggggcctgtactcttgctctgaaaagaaatttgaccatgaggtgaaggcccctcccttgaaatttgtgaaca

SEQ ID NO: 380178 - DNA, 556 bp, Homo sapiens
ctggaagagggggaggtttcttcagtggccttggaggaaaacccagtcaggatgcagccaacaaaaacccattcagctcggccagtgggggctttggatccacagctacctcaagtaagttgagaagacttttcccagtcccttggtcccctaatgccattgtcattcttagggtgttatcaaagcttcagtgacaaatataaaaagaaaaaaaaatctagaaggctcatttaaaatatcttccccaaagcagtgtgatctgttttgcttttttatttttggttttttaatgagatgtcctatataatcatgaaaagatatcagagctgcagggagaggatctgtgtattgagctgctcccctcttctctcccaaggcccaaatcgctctgtttcttagtattggagtgacttgaagtgaatgcaagcagacaagcataaatgagcagcagcagagcaagccgaggatgctgggaggagagcatgcagactttcatttggatagtactctccaaattttccttaaaattcagctcctgtagggagatgtcacccaa

SEQ ID NO: 380179 - DNA, 456 bp, Homo sapiens
atcaaggcactcacaaagtcccatccaggttcaagaggagatacagaggccgcctcttgctctagaagagcatatgtgactagaagtattgctgtgatcatctttggaaaatatctgtcataatgggaccattgaagagtggcagaaagccttgttgaactggtttccagagagtggagcccatcataggtgtgagcactgtggcacagcagctgctgggggcagatgccaggtctgggtttgagcaggtagtagagaggacttgccaaagactgagaaaatgtactggctggagaaggagctgttggcagtgatgggggcaagcaaaataaatgaccagtaattacatgaaaaggtgatcaagtagcattaaactaatgagggaaatgaaaatcaaaaccacaattagataagataccacttcacaccccctaggatggctatcatttaaaaagt

SEQ ID NO: 380180 - DNA, 6604 bp, Homo sapiens
gtcaactgcgcgccgctggcgctgaggggaggaagtttgctgtcgagcggcctgggttccgtgggcaaggccgtgggaggcagcgttggctgcttcgacacactgagggcggcgcgatgggagacgagatggatgccatgattcccgagcgggagatgaaggattttcagtttagagcgctaaagaaggtgagaatctttgactcccctgaggaattgcccaaggaacgctcgagtctgcttgctgtgtccaacaaatatggtctggtcttcgctggtggagccagtggcttgcagatttttcctactaaaaatcttcttattcaaaataaacccggagatgatcccaacaaaatagttgataaagtccaaggcttgctagttcctatgaaattcccaatccatcacctggccttgagctgtgataacctcacactctctgcgtgcatgatgtccagtgaatatggttccattattgctttttttgatgttcgcacattctcaaatgaggctaaacagcaaaaacgcccatttgcctatcataagcttttgaaagatgcaggaggcatggtgattgatatgaagtggaaccccactgtcccctccatggtggcagtttgtctggctgatggtagtattgctgtcctgcaagtcacggaaacagtgaaagtatgtgcaactcttccttccacggtagcagtaacctctgtgtgctggagccccaaaggaaagcagctggcagtgggaaaacagaatggaactgtggtccagtatcttcctactttgcaggaaaaaaaagtcattccttgtcctccgttttatgagtcagatcatcctgtcagagttctggatgtgctgtggattggtacctacgtcttcgccatagtgtatgctgctgcagatgggaccctggaaacgtctccagatgtggtgatggctctactaccgaaaaaagaagaaaagcacccagagatatttgtgaactttatggagccctgttatggcagctgcacggagagacagcatcattactacctcagttacattgaggaatgggatttagtgctggcagcatctgcggcttcaacagaagttagtatccttgctcgacaaagtgatcagattaattgggaatcttggctactggaggattctagtcgagctgaattgcctgtgacagacaagagtgatgactccttgcccatgggagttgtcgtagactatacaaaccaagtggaaatcaccatcagtgatgaaaagactcttcctcctgctccagttctcatgttactttcaacagatggtgtgctttgtccattttatatgattaatcaaaatcctggggttaagtctctcatcaaaacaccagagcgactttcattagaaggagagcgacagcccaagtcaccaggaagtactcccactaccccaacctcctctcaagccccacagaaactggatgcttctgcagctgcagcccctgcctctctgccaccttcatcacctgctgctcccattgccactttttctttgcttcctgctggtggagcccccactgtgttctcctttggttcttcatctttgaagtcatctgctacggtcactggggagcccccttcatattccagtggctccgacagctccaaagcagccccaggccctggcccatcaaccttctcttttgttcccccttctaaagcctccctagcccccacccctgcagcgtctcctgtggctccatcagctgcttcattctcctttggatcatctggttttaagcctaccctggaaagcacaccagtgccaagtgtgtctgctccaaatatagcaatgaagtcctccttcccaccctcaacctctgctgtcaaagtcaaccttagtgaaaagtttactgctgcagctacctctactcctgttagtagctcccagagcgcacccccgatgtcgccattctcttctgcctccaagccagctgcttctggaccactcagccaccccacacctctctcagcaccacctagttccgtgccattgaagtcctcagtcttgccctcaccatcaggacgatctgctcagggcagttcaagcccagtgccctcaatggtacagaaatcacccaggataacccctccagcggcaaagccaggctctccccaggcaaagtcacttcagcctgctgttgcagaaaagcagggacatcagtggaaagattcagatcctgtaatggctggaattggggaggagattgcacactttcagaaggagttggaagagttaaaagcccgaacttccaaagcctgtttccaagtgggcacttctgaggagatgaagatgctgcgaacagaatcagatgacttgcatacctttcttttggagattaaagagaccacagagtcgcttcatggagatataagtagcctgaaaacaactttacttgagggctttgctggtgttgaggaagccagagaacaaaatgaaagaaatcgtgactctggttatctgcatttgctttataaaagaccactggatcccaagagtgaagctcagcttcaggaaattcggcgccttcatcagtatgtgaaatttgctgtccaagatgtgaatgatgttctagacttggagtgggatcagcatctggaacaaaagaaaaaacaaaggcacctgcttgtgccagagcgagagacactgtttaacaccctagccaacaatcgggaaatcatcaaccaacagaggaagaggctgaatcacctggtggatagtcttcagcagctccgcctttacaaacagacttccctgtggagcctgtcctcggctgttccttcccagagcagcattcacagttttgacagtgacctggaaagcctgtgcaatgctttgttgaaaaccaccatagaatctcacaccaaatccttgcccaaagtaccagccaaactgtcccccatgaaacaggcacaactgagaaacttcttggccaagaggaagaccccaccagtgagatccactgctccagccagcctgtctcgatcagcctttctgtctcagagatattatgaagacttggatgaagtcagctcaacgtcatctgtctcccagtctctggagagtgaagatgcacggacgtcctgtaaagatgacgaggcagtggttcaggcccctcggcacgcccccgtggttcgcactccttccatccagcccagtctcttgccccatgcagcaccttttgctaaatctcacctggttcatggttcttcacctggtgtgatgggaacttcagtggctacatctgctagcaaaattattcctcaaggggccgatagcacaatgcttgccacgaaaaccgtgaaacatggtgcacctagtccttcccaccccatctcagccccgcaggcagctgccgcagcagcactcaggcggcagatggccagtcaggcaccagctgtaaacactttgactgaatcaacgttgaagaatgtccctcaagtggtaaatgtgcaggaattgaagaataaccctgcaaccccttctacagccatgggttcttcagtgccctactccacagccaaaacacctcacccagtgttgaccccagtggctgctaaccaagccaagcaggggtctctaataaattcccttaagccatctgggcctacaccagcatccggtcagttatcatctggtgacaaagcttcagggacagccaagatagaaacagctgtgacttcaaccccatctgcttctgggcagttcagcaagcctttctcattttctccatcagggactggctttaattttgggataatcacaccaacaccgtcttctaatttcactgctgcacaaggggcaacaccctccactaaagagtcaagccagccggacgcattctcatctggtgggggaagcaaaccttcttatgaggccattcctgaaagctcacctccctcaggaatcacatccgcatcaaacaccaccccaggagaacctgccgcatctagcagcagacctgtggcaccttctggaactgctctttccaccacctctagtaagctggaaaccccaccgtccaagctgggagagcttctgtttccaagttctttggctggagagactctgggaagtttttcaggactgcgggttggccaagcagatgattctacaaaaccaaccaataaggcttcatccacaagcctaactagtacccagccaaccaagacgtcaggcgtgccctcagggtttaattttactgcccccccggtgttagggaagcacacggagccccctgtgacatcctctgcaaccaccacctcagtagtaccaccagcagccaccagcacttcctcaactgccgtttttggcagtctgccagtcaccagtgcaggatcctctggggtcatcagttttggtgggacatctctaagtgctggcaagactagtttttcatttggaagccaacagaccaatagcacagtgcccccatctgccccaccaccaactacagctgccactccccttccaacatcattccccacattgtcatttggtagcctcctgagttcagcaactaccccctccctgcctatgtccgctggcagaagcacagaagaggccacttcatcagctttgcctgagaagccaggtgacagtgaggtctcagcatcagcagcctcacttctagaggagcaacagtcagcccagcttccccaggctcctccgcaaacttctgactctgttaaaaaagaacctgttcttgcccagcctgcagtcagcaactctggcactgcagcatctagtactagtcttgtagcactttctgcagaggctaccccagccaccacgggggtccctgatgccaggacggaggcagtaccacctgcttcctccttttctgtgcctgggcagactgctgtcacagcagctgctatctcaagtgcaggccctgtggccgtcgaaacatcaagtacccccatagcctccagcaccacgtccattgttgctcccggcccatctgcagaggcagcagcatttggtaccgtcacttctggctcatccgtctttgctcagcctcctgctgccagttctagctcagctttcaaccagctcaccaacaacacagccactgccccctctgccacgcccgtgtttgggcaagtggcagccagcaccgcaccaagtctgtttgggcagcagactggtagcacagccagcacagcagctgccacaccacaggtcagcagctcagggtttagcagcccagcttttggtaccacagccccaggggtctttggacagacaaccttcgggcaggcctcagtctttgggcagtcggcgagcagtgctgcaagtgtcttttccttcagtcagcctgggttcagttccgtgcctgccttcggtcagcctgcttcctccactcccacatccaccagtggaagtgtctttggtgccgcctcaagtaccagtagctccagttccttctcatttggacagtcttctcccaacacaggaggggggctgtttggccaaagcaacgctcctgcttttgggcagagtcctggctttggacagggaggctctgtctttggtggtacctcagctgccaccacaacagcagcaacctctgggttcagcttttgccaagcttcaggttttgggtctagtaatactggttctgtgtttggtcaagcagccagtactggtggaatagtctttggccagcaatcatcctcttccagtggtagcgtgtttgggtctggaaacactggaagagggggaggtttcttcagtggccttggaggaaaacccagtcaggatgcagccaacaaaaacccattcagctcggccagtgggggctttggatccacagctacctcaaatacctctaacctatttggaaacagtggggccaagacatttggtggatttgccagctcgtcgtttggagagcagaaacccactggcactttcagctctggaggaggaagtgtggcatcccaaggctttgggttttcctctccaaacaaaacaggtggcttcggtgctgctccagtgtttggcagccctcctacttttgggggatcccctgggtttggaggggtgccagcattcggttcagccccagcctttacaagccctctgggctcgacgggaggcaaagtgttcggagagggcactgcagctgccagcgcaggaggattcgggtttgggagcagcagcaacaccacatccttcggcacgctcgcgagtcagaatgcccccactttcggatcactgtcccaacagacttctggttttgggacccagagtagcggattctctggttttggatcaggcacaggagggttcagctttgggtcaaataactcgtctgtccagggttttggtggctggcgaagctgagggcgtgtcagcaggcctttcgatccctgggaccaaccgcatcctcagcttcttccccgagaaatgctggagcaggctgttcagaccgacgttgccatcaaaacacatacacccagaaagaaacaacagaaaccaaaactcacaaggcgcatgattacttgttttatatttcatgttgggttttccctcccactattaaacagtctgtttccgta

SEQ ID NO: 380181 - DNA, 6711 bp, Homo sapiens
gtcaactgcgcgccgctggcgctgaggggaggaagtttgctgtcgagcggcctgggttccgtgggcaaggccgtgggaggcagcgttggctgcttcgacacactgagggcggcgcgatgggagacgagatggatgccatgattcccgagcgggagatgaaggattttcagtttagagcgctaaagaaggtgagaatctttgactcccctgaggaattgcccaaggaacgctcgagtctgcttgctgtgtccaacaaatatggtctggtcttcgctggtggagccagtggcttgcagatttttcctactaaaaatcttcttattcaaaataaacccggagatgatcccaacaaaatagttgataaagtccaaggcttgctagttcctatgaaattcccaatccatcacctggccttgagctgtgataacctcacactctctgcgtgcatgatgtccagtgaatatggttccattattgctttttttgatgttcgcacattctcaaatgaggctaaacagcaaaaacgcccatttgcctatcataagcttttgaaagatgcaggaggcatggtgattgatatgaagtggaaccccactgtcccctccatggtggcagtttgtctggctgatggtagtattgctgtcctgcaagtcacggaaacagtgaaagtatgtgcaactcttccttccacggtagcagtaacctctgtgtgctggagccccaaaggaaagcagctggcagtgggaaaacagaatggaactgtggtccagtatcttcctactttgcaggaaaaaaaagtcattccttgtcctccgttttatgagtcagatcatcctgtcagagttctggatgtgctgtggattggtacctacgtcttcgccatagtgtatgctgctgcagatgggaccctggaaacgtctccagatgtggtgatggctctactaccgaaaaaagaagaaaagcacccagagatatttgtgaactttatggagccctgttatggcagctgcacggagagacagcatcattactacctcagttacattgaggaatgggatttagtgctggcagcatctgcggcttcaacagaagttagtatccttgctcgacaaagtgatcagattaattgggaatcttggctactggaggattctagtcgagctgaattgcctgtgacagacaagagtgatgactccttgcccatgggagttgtcgtagactatacaaaccaagtggaaatcaccatcagtgatgaaaagactcttcctcctgctccagttctcatgttactttcaacagatggtgtgctttgtccattttatatgattaatcaaaatcctggggttaagtctctcatcaaaacaccagagcgactttcattagaaggagagcgacagcccaagtcaccaggaagtactcccactaccccaacctcctctcaagccccacagaaactggatgcttctgcagctgcagcccctgcctctctgccaccttcatcacctgctgctcccattgccactttttctttgcttcctgctggtggagcccccactgtgttctcctttggttcttcatctttgaagtcatctgctacggtcactggggagcccccttcatattccagtggctccgacagctccaaagcagccccaggccctggcccatcaaccttctcttttgttcccccttctaaagcctccctagcccccacccctgcagcgtctcctgtggctccatcagctgcttcattctcctttggatcatctggttttaagcctaccctggaaagcacaccagtgccaagtgtgtctgctccaaatatagcaatgaagtcctccttcccaccctcaacctctgctgtcaaagtcaaccttagtgaaaatagctcccagagcgcacccccgatgtcgccattctcttctgcctccaagccagctgcttctggaccactcagccaccccacacctctctcagcaccacctagttccgtgccattgaagtcctcagtcttgccctcaccatcaggacgatctgctcagggcagttcaagcccagtgccctcaatggtacagaaatcacccaggataacccctccagcggcaaagccaggctctccccaggcaaagtcacttcagcctgctgttgcagaaaagcagggacatcagtggaaagattcagatcctgtaatggctggaattggggaggagattgcacactttcagaaggagttggaagagttaaaagcccgaacttccaaagcctgtttccaagtgggcacttctgaggagatgaagatgctgcgaacagaatcagatgacttgcatacctttcttttggagattaaagagaccacagagtcgcttcatggagatataagtagcctgaaaacaactttacttgagggctttgctggtgttgaggaagccagagaacaaaatgaaagaaatcgtgactctggttatctgcatttgctttataaaagaccactggatcccaagagtgaagctcagcttcaggaaattcggcgccttcatcagtatgtgaaatttgctgtccaagatgtgaatgatgttctagacttggagtgggatcagcatctggaacaaaagaaaaaacaaaggcacctgcttgtgccagagcgagagacactgtttaacaccctagccaacaatcgggaaatcatcaaccaacagaggaagaggctgaatcacctggtggatagtcttcagcagctccgcctttacaaacagacttccctgtggagcctgtcctcggctgttccttcccagagcagcattcacagttttgacagtgacctggaaagcctgtgcaatgctttgttgaaaaccaccatagaatctcacaccaaatccttgcccaaagtaccagccaaactgtcccccatgaaacaggcacaactgagaaacttcttggccaagaggaagaccccaccagtgagatccactgctccagccagcctgtctcgatcagcctttctgtctcagagatattatgaagacttggatgaagtcagctcaacgtcatctgtctcccagtctctggagagtgaagatgcacggacgtcctgtaaagatgacgaggcagtggttcaggcccctcggcacgcccccgtggttcgcactccttccatccagcccagtctcttgccccatgcagcaccttttgctaaatctcacctggttcatggttcttcacctggtgtgatgggaacttcagtggctacatctgctagcaaaattattcctcaaggggccgatagcacaatgcttgccacgaaaaccgtgaaacatggtgcacctagtccttcccaccccatctcagccccgcaggcagctgccgcagcagcactcaggcggcagatggccagtcaggcaccagctgtaaacactttgactgaatcaacgttgaagaatgtccctcaagtggtaaatgtgcaggaattgaagaataaccctgcaaccccttctacagccatgggccaaaacacctcacccagtgttgaccccagtggctgctaaccaagccaagcaggggtctctaataaattcccttaagccatctgggcctacaccagcatccggtcagttatcatctggtgacaaagcttcagggacagccaagatagaaacagctgtgacttcaaccccatctgcttctgggcagttcagcaagcctttctcattttctccatcagggactggctttaattttgggataatcacaccaacaccgtcttctaatttcactgctgcacaaggggcaacaccctccactaaagagtcaagccagccggacgcattctcatctggtgggggaagcaaaccttcttatgaggccattcctgaaagctcacctccctcaggaatcacatccgcatcaaacaccaccccaggagaacctgccgcatctagcagcagacctgtggcaccttctggaactgctctttccaccacctctagtaagctggaaaccccaccgtccaagctgggagagcttctgtttccaagttctttggctggagagactctgggaagtttttcaggactgcgggttggccaagcagatgattctacaaaaccaaccaataaggcttcatccacaagcctaactagtacccagccaaccaagacgtcaggcgtgccctcagggtttaattttactgcccccccggtgttagggaagcacacggagccccctgtgacatcctctgcaaccaccacctcagtagtaccaccagcagccaccagcacttcctcaactgccgtttttggcagtctgccagtcaccagtgcaggatcctctggggtcatcagttttggtgggacatctctaagtgctggcaagactagtttttcatttggaagccaacagaccaatagcacagtgcccccatctgccccaccaccaactacagctgccactccccttccaacatcattccccacattgtcatttggtagcctcctgagttcagcaactaccccctccctgcctatgtccgctggcagaagcacagaagaggccacttcatcagctttgcctgagaagccaggtgacagtgaggtctcagcatcagcagcctcacttctagaggagcaacagtcagcccagcttccccaggctcctccgcaaacttctgactctgttaaaaaagaacctgttcttgcccagcctgcagtcagcaactctggcactgcagcatctagtactagtcttgtagcactttctgcagaggctaccccagccaccacgggggtccctgatgccaggacggaggcagtaccacctgcttcctccttttctgtgcctgggcagactgctgtcacagcagctgctatctcaagtgcaggccctgtggccgtcgaaacatcaagtacccccatagcctccagcaccacgtccattgttgctcccggcccatctgcagaggcagcagcatttggtaccgtcacttctggctcatccgtctttgctcagcctcctgctgccagttctagctcagctttcaaccagctcaccaacaacacagccactgccccctctgccacgcccgtgtttgggcaagtggcagccagcaccgcaccaagtctgtttgggcagcagactggtagcacagccagcacagcagctgccacaccacaggtcagcagctcagggtttagcagcccagcttttggtaccacagccccaggggtctttggacagacaaccttcgggcaggcctcagtctttgggcagtcggcgagcagtgctgcaagtgtcttttccttcagtcagcctgggttcagttccgtgcctgccttcggtcagcctgcttcctccactcccacatccaccagtggaagtgtctttggtgccgcctcaagtaccagtagctccagttccttctcatttggacagtcttctcccaacacaggaggggggctgtttggccaaagcaacgctcctgcttttgggcagagtcctggctttggacagggaggctctgtctttggtggtacctcagctgccaccacaacagcagcaacctctgggttcagcttttgccaagcttcaggttttgggtctagtaatactggttctgtgtttggtcaagcagccagtactggtggaatagtctttggccagcaatcatcctcttccagtggtagcgtgtttgggtctggaaacactggaagagggggaggtttcttcagtggccttggaggaaaacccagtcaggatgcagccaacaaaaacccattcagctcggccagtgggggctttggatccacagctacctcaaatacctctaacctatttggaaacagtggggccaagacatttggtggatttgccagctcgtcgtttggagagcagaaacccactggcactttcagctctggaggaggaagtgtggcatcccaaggctttgggttttcctctccaaacaaaacaggtggcttcggtgctgctccagtgtttggcagccctcctacttttgggggatcccctgggtttggaggggtgccagcattcggttcagccccagcctttacaagccctctgggctcgacgggaggcaaagtgttcggagagggcactgcagctgccagcgcaggaggattcgggtccctggccatgagcctgtctccgaccctgaagggcaggctgttgctgatgaggcccaaggcaggaggaggaagggagcaggccgctcctgggagaaagtccaatgagagcagatcccttggccacctttgtatggaaagagccttgacctcaccattaaaagtttgggagcagcagcaacaccacatccttcggcacgctcgcgagtcagaatgcccccactttcggatcactgtcccaacagacttctggttttgggacccagagtagcggattctctggttttggatcaggcacaggagggttcagctttgggtcaaataactcgtctgtccagggttttggtggctggcgaagctgagggcgtgtcagcaggcctttcgatccctgggaccaaccgcatcctcagcttcttccccgagaaatgctggagcaggctgttcagaccgacgttgccatcaaaacacatacacccagaaagaaacaacagaaaccaaaactcacaaggcgcatgattacttgttttatatttcatgttgggttttccctcccactattaaacagtctgtttccgta

SEQ ID NO: 380182 - DNA, 654 bp, Homo sapiens
tgaaaagcgctatggctgcttctgaaactcaactgctgctggcatgagtggcttcctctgcctccactcaatcgcagagtgcgtccttggatggtcctgatacacaatggctaaaagaacaaggagaggagataaccaagtttcagcctcaaaaagatgacccaccagcattcggttcagccccagcctttacaagccctctgggctcgacgggaggcaaagtgttcggagagggcactgcagctgccagcgcaggaggattcgggtttgggagcagcagcaacaccacatccttcggcacgctcgcgagtcagaatgcccccactttcggatcactgtcccaacagacttctggttttgggacccagagtagcggattctctggttttggatcaggcacaggaggtctgtccagggttttggtggctggcgaagctgagggcgtgtcagcaggcctttcgatccctgggaccaaccgcatcctcagcttcttccccgagaaatgctggagcaggctgttcagaccgacgttgccatcaaaacacatacacccagaaagaaacaacagaaaccaaaactcacaaggcgcatgattacttgttttatatttcatgttgggttttccctcccactattaaacagtctgtttccgta

SEQ ID NO: 380183 - DNA, 4825 bp, Homo sapiens
  misc_feature (4809)..(4809): n is a, c, g, or t
  misc_feature (4811)..(4811): n is a, c, g, or t
gtcaactgcgcgccgctggcgctgaggggaggaagtttgctgtcgagcggcctgggttccgtgggcaaggccgtgggaggcagcgttggctgcttcgacacactgagggcggcgcgatgggagacgagatggatgccatgattcccgagcgggagatgaaggattttcagtttagagcgctaaagaaggtgagaatctttgactcccctgaggaattgcccaaggaacgctcgagtctgcttgctgtgtccaacaaatatggtctggtcttcgctggtggagccagtggcttgcagatttttcctactaaaaatcttcttattcaaaataaacccggagatgatcccaacaaaatagttgataaagtccaaggcttgctagttcctatgaaattcccaatccatcacctggccttgagctgtgataacctcacactctctgcgtgcatgatgtccagtgaatatggttccattattgctttttttgatgttcgcacattctcaaatgaggctaaacagcaaaaacgcccatttgcctatcataagcttttgaaagatgcaggaggcatggtgattgatatgaagtggaaccccactgtcccctccatggtggcagtttgtctggctgatggtagtattgctgtcctgcaagtcacggaaacagtgaaagtatgtgcaactcttccttccacggtagcagtaacctctgtgtgctggagccccaaaggaaagcagctggcagtgggaaaacagaatggaactgtggtccagtatcttcctactttgcaggaaaaaaaagtcattccttgtcctccgttttatgagtcagatcatcctgtcagagttctggatgtgctgtggattggtacctacgtcttcgccatagtgtatgctgctgcagatgggaccctggaaacgtctccagatgtggtgatggctctactaccgaaaaaagaagaaaagcacccagagatatttgtgaactttatggagccctgttatggcagctgcacggagagacagcatcattactacctcagttacattgaggaatgggatttagtgctggcagcatctgcggcttcaacagaagttagtatccttgctcgacaaagtgatcagattaattgggaatcttggctactggaggattctagtcgagctgaattgcctgtgacagacaagagtgatgactccttgcccatgggagttgtcgtagactatacaaaccaagtggaaatcaccatcagtgatgaaaagactcttcctcctgctccagttctcatgttactttcaacagatggtgtgctttgtccattttatatgattaatcaaaatcctggggttaagtctctcatcaaaacaccagagcgactttcattagaaggagagcgacagcccaagtcaccaggaagtactcccactaccccaacctcctctcaagccccacagaaactggatgcttctgcagctgcagcccctgcctctctgccaccttcatcacctgctgctcccattgccactttttctttgcttcctgctggtggagcccccactgtgttctcctttggttcttcatctttgaagtcatctgctacggtcactggggagcccccttcatattccagtggctccgacagctccaaagcagccccaggccctggcccatcaaccttctcttttgttcccccttctaaagcctccctagcccccacccctgcagcgtctcctgtggctccatcagctgcttcattctcctttggatcatctggttttaagcctaccctggaaagcacaccagtgccaagtgtgtctgctccaaatatagcaatgaagtcctccttcccaccctcaacctctgctgtcaaagtcaaccttagtgaaaagtttactgctgcagctacctctactcctgttagtagctcccagagcgcacccccgatgtcgccattctcttctgcctccaagccagctgcttctggaccactcagccaccccacacctctctcagcaccacctagttccgtgccattgaagtcctcagtcttgccctcaccatcaggacgatctgctcagggcagttcaagcccagtgccctcaatggtacagaaatcacccaggataacccctccagcggcaaagccaggctctccccaggcaaagtcacttcagcctgctgttgcagaaaagcagggacatcagtggaaagattcagatcctgtaatggctggaattggggaggagattgcacactttcagaaggagttggaagagttaaaagcccgaacttccaaagcctgtttccaagtgggcacttctgaggagatgaagatgctgcgaacagaatcagatgacttgcatacctttcttttggagattaaagagaccacagagtcgcttcatggagatataagtagcctgaaaacaactttacttgagggctttgctggtgttgaggaagccagagaacaaaatgaaagaaatcgtgactctggttatctgcatttgctttataaaagaccactggatcccaagagtgaagctcagcttcaggaaattcggcgccttcatcagtatgtgaaatttgctgtccaagatgtgaatgatgttctagacttggagtgggatcagcatctggaacaaaagaaaaaacaaaggcacctgcttgtgccagagcgagagacactgtttaacaccctagccaacaatcgggaaatcatcaaccaacagaggaagaggctgaatcacctggtggatagtcttcagcagctccgcctttacaaacagacttccctgtggagcctgtcctcggctgttccttcccagagcagcattcacagttttgacagtgacctggaaagcctgtgcaatgctttgttgaaaaccaccatagaatctcacaccaaatccttgcccaaagtaccagccaaactgtcccccatgaaacaggcacaactgagaaacttcttggccaagaggaagaccccaccagtgagatccactgctccagccagcctgtctcgatcagcctttctgtctcagagatattatgaagacttggatgaagtcagctcaacgtcatctgtctcccagtctctggagagtgaagatgcacggacgtcctgtaaagatgacgaggcagtggttcaggcccctcggcacgcccccgtggttcgcactccttccatccagcccagtctcttgccccatgcagcaccttttgctaaatctcacctggttcatggttcttcacctggtgtgatgggaacttcagtggctacatctgctagcaaaattattcctcaaggggccgatagcacaatgcttgccacgaaaaccgtgaaacatggtgcacctagtccttcccaccccatctcagccccgcaggcagctgccgcagcagcactcaggcggcagatggccagtcaggcaccagctgtaaacactttgactgaatcaacgttgaagaatgtccctcaagtggtaaatgtgcaggaattgaagaataaccctgcaaccccttctacagccatgggttcttcagtgccctactccacagccaaaacacctcacccagtgttgaccccagtggctgctaaccaagccaagcaggggtctctaataaattcccttaagccatctgggcctacaccagcatccggtcagttatcatctggtgacaaagcttcagggacagccaagatagaaacagctgtgacttcaaccccatctgcttctgggcagttcagcaagcctttctcattttctccatcagggactggctttaattttgggataatcacaccaacaccgtcttctaatttcactgctgcacaaggggcaacaccctccactaaagagtcaagccagccggacgcattctcatctggtgggggaagcaaaccttcttatgaggccattcctgaaagctcacctccctcaggaatcacatccgcatcaaacaccaccccaggagaacctgccgcatctagcagcagacctgtggcaccttctggaactgctctttccaccacctctagtaagctggaaaccccaccgtccaagctgggagagcttctgtttccaagttctttggctggagagactctgggaagtttttcaggactgcgggttggccaagcagatgattctacaaaaccaaccaataaggcttcatccacaagcctaactagtacccagccaaccaagacgtcaggcgtgccctcagggtttaattttactgcccccccggtgttagggaagcacacggagccccctgtgacatcctctgcaaccaccacctcagtagtaccaccagcagccaccagcacttcctcaactgccgtttttggcagtctgccagtcaccagtgcaggatcctctggggtcatcagttttggtgggacatctctaagtgctggcaagactagtttttcatttggaagccaacagaccaatagcacagtgcccccatctgccccaccaccaactacagctgccactccccttccaacatcattccccacattgtcatttggtagcctcctgagttcagcaactaccccctccctgcctatgtccgctggcagaagcacagaagaggccacttcatcagctttgcctgagaagccaggtgacagtgaggtctcagcatcagcagcctcacttctagaggagcaacagtcagcccagcttccccaggctcctccgcaaacttctgactctgttaaaaaagaacctgttcttgcccagcctgcagtcagcaactctggcactgcagcatctagtactactgaggtgtaagcggggntnctcaggaaacagct

SEQ ID NO: 380184 - DNA, 6940 bp, Homo sapiens
gtcaactgcgcgccgctggcgctgaggggaggaagtttgctgtcgagcggcctgggttccgtgggcaaggccgtgggaggcagcgttggctgcttcgacacactgagggcggcgcgatgggagacgagatggatgccatgattcccgagcgggagatgaaggattttcagtttagagcgctaaagaaggtgagaatctttgactcccctgaggaattgcccaaggaacgctcgagtctgcttgctgtgtccaacaaatatggtctggtcttcgctggtggagccagtggcttgcagatttttcctactaaaaatcttcttattcaaaataaacccggagatgatcccaacaaaatagttgataaagtccaaggcttgctagttcctatgaaattcccaatccatcacctggccttgagctgtgataacctcacactctctgcgtgcatgatgtccagtgaatatggttccattattgctttttttgatgttcgcacattctcaaatgaggctaaacagcaaaaacgcccatttgcctatcataagcttttgaaagatgcaggaggcatggtgattgatatgaagtggaaccccactgtcccctccatggtggcagtttgtctggctgatggtagtattgctgtcctgcaagtcacggaaacagtgaaagtatgtgcaactcttccttccacggtagcagtaacctctgtgtgctggagccccaaaggaaagcagctggcagtgggaaaacagaatggaactgtggtccagtatcttcctactttgcaggaaaaaaaagtcattccttgtcctccgttttatgagtcagatcatcctgtcagagttctggatgtgctgtggattggtacctacgtcttcgccatagtgtatgctgctgcagatgggaccctggaaacgtctccagatgtggtgatggctctactaccgaaaaaagaagaaaagcacccagagatatttgtgaactttatggagccctgttatggcagctgcacggagagacagcatcattactacctcagttacattgaggaatgggatttagtgctggcagcatctgcggcttcaacagaagttagtatccttgctcgacaaagtgatcagattaattgggaatcttggctactggaggattctagtcgagctgaattgcctgtgacagacaagagtgatgactccttgcccatgggagttgtcgtagactatacaaaccaagtggaaatcaccatcagtgatgaaaagactcttcctcctgctccagttctcatgttactttcaacagatggtgtgctttgtccattttatatgattaatcaaaatcctggggttaagtctctcatcaaaacaccagagcgactttcattagaaggagagcgacagcccaagtcaccaggaagtactcccactaccccaacctcctctcaagccccacagaaactggatgcttctgcagctgcagcccctgcctctctgccaccttcatcacctgctgctcccattgccactttttctttgcttcctgctggtggagcccccactgtgttctcctttggttcttcatctttgaagtcatctgctacggtcactggggagcccccttcatattccagtggctccgacagctccaaagcagccccaggccctggcccatcaaccttctcttttgttcccccttctaaagcctccctagcccccacccctgcagcgtctcctgtggctccatcagctgcttcattctcctttggatcatctggttttaagcctaccctggaaagcacaccagtgccaagtgtgtctgctccaaatatagcaatgaagtcctccttcccaccctcaacctctgctgtcaaagtcaaccttagtgaaaagtttactgctgcagctacctctactcctgttagtagctcccagagcgcacccccgatgtcgccattctcttctgcctccaagccagctgcttctggaccactcagccaccccacacctctctcagcaccacctagttccgtgccattgaagtcctcagtcttgccctcaccatcaggacgatctgctcagggcagttcaagcccagtgccctcaatggtacagaaatcacccaggataacccctccagcggcaaagccaggctctccccaggcaaagtcacttcagcctgctgttgcagaaaagcagggacatcagtggaaagattcagatcctgtaatggctggaattggggaggagattgcacactttcagaaggagttggaagagttaaaagcccgaacttccaaagcctgtttccaagtgggcacttctgaggagatgaagatgctgcgaacagaatcagatgacttgcatacctttcttttggagattaaagagaccacagagtcgcttcatggagatataagtagcctgaaaacaactttacttgagggctttgctggtgttgaggaagccagagaacaaaatgaaagaaatcgtgactctggttatctgcatttgctttataaaagaccactggatcccaagagtgaagctcagcttcaggaaattcggcgccttcatcagtatgtgaaatttgctgtccaagatgtgaatgatgttctagacttggagtgggatcagcatctggaacaaaagaaaaaacaaaggcacctgcttgtgccagagcgagagacactgtttaacaccctagccaacaatcgggaaatcatcaaccaacagaggaagaggctgaatcacctggtggatagtcttcagcagctccgcctttacaaacagacttccctgtggagcctgtcctcggctgttccttcccagagcagcattcacagttttgacagtgacctggaaagcctgtgcaatgctttgttgaaaaccaccatagaatctcacaccaaatccttgcccaaagtaccagccaaactgtcccccatgaaacaggcacaactgagaaacttcttggccaagaggaagaccccaccagtgagatccactgctccagccagcctgtctcgatcagcctttctgtctcagagatattatgaagacttggatgaagtcagctcaacgtcatctgtctcccagtctctggagagtgaagatgcacggacgtcctgtaaagatgacgaggcagtggttcaggcccctcggcacgcccccgtggttcgcactccttccatccagcccagtctcttgccccatgcagcaccttttgctaaatctcacctggttcatggttcttcacctggtgtgatgggaacttcagtggctacatctgctagcaaaattattcctcaaggggccgatagcacaatgcttgccacgaaaaccgtgaaacatggtgcacctagtccttcccaccccatctcagccccgcaggcagctgccgcagcagcactcaggcggcagatggccagtcaggcaccagctgtaaacactttgactgaatcaacgttgaagaatgtccctcaagtggtaaatgtgcaggaattgaagaataaccctgcaaccccttctacagccatgggttcttcagtgccctactccacagccaaaacacctcacccagtgttgaccccagtggctgctaaccaagccaagcaggggtctctaataaattcccttaagccatctgggcctacaccagcatccggtcagttatcatctggtgacaaagcttcagggacagccaagatagaaacagctgtgacttcaaccccatctgcttctgggcagttcagcaagcctttctcattttctccatcagggactggctttaattttgggataatcacaccaacaccgtcttctaatttcactgctgcacaaggggcaacaccctccactaaagagtcaagccagccggacgcattctcatctggtgggggaagcaaaccttcttatgaggccattcctgaaagctcacctccctcaggaatcacatccgcatcaaacaccaccccaggagaacctgccgcatctagcagcagacctgtggcaccttctggaactgctctttccaccacctctagtaagctggaaaccccaccgtccaagctgggagagcttctgtttccaagttctttggctggagagactctgggaagtttttcaggactgcgggttggccaagcagatgattctacaaaaccaaccaataaggcttcatccacaagcctaactagtacccagccaaccaagacgtcaggcgtgccctcagggtttaattttactgcccccccggtgttagggaagcacacggagccccctgtgacatcctctgcaaccaccacctcagtagtaccaccagcagccaccagcacttcctcaactgccgtttttggcagtctgccagtcaccagtgcaggatcctctggggtcatcagttttggtgggacatctctaagtgctggcaagactagtttttcatttggaagccaacagaccaatagcacagtgcccccatctgccccaccaccaactacagctgccactccccttccaacatcattccccacattgtcatttggtagcctcctgagttcagcaactaccccctccctgcctatgtccgctggcagaagcacagaagaggccacttcatcagctttgcctgagaagccaggtgacagtgaggtctcagcatcagcagcctcacttctagaggagcaacagtcagcccagcttccccaggctcctccgcaaacttctgactctgttaaaaaagaacctgttcttgcccagcctgcagtcagcaactctggcactgcagcatctagtactagtcttgtagcactttctgcagaggctaccccagccaccacgggggtccctgatgccaggacggaggcagtaccacctgcttcctccttttctgtgcctgggcagactgctgtcacagcagctgctatctcaagtgcaggccctgtggccgtcgaaacatcaagtacccccatagcctccagcaccacgtccattgttgctcccggcccatctgcagaggcagcagcatttggtaccgtcacttctggctcatccgtctttgctcagcctcctgctgccagttctagctcagctttcaaccagctcaccaacaacacagccactgccccctctgccacgcccgtgtttgggcaagtggcagccagcaccgcaccaagtctgtttgggcagcagactggtagcacagccagcacagcagctgccacaccacaggtcagcagctcagggtttagcagcccagcttttggtaccacagccccaggggtctttggacagacaaccttcgggcaggcctcagtctttgggcagtcggcgagcagtgctgcaagtgtcttttccttcagtcagcctgggttcagttccgtgcctgccttcggtcagcctgcttcctccactcccacatccaccagtggaagtgtctttggtgccgcctcaagtaccagtagctccagttccttctcatttggacagtcttctcccaacacaggaggggggctgtttggccaaagcaacgctcctgcttttgggcagagtcctggctttggacagggaggctctgtctttggtggtacctcagctgccaccacaacagcagcaacctctgggttcagcttttgccaagcttcaggttttgggtctagtaatactggttctgtgtttggtcaagcagccagtactggtggaatagtctttggccagcaatcatcctcttccagtggtagcgtgtttgggtctggaaacactggaagagggggaggtttcttcagtggccttggaggaaaacccagtcaggatgcagccaacaaaaacccattcagctcggccagtgggggctttggatccacagctacctcaaatacctctaacctatttggaaacagtggggccaagacatttggtggatttgccagctcgtcgtttggagagcagaaacccactggcactttcagctctggaggaggaagtgtggcatcccaaggctttgggttttcctctccaaacaaaacaggtggcttcggtgctgctccagtgtttggcagccctcctacttttgggggatcccctgggtttggaggggtgccagcattcggttcagccccagcctttacaagccctctgggctcgacgggaggcaaagtgttcggagagggcactgcagctgccagcgcaggaggattcgggtttgggagcagcagcaacaccacatccttcggcacgctcgcgagtcagaatgcccccactttcggatcactgtcccaacagacttctggttttgggacccagagtagcggattctctggttttggatcaggcacaggagggttcagctttgggtcaaataactcgtctgtccagggttttggtggctggcgaagctgagggcgtgtcagcaggcctttcgatccctgggaccaaccgcatcctcagcttcttccccgagaaatgctggagcaggctgttcagaccgacgttgccatcaaaacacatacacccagaaagaaacaacagaaaccaaaactcacaaggcgcatgattacttgttttatatttcatgttgggttttccctcccactattaaacagtctgtttccgtagaacaaaaaaaaaaaaaaacaaaaaaaaaaacatcttgtcaggcgacgacacggaccctctgaaaaaaagttcacaaccactttggtgtgatggaaccgcggaccccacagatgcgtaatggacacacgcgggcaaacagctggtacaccgtggagacatccatggacaagcaaagagggggagaaggggatacactcacactattaaaaacagcccccgcgggggcggcccgccggggggtctccgagcacacgtccccagaagagggagcctactaggaggcccaagacaggcgggactcctatcaggcgggaggtaccgagggagacccccga

SEQ ID NO: 380185 - DNA, 6508 bp, Homo sapiens
gtcaactgcgcgccgctggcgctgaggggaggaagtttgctgtcgagcggcctgggttccgtgggcaaggccgtgggaggcagcgttggctgcttcgacacactgagggcggcgcgatgggagacgagatggatgccatgattcccgagcgggagatgaaggattttcagtttagagcgctaaagaaggtgagaatctttgactcccctgaggaattgcccaaggaacgctcgagtctgcttgctgtgtccaacaaatatggtctggtcttcgctggtggagccagtggcttgcagatttttcctactaaaaatcttcttattcaaaataaacccggagatgatcccaacaaaatagttgataaagtccaaggcttgctagttcctatgaaattcccaatccatcacctggccttgagctgtgataacctcacactctctgcgtgcatgatgtccagtgaatatggttccattattgctttttttgatgttcgcacattctcaaatgaggctaaacagcaaaaacgcccatttgcctatcataagcttttgaaagatgcaggaggcatggtgattgatatgaagtggaaccccactgtcccctccatggtggcagtttgtctggctgatggtagtattgctgtcctgcaagtcacggaaacagtgaaagtatgtgcaactcttccttccacggtagcagtaacctctgtgtgctggagccccaaaggaaagcagctggcagtgggaaaacagaatggaactgtggtccagtatcttcctactttgcaggaaaaaaaagtcattccttgtcctccgttttatgagtcagatcatcctgtcagagttctggatgtgctgtggattggtacctacgtcttcgccatagtgtatgctgctgcagatgggaccctggaaacgtctccagatgtggtgatggctctactaccgaaaaaagaagaaaagcacccagagatatttgtgaactttatggagccctgttatggcagctgcacggagagacagcatcattactacctcagttacattgaggaatgggatttagtgctggcagcatctgcggcttcaacagaagttagtatccttgctcgacaaagtgatcagattaattgggaatcttggctactggaggattctagtcgagctgaattgcctgtgacagacaagagtgatgactccttgcccatgggagttgtcgtagactatacaaaccaagtggaaatcaccatcagtgatgaaaagactcttcctcctgctccagttctcatgttactttcaacagatggtgtgctttgtccattttatatgattaatcaaaatcctggggttaagtctctcatcaaaacaccagagcgactttcattagaaggagagcgacagcccaagtcaccaggaagtactcccactaccccaacctcctctcaagccccacagaaactggatgcttctgcagctgcagcccctgcctctctgccaccttcatcacctgctgctcccattgccactttttctttgcttcctgctggtggagcccccactgtgttctcctttggttcttcatctttgaagtcatctgctacggtcactggggagcccccttcatattccagtggctccgacagctccaaagcagccccaggccctggcccatcaaccttctcttttgttcccccttctaaagcctccctagcccccacccctgcagcgtctcctgtggctccatcagctgcttcattctcctttggatcatctggttttaagcctaccctggaaagcacaccagtgccaagtgtgtctgctccaaatatagcaatgaagtcctccttcccaccctcaacctctgctgtcaaagtcaaccttagtgaaaagtttactgctgcagctacctctactcctgttagtagctcccagagcgcacccccgatgtcgccattctcttctgcctccaagccagctgcttctggaccactcagccaccccacacctctctcagcaccacctagttccgtgccattgaagtcctcagtcttgccctcaccatcaggacgatctgctcagggcagttcaagcccagtgccctcaatggtacagaaatcacccaggataacccctccagcggcaaagccaggctctccccaggcaaagtcacttcagcctgctgttgcagaaaagcagggacatcagtggaaagattcagatcctgtaatggctggaattggggaggagattgcacactttcagaaggagttggaagagttaaaagcccgaacttccaaagcctgtttccaagtgggcacttctgaggagatgaagatgctgcgaacagaatcagatgacttgcatacctttcttttggagattaaagagaccacagagtcgcttcatggagatataagtagcctgaaaacaactttacttgagggctttgctggtgttgaggaagccagagaacaaaatgaaagaaatcgtgactctggttatctgcatttgctttataaaagaccactggatcccaagagtgaagctcagcttcaggaaattcggcgccttcatcagtatgtgaaatttgctgtccaagatgtgaatgatgttctagacttggagtgggatcagcatctggaacaaaagaaaaaacaaaggcacctgcttgtgccagagcgagagacactgtttaacaccctagccaacaatcgggaaatcatcaaccaacagaggaagaggctgaatcacctggtggatagtcttcagcagctccgcctttacaaacagacttccctgtggagcctgtcctcggctgttccttcccagagcagcattcacagttttgacagtgacctggaaagcctgtgcaatgctttgttgaaaaccaccatagaatctcacaccaaatccttgcccaaagtaccagccaaactgtcccccatgaaacaggcacaactgagaaacttcttggccaagaggaagaccccaccagtgagatccactgctccagccagcctgtctcgatcagcctttctgtctcagagatattatgaagacttggatgaagtcagctcaacgtcatctgtctcccagtctctggagagtgaagatgcacggacgtcctgtaaagatgacgaggcagtggttcaggcccctcggcacgcccccgtggttcgcactccttccatccagcccagtctcttgccccatgcagcaccttttgctaaatctcacctggttcatggttcttcacctggtgtgatgggaacttcagtggctacatctgctagcaaaattattcctcaaggggccgatagcacaatgcttgccacgaaaaccgtgaaacatggtgcacctagtccttcccaccccatctcagccccgcaggcagctgccgcagcagcactcaggcggcagatggccagtcaggcaccagctgtaaacactttgactgaatcaacgttgaagaatgtccctcaagtggtaaatgtgcaggaattgaagaataaccctgcaaccccttctacagccatgggttcttcagtgccctactccacagccaaaacacctcacccagtgttgaccccagtggctgctaaccaagccaagcaggggtctctaataaattcccttaagccatctgggcctacaccagcatccggtcagttatcatctggtgacaaagcttcagggacagccaagatagaaacagctgtgacttcaaccccatctgcttctgggcagttcagcaagcctttctcattttctccatcagggactggctttaattttgggataatcacaccaacaccgtcttctaatttcactgctgcacaaggggcaacaccctccactaaagagtcaagccagccggacgcattctcatctggtgggggaagcaaaccttcttatgaggccattcctgaaagctcacctccctcaggaatcacatccgcatcaaacaccaccccaggagaacctgccgcatctagcagcagacctgtggcaccttctggaactgctctttccaccacctctagtaagctggaaaccccaccgtccaagctgggagagcttctgtttccaagttctttggctggagagactctgggaagtttttcaggactgcgggttggccaagcagatgattctacaaaaccaaccaataaggcttcatccacaagcctaactagtacccagccaaccaagacgtcaggcgtgccctcagggtttaattttactgcccccccggtgttagggaagcacacggagccccctgtgacatcctctgcaaccaccacctcagtagtaccaccagcagccaccagcacttcctcaactgccgtttttggcagtctgccagtcaccagtgcaggatcctctggggtcatcagttttggtgggacatctctaagtgctggcaagactagtttttcatttggaagccaacagaccaatagcacagtgcccccatctgccccaccaccaactacagctgccactccccttccaacatcattccccacattgtcatttggtagcctcctgagttcagcaactaccccctccctgcctatgtccgctggcagaagcacagaagaggccacttcatcagctttgcctgagaagccaggtgacagtgaggtctcagcatcagcagcctcacttctagaggagcaacagtcagcccagcttccccaggctcctccgcaaacttctgactctgttaaaaaagaacctgttcttgcccagcctgcagtcagcaactctggcactgcagcatctagtactagtcttgtagcactttctgcagaggctaccccagccaccacgggggtccctgatgccaggacggaggcagtaccacctgcttcctccttttctgtgcctgggcagactgctgtcacagcagctgctatctcaagtgcaggccctgtggccgtcgaaacatcaagtacccccatagcctccagcaccacgtccattgttgctcccggcccatctgcagaggcagcagcatttggtaccgtcacttctggctcatccgtctttgctcagcctcctgctgccagttctagctcagctttcaaccagctcaccaacaacacagccactgccccctctgccacgcccgtgtttgggcaagtggcagccagcaccgcaccaagtctgtttgggcagcagactggtagcacagccagcacagcagctgccacaccacaggtcagcagctcagggtttagcagcccagcttttggtaccacagccccaggggtctttggacagacaaccttcgggcaggcctcagtctttgggcagtcggcgagcagtgctgcaagtgtcttttccttcagtcagcctgggttcagttccgtgcctgccttcggtcagcctgcttcctccactcccacatccaccagtggaagtgtctttggtgccgcctcaagtaccagtagctccagttccttctcatttggacagtcttctcccaacacaggaggggggctgtttggccaaagcaacgctcctgcttttgggcagagtcctggctttggacagggaggctctgtctttggtggtacctcagctgccaccacaacagcagcaacctctgggttcagcttttgccaagcttcaggttttgggtctagtaatactggttctgtgtttggtcaagcagccagtactggtggaatagtctttggccagcaatcatcctcttccagtggtagcgtgtttgggtctggaaacactggaagagggggaggtttcttcagtggccttggaggaaaacccagtcaggatgcagccaacaaaaacccattcagctcggccagtgggggctttggatccacagctacctcaaatacctctaacctatttggaaacagtggggccaagacatttggtggatttgccagctcgtcgtttggagagcagaaacccactggcactttcagctctggaggaggaagtgtggcatcccaaggctttgggttttcctctccaaacaaaacaggtggcttcggtgctgctccagtgtttggcagccctcctacttttgggggatcccctgggtttggaggggtgccagcattcggttcagccccagcctttacaagccctctgggctcgacgggaggcaaagtgttcggagagggcactgcagctgccagcgcaggaggattcgggtttgggagcagcagcaacaccacatccttcggcacgctcgcgagtcagaatgcccccactttcggatcactgtcccaacagacttctggttttgggacccagagtagcggattctctggttttggatcaggcacaggagggttcagctttgggtcaaataactcgtaagtatccccctttttgagtctcaccttaattaaaagcattaaataaggttggaagtgtgtggatcttgctggatttgtgcattttcttttcgttttttcctgtttttagagtttgtcctggaagtgtgggggttcagcagcagggtttgg

SEQ ID NO: 380186 - DNA, 6408 bp, Homo sapiens
gtcaactgcgcgccgctggcgctgaggggaggaagtttgctgtcgagcggcctgggttccgtgggcaaggccgtgggaggcagcgttggctgcttcgacacactgagggcggcgcgatgggagacgagatggatgccatgattcccgagcgggagatgaaggattttcagtttagagcgctaaagaaggtgagaatctttgactcccctgaggaattgcccaaggaacgctcgagtctgcttgctgtgtccaacaaatatggtctggtcttcgctggtggagccagtggcttgcagatttttcctactaaaaatcttcttattcaaaataaacccggagatgatcccaacaaaatagttgataaagtccaaggcttgctagttcctatgaaattcccaatccatcacctggccttgagctgtgataacctcacactctctgcgtgcatgatgtccagtgaatatggttccattattgctttttttgatgttcgcacattctcaaatgaggctaaacagcaaaaacgcccatttgcctatcataagcttttgaaagatgcaggaggcatggtgattgatatgaagtggaaccccactgtcccctccatggtggcagtttgtctggctgatggtagtattgctgtcctgcaagtcacggaaacagtgaaagtatgtgcaactcttccttccacggtagcagtaacctctgtgtgctggagccccaaaggaaagcagctggcagtgggaaaacagaatggaactgtggtccagtatcttcctactttgcaggaaaaaaaagtcattccttgtcctccgttttatgagtcagatcatcctgtcagagttctggatgtgctgtggattggtacctacgtcttcgccatagtgtatgctgctgcagatgggaccctggaaacgtctccagatgtggtgatggctctactaccgaaaaaagaagaaaagcacccagagatatttgtgaactttatggagccctgttatggcagctgcacggagagacagcatcattactacctcagttacattgaggaatgggatttagtgctggcagcatctgcggcttcaacagaagttagtatccttgctcgacaaagtgatcagattaattgggaatcttggctactggaggattctagtcgagctgaattgcctgtgacagacaagagtgatgactccttgcccatgggagttgtcgtagactatacaaaccaagtggaaatcaccatcagtgatgaaaagactcttcctcctgctccagttctcatgttactttcaacagatggtgtgctttgtccattttatatgattaatcaaaatcctggggttaagtctctcatcaaaacaccagagcgactttcattagaaggagagcgacagcccaagtcaccaggaagtactcccactaccccaacctcctctcaagccccacagaaactggatgcttctgcagctgcagcccctgcctctctgccaccttcatcacctgctgctcccattgccactttttctttgcttcctgctggtggagcccccactgtgttctcctttggttcttcatctttgaagtcatctgctacggtcactggggagcccccttcatattccagtggctccgacagctccaaagcagccccaggccctggcccatcaaccttctcttttgttcccccttctaaagcctccctagcccccacccctgcagcgtctcctgtggctccatcagctgcttcattctcctttggatcatctggttttaagcctaccctggaaagcacaccagtgccaagtgtgtctgctccaaatatagcaatgaagtcctccttcccaccctcaacctctgctgtcaaagtcaaccttagtgaaaagtttactgctgcagctacctctactcctgttagtagctcccagagcgcacccccgatgtcgccattctcttctgcctccaagccagctgcttctggaccactcagccaccccacacctctctcagcaccacctagttccgtgccattgaagtcctcagtcttgccctcaccatcaggacgatctgctcagggcagttcaagcccagtgccctcaatggtacagaaatcacccaggataacccctccagcggcaaagccaggctctccccaggcaaagtcacttcagcctgctgttgcagaaaagcagggacatcagtggaaagattcagatcctgtaatggctggaattggggaggagattgcacactttcagaaggagttggaagagttaaaagcccgaacttccaaagcctgtttccaagtgggcacttctgaggagatgaagatgctgcgaacagaatcagatgacttgcatacctttcttttggagattaaagagaccacagagtcgcttcatggagatataagtagcctgaaaacaactttacttgagggctttgctggtgttgaggaagccagagaacaaaatgaaagaaatcgtgactctggttatctgcatttgctttataaaagaccactggatcccaagagtgaagctcagcttcaggaaattcggcgccttcatcagtatgtgaaatttgctgtccaagatgtgaatgatgttctagacttggagtgggatcagcatctggaacaaaagaaaaaacaaaggcacctgcttgtgccagagcgagagacactgtttaacaccctagccaacaatcgggaaatcatcaaccaacagaggaagaggctgaatcacctggtggatagtcttcagcagctccgcctttacaaacagacttccctgtggagcctgtcctcggctgttccttcccagagcagcattcacagttttgacagtgacctggaaagcctgtgcaatgctttgttgaaaaccaccatagaatctcacaccaaatccttgcccaaagtaccagccaaactgtcccccatgaaacaggcacaactgagaaacttcttggccaagaggaagaccccaccagtgagatccactgctccagccagcctgtctcgatcagcctttctgtctcagagatattatgaagacttggatgaagtcagctcaacgtcatctgtctcccagtctctggagagtgaagatgcacggacgtcctgtaaagatgacgaggcagtggttcaggcccctcggcacgcccccgtggttcgcactccttccatccagcccagtctcttgccccatgcagcaccttttgctaaatctcacctggttcatggttcttcacctggtgtgatgggaacttcagtggctacatctgctagcaaaattattcctcaaggggccgatagcacaatgcttgccacgaaaaccgtgaaacatggtgcacctagtccttcccaccccatctcagccccgcaggcagctgccgcagcagcactcaggcggcagatggccagtcaggcaccagctgtaaacactttgactgaatcaacgttgaagaatgtccctcaagtggtaaatgtgcaggaattgaagaataaccctgcaaccccttctacagccatgggttcttcagtgccctactccacagccaaaacacctcacccagtgttgaccccagtggctgctaaccaagccaagcaggggtctctaataaattcccttaagccatctgggcctacaccagcatccggtcagttatcatctggtgacaaagcttcagggacagccaagatagaaacagctgtgacttcaaccccatctgcttctgggcagttcagcaagcctttctcattttctccatcagggactggctttaattttgggataatcacaccaacaccgtcttctaatttcactgctgcacaaggggcaacaccctccactaaagagtcaagccagccggacgcattctcatctggtgggggaagcaaaccttcttatgaggccattcctgaaagctcacctccctcaggaatcacatccgcatcaaacaccaccccaggagaacctgccgcatctagcagcagacctgtggcaccttctggaactgctctttccaccacctctagtaagctggaaaccccaccgtccaagctgggagagcttctgtttccaagttctttggctggagagactctgggaagtttttcaggactgcgggttggccaagcagatgattctacaaaaccaaccaataaggcttcatccacaagcctaactagtacccagccaaccaagacgtcaggcgtgccctcagggtttaattttactgcccccccggtgttagggaagcacacggagccccctgtgacatcctctgcaaccaccacctcagtagtaccaccagcagccaccagcacttcctcaactgccgtttttggcagtctgccagtcaccagtgcaggatcctctggggtcatcagttttggtgggacatctctaagtgctggcaagactagtttttcatttggaagccaacagaccaatagcacagtgcccccatctgccccaccaccaactacagctgccactccccttccaacatcattccccacattgtcatttggtagcctcctgagttcagcaactaccccctccctgcctatgtccgctggcagaagcacagaagaggccacttcatcagctttgcctgagaagccaggtgacagtgaggtctcagcatcagcagcctcacttctagaggagcaacagtcagcccagcttccccaggctcctccgcaaacttctgactctgttaaaaaagaacctgttcttgcccagcctgcagtcagcaactctggcactgcagcatctagtactagtcttgtagcactttctgcagaggctaccccagccaccacgggggtccctgatgccaggacggaggcagtaccacctgcttcctccttttctgtgcctgggcagactgctgtcacagcagctgctatctcaagtgcaggccctgtggccgtcgaaacatcaagtacccccatagcctccagcaccacgtccattgttgctcccggcccatctgcagaggcagcagcatttggtaccgtcacttctggctcatccgtctttgctcagcctcctgctgccagttctagctcagctttcaaccagctcaccaacaacacagccactgccccctctgccacgcccgtgtttgggcaagtggcagccagcaccgcaccaagtctgtttgggcagcagactggtagcacagccagcacagcagctgccacaccacaggtcagcagctcagggtttagcagcccagcttttggtaccacagccccaggggtctttggacagacaaccttcgggcaggcctcagtctttgggcagtcggcgagcagtgctgcaagtgtcttttccttcagtcagcctgggttcagttccgtgcctgccttcggtcagcctgcttcctccactcccacatccaccagtggaagtgtctttggtgccgcctcaagtaccagtagctccagttccttctcatttggacagtcttctcccaacacaggaggggggctgtttggccaaagcaacgctcctgcttttgggcagagtcctggctttggacagggaggctctgtctttggtggtacctcagctgccaccacaacagcagcaacctctgggttcagcttttgccaagcttcaggttttgggtctagtaatactggttctgtgtttggtcaagcagccagtactggtggaatagtctttggccagcaatcatcctcttccagtggtagcgtgtttgggtctggaaacactggaagagggggaggtttcttcagtggccttggaggaaaacccagtcaggatgcagccaacaaaaacccattcagctcggccagtgggggctttggatccacagctacctcaaatacctctaacctatttggaaacagtggggccaagacatttggtggatttgccagctcgtcgtttggagagcagaaacccactggcactttcagctctggaggaggaagtgtggcatcccaaggctttgggttttcctctccaaacaaaacaggtggcttcggtgctgctccagtgtttggcagccctcctacttttgggggatcccctgggtttggaggggtgccagcattcggttcagccccagcctttacaagccctctgggctcgacgggaggcaaagtgttcggagagggcactgcagctgccagcgcaggaggattcgggtttgggagcagcagcaacaccacatccttcggcacgctcgcgagtcagaatgcccccactttcggatcactgtcccaacagacttctggttttgggacccagagtagcggattctctggttttggatcaggcacaggaggttcagctttgggtcaaataactcgtctgtccgcttttggtgcatcgataagaccggatcctctagatgaacgcagca

SEQ ID NO: 380187 - DNA, 5873 bp, Homo sapiens
gtcaactgcgcgccgctggcgctgaggggaggaagtttgctgtcgagcggcctgggttccgtgggcaaggccgtgggaggcagcgttggctgcttcgacacactgagggcggcgcgatgggagacgagatggatgccatgattcccgagcgggagatgaaggattttcagtttagagcgctaaagaaggtgagaatctttgactcccctgaggaattgcccaaggaacgctcgagtctgcttgctgtgtccaacaaatatggtctggtcttcgctggtggagccagtggcttgcagatttttcctactaaaaatcttcttattcaaaataaacccggagatgatcccaacaaaatagttgataaagtccaaggcttgctagttcctatgaaattcccaatccatcacctggccttgagctgtgataacctcacactctctgcgtgcatgatgtccagtgaatatggttccattattgctttttttgatgttcgcacattctcaaatgaggctaaacagcaaaaacgcccatttgcctatcataagcttttgaaagatgcaggaggcatggtgattgatatgaagtggaaccccactgtcccctccatggtggcagtttgtctggctgatggtagtattgctgtcctgcaagtcacggaaacagtgaaagtatgtgcaactcttccttccacggtagcagtaacctctgtgtgctggagccccaaaggaaagcagctggcagtgggaaaacagaatggaactgtggtccagtatcttcctactttgcaggaaaaaaaagtcattccttgtcctccgttttatgagtcagatcatcctgtcagagttctggatgtgctgtggattggtacctacgtcttcgccatagtgtatgctgctgcagatgggaccctggaaacgtctccagatgtggtgatggctctactaccgaaaaaagaagaaaagcacccagagatatttgtgaactttatggagccctgttatggcagctgcacggagagacagcatcattactacctcagttacattgaggaatgggatttagtgctggcagcatctgcggcttcaacagaagttagtatccttgctcgacaaagtgatcagattaattgggaatcttggctactggaggattctagtcgagctgaattgcctgtgacagacaagagtgatgactccttgcccatgggagttgtcgtagactatacaaaccaagtggaaatcaccatcagtgatgaaaagactcttcctcctgctccagttctcatgttactttcaacagatggtgtgctttgtccattttatatgattaatcaaaatcctggggttaagtctctcatcaaaacaccagagcgactttcattagaaggagagcgacagcccaagtcaccaggaagtactcccactaccccaacctcctctcaagccccacagaaactggatgcttctgcagctgcagcccctgcctctctgccaccttcatcacctgctgctcccattgccactttttctttgcttcctgctggtggagcccccactgtgttctcctttggttcttcatctttgaagtcatctgctacggtcactggggagcccccttcatattccagtggctccgacagctccaaagcagccccaggccctggcccatcaaccttctcttttgttcccccttctaaagcctccctagcccccacccctgcagcgtctcctgtggctccatcagctgcttcattctcctttggatcatctggttttaagcctaccctggaaagcacaccagtgccaagtgtgtctgctccaaatatagcaatgaagtcctccttcccaccctcaacctctgctgtcaaagtcaaccttagtgaaaagtttactgctgcagctacctctactcctgttagtagctcccagagcgcacccccgatgtcgccattctcttctgcctccaagccagctgcttctggaccactcagccaccccacacctctctcagcaccacctagttccgtgccattgaagtcctcagtcttgccctcaccatcaggacgatctgctcagggcagttcaagcccagtgccctcaatggtacagaaatcacccaggataacccctccagcggcaaagccaggctctccccaggcaaagtcacttcagcctgctgttgcagaaaagcagggacatcagtggaaagattcagatcctgtaatggctggaattggggaggagattgcacactttcagaaggagttggaagagttaaaagcccgaacttccaaagcctgtttccaagtgggcacttctgaggagatgaagatgctgcgaacagaatcagatgacttgcatacctttcttttggagattaaagagaccacagagtcgcttcatggagatataagtagcctgaaaacaactttacttgagggctttgctggtgttgaggaagccagagaacaaaatgaaagaaatcgtgactctggttatctgcatttgctttataaaagaccactggatcccaagagtgaagctcagcttcaggaaattcggcgccttcatcagtatgtgaaatttgctgtccaagatgtgaatgatgttctagacttggagtgggatcagcatctggaacaaaagaaaaaacaaaggcacctgcttgtgccagagcgagagacactgtttaacaccctagccaacaatcgggaaatcatcaaccaacagaggaagaggctgaatcacctggtggatagtcttcagcagctccgcctttacaaacagacttccctgtggagcctgtcctcggctgttccttcccagagcagcattcacagttttgacagtgacctggaaagcctgtgcaatgctttgttgaaaaccaccatagaatctcacaccaaatccttgcccaaagtaccagccaaactgtcccccatgaaacaggcacaactgagaaacttcttggccaagaggaagaccccaccagtgagatccactgctccagccagcctgtctcgatcagcctttctgtctcagagatattatgaagacttggatgaagtcagctcaacgtcatctgtctcccagtctctggagagtgaagatgcacggacgtcctgtaaagatgacgaggcagtggttcaggcccctcggcacgcccccgtggttcgcactccttccatccagcccagtctcttgccccatgcagcaccttttgctaaatctcacctggttcatggttcttcacctggtgtgatgggaacttcagtggctacatctgctagcaaaattattcctcaaggggccgatagcacaatgcttgccacgaaaaccgtgaaacatggtgcacctagtccttcccaccccatctcagccccgcaggcagctgccgcagcagcactcaggcggcagatggccagtcaggcaccagctgtaaacactttgactgaatcaacgttgaagaatgtccctcaagtggtaaatgtgcaggaattgaagaataaccctgcaaccccttctacagccatgggttcttcagtgccctactccacagccaaaacacctcacccagtgttgaccccagtggctgctaaccaagccaagcaggggtctctaataaattcccttaagccatctgggcctacaccagcatccggtcagttatcatctggtgacaaagcttcagggacagccaagatagaaacagctgtgacttcaaccccatctgcttctgggcagttcagcaagcctttctcattttctccatcagggactggctttaattttgggataatcacaccaacaccgtcttctaatttcactgctgcacaaggggcaacaccctccactaaagagtcaagccagccggacgcattctcatctggtgggggaagcaaaccttcttatgaggccattcctgaaagctcacctccctcaggaatcacatccgcatcaaacaccaccccaggagaacctgccgcatctagcagcagacctgtggcaccttctggaactgctctttccaccacctctagtaagctggaaaccccaccgtccaagctgggagagcttctgtttccaagttctttggctggagagactctgggaagtttttcaggactgcgggttggccaagcagatgattctacaaaaccaaccaataaggcttcatccacaagcctaactagtacccagccaaccaagacgtcaggcgtgccctcagggtttaattttactgcccccccggtgttagggaagcacacggagccccctgtgacatcctctgcaaccaccacctcagtagtaccaccagcagccaccagcacttcctcaactgccgtttttggcagtctgccagtcaccagtgcaggatcctctggggtcatcagttttggtgggacatctctaagtgctggcaagactagtttttcatttggaagccaacagaccaatagcacagtgcccccatctgccccaccaccaactacagctgccactccccttccaacatcattccccacattgtcatttggtagcctcctgagttcagcaactaccccctccctgcctatgtccgctggcagaagcacagaagaggccacttcatcagctttgcctgagaagccaggtgacagtgaggtctcagcatcagcagcctcacttctagaggagcaacagtcagcccagcttccccaggctcctccgcaaacttctgactctgttaaaaaagaacctgttcttgcccagcctgcagtcagcaactctggcactgcagcatctagtactagtcttgtagcactttctgcagaggctaccccagccaccacgggggtccctgatgccaggacggaggcagtaccacctgcttcctccttttctgtgcctgggcagactgctgtcacagcagctgctatctcaagtgcaggccctgtggccgtcgaaacatcaagtacccccatagcctccagcaccacgtccattgttgctcccggcccatctgcagaggcagcagcatttggtaccgtcacttctggctcatccgtctttgctcagcctcctgctgccagttctagctcagctttcaaccagctcaccaacaacacagccactgccccctctgccacgcccgtgtttgggcaagtggcagccagcaccgcaccaagtctgtttgggcagcagactggtagcacagccagcacagcagctgccacaccacaggtcagcagctcagggtttagcagcccagcttttggtaccacagccccaggggtctttggacagacaaccttcgggcaggcctcagtctttgggcagtcggcgagcagtgctgcaagtgtcttttccttcagtcagcctgggttcagttccgtgcctgccttcggtcagcctgcttcctccactcccacatccaccagtggaagtgtctttggtgccgcctcaagtaccagtagctccagttccttctcatttggacagtcttctcccaacacaggaggggggctgtttggccaaagcaacgctcctgcttttgggcagagtcctggctttggacagggaggctctgtctttggtggtacctcagctgccaccacaacagcagcaacctctgggttcagcttttgccaagcttcaggttttgggtctagtaatactggttctgtgtttggtcaagcagccagtactggtggaatagtctttggccagtatctgtgatctcagctggaagaagggaagactggaggcaggagtcatctgaaggctcactctgatgtcagtggttggcttggtgtggcccacctttgcgggccgttcttgacctctttggctgttgcgggtcccccggggggctgccggggctcccaagggcct

SEQ ID NO: 380188 - DNA, 6420 bp, Homo sapiens
gtcaactgcgcgccgctggcgctgaggggaggaagtttgctgtcgagcggcctgggttccgtgggcaaggccgtgggaggcagcgttggctgcttcgacacactgagggcggcgcgatgggagacgagatggatgccatgattcccgagcgggagatgaaggattttcagtttagagcgctaaagaaggtgagaatctttgactcccctgaggaattgcccaaggaacgctcgagtctgcttgctgtgtccaacaaatatggtctggtcttcgctggtggagccagtggcttgcagatttttcctactaaaaatcttcttattcaaaataaacccggagatgatcccaacaaaatagttgataaagtccaaggcttgctagttcctatgaaattcccaatccatcacctggccttgagctgtgataacctcacactctctgcgtgcatgatgtccagtgaatatggttccattattgctttttttgatgttcgcacattctcaaatgaggctaaacagcaaaaacgcccatttgcctatcataagcttttgaaagatgcaggaggcatggtgattgatatgaagtggaaccccactgtcccctccatggtggcagtttgtctggctgatggtagtattgctgtcctgcaagtcacggaaacagtgaaagtatgtgcaactcttccttccacggtagcagtaacctctgtgtgctggagccccaaaggaaagcagctggcagtgggaaaacagaatggaactgtggtccagtatcttcctactttgcaggaaaaaaaagtcattccttgtcctccgttttatgagtcagatcatcctgtcagagttctggatgtgctgtggattggtacctacgtcttcgccatagtgtatgctgctgcagatgggaccctggaaacgtctccagatgtggtgatggctctactaccgaaaaaagaagaaaagcacccagagatatttgtgaactttatggagccctgttatggcagctgcacggagagacagcatcattactacctcagttacattgaggaatgggatttagtgctggcagcatctgcggcttcaacagaagttagtatccttgctcgacaaagtgatcagattaattgggaatcttggctactggaggattctagtcgagctgaattgcctgtgacagacaagagtgatgactccttgcccatgggagttgtcgtagactatacaaaccaagtggaaatcaccatcagtgatgaaaagactcttcctcctgctccagttctcatgttactttcaacagatggtgtgctttgtccattttatatgattaatcaaaatcctggggttaagtctctcatcaaaacaccagagcgactttcattagaaggagagcgacagcccaagtcaccaggaagtactcccactaccccaacctcctctcaagccccacagaaactggatgcttctgcagctgcagcccctgcctctctgccaccttcatcacctgctgctcccattgccactttttctttgcttcctgctggtggagcccccactgtgttctcctttggttcttcatctttgaagtcatctgctacggtcactggggagcccccttcatattccagtggctccgacagctccaaagcagccccaggccctggcccatcaaccttctcttttgttcccccttctaaagcctccctagcccccacccctgcagcgtctcctgtggctccatcagctgcttcattctcctttggatcatctggttttaagcctaccctggaaagcacaccagtgccaagtgtgtctgctccaaatatagcaatgaagtcctccttcccaccctcaacctctgctgtcaaagtcaaccttagtgaaaagtttactgctgcagctacctctactcctgttagtagctcccagagcgcacccccgatgtcgccattctcttctgcctccaagccagctgcttctggaccactcagccaccccacacctctctcagcaccacctagttccgtgccattgaagtcctcagtcttgccctcaccatcaggacgatctgctcagggcagttcaagcccagtgccctcaatggtacagaaatcacccaggataacccctccagcggcaaagccaggctctccccaggcaaagtcacttcagcctgctgttgcagaaaagcagggacatcagtggaaagattcagatcctgtaatggctggaattggggaggagattgcacactttcagaaggagttggaagagttaaaagcccgaacttccaaagcctgtttccaagtgggcacttctgaggagatgaagatgctgcgaacagaatcagatgacttgcatacctttcttttggagattaaagagaccacagagtcgcttcatggagatataagtagcctgaaaacaactttacttgagggctttgctggtgttgaggaagccagagaacaaaatgaaagaaatcgtgactctggttatctgcatttgctttataaaagaccactggatcccaagagtgaagctcagcttcaggaaattcggcgccttcatcagtatgtgaaatttgctgtccaagatgtgaatgatgttctagacttggagtgggatcagcatctggaacaaaagaaaaaacaaaggcacctgcttgtgccagagcgagagacactgtttaacaccctagccaacaatcgggaaatcatcaaccaacagaggaagaggctgaatcacctggtggatagtcttcagcagctccgcctttacaaacagacttccctgtggagcctgtcctcggctgttccttcccagagcagcattcacagttttgacagtgacctggaaagcctgtgcaatgctttgttgaaaaccaccatagaatctcacaccaaatccttgcccaaagtaccagccaaactgtcccccatgaaacaggcacaactgagaaacttcttggccaagaggaagaccccaccagtgagatccactgctccagccagcctgtctcgatcagcctttctgtctcagagatattatgaagacttggatgaagtcagctcaacgtcatctgtctcccagtctctggagagtgaagatgcacggacgtcctgtaaagatgacgaggcagtggttcaggcccctcggcacgcccccgtggttcgcactccttccatccagcccagtctcttgccccatgcagcaccttttgctaaatctcacctggttcatggttcttcacctggtgtgatgggaacttcagtggctacatctgctagcaaaattattcctcaaggggccgatagcacaatgcttgccacgaaaaccgtgaaacatggtgcacctagtccttcccaccccatctcagccccgcaggcagctgccgcagcagcactcaggcggcagatggccagtcaggcaccagctgtaaacactttgactgaatcaacgttgaagaatgtccctcaagtggtaaatgtgcaggaattgaagaataaccctgcaaccccttctacagccatgggttcttcagtgccctactccacagccaaaacacctcacccagtgttgaccccagtggctgctaaccaagccaagcaggggtctctaataaattcccttaagccatctgggcctacaccagcatccggtcagttatcatctggtgacaaagcttcagggacagccaagatagaaacagctgtgacttcaaccccatctgcttctgggcagttcagcaagcctttctcattttctccatcagggactggctttaattttgggataatcacaccaacaccgtcttctaatttcactgctgcacaaggggcaacaccctccactaaagagtcaagccagccggacgcattctcatctggtgggggaagcaaaccttcttatgaggccattcctgaaagctcacctccctcaggaatcacatccgcatcaaacaccaccccaggagaacctgccgcatctagcagcagacctgtggcaccttctggaactgctctttccaccacctctagtaagctggaaaccccaccgtccaagctgggagagcttctgtttccaagttctttggctggagagactctgggaagtttttcaggactgcgggttggccaagcagatgattctacaaaaccaaccaataaggcttcatccacaagcctaactagtacccagccaaccaagacgtcaggcgtgccctcagggtttaattttactgcccccccggtgttagggaagcacacggagccccctgtgacatcctctgcaaccaccacctcagtagtaccaccagcagccaccagcacttcctcaactgccgtttttggcagtctgccagtcaccagtgcaggatcctctggggtcatcagttttggtgggacatctctaagtgctggcaagactagtttttcatttggaagccaacagaccaatagcacagtgcccccatctgccccaccaccaactacagctgccactccccttccaacatcattccccacattgtcatttggtagcctcctgagttcagcaactaccccctccctgcctatgtccgctggcagaagcacagaagaggccacttcatcagctttgcctgagaagccaggtgacagtgaggtctcagcatcagcagcctcacttctagaggagcaacagtcagcccagcttccccaggctcctccgcaaacttctgactctgttaaaaaagaacctgttcttgcccagcctgcagtcagcaactctggcactgcagcatctagtactagtcttgtagcactttctgcagaggctaccccagccaccacgggggtccctgatgccaggacggaggcagtaccacctgcttcctccttttctgtgcctgggcagactgctgtcacagcagctgctatctcaagtgcaggccctgtggccgtcgaaacatcaagtacccccatagcctccagcaccacgtccattgttgctcccggcccatctgcagaggcagcagcatttggtaccgtcacttctggctcatccgtctttgctcagcctcctgctgccagttctagctcagctttcaaccagctcaccaacaacacagccactgccccctctgccacgcccgtgtttgggcaagtggcagccagcaccgcaccaagtctgtttgggcagcagactggtagcacagccagcacagcagctgccacaccacaggtcagcagctcagggtttagcagcccagcttttggtaccacagccccaggggtctttggacagacaaccttcgggcaggcctcagtctttgggcagtcggcgagcagtgctgcaagtgtcttttccttcagtcagcctgggttcagttccgtgcctgccttcggtcagcctgcttcctccactcccacatccaccagtggaagtgtctttggtgccgcctcaagtaccagtagctccagttccttctcatttggacagtcttctcccaacacaggaggggggctgtttggccaaagcaacgctcctgcttttgggcagagtcctggctttggacagggaggctctgtctttggtggtacctcagctgccaccacaacagcagcaacctctgggttcagcttttgccaagcttcaggttttgggtctagtaatactggttctgtgtttggtcaagcagccagtactggtggaatagtctttggccagtatctgtgatctcagctggaagaagggaagactggaggcaggagtcatctgaaggctcactctgatgtcagtggttggcttggctgttggctcagaccttagctggagctgttagctgaacacctacatttggcctatgtagcctgggcttcctcacaacgtggtggctaggttccaaggaggaacattccaagaaagaggaagagccatgctgaagctgtataaccttttatgacctatcctcagaagtcacagaacatcacttaggctgcatcctcttcatcaaggcactcacaaagtcccatccaggttcaagaggagatacagaggccgcctcttgctctagaagagcatatgtgactagaagtattgctgtgatcatctttggaaaatatctgtcataatgggaccattgaagagtggcagaaagccttgttgaactggtttccagagagtggagcccatcataggtgtgagcactgtggcacagcagctgctgggggcagatgccaggtctgggtttgagcaggtagtagagaggacttgccaaagactgagaaaatgtactggctggagaaggagctgttggcagtgatgggggcaagcaaaataaatgaccagtaattacatgaaaaggtgatcaagtagcattaaactaatgagggaaatgaaaatcaaaaccacaattagataagataccacttcacacccc

SEQ ID NO: 380189 - DNA, 5902 bp, Homo sapiens
agtggactctagagaagccccagctgcttcagctggtgttgcaacagagactgctgctgcgcgggaagtatcttagtactttggaggacggacaagctattccttgacctccgttttacaacgtagatactggtgtcagagttctggatgtgctgtggattggtacctacgtcttcgccatagtgtatgctgctgcagatgggaccctggaaacgtctccagatgtggtgatggctctactaccgaaaaaagaagaaaagcacccagagatatttgtgaactttatggagccctgttatggcagctgcacggagagacagcatcattactacctcagttacattgaggaatgggatttagtgctggcagcatctgcggcttcaacagaagttagtatccttgctcgacaaagtgatcagattaattgggaatcttggctactggaggattctagtcgagctgaattgcctgtgacagacaagagtgatgactccttgcccatgggagttgtcgtagactatacaaaccaagtggaaatcaccatcagtgatgaaaagactcttcctcctgctccagttctcatgttactttcaacagatggtgtgctttgtccattttatatgattaatcaaaatcctggggttaagtctctcatcaaaacaccagagcgactttcattagaaggagagcgacagcccaagtcaccaggaagtactcccactaccccaacctcctctcaagccccacagaaactggatgcttctgcagctgcagcccctgcctctctgccaccttcatcacctgctgctcccattgccactttttctttgcttcctgctggtggagcccccactgtgttctcctttggttcttcatctttgaagtcatctgctacggtcactggggagcccccttcatattccagtggctccgacagctccaaagcagccccaggccctggcccatcaaccttctcttttgttcccccttctaaagcctccctagcccccacccctgcagcgtctcctgtggctccatcagctgcttcattctcctttggatcatctggttttaagcctaccctggaaagcacaccagtgccaagtgtgtctgctccaaatatagcaatgaagtcctccttcccaccctcaacctctgctgtcaaagtcaaccttagtgaaaagtttactgctgcagctacctctactcctgttagtagctcccagagcgcacccccgatgtcgccattctcttctgcctccaagccagctgcttctggaccactcagccaccccacacctctctcagcaccacctagttccgtgccattgaagtcctcagtcttgccctcaccatcaggacgatctgctcagggcagttcaagcccagtgccctcaatggtacagaaatcacccaggataacccctccagcggcaaagccaggctctccccaggcaaagtcacttcagcctgctgttgcagaaaagcagggacatcagtggaaagattcagatcctgtaatggctggaattggggaggagattgcacactttcagaaggagttggaagagttaaaagcccgaacttccaaagcctgtttccaagtgggcacttctgaggagatgaagatgctgcgaacagaatcagatgacttgcatacctttcttttggagattaaagagaccacagagtcgcttcatggagatataagtagcctgaaaacaactttacttgagggctttgctggtgttgaggaagccagagaacaaaatgaaagaaatcgtgactctggttatctgcatttgctttataaaagaccactggatcccaagagtgaagctcagcttcaggaaattcggcgccttcatcagtatgtgaaatttgctgtccaagatgtgaatgatgttctagacttggagtgggatcagcatctggaacaaaagaaaaaacaaaggcacctgcttgtgccagagcgagagacactgtttaacaccctagccaacaatcgggaaatcatcaaccaacagaggaagaggctgaatcacctggtggatagtcttcagcagctccgcctttacaaacagacttccctgtggagcctgtcctcggctgttccttcccagagcagcattcacagttttgacagtgacctggaaagcctgtgcaatgctttgttgaaaaccaccatagaatctcacaccaaatccttgcccaaagtaccagccaaactgtcccccatgaaacaggcacaactgagaaacttcttggccaagaggaagaccccaccagtgagatccactgctccagccagcctgtctcgatcagcctttctgtctcagagatattatgaagacttggatgaagtcagctcaacgtcatctgtctcccagtctctggagagtgaagatgcacggacgtcctgtaaagatgacgaggcagtggttcaggcccctcggcacgcccccgtggttcgcactccttccatccagcccagtctcttgccccatgcagcaccttttgctaaatctcacctggttcatggttcttcacctggtgtgatgggaacttcagtggctacatctgctagcaaaattattcctcaaggggccgatagcacaatgcttgccacgaaaaccgtgaaacatggtgcacctagtccttcccaccccatctcagccccgcaggcagctgccgcagcagcactcaggcggcagatggccagtcaggcaccagctgtaaacactttgactgaatcaacgttgaagaatgtccctcaagtggtaaatgtgcaggaattgaagaataaccctgcaaccccttctacagccatgggttcttcagtgccctactccacagccaaaacacctcacccagtgttgaccccagtggctgctaaccaagccaagcaggggtctctaataaattcccttaagccatctgggcctacaccagcatccggtcagttatcatctggtgacaaagcttcagggacagccaagatagaaacagctgtgacttcaaccccatctgcttctgggcagttcagcaagcctttctcattttctccatcagggactggctttaattttgggataatcacaccaacaccgtcttctaatttcactgctgcacaaggggcaacaccctccactaaagagtcaagccagccggacgcattctcatctggtgggggaagcaaaccttcttatgaggccattcctgaaagctcacctccctcaggaatcacatccgcatcaaacaccaccccaggagaacctgccgcatctagcagcagacctgtggcaccttctggaactgctctttccaccacctctagtaagctggaaaccccaccgtccaagctgggagagcttctgtttccaagttctttggctggagagactctgggaagtttttcaggactgcgggttggccaagcagatgattctacaaaaccaaccaataaggcttcatccacaagcctaactagtacccagccaaccaagacgtcaggcgtgccctcagggtttaattttactgcccccccggtgttagggaagcacacggagccccctgtgacatcctctgcaaccaccacctcagtagtaccaccagcagccaccagcacttcctcaactgccgtttttggcagtctgccagtcaccagtgcaggatcctctggggtcatcagttttggtgggacatctctaagtgctggcaagactagtttttcatttggaagccaacagaccaatagcacagtgcccccatctgccccaccaccaactacagctgccactccccttccaacatcattccccacattgtcatttggtagcctcctgagttcagcaactaccccctccctgcctatgtccgctggcagaagcacagaagaggccacttcatcagctttgcctgagaagccaggtgacagtgaggtctcagcatcagcagcctcacttctagaggagcaacagtcagcccagcttccccaggctcctccgcaaacttctgactctgttaaaaaagaacctgttcttgcccagcctgcagtcagcaactctggcactgcagcatctagtactagtcttgtagcactttctgcagaggctaccccagccaccacgggggtccctgatgccaggacggaggcagtaccacctgcttcctccttttctgtgcctgggcagactgctgtcacagcagctgctatctcaagtgcaggccctgtggccgtcgaaacatcaagtacccccatagcctccagcaccacgtccattgttgctcccggcccatctgcagaggcagcagcatttggtaccgtcacttctggctcatccgtctttgctcagcctcctgctgccagttctagctcagctttcaaccagctcaccaacaacacagccactgccccctctgccacgcccgtgtttgggcaagtggcagccagcaccgcaccaagtctgtttgggcagcagactggtagcacagccagcacagcagctgccacaccacaggtcagcagctcagggtttagcagcccagcttttggtaccacagccccaggggtctttggacagacaaccttcgggcaggcctcagtctttgggcagtcggcgagcagtgctgcaagtgtcttttccttcagtcagcctgggttcagttccgtgcctgccttcggtcagcctgcttcctccactcccacatccaccagtggaagtgtctttggtgccgcctcaagtaccagtagctccagttccttctcatttggacagtcttctcccaacacaggaggggggctgtttggccaaagcaacgctcctgcttttgggcagagtcctggctttggacagggaggctctgtctttggtggtacctcagctgccaccacaacagcagcaacctctgggttcagcttttgccaagcttcaggttttgggtctagtaatactggttctgtgtttggtcaagcagccagtactggtggaatagtctttggccagcaatcatcctcttccagtggtagcgtgtttgggtctggaaacactggaagagggggaggtttcttcagtggccttggaggaaaacccagtcaggatgcagccaacaaaaacccattcagctcggccagtgggggctttggatccacagctacctcaaatacctctaacctatttggaaacagtggggccaagacatttggtggatttgccagctcgtcgtttggagagcagaaacccactggcactttcagctctggaggaggaagtgtggcatcccaaggctttgggttttcctctccaaacaaaacaggtggcttcggtgctgctccagtgtttggcagccctcctacttttgggggatcccctgggtttggaggggtgccagcattcggttcagccccagcctttacaagccctctgggctcgacgggaggcaaagtgttcggagagggcactgcagctgccagcgcaggaggattcgggtttgggagcagcagcaacaccacatccttcggcacgctcgcgagtcagaatgcccccactttcggatcactgtcccaacagacttctggttttgggacccagagtagcggattctctggttttggatcaggcacaggagggttcagctttgggtcaaataactcgtctgtccagggttttggtggctggcgaagctgagggcgtgtcagcaggcctttcgatccctgggaccaaccgcatcctcagcttcttccccgagaaatgctggagcaggctgttcagaccgacgttgccatcaaaacacatacacccagaaagaaacaacagaaaccaaaactcacaaggcgcatgattacttgttttatatttcatgttgggttttccctcccactattaaacagtctgtttccgta

SEQ ID NO: 380190 - DNA, 5029 bp, Homo sapiens
ggaaaacaagctatgacacaatgagttacagaatttcgagctccggtaccccgtctgaacaatgctgggaaccagccccaggccctggcccatcaaccttctcttttgttcccccttctaaagcctccctagcccccacccctgcagcgtctcctgtggctccatcagctgcttcattctcctttggatcatctggttttaagcctaccctggaaagcacaccagtgccaagtgtgtctgctccaaatatagcaatgaagtcctccttcccaccctcaacctctgctgtcaaagtcaaccttagtgaaaagtttactgctgcagctacctctactcctgttagtagctcccagagcgcacccccgatgtcgccattctcttctgcctccaagccagctgcttctggaccactcagccaccccacacctctctcagcaccacctagttccgtgccattgaagtcctcagtcttgccctcaccatcaggacgatctgctcagggcagttcaagcccagtgccctcaatggtacagaaatcacccaggataacccctccagcggcaaagccaggctctccccaggcaaagtcacttcagcctgctgttgcagaaaagcagggacatcagtggaaagattcagatcctgtaatggctggaattggggaggagattgcacactttcagaaggagttggaagagttaaaagcccgaacttccaaagcctgtttccaagtgggcacttctgaggagatgaagatgctgcgaacagaatcagatgacttgcatacctttcttttggagattaaagagaccacagagtcgcttcatggagatataagtagcctgaaaacaactttacttgagggctttgctggtgttgaggaagccagagaacaaaatgaaagaaatcgtgactctggttatctgcatttgctttataaaagaccactggatcccaagagtgaagctcagcttcaggaaattcggcgccttcatcagtatgtgaaatttgctgtccaagatgtgaatgatgttctagacttggagtgggatcagcatctggaacaaaagaaaaaacaaaggcacctgcttgtgccagagcgagagacactgtttaacaccctagccaacaatcgggaaatcatcaaccaacagaggaagaggctgaatcacctggtggatagtcttcagcagctccgcctttacaaacagacttccctgtggagcctgtcctcggctgttccttcccagagcagcattcacagttttgacagtgacctggaaagcctgtgcaatgctttgttgaaaaccaccatagaatctcacaccaaatccttgcccaaagtaccagccaaactgtcccccatgaaacaggcacaactgagaaacttcttggccaagaggaagaccccaccagtgagatccactgctccagccagcctgtctcgatcagcctttctgtctcagagatattatgaagacttggatgaagtcagctcaacgtcatctgtctcccagtctctggagagtgaagatgcacggacgtcctgtaaagatgacgaggcagtggttcaggcccctcggcacgcccccgtggttcgcactccttccatccagcccagtctcttgccccatgcagcaccttttgctaaatctcacctggttcatggttcttcacctggtgtgatgggaacttcagtggctacatctgctagcaaaattattcctcaaggggccgatagcacaatgcttgccacgaaaaccgtgaaacatggtgcacctagtccttcccaccccatctcagccccgcaggcagctgccgcagcagcactcaggcggcagatggccagtcaggcaccagctgtaaacactttgactgaatcaacgttgaagaatgtccctcaagtggtaaatgtgcaggaattgaagaataaccctgcaaccccttctacagccatgggttcttcagtgccctactccacagccaaaacacctcacccagtgttgaccccagtggctgctaaccaagccaagcaggggtctctaataaattcccttaagccatctgggcctacaccagcatccggtcagttatcatctggtgacaaagcttcagggacagccaagatagaaacagctgtgacttcaaccccatctgcttctgggcagttcagcaagcctttctcattttctccatcagggactggctttaattttgggataatcacaccaacaccgtcttctaatttcactgctgcacaaggggcaacaccctccactaaagagtcaagccagccggacgcattctcatctggtgggggaagcaaaccttcttatgaggccattcctgaaagctcacctccctcaggaatcacatccgcatcaaacaccaccccaggagaacctgccgcatctagcagcagacctgtggcaccttctggaactgctctttccaccacctctagtaagctggaaaccccaccgtccaagctgggagagcttctgtttccaagttctttggctggagagactctgggaagtttttcaggactgcgggttggccaagcagatgattctacaaaaccaaccaataaggcttcatccacaagcctaactagtacccagccaaccaagacgtcaggcgtgccctcagggtttaattttactgcccccccggtgttagggaagcacacggagccccctgtgacatcctctgcaaccaccacctcagtagtaccaccagcagccaccagcacttcctcaactgccgtttttggcagtctgccagtcaccagtgcaggatcctctggggtcatcagttttggtgggacatctctaagtgctggcaagactagtttttcatttggaagccaacagaccaatagcacagtgcccccatctgccccaccaccaactacagctgccactccccttccaacatcattccccacattgtcatttggtagcctcctgagttcagcaactaccccctccctgcctatgtccgctggcagaagcacagaagaggccacttcatcagctttgcctgagaagccaggtgacagtgaggtctcagcatcagcagcctcacttctagaggagcaacagtcagcccagcttccccaggctcctccgcaaacttctgactctgttaaaaaagaacctgttcttgcccagcctgcagtcagcaactctggcactgcagcatctagtactagtcttgtagcactttctgcagaggctaccccagccaccacgggggtccctgatgccaggacggaggcagtaccacctgcttcctccttttctgtgcctgggcagactgctgtcacagcagctgctatctcaagtgcaggccctgtggccgtcgaaacatcaagtacccccatagcctccagcaccacgtccattgttgctcccggcccatctgcagaggcagcagcatttggtaccgtcacttctggctcatccgtctttgctcagcctcctgctgccagttctagctcagctttcaaccagctcaccaacaacacagccactgccccctctgccacgcccgtgtttgggcaagtggcagccagcaccgcaccaagtctgtttgggcagcagactggtagcacagccagcacagcagctgccacaccacaggtcagcagctcagggtttagcagcccagcttttggtaccacagccccaggggtctttggacagacaaccttcgggcaggcctcagtctttgggcagtcggcgagcagtgctgcaagtgtcttttccttcagtcagcctgggttcagttccgtgcctgccttcggtcagcctgcttcctccactcccacatccaccagtggaagtgtctttggtgccgcctcaagtaccagtagctccagttccttctcatttggacagtcttctcccaacacaggaggggggctgtttggccaaagcaacgctcctgcttttgggcagagtcctggctttggacagggaggctctgtctttggtggtacctcagctgccaccacaacagcagcaacctctgggttcagcttttgccaagcttcaggttttgggtctagtaatactggttctgtgtttggtcaagcagccagtactggtggaatagtctttggccagcaatcatcctcttccagtggtagcgtgtttgggtctggaaacactggaagagggggaggtttcttcagtggccttggaggaaaacccagtcaggatgcagccaacaaaaacccattcagctcggccagtgggggctttggatccacagctacctcaaatacctctaacctatttggaaacagtggggccaagacatttggtggatttgccagctcgtcgtttggagagcagaaacccactggcactttcagctctggaggaggaagtgtggcatcccaaggctttgggttttcctctccaaacaaaacaggtggcttcggtgctgctccagtgtttggcagccctcctacttttgggggatcccctgggtttggaggggtgccagcattcggttcagccccagcctttacaagccctctgggctcgacgggaggcaaagtgttcggagagggcactgcagctgccagcgcaggaggattcgggtttgggagcagcagcaacaccacatccttcggcacgctcgcgagtcagaatgcccccactttcggatcactgtcccaacagacttctggttttgggacccagagtagcggattctctggttttggatcaggcacaggagggttcagctttgggtcaaataactcgtctgtccagggttttggtggctggcgaagctgagggcgtgtcagcaggcctttcgatccctgggaccaaccgcatcctcagcttcttccccgagaaatgctggagcaggctgttcagaccgacgttgccatcaaaacacatacacccagaaagaaacaacagaaaccaaaactcacaaggcgcatgattacttgttttatatttcatgttgggttttccctcccactattaaacagtctgtttccgta

SEQ ID NO: 380191 - DNA, 5885 bp, Homo sapiens
gtcaactgcgcgccgctggcgctgaggggaggaagtttgctgtcgagcggcctgggttccgtgggcaaggccgtgggaggcagcgttggctgcttcgacacactgagggcggcgcgatgggagacgagatggatgccatgattcccgagcgggagatgaaggattttcagtttagagcgctaaagaaggtgagaatctttgactcccctgaggaattgcccaaggaacgctcgagtctgcttgctgtgtccaacaaatatggtctggtcttcgctggtggagccagtggcttgcagatttttcctactaaaaatcttcttattcaaaataaacccggagatgatcccaacaaaatagttgataaagtccaaggcttgctagttcctatgaaattcccaatccatcacctggccttgagctgtgataacctcacactctctgcgtgcatgatgtccagtgaatatggttccattattgctttttttgatgttcgcacattctcaaatgaggctaaacagcaaaaacgcccatttgcctatcataagcttttgaaagatgcaggaggcatggtgattgatatgaagtggaaccccactgtcccctccatggtggcagtttgtctggctgatggtagtattgctgtcctgcaagtcacggaaacagtgaaagtatgtgcaactcttccttccacggtagcagtaacctctgtgtgctggagccccaaaggaaagcagctggcagtgggaaaacagaatggaactgtggtccagtatcttcctactttgcaggaaaaaaaagtcattccttgtcctccgttttatgagtcagatcatcctgtcagagttctggatgtgctgtggattggtacctacgtcttcgccatagtgtatgctgctgcagatgggaccctggaaacgtctccagatgtggtgatggctctactaccgaaaaaagaagaaaagcacccagagatatttgtgaactttatggagccctgttatggcagctgcacggagagacagcatcattactacctcagttacattgaggaatgggatttagtgctggcagcatctgcggcttcaacagaagttagtatccttgctcgacaaagtgatcagattaattgggaatcttggctactggaggattctagtcgagctgaattgcctgtgacagacaagagtgatgactccttgcccatgggagttgtcgtagactatacaaaccaagtggaaatcaccatcagtgatgaaaagactcttcctcctgctccagttctcatgttactttcaacagatggtgtgctttgtccattttatatgattaatcaaaatcctggggttaagtctctcatcaaaacaccagagcgactttcattagaaggagagcgacagcccaagtcaccaggaagtactcccactaccccaacctcctctcaagccccacagaaactggatgcttctgcagctgcagcccctgcctctctgccaccttcatcacctgctgctcccattgccactttttctttgcttcctgctggtggagcccccactgtgttctcctttggttcttcatctttgaagtcatctgctacggtcactggggagcccccttcatattccagtggctccgacagctccaaagcagccccaggccctggcccatcaaccttctcttttgttcccccttctaaagcctccctagcccccacccctgcagcgtctcctgtggctccatcagctgcttcattctcctttggatcatctggttttaagcctaccctggaaagcacaccagtgccaagtgtgtctgctccaaatatagcaatgaagtcctccttcccaccctcaacctctgctgtcaaagtcaaccttagtgaaaagtttactgctgcagctacctctactcctgttagtagctcccagagcgcacccccgatgtcgccattctcttctgcctccaagccagctgcttctggaccactcagccaccccacacctctctcagcaccacctagttccgtgccattgaagtcctcagtcttgccctcaccatcaggacgatctgctcagggcagttcaagcccagtgccctcaatggtacagaaatcacccaggataacccctccagcggcaaagccaggctctccccaggcaaagtcacttcagcctgctgttgcagaaaagcagggacatcagtggaaagattcagatcctgtaatggctggaattggggaggagattgcacactttcagaaggagttggaagagttaaaagcccgaacttccaaagcctgtttccaagtgggcacttctgaggagatgaagatgctgcgaacagaatcagatgacttgcatacctttcttttggagattaaagagaccacagagtcgcttcatggagatataagtagcctgaaaacaactttacttgagggctttgctggtgttgaggaagccagagaacaaaatgaaagaaatcgtgactctggttatctgcatttgctttataaaagaccactggatcccaagagtgaagctcagcttcaggaaattcggcgccttcatcagtatgtgaaatttgctgtccaagatgtgaatgatgttctagacttggagtgggatcagcatctggaacaaaagaaaaaacaaaggcacctgcttgtgccagagcgagagacactgtttaacaccctagccaacaatcgggaaatcatcaaccaacagaggaagaggctgaatcacctggtggatagtcttcagcagctccgcctttacaaacagacttccctgtggagcctgtcctcggctgttccttcccagagcagcattcacagttttgacagtgacctggaaagcctgtgcaatgctttgttgaaaaccaccatagaatctcacaccaaatccttgcccaaagtaccagccaaactgtcccccatgaaacaggcacaactgagaaacttcttggccaagaggaagaccccaccagtgagatccactgctccagccagcctgtctcgatcagcctttctgtctcagagatattatgaagacttggatgaagtcagctcaacgtcatctgtctcccagtctctggagagtgaagatgcacggacgtcctgtaaagatgacgaggcagtggttcaggcccctcggcacgcccccgtggttcgcactccttccatccagcccagtctcttgccccatgcagcaccttttgctaaatctcacctggttcatggttcttcacctggtgtgatgggaacttcagtggctacatctgctagcaaaattattcctcaaggggccgatagcacaatgcttgccacgaaaaccgtgaaacatggtgcacctagtccttcccaccccatctcagccccgcaggcagctgccgcagcagcactcaggcggcagatggccagtcaggcaccagctgtaaacactttgactgaatcaacgttgaagaatgtccctcaagtggtaaatgtgcaggaattgaagaataaccctgcaaccccttctacagccatgggttcttcagtgccctactccacagccaaaacacctcacccagtgttgaccccagtggctgctaaccaagccaagcaggggtctctaataaattcccttaagccatctgggcctacaccagcatccggtcagttatcatctggtgacaaagcttcagggacagccaagatagaaacagctgtgacttcaaccccatctgcttctgggcagttcagcaagcctttctcattttctccatcagggactggctttaattttgggataatcacaccaacaccgtcttctaatttcactgctgcacaaggggcaacaccctccactaaagagtcaagccagccggacgcattctcatctggtgggggaagcaaaccttcttatgaggccattcctgaaagctcacctccctcaggaatcacatccgcatcaaacaccaccccaggagaacctgccgcatctagcagcagacctgtggcaccttctggaactgctctttccaccacctctagtaagctggaaaccccaccgtccaagctgggagagcttctgtttccaagttctttggctggagagactctgggaagtttttcaggactgcgggttggccaagcagatgattctacaaaaccaaccaataaggcttcatccacaagcctaactagtacccagccaaccaagacgtcaggcgtgccctcagggtttaattttactgcccccccggtgttagggaagcacacggagccccctgtgacatcctctgcaaccaccacctcagtagtaccaccagcagccaccagcacttcctcaactgccgtttttggcagtctgccagtcaccagtgcaggatcctctggggtcatcagttttggtgggacatctctaagtgctggcaagactagtttttcatttggaagccaacagaccaatagcacagtgcccccatctgccccaccaccaactacagctgccactccccttccaacatcattccccacattgtcatttggtagcctcctgagttcagcaactaccccctccctgcctatgtccgctggcagaagcacagaagaggccacttcatcagctttgcctgagaagccaggtgacagtgaggtctcagcatcagcagcctcacttctagaggagcaacagtcagcccagcttccccaggctcctccgcaaacttctgactctgttaaaaaagaacctgttcttgcccagcctgcagtcagcaactctggcactgcagcatctagtactagtcttgtagcactttctgcagaggctaccccagccaccacgggggtccctgatgccaggacggaggcagtaccacctgcttcctccttttctgtgcctgggcagactgctgtcacagcagctgctatctcaagtgcaggccctgtggccgtcgaaacatcaagtacccccatagcctccagcaccacgtccattgttgctcccggcccatctgcagaggcagcagcatttggtaccgtcacttctggctcatccgtctttgctcagcctcctgctgccagttctagctcagctttcaaccagctcaccaacaacacagccactgccccctctgccacgcccgtgtttgggcaagtggcagccagcaccgcaccaagtctgtttgggcagcagactggtagcacagccagcacagcagctgccacaccacaggtcagcagctcagggtttagcagcccagcttttggtaccacagccccaggggtctttggacagacaaccttcgggcaggcctcagtctttgggcagtcggcgagcagtgctgcaagtgtcttttccttcagtcagcctgggttcagttccgtgcctgccttcggtcagcctgcttcctccactcccacatccaccagtggaagtgtctttggtgccgcctcaagtaccagtagctccagttccttctcatttggacagtcttctcccaacacaggaggggggctgtttggccaaagcaacgctcctgcttttgggcagagtcctggctttggacagggaggctctgtctttggtggtacctcagctgccaccacaacagcagcaacctctgggttcagcttttgccaagcttcagcaccctgagaatggagacagtgtttgaagagatggatgaagaaagcacaggaggacgtttcatcttcgaaagcaagaaatagtccttggccagagatccatctaagctttccttttagcattatcttctcaactgttctctactgtggtgaggttgccttgggtttatacatgtttgaacatttatcgaaaagctaatgacacattctgggatgtcatttaccatccaggttattatgtggggccact

SEQ ID NO: 380192 - DNA, 3232 bp, Homo sapiens
tgagaaggaggtatctagcacttctcgaccggggcctaaagctttatgttaaaaggaaaattatatagtagaactgtcaaagacttgagtattttacaaaaaggttttgaaagatcatatactcttttttcaaggacttcattggagaggtttttgtcactcttggagttagaatcaaagaaacctaaggaactttgctttatgcatgtctgggcaagtagtgtgacttgcaagaaatttccgagattcaccattcattgctgatcatgaaatcctctcttttgttacgaggtgttcacttctgttttcacttgccagggacagccaagatagaaacagctgtgacttcaaccccatctgcttctgggcagttcagcaagcctttctcattttctccatcagggactggctttaattttgggataatcacaccaacaccgtcttctaatttcactgctgcacaaggggcaacaccctccactaaagagtcaagccagccggacgcattctcatctggtgggggaagcaaaccttcttatgaggccattcctgaaagctcacctccctcaggaatcacatccgcatcaaacaccaccccaggagaacctgccgcatctagcagcagacctgtggcaccttctggaactgctctttccaccacctctagtaagctggaaaccccaccgtccaagctgggagagcttctgtttccaagttctttggctggagagactctgggaagtttttcaggactgcgggttggccaagcagatgattctacaaaaccaaccaataaggcttcatccacaagcctaactagtacccagccaaccaagacgtcaggcgtgccctcagggtttaattttactgcccccccggtgttagggaagcacacggagccccctgtgacatcctctgcaaccaccacctcagtagtaccaccagcagccaccagcacttcctcaactgccgtttttggcagtctgccagtcaccagtgcaggatcctctggggtcatcagttttggtgggacatctctaagtgctggcaagactagtttttcatttggaagccaacagaccaatagcacagtgcccccatctgccccaccaccaactacagctgccactccccttccaacatcattccccacattgtcatttggtagcctcctgagttcagcaactaccccctccctgcctatgtccgctggcagaagcacagaagaggccacttcatcagctttgcctgagaagccaggtgacagtgaggtctcagcatcagcagcctcacttctagaggagcaacagtcagcccagcttccccaggctcctccgcaaacttctgactctgttaaaaaagaacctgttcttgcccagcctgcagtcagcaactctggcactgcagcatctagtactagtcttgtagcactttctgcagaggctaccccagccaccacgggggtccctgatgccaggacggaggcagtaccacctgcttcctccttttctgtgcctgggcagactgctgtcacagcagctgctatctcaagtgcaggccctgtggccgtcgaaacatcaagtacccccatagcctccagcaccacgtccattgttgctcccggcccatctgcagaggcagcagcatttggtaccgtcacttctggctcatccgtctttgctcagcctcctgctgccagttctagctcagctttcaaccagctcaccaacaacacagccactgccccctctgccacgcccgtgtttgggcaagtggcagccagcaccgcaccaagtctgtttgggcagcagactggtagcacagccagcacagcagctgccacaccacaggtcagcagctcagggtttagcagcccagcttttggtaccacagccccaggggtctttggacagacaaccttcgggcaggcctcagtctttgggcagtcggcgagcagtgctgcaagtgtcttttccttcagtcagcctgggttcagttccgtgcctgccttcggtcagcctgcttcctccactcccacatccaccagtggaagtgtctttggtgccgcctcaagtaccagtagctccagttccttctcatttggacagtcttctcccaacacaggaggggggctgtttggccaaagcaacgctcctgcttttgggcagagtcctggctttggacagggaggctctgtctttggtggtacctcagctgccaccacaacagcagcaacctctgggttcagcttttgccaagcttcaggttttgggtctagtaatactggttctgtgtttggtcaagcagccagtactggtggaatagtctttggccagcaatcatcctcttccagtggtagcgtgtttgggtctggaaacactggaagagggggaggtttcttcagtggccttggaggaaaacccagtcaggatgcagccaacaaaaacccattcagctcggccagtgggggctttggatccacagctacctcaaatacctctaacctatttggaaacagtggggccaagacatttggtggatttgccagctcgtcgtttggagagcagaaacccactggcactttcagctctggaggaggaagtgtggcatcccaaggctttgggttttcctctccaaacaaaacaggtggcttcggtgctgctccagtgtttggcagccctcctacttttgggggatcccctgggtttggaggggtgccagcattcggttcagccccagcctttacaagccctctgggctcgacgggaggcaaagtgttcggagagggcactgcagctgccagcgcaggaggattcgggtttgggagcagcagcaacaccacatccttcggcacgctcgcgagtcagaatgcccccactttcggatcactgtcccaacagacttctggttttgggacccagagtagcggattctctggttttggatcaggcacaggagggttcagctttgggtcaaataactcgtctgtccagggttttggtggctggcgaagctgagggcgtgtcagcaggcctttcgatccctgggaccaaccgcatcctcagcttcttccccgagaaatgctggagcaggctgttcagaccgacgttgccatcaaaacacatacacccagaaagaaacaacagaaaccaaaactcacaaggcgcatgattacttgttttatatttcatgttgggttttccctcccactattaaacagtctgtttccgta

SEQ ID NO: 380193 - DNA, 1772 bp, Homo sapiens
tgtctggggagcctggactgctgtgggaagctgtagattcctgactgacgcctggcatggtggtactgccagggaatgccgctgtgtgcgatgagcctgcccggctgtgcgaggagcagcattcttcactgacgcctgagctagacgtgcagtcgggctacagtgccatctgcagaggcagcagcatttggtaccgtcacttctggctcatccgtctttgctcagcctcctgctgccagttctagctcagctttcaaccagctcaccaacaacacagccactgccccctctgccacgcccgtgtttgggcaagtggcagccagcaccgcaccaagtctgtttgggcagcagactggtagcacagccagcacagcagctgccacaccacaggtcagcagctcagggtttagcagcccagcttttggtaccacagccccaggggtctttggacagacaaccttcgggcaggcctcagtctttgggcagtcggcgagcagtgctgcaagtgtcttttccttcagtcagcctgggttcagttccgtgcctgccttcggtcagcctgcttcctccactcccacatccaccagtggaagtgtctttggtgccgcctcaagtaccagtagctccagttccttctcatttggacagtcttctcccaacacaggaggggggctgtttggccaaagcaacgctcctgcttttgggcagagtcctggctttggacagggaggctctgtctttggtggtacctcagctgccaccacaacagcagcaacctctgggttcagcttttgccaagcttcaggttttgggtctagtaatactggttctgtgtttggtcaagcagccagtactggtggaatagtctttggccagcaatcatcctcttccagtggtagcgtgtttgggtctggaaacactggaagagggggaggtttcttcagtggccttggaggaaaacccagtcaggatgcagccaacaaaaacccattcagctcggccagtgggggctttggatccacagctacctcaaatacctctaacctatttggaaacagtggggccaagacatttggtggatttgccagctcgtcgtttggagagcagaaacccactggcactttcagctctggaggaggaagtgtggcatcccaaggctttgggttttcctctccaaacaaaacaggtggcttcggtgctgctccagtgtttggcagccctcctacttttgggggatcccctgggtttggaggggtgccagcattcggttcagccccagcctttacaagccctctgggctcgacgggaggcaaagtgttcggagagggcactgcagctgccagcgcaggaggattcgggtttgggagcagcagcaacaccacatccttcggcacgctcgcgagtcagaatgcccccactttcggatcactgtcccaacagacttctggttttgggacccagagtagcggattctctggttttggatcaggcacaggagggttcagctttgggtcaaataactcgtctgtccagggttttggtggctggcgaagctgagggcgtgtcagcaggcctttcgatccctgggaccaaccgcatcctcagcttcttccccgagaaatgctggagcaggctgttcagaccgacgttgccatcaaaacacatacacccagaaagaaacaacagaaaccaaaactcacaaggcgcatgattacttgttttatatttcatgttgggttttccctcccactattaaacagtctgtttccgta

SEQ ID NO: 380194 - DNA, 6432 bp, Homo sapiens
  misc_feature (1071)..(1071): n is a, c, g, or t
atgtgtttggaataaaaatcactgtgaatcttgggaatctgggaatactaataatattcttagagcaaagtgccctcctaaaacagctgcttctgatgacagatgttacagatatgcagattgtgccagctgtactgccaatacaaatgggtgccaatggtgtgatgacaagaaatgcatttcggcaaatagtaactgcagtatgtctgtcaagaactacaccaaatgtcatgtgagaaatgagcagatttgtaacaaacttaccagctgtaaaagctgttcactaaacttgaattgccagtgggatcagagacagcaagaatgccaggctttaccagctcatctttgtggagaaggatggagtcatattggggatgcttgtcttagagtcaattccagtagagaaaactatgacaatgcaaaactttattgctataatcttagtggaaatcttgcttcattaacaacctcaaaagaagtagaatttgttctggatgaaatacagaagtatacacaacagaaagtatcaccttgggtaggcttgcgcaagatcaatatatcctattggggatgggaagacatgtctccttttacaaacacaacactacagtggcttcctggcgaacccaatgattctgggttttgtgcatatctggaaagggctgcagtggcaggcttaaaagctaatccttgtacatctatggcaaatggccttgtctgtgaaaaacctgttgttagtccaaatcaaaatgcgaggccgtgcaaaaagccatgctctctgaggacatcatgttccaactgtacaagcaatggcatggagtgtatgtggtgcagcagtacgaaacgatgtgttgactctaatgcctatatcatctcttttccatatggacaatgtctagagtggcaaactgccacctgctcccctcaaaattgttctggattgagaacctgtggacagtgtttggaacagcctggatgtggctggtgcaatgatcctagtaatacaggaagaggacattgcattgaaggttcttcacggggaccaatgaagcttattggaatgcaccacantgagatggttcttgacaccaatctttgccccaaagaaaagaactatgagtggtcctttatccagtgtccagcttgccagtgtaatggacatagcacttgcatcaataataatgtgtgcgaacagtgtaaaaatctcaccacaggaaagcagtgtcaagattgtatgccaggttattatggagatccaaccaatggtggacagtgcacagcttgtacatgcagtggccatgcaaatatctgtcatctgcacacaggaaaatgtttctgcacaactaaaggaataaaaggtgaccaatgccaattatgtgactctgaaaatcgctatgttggtaatccacttagaggaacatgttattcttattacaggaagatgatcgccaccatactgccataaactttatagcaaacccagaacagtcgaacaaaaatctggatatatcaattaatgcatcaaacaactttaatctcaacattacgtggtctgtcggttcaacagctggaacaatatctggggaagagacttctatagtttccaagaataatataaaggaatacagagatagtttttcctatgaaaaatttaactttagaagcaatcctaacattacattctatgtgtacgtcagcaacttttcctggcctattaaaatacagattgcattctcacaacacaatacaatcatggaccttgtgcagttttttgtcaccttcttcagttgtttcctatccttattgctggtggctgctgtggtatggaagatcaaacaaacttgttgggcttctcgacggagagagcaactgcttcgagaacgacagcagatggccagccgtccctttgcttctgttgatgtagctctggaagtgggagctgaacaaacagagtttctgcgagggccattagagggggcacccaagccaattgccattgaaccatgtgctgggaacagagctgctgttctgactgtgtttctttgtctaccacgaggatcatcaggtgcccctccccctgggcagtcaggccttgcaattgccagtgccctaatagatatttcacaacagaaagcttcagatagtaaagataagacttctggagtccggaatcgaaaacacctttcaacacgtcaaggaacttgtgtctgagaaatggaaaccgctcctgtatattctgtactgttttacttcgggcttctgttaaagctgttctatggccttggattttatggaggcagatctctgtatcatccagagcctgagtacagtttccttccaaatggacaatgacccaggtggccaaagaatgttcatgagttttataaaagtattgatggtcacaggtgataaagtcagtttttaccactatcttaggcttattatagctaacattaaattactctggaaaaagatgtatattgtttcttaatgaagatgaaaaatatgtaattcatataaatcaactgtttatatcccaagactttaaagaaagacattttttaatgcctgaatgatgagaattgtacagtttttgcctcataagcaaacttgaatcacctgtgtatgaacagggaatgaacacattgcaatggctttaaatgctcttttatctcgttgtaaaggtaaggcaagattttgatgtagtaggatgtaggtaatgtatttaaatatttcatatgaccatatcgtgtccaaactcagtctgagaatgtgacagctttccgcctaactagaatgcagaccagaatgagttcaactcattctgtgcaacttcacagggggtttattagaatgctcagtgtagaggacattcctgtcatccatgccaactacctaactcgttatcagagctgatagagcatgggaaaagtctgtccagcgattcagttgttcccctccttccaaaaacagcctccaataccacaacctggaaaagaggccgaaatgggttatttttacagcatacaagcttctgctccagtatgataatttttaattgcctaagaatcattggatcagacctaaatgatccatctgcatttttataagaatggatctttctttgcccttcctctcctagctgctagattttaactaccttttacaaatgttacaaaatgtattttagaggcgacatctctcaagatgacctgagttccttcctgccaactgttccacctagaatacaagtagagaagagcactggctggcaagcatcaacaggagtcttcttcccaacacgagcgcatccatgtcctgagaaaaagtctgtggtttagaaaatatgtccatggttgcccacagtcagcacactcttagtgactcaaaattctgaattatggcagaaaggaaaaataaaacatacttcacattagaacacagaatcatttacatcctaatactgaccacagttcactaaagctcagtagcattaacagatatagtttggaattgcagtttcctcacttcagggtgacaagatatgtataacagtgacagaaatctccaaagctgctgtatatgatatagctttgttaaatatgaaggtcctttaaatacaattgatgtttagtactatatatgtacttttcacattctttggatttctggaaggttatgacactttactgtttacagctaatgcatagttacttgcatgccatggttgtacagtagcagactatgaccctattgtgatattaagtgtttatttcataatgccatttatacatagctgaatttgatgaggattgaatgtcatatataagaggaatgatcatacaatatgtagttgcatcttatataagatttctaggttgcatctaaccatgactatgtcattattttgataattaggcatttatgaattatagtatatattcctcatgttggcatgataattttgctattttccatgcattaaaaataagacaaattcttagagtaattttagtaattttatctataatctgtggggtttttttggagggggaggccactggttgtttctacttccctgtgatattttctctctcattaaaggaatgagctaagtttgtaaatatctcctaaaaacaatcaagtaattttattagcttcttttggaccctctaaatattgacttctctcatgaaaaaataaattgatgaaactaatgattacaaagatataatcattttttaaaaagtgattgcccaatgtatttctctaacaattgtcacaagagaaagcataacaataaaaatacaaaaacatacagatttagatgtaaaatctatataagctatatttttagggaggctaagcagatagtattactgtggaagaattatcaagttttattcacctcaaatcccactgggttcttaaaacttgaaaattcaaattgtagagaattatgagacacaatgtgatgtttagttaaagtcatgctatacctttctgggccacatattgctaactctgtggctaattatgcaattaattctcaacgtatcaaagcttttcactggcagtaaattctttgccctcaggtgaagtggattgaaaagacatcaaggatcaaggataatcactttgaatctgttggtttttccccctacattccagacactttaaatttggatgctttcattttttttaaatcaaaccacacaaatatgcagatactttcccagaatttcgcagttaaatggctgatcctcttgaaaactaaccttaatggaattctaaacatttcagtttagaatgactttgaaaaattccttagatttttaggatgttttattctgccaagtatgaaaaaaaaatggttaaatacaatggagttttaaaaattaacctggggattctatttgaactagaaaattcctattggaaaagaatttgcacatacttacagattcagctaataaattttaagaggattaggattctcataattctttaaatgaaaatttgttttagtgatacacagagatgccgtatactatagtgttatgttcagtaggaaaacttcaaatagttcgtatttaaaaaggtaattgatccttgctgtacttcccaacatctcatcttcttttagctgcagtaagatagaggtgactgtatggctacagttcatggtataaggtcatttagggtgcacactggcacacaggctggaaaacgggcactggacccagctttcaggtgtgtggtgctgggtaagtttcacctttgaagcctcagccttccatctgtaaagggcggtaatggtgcccacctttcgaggcattgcgaggctagatggtaacacacagaaagctcccacagtgggaccttgatgcagcgtagctggtattaacaaccgtggggacaccaggccactctttttctaccagttgttttatgaatccacctattaattttcatccatcttttggtcgtaggtaaaggtcaatcaggtttttcaaaaagactccctgaataacttaagttcctgtatttctaagatatagggatttctacaaaacgactttgacatttagtcaataaagacttaaactcttcttaaatctatagttttaggagagtttttcttaaaattactgactgatgacattgagacaagagcatcaatgatcacctttcacgtacaaactaggcaagacagggtcagtgcttacattttgtggttatacatgatacatcttttctcagtgaacataaaactatgatttgaaaggtgtcttatatttaaaaaagattgtaaaatgaaaactgaccaaatgaactaattctacccacctatggtctttttaaatgtcgagtttcaaaacccatttgccgtatactagagtgagcttggaaacttacctgattacaggaattgcttgggttcaggcagattcccactttcacctctagagatttagattcagaaacactggggtaggccctggagagcagtactcttaacaagctcctcagtgcttcttaccattaggcaaattagggaaacactgcattgggtcaaagtgctgcctttaatcgaccattagagggagttctctaaataacaaagttattactctaattcaaaatgctttaaagaattttccaaggaatacaagccatctggttggtgttagttatagcagtgatttcattagagtgtacatttaacattttagttttatcaaaattttttgaaattaagaattagaaccagagctcctatcagtatatatgtacacaggtgtgcatgccagtgttcaaaacagattgtgtaaaagttcaagcccgttttagaaagccaacattttatgttataatatgctgttaatcaggactttattaaataaaaacattggctcttccaacccccac

SEQ ID NO: 380195 - DNA, 6466 bp, Homo sapiens
  misc_feature (1071)..(1071): n is a, c, g, or t
atgtgtttggaataaaaatcactgtgaatcttgggaatctgggaatactaataatattcttagagcaaagtgccctcctaaaacagctgcttctgatgacagatgttacagatatgcagattgtgccagctgtactgccaatacaaatgggtgccaatggtgtgatgacaagaaatgcatttcggcaaatagtaactgcagtatgtctgtcaagaactacaccaaatgtcatgtgagaaatgagcagatttgtaacaaacttaccagctgtaaaagctgttcactaaacttgaattgccagtgggatcagagacagcaagaatgccaggctttaccagctcatctttgtggagaaggatggagtcatattggggatgcttgtcttagagtcaattccagtagagaaaactatgacaatgcaaaactttattgctataatcttagtggaaatcttgcttcattaacaacctcaaaagaagtagaatttgttctggatgaaatacagaagtatacacaacagaaagtatcaccttgggtaggcttgcgcaagatcaatatatcctattggggatgggaagacatgtctccttttacaaacacaacactacagtggcttcctggcgaacccaatgattctgggttttgtgcatatctggaaagggctgcagtggcaggcttaaaagctaatccttgtacatctatggcaaatggccttgtctgtgaaaaacctgttgttagtccaaatcaaaatgcgaggccgtgcaaaaagccatgctctctgaggacatcatgttccaactgtacaagcaatggcatggagtgtatgtggtgcagcagtacgaaacgatgtgttgactctaatgcctatatcatctcttttccatatggacaatgtctagagtggcaaactgccacctgctcccctcaaaattgttctggattgagaacctgtggacagtgtttggaacagcctggatgtggctggtgcaatgatcctagtaatacaggaagaggacattgcattgaaggttcttcacggggaccaatgaagcttattggaatgcaccacantgagatggttcttgacaccaatctttgccccaaagaaaagaactatgagtggtcctttatccagtgtccagcttgccagtgtaatggacatagcacttgcatcaataataatgtgtgcgaacagtgtaaaaatctcaccacaggaaagcagtgtcaagattgtatgccaggttattatggagatccaaccaatggtggacagtgcacagcttgtacatgcagtggccatgcaaatatctgtcatctgcacacaggaaaatgtttctgcacaactaaaggaataaaaggtgaccaatgccaattatgtgactctgaaaatcgctatgttggtaatccacttagaggaacatgttattacagccttttgattgattatcaatttaccttcagcttattacaggaagatgatcgccaccatactgccataaactttatagcaaacccagaacagtcgaacaaaaatctggatatatcaattaatgcatcaaacaactttaatctcaacattacgtggtctgtcggttcaacagctggaacaatatctggggaagagacttctatagtttccaagaataatataaaggaatacagagatagtttttcctatgaaaaatttaactttagaagcaatcctaacattacattctatgtgtacgtcagcaacttttcctggcctattaaaatacagattgcattctcacaacacaatacaatcatggaccttgtgcagttttttgtcaccttcttcagttgtttcctatccttattgctggtggctgctgtggtatggaagatcaaacaaacttgttgggcttctcgacggagagagcaactgcttcgagaacgacagcagatggccagccgtccctttgcttctgttgatgtagctctggaagtgggagctgaacaaacagagtttctgcgagggccattagagggggcacccaagccaattgccattgaaccatgtgctgggaacagagctgctgttctgactgtgtttctttgtctaccacgaggatcatcaggtgcccctccccctgggcagtcaggccttgcaattgccagtgccctaatagatatttcacaacagaaagcttcagatagtaaagataagacttctggagtccggaatcgaaaacacctttcaacacgtcaaggaacttgtgtctgagaaatggaaaccgctcctgtatattctgtactgttttacttcgggcttctgttaaagctgttctatggccttggattttatggaggcagatctctgtatcatccagagcctgagtacagtttccttccaaatggacaatgacccaggtggccaaagaatgttcatgagttttataaaagtattgatggtcacaggtgataaagtcagtttttaccactatcttaggcttattatagctaacattaaattactctggaaaaagatgtatattgtttcttaatgaagatgaaaaatatgtaattcatataaatcaactgtttatatcccaagactttaaagaaagacattttttaatgcctgaatgatgagaattgtacagtttttgcctcataagcaaacttgaatcacctgtgtatgaacagggaatgaacacattgcaatggctttaaatgctcttttatctcgttgtaaaggtaaggcaagattttgatgtagtaggatgtaggtaatgtatttaaatatttcatatgaccatatcgtgtccaaactcagtctgagaatgtgacagctttccgcctaactagaatgcagaccagaatgagttcaactcattctgtgcaacttcacagggggtttattagaatgctcagtgtagaggacattcctgtcatccatgccaactacctaactcgttatcagagctgatagagcatgggaaaagtctgtccagcgattcagttgttcccctccttccaaaaacagcctccaataccacaacctggaaaagaggccgaaatgggttatttttacagcatacaagcttctgctccagtatgataatttttaattgcctaagaatcattggatcagacctaaatgatccatctgcatttttataagaatggatctttctttgcccttcctctcctagctgctagattttaactaccttttacaaatgttacaaaatgtattttagaggcgacatctctcaagatgacctgagttccttcctgccaactgttccacctagaatacaagtagagaagagcactggctggcaagcatcaacaggagtcttcttcccaacacgagcgcatccatgtcctgagaaaaagtctgtggtttagaaaatatgtccatggttgcccacagtcagcacactcttagtgactcaaaattctgaattatggcagaaaggaaaaataaaacatacttcacattagaacacagaatcatttacatcctaatactgaccacagttcactaaagctcagtagcattaacagatatagtttggaattgcagtttcctcacttcagggtgacaagatatgtataacagtgacagaaatctccaaagctgctgtatatgatatagctttgttaaatatgaaggtcctttaaatacaattgatgtttagtactatatatgtacttttcacattctttggatttctggaaggttatgacactttactgtttacagctaatgcatagttacttgcatgccatggttgtacagtagcagactatgaccctattgtgatattaagtgtttatttcataatgccatttatacatagctgaatttgatgaggattgaatgtcatatataagaggaatgatcatacaatatgtagttgcatcttatataagatttctaggttgcatctaaccatgactatgtcattattttgataattaggcatttatgaattatagtatatattcctcatgttggcatgataattttgctattttccatgcattaaaaataagacaaattcttagagtaattttagtaattttatctataatctgtggggtttttttggagggggaggccactggttgtttctacttccctgtgatattttctctctcattaaaggaatgagctaagtttgtaaatatctcctaaaaacaatcaagtaattttattagcttcttttggaccctctaaatattgacttctctcatgaaaaaataaattgatgaaactaatgattacaaagatataatcattttttaaaaagtgattgcccaatgtatttctctaacaattgtcacaagagaaagcataacaataaaaatacaaaaacatacagatttagatgtaaaatctatataagctatatttttagggaggctaagcagatagtattactgtggaagaattatcaagttttattcacctcaaatcccactgggttcttaaaacttgaaaattcaaattgtagagaattatgagacacaatgtgatgtttagttaaagtcatgctatacctttctgggccacatattgctaactctgtggctaattatgcaattaattctcaacgtatcaaagcttttcactggcagtaaattctttgccctcaggtgaagtggattgaaaagacatcaaggatcaaggataatcactttgaatctgttggtttttccccctacattccagacactttaaatttggatgctttcattttttttaaatcaaaccacacaaatatgcagatactttcccagaatttcgcagttaaatggctgatcctcttgaaaactaaccttaatggaattctaaacatttcagtttagaatgactttgaaaaattccttagatttttaggatgttttattctgccaagtatgaaaaaaaaatggttaaatacaatggagttttaaaaattaacctggggattctatttgaactagaaaattcctattggaaaagaatttgcacatacttacagattcagctaataaattttaagaggattaggattctcataattctttaaatgaaaatttgttttagtgatacacagagatgccgtatactatagtgttatgttcagtaggaaaacttcaaatagttcgtatttaaaaaggtaattgatccttgctgtacttcccaacatctcatcttcttttagctgcagtaagatagaggtgactgtatggctacagttcatggtataaggtcatttagggtgcacactggcacacaggctggaaaacgggcactggacccagctttcaggtgtgtggtgctgggtaagtttcacctttgaagcctcagccttccatctgtaaagggcggtaatggtgcccacctttcgaggcattgcgaggctagatggtaacacacagaaagctcccacagtgggaccttgatgcagcgtagctggtattaacaaccgtggggacaccaggccactctttttctaccagttgttttatgaatccacctattaattttcatccatcttttggtcgtaggtaaaggtcaatcaggtttttcaaaaagactccctgaataacttaagttcctgtatttctaagatatagggatttctacaaaacgactttgacatttagtcaataaagacttaaactcttcttaaatctatagttttaggagagtttttcttaaaattactgactgatgacattgagacaagagcatcaatgatcacctttcacgtacaaactaggcaagacagggtcagtgcttacattttgtggttatacatgatacatcttttctcagtgaacataaaactatgatttgaaaggtgtcttatatttaaaaaagattgtaaaatgaaaactgaccaaatgaactaattctacccacctatggtctttttaaatgtcgagtttcaaaacccatttgccgtatactagagtgagcttggaaacttacctgattacaggaattgcttgggttcaggcagattcccactttcacctctagagatttagattcagaaacactggggtaggccctggagagcagtactcttaacaagctcctcagtgcttcttaccattaggcaaattagggaaacactgcattgggtcaaagtgctgcctttaatcgaccattagagggagttctctaaataacaaagttattactctaattcaaaatgctttaaagaattttccaaggaatacaagccatctggttggtgttagttatagcagtgatttcattagagtgtacatttaacattttagttttatcaaaattttttgaaattaagaattagaaccagagctcctatcagtatatatgtacacaggtgtgcatgccagtgttcaaaacagattgtgtaaaagttcaagcccgttttagaaagccaacattttatgttataatatgctgttaatcaggactttattaaataaaaacattggctcttccaacccccac

SEQ ID NO: 380196 - DNA, 2216 bp, Homo sapiens
  misc_feature (1071)..(1071): n is a, c, g, or t
atgtgtttggaataaaaatcactgtgaatcttgggaatctgggaatactaataatattcttagagcaaagtgccctcctaaaacagctgcttctgatgacagatgttacagatatgcagattgtgccagctgtactgccaatacaaatgggtgccaatggtgtgatgacaagaaatgcatttcggcaaatagtaactgcagtatgtctgtcaagaactacaccaaatgtcatgtgagaaatgagcagatttgtaacaaacttaccagctgtaaaagctgttcactaaacttgaattgccagtgggatcagagacagcaagaatgccaggctttaccagctcatctttgtggagaaggatggagtcatattggggatgcttgtcttagagtcaattccagtagagaaaactatgacaatgcaaaactttattgctataatcttagtggaaatcttgcttcattaacaacctcaaaagaagtagaatttgttctggatgaaatacagaagtatacacaacagaaagtatcaccttgggtaggcttgcgcaagatcaatatatcctattggggatgggaagacatgtctccttttacaaacacaacactacagtggcttcctggcgaacccaatgattctgggttttgtgcatatctggaaagggctgcagtggcaggcttaaaagctaatccttgtacatctatggcaaatggccttgtctgtgaaaaacctgttgttagtccaaatcaaaatgcgaggccgtgcaaaaagccatgctctctgaggacatcatgttccaactgtacaagcaatggcatggagtgtatgtggtgcagcagtacgaaacgatgtgttgactctaatgcctatatcatctcttttccatatggacaatgtctagagtggcaaactgccacctgctcccctcaaaattgttctggattgagaacctgtggacagtgtttggaacagcctggatgtggctggtgcaatgatcctagtaatacaggaagaggacattgcattgaaggttcttcacggggaccaatgaagcttattggaatgcaccacantgagatggttcttgacaccaatctttgccccaaagaaaagaactatgagtggtcctttatccagtgtccagcttgccagtgtaatggacatagcacttgcatcaataataatgtgtgcgaacagtgtaaaaatctcaccacaggaaagcagtgtcaagattgtatgccaggttattatggagatccaaccaatggtggacagtgcacagcttgtacatgcagtggccatgcaaatatctgtcatctgcacacaggaaaatgtttctgcacaactaaaggaataaaaggtgaccaatgccaattatgtgactctgaaaatcgctatgttggtaatccacttagaggaacatgttattcttattacaggaagatgatcgccaccatactgccataaactttatagcaaacccagaacagtcgaacaaaaatctggatatatcaattaatgcatcaaacaactttaatctcaacattacgtggtctgtcggttcaacagctggaacaatatctggggaagagacttctatagtttccaagaataatataaaggaatacagagatagtttttcctatgaaaaatttaactttagaagcaatcctaacattacattctatgtgtacgtcagcaacttttcctggcctattaaaatacagattgcattctcacaacacaatacaatcatggaccttgtgcagttttttgtcaccttcttcagttgtttcctatccttattgctggtggctgctgtggtatggaagatcaaacaaacttgttgggcttctcgacggagagagacagagtcacactcttgtcacccaggctggcgtgcagtgtggggatctcagctcactgcaacctccgcatcctgggtcaagcaattctccattacaggcgcccactaccacgctcagctaatttttgtattttttagtagagatggggtttcaccatgttggccagactggacctcaggcgatctgcccacctcggcctcctaaagtgctgggattacaggcgtgagccaccgcgccgggcctctatgtgaactctttaaatttagacattttcaacaacattgctgttcatttctgtagtagattaaggtgtgttcatataactgaacttctaaactcgtgatatatag

SEQ ID NO: 380197 - DNA, 1007 bp, Homo sapiens
cagctcttcccattgctcaagatgcttgtacccgtgatgcttcttttctctgcttaggtcacaatatgtggagctgacaaggttcccctattatcagtgacaatggtggaatgtggaggtgaagttaacaccttcgtggctacagagtttccttagcagagctgtggagtgtgacaatggtgtttgtgtctaaactatcaaacgccattatcacactaaatagctactgctaggcaatccttccctcgataaatgtcttggcatcgtttgctttgagcaagaaggttcatctgatatcagtcttctcaatcttgtgtacttactgaataaagtctggttcttttgcactcataaccaatatggttagctgaaccctgcctctcacatgctgttgttacataccttagctggtgattaattttcttgttttcccaagtcaataaaaagattgcagaccaggcacggtggctcacgcctgaaatcccagcactttgggaggccaaggcaggcggatcacttgagctcaggagttcaagtccagcctggggcagcatgggtgaaaccgtgtctctacaaaaactacaaaaattagccaggcatggtggcatgtgcctgtaatctcagctacttgagaggctgaggtgggaggatcaattgagccccacgaggttgaggctgtagtgagctgtgatggtaccactgcactccagcctgtgtgacagagcaagatcctgtctcaaaaaatgaaaataaaaagattgcagagttcctcagagcccccaacacaaggccaggcacgaggtaatcatttaacccatgcttatagacttaaaatgaatagttaggaaagtgttagacgcagaaggctaagactgggctaaatctatgttatgcagacagaccgcaagcttataggtacaaaattaaggtgtgtgggtccttctcttttcgtcgttaaaaaatccaactttctaataaacttacacatggtttcactgacgtttcag

SEQ ID NO: 380198 - DNA, 378 bp, Homo sapiens
agctcggtttttggagacatgaatccgccgatgctcccagctgaataaagcccttgcctttcacaacttggtgtctgaggggttcttgtctgcggcaagatcctgtctcaaaaaatgaaaataaaaagattgcagagttcctcagagcccccaacacaaggccaggcacgaggtaatcatttaacccatgcttatagacttaaaatgaatagttaggaaagtgttagacgcagaaggctaagactgggctaaatctatgttatgcagacagaccgcaagcttataggtacaaaattaaggtgtgtgggtccttctcttttcgtcgttaaaaaatccaactttctaataaacttacacatggtttcactgacgtttcag

SEQ ID NO: 380199 - DNA, 796 bp, Homo sapiens
cgacgttcgcagcgctacccttttccgctccacggtgacctccgtgcggccgggtgcgggcggagtcttcctcgatcccgtggtgctccgcggcgcggccttgctctcttccggtcgcgggacaccgggtgtagagggcggtcgcggcgggcagtggcggcagaatgttggctaccagggtatttagcctagttggcaagcgagcaatttccacctctgtgtgtgtacgagctcatgaaagtgttgtgaagagcgaagacttttcgctcccagcttatatggatcggcgtgaccaccccttgccggaggtggcccatgtcaagcacctgtctgccagccagaaggcactgaaggagaaggagaaggcctcctggagcagcctctccatggatgagaaagtcgagttgtatcgcattaagttcaaggagagctttgctgagatgaacaggggctcgaacgagtggaagacggttgtgggcggtgccatgttcttcatcggtttcaccgcgctcgttatcatgtggcagaagcactatgtgtacggccccctcccgcaaagctttgacaaagagtgggtggccaagcagaccaagaggatgctggacatgaaggtgaaccccatccagggcttagcctccaagtgggactacgaaaagaacgagtggaagaagtgagagatgctggcctgcgcctgcacctgcgcctggctctgtcaccgccatgcaactccatgcctatttactggaaacctgttatgccaaacagttgtaccactgctaataaatgaccagtttac

SEQ ID NO: 380200 - DNA, 986 bp, Homo sapiens
  misc_feature (826)..(826): n is a, c, g, or t
cgacgttcgcagcgctacccttttccgctccacggtgacctccgtgcggccgggtgcgggcggagtcttcctcgatcccgtggtgctccgcggcgcggccttgctctcttccggtcgcgggacaccgggtgtagagggcggtcgcggcgggcagtggcggcagaatgttggctaccagggtatttagcctagttggcaagcgagcaatttccacctctgtgtgtgtacgagctcatgaaagtgttgtgaagagcgaagacttttcgctcccagcttatatggatcggcgtgaccaccccttgccggaggtggcccatgtcaagcacctgtctgccagccagaaggcactgaaggagaaggagaaggcctcctggagcagcctctccatggatgagaaagtcgagttgtatcgcattaagttcaaggagagctttgctgagatgaacaggggctcgaacgagtggaagacggttgtgggcggtgccatgttcttcatcggtttcaccgcgctcgttatcatgtggcagaagcactatgtgtacggccccctcccgcaaagctttgacaaagagtgggtggccaagcagaccaagaggatgctggacatgaaggtgaaccccatccagggcttagcctccaagtgggactacgaaaagaacgagtggaagaagtgagagatgctggcctgcgcctgcacctgcgcctggctctgtcaccgccatgcaactccatgcctatttactggaaacctgttatgccaaacagttgtaccactgctaataaatgaccagtttactgaaaaaaaaaaaaaaaacagaaaaaaaanaaaaacaaaaaaaaccggggggtctttttggggggggggggaaagaggggaaaaggggaaggggtaggttttccgggagcccctttttttaaaagggggaaacggggcgccccaaggggggggtttttgcgcggcgctgttttcttttcggaggggggac

SEQ ID NO: 380201 - DNA, 828 bp, Homo sapiens
cgacgttcgcagcgctacccttttccgctccacggtgacctccgtgcggccgggtgcgggcggagtcttcctcgatcccgtggtgctccgcggcgcggccttgctctcttccggtcgcgggacaccgggtgtagagggcggtcgcggcgggcagtggcggcagaatgttggctaccagggtatttagcctagttggcaagcgagcaatttccacctctgtgtgtgtacgagctcatgaaagtgttgtgaagagcgaagacttttcgctcccagcttatatggatcggcgtgaccaccccttgccggaggtggcccatgtcaagcacctgtctgccagccagaaggcactgaaggagaaggagaaggcctcctggagcagcctctccatggatgagaaagtcgagttgtatcgcattaagttcaaggagagctttgctgagatgaacaggggctcgaacgagtggaagacggttgtgggcggtgccatgttcttcatcggtttcaccgcgctcgttatcatgtggcagaagcactatgtgtacggccccctcccgcaaagctttgacaaagagtgggtggccaagcagaccaagaggatgctggacatgaaggtgaaccccatccagggcttagcctccaagtgggactacgaaaagaacgagtggaagaagtgagagatgctggcctgcgcctgcacctgcgcctggctctgtcaccgccatgcaactccatgcctatttactggaaacctgttatgccaaacagttgtaccactgctaataaatgaccagtttacctgaaaaaaaaaagtcgaaggccgaaaaaaaa

SEQ ID NO: 380202 - DNA, 817 bp, Homo sapiens
cgacgttcgcagcgctacccttttccgctccacggtgacctccgtgcggccgggtgcgggcggagtcttcctcgatcccgtggtgctccgcggcgcggccttgctctcttccggtcgcgggacaccgggtgtagagggcggtcgcggcgggcagtggcggcaggtgtacatttttatctttcagaatgttggctaccagggtatttagcctagttggcaagcgagcaatttccacctctgtgtgtgtacgagctcatgaaagtgttgtgaagagcgaagacttttcgctcccagcttatatggatcggcgtgaccaccccttgccggaggtggcccatgtcaagcacctgtctgccagccagaaggcactgaaggagaaggagaaggcctcctggagcagcctctccatggatgagaaagtcgagttgtatcgcattaagttcaaggagagctttgctgagatgaacaggggctcgaacgagtggaagacggttgtgggcggtgccatgttcttcatcggtttcaccgcgctcgttatcatgtggcagaagcactatgtgtacggccccctcccgcaaagctttgacaaagagtgggtggccaagcagaccaagaggatgctggacatgaaggtgaaccccatccagggcttagcctccaagtgggactacgaaaagaacgagtggaagaagtgagagatgctggcctgcgcctgcacctgcgcctggctctgtcaccgccatgcaactccatgcctatttactggaaacctgttatgccaaacagttgtaccactgctaataaatgaccagtttac

SEQ ID NO: 380203 - DNA, 3972 bp, Homo sapiens
  misc_feature (52)..(52): n is a, c, g, or t
  misc_feature (82)..(82): n is a, c, g, or t
  misc_feature (189)..(189): n is a, c, g, or t
  misc_feature (360)..(360): n is a, c, g, or t
  misc_feature (456)..(456): n is a, c, g, or t
  misc_feature (556)..(556): n is a, c, g, or t
  misc_feature (672)..(672): n is a, c, g, or t
  misc_feature (850)..(850): n is a, c, g, or t
  misc_feature (944)..(944): n is a, c, g, or t
  misc_feature (966)..(966): n is a, c, g, or t
  misc_feature (1086)..(1086): n is a, c, g, or t
  misc_feature (1125)..(1125): n is a, c, g, or t
  misc_feature (1147)..(1147): n is a, c, g, or t
  misc_feature (1277)..(1277): n is a, c, g, or t
  misc_feature (1324)..(1324): n is a, c, g, or t
  misc_feature (1431)..(1431): n is a, c, g, or t
  misc_feature (1453)..(1453): n is a, c, g, or t
  misc_feature (1870)..(1870): n is a, c, g, or t
gttctagaacattctcatcacccatatttacatttatttttaataactctcntgtgtaagctgagtgttttaaactttaganacttctggggggtgctgaacttgataaaaatattcagtatacaagtgttctttatagttcactcatcattttcatagaattagggttttaaaattagaaagtaattnaggccatttccatctcctgtccctcaaatcccagctcagttttgggatgaggtgtcaagtataagtttgtaagtatgccagtcatttgcacggctaagagaaacatctagagaagtctatatacgacttgcttaaagctgaatgttgatttactgttcacatgatttgggngattttagtcactgggactgagctaatggagttgaagcattgttgcgggcattgtacctccagaccagtgtgtaatacaaagagttcttgcagacntaggacagaattggagaaacagcttctaacagtgggaagactctcagtacaaccaagctattccttacctttctgatttctgaacttttttccatgtganacctgctgctttgaaggcactaaaataacagaagcagatagagcagaaatcctcactcagatcttcctccttcctacctgtataacagtttgtggcttgccttgtctgttttgtgngtttcgttacgcgtatgtgagtatgtgcacgtgatttccagaaaggagaagcgcacgatactgcccgtgctctgtgactcctgagtgcatgcttcctctgcatttgggctcctaggtcggcctcgtcctgtggacgttgccccttgtttcgtgccatccacacattcctgatgccccnctgctctactctttctccagagtactttttccaaacatgtgatttgcacatttgttatgtttattgtttgttttccacttctagaagtgtgccnctaggcaggaatgtttgatttnttcactgatgatcccagatctctagaaccctgccttgcctgtagagggtgcttggtaaatgtgctctgaatgaatggctccatgatcctcgtttctaagagctagcacgatttctcactnagtcctggttggacacaggttccctggaacagtgctgtngtggttatcttctcacgtgtcnttgtttctgaacttgaaacgctttgagttttttattgtttttgttcttcctcattagtttgagtcccttgcagataggctttcattttgtccagtcacctgttcagggagccctgagggccttggcccangtctgcaggtaactggtttttttatttttatttttttattttgagangaagtctcgctctgtcaccaggctggagtgcagcggtgcgatctcagctcactgcaacctccgcctcctgcgttcaagcgattctcctgcctcagccttccgagtanctgggactataggcacgtgccnccacgcccggctaattttttgtatttttagtagagacggggtttcaccatattagccaggatggtctcgatctcctgacctcgtgatccgcctgcctgggcctcccaaagtgctgggattacaggtgtgagccaccgcgcccagccctgcaggtaactgttaatgtaggaagtgctgcctctgggcaccttggccccagggttcattagcagttgcccctggtgggtttttgttggctgtgatgagaagtgcttctgttccccctccaccacactcctgcaactgtttaaacagtggctgtgaccccctgagatgatccagggtttcaaggcgtgcacatgtctgtgtttcggttttcagaagtatcaccttggggtgactctcaacctacatggattttcaaagatttattcaatntgtttttcagaaagtgttgtgaagagcgaagacttttcgctcccagcttatatggatcggcgtgaccaccccttgccggaggtggcccatgtcaagcacctgtctgccagccagaaggcactgaaggagaaggagaaggcctcctggagcagcctctccatggatgagaaagtcgagtgtgggtattgaagggacccacaggcgcgcccagcagctctcggaagcgtgtgtgtgacagagcctctgctcacttctgggcctactgtctagagagcagtcttgcacaggagggttgctctgctgggtttcggggtcactgtgccagggccccagtttatgtgctcaccagtcacttagctctgccagctgacaggatcttttgctgggcccccttctctgtgctgagtggaggtagcctctcagcatatctgctgggtaagacatagttaactgtaaattattgaaagaaactcagcaaaatgcatagtgtttggtatgaaaggggcagaaaaataacaagattaaatagaccctaatactgtaattcaagtaagaaataattttgcagttttaatttgcacctgaagcgaactgtatgcattttcttccttccttgccctgtcacatgcctgcgtgggcacgtgtgtgcacgtatgtgcgtgaacatgatgtggcctgggttggtgtatccttcagctctgtgtttcctccttcacaagtgtggttttggggagaagtggttgaatgttgcagaggagggagctgctgacctttgtgcctgtaaatggctgtcctctctgcccccagtgtatcgcattaagttcaaggagagctttgctgagatgaacaggggctcgaacgagtggaagacggttgtgggcggtgccatgttcttcatcggtttcaccgcgctcgttatcatgtggcagaagcactatggtgagtagagagggaggaaggcatgggcgcctggactggggctccagcctgcagtgcccattggtgggctgtgggggacctccataccttgaggctatgagatagggactgcattccagagttcatctcaggattgtttccaggccttggtgacctggagaactgaagtcgtgggaggttagtttataagccagcatctgattattcatagccatgcttgttgggtggtgaaataccctaactactttgtacagcacaccacgttttcagtagcaatttatgtgctcaccagtcacttagcaaaagatgacttcgtgaaggttcgagcaaggataaggggactcattcatttaatgactgtctcgactgttgtgaggactgcatctcaacagccagcatctgggggtcccgacctgatagtttgtgtgtgggcattgccgggttgctcgctcgtggtaatgactcttccccgaggttctttctgtccaggcagaacaggcatttttgcattctgaataggtatattctcgtacttttggtttgaatgtggatgtgggttaataacgacccgaatctatttgatcttccaggtcaccttgggctctgtttgtcagatcctgttatccatagcctttagagaggaccttctgcttttagcttattttgttgctaactttttacaaacaaagggctaattttaaaatgtcagtgttgtcagtggtcagaaaccgtgtgtttgagcgggtgttgagtggcaggtggctctgctgacctggtggctggtgtgtcgggaggatttaacctgtgtgagggattggcctagaaacaacctgttgagatagtcttgccccataacctgtctcacaccgtagtgtacggccccctcccgcaaagctttgacaaagagtgggtggccaagcagaccaagaggatgctggacatgaaggtgaaccccatccagggcttagcctccaagtgggactacgaaaagaacgagtggaagaagtgagagatgctggcctgcgcctgcacctgcgcctggctctgtcaccgccatgcaactccatgcctatttactggaaacctgttatgccaaacagttgtaccactgctaataaatgaccagtttacctgaaaaaaaaaagtcgaaggccgaaaaaaaa

SEQ ID NO: 380204 - DNA, 638 bp, Homo sapiens
  misc_feature (608)..(608): n is a, c, g, or t
cgacgttcgcagcgctacccttttccgctccacggtgacctccgtgcggccgggtgcgggcggagtcttcctcgatcccgtggtgctccgcggcgcggccttgctctcttccggtcgcgggacaccgggtgtagagggcggtcgcggcgggcagtggcggcagaatgttggctaccagggtatttagcctagttggcaagcgagcaatttccacctctgtgtgtgtacgagctcatgaaagtgttgtgaagagcgaagacttttcgctcccagcttatatggatcggcgtgaccaccccttgccggaggtggcccatgtcaagcacctgtctgccagccagaaggcactgaaggagaaggagaaggcctcctggagcagcctctccatggatgagaaagtcgagttgtatcgcattaagttcaaggagagctttgctgagatgaacaggggctcgaacgagtggaagacggttgtgggcggtgccatgttcttcatcggtttcaccgcgctcgttatcatgtggcagaagcactatgcacgtgaccaacttgcgcaagatgggagcgcccgaatctggcttggcggaatatctctgtgacaagcacancctggcagaagcagaagcggtccgagccga

SEQ ID NO: 380205 - DNA, 792 bp, Homo sapiens
  misc_feature (589)..(589): n is a, c, g, or t
  misc_feature (615)..(615): n is a, c, g, or t
  misc_feature (624)..(624): n is a, c, g, or t
  misc_feature (664)..(664): n is a, c, g, or t
  misc_feature (671)..(671): n is a, c, g, or t
  misc_feature (677)..(677): n is a, c, g, or t
  misc_feature (721)..(721): n is a, c, g, or t
  misc_feature (724)..(724): n is a, c, g, or t
  misc_feature (728)..(728): n is a, c, g, or t
  misc_feature (735)..(735): n is a, c, g, or t
  misc_feature (744)..(744): n is a, c, g, or t
  misc_feature (747)..(747): n is a, c, g, or t
cgacgttcgcagcgctacccttttccgctccacggtgacctccgtgcggccgggtgcgggcggagtcttcctcgatcccgtggtgctccgcggcgcggccttgctctcttccggtcgcgggacaccgggtgtagagggcggtcgcggcgggcagtggcggcagaatgttggctaccagggtatttagcctagttggcaagcgagcaatttccacctctgtgtgtgtacgagctcatgaaagtgttgtgaagagcgaagacttttcgctcccagcttatatggatcggcgtgaccaccccttgccggaggtggcccatgtcaagcacctgtctgccagccagaaggcactgaaggagaaggagaaggcctcctggagcagcctctccatggatgagaaagtcgagttgtatcgcattaagttcaaggagagctttgctgagatgaacaggggctcgaacgagtgggaagacggtttttgggcggtgccatgtttttttcaatcggtttcaaccgcgcttcgttaatccattgttggcaagaaagcactattgtgttaacgggccccttcccgcaaaagcttttgcaaaanagttgggttgcccaagcaagaccaangaggattcnttgacaattaagggtgaaccccatccaagggtttagcctncaaagtngggctntcggaaagaaccgagttgaaagaagttaagaaaatcttgccttncancttnaaccttnaccttggtnttntaacccgcaattaaactccaatccctttttacttggaaccctttt

SEQ ID NO: 380206 - DNA, 1172 bp, Homo sapiens
cgacgttcgcagcgctacccttttccgctccacggtgacctccgtgcggccgggtgcgggcggagtcttcctcgatcccgtggtgctccgcggcgcggccttgctctcttccggtcgcgggacaccgggtgtagagggcggtcgcggcgggcagtggcggcagaatgttggctaccagggtatttagcctagttggcaagcgagcaatttccacctctgtgtgtgtacgagctcatgaaagtgttgtgaagagcgaagacttttcgctcccagcttatatggatcggcgtgaccaccccttgccggaggtggcccatgtcaagcacctgtctgccagccagaaggcactgaaggagaaggagaaggcctcctggagcagcctctccatggatgagaaagtcgagttgtatcgcattaagttcaaggagagctttgctgagatgaacaggggctcgaacgagtggaagacggttgtgggcggtgccatgttcttcatcggtttcaccgcgctcgttatcatgtggcagaagcactatgtgtacggccccctcccgcaaagctttgacaaagagtgggtggccaagcagaccaagaggatgctggacatgaaggtgaaccccatccagggcttagcctccaagtgggactacgaaaagaacgagtggaagaagtgagagatgctggcctgcgcctgcacctgcgcctggctctgtcaccgccatgcaactccatgcctatttactggaaacctgttatgccaaacagttgtaccactgctaataaatgaccagtttacctgaaaaaaaaaaaaaacaaacacaaaaaaaaaaaaaaaaaaaaaaaaaaaaacaaaaaaaaaaaaaaaaaaagaggggggggaatgggggggggggaaaaaaggggtaaaaaggggcccaggggatcaatagatgattcccagcaacccccacgttttgtgaacagaggggaaaaagagcgggcccccaccaagaagggggccgacaaaacatggcaaaacgagagggttcaccctctttaattgttcgctcgtgcaaaaaactaggaactcagaccgctgtagcacagtcataatagagggagagcaccaccgagatataacaacatgatgacgaaaacgactgacaaacgagaacgagacaacataacccaga

SEQ ID NO: 380207 - DNA, 1026 bp, Homo sapiens
  misc_feature (883)..(883): n is a, c, g, or t
  misc_feature (911)..(911): n is a, c, g, or t
cgacgttcgcagcgctacccttttccgctccacggtgacctccgtgcggccgggtgcgggcggagtcttcctcgatcccgtggtgctccgcggcgcggccttgctctcttccggtcgcgggacaccgggtgtagagggcggtcgcggcgggcagtggcggcagaatgttggctaccagggtatttagcctagttggcaagcgagcaatttccacctctgtgtgtgtacgagctcatgaaagtgttgtgaagagcgaagacttttcgctcccagcttatatggatcggcgtgaccaccccttgccggaggtggcccatgtcaagcacctgtctgccagccagaaggcactgaaggagaaggagaaggcctcctggagcagcctctccatggatgagaaagtcgagttgtatcgcattaagttcaaggagagctttgctgagatgaacaggggctcgaacgagtggaagacggttgtgggcggtgccatgttcttcatcggtttcaccgcgctcgttatcatgtggcagaagcactatgtgtacggccccctcccgcaaagctttgacaaagagtgggtggccaagcagaccaagaggatgctggacatgaaggtgaaccccatccagggcttagcctccaagtgggactacgaaaagaacgagtggaagaagtgagagatgctggcctgcgcctgcacctgcgcctggctctgtcaccgccatgcaactccatgcctatttactggaaacctgttatgccaaacagttgtaccactgctaataaatgaccagtttacctgaaaaaaaaaaaaaacaaacacaaaaaaaaaaaaaaaaaaaaaaaaaaaaacaaaaaaaaaaaaaaaaaaaaaaaaaaaaaaaanaaaaaaaaaaaaaaatttaaaaattttntaaaataatataaaaggcggcaattgggggccttttggcaatttgcccttatggggggggtttacaattaatgggcgggctttttcaccgggggtctgggccctctggttccccc

SEQ ID NO: 380208 - DNA, 907 bp, Homo sapiens
cgacgttcgcagcgctacccttttccgctccacggtgacctccgtgcggccgggtgcgggcggagtcttcctcgatcccgtggtgctccgcggcgcggccttgctctcttccggtcgcgggacaccgggtgtagagggcggtcgcggcgggcagtggcggcagaatgttggctaccagggtatttagcctagttggcaagcgagcaatttccacctctgtgtgtgtacgagctcatgaaagtgttgtgaagagcgaagacttttcgctcccagcttatatggatcggcgtgaccaccccttgccggaggtggcccatgtcaagcacctgtctgccagccagaaggcactgaaggagaaggagaaggcctcctggagcagcctctccatggatgagaaagtcgagttgtatcgcattaagttcaaggagagctttgctgagatgaacaggggctcgaacgagtggaagacggttgtgggcggtgccatgttcttcatcggtttcaccgcgctcgttatcatgtggcagaagcactatgtgtacggccccctcccgcaaagctttgacaaagagtgggtggccaagcagaccaagaggatgctggacatgaaggtgaaccccatccagggcttagcctccaagtgggactacgaaaagaacgagtggaagaagtgagagatgctggcctgcgcctgcacctgcgcctggctctgtcaccgccatgcaactccatgcctatttactggaaacctgttatgccaaacagttgtaccactgctaataaatgaccagtttacctgtaaataattctataaatctgatgaagaccctaagtgggggcccggcccccaatttcacccttttgggaactcgaattcccatttccctggcccccgtttatacaaatg

SEQ ID NO: 380209 - DNA, 2439 bp, Homo sapiens
  misc_feature (52)..(52): n is a, c, g, or t
  misc_feature (82)..(82): n is a, c, g, or t
  misc_feature (189)..(189): n is a, c, g, or t
  misc_feature (360)..(360): n is a, c, g, or t
  misc_feature (456)..(456): n is a, c, g, or t
  misc_feature (556)..(556): n is a, c, g, or t
  misc_feature (672)..(672): n is a, c, g, or t
  misc_feature (850)..(850): n is a, c, g, or t
  misc_feature (944)..(944): n is a, c, g, or t
  misc_feature (966)..(966): n is a, c, g, or t
  misc_feature (1086)..(1086): n is a, c, g, or t
  misc_feature (1125)..(1125): n is a, c, g, or t
  misc_feature (1147)..(1147): n is a, c, g, or t
  misc_feature (1277)..(1277): n is a, c, g, or t
  misc_feature (1324)..(1324): n is a, c, g, or t
  misc_feature (1431)..(1431): n is a, c, g, or t
  misc_feature (1453)..(1453): n is a, c, g, or t
  misc_feature (1870)..(1870): n is a, c, g, or t
gttctagaacattctcatcacccatatttacatttatttttaataactctcntgtgtaagctgagtgttttaaactttaganacttctggggggtgctgaacttgataaaaatattcagtatacaagtgttctttatagttcactcatcattttcatagaattagggttttaaaattagaaagtaattnaggccatttccatctcctgtccctcaaatcccagctcagttttgggatgaggtgtcaagtataagtttgtaagtatgccagtcatttgcacggctaagagaaacatctagagaagtctatatacgacttgcttaaagctgaatgttgatttactgttcacatgatttgggngattttagtcactgggactgagctaatggagttgaagcattgttgcgggcattgtacctccagaccagtgtgtaatacaaagagttcttgcagacntaggacagaattggagaaacagcttctaacagtgggaagactctcagtacaaccaagctattccttacctttctgatttctgaacttttttccatgtganacctgctgctttgaaggcactaaaataacagaagcagatagagcagaaatcctcactcagatcttcctccttcctacctgtataacagtttgtggcttgccttgtctgttttgtgngtttcgttacgcgtatgtgagtatgtgcacgtgatttccagaaaggagaagcgcacgatactgcccgtgctctgtgactcctgagtgcatgcttcctctgcatttgggctcctaggtcggcctcgtcctgtggacgttgccccttgtttcgtgccatccacacattcctgatgccccnctgctctactctttctccagagtactttttccaaacatgtgatttgcacatttgttatgtttattgtttgttttccacttctagaagtgtgccnctaggcaggaatgtttgatttnttcactgatgatcccagatctctagaaccctgccttgcctgtagagggtgcttggtaaatgtgctctgaatgaatggctccatgatcctcgtttctaagagctagcacgatttctcactnagtcctggttggacacaggttccctggaacagtgctgtngtggttatcttctcacgtgtcnttgtttctgaacttgaaacgctttgagttttttattgtttttgttcttcctcattagtttgagtcccttgcagataggctttcattttgtccagtcacctgttcagggagccctgagggccttggcccangtctgcaggtaactggtttttttatttttatttttttattttgagangaagtctcgctctgtcaccaggctggagtgcagcggtgcgatctcagctcactgcaacctccgcctcctgcgttcaagcgattctcctgcctcagccttccgagtanctgggactataggcacgtgccnccacgcccggctaattttttgtatttttagtagagacggggtttcaccatattagccaggatggtctcgatctcctgacctcgtgatccgcctgcctgggcctcccaaagtgctgggattacaggtgtgagccaccgcgcccagccctgcaggtaactgttaatgtaggaagtgctgcctctgggcaccttggccccagggttcattagcagttgcccctggtgggtttttgttggctgtgatgagaagtgcttctgttccccctccaccacactcctgcaactgtttaaacagtggctgtgaccccctgagatgatccagggtttcaaggcgtgcacatgtctgtgtttcggttttcagaagtatcaccttggggtgactctcaacctacatggattttcaaagatttattcaatntgtttttcagaaagtgttgtgaagagcgaagacttttcgctcccagcttatatggatcggcgtgaccaccccttgccggaggtggcccatgtcaagcacctgtctgccagccagaaggcactgaaggagaaggagaaggcctcctggagcagcctctccatggatgagaaagtcgagttgtatcgcattaagttcaaggagagctttgctgagatgaacaggggctcgaacgagtggaagacggttgtgggcggtgccatgttcttcatcggtttcaccgcgctcgttatcatgtggcagaagcactatgtgtacggccccctcccgcaaagctttgacaaagagtgggtggccaagcagaccaagaggatgctggacatgaaggtgaaccccatccagggcttagcctccaagtgggactacgaaaagaacgagtggaagaagtgagagatgctggcctgcgcctgcacctgcgcctggctctgtcaccgccatgcaactccatgcctatttactggaaacctgttatgccaaacagttgtaccactgctaataaatgaccagtttac

SEQ ID NO: 380210 - DNA, 710 bp, Homo sapiens
  misc_feature (675)..(675): n is a, c, g, or t
cgacgttcgcagcgctacccttttccgctccacggtgacctccgtgcggccgggtgcgggcggagtcttcctcgatcccgtggtgctccgcggcgcggccttgctctcttccggtcgcgggacaccgggtgtagagggcggtcgcggcgggcagtggcggcagaatgttggctaccagggtatttagcctagttggcaagcgagcaatttccacctctgtgtgtgtacgagctcatgaaagtgttgtgaagagcgaagacttttcgctcccagcttatatggatcggcgtgaccaccccttgccggaggtggcccatgtcaagcacctgtctgccagccagaaggcactgaaggagaaggagaaggcctcctggagcagcctctccatggatgagaaagtcgagttgtatcgcattaagttcaaggagagctttgctgagatgaacaggggctcgaacgagtggaagacggttgtgggcggtgccatgttcttcatcggtttcaccgcgctcgttatcatgtggcagaagcactatgtgtacggccccctcccgcaaagctttgacaaagagtgggtggccaagcagaccaagaggatgctggacatgaaggtgaaccccatccagggcttagcctccaagtgggactacgaaaagaacgagtggaagaagttgnagaaattgcttgggccttgcggccttgcaccttgc

SEQ ID NO: 380211 - DNA, 1193 bp, Homo sapiens
cgacgttcgcagcgctacccttttccgctccacggtgacctccgtgcggccgggtgcgggcggagtcttcctcgatcccgtggtgctccgcggcgcggccttgctctcttccggtcgcgggacaccgggtgtagagggcggtcgcggcgggcagtggcggcaggtgtacatttttatctttcagaatgttggctaccagggtatttagcctagttggcaagcgagcaatttccacctctgtgtgtgtacgagctcatgaaagtgttgtgaagagcgaagacttttcgctcccagcttatatggatcggcgtgaccaccccttgccggaggtggcccatgtcaagcacctgtctgccagccagaaggcactgaaggagaaggagaaggcctcctggagcagcctctccatggatgagaaagtcgagttgtatcgcattaagttcaaggagagctttgctgagatgaacaggggctcgaacgagtggaagacggttgtgggcggtgccatgttcttcatcggtttcaccgcgctcgttatcatgtggcagaagcactatgtgtacggccccctcccgcaaagctttgacaaagagtgggtggccaagcagaccaagaggatgctggacatgaaggtgaaccccatccagggcttagcctccaagtgggactacgaaaagaacgagtggaagaagtgagagatgctggcctgcgcctgcacctgcgcctggctctgtcaccgccatgcaactccatgcctatttactggaaacctgttatgccaaacagttgtaccactgctaataaatgaccagtttacctgaaaaaaaaaaaaaacaaacacaaaaaaaaaaaaaaaaaaaaaaaaaaaaacaaaaaaaaaaaaaaaaaaagaggggggggaatgggggggggggaaaaaaggggtaaaaaggggcccaggggatcaatagatgattcccagcaacccccacgttttgtgaacagaggggaaaaagagcgggcccccaccaagaagggggccgacaaaacatggcaaaacgagagggttcaccctctttaattgttcgctcgtgcaaaaaactaggaactcagaccgctgtagcacagtcataatagagggagagcaccaccgagatataacaacatgatgacgaaaacgactgacaaacgagaacgagacaacataacccaga

SEQ ID NO: 380212 - DNA, 1700 bp, Homo sapiens
cgacgttcgcagcgctacccttttccgctccacggtgacctccgtgcggccgggtgcgggcggagtcttcctcgatcccgtggtgctccgcggcgcggccttgctctcttccggtcgcgggacaccgggtgtagagggcggtcgcggcgggcagtggcggcagaatgttggctaccagggtatttagcctagttggcaagcgagcaatttccacctctgtgtgtgtacgagctcatgaaagtgttgtgaagagcgaagacttttcgctcccagcttatatggatcggcgtgaccaccccttgccggaggtggcccatgtcaagcacctgtctgccagccagaaggcactgaaggagaaggagaaggcctcctggagcagcctctccatggatgagaaagtcgagttgtatcgcattaagttcaaggagagctttgctgagatgaacaggggctcgaacgagtggaagacggttgtgggcggtgccatgttcttcatcggtttcaccgcgctcgttatcatgtggcagaagcactatggtgagtagagagggaggaaggcatgggcgcctggactggggctccagcctgcagtgcccattggtgggctgtgggggacctccataccttgaggctatgagatagggactgcattccagagttcatctcaggattgtttccaggccttggtgacctggagaactgaagtcgtgggaggttagtttataagccagcatctgattattcatagccatgcttgttgggtggtgaaataccctaactactttgtacagcacaccacgttttcagtagcaatttatgtgctcaccagtcacttagcaaaagatgacttcgtgaaggttcgagcaaggataaggggactcattcatttaatgactgtctcgactgttgtgaggactgcatctcaacagccagcatctgggggtcccgacctgatagtttgtgtgtgggcattgccgggttgctcgctcgtggtaatgactcttccccgaggttctttctgtccaggcagaacaggcatttttgcattctgaataggtatattctcgtacttttggtttgaatgtggatgtgggttaataacgacccgaatctatttgatcttccaggtcaccttgggctctgtttgtcagatcctgttatccatagcctttagagaggaccttctgcttttagcttattttgttgctaactttttacaaacaaagggctaattttaaaatgtcagtgttgtcagtggtcagaaaccgtgtgtttgagcgggtgttgagtggcaggtggctctgctgacctggtggctggtgtgtcgggaggatttaacctgtgtgagggattggcctagaaacaacctgttgagatagtcttgccccataacctgtctcacaccgtagtgtacggccccctcccgcaaagctttgacaaagagtgggtggccaagcagaccaagaggatgctggacatgaaggtgaaccccatccagggcttagcctccaagtgggactacgaaaagaacgagtggaagaagtgagagatgctggcctgcgcctgcacctgcgcctggctctgtcaccgccatgcaactccatgcctatttactggaaacctgttatgccaaacagttgtaccactgctaataaatgaccagtttacctgaaaaaaaaaagtcgaaggccgaaaaaaaa

SEQ ID NO: 380213 - DNA, 617 bp, Homo sapiens
cgacgttcgcagcgctacccttttccgctccacggtgacctccgtgcggccgggtgcgggcggagtcttcctcgatcccgtggtgctccgcggcgcggccttgctctcttccggtcgcgggacaccgggtgtagagggcggtcgcggcgggcagtggcggcagaatgttggctaccagggtatttagcctagttggcaagcgagcaatttccacctctgtgtgtgtacgagctcatgaaagtgttgtgaagagcgaagacttttcgctcccagcttatatggatcggcgtgaccaccccttgccggaggtggcccatgtcaagcacctgtctgccagccagaaggcactgaaggagaaggagaaggcctcctggagcagcctctccatggatgagaaagtcgagttgtatcgcattaagttcaaggagagctttgctgagatgaacaggggctcgaacgagtggaagacggttgtgggcggtgccatgttcttcatcggtttcaccgcgctcgttatcatgtggcagaagcactatgtgtacggccccctcccgcaaagctttgacaaagagtgggtggccaagcagaccaaggagtgctgacgttggtaccgagcc

SEQ ID NO: 380214 - DNA, 1425 bp, Homo sapiens
cgacgttcgcagcgctacccttttccgctccacggtgacctccgtgcggccgggtgcgggcggagtcttcctcgatcccgtggtgctccgcggcgcggccttgctctcttccggtcgcgggacaccgggtgtagagggcggtcgcggcgggcagtggcggcagaatgttggctaccagggtatttagcctagttggcaagcgagcaatttccacctctgtgtgtgtacgagctcatgaaagtgttgtgaagagcgaagacttttcgctcccagcttatatggatcggcgtgaccaccccttgccggaggtggcccatgtcaagcacctgtctgccagccagaaggcactgaaggagaaggagaaggcctcctggagcagcctctccatggatgagaaagtcgagtgtgggtattgaagggacccacaggcgcgcccagcagctctcggaagcgtgtgtgtgacagagcctctgctcacttctgggcctactgtctagagagcagtcttgcacaggagggttgctctgctgggtttcggggtcactgtgccagggccccagtttatgtgctcaccagtcacttagctctgccagctgacaggatcttttgctgggcccccttctctgtgctgagtggaggtagcctctcagcatatctgctgggtaagacatagttaactgtaaattattgaaagaaactcagcaaaatgcatagtgtttggtatgaaaggggcagaaaaataacaagattaaatagaccctaatactgtaattcaagtaagaaataattttgcagttttaatttgcacctgaagcgaactgtatgcattttcttccttccttgccctgtcacatgcctgcgtgggcacgtgtgtgcacgtatgtgcgtgaacatgatgtggcctgggttggtgtatccttcagctctgtgtttcctccttcacaagtgtggttttggggagaagtggttgaatgttgcagaggagggagctgctgacctttgtgcctgtaaatggctgtcctctctgcccccagtgtatcgcattaagttcaaggagagctttgctgagatgaacaggggctcgaacgagtggaagacggttgtgggcggtgccatgttcttcatcggtttcaccgcgctcgttatcatgtggcagaagcactatgtgtacggccccctcccgcaaagctttgacaaagagtgggtggccaagcagaccaagaggatgctggacatgaaggtgaaccccatccagggcttagcctccaagtgggactacgaaaagaacgagtggaagaagtgagagatgctggcctgcgcctgcacctgcgcctggctctgtcaccgccatgcaactccatgcctatttactggaaacctgttatgccaaacagttgtaccactgctaataaatgaccagtttac

SEQ ID NO: 380215 - DNA, 1383 bp, Homo sapiens
cgacgttcgcagcgctacccttttccgctccacggtgacctccgtgcggccgggtgcgggcggagtcttcctcgatcccgtggtgctccgcggcgcggccttgctctcttccggtcgcgggacaccgggtgtagagggcggtcgcggcgggcagtggcggcagaatgttggctaccagggtatttagcctagttggcaagcgagcaatttccacctctgtgtgtgtacgagctcatgaaagtgttgtgaagagcgaagacttttcgctcccagcttatatggatcggcgtgaccaccccttgccggaggtggcccatgtcaagcacctgtctgccagccagaaggcactgaaggagaaggagaaggcctcctggagcagcctctccatggatgagaaagtcgagttgtatcgcattaagttcaaggagagctttgctgagatgaacaggggctcgaacgagtggaagacggttgtgggcggtgccatgttcttcatcggtttcaccgcgctcgttatcatgtggcagaagcactatggtgagtagagagggaggaaggcatgggcgcctggactggggctccagcctgcagtgcccattggtgggctgtgggggacctccataccttgaggctatgagatagggactgcattccagagttcatctcaggattgtttccaggccttggtgacctggagaactgaagtcgtgggaggttagtttataagccagcatctgattattcatagccatgcttgttgggtggtgaaataccctaactactttgtacagcacaccacgttttcagtagcaatttatgtgctcaccagtcacttagcaaaagatgacttcgtgaaggttcgagcaaggataaggggactcattcatttaatgactgtctcgactgttgtgaggactgcatctcaacagccagcatctgggggtcccgacctgatagtttgtgtgtgggcattgccgggttgctcgctcgtggtaatgactcttccccgaggttctttctgtccaggcagaacaggcatttttgcattctgaataggtatattctcgtacttttggtttgaatgtggatgtgggttaataacgacccgaatctatttgatcttccaggtcaccttgggctctgtttgtcagatcctgttatccatagcctttagagaggaaggatgctggacatgaaggtgaaccccatccagggcttagcctccaagtgggactacgaaaagaacgagtggaagaagtgagagatgctggcctgcgcctgcacctgcgcctggctctgtcaccgccatgcaactccatgcctatttactggaaacctgttatgccaaacagttgtaccactgctaataaatgaccagtttac

SEQ ID NO: 380216 - DNA, 1580 bp, Homo sapiens
ggtgagacaggaggtggacgagggcggcgggcagtggcggcagaatgttggctaccagggtatttagcctagttggcaagcgagcaatttccacctctgtgtgtgtacgagctcatgaaagtgttgtgaagagcgaagacttttcgctcccagcttatatggatcggcgtgaccaccccttgccggaggtggcccatgtcaagcacctgtctgccagccagaaggcactgaaggagaaggagaaggcctcctggagcagcctctccatggatgagaaagtcgagttgtatcgcattaagttcaaggagagctttgctgagatgaacaggggctcgaacgagtggaagacggttgtgggcggtgccatgttcttcatcggtttcaccgcgctcgttatcatgtggcagaagcactatggtgagtagagagggaggaaggcatgggcgcctggactggggctccagcctgcagtgcccattggtgggctgtgggggacctccataccttgaggctatgagatagggactgcattccagagttcatctcaggattgtttccaggccttggtgacctggagaactgaagtcgtgggaggttagtttataagccagcatctgattattcatagccatgcttgttgggtggtgaaataccctaactactttgtacagcacaccacgttttcagtagcaatttatgtgctcaccagtcacttagcaaaagatgacttcgtgaaggttcgagcaaggataaggggactcattcatttaatgactgtctcgactgttgtgaggactgcatctcaacagccagcatctgggggtcccgacctgatagtttgtgtgtgggcattgccgggttgctcgctcgtggtaatgactcttccccgaggttctttctgtccaggcagaacaggcatttttgcattctgaataggtatattctcgtacttttggtttgaatgtggatgtgggttaataacgacccgaatctatttgatcttccaggtcaccttgggctctgtttgtcagatcctgttatccatagcctttagagaggaccttctgcttttagcttattttgttgctaactttttacaaacaaagggctaattttaaaatgtcagtgttgtcagtggtcagaaaccgtgtgtttgagcgggtgttgagtggcaggtggctctgctgacctggtggctggtgtgtcgggaggatttaacctgtgtgagggattggcctagaaacaacctgttgagatagtcttgccccataacctgtctcacaccgtagtgtacggccccctcccgcaaagctttgacaaagagtgggtggccaagcagaccaagaggatgctggacatgaaggtgaaccccatccagggcttagcctccaagtgggactacgaaaagaacgagtggaagaagtgagagatgctggcctgcgcctgcacctgcgcctggctctgtcaccgccatgcaactccatgcctatttactggaaacctgttatgccaaacagttgtaccactgctaataaatgaccagtttacctgaaaaaaaaaagtcgaaggccgaaaaaaaa

SEQ ID NO: 380217 - DNA, 627 bp, Homo sapiens
cgacgttcgcagcgctacccttttccgctccacggtgacctccgtgcggccgggtgcgggcggagtcttcctcgatcccgtggtgctccgcggcgcggccttgctctcttccggtcgcgggacaccgggtgtagagggcggtcgcggcgggcagtggcggcagaatgttggctaccagggtatttagcctagttggcaagcgagcaatttccacctctgtgtgtgtacgagctcatgaaagtgttgtgaagagcgaagacttttcgctcccagcttatatggatcggcgtgaccaccccttgccggaggtggcccatgtcaagcacctgtctgccagccagaaggcactgaaggagaaggagaaggcctcctggagcagcctctccatggatgagaaagtcgagttgtatcgcattaagttcaaggagagctttgctgagatgaacaggggctcgaacgagtggaagacggttgtgggcggtgccatgttcttcatcggtttcaccgcgctcgttatcatgtggcagaagcactatcgacatgaatcatgtcggtgctttcatgccaccgtcctgctgtctatatcaaccaacaccttttctggggatgaagggcctcgacattgaa

SEQ ID NO: 380218 - DNA, 1278 bp, Homo sapiens
cgacgttcgcagcgctacccttttccgctccacggtgacctccgtgcggccgggtgcgggcggagtcttcctcgatcccgtggtgctccgcggcgcggccttgctctcttccggtcgcgggacaccgggtgtagagggcggtcgcggcgggcagtggcggcagaatgttggctaccagggtatttagcctagttggcaagcgagcaatttccacctctgtgtgtgtacgagctcatgaaagtgttgtgaagagcgaagacttttcgctcccagcttatatggatcggcgtgaccaccccttgccggaggtggcccatgtcaagcacctgtctgccagccagaaggcactgaaggagaaggagaaggcctcctggagcagcctctccatggatgagaaagtcgagtgtgggtattgaagggacccacaggcgcgcccagcagctctcggaagcgtgtgtgtgacagagcctctgctcacttctgggcctactgtctagagagcagtcttgcacaggagggttgctctgctgggtttcggggtcactgtgccagggccccagtttatgtgctcaccagtcacttagctctgccagctgacaggatcttttgctgggcccccttctctgtgctgagtggaggtagcctctcagcatatctgctgggtaagacatagttaactgtaaattattgaaagaaactcagcaaaatgcatagtgtttggtatgaaaggggcagaaaaataacaagattaaatagaccctaatactgtaattcaagtaagaaataattttgcagttttaatttgcacctgaagcgaactgtatgcattttcttccttccttgccctgtcacatgcctgcgtgggcacgtgtgtgcacgtatgtgcgtgaacatgatgtggcctgggttggtgtatccttcagctctgtgtttcctccttcacaagtgtggttttggggagaagtggttgaatgttgcagaggagggagctgctgacctttgtgcctgtaaatggctgtcctctctgcccccagtgtatcgcattaagttcaaggagagctttgctgagatgaacaggggctcgaacgagtggaagacggttgtgggcggtgccatgttcttcatcggtttcaccgcgctcgttatcatgtggcagaagcactatggtgagtatagagggcagaacgcttggtcctctggacatggcgttcatcctagacttgcccatctgcgggcctcttcggaatctccgtcctctcgggggtctatccgtagtat

SEQ ID NO: 380219 - DNA, 1376 bp, Homo sapiens
cgacgttcgcagcgctacccttttccgctccacggtgacctccgtgcggccgggtgcgggcggagtcttcctcgatcccgtggtgctccgcggcgcggccttgctctcttccggtcgcgggacaccgggtgtagagggcggtcgcggcgggcagtggcggcagaatgttggctaccagggtatttagcctagttggcaagcgagcaatttccacctctgtgtgtgtacgagctcatgaaagtgttgtgaagagcgaagacttttcgctcccagcttatatggatcggcgtgaccaccccttgccggaggtggcccatgtcaagcacctgtctgccagccagaaggcactgaaggagaaggagaaggcctcctggagcagcctctccatggatgagaaagtcgagtgtgggtattgaagggacccacaggcgcgcccagcagctctcggaagcgtgtgtgtgacagagcctctgctcacttctgggcctactgtctagagagcagtcttgcacaggagggttgctctgctgggtttcggggtcactgtgccagggccccagtttatgtgctcaccagtcacttagctctgccagctgacaggatcttttgctgggcccccttctctgtgctgagtggaggtagcctctcagcatatctgctgggtaagacatagttaactgtaaattattgaaagaaactcagcaaaatgcatagtgtttggtatgaaaggggcagaaaaataacaagattaaatagaccctaatactgtaattcaagtaagaaataattttgcagttttaatttgcacctgaagcgaactgtatgcattttcttccttccttgccctgtcacatgcctgcgtgggcacgtgtgtgcacgtatgtgcgtgaacatgatgtggcctgggttggtgtatccttcagctctgtgtttcctccttcacaagtgtggttttggggagaagtggttgaatgctagaaacaactaacatgatgacttacaggtatcatcatacttaatgtctgtagactgaaagctttccatcttaataacagagcacgacacggatgctatcagcacttctattcagcactatattgcttgttctaggtgccatgagttatatggaatacagacgcgctgtttatatgatacagtaactctatatttaccgatgtcacgaacttacctgcctaataatcctacgccattcacaccgattgtcagtaacctatgagatcagcaatcaggacgtagcatgcatatgaccttacaataggtcttatctctatatggctgatacgcataatctcggatttgacattatcactggttcttcttatctttgcttatcactactcatttacctactcccg

SEQ ID NO: 380220 - DNA, 170 bp, Homo sapiens
gcttagcctccaagtgggactacgaaaagaacgagtggaagaagtgagagatgctggcctgcgcctgcacctgcgcctggctctgtcaccgccatgcaactccatgcctatttactggaaacctgttatgccaaacagttgtaccactgctaataaatgaccagtttacc

SEQ ID NO: 380221 - DNA, 676 bp, Homo sapiens
ggtgagacaggaggtggacgagggcggcgggcagtggcggcagaatgttggctaccagggtatttagcctagttggcaagcgagcaatttccacctctgtgtgtgtacgagctcatgaaagtgttgtgaagagcgaagacttttcgctcccagcttatatggatcggcgtgaccaccccttgccggaggtggcccatgtcaagcacctgtctgccagccagaaggcactgaaggagaaggagaaggcctcctggagcagcctctccatggatgagaaagtcgagttgtatcgcattaagttcaaggagagctttgctgagatgaacaggggctcgaacgagtggaagacggttgtgggcggtgccatgttcttcatcggtttcaccgcgctcgttatcatgtggcagaagcactatgtgtacggccccctcccgcaaagctttgacaaagagtgggtggccaagcagaccaagaggatgctggacatgaaggtgaaccccatccagggcttagcctccaagtgggactacgaaaagaacgagtggaagaagtgagagatgctggcctgcgcctgcacctgcgcctggctctgtcaccgccatgcaactccatgcctatttactggaaacctgttatgccaaacagttgtaccactgctaataaatgaccagtttac

SEQ ID NO: 380222 - DNA, 956 bp, Homo sapiens
  misc_feature (810)..(810): n is a, c, g, or t
  misc_feature (812)..(812): n is a, c, g, or t
  misc_feature (814)..(814): n is a, c, g, or t
cgacgttcgcagcgctacccttttccgctccacggtgacctccgtgcggccgggtgcgggcggagtcttcctcgatcccgtggtgctccgcggcgcggccttgctctcttccggtcgcgggacaccgggtgtagagggcggtcgcggcgggcagtggcggcagaatgttggctaccagggtatttagcctagttggcaagcgagcaatttccacctctgtgtgtgtacgagctcatgaaagtgttgtgaagagcgaagacttttcgctcccagcttatatggatcggcgtgaccaccccttgccggaggtggcccatgtcaagcacctgtctgccagccagaaggcactgaaggagaaggagaaggcctcctggagcagcctctccatggatgagaaagtcgagttgtatcgcattaagttcaaggagagctttgctgagatgaacaggggctcgaacgagtggaagacggttgtgggcggtgccatgttcttcatcggtttcaccgcgctcgttatcatgtggcagaagcactatgtgtacggccccctcccgcaaagctttgacaaagagtgggtggccaagcagaccaagaggatgctggacatgaaggtgaaccccatccagggcttagcctccaagtgggactacgaaaagaacgagtggaagaagtgagagatgctggcctgcgcctgcacctgcgcctggctctgtcaccgccatgcaactccatgcctatttactggaaacctgttatgccaaacagttgtaccactgctaataaatgaccagtttacctgaaaaaaaaaanananaaaaaaaaaactccggggcttttttgggggggggaaaagggtttaaatgggccctggcaccagggtttccggacccgctttttgtaaaagggggaaatggggggcccctagggggcgggtatatcgaagagccgggtcctga

SEQ ID NO: 380223 - DNA, 176 bp, Homo sapiens
cgtccgccacagcttctcattatgataactctcattttcttagtcccacttggaggctaggatgctggacatgaaggtgaaccccatccagggcttagcctccaagtgggactacgaaaagaacgagtggaagaagtgagagaagctgtgcggccgagaagctgtgcgaccggtag

SEQ ID NO: 380224 - DNA, 1144 bp, Homo sapiens
cgacgttcgcagcgctacccttttccgctccacggtgacctccgtgcggccgggtgcgggcggagtcttcctcgatcccgtggtgctccgcggcgcggccttgctctcttccggtcgcgggacaccgggtgtagagggcggtcgcggcgggcagtggcggcagaatgttggctaccagggtatttagcctagttggcaagcgagcaatttccacctctgtgtgtgtacgagctcatgaaagtgttgtgaagagcgaagacttttcgctcccagcttatatggatcggcgtgaccaccccttgccggaggtggcccatgtcaagcacctgtctgccagccagaaggcactgaaggagaaggagaaggcctcctggagcagcctctccatggatgagaaagtcgagttgtatcgcattaagttcaaggagagctttgctgagatgaacaggggctcgaacgagtggaagacggttgtgggcggtgccatgttcttcatcggtttcaccgcgctcgttatcatgtggcagaagcactatgtgtacggccccctcccgcaaagctttgacaaagagtgggtggccaagcagaccaagaggatgctggacatgaaggtgaaccccatccagggcttagcctccaagtgggactacgaaaagaacgagtggaagaagtgagagatgctggcctgcgcctgcacctgcgcctggctctgtcaccgccatgcaactccatgcctatttactggaaacctgttatgccaaacagttgtaccactgctaataaatgaccagtttacctggcctagttggcaagcgagcaattttccacctctgtgtgtgtacgagctcatgaaagtgtgtgaagagcgaagacttttcgctcccagcttatatggatcggcgtgaccaccccttgccggaggtggccatgtcaaagcacctgtctgaccaggcagaacggcactgaaggagacaggagaaggactccctggagcaggcctgcccatggcatgacgacacgccacagagggcatccgcatacagcgtccaccggaggagcgagcagagatgaccgaggggcgccaacagtgggaaaacgcagtgagcagaggcaggcgctcaacgggacacgggccccagccagc

SEQ ID NO: 380225 - DNA, 919 bp, Homo sapiens
cgacgttcgcagcgctacccttttccgctccacggtgacctccgtgcggccgggtgcgggcggagtcttcctcgatcccgtggtgctccgcggcgcggccttgctctcttccggtcgcgggacaccgggtgtagagggcggtcgcggcgggcagtggcggcagaatgttggctaccagggtatttagcctagttggcaagcgagcaatttccacctctgtgtgtgtacgagctcatgtagagacggggtttcaccatattagccaggatggtctcgatctcctgacctcgtgatccgcctgcctgggcctcccaaagtgctgggattacaggtgtgagccaccgcgcccagccctgcaggaaagtgttgtgaagagcgaagacttttcgctcccagcttatatggatcggcgtgaccaccccttgccggaggtggcccatgtcaagcacctgtctgccagccagaaggcactgaaggagaaggagaaggcctcctggagcagcctctccatggatgagaaagtcgagttgtatcgcattaagttcaaggagagctttgctgagatgaacaggggctcgaacgagtggaagacggttgtgggcggtgccatgttcttcatcggtttcaccgcgctcgttatcatgtggcagaagcactatgtgtacggccccctcccgcaaagctttgacaaagagtgggtggccaagcagaccaagaggatgctggacatgaaggtgaaccccatccagggcttagcctccaagtgggactacgaaaagaacgagtggaagaagtgagagatgctggcctgcgcctgcacctgcgcctggctctgtcaccgccatgcaactccatgcctatttactggaaacctgttatgccaaacagttgtaccactgctaataaatgaccagtttac

SEQ ID NO: 380226 - DNA, 726 bp, Homo sapiens
tggacgaacgtacgaacgcaccttccatggccgtgtaatccggacaggcgatgcagcggcgggtggtgggcgaaattgtgcggagcttcgagaggaagggcttcaagttggtggtgctgaagctggtgcaggtgggggcgcggactccgaggagctgctgcgtgagcattactccgagctacgtgttcgggcacgtggacggacacgtatggatcggcgtgaccaccccttgccggaggtggcccatgtcaagcacctgtctgccagccagaaggcactgaaggagaaggagaaggcctcctggagcagcctctccatggatgagaaagtcgagttgtatcgcattaagttcaaggagagctttgctgagatgaacaggggctcgaacgagtggaagacggttgtgggcggtgccatgttcttcatcggtttcaccgcgctcgttatcatgtggcagaagcactatgtgtacggccccctcccgcaaagctttgacaaagagtgggtggccaagcagaccaagaggatgctggacatgaaggtgaaccccatccagggcttagcctccaagtgggactacgaaaagaacgagtggaagaagtgagagatgctggcctgcgcctgcacctgcgcctggctctgtcaccgccatgcaactccatgcctatttactggaaacctgttatgccaaacagttgtaccactgctaataaatgaccagtttac

SEQ ID NO: 380227 - DNA, 1110 bp, Homo sapiens
cgacgttcgcagcgctacccttttccgctccacggtgacctccgtgcggccgggtgcgggcggagtcttcctcgatcccgtggtgctccgcggcgcggccttgctctcttccggtcgcgggacaccgggtgtagagggcggtcgcggcgggcagtggcggcagaatgttggctaccagggtatttagcctagttggcaagcgagcaatttccacctctgtgtgtgtacgagctcatgaaagtgttgtgaagagcgaagacttttcgctcccagcttatatggatcggcgtgaccaccccttgccggaggtggcccatgtcaagcacctgtctgccagccagaaggcactgaaggagaaggagaaggcctcctggagcagcctctccatggatgagaaagtcgagttgtatcgcattaagttcaaggagagctttgctgagatgaacaggggctcgaacgagtggaagacggttgtgggcggtgccatgttcttcatcggtttcaccgcgctcgttatcatgtggcagaagcactatggtcaccttgggctctgtttgtcagatcctgttatccatagcctttagagaggaccttctgcttttagcttattttgttgctaactttttacaaacaaagggctaattttaaaatgtcagtgttgtcagtggtcagaaaccgtgtgtttgagcgggtgttgagtggcaggtggctctgctgacctggtggctggtgtgtcgggaggatttaacctgtgtgagggattggcctagaaacaacctgttgagatagtcttgccccataacctgtctcacaccgtagtgtacggccccctcccgcaaagctttgacaaagagtgggtggccaagcagaccaagaggatgctggacatgaaggtgaaccccatccagggcttagcctccaagtgggactacgaaaagaacgagtggaagaagtgagagatgctggcctgcgcctgcacctgcgcctggctctgtcaccgccatgcaactccatgcctatttactggaaacctgttatgccaaacagttgtaccactgctaataaatgaccagtttacctgaaaaaaaaaagtcgaaggccgaaaaaaaa

SEQ ID NO: 380228 - DNA, 2329 bp, Homo sapiens
cgacgttcgcagcgctacccttttccgctccacggtgacctccgtgcggccgggtgcgggcggagtcttcctcgatcccgtggtgctccgcggcgcggccttgctctcttccggtcgcgggacaccgggtgtagagggcggtcgcggcgggcagtggcggcagaatgttggctaccagggtatttagcctagttggcaagcgagcaatttccacctctgtgtgtgtacgagctcatgaaagtgttgtgaagagcgaagacttttcgctcccagcttatatggatcggcgtgaccaccccttgccggaggtggcccatgtcaagcacctgtctgccagccagaaggcactgaaggagaaggagaaggcctcctggagcagcctctccatggatgagaaagtcgagtgtgggtattgaagggacccacaggcgcgcccagcagctctcggaagcgtgtgtgtgacagagcctctgctcacttctgggcctactgtctagagagcagtcttgcacaggagggttgctctgctgggtttcggggtcactgtgccagggccccagtttatgtgctcaccagtcacttagctctgccagctgacaggatcttttgctgggcccccttctctgtgctgagtggaggtagcctctcagcatatctgctgggtaagacatagttaactgtaaattattgaaagaaactcagcaaaatgcatagtgtttggtatgaaaggggcagaaaaataacaagattaaatagaccctaatactgtaattcaagtaagaaataattttgcagttttaatttgcacctgaagcgaactgtatgcattttcttccttccttgccctgtcacatgcctgcgtgggcacgtgtgtgcacgtatgtgcgtgaacatgatgtggcctgggttggtgtatccttcagctctgtgtttcctccttcacaagtgtggttttggggagaagtggttgaatgttgcagaggagggagctgctgacctttgtgcctgtaaatggctgtcctctctgcccccagtgtatcgcattaagttcaaggagagctttgctgagatgaacaggggctcgaacgagtggaagacggttgtgggcggtgccatgttcttcatcggtttcaccgcgctcgttatcatgtggcagaagcactatggtgagtagagagggaggaaggcatgggcgcctggactggggctccagcctgcagtgcccattggtgggctgtgggggacctccataccttgaggctatgagatagggactgcattccagagttcatctcaggattgtttccaggccttggtgacctggagaactgaagtcgtgggaggttagtttataagccagcatctgattattcatagccatgcttgttgggtggtgaaataccctaactactttgtacagcacaccacgttttcagtagcaatttatgtgctcaccagtcacttagcaaaagatgacttcgtgaaggttcgagcaaggataaggggactcattcatttaatgactgtctcgactgttgtgaggactgcatctcaacagccagcatctgggggtcccgacctgatagtttgtgtgtgggcattgccgggttgctcgctcgtggtaatgactcttccccgaggttctttctgtccaggcagaacaggcatttttgcattctgaataggtatattctcgtacttttggtttgaatgtggatgtgggttaataacgacccgaatctatttgatcttccaggtcaccttgggctctgtttgtcagatcctgttatccatagcctttagagaggaccttctgcttttagcttattttgttgctaactttttacaaacaaagggctaattttaaaatgtcagtgttgtcagtggtcagaaaccgtgtgtttgagcgggtgttgagtggcaggtggctctgctgacctggtggctggtgtgtcgggaggatttaacctgtgtgagggattggcctagaaacaacctgttgagatagtcttgccccataacctgtctcacaccgtagtgtacggccccctcccgcaaagctttgacaaagagtgggtggccaagcagaccaagaggatgctggacatgaaggtgaaccccatccagggcttagcctccaagtgggactacgaaaagaacgagtggaagaagtgagagatgctggcctgcgcctgcacctgcgcctggctctgtcaccgccatgcaactccatgcctatttactggaaacctgttatgccaaacagttgtaccactgctaataaatgaccagtttacctgaaaaaaaaaagtcgaaggccgaaaaaaaa

SEQ ID NO: 380229 - DNA, 773 bp, Homo sapiens
cgacgttcgcagcgctacccttttccgctccacggtgacctccgtgcggccgggtgcgggcggagtcttcctcgatcccgtggtgctccgcggcgcggccttgctctcttccggtcgcgggacaccgggtgtagagggcggtcgcggcgggcagtggcggcagaatgttggctaccagggtatttagcctagttggcaagcgagcaatttccacctctgtgtgtgtacgagctcatgaaagtgttgtgaagagcgaagacttttcgctcccagcttatatggatcggcgtgaccaccccttgccggaggtggcccatgtcaagcacctgtctgccagccagaaggcactgaaggagaaggagaaggcctcctggagcagcctctccatggatgagaaagtcgagttgtatcgcattaagttcaaggagagctttgctgagatgaacaggggctcgaacgagtggaagacggttgtgggcggtgccatgttcttcatcggtttcaccgcgctcgttatcatgtggcagaagcactatctttgacaaagagtgggtggccaagcagaccaagaggatgctggacatgaaggtgaaccccatccagggcttagcctccaagtgggactacgaaaagaacgagtggaagaagtgagagatgctggcctgcgcctgcacctgcgcctggctctgtcaccgccatgcaactccatgcctatttactggaaacctgttatgccaaacagttgtaccactgctaataaatgaccagtttac

SEQ ID NO: 380230 - DNA, 707 bp, Homo sapiens
cgacgttcgcagcgctacccttttccgctccacggtgacctccgtgcggccgggtgcgggcggagtcttcctcgatcccgtggtgctccgcggcgcggccttgctctcttccggtcgcgggacaccgggtgtagagggcggtcgcggcgggcagtggcggcagaatgttggctaccagggtatttagcctagttggcaagcgagcaatttccacctctgtgtgtgtacgagctcatgaaagtgttgtgaagagcgaagacttttcgctcccagcttatatggatcggcgtgaccaccccttgccggaggtggcccatgtcaagcacctgtctgccagccagaaggcactgaaggagaaggagaaggcctcctggagcagcctctccatggatgagaaagtcgagttgtatcgcattaagttcaaggagagctttgctgagatgaacaggggctcgaacgagtggaagacggttgtgggcggtgccatgttcttcatcggtttcaccgcgctcgttatcatgtggcagaagcactatgggcttagcctccaagtgggactacgaaaagaacgagtggaagaagtgagagatgctggcctgcgcctgcacctgcgcctggctctgtcaccgccatgcaactccatgcctatttactggaaacctgttatgccaaacagttgtaccactgctaataaatgaccagtttac

SEQ ID NO: 380231 - DNA, 1427 bp, Homo sapiens
cgacgttcgcagcgctacccttttccgctccacggtgacctccgtgcggccgggtgcgggcggagtcttcctcgatcccgtggtgctccgcggcgcggccttgctctcttccggtcgcgggacaccgggtgtagagggcggtcgcggcgggcagtggcggcagaatgttggctaccagggtatttagcctagttggcaagcgagcaatttccacctctgtgtgtgtacgagctcatgaaagtgttgtgaagagcgaagacttttcgctcccagcttatatggatcggcgtgaccaccccttgccggaggtggcccatgtcaagcacctgtctgccagccagaaggcactgaaggagaaggagaaggcctcctggagcagcctctccatggatgagaaagtcgagtgtgggtattgaagggacccacaggcgcgcccagcagctctcggaagcgtgtgtgtgacagagcctctgctcacttctgggcctactgtctagagagcagtcttgcacaggagggttgctctgctgggtttcggggtcactgtgccagggccccagtttatgtgctcaccagtcacttagctctgccagctgacaggatcttttgctgggcccccttctctgtgctgagtggaggtagcctctcagcatatctgctgggtaagacatagttaactgtaaattattgaaagaaactcagcaaaatgcatagtgtttggtatgaaaggggcagaaaaataacaagattaaatagaccctaatactgtaattcaagtaagaaataattttgcagttttaatttgcacctgaagcgaactgtatgcattttcttccttccttgccctgtcacatgcctgcgtgggcacgtgtgtgcacgtatgtgcgtgaacatgatgtggcctgggttggtgtatccttcagctctgtgtttcctccttcacaagtgtggttttggggagaagtggttgaatgttgcagaggagggagctgctgacctttgtgcctgtaaatggctgtcctctctgcccccagtgtatcgcattaagttcaaggagagctttgctgagatgaacaggggctcgaacgagtggaagacggttgtgggcggtgccatgttcttcatcggtttcaccgcgctcgttatcatgtggcagaagcactatgtgttaccggcccccttcccgcaaactttgacaaagagtgggtggccaagcagaccaagaggatgctggacatgaaggtgaaccccatccagggcttagcctccaagtgggactacgaaaagaacgagtggaagaagtgagagatgctggcctgcgcctgcacctgcgcctggctctgtcaccgccatgcaactccatgcctatttactggaaacctgttatgccaaacagttgtaccactgctaataaatgaccagtttac

SEQ ID NO: 380232 - DNA, 430 bp, Homo sapiens
cgacgttcgcagcgctacccttttccgctccacggtgacctccgtgcggccgggtgcgggcggagtcttcctcgatcccgtggtgctccgcggcgcggccttgctctcttccggtcgcgggacaccgggtgtagagggcggtcgcggcgggcagtggcggcagaatgttggctaccagggtatttagcctagttggcaagcgagcaatttccacctctgtgtgtgtacgagctcatgaaagtgttgtgaagagcgaagacttttcgctcccagcttatatggatcggcgtgaccaccccttgccggaggtggcccatgtcaagcacctgtctgccagccagaaggcactgaaggagaaggagaaggcctcctggagcagcctctccatggagacctgccaatttatgtcaagactgtatttgcaaaggga

SEQ ID NO: 380233 - DNA, 454 bp, Homo sapiens
attcagccccctacaggcagcgatcctgcactgtgcttgtcacccacccccatgcctgaccctgaggtggggaagcctcagacacaggcactgtcaagtcaaggaagggcgtggctcccgggaccccttgtaactggaggccgagtctgtctgaggtatttctattgtagaaaatagaaataagcctatcccctcaagtaagtgtctgtgtgtgtgtgtgtgtgtgtgtgtgtgtgtgtgtgtttactcaataagatcagatggcagtttgttcagtaatttgcttcagaaagagggttttacagctgggtgtggtaattgtacctttagtcccagctactcacgaggccgaggcaggaggattgcttgagtttgaggctgtactggccatgatagagtctgtgaatagtcactgtgctccagcctaggaaacatagcaagaccccatctctaa

SEQ ID NO: 380234 - DNA, 679 bp, Homo sapiens
gcggccgcctactactactactgctcgaattcaagcttctaacgatgtacggggacatgaaaaatcctattttctctatacccttcctgtactgttctattttggaaccagagaatcaataactggcttggtaatgagctcattgtccttaacttttgctttattgattcacaatacacttactgaaatgtaataaactattcataaacttgcaaactccagttgtctcaaagtttctccaaagaggtatgtacatatttcaaaaagataatgttacctattttaaaccattttgattttatgtctaggtgaaatgctgactcatagcccttgattgctgttttagagtttaggcaatcctctttaaaaaatgtgcttgaggtacctggggagaataacaatttcaagtacatgaagggttattaagcagaaggtgataggcatctttgcttaatttccagagaggctacaacaagggaaaaggcaaatgaagtcgtggatatgaaaataactataccttggctttctgtagctcttctggcccaaggtgctcaaagaatcttcaacagatattttatcttcacagtatatgtatgatgaggatagcgctgtggaaagtaagacaatgcttaaggaatttccccaaggtcacacaagagggaggactaatttctatttt

SEQ ID NO: 380235 - DNA, 2057 bp, Homo sapiens
  misc_feature (520)..(520): n is a, c, g, or t
  misc_feature (840)..(840): n is a, c, g, or t
cttgctacagccaaatggcatctcactttttaaagacgtttgcaattattagttgattcacagtacagaacaaggtataaaggaaaaaaccctgctaggtagtgttacacctgctaattggatgactttgccaagtcacctaaactctggatctcagtcaccttttgtcctacattcctctacccttctacttgaaaatttgaaatatgctgtctattcacttcatagtcattaaggaaatgttcttaattgtttttttgtttttgttttttttttgagatggagtcttgctctgtcgccagactggagtgcagtggcgcaatctcggctcactgcaacctccacctcctggattcaagcgattctcctgcctcagcctcccaagtagctgggattacaggcgcatgccaccatgcccagctaatttttttgtatttttagtagagatggggtttcaccgtgctggccaggatggtctcgatctcctgacctcgtgatccgcccacctcggcctcccaangtgctgggactacaggcatgagccaccgtgcccggcctcttagttgttttttaaaaattatgtacattttaagtattttgcaatgaagaaattcatgcaaacaagaaaaacacatttcttataccatcaaatttgtgtagcatgtaataaaaataactatttgtattaaaattaggtaaacttcagcacaacccaattataactttgttaattttgtttactatttcagttttctgtatttccatatgtaagtcaccatttcttttaataatatgcatgaaaatgtaatatagggccaaatgtggtggctcatgcctgtnatcccagcactttgggaggccgaggtgggaggatcacttgagcccaggagtttgcgaccagcctgggcagaatagcaagacccagtctctaacatatacatatacatatagatatatatgtaatatagaagggttattgtgtgttatattactttccagggacattcaaatgttttacattactttaagaatctttacttgatataagaacaaagtataagggtttaaaagttgtttttattaaacatactatataaatgggttaatggtctatttttcagtttttaccaaaatcatgtgtctcactttttgtcttcgctttttaaagaactggttcatgaaattagtgttagttcataaattgtttaagaagttccttttccattgaattagattgctgtaaaagggagaaaaagggaagcttcccataagaatagtttgaaaacaaattgacttgttcatttccatattatctgcttgatgatatggagccagtgtcaatttttctgttagtgaatgttttggactagatgttcccgtccccaaaatttatatgttgaagcccttattaatgtgatggtatctggagatggggctcctccaaccatcccatcctggaacatataagccagaaagaaagtagtctccagaaacagaccatgctgacaccttgagtttgaacttctaatcaccagaactgtgaggaaataaatttctggtgtttaaaccacccagtcctatggtattttgttagggcagtctgagctacgacagtgatataagatagatagctagtaaggtaaacttttcaaaggcaagagaggaagatatacaagaaattgaaagaataattaagtcagtaagaggtaatattcagttttggcaaactcctctgacttgagttgaaaatacttttttttttaagagtaaaaaccaaataactaattctaattggcaaaaaaaggtaaataaataaacatcctaagtagctgctgaaatttccgttgtgtcttatagtttctttaggtctgtgttcctaagatgcttaaaatttttatcatgaaaaatcctattttctctatacccttcctgtactgttctattttggaaccagagaatcaataactggcttggtaatgagctcattgtccttaacttttgctttattgattcacaatacacttactgaaatgtaataaactattcataaacttgca

SEQ ID NO: 380236 - DNA, 526 bp, Homo sapiens
agactctgctagggttagcagagcagccggtaacgttgctggaccgggacgcacgctcagctgaggaggacccccaaagatttttattgttaggtatattgaccaaagtttaacgagaagaactgtgatcagctgggaggattgctgcaaggaatggaattagctcatagcttactgctgaatgaagaagcatacaatcaactaggtgaagttcagaaggcagagtttatttttgagtggttgagatacttggagaagctcttgttggcaaccagcaggaatgatgtaagggagaaacagaagactcttgttgaacagctcctgtctttgttgaacagctccccagggcctcctacccgcaaactgcttgctaagaatctagccatactttatagtattggagacacattctccgttcatgaagcaatcgataaatgtaatgatcttattcgtagcaaagatgattctccaagttatcttcccactaagctgtaagtgaaacattaaaacagaacagaaaacaaaa

SEQ ID NO: 380237 - DNA, 551 bp, Homo sapiens
gtaatgagttgattgaccttgagttgagatggatttctattaaagatatctctagtttaaagatactagtcacctgccataagtcatggaatagtttttatatttacagcttttatatttaaaacttgtaagagtttttttaatgattgaggaaaaagtcatttagaaaacttcagttttcggccagcgcgtcgagggaggggccagcgacacatggcctagtaactgtccggccgcggcgctggcttaagccatggctgagggtagccggattcctcaggcccgggcgctcctacagcagtgcctgcacgcccggctgcaaattcgcccagccgatggggacgtcgcggcccagtgggtggaggtccaaagaggactggtgatctacgtgtgctttttcaagggagctgataaagaacttcttcccaaaatggccgaagctggactgtactgctgccatctctggctcactgcaacctccctgcctgattctcctgcctcagcctgccgagtgcctgcgattgcaggcgtgcgccaccacgcctgactgg

SEQ ID NO: 380238 - DNA, 3544 bp, Homo sapiens
  misc_feature (2007)..(2007): n is a, c, g, or t
  misc_feature (2327)..(2327): n is a, c, g, or t
acgtcatatgcatcagaataagctgttttatttttgtattagtagcgggctaagttattaacaatcatactttcttggataagaacatttttaacaaggatatcttctaaagaatgtgtattcgtatagcataccaataccttttcacaactgtggaatcagaataatttatggcattcccgatagaggaggcagcattgtttttattgattggaataaggaaaattttgaaggatgtatatatagcttttagttccatctccgcttgctttatgattcgattatttgtttacttactttcatatgggcataacatgaatttaaatcaagcagatttaaaatttttcaacagttggaacctaagctttctgaggtgaaaaatgtttcttaaaaggtttgtaggaaagagatttaacgagtcttttcaatcgtttaataaaagtatacactgagcgccttctacagagttgggcaggtgctgccgagaagcttagcgctacgccggcctccaagaccgcacatccgggacattcgagagtcagtccgaggccccgccctcctaagggcggggccactgggcaatcggcgcaggcccttcgtcgtgccccgcctcgtctgccccgccagcgcgtcgagggaggggccagcgacacatggcctagtaactgtccggccgcggcgctggcttaagccatggctgagggtagccggattcctcaggcccgggcgctcctacagcagtgcctgcacgcccggctgcaaattcgcccagccgatggggacgtcgcggcccagtgggtggaggtaacgtcagcccggcagctctcgttatcctccggcgtgcggggcggttttttccgcgttgtctcggtgactcgtccgctctgtgtctccctctgagaccggcggtccggccgcggggataccgggtcagcttgaagctggccgcggtggcctgcctggctgcgcttgtcttttcggtccagcatcaccgttccccagcgccagttgtagcacccgagaggaagagcgtgtctcccttcttggggggaccacaggtccaaagaggactggtgatctacgtgtgctttttcaagggagctgataaagaacttcttcccaaaatggttaatacactgttaaatgtgaaattaagtgagacagaaaatggcaagcatgtctctatattggatctacctggcaacattcttattatccctcaagctacccttggaggaagactaaaaggaagaaacatgcaatatcactctaactctggaaaagaagaagggtttgaactttactctcaatttgtgactctatgtgaaaaagaagtagctgctaatagcaagtgtgctgaagctagggttgtagtggaacatggcacttatgggaacaggcaggtgttaaagctggacaccaacggaccattcacacacttaattgagttttgaaaatgaaaaactagtttctatagctgttttctggtatgaaatgatctaaagtataattagattttcttccccttaatcttgaatatactaatcttcagcatttttagacaggaaaatcttgggtttcatatataactctgcacctgctaattggatgactttgccaagtcacctaaactctggatctcagtcaccttttgtcctacattcctctacccttctacttgaaaatttgaaatatgctgtctattcacttcatagtcattaaggaaatgttcttaattgtttttttgtttttgttttttttttgagatggagtcttgctctgtcgccagactggagtgcagtggcgcaatctcggctcactgcaacctccacctcctggattcaagcgattctcctgcctcagcctcccaagtagctgggattacaggcgcatgccaccatgcccagctaatttttttgtatttttagtagagatggggtttcaccgtgctggccaggatggtctcgatctcctgacctcgtgatccgcccacctcggcctcccaangtgctgggactacaggcatgagccaccgtgcccggcctcttagttgttttttaaaaattatgtacattttaagtattttgcaatgaagaaattcatgcaaacaagaaaaacacatttcttataccatcaaatttgtgtagcatgtaataaaaataactatttgtattaaaattaggtaaacttcagcacaacccaattataactttgttaattttgtttactatttcagttttctgtatttccatatgtaagtcaccatttcttttaataatatgcatgaaaatgtaatatagggccaaatgtggtggctcatgcctgtnatcccagcactttgggaggccgaggtgggaggatcacttgagcccaggagtttgcgaccagcctgggcagaatagcaagacccagtctctaacatatacatatacatatagatatatatgtaatatagaagggttattgtgtgttatattactttccagggacattcaaatgttttacattactttaagaatctttacttgatataagaacaaagtataagggtttaaaagttgtttttattaaacatactatataaatgggttaatggtctatttttcagtttttaccaaaatcatgtgtctcactttttgtcttcgctttttaaagaactggttcatgaaattagtgttagttcataaattgtttaagaagttccttttccattgaattagattgctgtaaaagggagaaaaagggaagcttcccataagaatagtttgaaaacaaattgacttgttcatttccatattatctgcttgatgatatggagccagtgtcaatttttctgttagtgaatgttttggactagatgttcccgtccccaaaatttatatgttgaagcccttattaatgtgatggtatctggagatggggctcctccaaccatcccatcctggaacatataagccagaaagaaagtagtctccagaaacagaccatgctgacaccttgagtttgaacttctaatcaccagaactgtgaggaaataaatttctggtgtttaaaccacccagtcctatggtattttgttagggcagtctgagctacgacagtgatataagatagatagctagtaaggtaaacttttcaaaggcaagagaggaagatatacaagaaattgaaagaataattaagtcagtaagaggtaatattcagttttggcaaactcctctgacttgagttgaaaatacttttttttttaagagtaaaaaccaaataactaattctaattggcaaaaaaaggtaaataaataaacatcctaagtagctgctgaaatttccgttgtgtcttatagtttctttaggtctgtgttcctaagatgcttaaaatttttatcatgaaaaatcctattttctctatacccttcctgtactgttctattttggaaccagagaatcaataactggcttggtaatgagctcattgtccttaacttttgctttattgattcacaatacacttactgaaatgtaataaactattcataaacttgca

SEQ ID NO: 380239 - DNA, 2060 bp, Homo sapiens
acgtcatatgcatcagaataagctgttttatttttgtattagtagcgggctaagttattaacaatcatactttcttggataagaacatttttaacaaggatatcttctaaagaatgtgtattcgtatagcataccaataccttttcacaactgtggaatcagaataatttatggcattcccgatagaggaggcagcattgtttttattgattggaataaggaaaattttgaaggatgtatatatagcttttagttccatctccgcttgctttatgattcgattatttgtttacttactttcatatgggcataacatgaatttaaatcaagcagatttaaaatttttcaacagttggaacctaagctttctgaggtgaaaaatgtttcttaaaaggtttgtaggaaagagatttaacgagtcttttcaatcgtttaataaaagtatacactgagcgccttctacagagttgggcaggtgctgccgagaagcttagcgctacgccggcctccaagaccgcacatccgggacattcgagagtcagtccgaggccccgccctcctaagggcggggccactgggcaatcggcgcaggcccttcgtcgtgccccgcctcgtctgccccgccagcgcgtcgagggaggggccagcgacacatggcctagtaactgtccggccgcggcgctggcttaagccatggctgagggtagccggattcctcaggcccgggcgctcctacagcagtgcctgcacgcccggctgcaaattcgcccagccgatggggacgtcgcggcccagtgggtggaggtccaaagaggactggtgatctacgtgtgctttttcaagggagctgataaagaacttcttcccaaaatggttaatacactgttaaatgtgaaattaagtgagacagaaaatggcaagcatgtctctatattggatctacctggcaacattcttattatccctcaagctacccttggaggaagactaaaaggaagaaacatgcaatatcactctaactctggaaaagaagaagggtttgaactttactctcaatttgtgactctatgtgaaaaagaagtagctgctaatagcaagtgtgctgaagctagggttgtagtggaacatggcacttatgggaacaggcaggtgttaaagctggacaccaacggaccattcacacacttaattgagttttgaaaatgaaaaactagtttctatagctgttttctggtatgaaatgatctaaagtataattagattttcttccccttaatcttgaatatactaatcttcagcatttttagacaggaaaatcttgggtttcatatataactctgcacctgctaattggatgactttgccaagtcacctaaactctggatctcagtcaccttttgtcctacattcctctacccttctacttgaaaatttgaaatatgctgtctattcacttcatagtcattaaggaaatgttcttaattgtttttttgtttttgttttttttttgagatggagtcttgctctgtcgccagactggagtgcagtggcgcaatctcggctcactgcaacctccacctcctggattcaagcgattctcctgcctcagcctcccaagtagtgggactacaggcatgagccaccgtgcccggcctcttagttgttttttaaaaattatgtacattttaagtattttgcaatgaagaaattcatgcaaacaagaaaaacacatttcttataccatcaaatttgtgtagcatgtaataaaaataactatttgtattaaaattaggtaaacttcagcactttgggaggccgaggtgggaggatcacttgagcccaggagtttgcgaccagcctgggcagaatagcaagacccagtctctaacatatacatatacatatagatatatatgtaatatagaagggttattgtgtgttatattactttccagggacattcaaatgttttacattactttaagaatctttacttgatataagaacaaagtataagggtttaaaagttgtttttattaaacatactatataaatgggtt

SEQ ID NO: 380240 - DNA, 1166 bp, Homo sapiens
acgtcatatgcatcagaataagctgttttatttttgtattagtagcgggctaagttattaacaatcatactttcttggataagaacatttttaacaaggatatcttctaaagaatgtgtattcgtatagcataccaataccttttcacaactgtggaatcagaataatttatggcattcccgatagaggaggcagcattgtttttattgattggaataaggaaaattttgaaggatgtatatatagcttttagttccatctccgcttgctttatgattcgattatttgtttacttactttcatatgggcataacatgaatttaaatcaagcagatttaaaatttttcaacagttggaacctaagctttctgaggtgaaaaatgtttcttaaaaggtttgtaggaaagagatttaacgagtcttttcaatcgtttaataaaagtatacactgagcgccttctacagagttgggcaggtgctgccgagaagcttagcgctacgccggcctccaagaccgcacatccgggacattcgagagtcagtccgaggccccgccctcctaagggcggggccactgggcaatcggcgcaggcccttcgtcgtgccccgcctcgtctgccccgccagcgcgtcgagggaggggccagcgacacatggcctagtaactgtccggccgcggcgctggcttaagccatggctgagggtagccggattcctcaggcccgggcgctcctacagcagtgcctgcacgcccggctgcaaattcgcccagccgatggggacgtcgcggcccagtgggtggaggtccaaagaggactggtgatctacgtgtgctttttcaagggagctgataaagaacttcttcccaaaatggatctacgactctggctccactgattaccttaaccatattacatggaatgatgtaagggagaaacagaagactcttgttgaacagctcctgtctttgttgaacagctccccagggcctcctacccgcaaactgcttgctaagaatctagccatactttatagtattggagacacattctccgttcatgaagcaatcgataaatgtaatgatcttattcgtagcaaagatgattctccaagttatcttcccactaagctgtaagtgaaacattaaaacagaacagaaaacaaaa

SEQ ID NO: 380241 - DNA, 377 bp, Homo sapiens
ggagcggggacacctccgggcgcgagggggctgtgtctgggctgcctgttggctgggaaggagaacgcaccagggccgctgtatgagttgagcgctcggggatcccgagggtggtcgcggcagcaatgtgatcgcgaaagaagccggtgggagaaccggtcgaggggctaggtgtcttgaccctaagggctggagtccgccgagaagaggctgactggggcacagggtcggctgataaacagcgtggtccgttcttcctcctggactacgggaaagtctggcttcacctgtgcacaacaggtaggcgtggactctgcccgccagcgggagccggggttgccgggcgtgtggggaaggtcagcaagtcggagcccgcc

SEQ ID NO: 380242 - DNA, 696 bp, Homo sapiens
gtgggatttacttactaaataaaaagaacaggaaggtaaaatcttctcatgtattcccccaggggaacaatatttgaggttccagtgtacagttaattctttagacctttctggatgaacttattgttaggttatcttaactgccaattcagatttaaaatatcatgccattttctgcatgaaaattgccttatttttcatgcttagattatttagcttagtgaagcagtattttaaatctaaatagagactttgggttagaggcatgagctgacaaactgaattttaaacatgagatttgctgactaaaaacttgatggttttcttcatgtttgtttttcactttaaaatgttttgcctttcttcctcacccagttaatacactgttaaatgtgaaattaagtgagacagaaaatggcaagcatgtctctatattggatctacctggcaacattcttattatccctcaagctacccttggaggaagactaaaaggaagaaacatgcaatatcactctaactctggaaaagaagaagggtttgaactttactctcaatttgtgactctatgtgaaaaagaagtagctgctaatagcaagtgtgctgaagctagggttgtagtggaacatggcacttatgggaacaggcaggtgttaaagctggacaccaacggaccattcacacacttaattgagt

SEQ ID NO: 380243 - DNA, 593 bp, Homo sapiens
accggtcgaggggctaggtgtcttgaccctaagggctggagtccgccgagaagaggctgactggggcacagggtcggctgataaacagcgtggtccgttcttcctcctggactacgggaaagtctggcttcacctgtgcacaacagatttttattgttaggtatattgaccaaagtttaacgagaagaactgtgatcagctgggaggattgctgcaaggaatggaattagctcatagcttactgctgaatgaagaagcatacaatcaactaggtgaagttcagaaggcagagtttatttttgagtggttgagatacttggagaagctcttgttggcaaccagcaggaatgatgtaagggagaaacagaagactcttgttgaacagctcctgtctttgttgaacagctccccagggcctcctacccgcaaactgcttgctaagaatctagccatactttatagtattggagacacattctccgttcatgaagcaatcgataaatgtaatgatcttattcgtagcaaagatgattctccaagttatcttcccactaagctgtaagtgaaacattaaaacagaacagaaaacaaaa

SEQ ID NO: 380244 - DNA, 3290 bp, Homo sapiens
  misc_feature (1753)..(1753): n is a, c, g, or t
  misc_feature (2073)..(2073): n is a, c, g, or t
acgtcatatgcatcagaataagctgttttatttttgtattagtagcgggctaagttattaacaatcatactttcttggataagaacatttttaacaaggatatcttctaaagaatgtgtattcgtatagcataccaataccttttcacaactgtggaatcagaataatttatggcattcccgatagaggaggcagcattgtttttattgattggaataaggaaaattttgaaggatgtatatatagcttttagttccatctccgcttgctttatgattcgattatttgtttacttactttcatatgggcataacatgaatttaaatcaagcagatttaaaatttttcaacagttggaacctaagctttctgaggtgaaaaatgtttcttaaaaggtttgtaggaaagagatttaacgagtcttttcaatcgtttaataaaagtatacactgagcgccttctacagagttgggcaggtgctgccgagaagcttagcgctacgccggcctccaagaccgcacatccgggacattcgagagtcagtccgaggccccgccctcctaagggcggggccactgggcaatcggcgcaggcccttcgtcgtgccccgcctcgtctgccccgccagcgcgtcgagggaggggccagcgacacatggcctagtaactgtccggccgcggcgctggcttaagccatggctgagggtagccggattcctcaggcccgggcgctcctacagcagtgcctgcacgcccggctgcaaattcgcccagccgatggggacgtcgcggcccagtgggtggaggtccaaagaggactggtgatctacgtgtgctttttcaagggagctgataaagaacttcttcccaaaatggttaatacactgttaaatgtgaaattaagtgagacagaaaatggcaagcatgtctctatattggatctacctggcaacattcttattatccctcaagctacccttggaggaagactaaaaggaagaaacatgcaatatcactctaactctggaaaagaagaagggtttgaactttactctcaatttgtgactctatgtgaaaaagaagtagctgctaatagcaagtgtgctgaagctagggttgtagtggaacatggcacttatgggaacaggcaggtgttaaagctggacaccaacggaccattcacacacttaattgagttttgaaaatgaaaaactagtttctatagctgttttctggtatgaaatgatctaaagtataattagattttcttccccttaatcttgaatatactaatcttcagcatttttagacaggaaaatcttgggtttcatatataactctgcacctgctaattggatgactttgccaagtcacctaaactctggatctcagtcaccttttgtcctacattcctctacccttctacttgaaaatttgaaatatgctgtctattcacttcatagtcattaaggaaatgttcttaattgtttttttgtttttgttttttttttgagatggagtcttgctctgtcgccagactggagtgcagtggcgcaatctcggctcactgcaacctccacctcctggattcaagcgattctcctgcctcagcctcccaagtagctgggattacaggcgcatgccaccatgcccagctaatttttttgtatttttagtagagatggggtttcaccgtgctggccaggatggtctcgatctcctgacctcgtgatccgcccacctcggcctcccaangtgctgggactacaggcatgagccaccgtgcccggcctcttagttgttttttaaaaattatgtacattttaagtattttgcaatgaagaaattcatgcaaacaagaaaaacacatttcttataccatcaaatttgtgtagcatgtaataaaaataactatttgtattaaaattaggtaaacttcagcacaacccaattataactttgttaattttgtttactatttcagttttctgtatttccatatgtaagtcaccatttcttttaataatatgcatgaaaatgtaatatagggccaaatgtggtggctcatgcctgtnatcccagcactttgggaggccgaggtgggaggatcacttgagcccaggagtttgcgaccagcctgggcagaatagcaagacccagtctctaacatatacatatacatatagatatatatgtaatatagaagggttattgtgtgttatattactttccagggacattcaaatgttttacattactttaagaatctttacttgatataagaacaaagtataagggtttaaaagttgtttttattaaacatactatataaatgggttaatggtctatttttcagtttttaccaaaatcatgtgtctcactttttgtcttcgctttttaaagaactggttcatgaaattagtgttagttcataaattgtttaagaagttccttttccattgaattagattgctgtaaaagggagaaaaagggaagcttcccataagaatagtttgaaaacaaattgacttgttcatttccatattatctgcttgatgatatggagccagtgtcaatttttctgttagtgaatgttttggactagatgttcccgtccccaaaatttatatgttgaagcccttattaatgtgatggtatctggagatggggctcctccaaccatcccatcctggaacatataagccagaaagaaagtagtctccagaaacagaccatgctgacaccttgagtttgaacttctaatcaccagaactgtgaggaaataaatttctggtgtttaaaccacccagtcctatggtattttgttagggcagtctgagctacgacagtgatataagatagatagctagtaaggtaaacttttcaaaggcaagagaggaagatatacaagaaattgaaagaataattaagtcagtaagaggtaatattcagttttggcaaactcctctgacttgagttgaaaatacttttttttttaagagtaaaaaccaaataactaattctaattggcaaaaaaaggtaaataaataaacatcctaagtagctgctgaaatttccgttgtgtcttatagtttctttaggtctgtgttcctaagatgcttaaaatttttatcatgaaaaatcctattttctctatacccttcctgtactgttctattttggaaccagagaatcaataactggcttggtaatgagctcattgtccttaacttttgctttattgattcacaatacacttactgaaatgtaataaactattcataaacttgca

SEQ ID NO: 380245 - DNA, 3149 bp, Homo sapiens
  misc_feature (1753)..(1753): n is a, c, g, or t
acgtcatatgcatcagaataagctgttttatttttgtattagtagcgggctaagttattaacaatcatactttcttggataagaacatttttaacaaggatatcttctaaagaatgtgtattcgtatagcataccaataccttttcacaactgtggaatcagaataatttatggcattcccgatagaggaggcagcattgtttttattgattggaataaggaaaattttgaaggatgtatatatagcttttagttccatctccgcttgctttatgattcgattatttgtttacttactttcatatgggcataacatgaatttaaatcaagcagatttaaaatttttcaacagttggaacctaagctttctgaggtgaaaaatgtttcttaaaaggtttgtaggaaagagatttaacgagtcttttcaatcgtttaataaaagtatacactgagcgccttctacagagttgggcaggtgctgccgagaagcttagcgctacgccggcctccaagaccgcacatccgggacattcgagagtcagtccgaggccccgccctcctaagggcggggccactgggcaatcggcgcaggcccttcgtcgtgccccgcctcgtctgccccgccagcgcgtcgagggaggggccagcgacacatggcctagtaactgtccggccgcggcgctggcttaagccatggctgagggtagccggattcctcaggcccgggcgctcctacagcagtgcctgcacgcccggctgcaaattcgcccagccgatggggacgtcgcggcccagtgggtggaggtccaaagaggactggtgatctacgtgtgctttttcaagggagctgataaagaacttcttcccaaaatggttaatacactgttaaatgtgaaattaagtgagacagaaaatggcaagcatgtctctatattggatctacctggcaacattcttattatccctcaagctacccttggaggaagactaaaaggaagaaacatgcaatatcactctaactctggaaaagaagaagggtttgaactttactctcaatttgtgactctatgtgaaaaagaagtagctgctaatagcaagtgtgctgaagctagggttgtagtggaacatggcacttatgggaacaggcaggtgttaaagctggacaccaacggaccattcacacacttaattgagttttgaaaatgaaaaactagtttctatagctgttttctggtatgaaatgatctaaagtataattagattttcttccccttaatcttgaatatactaatcttcagcatttttagacaggaaaatcttgggtttcatatataactctgcacctgctaattggatgactttgccaagtcacctaaactctggatctcagtcaccttttgtcctacattcctctacccttctacttgaaaatttgaaatatgctgtctattcacttcatagtcattaaggaaatgttcttaattgtttttttgtttttgttttttttttgagatggagtcttgctctgtcgccagactggagtgcagtggcgcaatctcggctcactgcaacctccacctcctggattcaagcgattctcctgcctcagcctcccaagtagctgggattacaggcgcatgccaccatgcccagctaatttttttgtatttttagtagagatggggtttcaccgtgctggccaggatggtctcgatctcctgacctcgtgatccgcccacctcggcctcccaangtgctgggactacaggcatgagccaccgtgcccggcctcttagttgttttttaaaaattatgtacattttaagtattttgcaatgaagaaattcatgcaaacaagaaaaacacatttcttataccatcaaatttgtgtagcatgtaataaaaataactatttgtattaaaattaggtaaacttcagcactttgggaggccgaggtgggaggatcacttgagcccaggagtttgcgaccagcctgggcagaatagcaagacccagtctctaacatatacatatacatatagatatatatgtaatatagaagggttattgtgtgttatattactttccagggacattcaaatgttttacattactttaagaatctttacttgatataagaacaaagtataagggtttaaaagttgtttttattaaacatactatataaatgggttaatggtctatttttcagtttttaccaaaatcatgtgtctcactttttgtcttcgctttttaaagaactggttcatgaaattagtgttagttcataaattgtttaagaagttccttttccattgaattagattgctgtaaaagggagaaaaagggaagcttcccataagaatagtttgaaaacaaattgacttgttcatttccatattatctgcttgatgatatggagccagtgtcaatttttctgttagtgaatgttttggactagatgttcccgtccccaaaatttatatgttgaagcccttattaatgtgatggtatctggagatggggctcctccaaccatcccatcctggaacatataagccagaaagaaagtagtctccagaaacagaccatgctgacaccttgagtttgaacttctaatcaccagaactgtgaggaaataaatttctggtgtttaaaccacccagtcctatggtattttgttagggcagtctgagctacgacagtgatataagatagatagctagtaaggtaaacttttcaaaggcaagagaggaagatatacaagaaattgaaagaataattaagtcagtaagaggtaatattcagttttggcaaactcctctgacttgagttgaaaatacttttttttttaagagtaaaaaccaaataactaattctaattggcaaaaaaaggtaaataaataaacatcctaagtagctgctgaaatttccgttgtgtcttatagtttctttaggtctgtgttcctaagatgcttaaaatttttatcatgaaaaatcctattttctctatacccttcctgtactgttctattttggaaccagagaatcaataactggcttggtaatgagctcattgtccttaacttttgctttattgattcacaatacacttactgaaatgtaataaactattcataaacttgca

SEQ ID NO: 380246 - DNA, 3755 bp, Homo sapiens
  misc_feature (1753)..(1753): n is a, c, g, or t
  misc_feature (2073)..(2073): n is a, c, g, or t
acgtcatatgcatcagaataagctgttttatttttgtattagtagcgggctaagttattaacaatcatactttcttggataagaacatttttaacaaggatatcttctaaagaatgtgtattcgtatagcataccaataccttttcacaactgtggaatcagaataatttatggcattcccgatagaggaggcagcattgtttttattgattggaataaggaaaattttgaaggatgtatatatagcttttagttccatctccgcttgctttatgattcgattatttgtttacttactttcatatgggcataacatgaatttaaatcaagcagatttaaaatttttcaacagttggaacctaagctttctgaggtgaaaaatgtttcttaaaaggtttgtaggaaagagatttaacgagtcttttcaatcgtttaataaaagtatacactgagcgccttctacagagttgggcaggtgctgccgagaagcttagcgctacgccggcctccaagaccgcacatccgggacattcgagagtcagtccgaggccccgccctcctaagggcggggccactgggcaatcggcgcaggcccttcgtcgtgccccgcctcgtctgccccgccagcgcgtcgagggaggggccagcgacacatggcctagtaactgtccggccgcggcgctggcttaagccatggctgagggtagccggattcctcaggcccgggcgctcctacagcagtgcctgcacgcccggctgcaaattcgcccagccgatggggacgtcgcggcccagtgggtggaggtccaaagaggactggtgatctacgtgtgctttttcaagggagctgataaagaacttcttcccaaaatggttaatacactgttaaatgtgaaattaagtgagacagaaaatggcaagcatgtctctatattggatctacctggcaacattcttattatccctcaagctacccttggaggaagactaaaaggaagaaacatgcaatatcactctaactctggaaaagaagaagggtttgaactttactctcaatttgtgactctatgtgaaaaagaagtagctgctaatagcaagtgtgctgaagctagggttgtagtggaacatggcacttatgggaacaggcaggtgttaaagctggacaccaacggaccattcacacacttaattgagttttgaaaatgaaaaactagtttctatagctgttttctggtatgaaatgatctaaagtataattagattttcttccccttaatcttgaatatactaatcttcagcatttttagacaggaaaatcttgggtttcatatataactctgcacctgctaattggatgactttgccaagtcacctaaactctggatctcagtcaccttttgtcctacattcctctacccttctacttgaaaatttgaaatatgctgtctattcacttcatagtcattaaggaaatgttcttaattgtttttttgtttttgttttttttttgagatggagtcttgctctgtcgccagactggagtgcagtggcgcaatctcggctcactgcaacctccacctcctggattcaagcgattctcctgcctcagcctcccaagtagctgggattacaggcgcatgccaccatgcccagctaatttttttgtatttttagtagagatggggtttcaccgtgctggccaggatggtctcgatctcctgacctcgtgatccgcccacctcggcctcccaangtgctgggactacaggcatgagccaccgtgcccggcctcttagttgttttttaaaaattatgtacattttaagtattttgcaatgaagaaattcatgcaaacaagaaaaacacatttcttataccatcaaatttgtgtagcatgtaataaaaataactatttgtattaaaattaggtaaacttcagcacaacccaattataactttgttaattttgtttactatttcagttttctgtatttccatatgtaagtcaccatttcttttaataatatgcatgaaaatgtaatatagggccaaatgtggtggctcatgcctgtnatcccagcactttgggaggccgaggtgggaggatcacttgagcccaggagtttgcgaccagcctgggcagaatagcaagacccagtctctaacatatacatatacatatagatatatatgtaatatagaagggttattgtgtgttatattactttccagggacattcaaatgttttacattactttaagaatctttacttgatataagaacaaagtataagggtttaaaagttgtttttattaaacatactatataaatgggttaatggtctatttttcagtttttaccaaaatcatgtgtctcactttttgtcttcgctttttaaagaactggttcatgaaattagtgttagttcataaattgtttaagaagttccttttccattgaattagattgctgtaaaagggagaaaaagggaagcttcccataagaatagtttgaaaacaaattgacttgttcatttccatattatctgcttgatgatatggagccagtgtcaatttttctgttagtgaatgttttggactagatgttcccgtccccaaaatttatatgttgaagcccttattaatgtgatggtatctggagatggggctcctccaaccatcccatcctggaacatataagccagaaagaaagtagtctccagaaacagaccatgctgacaccttgagtttgaacttctaatcaccagaactgtgaggaaataaatttctggtgtttaaaccacccagtcctatggtattttgttagggcagtctgagctacgacagtgatataagatagatagctagtaaggtaaacttttcaaaggcaagagaggaagatatacaagaaattgaaagaataattaagtcagtaagaggtaatattcagttttggcaaactcctctgacttgagttgaaaatacttttttttttaagagtaaaaaccaaataactaattctaattggcaaaaaaaggtaaataaataaacatcctaagtagctgctgaaatttccgttgtgtcttatagtttctttaggtctgtgttcctaagatgcttaaaatttttatcatgaaaaatcctattttctctatacccttcctgtactgttctattttggaaccagagaatcaataactggcttggtaatgagctcattgtccttaacttttgctttattgattcacaatacacttactgaaatgtaataaactattcataaacttgcaaactccagttgtctcaaagtttctccaaagaggtatgtacatatttcaaaaagataatgttacctattttaaaccattttgattttatgtctaggtgaaatgctgactcatagcccttgattgctgttttagagtttaggcaatcctctttaaaaaatgtgcttgaggtacctggggagaataacaatttcaagtacatgaagggttattaagcagaaggtgataggcatctttgcttaatttccagagaggctacaacaagggaaaaggcaaatgaagtcgtggatatgaaaataactataccttggctttctgtagctcttctggcccaaggtgctcaaagaatcttcaacagatattttatcttcacagtatatgtatgatgaggatagcgctgtggaaagtaagacaatgcttaaggaatttccccaaggtcacacaagagggaggactaatttctatttt

SEQ ID NO: 380247 - DNA, 2337 bp, Homo sapiens
  misc_feature (1753)..(1753): n is a, c, g, or t
  misc_feature (2073)..(2073): n is a, c, g, or t
acgtcatatgcatcagaataagctgttttatttttgtattagtagcgggctaagttattaacaatcatactttcttggataagaacatttttaacaaggatatcttctaaagaatgtgtattcgtatagcataccaataccttttcacaactgtggaatcagaataatttatggcattcccgatagaggaggcagcattgtttttattgattggaataaggaaaattttgaaggatgtatatatagcttttagttccatctccgcttgctttatgattcgattatttgtttacttactttcatatgggcataacatgaatttaaatcaagcagatttaaaatttttcaacagttggaacctaagctttctgaggtgaaaaatgtttcttaaaaggtttgtaggaaagagatttaacgagtcttttcaatcgtttaataaaagtatacactgagcgccttctacagagttgggcaggtgctgccgagaagcttagcgctacgccggcctccaagaccgcacatccgggacattcgagagtcagtccgaggccccgccctcctaagggcggggccactgggcaatcggcgcaggcccttcgtcgtgccccgcctcgtctgccccgccagcgcgtcgagggaggggccagcgacacatggcctagtaactgtccggccgcggcgctggcttaagccatggctgagggtagccggattcctcaggcccgggcgctcctacagcagtgcctgcacgcccggctgcaaattcgcccagccgatggggacgtcgcggcccagtgggtggaggtccaaagaggactggtgatctacgtgtgctttttcaagggagctgataaagaacttcttcccaaaatggttaatacactgttaaatgtgaaattaagtgagacagaaaatggcaagcatgtctctatattggatctacctggcaacattcttattatccctcaagctacccttggaggaagactaaaaggaagaaacatgcaatatcactctaactctggaaaagaagaagggtttgaactttactctcaatttgtgactctatgtgaaaaagaagtagctgctaatagcaagtgtgctgaagctagggttgtagtggaacatggcacttatgggaacaggcaggtgttaaagctggacaccaacggaccattcacacacttaattgagttttgaaaatgaaaaactagtttctatagctgttttctggtatgaaatgatctaaagtataattagattttcttccccttaatcttgaatatactaatcttcagcatttttagacaggaaaatcttgggtttcatatataactctgcacctgctaattggatgactttgccaagtcacctaaactctggatctcagtcaccttttgtcctacattcctctacccttctacttgaaaatttgaaatatgctgtctattcacttcatagtcattaaggaaatgttcttaattgtttttttgtttttgttttttttttgagatggagtcttgctctgtcgccagactggagtgcagtggcgcaatctcggctcactgcaacctccacctcctggattcaagcgattctcctgcctcagcctcccaagtagctgggattacaggcgcatgccaccatgcccagctaatttttttgtatttttagtagagatggggtttcaccgtgctggccaggatggtctcgatctcctgacctcgtgatccgcccacctcggcctcccaangtgctgggactacaggcatgagccaccgtgcccggcctcttagttgttttttaaaaattatgtacattttaagtattttgcaatgaagaaattcatgcaaacaagaaaaacacatttcttataccatcaaatttgtgtagcatgtaataaaaataactatttgtattaaaattaggtaaacttcagcacaacccaattataactttgttaattttgtttactatttcagttttctgtatttccatatgtaagtcaccatttcttttaataatatgcatgaaaatgtaatatagggccaaatgtggtggctcatgcctgtnatcccagcactttgggaggccgaggtgggaggatcacttgagcccaggagtttgcgaccagcctgggcagaatagcaagacccagtctctaacatatacatatacatatagatatatatgtaatatagaagggttattgtgtgttatattactttccagggacattcaaatgttttacattactttaagaatctttacttgatataagaacaaagtataagggtttaaaagttgtttttattaaacatactatataaatgggtt

SEQ ID NO: 380248 - DNA, 3495 bp, Homo sapiens
ttgttatgtctcggctccggccgcggccgccgctgatacacggttgtggagggtacggccgcggtctccggaggtggcgggggtgttggggacgggtgctgcgaccggcactgcccatccgagcgggacgggcgctgagtggccgggaggcagccgggtagccgcctggaggagcagtctcggggcctattattggttttttccctccgagaccgattccatctgcagagaccgcgacgccccatcctgggccgggccgcagtgcccgcccgcctgagaggcgccgcccgccagccggcccgagcgaacctggagccgccgccgtgcccgccgctcttctcgcggagcctgggcggtcggcggggcctggggcctgggcttcgggcgcggcgttgcggcggccgctcctccccgcgcagaacacgctgggccccgggcctggcccggccgagcgccgcgccctcctgacccgcggccgcgggagtccggcccccacggcccctcgggccccggcctgccgcccggatccccgcctcctgggcggatctgagttattttttggtctccccctcccccttgagatcgcggcaccggagggccgaccccgccacctgggtcagtgcccgccccgggggaagcgtccctcgttttgttcttccccgcgagctctccccgcgcccctctcctttctgtgcttaatggatgggggttttgagtttttcccctttatttttgtcggctcttgactgggaggcccggcgcgaggctctgcgtctctgcgtccctcgtcgccgcctcgcgcccgcgcggatcccgtcacctgcttccccgccggggatggccggccagtgacggcgccgggtggcccgcgcgtggacacggggccctcgcccaagctgccaccgagccgcggcccccgccctcgacccttctctctcccgtattccgagctctctggaaagagaggagactccagggaagatgtggctgaagctttttttcttgctcctctatttcctggtcctgttcgtcctggccaggttttttgaggccattgtgtggtatgaaactggcatctttgccacccagctggtggatccggtggcgctgagcttcaagaagctgaagaccattttggagtgccgggggttgggctactcagggttgcccgagaagaaggatgtccgggagctggtggaaaagtcaggtgacttgatggagggtgagctctattctgctctcaaggaagaagaagcatccgaatcggtttctagtaccaatttcagtggtgaaatgcacttctatgagcttgtggaagacacaaaagatggcatctggctggttcaggtcatagcaaatgacagaagtcccttggtgggcaaaattcactgggagaaaatggttaaaaaggtgtcaagatttggaatacgtacaggcacatttaactgttccagtgatcccagatattgcaggagaagaggctgggtccgatccacactcattatgtctgttccacaaacaagtacttcaaaagggaaagtcatgcttaaagaatacagtggacgcaagattgaagtagagcacatttttaaatggataactgctcatgcagcttctcggatcaaaaccatttataatgctgaacacttgaaagaagaatggaataaaagtgatcagtattggttaaaaatatacctatttgcaaaccttgaccagcccccagctttcttctctgcactaagtataaagtttactggaagagttgagtttatttttgttaatgtagaaaattgggacaacaagagttatatgacagatattggcatatataatatgccatcatacatacttagaactcctgaaggaatttacaggtatggaaaccacacaggcgaatttatatcccttcaggccatggattcatttttgcgctcattacaacccgaggtaaatgatctgtttgttttgagcttggttctagttaatcttatggcttggatggacttatttattacacaaggagctaccataaagcgatttgtggttctcataagcactttagggacatataattctctattaattatttcctggctacctgtgttgggctttttacagctaccttacttagatagcttttatgaatatagcttaaaattgttgagatattccaatacaaccacactggcttcatgggtaagggcagactggatgttttactcttcacacccagccctgtttctcagtacataccttggtcatggtttactaattgattactttgagaagaagagaaggcgcaacaacaacaatgatgaagtcaatgccaataacttagaatggttatcaagtctgtgggactggtacaccagctacctcttccacccgattgcttcttttcagaactttcctgtagaatctgattgggacgaagaccctgacttattcttggagcgcttagctttccctgacctttggcttcaccctctgataccaactgattatattaaaaacttaccaatgtggcgatttaaatgtcttggagtccagtctgaagaggaaatgtcggaggggtctcaagatactgaaaatgactcggaaagtgagaacacagacactttgagtagtgagaaggaagtatttgaagataagcaaagcgtacttcacaattctccaggaacagcaagtcactgtgatgctgaggcttgttcatgtgccaataaatattgtcagaccagcccatgtgaaaggaaggggaggtcatatggatcatataacactaatgaagatatggaacctgattggttaacttggcctgctgatatgctgcactgtactgaatgtgttgtttgcctagagaattttgaaaatggatgtttgctaatggggttgccttgtggtcatgtgtttcatcagaattgcattgtgatgtggttggctgggggccgacattgttgccctgtttgccggtggccttcttataaaaaaaagcagccatatgcacaacaccagcccttgtcaaatgatgtcccatcttaaccatgtgcaatttgtcctttataagctttgagtatcttacagcttgcctttttaatgttagtcacaatgtttttgtggtttgaagtttagtttaatgttagtgcagtgacgggaaatacacattatgctaatgttgatgacagaatttatttggttgccttgtgtgttaattgaatgcatacctaattgtaaaatttttttatttacaacattggaaattcagaagttaatgtttttttgtaagcacaaaagaagtattatagaaatttatcctagcaagactttacaagataggatcaaattctaatggaattgagccggtttcttatcctaaatgtttcctccctttttacaatctctgtccagcacctcttggttaaataatgtatgctgtgagacatgaaattaaaacagacctatgaaataaattattttaaaaccagaaaaaaaaaaaaa

SEQ ID NO: 380249 - DNA, 3443 bp, Homo sapiens
ttgttatgtctcggctccggccgcggccgccgctgatacacggttgtggagggtacggccgcggtctccggaggtggcgggggtgttggggacgggtgctgcgaccggcactgcccatccgagcgggacgggcgctgagtggccgggaggcagccgggtagccgcctggaggagcagtctcggggcctattattggttttttccctccgagaccgattccatctgcagagaccgcgacgccccatcctgggccgggccgcagtgcccgcccgcctgagaggcgccgcccgccagccggcccgagcgaacctggagccgccgccgtgcccgccgctcttctcgcggagcctgggcggtcggcggggcctggggcctgggcttcgggcgcggcgttgcggcggccgctcctccccgcgcagaacacgctgggccccgggcctggcccggccgagcgccgcgccctcctgacccgcggccgcgggagtccggcccccacggcccctcgggccccggcctgccgcccggatccccgcctcctgggcggatctgagttattttttggtctccccctcccccttgagatcgcggcaccggagggccgaccccgccacctgggtcagtgcccgccccgggggaagcgtccctcgttttgttcttccccgcgagctctccccgcgcccctctcctttctgtgcttaatggatgggggttttgagtttttcccctttatttttgtcggctcttgactgggaggcccggcgcgaggctctgcgtctctgcgtccctcgtcgccgcctcgcgcccgcgcggatcccgtcacctgcttccccgccggggatggccggccagtgacggcgccgggtggcccgcgcgtggacacggggccctcgcccaagctgccaccgagccgcggcccccgccctcgacccttctctctcccgtattccgagctctctggaaagagaggagactccagggaagatgtggctgaagctttttttcttgctcctctatttcctggtcctgttcgtcctggccaggttttttgaggccattgtgtggtatgaaactggcatctttgccacccagctggtggatccggtggcgctgagcttcaagaagctgaagaccattttggagtgccgggggttgggctactcagggttgcccgagaagaaggatgtccgggagctggtggaaaagtcaggtgacttgatggagggtgagctctattctgctctcaaggaagaagaagcatccgaatcggtttctagtaccaatttcagtggtgaaatgcacttctatgagcttgtggaagacacaaaagatggcatctggctggttcaggtcatagcaaatgacagaagtcccttggtgggcaaaattcactgggagaaaatggttaaaaaggtgtcaagatttggaatacgtacaggcacatttaactgttccagtgatcccagatattgcaggagaagaggctgggtccgatccacactcattatgtctgttccacaaacaagtacttcaaaagggaaagtcatgcttaaagaatacagtggacgcaagattgaagtagagcacatttttaaatggataactgctcatgcagcttctcggatcaaaaccatttataatgctgaacacttgaaagaagaatggaataaaagtgatcagtattggttaaaaatatacctatttgcaaaccttgaccagcccccagctttcttctctgcactaagtataaagtttactggaagagttgagtttatttttgttaatgtagaaaattgggacaacaagagttatatgacagatattggcatatataatatgccatcatacatacttagaactcctgaaggaatttacaggtatggaaaccacacaggcgaatttatatcccttcaggccatggattcatttttgcgctcattacaacccgaggtaaatgatctgtttgttttgagcttggttctagttaatcttatggcttggatggacttatttattacacaaggagctaccataaagcgatttgtggttctcataagcactttagggacatataattctctattaattatttcctggctacctgtgttgggctttttacagctaccttacttagatagcttttatgaatatagcttaactggatgttttactcttcacacccagccctgtttctcagtacataccttggtcatggtttactaattgattactttgagaagaagagaaggcgcaacaacaacaatgatgaagtcaatgccaataacttagaatggttatcaagtctgtgggactggtacaccagctacctcttccacccgattgcttcttttcagaactttcctgtagaatctgattgggacgaagaccctgacttattcttggagcgcttagctttccctgacctttggcttcaccctctgataccaactgattatattaaaaacttaccaatgtggcgatttaaatgtcttggagtccagtctgaagaggaaatgtcggaggggtctcaagatactgaaaatgactcggaaagtgagaacacagacactttgagtagtgagaaggaagtatttgaagataagcaaagcgtacttcacaattctccaggaacagcaagtcactgtgatgctgaggcttgttcatgtgccaataaatattgtcagaccagcccatgtgaaaggaaggggaggtcatatggatcatataacactaatgaagatatggaacctgattggttaacttggcctgctgatatgctgcactgtactgaatgtgttgtttgcctagagaattttgaaaatggatgtttgctaatggggttgccttgtggtcatgtgtttcatcagaattgcattgtgatgtggttggctgggggccgacattgttgccctgtttgccggtggccttcttataaaaaaaagcagccatatgcacaacaccagcccttgtcaaatgatgtcccatcttaaccatgtgcaatttgtcctttataagctttgagtatcttacagcttgcctttttaatgttagtcacaatgtttttgtggtttgaagtttagtttaatgttagtgcagtgacgggaaatacacattatgctaatgttgatgacagaatttatttggttgccttgtgtgttaattgaatgcatacctaattgtaaaatttttttatttacaacattggaaattcagaagttaatgtttttttgtaagcacaaaagaagtattatagaaatttatcctagcaagactttacaagataggatcaaattctaatggaattgagccggtttcttatcctaaatgtttcctccctttttacaatctctgtccagcacctcttggttaaataatgtatgctgtgagacatgaaattaaaacagacctatgaaataaattattttaaaaccagaaaaaaaaaaaaa

SEQ ID NO: 380250 - DNA, 3353 bp, Homo sapiens
ttgttatgtctcggctccggccgcggccgccgctgatacacggttgtggagggtacggccgcggtctccggaggtggcgggggtgttggggacgggtgctgcgaccggcactgcccatccgagcgggacgggcgctgagtggccgggaggcagccgggtagccgcctggaggagcagtctcggggcctattattggttttttccctccgagaccgattccatctgcagagaccgcgacgccccatcctgggccgggccgcagtgcccgcccgcctgagaggcgccgcccgccagccggcccgagcgaacctggagccgccgccgtgcccgccgctcttctcgcggagcctgggcggtcggcggggcctggggcctgggcttcgggcgcggcgttgcggcggccgctcctccccgcgcagaacacgctgggccccgggcctggcccggccgagcgccgcgccctcctgacccgcggccgcgggagtccggcccccacggcccctcgggccccggcctgccgcccggatccccgcctcctgggcggatctgagttattttttggtctccccctcccccttgagatcgcggcaccggagggccgaccccgccacctgggtcagtgcccgccccgggggaagcgtccctcgttttgttcttccccgcgagctctccccgcgcccctctcctttctgtgcttaatggatgggggttttgagtttttcccctttatttttgtcggctcttgactgggaggcccggcgcgaggctctgcgtctctgcgtccctcgtcgccgcctcgcgcccgcgcggatcccgtcacctgcttccccgccggggatggccggccagtgacggcgccgggtggcccgcgcgtggacacggggccctcgcccaagctgccaccgagccgcggcccccgccctcgacccttctctctcccgtattccgagctctctggaaagagaggagactccagggaagatgtggctgaagctttttttcttgctcctctatttcctggtcctgttcgtcctggccaggttttttgaggccattgtgtggtatgaaactggcatctttgccacccagctggtggatccggtggcgctgagcttcaagaagctgaagaccattttggagtgccgggggttgggctactcagggttgcccgagaagaaggatgtccgggagctggtggaaaagtcaggtgacttgatggagggtgagctctattctgctctcaaggaagaagaagcatccgaatcggtttctagtaccaatttcagtggtgaaatgcacttctatgagcttgtggaagacacaaaagatggcatctggctggttcaggtcatagcaaatgacagaagtcccttggtgggcaaaattcactgggagaaaatggttaaaaaggtgtcaagatttggaatacgtacaggcacatttaactgttccagtgatcccagatattgcaggagaagaggctgggtccgatccacactcattatgtctgttccacaaacaagtacttcaaaagggaaagtcatgcttaaagaatacagtggacgcaagattgaagtagagcacatttttaaatggataactgctcatgcagcttctcggatcaaaaccatttataatgctgaacacttgaaagaagaatggaataaaagtgatcagtattggttaaaaatatacctatttgcaaaccttgaccagcccccagctttcttctctgcactaagtataaagtttactggaagagttgagtttatttttgttaatgtagaaaattgggacaacaagagttatatgacagatattggcatatataatatgccatcatacatacttagaactcctgaaggaatttacaggtatggaaaccacacaggcgaatttatatcccttcaggccatggattcatttttgcgctcattacaacccgaggtaaatgatctgtttgttttgagcttggttctagttaatcttatggcttggatggacttatttattacacaaggagctaccataaagcgatttgtggttctcataagcactttagggacatataattctctattaattatttcctggctacctgtgttgggctttttacagctaccttacttagatagcttttatgaatatagcttaaaattgttgagatattccaatacaaccacactggcttcatgggtaagggcagactggatgttttactcttcacacccagccctgtttctcagtacataccttggtcatggtttactaattgattactttgagaagaagagaaggcgcaacaacaacaatgatgaagtcaatgccaataacttagaatggttatcaagtctgtgggactggtacaccagctacctcttccacccgattgcttcttttcagaactttcctgtagaatctgattgggacgaagaccctgacttattcttggagcgcttagctttccctgacctttggcttcaccctctgataccaactgattatattaaaaacttaccaatgtggcgatttaaatgtcttggagtccagtctgaagaggaaatgtcggaggggtctcaagatactgaaaatgactcggaaagtgagaacacagacactttgagtagtgagaaggaagtatttgaagataagcaaagcgtacttcacaattctccaggaacagcaagtcactgtgatgctgaggcttgttcatgtgccaataaatattgtcagaccagcccatgtgaaaggaaggggaggtcatatggatcatataacactaatgaagatatggaacctgattggttaacttggcctgctgatatgctgcactgtactgaatgtgttgtttgcctagagaattttgaaaatggatgtttgctaatggggttgccttgtggtcatgtgtttcatcagaattgcattgtgatgtggttggctgggggccgacattgttgccctgtttgccggtggccttcttataaaaaaaagcagccatatgcacaacaccagcccttgtcaaatgatgtcccatcttaaccatgtgcaatttgtcctttataagctttgagtatcttacagcttgcctttttaatgttagtcacaatgtttttgtggtttgaagtttagtttaatgttagtgcagtgacgggaaatacacattatgctaatgttgatgacagaatttatttggttgccttgtgtgttaattgaatgcatacctaattgtaaaatttttttatttgggggggtgcttattctactcgttaaagtccccccgtaagcaacgaaaaaagttgtttataaatttatattagcagccagttacaacgtagtcacgctcagggggtttt

SEQ ID NO: 380251 - DNA, 573 bp, Homo sapiens
  misc_feature (27)..(27): n is a, c, g, or t
  misc_feature (41)..(41): n is a, c, g, or t
cagcccgttactgcgctaacattatantaaacttcaaccanaaaaacattgtgactaacattaaaaaagcagccatatgcacaacaccagcccttgtcaaatgatgtcccatcttaaccatgtgcaatttgtcctttataagctttgagtatcttacagcttgcctttttaatgttagtcacaatgtttttgtggtttgaagtttagtttaatgttagtgcagtgacgggaaatacacattatgctaatgttgatgacagaatttatttggttgccttgtgtgttaattgaatgcatacctaattgtaaaatttttttatttacaacattggaaattcagaagttaatgtttttttgtaagcacaaaagaagtattatagaaatttatcctagcaagactttacaagataggatcaaattctaatggaattgagccggtttcttatcctaaatgtttcctccctttttacaatctctgtccagcacctcttggttaaataatgtatgctgtgagacatgaaattaaaacagacctatgaaataaattattttaaaaccagaaaaaaaaaaaaa

SEQ ID NO: 380252 - DNA, 1666 bp, Homo sapiens
  misc_feature (1469)..(1469): n is a, c, g, or t
ttgttatgtctcggctccggccgcggccgccgctgatacacggttgtggagggtacggccgcggtctccggaggtggcgggggtgttggggacgggtgctgcgaccggcactgcccatccgagcgggacgggcgctgagtggccgggaggcagccgggtagccgcctggaggagcagtctcggggcctattattggttttttccctccgagaccgattccatctgcagagaccgcgacgccccatcctgggccgggccgcagtgcccgcccgcctgagaggcgccgcccgccagccggcccgagcgaacctggagccgccgccgtgcccgccgctcttctcgcggagcctgggcggtcggcggggcctggggcctgggcttcgggcgcggcgttgcggcggccgctcctccccgcgcagaacacgctgggccccgggcctggcccggccgagcgccgcgccctcctgacccgcggccgcgggagtccggcccccacggcccctcgggccccggcctgccgcccggatccccgcctcctgggcggatctgagttattttttggtctccccctcccccttgagatcgcggcaccggagggccgaccccgccacctgggtcagtgcccgccccgggggaagcgtccctcgttttgttcttccccgcgagctctccccgcgcccctctcctttctgtgcttaatggatgggggttttgagtttttcccctttatttttgtcggctcttgactgggaggcccggcgcgaggctctgcgtctctgcgtccctcgtcgccgcctcgcgcccgcgcggatcccgtcacctgcttccccgccggggatggccggccagtgacggcgccgggtggcccgcgcgtggacacggggccctcgcccaagctgccaccgagccgcggcccccgccctcgacccttctctctcccgtattccgagctctctggaaagagaggagactccagggaagatgtggctgaagctttttttcttgctcctctatttcctggtcctgttcgtcctggccaggttttttgaggccattgtgtggtatgaaactggcatctttgccacccagctggtggatccggtggcgctgagcttcaagaagctgaagaccattttggagtgccgggggttgggctactcagggttgcccgagaagaaggatgtccgggagctggtggaaaagtcaggtgacttgatggagggtgagctctattctgctctcaaggaagaagaagcatccgaatcggtttctagtaccaatttcagtggtgaaatgcacttctatgagcttgtggaagacacaaaagatggcatctggctggttcagtgatgctcaaggtttgcattgaccaccactgtctggcttgtgttccttgaggccagtggcttacatctgtcaaatggctggcctggtctgaaagaacaatctctggcaggacaactgagaangaatgacgattgaaaccctgtccttggcactgtgaactagccagctaagccaatcagcacagccaccttggtttaagcccttaaaagagggttgtactttttaaaactatgcttaaaattgaaaatatctactagaaacagaagagaaatattgtctccattgcttgccattctttcagctcagatcatatatatta

SEQ ID NO: 380253 - DNA, 293 bp, Homo sapiens
atggcatctggctggttcaggtatgaaaagcagtaataatttgataattcgagagccctaaaaaaattatttttaccaaaatagtatgtaccagccagtgacacttccgtgtccttgtgtcttgtttctcacacataactcagttctcttagggaggctccagtatcttcttaaaaaggttttggagactgaggaagatgaaaattgagtagtgggaaagagaaagatgggggatgggggtcaactttttgtttagaatccccagaagcaaatctattttagttattggacct

SEQ ID NO: 380254 - DNA, 609 bp, Homo sapiens
gaacattgtcttgtacctgccccaggtatgttcccaactcttttcactcacttctactatctctgctataaccaagaggtacctgggaagaacccctctcattcctccttcttttcctaacattggagctcttatcacatgtctcaaagatacctgtgcagtgaacaagatcttcactgaaagatgcctccagacttaggaactaaatatttacactggcgaggcaacctctaaactccttggagcagtgtcattctgcacacagacctgaaatgtttgggttatttgcaaccttgatcaagaaatgggataatgcctgaaaagtgagttatttttaaaagagggcaaagagtagagagtatggtagtatgattgcacagatacttcttaatcttcctaaggaatctgaaaaataagttaaacttgtctttgattatttgaccaaaagaactaccagattgactcttgagtggtagcaataaaaataaaataaaataaagaacaagaggcaataggcgcctgctttgcttgatcttcctaattttctaggtacaacttttttttctctcttttttttgagatggagtcttgctctgttacccaggctgg

SEQ ID NO: 380255 - DNA, 502 bp, Homo sapiens
gaaacacagaaatacaaaacaaactagaaaaacagagcttgtttttcacagctgccaagtagtggtaccactttttgattatttggaaattatttggctttggggtgaggtgctaaagaaatttgtcagggaagataaattgtttgcattacagcctagctgtttatttacagtttcctctcttgtagatattgcaggagaagaggctgggtccgatccacactcattatgtctgttccacaaacaagtacttcaaaagggaaagtcatgcttaaagaatacagtggacgcaagattgaagtagagcacatttttaaatggataactgctcatgcagcttctcggatcaaaaccatttataatgctgaacacttgaaagaagaatggaataaaagtgatcagtattggttaaaaatatacctatttgcaaaccttgaccagcccccagctttcttctctgcactaagtataaagtttactggaagagttgagtttatttttg

SEQ ID NO: 380256 - DNA, 2507 bp, Homo sapiens
ttgttatgtctcggctccggccgcggccgccgctgatacacggttgtggagggttttttgaggccattgtgtggtatgaaactggcatctttgccacccagctggtggatccggtggcgctgagcttcaagaagctgaagaccattttggagtgccgggggttgggctactcagggttgcccgagaagaaggatgtccgggagctggtggaaaagtcaggtgacttgatggagggtgagctctattctgctctcaaggaagaagaagcatccgaatcggtttctagtaccaatttcagtggtgaaatgcacttctatgagcttgtggaagacacaaaagatggcatctggctggttcaggtcatagcaaatgacagaagtcccttggtgggcaaaattcactgggagaaaatggttaaaaaggtgtcaagatttggaatacgtacaggcacatttaactgttccagtgatcccagatattgcaggagaagaggctgggtccgatccacactcattatgtctgttccacaaacaagtacttcaaaagggaaagtcatgcttaaagaatacagtggacgcaagattgaagtagagcacatttttaaatggataactgctcatgcagcttctcggatcaaaaccatttataatgctgaacacttgaaagaagaatggaataaaagtgatcagtattggttaaaaatatacctatttgcaaaccttgaccagcccccagctttcttctctgcactaagtataaagtttactggaagagttgagtttatttttgttaatgtagaaaattgggacaacaagagttatatgacagatattggcatatataatatgccatcatacatacttagaactcctgaaggaatttacaggtatggaaaccacacaggcgaatttatatcccttcaggccatggattcatttttgcgctcattacaacccgaggtaaatgatctgtttgttttgagcttggttctagttaatcttatggcttggatggacttatttattacacaaggagctaccataaagcgatttgtggttctcataagcactttagggacatataattctctattaattatttcctggctacctgtgttgggctttttacagctaccttacttagatagcttttatgaatatagcttaaaattgttgagatattccaatacaaccacactggcttcatgggtaagggcagactggatgttttactcttcacacccagccctgtttctcagtacataccttggtcatggtttactaattgattactttgagaagaagagaaggcgcaacaacaacaatgatgaagtcaatgccaataacttagaatggttatcaagtctgtgggactggtacaccagctacctcttccacccgattgcttcttttcagaactttcctgtagaatctgattgggacgaagaccctgacttattcttggagcgcttagctttccctgacctttggcttcaccctctgataccaactgattatattaaaaacttaccaatgtggcgatttaaatgtcttggagtccagtctgaagaggaaatgtcggaggggtctcaagatactgaaaatgactcggaaagtgagaacacagacactttgagtagtgagaaggaagtatttgaagataagcaaagcgtacttcacaattctccaggaacagcaagtcactgtgatgctgaggcttgttcatgtgccaataaatattgtcagaccagcccatgtgaaaggaaggggaggtcatatggatcatataacactaatgaagatatggaacctgattggttaacttggcctgctgatatgctgcactgtactgaatgtgttgtttgcctagagaattttgaaaatggatgtttgctaatggggttgccttgtggtcatgtgtttcatcagaattgcattgtgatgtggttggctgggggccgacattgttgccctgtttgccggtggccttcttataaaaaaaagcagccatatgcacaacaccagcccttgtcaaatgatgtcccatcttaaccatgtgcaatttgtcctttataagctttgagtatcttacagcttgcctttttaatgttagtcacaatgtttttgtggtttgaagtttagtttaatgttagtgcagtgacgggaaatacacattatgctaatgttgatgacagaatttatttggttgccttgtgtgttaattgaatgcatacctaattgtaaaatttttttatttacaacattggaaattcagaagttaatgtttttttgtaagcacaaaagaagtattatagaaatttatcctagcaagactttacaagataggatcaaattctaatggaattgagccggtttcttatcctaaatgtttcctccctttttacaatctctgtccagcacctcttggttaaataatgtatgctgtgagacatgaaattaaaacagacctatgaaataaattattttaaaaccagaaaaaaaaaaaaa

SEQ ID NO: 380257 - DNA, 3441 bp, Homo sapiens
ttgttatgtctcggctccggccgcggccgccgctgatacacggttgtggagggtacggccgcggtctccggaggtggcgggggtgttggggacgggtgctgcgaccggcactgcccatccgagcgggacgggcgctgagtggccgggaggcagccgggtagccgcctggaggagcagtctcggggcctattattggttttttccctccgagaccgattccatctgcagagaccgcgacgccccatcctgggccgggccgcagtgcccgcccgcctgagaggcgccgcccgccagccggcccgagcgaacctggagccgccgccgtgcccgccgctcttctcgcggagcctgggcggtcggcggggcctggggcctgggcttcgggcgcggcgttgcggcggccgctcctccccgcgcagaacacgctgggccccgggcctggcccggccgagcgccgcgccctcctgacccgcggccgcgggagtccggcccccacggcccctcgggccccggcctgccgcccggatccccgcctcctgggcggatctgagttattttttggtctccccctcccccttgagatcgcggcaccggagggccgaccccgccacctgggtcagtgcccgccccgggggaagcgtccctcgttttgttcttccccgcgagctctccccgcgcccctctcctttctgtgcttaatggatgggggttttgagtttttcccctttatttttgtcggctcttgactgggaggcccggcgcgaggctctgcgtctctgcgtccctcgtcgccgcctcgcgcccgcgcggatcccgtcacctgcttccccgccggggatggccggccagtgacggcgccgggtggcccgcgcgtggacacggggccctcgcccaagctgccaccgagccgcggcccccgccctcgacccttctctctcccgtattccgagctctctggaaagagaggagactccagggaagatgtggctgaagctttttttcttgctcctctatttcctggtcctgttcgtcctggccaggttttttgaggccattgtgtggtatgaaactggcatctttgccacccagctggtggatccggtggcgctgagcttcaagaagctgaagaccattttggagtgccgggggttgggctactcagggttgcccgagaagaaggatgtccgggagctggtggaaaagtcaggtgacttgatggagggtgagctctattctgctctcaaggaagaagaagcatccgaatcggtttctagtaccaatttcagtggtgaaatgcacttctatgagcttgtggaagacacaaaagatggcatctggctggttcaggtcatagcaaatgacagaagtcccttggtgggcaaaattcactgggagaaaatggttaaaaaggtgtcaagatttggaatacgtacaggcacatttaactgttccagtgatcccagatattgcaggagaagaggctgggtccgatccacactcattatgtctgttccacaaacaagtacttcaaaagggaaagtcatgcttaaagaatacagtggacgcaagattgaagtagagcacatttttaaatggataactgctcatgcagcttctcggatcaaaaccatttataatgctgaacacttgaaagaagaatggaataaaagtgatcagtattggttaaaaatatacctatttgcaaaccttgaccagcccccagctttcttctctgcactaagtataaagtttactggaagagttgagtttatttttgttaatgtagcatacatacttagaactcctgaaggaatttacaggtatggaaaccacacaggcgaatttatatcccttcaggccatggattcatttttgcgctcattacaacccgaggtaaatgatctgtttgttttgagcttggttctagttaatcttatggcttggatggacttatttattacacaaggagctaccataaagcgatttgtggttctcataagcactttagggacatataattctctattaattatttcctggctacctgtgttgggctttttacagctaccttacttagatagcttttatgaatatagcttaaaattgttgagatattccaatacaaccacactggcttcatgggtaagggcagactggatgttttactcttcacacccagccctgtttctcagtacataccttggtcatggtttactaattgattactttgagaagaagagaaggcgcaacaacaacaatgatgaagtcaatgccaataacttagaatggttatcaagtctgtgggactggtacaccagctacctcttccacccgattgcttcttttcagaactttcctgtagaatctgattgggacgaagaccctgacttattcttggagcgcttagctttccctgacctttggcttcaccctctgataccaactgattatattaaaaacttaccaatgtggcgatttaaatgtcttggagtccagtctgaagaggaaatgtcggaggggtctcaagatactgaaaatgactcggaaagtgagaacacagacactttgagtagtgagaaggaagtatttgaagataagcaaagcgtacttcacaattctccaggaacagcaagtcactgtgatgctgaggcttgttcatgtgccaataaatattgtcagaccagcccatgtgaaaggaaggggaggtcatatggatcatataacactaatgaagatatggaacctgattggttaacttggcctgctgatatgctgcactgtactgaatgtgttgtttgcctagagaattttgaaaatggatgtttgctaatggggttgccttgtggtcatgtgtttcatcagaattgcattgtgatgtggttggctgggggccgacattgttgccctgtttgccggtggccttcttataaaaaaaagcagccatatgcacaacaccagcccttgtcaaatgatgtcccatcttaaccatgtgcaatttgtcctttataagctttgagtatcttacagcttgcctttttaatgttagtcacaatgtttttgtggtttgaagtttagtttaatgttagtgcagtgacgggaaatacacattatgctaatgttgatgacagaatttatttggttgccttgtgtgttaattgaatgcatacctaattgtaaaatttttttatttacaacattggaaattcagaagttaatgtttttttgtaagcacaaaagaagtattatagaaatttatcctagcaagactttacaagataggatcaaattctaatggaattgagccggtttcttatcctaaatgtttcctccctttttacaatctctgtccagcacctcttggttaaataatgtatgctgtgagacatgaaattaaaacagacctatgaaataaattattttaaaaccagaaaaaaaaaaaaa

SEQ ID NO: 380258 - DNA, 1670 bp, Homo sapiens
ttgttatgtctcggctccggccgcggccgccgctgatacacggttgtggagggttttttgaggccattgtgtggtatgaaactggcatctttgccacccagctggtggatccggtggcgctgagcttcaagaagctgaagaccattttggagtgccgggggttgggctactcagggttgcccgagaagaaggatgtccgggagctggtggaaaagtcaggtgacttgatggagggtgagctctattctgctctcaaggaagaagaagcatccgaatcggtttctagtaccaatttcagtggtgaaatgcacttctatgagcttgtggaagacacaaaagatggcatctggctggttcagctctgtcagtcagggatccttaaactcttcaaaaccaaatgctagaacacgttgctgaataaataaggccctggcattgaacattgtcttgtacctgccccaggtcatagcaaatgacagaagtcccttggtgggcaaaattcactgggagaaaatggttaaaaaggtgtcaagatttggaatacgtacaggcacatttaactgttccagtgatcccagaactttcctgtagaatctgattgggacgaagaccctgacttattcttggagcgcttagctttccctgacctttggcttcaccctctgataccaactgattatattaaaaacttaccaatgtggcgatttaaatgtcttggagtccagtctgaagaggaaatgtcggaggggtctcaagatactgaaaatgactcggaaagtgagaacacagacactttgagtagtgagaaggaagtatttgaagataagcaaagcgtacttcacaattctccaggaacagcaagtcactgtgatgctgaggcttgttcatgtgccaataaatattgtcagaccagcccatgtgaaaggaaggggaggtcatatggatcatataacactaatgaagatatggaacctgattggttaacttggcctgctgatatgctgcactgtactgaatgtgttgtttgcctagagaattttgaaaatggatgtttgctaatggggttgccttgtggtcatgtgtttcatcagaattgcattgtgatgtggttggctgggggccgacattgttgccctgtttgccggtggccttcttataaaaaaaagcagccatatgcacaacaccagcccttgtcaaatgatgtcccatcttaaccatgtgcaatttgtcctttataagctttgagtatcttacagcttgcctttttaatgttagtcacaatgtttttgtggtttgaagtttagtttaatgttagtgcagtgacgggaaatacacattatgctaatgttgatgacagaatttatttggttgccttgtgtgttaattgaatgcatacctaattgtaaaatttttttatttacaacattggaaattcagaagttaatgtttttttgtaagcacaaaagaagtattatagaaatttatcctagcaagactttacaagataggatcaaattctaatggaattgagccggtttcttatcctaaatgtttcctccctttttacaatctctgtccagcacctcttggttaaataatgtatgctgtgagacatgaaattaaaacagacctatgaaataaattattttaaaaccagaaaaaaaaaaaaa

SEQ ID NO: 380259 - DNA, 1644 bp, Homo sapiens
ttgttatgtctcggctccggccgcggccgccgctgatacacggttgtggagggtacggccgcggtctccggaggtggcgggggtgttggggacgggtgctgcgaccggcactgcccatccgagcgggacgggcgctgagtggccgggaggcagccgggtagccgcctggaggagcagtctcggggcctattattggttttttccctccgagaccgattccatctgcagagaccgcgacgccccatcctgggccgggccgcagtgcccgcccgcctgagaggcgccgcccgccagccggcccgagcgaacctggagccgccgccgtgcccgccgctcttctcgcggagcctgggcggtcggcggggcctggggcctgggcttcgggcgcggcgttgcggcggccgctcctccccgcgcagaacacgctgggccccgggcctggcccggccgagcgccgcgccctcctgacccgcggccgcgggagtccggcccccacggcccctcgggccccggcctgccgcccggatccccgcctcctgggcggatctgagttattttttggtctccccctcccccttgagatcgcggcaccggagggccgaccccgccacctgggtcagtgcccgccccgggggaagcgtccctcgttttgttcttccccgcgagctctccccgcgcccctctcctttctgtgcttaatggatgggggttttgagtttttcccctttatttttgtcggctcttgactgggaggcccggcgcgaggctctgcgtctctgcgtccctcgtcgccgcctcgcgcccgcgcggatcccgtcacctgcttccccgccggggatggccggccagtgacggcgccgggtggcccgcgcgtggacacggggccctcgcccaagctgccaccgagccgcggcccccgccctcgacccttctctctcccgtattccgagctctctggaaagagaggagactccagggaagatgtggctgaagctttttttcttgctcctctatttcctggtcctgttcgtcctggccaggttttttgaggccattgtgtggtatgaaactggcatctttgccacccagctggtggatccggtggcgctgagcttcaagaagctgaagaccattttggagtgccgggggttgggctactcagggttgcccgagaagaaggatgtccgggagctggtggaaaagtcaggtgacttgatggagggtgagctctattctgctctcaaggaagaagaagcatccgaatcggtttctagtaccaatttcagtggtgaaatgcacttctatgagcttgtggaagacacaaaagatggcatctggctggttcaggtcaatgagtggtcattgaagataagaaaggaaatgagagttgttgacaggcaaataagggatatccaaagagaagaagaaaaagtgaaacgatctgtgaaagatgctgccaagaagggccagaaggatgtctgcatagttctggccaaggagatgatcaggtcaaggaaggctgtgagcaagctgtatgcatccaaagcacacatgaactcagtgctcatggggatgaagaaccagctcgcggtcttgcgagtggctggttccctgcagaagagcacagaagtgatgaaggccatg

SEQ ID NO: 380260 - DNA, 1998 bp, Homo sapiens
cagaagactacattagtgagatgtaagaattattaaatattccatttccgctttggctacaattatgaagaagttgaaggtacttcttttagaccaccagtaaataatcctccttcaaaaaataaaaataaaagaaaaaggaaaatcattcaggaagaaatgacctgtctaaaaaaacctaaggaagaataataatataagaaaggaaatttaaaaacattccacaagaagaaaaattattgtttatactcctacttatggttatatcttatattctctattcaagtgacctgtcttttaaaaaggcagtgctgtcttacctcttgctagtgggttaaatgttttcaaaaattatagcagtagtagaagttttgtataaaatttgtccttatttgttaattgtatataaatgttaattatttgatacgaatgttatgcatttagtatgcacattgaagtctaaactgtagaagagtctaaaacaagttctctttttgcagattcacatactaatggtttaattctgtgctctgtttaaagtactattataactagagtagatctgaatgaggataaccctaaaatcatgaggaatggaagaatggaccttgaaactacctaggcttttatgcatggcacctctttataatgaagacactttttaaagtttttgtttttgtttcaattaccgctagatttttttttctctttttttaaaatccattttactggaaagttggccagcagagggagtagaaattattaaaattctagtgtttggattgggcccttctctaacagtacatactcattcccaaagcaatccaaaaacaaaatgtgaaccatttgggtttcaaatgttaagaacactaaatagcatgatttaaaaaatgaaaaatgctaacacccaagaaaagaagatattaagtgctttttaacaactcctagagtacaaaatgagtacatcataatgctggctcttctactaatgaaccatcgagtgatattgaataaattatttatcttctcagtttccttatctgtaaattacaatattagactaagtaagtttttccaactcttcactaccaattaccttaggcttttataatgctccgcctacttcagtcccatgtttcagaagcttttgtctattttttaaactcattgattaaataatgattaatgcattctccacattttaatattgcaaaggcccattggagtttctgaagtggctccacagaattgaaataatttcaaataactgtaaaggaactgaaaatcttcacagagatgaagtggggtttccattaggtgctttgaaatttgataacaaatcatcaacttccactggtcaatatatagattttgggtgtctgaggccccaagattagatgccactaatctccaaagattccctccaattatgaaatattttaatgtctacttttagagagcactagccagtatatgaccatgtgattaatttcttttcacactagataaaattacctggttcaaaagtggtttttgtttattaaatttggtaataaatatatataatacacagacaggatagtttttatgctgaagtttttggccagctttagtttgaggactccttgataagcttgctaaactttcagagtgccctgagacacttccagccatccctcctcctgccttcattggggcagacttgcattgcagtctgacagtaattttttttctgattgagaattatgtaaattcaatacaatgtcagtttttaaaagtcaaagttagatcaagagaatatttcagagttttggtttacacatcaagaaacagacacacatacctaggaaagatttacacaatagataatcatcttaatgtgaaagatatttgaagtattaattttaatatattaaatatgatttctgttatagtcttctgtatggaattttgtcacttaagatgagctgcaaataaataataccttcaatggaaaac

SEQ ID NO: 380261 - DNA, 1442 bp, Homo sapiens
cagaagactacattagtgagatgtaagaattattaaatattccatttccgctttggctacaattatgaagaagttgaaggtacttcttttagaccaccagtaaataatcctccttcaaaaaataaaaataaaagaaaaaggaaaatcattcaggaagaaatgacctgtctaaaaaaacctaaggaagaataataatataagaaaggaaatttaaaaacattccacaagaagaaaaattattgtttatactcctacttatggttatatcttatattctctattcaagtgacctgtcttttaaaaaggcagtgctgtcttacctcttgctagtgggttaaatgttttcaaaaattatagcagtagtagaagttttgtataaaatttgtccttatttgttaattgtatataaatgttaattatttgatacgaatgttatgcatttagtatgcacattgaagtctaaactgtagaagagtctaaaacaagttctctttttgcagattcacatactaatggtttaattctgtgctctgtttaaagtactattataactagagtagatctgaatgaggataaccctaaaatcatgaggaatggaagaatggaccttgaaactacctaggcttttatgcatggcacctctttataatgaagacactttttaaagtttttgtttttgtttcaattaccgctagatttttttttctctttttttaaaatccattttactggaaagttggccagcagagggagtagaaattattaaaattctagtgtttggattgggcccttctctaacagtacatactcattcccaaagcaatccaaaaacaaaatgtgaaccatttgggtttcaaatgttaagaacactaaatagcatgatttaaaaaatgaaaaatgctaacacccaagaaaagaagatattaagtgctttttaacaactcctagagtacaaaatgagtacatcataatgctggctcttctactaatgaaccatcgagtgatattgaataaattatttatcttctcagtttccttatctgtaaattacaatattagactaagtaagtttttccaactcttcactaccaattaccttaggcttttataatgctccgcctacttcagtcccatgtttcagaagcttttgtctattttttaaactcattgattaaataatgattaatgcattctccacattttaatattgcaaaggcccattggagtttctgaagtggctccacagaattgaaataatttcaaataactgtaaaggaactgaaaatcttcacagagatgaagtggggtttccattaggtgctttgaaatttgataacaaatcatcaacttccactggtcaatatatagattttgggaatctttggagacttagtggcatctaatcttggggcctcagacacccgaaatctatatatgaccag

SEQ ID NO: 380262 - DNA, 2251 bp, Homo sapiens
cagaagactacattagtgagatgtaagaattattaaatattccatttccgctttggctacaattatgaagaagttgaaggtacttcttttagaccaccagtaaataatcctccttcaaaaaataaaaataaaagaaaaaggaaaatcattcaggaagaaatgacctgtctaaaaaaacctaaggaagaataataatataagaaaggaaatttaaaaacattccacaagaagaaaaattattgtttatactcctacttatggttatatcttatattctctattcaagtgacctgtcttttaaaaaggcagtgctgtcttacctcttgctagtgggttaaatgttttcaaaaattatagcagtagtagaagttttgtataaaatttgtccttatttgttaattgtatataaatgttaattatttgatacgaatgttatgcatttagtatgcacattgaagtctaaactgtagaagagtctaaaacaagttctctttttgcagattcacatactaatggtttaattctgtgctctgtttaaagtactattataactagagtagatctgaatgaggataaccctaaaatcatgaggaatggaagaatggaccttgaaactacctaggcttttatgcatggcacctctttataatgaagacactttttaaagtttttgtttttgtttcaattaccgctagatttttttttctctttttttaaaatccattttactggaaagttggccagcagagggagtagaaattattaaaattctagtgtttggattgggcccttctctaacagtacatactcattcccaaagcaatccaaaaacaaaatgtgaaccatttgggtttcaaatgttaagaacactaaatagcatgatttaaaaaatgaaaaatgctaacacccaagaaaagaagatattaagtgctttttaacaactcctagagtacaaaatgagtacatcataatgctggctcttctactaatgaaccatcgagtgatattgaataaattatttatcttctcagtttccttatctgtaaattacaatattagactaagtaagtttttccaactcttcactaccaattaccttaggcttttataatgctccgcctacttcagtcccatgtttcagaagcttttgtctattttttaaactcattgattaaataatgattaatgcattctccacattttaatattgcaaaggcccattggagtttctgaagtggctccacagaattgaaataatttcaaataactgtaaaggaactgaaaatcttcacagagatgaagtggggtttccattaggtgctttgaaatttgataacaaatcatcaacttccactggtcaatatatagattttgggtgtctgaggccccaagattagatgccactaatctccaaagattccctccaattatgaaatattttaatgtctacttttagagagcactagccagtatatgaccatgtgattaatttcttttcacactagataaaattacctggttcaaaagtggtttttgtttattaaatttggtaataaatatatataatacacagacaggatagtttttatgctgaagtttttggccagctttagtttgaggactccttgataagcttgctaaactttcagagtgccctgagacacttccagccatccctcctcctgccttcattggggcagacttgcattgcagtctgacagtaattttttttctgattgagaattatgtaaattcaatacaatgtcagtttttaaaagtcaaagttagatcaagagaatatttcagagttttggtttacacatcaagaaacagacacacatacctaggaaagatttacacaatagataatcatcttaatgtgaaagatatttgaagtattaattttaatatattaaatatgatttctgttatagtcttctgtatggaattttgtcacttaagatgagctgcaaataaataataccttcaatggaaaacaaaaaaaaaaaaaaaaaaaaaaaaaaactgtgtgtgtgggggcgcccctgggcccctagaaaagctcttttcaaaacacttcgcgtggggggcgcggcggccccaaggagggttcatcgtgacaccggtggcccaagaggcggtccccgaaggagacaccgcggcacaggaacacgagtgctcggggtatcctccacccaattaaaaagcgcgcggggggaaacccgacgcttcgctggacaaatctccaagg

SEQ ID NO: 380263 - DNA, 458 bp, Homo sapiens
tatgggaaagtggtgattttatctaagttaacgtttttataatgattactttgctatcttccttgaatctctttaataagaacttgtacaattaacacttacatttgaggcttagattcattgctttaaaaacagcaatagtttctattattaaattgcatttgaaagttatttccctttattttgaatgttatttggatcagtttaaacaagtgctctaaattgttccattaaataaattggttgaactagaaatggaggctttgtagataaaactgtcaccttggaattattggctgaatttaaatttcatgctaaaccatgtggttgtgaaaacgatgcatcaaatatgggtattgcaaataatctttattgcatgcatcatcttcaaagacttatctagaaaattaaataataaaaatgtgttttttgtttaaataaaaccatgcatttattgt

SEQ ID NO: 380264 - DNA, 227 bp, Homo sapiens
ttttagtagagacggggtttcatcatgttggccagactgatctcaaactcctgacctcaggtgatccacccacctcctcggcctcccaaagtgctgggattacaggtgtgaaccactgcgcctggccttaaaccaaaatcttgattgtgcttaaaatatttaagtaaaaaggtactttgctatgccagtgttccagtttgacagtgatcaattaaaaaatttttaat

SEQ ID NO: 380265 - DNA, 356 bp, Homo sapiens
gcatggtggcgtgggtctgtagtcacagctactcaggaggctgaggcaggagaatcgcttgaacccaggaggtagaggttgcagtgagctgagatcacactgcttcactccagcctgggtgacaaagagagactgcgtctcaaaaaaaaaaaaacaatgagaccgtcatcactagatcacggatttcaaattaaccattccacatattagtcgttcttcaaagaataagtttctctttatttagttaatatgcacaatagattacacatggtgtaacagaagtagaagtagattttttaaaaaattagaggagtcccagggtgctgtgcacctcttaagatctgttaataattcac

SEQ ID NO: 380266 - DNA, 339 bp, Homo sapiens
atctaattatatcctgatagggagaaggatagattcttactgagacaatgcaaataattacattgtcatgtaaaataaaagaactcaataaaggcatgttgtagaatatttggccattgctttgattagttttacagacaaggccaatcaatatgtgttgtattttctatataattaacatctttaaatttatctaatgatttaccagtttatatttcagctactgttgcagcgtaacaaaccaccccaaacttattgtggtaaaggaacaaccattttagatgctcacaagtttttctggtcaggaattttgtcaggacttagacaatccttttgctc

SEQ ID NO: 380267 - DNA, 2142 bp, Homo sapiens
tgttcccctgtgtttttttattttcctgacttattcaagcagagctagctcagagtacaggtctgtaacaagggcttattaggagatagatgaaaaagtgcaggtttgtatatgtaagttgtccattactatagatagatactattccaggcattggactttaactgcactgcctaaaagagcccaaagataaacttcacaataggctgatatgtggaatgggaggaggagataaagaacggggtttctgttttattcataagctcagtcttagcttcagtcttttctgagcatttgtttatttgtaagatggaagtcaaagtaagtgggaagtctgtaggtcagctctattttccatgcctgcccttgacttctcctcagctgttctctgcctgtgcaggtgaggcaggggaggtggttggtccagagagaactaaaagaagttgttttcttggactataggtccagctgcaaggcagggtgcctttcctatgtgttcctcttttcactaaaagactcaaaatgctttagcagctagatctggaactaactcttctggatggggtaggaacttccctgcccttcccttagggaagctcatgtttccaagtcagacagcagggggcattgggtgcctttcggacagaaggaagctgcctaagctagaaggcctgcctgctgtagtttatttcttttgccttgttcagtgaatttacccagagggtggctgagattgaggctttgggagccccaagaagctgcttggttttaatgtgctgccttatagctgagcctgttgtgctcagggcaagtagtaggatgttccccctgggatgtgcaaggttctctcaagcagacatgagcctccatcactcccaccactccctgcaactcagcctcctcttctcagcctgtgccttcctccagttctagtaaacactgccaaatgaatatagttctccgactcttctctgggggttcattggcagctgctgctttcttcattttttaaaatttatttgccacttggtgaaagccactgagatggttttttccagccttgggcaagttggagctttggaatctggagtgaatgaggtcatctggatttcattgtcttcttacgaagccagcagtaagcttgggcagtccactcacccacccctagggccatatctggggatgaagccacccccgacctatacataggaaatgattgatgtgcctggtcttatacccagtctgtgtctggtttctctaccctcagtgccctttggcttaggctcaggatgggtgggcctcccttccccagcagctgcctcagccctgatcaagggcagttatttggctcaaggtgagtagtggtttttaaaccctactcccacacactgctgagtctgtgttttcctttcttcctgaccaggtaaactgtcttgagccccaccctcacctgcctgtgctggcaaccagtggcctagaccatgatgtgaagatctgggcacccacagctgaagcttccactgagctgacagggttaaaagatgtgattaagaagaacaagcgggagcgggatgaagatagcttgcaccaaactgacctgtttgatagtcacatgctgtggttccttatgcatcacctgagacagagacgccatcaccgggtaagctagggttggaaatgaattcccaagggagtgacccttttaagagggctaaaaagttccagagtagtgacttcaagcagtaatcaggtgatcttggtcggatttcctatccactgtcctctgtccccatcagatccctgatatagccttggaagagacatcagcagaaaagggtggtatctacttttgtccattgccgtccatgtgtaatgctatcttcataaaggcaaaagctggagggtggaggagggaattgagaagaaataacaagtctcagtgtgacccttctatttttcctcttatgccaaaagaggcctagttcaggggttggcaaactggcagttggcctgctgctggtttttgtaaataaagtttcattggcttgcagccatacccattctgtgtattgtctgtggcggccttcacgctacaatgagttgaatagttgcaataaagaccatatagaccacaaaaaaaaa

SEQ ID NO: 380268 - DNA, 574 bp, Homo sapiens
gtccggctatacattatcaggtgagtgggagttggaggcattaaaattcttgagttcaagacagactgcgctgatgctcaactgctgaccactaaagtcataaaattcctaccagtttcccaaagagcttgagtgttgttcttggctttgttccagctctggttgaattacttttacaagtttaattgtctgtgggcttcttgtctttctgtcctaaactattgctgtgtatctccaaatgacttaagcctagaagtgaatgtgtgccccctgccccatgtcttcttttcttctttattcattttccttgtattttgtctttgtgtcgatcatattttttacgttgttaaaaactggaacttagtttgcctgagttctgttcatcctgttgtcaaatcaggtctcttcccctctcacagcttcgggttgtcatcccttggtatttagaggagaatatttagctgcttgtgactaaaagctggggagtgatgagtgatgctgcctttagttggtgtctgagtccagtctatttcagaattccgactttttaggatatagtgggaaattttttgta

SEQ ID NO: 380269 - DNA, 254 bp, Homo sapiens
ccagcagctctgagaaaaggggcaggaggaagaagtatctgggaataccattctctcactcttctcctgccccttttcccagcagctctgagaccagatgttggctgctgtacttactccctgaggtagggaatgtgtggtgatcgagtggtctgtgttcctattgctggtggggtgatagggtgggctaaaaaccatgcactctggaatttgttgtattttctcccagtaaagcttttcttctcccgactgct

SEQ ID NO: 380270 - DNA, 4170 bp, Homo sapiens
gaaagcgtggcagcgcaggcgcaagcgcagagagcggaggcggtggtggtggcggccgctggccagtgtaagatggcggcggcgttggtggtggcagtggacggggcggctgggcctggaacagtcggagcagccgctagcagaaggatgacccaagacgggaagcgggctgctgagcctcgccgattcccgtgcttgtaactgccccagccggacaccccccctcccttgacctacccggtctgtgtctcgttccggctcggcctgcgccccccctcgcttcccagccggtttcccctaaggatgggcctgacccgtatcccaagctcttagcgctcaggtcttttccttccgccgacccgaagtcatcgctgggagtactggttgccctttcctcagtccttcagtgaatctacagacctattttctcaggagctcagcctggccttacttcagtgataaaaggaggaaaggctggctacagcaaacatcattcaagatgtccagcaaagggagcagcacagatggcagaacagacttagctaatggaagcctgtctagcagtccagaggagatgtctggagctgaagaggggagggagacatcctcaggcattgaagtggaggcctcagacctgagtttgagcttgactggggatgatggtggccccaaccgcaccagcacagaaagtcgaggcacagacacagagagctcaggtgaagataaggactctgacagcatggaggacactggtcattactccattaatgatgaaaatcgagtccatgaccgctcagaggaagaggaagaggaggaagaagaggaggaagaagagcagcctcggcgccgtgtacagcgcaagcgggctaaccgtgaccaggactcatcagatgatgagcgggccctagaggactgggtgtcctcagaaacatcagctctaccccgacctcgctggcaagccctccctgcccttcgggagcgggagctgggttcaagtgcccgctttgtctatgaggcctgtggggcaagagtctttgtgcagcgtttccgcctgcagcatgggcttgagggccatactggttgtgtcaataccctgcactttaaccagcgcggcacctggctggccagtggcagcgatgacctgaaggtggtggtgtgggattgggtacggcggcagccagtactggactttgagagtggccacaaaagtaatgtgttccaggccaagtttcttcctaacagtggtgattctactctggccatgtgtgcccgtgacgggcaggttcgagtagcagaactgtctgccacacagtgttgcaagaatacaaaacgtgtggcccagcacaagggagcgtcccacaagttggcactggaaccagactctccctgtacgttcttatctgcaggtgaagatgcagttgttttcaccattgacctgagacaagaccgcccagcgtcgaaactggtggtgacaaaagagaaagagaagaaagtggggctgtatacgatctatgtgaatcctgccaatacccaccagtttgcagtgggtggacgagatcagtttgtaaggatttatgaccagaggaaaattgatgagaatgagaacaatggagtactcaagaagttctgtcctcatcacctggtgaacagtgagtccaaagcaaacatcacctgtcttgtgtacagccacgacggcacagagctcctggccagttacaatgatgaagacatttacctcttcaactcctctcacagtgatggggcccagtatgttaagagatacaagggccacagaaataatgccacagtaaaaggcgtcaatttctatggccccaagagtgagtttgtggtgagcggtagtgactgtgggcacatcttcctctgggagaaatcatcctgccagattattcagttcatggagggggacaagggaggcgtggtaaactgtcttgagccccaccctcacctgcctgtgctggcaaccagtggcctagaccatgatgtgaagatctgggcacccacagctgaagcttccactgagctgacagggttaaaagatgtgattaagaagaacaagcgggagcgggatgaagatagcttgcaccaaactgacctgtttgatagtcacatgctgtggttccttatgcatcacctgagacagagacgccatcaccggcgctggcgagaacctggggttggggccacagacgcggactctgatgagtctcccagctcctcagacacatcggacgaggaggagggccctgaccgggtgcagtgcatgccatcttgaggcctcatacctaggtggggcaggctggggctgccaacctgatcctgcctgggcaaccctttcctgtcccaggccctacattcagcagaaacgcactttggactttttgctttagataaaagaaagacatcccaggagaaggacaaaccagaggagtgaaccaacaaagagtacctaggaatgggagttgagccctggaatggggctccatggagaggtgcataggactcggcagaaatggcctctccccaaagcctctttttgagaggagagggaagcctattttgttaactggtttgggatagggaatggggtttctttttctttaatctcccttgtttcttgggctgggggaggggtggggggaacaactggctattcagtaccaaggggccagagtggagggtaggagtgccactctctctttggtttaggtttttgaccttttcttcctttgttttttaaaagtttatgacagttggctccccccccacccccagcaaccccatcccagaatcctattttcctgggaagtccttaaagcccctaaccatcccacactcttcactttcctttccaccttattcattctctgtacttaccacagtattttgcacttgattacatatccttcactctcttctcttcatcccatcaccccctaaataggtcaggtgagggaggctgggaagaggtgggaggaggggcagaagtgaaggaagaataggaaggatattacctcttctgttatttttttaagaaacattgtttggtggcagcaatctccctgtccctatcactgttagaggcctaattttatatctataaatatattaaaaagcaagtcaaacttggatgtatcaaggtaaaattattgtcaaagtttaaatacctatatattctctgaatgcaataaagggacttaagagtgaacaagagtaatggtgtggaagtgacacctggggtcagtttacctctgtgtatggtcactagagattgggacttaccctttaggttttaggaggcttgagaatggaaggatcctcatttctgcccttcctggttccctgctttggtgtaggggttgggaaaaacaggaaattcctctcagctctgcctcagatctcctacctctccttaagtcttgtagggggttccaaggatggctcttctaaccagaggctggcctgtctttaaaacttaactactttagggtggtgccaccactgcagactattgtggtactttgtgacagaagacatgtacacacacaccacacacatacatacacactctctcactctgtctctcttacctttagctgcttgatcattaagccatccaacttcatgccagttcccttctttatagaagagtgaagggaaagacttcctgggtttgacttaaaccttgtccacctcttgatattttaggattgaggaataagtcattaatctaaggactgattacagtggctggagcttgggcacttgtcttatcactggtcactgagtctgaaagtcccagctgaattcttgcccttaagtgcttttgctgctatttttttgcccccagttccacaagatccaaccaagaattctgtatcctgggacagtcagattcttctaaatcaggccaggaaggaggggaaaagagtgagagaatggtattcccagatacttcttcctcctgccccttttcccagcagctctgagaccagatgttggctgctgtacttactccctgaggtagggaatgtgtggtgatcgagtggtctgtgttcctattgctggtggggtgatagggtgggctaaaaaccatgcactctggaatttgttgtattttctcccagtaaagcttttcttctcccgactgct

SEQ ID NO: 380271 - DNA, 3764 bp, Homo sapiens
gaaagcgtggcagcgcaggcgcaagcgcagagagcggaggcggtggtggtggcggccgctggccagtgctggctacagcaaacatcattcaagatgtccagcaaagggagcagcacagatggcagaacagacttagctaatggaagcctgtctagcagtccagaggagatgtctggagctgaagaggggagggagacatcctcaggcattgaagtggaggcctcagacctgagtttgagcttgactggggatgatggtggccccaaccgcaccagcacagaaagtcgaggcacagacacagagagctcaggtgaagataaggactctgacagcatggaggacactggtcattactccattaatgatgaaaatcgagtccatgaccgctcagaggaagaggaagaggaggaagaagaggaggaagaagagcagcctcggcgccgtgtacagcgcaagcgggctaaccgtgaccaggactcatcagatgatgagcgggccctagaggactgggtgtcctcagaaacatcagctctaccccgacctcgctggcaagccctccctgcccttcgggagcgggagctgggttcaagtgcccgctttgtctatgaggcctgtggggcaagagtctttgtgcagcgtttccgcctgcagcatgggcttgagggccatactggttgtgtcaataccctgcactttaaccagcgcggcacctggctggccagtggcagcgatgacctgaaggtggtggtgtgggattgggtacggcggcagccagtactggactttgagagtggccacaaaagtaatgtgttccaggccaagtttcttcctaacagtggtgattctactctggccatgtgtgcccgtgacgggcaggttcgagtagcagaactgtctgccacacagtgttgcaagaatacaaaacgtgtggcccagcacaagggagcgtcccacaagttggcactggaaccagactctccctgtacgttcttatctgcaggtgaagatgcagttgttttcaccattgacctgagacaagaccgcccagcgtcgaaactggtggtgacaaaagagaaagagaagaaagtggggctgtatacgatctatgtgaatcctgccaatacccaccagtttgcagtgggtggacgagatcagtttgtaaggatttatgaccagaggaaaattgatgagaatgagaacaatggagtactcaagaagttctgtcctcatcacctggtgaacagtgagtccaaagcaaacatcacctgtcttgtgtacagccacgacggcacagagctcctggccagttacaatgatgaagacatttacctcttcaactcctctcacagtgatggggcccagtatgttaagagatacaagggccacagaaataatgccacagtaaaaggcgtcaatttctatggccccaagagtgagtttgtggtgagcggtagtgactgtgggcacatcttcctctgggagaaatcatcctgccagattattcagttcatggagggggacaagggaggcgtggtaaactgtcttgagccccaccctcacctgcctgtgctggcaaccagtggcctagaccatgatgtgaagatctgggcacccacagctgaagcttccactgagctgacagggttaaaagatgtgattaagaagaacaagcgggagcgggatgaagatagcttgcaccaaactgacctgtttgatagtcacatgctgtggttccttatgcatcacctgagacagagacgccatcaccggcgctggcgagaacctggggttggggccacagacgcggactctgatgagtctcccagctcctcagacacatcggacgaggaggagggccctgaccgggtgcagtgcatgccatcttgaggcctcatacctaggtggggcaggctggggctgccaacctgatcctgcctgggcaaccctttcctgtcccaggccctacattcagcagaaacgcactttggactttttgctttagataaaagaaagacatcccaggagaaggacaaaccagaggagtgaaccaacaaagagtacctaggaatgggagttgagccctggaatggggctccatggagaggtgcataggactcggcagaaatggcctctccccaaagcctctttttgagaggagagggaagcctattttgttaactggtttgggatagggaatggggtttctttttctttaatctcccttgtttcttgggctgggggaggggtggggggaacaactggctattcagtaccaaggggccagagtggagggtaggagtgccactctctctttggtttaggtttttgaccttttcttcctttgttttttaaaagtttatgacagttggctccccccccacccccagcaaccccatcccagaatcctattttcctgggaagtccttaaagcccctaaccatcccacactcttcactttcctttccaccttattcattctctgtacttaccacagtattttgcacttgattacatatccttcactctcttctcttcatcccatcaccccctaaataggtcaggtgagggaggctgggaagaggtgggaggaggggcagaagtgaaggaagaataggaaggatattacctcttctgttatttttttaagaaacattgtttggtggcagcaatctccctgtccctatcactgttagaggcctaattttatatctataaatatattaaaaagcaagtcaaacttggatgtatcaaggtaaaattattgtcaaagtttaaatacctatatattctctgaatgcaataaagggacttaagagtgaacaagagtaatggtgtggaagtgacacctggggtcagtttacctctgtgtatggtcactagagattgggacttaccctttaggttttaggaggcttgagaatggaaggatcctcatttctgcccttcctggttccctgctttggtgtaggggttgggaaaaacaggaaattcctctcagctctgcctcagatctcctacctctccttaagtcttgtagggggttccaaggatggctcttctaaccagaggctggcctgtctttaaaacttaactactttagggtggtgccaccactgcagactattgtggtactttgtgacagaagacatgtacacacacaccacacacatacatacacactctctcactctgtctctcttacctttagctgcttgatcattaagccatccaacttcatgccagttcccttctttatagaagagtgaagggaaagacttcctgggtttgacttaaaccttgtccacctcttgatattttaggattgaggaataagtcattaatctaaggactgattacagtggctggagcttgggcacttgtcttatcactggtcactgagtctgaaagtcccagctgaattcttgcccttaagtgcttttgctgctatttttttgcccccagttccacaagatccaaccaagaattctgtatcctgggacagtcagattcttctaaatcaggccaggaaggaggggaaaagagtgagagaatggtattcccagatacttcttcctcctgccccttttcccagcagctctgagaccagatgttggctgctgtacttactccctgaggtagggaatgtgtggtgatcgagtggtctgtgttcctattgctggtggggtgatagggtgggctaaaaaccatgcactctggaatttgttgtattttctcccagtaaagcttttcttctcccgactgct

SEQ ID NO: 380272 - DNA, 4096 bp, Homo sapiens
gaaagcgtggcagcgcaggcgcaagcgcagagagcggaggcggtggtggtggcggccgctggccagtgtaagatggcggcggcgttggtggtggcagtggacggggcggctgggcctggaacagtcggagcagccgctagcagaaggatgacccaagacgggaagcgggctgctgagcctcgccgattcccgtgcttgtaactgccccagccggacaccccccctcccttgacctacccggtctgtgtctcgttccggctcggcctgcgccccccctcgcttcccagccggtttcccctaaggatgggcctgacccgtatcccaagctcttagcgctcaggtcttttccttccgccgacccgaagtcatcgctgggagtactggttgccctttcctcaggctggctacagcaaacatcattcaagatgtccagcaaagggagcagcacagatggcagaacagacttagctaatggaagcctgtctagcagtccagaggagatgtctggagctgaagaggggagggagacatcctcaggcattgaagtggaggcctcagacctgagtttgagcttgactggggatgatggtggccccaaccgcaccagcacagaaagtcgaggcacagacacagagagctcaggtgaagataaggactctgacagcatggaggacactggtcattactccattaatgatgaaaatcgagtccatgaccgctcagaggaagaggaagaggaggaagaagaggaggaagaagagcagcctcggcgccgtgtacagcgcaagcgggctaaccgtgaccaggactcatcagatgatgagcgggccctagaggactgggtgtcctcagaaacatcagctctaccccgacctcgctggcaagccctccctgcccttcgggagcgggagctgggttcaagtgcccgctttgtctatgaggcctgtggggcaagagtctttgtgcagcgtttccgcctgcagcatgggcttgagggccatactggttgtgtcaataccctgcactttaaccagcgcggcacctggctggccagtggcagcgatgacctgaaggtggtggtgtgggattgggtacggcggcagccagtactggactttgagagtggccacaaaagtaatgtgttccaggccaagtttcttcctaacagtggtgattctactctggccatgtgtgcccgtgacgggcaggttcgagtagcagaactgtctgccacacagtgttgcaagaatacaaaacgtgtggcccagcacaagggagcgtcccacaagttggcactggaaccagactctccctgtacgttcttatctgcaggtgaagatgcagttgttttcaccattgacctgagacaagaccgcccagcgtcgaaactggtggtgacaaaagagaaagagaagaaagtggggctgtatacgatctatgtgaatcctgccaatacccaccagtttgcagtgggtggacgagatcagtttgtaaggatttatgaccagaggaaaattgatgagaatgagaacaatggagtactcaagaagttctgtcctcatcacctggtgaacagtgagtccaaagcaaacatcacctgtcttgtgtacagccacgacggcacagagctcctggccagttacaatgatgaagacatttacctcttcaactcctctcacagtgatggggcccagtatgttaagagatacaagggccacagaaataatgccacagtaaaaggcgtcaatttctatggccccaagagtgagtttgtggtgagcggtagtgactgtgggcacatcttcctctgggagaaatcatcctgccagattattcagttcatggagggggacaagggaggcgtggtaaactgtcttgagccccaccctcacctgcctgtgctggcaaccagtggcctagaccatgatgtgaagatctgggcacccacagctgaagcttccactgagctgacagggttaaaagatgtgattaagaagaacaagcgggagcgggatgaagatagcttgcaccaaactgacctgtttgatagtcacatgctgtggttccttatgcatcacctgagacagagacgccatcaccggcgctggcgagaacctggggttggggccacagacgcggactctgatgagtctcccagctcctcagacacatcggacgaggaggagggccctgaccgggtgcagtgcatgccatcttgaggcctcatacctaggtggggcaggctggggctgccaacctgatcctgcctgggcaaccctttcctgtcccaggccctacattcagcagaaacgcactttggactttttgctttagataaaagaaagacatcccaggagaaggacaaaccagaggagtgaaccaacaaagagtacctaggaatgggagttgagccctggaatggggctccatggagaggtgcataggactcggcagaaatggcctctccccaaagcctctttttgagaggagagggaagcctattttgttaactggtttgggatagggaatggggtttctttttctttaatctcccttgtttcttgggctgggggaggggtggggggaacaactggctattcagtaccaaggggccagagtggagggtaggagtgccactctctctttggtttaggtttttgaccttttcttcctttgttttttaaaagtttatgacagttggctccccccccacccccagcaaccccatcccagaatcctattttcctgggaagtccttaaagcccctaaccatcccacactcttcactttcctttccaccttattcattctctgtacttaccacagtattttgcacttgattacatatccttcactctcttctcttcatcccatcaccccctaaataggtcaggtgagggaggctgggaagaggtgggaggaggggcagaagtgaaggaagaataggaaggatattacctcttctgttatttttttaagaaacattgtttggtggcagcaatctccctgtccctatcactgttagaggcctaattttatatctataaatatattaaaaagcaagtcaaacttggatgtatcaaggtaaaattattgtcaaagtttaaatacctatatattctctgaatgcaataaagggacttaagagtgaacaagagtaatggtgtggaagtgacacctggggtcagtttacctctgtgtatggtcactagagattgggacttaccctttaggttttaggaggcttgagaatggaaggatcctcatttctgcccttcctggttccctgctttggtgtaggggttgggaaaaacaggaaattcctctcagctctgcctcagatctcctacctctccttaagtcttgtagggggttccaaggatggctcttctaaccagaggctggcctgtctttaaaacttaactactttagggtggtgccaccactgcagactattgtggtactttgtgacagaagacatgtacacacacaccacacacatacatacacactctctcactctgtctctcttacctttagctgcttgatcattaagccatccaacttcatgccagttcccttctttatagaagagtgaagggaaagacttcctgggtttgacttaaaccttgtccacctcttgatattttaggattgaggaataagtcattaatctaaggactgattacagtggctggagcttgggcacttgtcttatcactggtcactgagtctgaaagtcccagctgaattcttgcccttaagtgcttttgctgctatttttttgcccccagttccacaagatccaaccaagaattctgtatcctgggacagtcagattcttctaaatcaggccaggaaggaggggaaaagagtgagagaatggtattcccagatacttcttcctcctgccccttttcccagcagctctgagaccagatgttggctgctgtacttactccctgaggtagggaatgtgtggtgatcgagtggtctgtgttcctattgctggtggggtgatagggtgggctaaaaaccatgcactctggaatttgttgtattttctcccagtaaagcttttcttctcccgactgct

SEQ ID NO: 380273 - DNA, 3937 bp, Homo sapiens
gaaagcgtggcagcgcaggcgcaagcgcagagagcggaggcggtggtggtggcggccgctggccagtgtaagatggcggcggcgttggtggtggcagtggacggggcggctgggcctggaacagtcggagcagccgctagcagaaggatgacccaagacgggaagcgggctgctgagcctcgccgattcccgtgcttgtaactgccccagccggacaccccccctcccttgacctacccggctggctacagcaaacatcattcaagatgtccagcaaagggagcagcacagatggcagaacagacttagctaatggaagcctgtctagcagtccagaggagatgtctggagctgaagaggggagggagacatcctcaggcattgaagtggaggcctcagacctgagtttgagcttgactggggatgatggtggccccaaccgcaccagcacagaaagtcgaggcacagacacagagagctcaggtgaagataaggactctgacagcatggaggacactggtcattactccattaatgatgaaaatcgagtccatgaccgctcagaggaagaggaagaggaggaagaagaggaggaagaagagcagcctcggcgccgtgtacagcgcaagcgggctaaccgtgaccaggactcatcagatgatgagcgggccctagaggactgggtgtcctcagaaacatcagctctaccccgacctcgctggcaagccctccctgcccttcgggagcgggagctgggttcaagtgcccgctttgtctatgaggcctgtggggcaagagtctttgtgcagcgtttccgcctgcagcatgggcttgagggccatactggttgtgtcaataccctgcactttaaccagcgcggcacctggctggccagtggcagcgatgacctgaaggtggtggtgtgggattgggtacggcggcagccagtactggactttgagagtggccacaaaagtaatgtgttccaggccaagtttcttcctaacagtggtgattctactctggccatgtgtgcccgtgacgggcaggttcgagtagcagaactgtctgccacacagtgttgcaagaatacaaaacgtgtggcccagcacaagggagcgtcccacaagttggcactggaaccagactctccctgtacgttcttatctgcaggtgaagatgcagttgttttcaccattgacctgagacaagaccgcccagcgtcgaaactggtggtgacaaaagagaaagagaagaaagtggggctgtatacgatctatgtgaatcctgccaatacccaccagtttgcagtgggtggacgagatcagtttgtaaggatttatgaccagaggaaaattgatgagaatgagaacaatggagtactcaagaagttctgtcctcatcacctggtgaacagtgagtccaaagcaaacatcacctgtcttgtgtacagccacgacggcacagagctcctggccagttacaatgatgaagacatttacctcttcaactcctctcacagtgatggggcccagtatgttaagagatacaagggccacagaaataatgccacagtaaaaggcgtcaatttctatggccccaagagtgagtttgtggtgagcggtagtgactgtgggcacatcttcctctgggagaaatcatcctgccagattattcagttcatggagggggacaagggaggcgtggtaaactgtcttgagccccaccctcacctgcctgtgctggcaaccagtggcctagaccatgatgtgaagatctgggcacccacagctgaagcttccactgagctgacagggttaaaagatgtgattaagaagaacaagcgggagcgggatgaagatagcttgcaccaaactgacctgtttgatagtcacatgctgtggttccttatgcatcacctgagacagagacgccatcaccggcgctggcgagaacctggggttggggccacagacgcggactctgatgagtctcccagctcctcagacacatcggacgaggaggagggccctgaccgggtgcagtgcatgccatcttgaggcctcatacctaggtggggcaggctggggctgccaacctgatcctgcctgggcaaccctttcctgtcccaggccctacattcagcagaaacgcactttggactttttgctttagataaaagaaagacatcccaggagaaggacaaaccagaggagtgaaccaacaaagagtacctaggaatgggagttgagccctggaatggggctccatggagaggtgcataggactcggcagaaatggcctctccccaaagcctctttttgagaggagagggaagcctattttgttaactggtttgggatagggaatggggtttctttttctttaatctcccttgtttcttgggctgggggaggggtggggggaacaactggctattcagtaccaaggggccagagtggagggtaggagtgccactctctctttggtttaggtttttgaccttttcttcctttgttttttaaaagtttatgacagttggctccccccccacccccagcaaccccatcccagaatcctattttcctgggaagtccttaaagcccctaaccatcccacactcttcactttcctttccaccttattcattctctgtacttaccacagtattttgcacttgattacatatccttcactctcttctcttcatcccatcaccccctaaataggtcaggtgagggaggctgggaagaggtgggaggaggggcagaagtgaaggaagaataggaaggatattacctcttctgttatttttttaagaaacattgtttggtggcagcaatctccctgtccctatcactgttagaggcctaattttatatctataaatatattaaaaagcaagtcaaacttggatgtatcaaggtaaaattattgtcaaagtttaaatacctatatattctctgaatgcaataaagggacttaagagtgaacaagagtaatggtgtggaagtgacacctggggtcagtttacctctgtgtatggtcactagagattgggacttaccctttaggttttaggaggcttgagaatggaaggatcctcatttctgcccttcctggttccctgctttggtgtaggggttgggaaaaacaggaaattcctctcagctctgcctcagatctcctacctctccttaagtcttgtagggggttccaaggatggctcttctaaccagaggctggcctgtctttaaaacttaactactttagggtggtgccaccactgcagactattgtggtactttgtgacagaagacatgtacacacacaccacacacatacatacacactctctcactctgtctctcttacctttagctgcttgatcattaagccatccaacttcatgccagttcccttctttatagaagagtgaagggaaagacttcctgggtttgacttaaaccttgtccacctcttgatattttaggattgaggaataagtcattaatctaaggactgattacagtggctggagcttgggcacttgtcttatcactggtcactgagtctgaaagtcccagctgaattcttgcccttaagtgcttttgctgctatttttttgcccccagttccacaagatccaaccaagaattctgtatcctgggacagtcagattcttctaaatcaggccaggaaggaggggaaaagagtgagagaatggtattcccagatacttcttcctcctgccccttttcccagcagctctgagaccagatgttggctgctgtacttactccctgaggtagggaatgtgtggtgatcgagtggtctgtgttcctattgctggtggggtgatagggtgggctaaaaaccatgcactctggaatttgttgtattttctcccagtaaagcttttcttctcccgactgct

SEQ ID NO: 380274 - DNA, 4112 bp, Homo sapiens
gaaagcgtggcagcgcaggcgcaagcgcagagagcggaggcggtggtggtggcggccgctggccagtgtaagatggcggcggcgttggtggtggcagtggacggggcggctgggcctggaacagtcggagcagccgctagcagaaggatgacccaagacgggaagcgggctgctgagcctcgccgattcccgtgcttgtaactgccccagccggacaccccccctcccttgacctacccggtctgtgtctcgttccggctcggcctgcgccccccctcgcttcccagccggtttcccctaaggatgggcctgacccgtatcccaagctcttagcgctcaggtcttttccttccgccgacccgaagtcatcgctgggagtactggttgccctttcctcagtccttcagtgaatctacagacctattttctcaggagctcagcctggccttacttcagtgataaaaggaggaaaggctggctacagcaaacatcattcaagatgtccagcaaagggagcagcacagatggcagaacagacttagctaatggaagcctgtctagcagtccagaggagatgtctggagctgaagaggggagggagacatcctcaggcattgaagtggaggcctcagacctgagtttgagcttgactggggatgatggtggccccaaccgcaccagcacagaaagtcgaggcacagacacagagagctcaggtgaagataaggactctgacagcatggaggacactggtcattactccattaatgatgaaaatcgagtccatgaccgctcagaggaagaggaagaggaggaagaagaggaggaagaagagcagcctcggcgccgtgtacagcgcaagcgggctaaccgtgaccaggactcatcagatgatgagcgggccctagaggactgggtgtcctcagaaacatcagctctaccccgacctcgctggcaagccctccctgcccttcgggagcgggagctgggttcaagtgcccgctttgtctatgaggcctgtggggcaagagtctttgtgcagcgtttccgcctgcagcatgggcttgagggccatactggttgtgtcaataccctgcactttaaccagcgcggcacctggctggccagtggcagcgatgacctgaaggtggtggtgtgggattgggtacggcggcagccagtactggactttgagagtggccacaaaagtaatgtgttccaggccaagtttcttcctaacagtggtgattctactctggccatgtgtgcccgtgacgggcaggttcgagtagcagaactgtctgccacacagtgttgcaagaatacaaaacgtgtggcccagcacaagggagcgtcccacaagttggcactggaaccagactctccctgtacgttcttatctgcaggtgaagatgcagttgttttcaccattgacctgagacaagaccgcccagcgtcgaaactggtggtgacaaaagagaaagagaagaaagtggggctgtatacgatctatgtgaatcctgccaatacccaccagtttgcagtgggtggacgagatcagtttgtaaggatttatgaccagaggaaaattgatgagaatgagaacaatggagtactcaagaagttctgtcctcatcacctggtgaacagtgagtccaaagcaaacatcacctgtcttgtgtacagccacgacggcacagagctcctggccagttacaatgatgaagacatttacctcttcaactcctctcacagtgatggggcccagtatgttaagagatacaagggccacagaaataatgccacagtaaaaggcgtcaatttctatggccccaagagtgagtttgtggtgagcggtagtgactgtgggcacatcttcctctgggagaaatcatcctgccagattattcagttcatggagggggacaagggaggcgtggtaaactgtcttgagccccaccctcacctgcctgtgctggcaaccagtggcctagaccatgatgtgaagatctgggcacccacagctgaagcttccactgagctgacagggttaaaagatgtgattaagaagaacaagcgggagcgggatgaagatagcttgcaccaaactgacctgtttgatagtcacatgctgtggttccttatgcatcacctgagacagagacgccatcaccggcgctggcgagaacctggggttggggccacagacgcggactctgatgagtctcccagctcctcagacacatcggacgaggaggagggccctgaccgggtgcagtgcatgccatcttgaggcctcatacctaggccctacattcagcagaaacgcactttggactttttgctttagataaaagaaagacatcccaggagaaggacaaaccagaggagtgaaccaacaaagagtacctaggaatgggagttgagccctggaatggggctccatggagaggtgcataggactcggcagaaatggcctctccccaaagcctctttttgagaggagagggaagcctattttgttaactggtttgggatagggaatggggtttctttttctttaatctcccttgtttcttgggctgggggaggggtggggggaacaactggctattcagtaccaaggggccagagtggagggtaggagtgccactctctctttggtttaggtttttgaccttttcttcctttgttttttaaaagtttatgacagttggctccccccccacccccagcaaccccatcccagaatcctattttcctgggaagtccttaaagcccctaaccatcccacactcttcactttcctttccaccttattcattctctgtacttaccacagtattttgcacttgattacatatccttcactctcttctcttcatcccatcaccccctaaataggtcaggtgagggaggctgggaagaggtgggaggaggggcagaagtgaaggaagaataggaaggatattacctcttctgttatttttttaagaaacattgtttggtggcagcaatctccctgtccctatcactgttagaggcctaattttatatctataaatatattaaaaagcaagtcaaacttggatgtatcaaggtaaaattattgtcaaagtttaaatacctatatattctctgaatgcaataaagggacttaagagtgaacaagagtaatggtgtggaagtgacacctggggtcagtttacctctgtgtatggtcactagagattgggacttaccctttaggttttaggaggcttgagaatggaaggatcctcatttctgcccttcctggttccctgctttggtgtaggggttgggaaaaacaggaaattcctctcagctctgcctcagatctcctacctctccttaagtcttgtagggggttccaaggatggctcttctaaccagaggctggcctgtctttaaaacttaactactttagggtggtgccaccactgcagactattgtggtactttgtgacagaagacatgtacacacacaccacacacatacatacacactctctcactctgtctctcttacctttagctgcttgatcattaagccatccaacttcatgccagttcccttctttatagaagagtgaagggaaagacttcctgggtttgacttaaaccttgtccacctcttgatattttaggattgaggaataagtcattaatctaaggactgattacagtggctggagcttgggcacttgtcttatcactggtcactgagtctgaaagtcccagctgaattcttgcccttaagtgcttttgctgctatttttttgcccccagttccacaagatccaaccaagaattctgtatcctgggacagtcagattcttctaaatcaggccaggaaggaggggaaaagagtgagagaatggtattcccagatacttcttcctcctgccccttttcccagcagctctgagaccagatgttggctgctgtacttactccctgaggtagggaatgtgtggtgatcgagtggtctgtgttcctattgctggtggggtgatagggtgggctaaaaaccatgcactctggaatttgttgtattttctcccagtaaagcttttcttctcccgactgct

SEQ ID NO: 380275 - DNA, 2859 bp, Homo sapiens
tcatcgagctcggccatggttagcagaggccagcacaagggagcgtccacagttggcactggaaccagactctccctgtacgttcttatctgcaggtgaagatgcagttgttttcaccattgacctgagacaagaccgcccagcgtcgaaactggtggtgacaaaagagaaagagaagaaagtggggctgtatacgatctatgtgaatcctgccaatacccaccagtttgcagtgggtggacgagatcagtttgtaaggatttatgaccagaggaaaattgatgagaatgagaacaatggagtactcaagaagttctgtcctcatcacctggtgaacagtgagtccaaagcaaacatcacctgtcttgtgtacagccacgacggcacagagctcctggccagttacaatgatgaagacatttacctcttcaactcctctcacagtgatggggcccagtatgttaagagatacaagggccacagaaataatgccacagtaaaaggcgtcaatttctatggccccaagagtgagtttgtggtgagcggtagtgactgtgggcacatcttcctctgggagaaatcatcctgccagattattcagttcatggagggggacaagggaggcgtggtaaactgtcttgagccccaccctcacctgcctgtgctggcaaccagtggcctagaccatgatgtgaagatctgggcacccacagctgaagcttccactgagctgacagggttaaaagatgtgattaagaagaacaagcgggagcgggatgaagatagcttgcaccaaactgacctgtttgatagtcacatgctgtggttccttatgcatcacctgagacagagacgccatcaccggcgctggcgagaacctggggttggggccacagacgcggactctgatgagtctcccagctcctcagacacatcggacgaggaggagggccctgaccgggtgcagtgcatgccatcttgaggcctcatacctaggtggggcaggctggggctgccaacctgatcctgcctgggcaaccctttcctgtcccaggccctacattcagcagaaacgcactttggactttttgctttagataaaagaaagacatcccaggagaaggacaaaccagaggagtgaaccaacaaagagtacctaggaatgggagttgagccctggaatggggctccatggagaggtgcataggactcggcagaaatggcctctccccaaagcctctttttgagaggagagggaagcctattttgttaactggtttgggatagggaatggggtttctttttctttaatctcccttgtttcttgggctgggggaggggtggggggaacaactggctattcagtaccaaggggccagagtggagggtaggagtgccactctctctttggtttaggtttttgaccttttcttcctttgttttttaaaagtttatgacagttggctccccccccacccccagcaaccccatcccagaatcctattttcctgggaagtccttaaagcccctaaccatcccacactcttcactttcctttccaccttattcattctctgtacttaccacagtattttgcacttgattacatatccttcactctcttctcttcatcccatcaccccctaaataggtcaggtgagggaggctgggaagaggtgggaggaggggcagaagtgaaggaagaataggaaggatattacctcttctgttatttttttaagaaacattgtttggtggcagcaatctccctgtccctatcactgttagaggcctaattttatatctataaatatattaaaaagcaagtcaaacttggatgtatcaaggtaaaattattgtcaaagtttaaatacctatatattctctgaatgcaataaagggacttaagagtgaacaagagtaatggtgtggaagtgacacctggggtcagtttacctctgtgtatggtcactagagattgggacttaccctttaggttttaggaggcttgagaatggaaggatcctcatttctgcccttcctggttccctgctttggtgtaggggttgggaaaaacaggaaattcctctcagctctgcctcagatctcctacctctccttaagtcttgtagggggttccaaggatggctcttctaaccagaggctggcctgtctttaaaacttaactactttagggtggtgccaccactgcagactattgtggtactttgtgacagaagacatgtacacacacaccacacacatacatacacactctctcactctgtctctcttacctttagctgcttgatcattaagccatccaacttcatgccagttcccttctttatagaagagtgaagggaaagacttcctgggtttgacttaaaccttgtccacctcttgatattttaggattgaggaataagtcattaatctaaggactgattacagtggctggagcttgggcacttgtcttatcactggtcactgagtctgaaagtcccagctgaattcttgcccttaagtgcttttgctgctatttttttgcccccagttccacaagatccaaccaagaattctgtatcctgggacagtcagattcttctaaatcaggccaggaaggaggggaaaagagtgagagaatggtattcccagatacttcttcctcctgccccttttcccagcagctctgagaccagatgttggctgctgtacttactccctgaggtagggaatgtgtggtgatcgagtggtctgtgttcctattgctggtggggtgatagggtgggctaaaaaccatgcactctggaatttgttgtattttctcccagtaaagcttttcttctcccgactgct

SEQ ID NO: 380276 - DNA, 3654 bp, Homo sapiens
tgttcccctgtgtttttttattttcctgacttattcaagcagagctagctcagagtacaggtctgtaacaagggcttattaggagatagatgaaaaagtgcaggtttgtatatgtaagttgtccattactatagatagatactattccaggcattggactttaactgcactgcctaaaagagcccaaagataaacttcacaataggctgatatgtggaatgggaggaggagataaagaacggggtttctgttttattcataagctcagtcttagcttcagtcttttctgagcatttgtttatttgtaagatggaagtcaaagtaagtgggaagtctgtaggtcagctctattttccatgcctgcccttgacttctcctcagctgttctctgcctgtgcaggtgaggcaggggaggtggttggtccagagagaactaaaagaagttgttttcttggactataggtccagctgcaaggcagggtgcctttcctatgtgttcctcttttcactaaaagactcaaaatgctttagcagctagatctggaactaactcttctggatggggtaggaacttccctgcccttcccttagggaagctcatgtttccaagtcagacagcagggggcattgggtgcctttcggacagaaggaagctgcctaagctagaaggcctgcctgctgtagtttatttcttttgccttgttcagtgaatttacccagagggtggctgagattgaggctttgggagccccaagaagctgcttggttttaatgtgctgccttatagctgagcctgttgtgctcagggcaagtagtaggatgttccccctgggatgtgcaaggttctctcaagcagacatgagcctccatcactcccaccactccctgcaactcagcctcctcttctcagcctgtgccttcctccagttctagtaaacactgccaaatgaatatagttctccgactcttctctgggggttcattggcagctgctgctttcttcattttttaaaatttatttgccacttggtgaaagccactgagatggttttttccagccttgggcaagttggagctttggaatctggagtgaatgaggtcatctggatttcattgtcttcttacgaagccagcagtaagcttgggcagtccactcacccacccctagggccatatctggggatgaagccacccccgacctatacataggaaatgattgatgtgcctggtcttatacccagtctgtgtctggtttctctaccctcagtgccctttggcttaggctcaggatgggtgggcctcccttccccagcagctgcctcagccctgatcaagggcagttatttggctcaaggtgagtagtggtttttaaaccctactcccacacactgctgagtctgtgttttcctttcttcctgaccaggtaaactgtcttgagccccaccctcacctgcctgtgctggcaaccagtggcctagaccatgatgtgaagatctgggcacccacagctgaagcttccactgagctgacagggttaaaagatgtgattaagaagaacaagcgggagcgggatgaagatagcttgcaccaaactgacctgtttgatagtcacatgctgtggttccttatgcatcacctgagacagagacgccatcaccggcgctggcgagaacctggggttggggccacagacgcggactctgatgagtctcccagctcctcagacacatcggacgaggaggagggccctgaccgggtgcagtgcatgccatcttgaggcctcatacctaggtggggcaggctggggctgccaacctgatcctgcctgggcaaccctttcctgtcccaggccctacattcagcagaaacgcactttggactttttgctttagataaaagaaagacatcccaggagaaggacaaaccagaggagtgaaccaacaaagagtacctaggaatgggagttgagccctggaatggggctccatggagaggtgcataggactcggcagaaatggcctctccccaaagcctctttttgagaggagagggaagcctattttgttaactggtttgggatagggaatggggtttctttttctttaatctcccttgtttcttgggctgggggaggggtggggggaacaactggctattcagtaccaaggggccagagtggagggtaggagtgccactctctctttggtttaggtttttgaccttttcttcctttgttttttaaaagtttatgacagttggctccccccccacccccagcaaccccatcccagaatcctattttcctgggaagtccttaaagcccctaaccatcccacactcttcactttcctttccaccttattcattctctgtacttaccacagtattttgcacttgattacatatccttcactctcttctcttcatcccatcaccccctaaataggtcaggtgagggaggctgggaagaggtgggaggaggggcagaagtgaaggaagaataggaaggatattacctcttctgttatttttttaagaaacattgtttggtggcagcaatctccctgtccctatcactgttagaggcctaattttatatctataaatatattaaaaagcaagtcaaacttggatgtatcaaggtaaaattattgtcaaagtttaaatacctatatattctctgaatgcaataaagggacttaagagtgaacaagagtaatggtgtggaagtgacacctggggtcagtttacctctgtgtatggtcactagagattgggacttaccctttaggttttaggaggcttgagaatggaaggatcctcatttctgcccttcctggttccctgctttggtgtaggggttgggaaaaacaggaaattcctctcagctctgcctcagatctcctacctctccttaagtcttgtagggggttccaaggatggctcttctaaccagaggctggcctgtctttaaaacttaactactttagggtggtgccaccactgcagactattgtggtactttgtgacagaagacatgtacacacacaccacacacatacatacacactctctcactctgtctctcttacctttagctgcttgatcattaagccatccaacttcatgccagttcccttctttatagaagagtgaagggaaagacttcctgggtttgacttaaaccttgtccacctcttgatattttaggattgaggaataagtcattaatctaaggactgattacagtggctggagcttgggcacttgtcttatcactggtcactgagtctgaaagtcccagctgaattcttgcccttaagtgcttttgctgctatttttttgcccccagttccacaagatccaaccaagaattctgtatcctgggacagtcagattcttctaaatcaggccaggaaggaggggaaaagagtgagagaatggtattcccagatacttcttcctcctgccccttttcccagcagctctgagaccagatgttggctgctgtacttactccctgaggtagggaatgtgtggtgatcgagtggtctgtgttcctattgctggtggggtgatagggtgggctaaaaaccatgcactctggaatttgttgtattttctcccagtaaagcttttcttctcccgactgct

SEQ ID NO: 380277 - DNA, 3205 bp, Homo sapiens
gaaagcgtggcagcgcaggcgcaagcgcagagagcggaggcggtggtggtggcggccgctggccagtgtaagatggcggcggcgttggtggtggcagtggacggggcggctgggcctggaacagtcggagcagccgctagcagaaggatgacccaagacgggaagcgggctgctgagcctcgccgattcccgtgcttgtaactgccccagccggacaccccccctcccttgacctacccggtctgtgtctcgttccggctcggcctgcgccccccctcgcttcccagccggtttcccctaaggatgggcctgacccgtatcccaagctcttagcgctcaggtcttttccttccgccgacccgaagtcatcgctgggagtactggttgccctttcctcagtccttcagtgaatctacagacctattttctcaggagctcagcctggccttacttcagtgataaaaggaggaaaggctggctacagcaaacatcattcaagatgtccagcaaagggagcagcacagatggcagaacagacttagctaatggaagcctgtctagcagtccagaggagatgtctggagctgaagaggggagggagacatcctcaggcattgaagtggaggcctcagacctgagtttgagcttgactggggatgatggtggccccaaccgcaccagcacagaaagtcgaggcacagacacagagagctcaggtgaagataaggactctgacagcatggaggacactggtcattactccattaatgatgaaaatcgagtccatgaccgctcagaggaagaggaagaggaggaagaagaggaggaagaagagcagcctcggcgccgtgtacagcgcaagcgggctaaccgtgaccaggactcatcagatgatgagcgggccctagaggactgggtgtcctcagaaacatcagctctaccccgacctcgctggcaagccctccctgcccttcgggagcgggagctgggttcaagtgcccgctttgtctatgaggcctgtggggcaagagtctttgtgcagcgtttccgcctgcagcatgggcttgagggccatactggttgtgtcaataccctgcactttaaccagcgcggcacctggctggccagtggcagcgatgacctgaaggtggtggtgtgggattgggtacggcggcagccagtactggactttgagagtggccacaaaagtaatgtgttccaggccaagtttcttcctaacagtggtgattctactctggccatgtgtgcccgtgacgggcaggttcgagtagcagaactgtctgccacacagtgttgcaagaatacaaaacgtgtggcccagcacaagggagcgtcccacaagttggcactggaaccagactctccctgtacgttcttatctgcaggtgaagatgcagttgttttcaccattgacctgagacaagaccgcccagcgtcgaaactggtggtgacaaaagagaaagagaagaaagtggggctgtatacgatctatgtgaatcctgccaatacccaccagtttgcagtgggtggacgagatcagtttgtaaggatttatgaccagaggaaaattgatgagaatgagaacaatggagtactcaagaagttctgtcctcatcacctggtgaacagtgagtccaaagcaaacatcacctgtcttgtgtacagccacgacggcacagagctcctggccagttacaatgatgaagacatttacctcttcaactcctctcacagtgatggggcccagtatgttaagagatacaagggccacagaaataatgccacagtaaaaggcgtcaatttctatggccccaagagtgagtttgtggtgagcggtagtgactgtgggcacatcttcctctgggagaaatcatcctgccagattattcagttcatggagggggacaagggaggcgtggtaaactgtcttgagccccaccctcacctgcctgtgctggcaaccagtggcctagaccatgatgtgaagatctgggcacccacagctgaagcttccactgagctgacagggttaaaagatgatattacctcttctgttatttttttaagaaacattgtttggtggcagcaatctccctgtccctatcactgttagaggcctaattttatatctataaatatattaaaaagcaagtcaaacttggatgtatcaaggtaaaattattgtcaaagtttaaatacctatatattctctgaatgcaataaagggacttaagagtgaacaagagtaatggtgtggaagtgacacctggggtcagtttacctctgtgtatggtcactagagattgggacttaccctttaggttttaggaggcttgagaatggaaggatcctcatttctgcccttcctggttccctgctttggtgtaggggttgggaaaaacaggaaattcctctcagctctgcctcagatctcctacctctccttaagtcttgtagggggttccaaggatggctcttctaaccagaggctggcctgtctttaaaacttaactactttagggtggtgccaccactgcagactattgtggtactttgtgacagaagacatgtacacacacaccacacacatacatacacactctctcactctgtctctcttacctttagctgcttgatcattaagccatccaacttcatgccagttcccttctttatagaagagtgaagggaaagacttcctgggtttgacttaaaccttgtccacctcttgatattttaggattgaggaataagtcattaatctaaggactgattacagtggctggagcttgggcacttgtcttatcactggtcactgagtctgaaagtcccagctgaattcttgcccttaagtgcttttgctgctatttttttgcccccagttccacaagatccaaccaagaattctgtatcctgggacagtcagattcttctaaatcaggccaggaaggaggggaaaagagtgagagaatggtattcccagatacttcttcctcctgccccttttcccagcagctctgagaccagatgttggctgctgtacttactccctgaggtagggaatgtgtggtgatcgagtggtctgtgttcctattgctggtggggtgatagggtgggctaaaaaccatgcactctggaatttgttgtattttctcccagtaaagcttttcttctcccgactgct

SEQ ID NO: 380278 - DNA, 3749 bp, Homo sapiens
cccatgatcgtatcatagtctgcctggcctttgagttctgcagccctctgtggagttagggcaaaaaggaagagtgagaatcgagttagggaatgaagagcaatcagctcttaagatgtatctggttaaccttatctttttttttttttttttttttttgagacctagaattaggaaggagttcaatcgctttctgttacaaggtttttggaccacaggagatgggaaaaacacagtttggaagactaaattatactgattgcccagaatagtctggttatccaaggcctctaaggaatgactgagacagctaagtctctcttcctttttattccttcttagctgtggggaacttcaaagagcctagccatctcttgatgaggttttttcagagagtggttttagaatttagaatggttctttgcaatcaggatcccattccttatgtttttcttgccctggtgaaagggtatttcaaattttcttctggtttcctctaaatttcagggacctgggacctgcatagatctagggtttttatggtttgaatacaaatggagaggagtctagaagttcaaggtgtgtctcactcttccctgcttcatttccaactcttccataggtccccctgtgtcatctgcagtgaacaaacccaaaacacttgagtcttaatgggaattatgcaataggcatttagagaaaggaagtcagaaggggccagtgaattttttcttgacataagctattgccttgcattctgttccagagagatgcagggctgaatgccctctcccaggccagcatttgtccattctccaaaagcattctgcaggccagtttgcttttagctcagccaatgccagggtttgatgattaacccatttgcccaggtgaggaaggcatctacttgggatgggtgggccccaggcctaagttttagtggtcctaagagtaaatgagtagaataagagatatagaggctacccctgaagcaaatttccttacatattcttgtctctgtgtaagctgaatgatcgatgtggtcttttacttggctccctctgctctgttttttggtcctaattttccagcagtgggggttaccaggcactactttcaatgtagtagactcagcagttctatatcatgcaaattgtaaatgtagagtagaatgtaattgtaacgtagaatgttagaaccaaagatcttagaagttattttctgccttgcccagatctcctgactgatttgaggatcttttctttgttcccattcagcttcacagggacaagggttgggggtggtatcagaggacagccccttagtctcccaagagcactttgatgcttgatcccattctctacattcccccagcccagtcatctaaggccagagctcttttctctgctcaggcattattgacaggataagtcctggcattcagacaggtctggtgaagtgaccaggtactctggcccagaagttctctgtcggctccccccgcaggctccaattcaggtaaactgtcttgagccccaccctcacctgcctgtgctggcaaccagtggcctagaccatgatgtgaagatctgggcacccacagctgaagcttccactgagctgacagggttaaaagatgtgattaagaagaacaagcgggagcgggatgaagatagcttgcaccaaactgacctgtttgatagtcacatgctgtggttccttatgcatcacctgagacagagacgccatcaccggcgctggcgagaacctggggttggggccacagacgcggactctgatgagtctcccagctcctcagacacatcggacgaggaggagggccctgaccgggtgcagtgcatgccatcttgaggcctcatacctaggtggggcaggctggggctgccaacctgatcctgcctgggcaaccctttcctgtcccaggccctacattcagcagaaacgcactttggactttttgctttagataaaagaaagacatcccaggagaaggacaaaccagaggagtgaaccaacaaagagtacctaggaatgggagttgagccctggaatggggctccatggagaggtgcataggactcggcagaaatggcctctccccaaagcctctttttgagaggagagggaagcctattttgttaactggtttgggatagggaatggggtttctttttctttaatctcccttgtttcttgggctgggggaggggtggggggaacaactggctattcagtaccaaggggccagagtggagggtaggagtgccactctctctttggtttaggtttttgaccttttcttcctttgttttttaaaagtttatgacagttggctccccccccacccccagcaaccccatcccagaatcctattttcctgggaagtccttaaagcccctaaccatcccacactcttcactttcctttccaccttattcattctctgtacttaccacagtattttgcacttgattacatatccttcactctcttctcttcatcccatcaccccctaaataggtcaggtgagggaggctgggaagaggtgggaggaggggcagaagtgaaggaagaataggaaggatattacctcttctgttatttttttaagaaacattgtttggtggcagcaatctccctgtccctatcactgttagaggcctaattttatatctataaatatattaaaaagcaagtcaaacttggatgtatcaaggtaaaattattgtcaaagtttaaatacctatatattctctgaatgcaataaagggacttaagagtgaacaagagtaatggtgtggaagtgacacctggggtcagtttacctctgtgtatggtcactagagattgggacttaccctttaggttttaggaggcttgagaatggaaggatcctcatttctgcccttcctggttccctgctttggtgtaggggttgggaaaaacaggaaattcctctcagctctgcctcagatctcctacctctccttaagtcttgtagggggttccaaggatggctcttctaaccagaggctggcctgtctttaaaacttaactactttagggtggtgccaccactgcagactattgtggtactttgtgacagaagacatgtacacacacaccacacacatacatacacactctctcactctgtctctcttacctttagctgcttgatcattaagccatccaacttcatgccagttcccttctttatagaagagtgaagggaaagacttcctgggtttgacttaaaccttgtccacctcttgatattttaggattgaggaataagtcattaatctaaggactgattacagtggctggagcttgggcacttgtcttatcactggtcactgagtctgaaagtcccagctgaattcttgcccttaagtgcttttgctgctatttttttgcccccagttccacaagatccaaccaagaattctgtatcctgggacagtcagattcttctaaatcaggccaggaaggaggggaaaagagtgagagaatggtattcccagatacttcttcctcctgccccttttcccagcagctctgagaccagatgttggctgctgtacttactccctgaggtagggaatgtgtggtgatcgagtggtctgtgttcctattgctggtggggtgatagggtgggctaaaaaccatgcactctggaatttgttgtattttctcccagtaaagcttttcttctcccgactgct

SEQ ID NO: 380279 - DNA, 3225 bp, Homo sapiens
gaaagcgtggcagcgcaggcgcaagcgcagagagcggaggcggtggtggtggcggccgctggccagtgtaagatggcggcggcgttggtggtggcagtggacggggcggctgggcctggaacagtcggagcagccgctagcagaaggatgacccaagacgggaagcgggctgctgagcctcgccgattcccgtgcttgtaactgccccagccggacaccccccctcccttgacctacccggtctgtgtctcgttccggctcggcctgcgccccccctcgcttcccagccggtttcccctaaggatgggcctgacccgtatcccaagctcttagcgctcaggtcttttccttccgccgacccgaagtcatcgctgggagtactggttgccctttcctcagtccttcagtgaatctacagacctattttctcaggagctcagcctggccttacttcagtgataaaaggaggaaaggctggctacagcaaacatcattcaagatgtccagcaaagggagcagcacagatggcagaacagacttagctaatggaagcctgtctagcagtccagaggagatgtctggagctgaagaggggagggagacatcctcaggcattgaagtggaggcctcagacctgagtttgagcttgactggggatgatggtggccccaaccgcaccagcacagaaagtcgaggcacagacacagagagctcaggtgaagataaggactctgacagcatggaggacactggtcattactccattaatgatgaaaatcgagtccatgaccgctcagaggaagaggaagaggaggaagaagaggaggaagaagagcagcctcggcgccgtgtacagcgcaagcgggctaaccgtgaccaggactcatcagatgatgagcgggccctagaggactgggtgtcctcagaaacatcagctctaccccgacctcgctggcaagccctccctgcccttcgggagcgggagctgggttcaagtgcccgctttgtctatgaggcctgtggggcaagagtctttgtgcagcgtttccgcctgcagcatgggcttgagggccatactggttgtgtcaataccctgcactttaaccagcgcggcacctggctggccagtggcagcgatgacctgaaggtggtggtgtgggattgggtacggcggcagccagtactggactttgagagtggccacaaaagtaatgtgttccaggccaagtttcttcctaacagtggtgattctactctggccatgtgtgcccgtgacgggcaggttcgagtagcagaactgtctgccacacagtgttgcaagaatacaaaacgtgtggcccagcacaagggagcgtcccacaagttggcactggaaccagactctccctgtacgttcttatctgcaggtgaagatgcagttgttttcaccattgacctgagacaagaccgcccagcgtcgaaactggtggtgacaaaagagaaagagaagaaagtggggctgtatacgatctatgtgaatcctgccaatacccaccagtttgcagtgggtggacgagatcagtttgtaaggatttatgaccagaggaaaattgatgagaatgagaacaatggagtactcaagaagttctgtcctcatcacctggtgaacagtgagtccaaagcaaacatcacctgtcttgtgtacagccacgacggcacagagctcctggccagttacaatgatgaagacatttacctcttcaactcctctcacagtgatggggcccagtatgttaagagatacaagggccacagaaataatgccacagtaaaaggcgtcaatttctatggccccaagagtgagtttgtggtgagcggtagtgactgtgggcacatcttcctctgggagaaatcatcctgccagattattcagttcatggagggggacaagggaggcgtggtaaactgtcttgagccccaccctcacctgcctgtgctggcaaccagtggcctagaccatgatgtgaagatctgggcacccacagctgaagcttccactgagctgacagggttaaaagatgtgattaagaagaacaagcgggagcgggatgaagatagcttgcaccaaactgacctgtttgatagtcacatgctgtggttccttatgcatcacctgagacagagacgccatcaccggcgctggcgagaacctggggttggggccacagacgcggactctgatgagtctcccagctcctcagacacatcggacgaggaggagggccctgaccgggtgcagtgcatgccatcttgaggcctcatacctaggtggggcaggctggggctgccaacctgatcctgcctgggcaaccctttcctgtcccaggccctacattcagcagaaacgcactttggactttttgctttagataaaagaaagacatcccaggagaaggacaaaccagaggagtgaaccaacaaagagtacctaggaatgggagttgagccctggaatggggctccatggagaggtgcataggactcggcagaaatggcctctccccaaagcctctttttgagaggagagggaagcctattttgttaactggtttgggatagggaatggggtttctttttctttaatctcccttgtttcttgggctgggggaggggtggggggaacaactggctattcagtaccaaggggccagagtggagggtaggagtgccactctctctttggtttaggtttttgaccttttcttcctttgttttttaaaagtttatgacagttggctccccccccacccccagcaaccccatcccagaatcctattttcctgggaagtccttaaagcccctaaccatcccacactcttcactttcctttccaccttattcattctctgtacttaccacagtattttgcacttgattacatatccttcactctcttctcttcatcccatcaccccctaaataggtcaggtgagggaggctgggaagaggtgggaggaggggcagaagtgaaggaagaataggaaggatattacctcttctgttatttttttaagaaacattgtttggtggcagcaatctccctgtccctatcactgttagaggcctaattttatatctataaatatattaaaaagcaagtcaaacttggatgtatcaaggtaaaattattgtcaaagtttaaatacctatatattctctgaatgcaataaagggacttaagagtga

SEQ ID NO: 380280 - DNA, 2658 bp, Homo sapiens
gaaagcgtggcagcgcaggcgcaagcgcagagagcggaggcggtggtggtggcggccgctggccagtgtaagatggcggcggcgttggtggtggcagtggacggggcggctgggcctggaacagtcggagcagccgctagcagaaggatgacccaagacgggaagcgggctgctgagcctcgccgattcccgtgcttgtaactgccccagccggacaccccccctcccttgacctacccggtctgtgtctcgttccggctcggcctgcgccccccctcgcttcccagccggtttcccctaaggatgggcctgacccgtatcccaagctcttagcgctcaggtcttttccttccgccgacccgaagtcatcgctgggagtactggttgccctttcctcagtccttcagtgaatctacagacctattttctcaggagctcagcctggccttacttcagtgataaaaggaggaaaggctggctacagcaaacatcattcaagatgtccagcaaagggagcagcacagatggcagaacagacttagctaatggaagcctgtctagcagtccagaggagatgtctggagctgaagaggggagggagacatcctcaggcattgaagtggaggcctcagacctgagtttgagcttgactggggatgatggtggccccaaccgcaccagcacagaaagtcgaggcacagacacagagagctcaggtgaagataaggactctgacagcatggaggacactggtcattactccattaatgatgaaaatcgagtccatgaccgctcagaggaagaggaagaggaggaagaagaggaggaagaagagcagcctcggcgccgtgtacagcgcaagcgggctaaccgtgaccaggactcatcagatgatgagcgggccctagaggactgggtgtcctcagaaacatcagctctaccccgacctcgctggcaagccctccctgcccttcgggagcgggagctgggttcaagtgcccgctttgtctatgaggcctgtggggcaagagtctttgtgcagcgtttccgcctgcagcatgggcttgagggccatactggttgtgtcaataccctgcactttaaccagcgcggcacctggctggccagtggcagcgatgacctgaaggtggtggtgtgggattgggtacggcggcagccagtactggactttgagagtggccacaaaagtaatgtgttccaggccaagtttcttcctaacagtggtgattctactctggccatgtgtgcccgtgacgggcaggttcgagtagcagaactgtctgccacacagtgttgcaagaatacaaaacgtgtggcccagcacaagggagcgtcccacaagttggcactggaaccagactctccctgtacgttcttatctgcaggtgaagatgcagttgttttcaccattgacctgagacaagaccgcccagcgtcgaaactggtggtgacaaaagagaaagagaagaaagtggggctgtatacgatctatgtgaatcctgccaatacccaccagtttgcagtgggtggacgagatcagtttgtaaggatttatgaccagaggaaaattgatgagaatgagaacaatggagtactcaagaagttctgtcctcatcacctggtgaacagtgagtccaaagcaaacatcacctgtcttgtgtacagccacgacggcacagagctcctggccagttacaatgatgaagacatttacctcttcaactcctctcacagtgatggggcccagtatgttaagagatacaagggccacagaaataatgccacagtaaaaggcgtcaatttctatggccccaagagtgagtttgtggtgagcggtagtgactgtgggcacatcttcctctgggagaaatcatcctgccagattattcagttcatggagggggacaagggaggcgtggtaaactgtcttgagccccaccctcacctgcctgtgctggcaaccagtggcctagaccatgatgtgaagatctgggcacccacagctgaagcttccactgagctgacagggttaaaagatgtgattaagaagaacaagcgggagcgggatgaagatagcttgcaccaaactgacctgtttgatagtcacatgctgtggttccttatgcatcacctgagacagagacgccatcaccgggtaagctagggttggaaatgaattcccaagggagtgacccttttaagagggctaaaaagttccagagtagtgacttcaagcagtaatcaggtgatcttggtcggatttcctatccactgtcctctgtccccatcagatccctgatatagccttggaagagacatcagcagaaaagggtggtatctacttttgtccattgccgtccatgtgtaatgctatcttcataaaggcaaaagctggagggtggaggagggaattgagaagaaataacaagtctcagtgtgacccttctatttttcctcttatgccaaaagaggcctagttcaggggttggcaaactggcagttggcctgctgctggtttttgtaaataaagtttcattggcttgcagccatacccattctgtgtattgtctgtggcggccttcacgctacaatgagttgaatagttgcaataaagaccatatagaccacaaaaaaaaa

SEQ ID NO: 380281 - DNA, 1836 bp, Homo sapiens
gaaagcgtggcagcgcaggcgcaagcgcagagagcggaggcggtggtggtggcggccgctggccagtgtaagatggcggcggcgttggtggtggcagtggacggggcggctgggcctggaacagtcggagcagccgctagcagaaggatgacccaagacgggaagcgggctgctgagcctcgccgattcccgtgcttgtaactgccccagccggacaccccccctcccttgacctacccggtctgtgtctcgttccggctcggcctgcgccccccctcgcttcccagccggtttcccctaaggatgggcctgacccgtatcccaagctcttagcgctcaggtcttttccttccgccgacccgaagtcatcgctgggagtactggttgccctttcctcagtccttcagtgaatctacagacctattttctcaggagctcagcctggccttacttcagtgataaaaggaggaaaggctggctacagcaaacatcattcaagatgtccagcaaagggagcagcacagatggcagaacagacttagctaatggaagcctgtctagcagtccagaggagatgtctggagctgaagaggggagggagacatcctcaggcattgaagtggaggcctcagacctgagtttgagcttgactggggatgatggtggccccaaccgcaccagcacagaaagtcgaggcacagacacagagagctcaggtgaagataaggactctgacagcatggaggacactggtcattactccattaatgatgaaaatcgagtccatgaccgctcagaggaagaggaagaggaggaagaagaggaggaagaagagcagcctcggcgccgtgtacagcgcaagcgggctaaccgtgaccaggactcatcagatgatgagcgggccctagaggactgggtgtcctcagaaacatcagctctaccccgacctcgctggcaagccctccctgcccttcgggagcgggagctgggttcaagtgcccgctttgtctatgaggcctgtggggcaagagtctttgtgcagcgtttccgcctgcagcatgggcttgagggccatactggttgtgtcaataccctgcactttaaccagcgcggcacctggctggccagtggcagcgatgacctgaaggtggtggtgtgggattgggtacggcggcagccagtactggactttgagagtggccacaaaagtaatgtgttccaggccaagtttcttcctaacagtggtgattctactctggccatgtgtgcccgtgacgggcaggttcgagtagcagaactgtctgccacacagtgttgcaagaatacaaaacgtgtggcccagcacaagggagcgtcccacaagttggcactggaaccagactctccctgtacgttcttatctgcaggtgaagatgcagttgttttcaccattgacctgagacaagaccgcccagcgtcgaaactggtggtgacaaaagagaaagagaagaaagtggggctgtatacgatctatgtgaatcctgccaatacccaccagtttgcagtgggtggacgagatcagtttgtaaggatttatgaccagaggaaaattgatgagaatgagaacaatggagtactcaagaagttctgtcctcatcacctggtaagattcatgaagggccagttgctgcaggcttccctgactcaaccccaaggctgcacctgaacttgttggtatggtgggaagagcttggactttcaagtcagtcatctggatttgaatcctggctttaccacttaccagctttgtgatcttggcagtcacttcacttctgatagcctcagttttttaatcga

SEQ ID NO: 380282 - DNA, 1491 bp, Homo sapiens
gaaagcgtggcagcgcaggcgcaagcgcagagagcggaggcggtggtggtggcggccgctggccagtgtaagatggcggcggcgttggtggtggcagtggacggggcggctgggcctggaacagtcggagcagccgctagcagaaggatgacccaagacgggaagcgggctgctgagcctcgccgattcccgtgcttgtaactgccccagccggacaccccccctcccttgacctacccggtctgtgtctcgttccggctcggcctgcgccccccctcgcttcccagccggtttcccctaaggatgggcctgacccgtatcccaagctcttagcgctcaggtcttttccttccgccgacccgaagtcatcgctgggagtactggttgccctttcctcagtccttcagtgaatctacagacctattttctcaggagctcagcctggccttacttcagtgataaaaggaggaaaggctggctacagcaaacatcattcaagatgtccagcaaagggagcagcacagatggcagaacagacttagctaatggaagcctgtctagcagtccagaggagatgtctggagctgaagaggggagggagacatcctcaggcattgaagtggaggcctcagacctgagtttgagcttgactggggatgatggtggccccaaccgcaccagcacagaaagtcgaggcacagacacagagagctcaggtgaagataaggactctgacagcatggaggacactggtcattactccattaatgatgaaaatcgagtccatgaccgctcagaggaagaggaagaggaggaagaagaggaggaagaagagcagcctcggcgccgtgtacagcgcaagcgggctaaccgtgaccaggactcatcagatgatgagcgggccctagaggactgggtgtcctcagaaacatcagctctaccccgacctcgctggcaagccctccctgcccttcgggagcgggagctgggttcaagtgcccgctttgtctatgaggcctgtggggcaagagtctttgtgcagcgtttccgcctgcagcatgggcttgagggccatactggttgtgtcaataccctgcactttaaccagcgcggcacctggctggccagtggcagcgatgacctgaaggtggtggtgtgggattgggtacggcggcagccagtactggactttgagagtggccacaaaagtaatgtgttccaggccaagtttcttcctaacagtggtgattctactctggccatgtgtgcccgtgacgggcaggttcgagtagcagaactgtctgccacacagtgttgcaagaatacaaaacgtgtggcccagcacaagggagcgtcccacaagttggcactggaaccagactctccctgtacgttcttatctgcaggtgaagatgcagttgttttcaccattgacctgagacaagaccgcccagcgtcgtaagtgtagcagtaatatcattacagaactgt

SEQ ID NO: 380283 - DNA, 1353 bp, Homo sapiens
gaaagcgtggcagcgcaggcgcaagcgcagagagcggaggcggtggtggtggcggccgctggccagtgtaagatggcggcggcgttggtggtggcagtggacggggcggctgggcctggaacagtcggagcagccgctagcagaaggatgacccaagacgggaagcgggctgctgagcctcgccgattcccgtgcttgtaactgccccagccggacaccccccctcccttgacctacccggtctgtgtctcgttccggctcggcctgcgccccccctcgcttcccagccggtttcccctaaggatgggcctgacccgtatcccaagctcttagcgctcaggtcttttccttccgccgacccgaagtcatcgctgggagtactggttgccctttcctcagtccttcagtgaatctacagacctattttctcaggagctcagcctggccttacttcagtgataaaaggaggaaaggctggctacagcaaacatcattcaagatgtccagcaaagggagcagcacagatggcagaacagacttagctaatggaagcctgtctagcagtccagaggagatgtctggagctgaagaggggagggagacatcctcaggcattgaagtggaggcctcagacctgagtttgagcttgactggggatgatggtggccccaaccgcaccagcacagaaagtcgaggcacagacacagagagctcaggtgaagataaggactctgacagcatggaggacactggtcattactccattaatgatgaaaatcgagtccatgaccgctcagaggaagaggaagaggaggaagaagaggaggaagaagagcagcctcggcgccgtgtacagcgcaagcgggctaaccgtgaccaggactcatcagatgatgagcgggccctagaggactgggtgtcctcagaaacatcagctctaccccgacctcgctggcaagccctccctgcccttcgggagcgggagctgggttcaagtgcccgctttgtctatgaggcctgtggggcaagagtctttgtgcagcgtttccgcctgcagcatgggcttgagggccatactggttgtgtcaataccctgcactttaaccagcgcggcacctggctggccagtggcagcgatgacctgaaggtggtggtgtgggattgggtacggcggcagccagtactggactttgagagtggccacaaaagtaatgtgttccaggccacgttcttccctaacagctggtgaatctactctgggccttgtgttgcccgtgagggccggtccaccgttcgaacggctggcccacgtggtgcgagatttcaagttggccgcaaggggcgtccccattg

SEQ ID NO: 380284 - DNA, 1082 bp, Homo sapiens
gaaagcgtggcagcgcaggcgcaagcgcagagagcggaggcggtggtggtggcggccgctggccagtgtaagatggcggcggcgttggtggtggcagtggacggggcggctgggcctggaacagtcggagcagccgctagcagaaggatgacccaagacgggaagcgggctgctgagcctcgccgattcccgtgcttgtaactgccccagccggacaccccccctcccttgacctacccgtccttcagtgaatctacagacctattttctcaggagctcagcctggccttacttcagtgataaaaggaggaaaggctggctacagcaaacatcattcaagatgtccagcaaagggagcagcacagatggcagaacagacttagctaatggaagcctgtctagcagtccagaggagatgtctggagctgaagaggggagggagacatcctcaggcattgaagtggaggcctcagacctgagtttgagcttgactggggatgatggtggccccaaccgcaccagcacagaaagtcgaggcacagacacagagagctcaggtgaagataaggactctgacagcatggaggacactggtcattactccattaatgatgaaaatcgagtccatgaccgctcagaggaagaggaagaggaggaagaagaggaggaagaagagcagcctcggcgccgtgtacagcgcaagcgggctaaccgtgaccaggactcatcagatgatgagcgggccctagaggactgggtgtcctcagaaacatcagctctaccccgacctcgctggcaagccctccctgcccttcgggagcgggagctgggttcaagtgcccgctttgtctatgaggcctgtggggcaagagtctttgtgcagcgtttccgcctgcagcatgggcttgagggccatactggttgtgtcaataccgctgtacttactccctgaggtagggaatgtgtggtgatcgagtggtctgtgttcctattgctggtggggtgatagggtgggctaaaaaccatgcactctggaatttgttgtattttctcccagtaaagcttttcttctcccgactgct

SEQ ID NO: 380285 - DNA, 1027 bp, Homo sapiens
gaaagcgtggcagcgcaggcgcaagcgcagagagcggaggcggtggtggtggcggccgctggccagtgtaagatggcggcggcgttggtggtggcagtggacggggcggctgggcctggaacagtcggagcagccgctagcagaaggatgacccaagacgggaagcgggctgctgagcctcgccgattcccgtgcttgtaactgccccagccggacaccccccctcccttgacctacccggtctgtgtctcgttccggctcggcctgcgccccccctcgcttcccagccggtttcccctaaggatgggcctgacccgtatcccaagctcttagcgctcaggtcttttccttccgccgacccgaagtcatcgctgggagtactggttgccctttcctcagtccttcagtgaatctacagacctattttctcaggagctcagcctggccttacttcagtgataaaaggaggaaaggtgagtgggagttggaggcattaaaattcttgagttcaagacagactgcgctgatgctcaactgctgaccactaaagtcataaaattcctaccagtttcccaaagagcttgagtgttgttcttggctttgttccagctctggttgaattacttttacaagtttaattgtctgtgggcttcttgtctttctgtcctaaactattgctgtgtatctccaaatgacttaagcctagaagtgaatgtgtgccccctgccccatgtcttcttttcttctttattcattttccttgtattttgtctttgtgtcgatcatattttttacgttgttaaaaactggaacttagtttgcctgagttctgttcatcctgttgtcaaatcaggtctcttcccctctcacagcttcgggttgtcatcccttggtatttagaggagaatatttagctgcttgtgactaaaagctggggagtgatgagtgatgctgcctttagttggtgtctgagtccagtctatttcagaattccgactttttaggatatagtgggaaattttttgta

SEQ ID NO: 380286 - DNA, 537 bp, Homo sapiens
acttaagggaagcttttattgggataggagatcagccttcttgatcaggtcccgggttcctcttcattgctgccccctcttcccaacctttttgggttccaggtgattaagaagaacaagcgggagcgggatgaagatagcttgcaccaaactgacctgtttgatagtcacatgctgtggttccttatgcatcacctgagacagagacgccatcaccgggtaagctagggttggaaatgaattcccaagggagtgacccttttaagagggctaaaaagttccagagtagtgacttcaagcagtaatcaggtgatcttggtcggatttcctatccactgtcctctgtccccatcagatccctgatatagccttggaagagacatcagcagaaaagggtggtatctacttttgtccattgccgtccatgtgtaatgctatcttcataaaggcaaaagctggagggtggaggagggaattgagaagaaataacaagtctcagtgtgacccttctatttttcctcttatgccaaaagaggc

SEQ ID NO: 380287 - DNA, 964 bp, Homo sapiens
cgagggggacataggctaggtcgaggctggtggctggggggacaggaggcgtggtaaactgtcttgagccccaccctcacctgcctgtgctggcaaccagtggcctagaccatgatgtgaagatctgggcacccacagctgaagcttccactgagctgacagggttaaaagatgtgattaagaagaacaagcgggagcgggatgaagatagcttgcaccaaactgacctgtttgatagtcacatgctgtggttccttatgcatcacctgagacagagacgccatcaccggcgctggcgagaacctggggttggggccacagacgcggactctgatgagtctcccagctcctcagacacatcggacgaggaggagggccctgaccgggtgcagtgcatgccatcttgaggcctcatacctaggtggggcaggctggggctgccaacctgatcctgcctgggcaaccctttcctgtcccaggccctacattcagcagaaacgcactttggactttttgctttagataaaagaaagacatcccaggagaaggacaaaccagaggagtgaaccaacaaagagtacctaggaatgggagttgagccctggaatggggctccatggagaggtgcataggactcggcagaaatggcctctccccaaagcctctttttgagaggagagggaagcctattttgttaactggtttgggatagggaatggggtttctttttctttaatctcccttgtttcttgggctgggggaggggtggggggaacaactggctattcagtaccaaggggccagagtggagggtaggagtgccactctctctttggtttaggtttttgaccttttcttcctttgttttaaagtttcgttgggttcccccccccccccaccctcccaaaacccttttccggggggtctagccctaacccatttttcgttcccttttctttgttcc

SEQ ID NO: 380288 - DNA, 4011 bp, Homo sapiens
gaaagcgtggcagcgcaggcgcaagcgcagagagcggaggcggtggtggtggcggccgctggccagtgtaagatggcggcggcgttggtggtggcagtggacggggcggctgggcctggaacagtcggagcagccgctagcagaaggatgacccaagacgggaagcgggctgctgagcctcgccgattcccgtgcttgtaactgccccagccggacaccccccctcccttgacctacccgtccttcagtgaatctacagacctattttctcaggagctcagcctggccttacttcagtgataaaaggaggaaaggctggctacagcaaacatcattcaagatgtccagcaaagggagcagcacagatggcagaacagacttagctaatggaagcctgtctagcagtccagaggagatgtctggagctgaagaggggagggagacatcctcaggcattgaagtggaggcctcagacctgagtttgagcttgactggggatgatggtggccccaaccgcaccagcacagaaagtcgaggcacagacacagagagctcaggtgaagataaggactctgacagcatggaggacactggtcattactccattaatgatgaaaatcgagtccatgaccgctcagaggaagaggaagaggaggaagaagaggaggaagaagagcagcctcggcgccgtgtacagcgcaagcgggctaaccgtgaccaggactcatcagatgatgagcgggccctagaggactgggtgtcctcagaaacatcagctctaccccgacctcgctggcaagccctccctgcccttcgggagcgggagctgggttcaagtgcccgctttgtctatgaggcctgtggggcaagagtctttgtgcagcgtttccgcctgcagcatgggcttgagggccatactggttgtgtcaataccctgcactttaaccagcgcggcacctggctggccagtggcagcgatgacctgaaggtggtggtgtgggattgggtacggcggcagccagtactggactttgagagtggccacaaaagtaatgtgttccaggccaagtttcttcctaacagtggtgattctactctggccatgtgtgcccgtgacgggcaggttcgagtagcagaactgtctgccacacagtgttgcaagaatacaaaacgtgtggcccagcacaagggagcgtcccacaagttggcactggaaccagactctccctgtacgttcttatctgcaggtgaagatgcagttgttttcaccattgacctgagacaagaccgcccagcgtcgaaactggtggtgacaaaagagaaagagaagaaagtggggctgtatacgatctatgtgaatcctgccaatacccaccagtttgcagtgggtggacgagatcagtttgtaaggatttatgaccagaggaaaattgatgagaatgagaacaatggagtactcaagaagttctgtcctcatcacctggtgaacagtgagtccaaagcaaacatcacctgtcttgtgtacagccacgacggcacagagctcctggccagttacaatgatgaagacatttacctcttcaactcctctcacagtgatggggcccagtatgttaagagatacaagggccacagaaataatgccacagtaaaaggcgtcaatttctatggccccaagagtgagtttgtggtgagcggtagtgactgtgggcacatcttcctctgggagaaatcatcctgccagattattcagttcatggagggggacaagggaggcgtggtaaactgtcttgagccccaccctcacctgcctgtgctggcaaccagtggcctagaccatgatgtgaagatctgggcacccacagctgaagcttccactgagctgacagggttaaaagatgtgattaagaagaacaagcgggagcgggatgaagatagcttgcaccaaactgacctgtttgatagtcacatgctgtggttccttatgcatcacctgagacagagacgccatcaccggcgctggcgagaacctggggttggggccacagacgcggactctgatgagtctcccagctcctcagacacatcggacgaggaggagggccctgaccgggtgcagtgcatgccatcttgaggcctcatacctaggtggggcaggctggggctgccaacctgatcctgcctgggcaaccctttcctgtcccaggccctacattcagcagaaacgcactttggactttttgctttagataaaagaaagacatcccaggagaaggacaaaccagaggagtgaaccaacaaagagtacctaggaatgggagttgagccctggaatggggctccatggagaggtgcataggactcggcagaaatggcctctccccaaagcctctttttgagaggagagggaagcctattttgttaactggtttgggatagggaatggggtttctttttctttaatctcccttgtttcttgggctgggggaggggtggggggaacaactggctattcagtaccaaggggccagagtggagggtaggagtgccactctctctttggtttaggtttttgaccttttcttcctttgttttttaaaagtttatgacagttggctccccccccacccccagcaaccccatcccagaatcctattttcctgggaagtccttaaagcccctaaccatcccacactcttcactttcctttccaccttattcattctctgtacttaccacagtattttgcacttgattacatatccttcactctcttctcttcatcccatcaccccctaaataggtcaggtgagggaggctgggaagaggtgggaggaggggcagaagtgaaggaagaataggaaggatattacctcttctgttatttttttaagaaacattgtttggtggcagcaatctccctgtccctatcactgttagaggcctaattttatatctataaatatattaaaaagcaagtcaaacttggatgtatcaaggtaaaattattgtcaaagtttaaatacctatatattctctgaatgcaataaagggacttaagagtgaacaagagtaatggtgtggaagtgacacctggggtcagtttacctctgtgtatggtcactagagattgggacttaccctttaggttttaggaggcttgagaatggaaggatcctcatttctgcccttcctggttccctgctttggtgtaggggttgggaaaaacaggaaattcctctcagctctgcctcagatctcctacctctccttaagtcttgtagggggttccaaggatggctcttctaaccagaggctggcctgtctttaaaacttaactactttagggtggtgccaccactgcagactattgtggtactttgtgacagaagacatgtacacacacaccacacacatacatacacactctctcactctgtctctcttacctttagctgcttgatcattaagccatccaacttcatgccagttcccttctttatagaagagtgaagggaaagacttcctgggtttgacttaaaccttgtccacctcttgatattttaggattgaggaataagtcattaatctaaggactgattacagtggctggagcttgggcacttgtcttatcactggtcactgagtctgaaagtcccagctgaattcttgcccttaagtgcttttgctgctatttttttgcccccagttccacaagatccaaccaagaattctgtatcctgggacagtcagattcttctaaatcaggccaggaaggaggggaaaagagtgagagaatggtattcccagatacttcttcctcctgccccttttcccagcagctctgagaccagatgttggctgctgtacttactccctgaggtagggaatgtgtggtgatcgagtggtctgtgttcctattgctggtggggtgatagggtgggctaaaaaccatgcactctggaatttgttgtattttctcccagtaaagcttttcttctcccgactgct

SEQ ID NO: 380289 - DNA, 3978 bp, Homo sapiens
gaaagcgtggcagcgcaggcgcaagcgcagagagcggaggcggtggtggtggcggccgctggccagtgtaagatggcggcggcgttggtggtggcagtggacggggcggctgggcctggaacagtcggagcagccgctagcagaaggatgacccaagacgggaagcgggctgctgagcctcgccgattcccgtgcttgtaactgccccagccggacaccccccctcccttgacctacccggagctcagcctggccttacttcagtgataaaaggaggaaaggctggctacagcaaacatcattcaagatgtccagcaaagggagcagcacagatggcagaacagacttagctaatggaagcctgtctagcagtccagaggagatgtctggagctgaagaggggagggagacatcctcaggcattgaagtggaggcctcagacctgagtttgagcttgactggggatgatggtggccccaaccgcaccagcacagaaagtcgaggcacagacacagagagctcaggtgaagataaggactctgacagcatggaggacactggtcattactccattaatgatgaaaatcgagtccatgaccgctcagaggaagaggaagaggaggaagaagaggaggaagaagagcagcctcggcgccgtgtacagcgcaagcgggctaaccgtgaccaggactcatcagatgatgagcgggccctagaggactgggtgtcctcagaaacatcagctctaccccgacctcgctggcaagccctccctgcccttcgggagcgggagctgggttcaagtgcccgctttgtctatgaggcctgtggggcaagagtctttgtgcagcgtttccgcctgcagcatgggcttgagggccatactggttgtgtcaataccctgcactttaaccagcgcggcacctggctggccagtggcagcgatgacctgaaggtggtggtgtgggattgggtacggcggcagccagtactggactttgagagtggccacaaaagtaatgtgttccaggccaagtttcttcctaacagtggtgattctactctggccatgtgtgcccgtgacgggcaggttcgagtagcagaactgtctgccacacagtgttgcaagaatacaaaacgtgtggcccagcacaagggagcgtcccacaagttggcactggaaccagactctccctgtacgttcttatctgcaggtgaagatgcagttgttttcaccattgacctgagacaagaccgcccagcgtcgaaactggtggtgacaaaagagaaagagaagaaagtggggctgtatacgatctatgtgaatcctgccaatacccaccagtttgcagtgggtggacgagatcagtttgtaaggatttatgaccagaggaaaattgatgagaatgagaacaatggagtactcaagaagttctgtcctcatcacctggtgaacagtgagtccaaagcaaacatcacctgtcttgtgtacagccacgacggcacagagctcctggccagttacaatgatgaagacatttacctcttcaactcctctcacagtgatggggcccagtatgttaagagatacaagggccacagaaataatgccacagtaaaaggcgtcaatttctatggccccaagagtgagtttgtggtgagcggtagtgactgtgggcacatcttcctctgggagaaatcatcctgccagattattcagttcatggagggggacaagggaggcgtggtaaactgtcttgagccccaccctcacctgcctgtgctggcaaccagtggcctagaccatgatgtgaagatctgggcacccacagctgaagcttccactgagctgacagggttaaaagatgtgattaagaagaacaagcgggagcgggatgaagatagcttgcaccaaactgacctgtttgatagtcacatgctgtggttccttatgcatcacctgagacagagacgccatcaccggcgctggcgagaacctggggttggggccacagacgcggactctgatgagtctcccagctcctcagacacatcggacgaggaggagggccctgaccgggtgcagtgcatgccatcttgaggcctcatacctaggtggggcaggctggggctgccaacctgatcctgcctgggcaaccctttcctgtcccaggccctacattcagcagaaacgcactttggactttttgctttagataaaagaaagacatcccaggagaaggacaaaccagaggagtgaaccaacaaagagtacctaggaatgggagttgagccctggaatggggctccatggagaggtgcataggactcggcagaaatggcctctccccaaagcctctttttgagaggagagggaagcctattttgttaactggtttgggatagggaatggggtttctttttctttaatctcccttgtttcttgggctgggggaggggtggggggaacaactggctattcagtaccaaggggccagagtggagggtaggagtgccactctctctttggtttaggtttttgaccttttcttcctttgttttttaaaagtttatgacagttggctccccccccacccccagcaaccccatcccagaatcctattttcctgggaagtccttaaagcccctaaccatcccacactcttcactttcctttccaccttattcattctctgtacttaccacagtattttgcacttgattacatatccttcactctcttctcttcatcccatcaccccctaaataggtcaggtgagggaggctgggaagaggtgggaggaggggcagaagtgaaggaagaataggaaggatattacctcttctgttatttttttaagaaacattgtttggtggcagcaatctccctgtccctatcactgttagaggcctaattttatatctataaatatattaaaaagcaagtcaaacttggatgtatcaaggtaaaattattgtcaaagtttaaatacctatatattctctgaatgcaataaagggacttaagagtgaacaagagtaatggtgtggaagtgacacctggggtcagtttacctctgtgtatggtcactagagattgggacttaccctttaggttttaggaggcttgagaatggaaggatcctcatttctgcccttcctggttccctgctttggtgtaggggttgggaaaaacaggaaattcctctcagctctgcctcagatctcctacctctccttaagtcttgtagggggttccaaggatggctcttctaaccagaggctggcctgtctttaaaacttaactactttagggtggtgccaccactgcagactattgtggtactttgtgacagaagacatgtacacacacaccacacacatacatacacactctctcactctgtctctcttacctttagctgcttgatcattaagccatccaacttcatgccagttcccttctttatagaagagtgaagggaaagacttcctgggtttgacttaaaccttgtccacctcttgatattttaggattgaggaataagtcattaatctaaggactgattacagtggctggagcttgggcacttgtcttatcactggtcactgagtctgaaagtcccagctgaattcttgcccttaagtgcttttgctgctatttttttgcccccagttccacaagatccaaccaagaattctgtatcctgggacagtcagattcttctaaatcaggccaggaaggaggggaaaagagtgagagaatggtattcccagatacttcttcctcctgccccttttcccagcagctctgagaccagatgttggctgctgtacttactccctgaggtagggaatgtgtggtgatcgagtggtctgtgttcctattgctggtggggtgatagggtgggctaaaaaccatgcactctggaatttgttgtattttctcccagtaaagcttttcttctcccgactgct

SEQ ID NO: 380290 - DNA, 4140 bp, Homo sapiens
ttagaacggtcccatttggtccctgttagttggaaagcatctggtggcttgaatttctgactcatgattgttactggagtctctgtaaacaaaccggcactagcgctatcacattctctccgggatttccccccctgctctgtggcttcttgttgagaggttgtttggttatggtttagcgttgaaaagattcaggttatccttttaaatgactttacgttttagtggagctgggagattacttgcctggcttctaatcttcatgttggttcattttatttccatatgtgtgtgggttatttgttcagtaattagaattagataaagtattctgcttttaagtagttttgagaaggcctaaaaatactaaagtgtattcataaatatttttattatgttcagtagaagacacacctttgccatgtaaattttaacttttctcagtccttcagtgaatctacagacctattttctcaggagctcagcctggccttacttcagtgataaaaggaggaaaggaagcctgtctagcagtccagaggagatgtctggagctgaagaggggagggagacatcctcaggcattgaagtggaggcctcagacctgagtttgagcttgactggggatgatggtggccccaaccgcaccagcacagaaagtcgaggcacagacacagagagctcaggtgaagataaggactctgacagcatggaggacactggtcattactccattaatgatgaaaatcgagtccatgaccgctcagaggaagaggaagaggaggaagaagaggaggaagaagagcagcctcggcgccgtgtacagcgcaagcgggctaaccgtgaccaggactcatcagatgatgagcgggccctagaggactgggtgtcctcagaaacatcagctctaccccgacctcgctggcaagccctccctgcccttcgggagcgggagctgggttcaagtgcccgctttgtctatgaggcctgtggggcaagagtctttgtgcagcgtttccgcctgcagcatgggcttgagggccatactggttgtgtcaataccctgcactttaaccagcgcggcacctggctggccagtggcagcgatgacctgaaggtggtggtgtgggattgggtacggcggcagccagtactggactttgagagtggccacaaaagtaatgtgttccaggccaagtttcttcctaacagtggtgattctactctggccatgtgtgcccgtgacgggcaggttcgagtagcagaactgtctgccacacagtgttgcaagaatacaaaacgtgtggcccagcacaagggagcgtcccacaagttggcactggaaccagactctccctgtacgttcttatctgcaggtgaagatgcagttgttttcaccattgacctgagacaagaccgcccagcgtcgaaactggtggtgacaaaagagaaagagaagaaagtggggctgtatacgatctatgtgaatcctgccaatacccaccagtttgcagtgggtggacgagatcagtttgtaaggatttatgaccagaggaaaattgatgagaatgagaacaatggagtactcaagaagttctgtcctcatcacctggtgaacagtgagtccaaagcaaacatcacctgtcttgtgtacagccacgacggcacagagctcctggccagttacaatgatgaagacatttacctcttcaactcctctcacagtgatggggcccagtatgttaagagatacaagggccacagaaataatgccacagtaaaaggcgtcaatttctatggccccaagagtgagtttgtggtgagcggtagtgactgtgggcacatcttcctctgggagaaatcatcctgccagattattcagttcatggagggggacaagggaggcgtggtaaactgtcttgagccccaccctcacctgcctgtgctggcaaccagtggcctagaccatgatgtgaagatctgggcacccacagctgaagcttccactgagctgacagggttaaaagatgtgattaagaagaacaagcgggagcgggatgaagatagcttgcaccaaactgacctgtttgatagtcacatgctgtggttccttatgcatcacctgagacagagacgccatcaccggcgctggcgagaacctggggttggggccacagacgcggactctgatgagtctcccagctcctcagacacatcggacgaggaggagggccctgaccgggtgcagtgcatgccatcttgaggcctcatacctaggtggggcaggctggggctgccaacctgatcctgcctgggcaaccctttcctgtcccaggccctacattcagcagaaacgcactttggactttttgctttagataaaagaaagacatcccaggagaaggacaaaccagaggagtgaaccaacaaagagtacctaggaatgggagttgagccctggaatggggctccatggagaggtgcataggactcggcagaaatggcctctccccaaagcctctttttgagaggagagggaagcctattttgttaactggtttgggatagggaatggggtttctttttctttaatctcccttgtttcttgggctgggggaggggtggggggaacaactggctattcagtaccaaggggccagagtggagggtaggagtgccactctctctttggtttaggtttttgaccttttcttcctttgttttttaaaagtttatgacagttggctccccccccacccccagcaaccccatcccagaatcctattttcctgggaagtccttaaagcccctaaccatcccacactcttcactttcctttccaccttattcattctctgtacttaccacagtattttgcacttgattacatatccttcactctcttctcttcatcccatcaccccctaaataggtcaggtgagggaggctgggaagaggtgggaggaggggcagaagtgaaggaagaataggaaggatattacctcttctgttatttttttaagaaacattgtttggtggcagcaatctccctgtccctatcactgttagaggcctaattttatatctataaatatattaaaaagcaagtcaaacttggatgtatcaaggtaaaattattgtcaaagtttaaatacctatatattctctgaatgcaataaagggacttaagagtgaacaagagtaatggtgtggaagtgacacctggggtcagtttacctctgtgtatggtcactagagattgggacttaccctttaggttttaggaggcttgagaatggaaggatcctcatttctgcccttcctggttccctgctttggtgtaggggttgggaaaaacaggaaattcctctcagctctgcctcagatctcctacctctccttaagtcttgtagggggttccaaggatggctcttctaaccagaggctggcctgtctttaaaacttaactactttagggtggtgccaccactgcagactattgtggtactttgtgacagaagacatgtacacacacaccacacacatacatacacactctctcactctgtctctcttacctttagctgcttgatcattaagccatccaacttcatgccagttcccttctttatagaagagtgaagggaaagacttcctgggtttgacttaaaccttgtccacctcttgatattttaggattgaggaataagtcattaatctaaggactgattacagtggctggagcttgggcacttgtcttatcactggtcactgagtctgaaagtcccagctgaattcttgcccttaagtgcttttgctgctatttttttgcccccagttccacaagatccaaccaagaattctgtatcctgggacagtcagattcttctaaatcaggccaggaaggaggggaaaagagtgagagaatggtattcccagatacttcttcctcctgccccttttcccagcagctctgagaccagatgttggctgctgtacttactccctgaggtagggaatgtgtggtgatcgagtggtctgtgttcctattgctggtggggtgatagggtgggctaaaaaccatgcactctggaatttgttgtattttctcccagtaaagcttttcttctcccgactgct

SEQ ID NO: 380291 - DNA, 4061 bp, Homo sapiens
gaaagcgtggcagcgcaggcgcaagcgcagagagcggaggcggtggtggtggcggccgctggccagtgtaagatggcggcggcgttggtggtggcagtggacggggcggctgggcctggaacagtcggagcagccgctagcagaaggatgacccaagacgggaagcgggctgctgagcctcgccgattcccgtgcttgtaactgccccagccggacaccccccctcccttgacctacccggtctgtgtctcgttccggctcggcctgcgccccccctcgcttcccagccggtttcccctaaggatgggcctgacccgtatcccaagctcttagcgctcaggtcttttccttccgccgacccgaagtcatcgctgggagtactggttgccctttcctcagtccttcagtgaatctacagacctattttctcaggagctcagcctggccttacttcagtgataaaaggaggaaaggctggctacagcaaacatcattcaagatgtccagcaaagggagcagcacagatggcagaacagacttagctaatggaagcctgtctagcagtccagaggagatgtctggagctgaagaggggagggagacatcctcaggcattgaagtggaggcctcagacctgagtttgagcttgactggggatgatggtggccccaaccgcaccagcacagaaagtcgaggcacagacacagagagctcaggtgaagataaggactctgacagcatggaggacactggtcattactccattaatgatgaaaatcgagtccatgaccgctcagaggaagaggaagaggaggaagaagaggaggaagaagagcagcctcggcgccgtgtacagcgcaagcgggctaaccgtgaccaggactcatcagatgatgagcgggccctagaggactgggtgtcctcagaaacatcagctctaccccgacctcgctggcaagccctccctgcccttcgggagcgggagctgggttcaagtgcccgctttgtctatgaggcctgtggggcaagagtctttgtgcagcgtttccgcctgcagcatgggcttgagggccatactggttgtgtcaataccctgcactttaaccagcgcggcacctggctggccagtggcagcgatgacctgaaggtggtggtgtgggattgggtacggcggcagccagtactggactttgagagtggccacaaaagtaatgtgttccaggccaagtttcttcctaacagtggtgattctactctggccatgtgtgcccgtgacgggcaggttcgagtagcagaactgtctgccacacagtgttgcaagaatacaaaacgtgtggcccagcacaagggagcgtcccacaagttggcactggaaccagactctccctgtacgttcttatctgcaggtgaagatgcagttgttttcaccattgacctgagacaagaccgcccagcgtcgaaactggtggtgacaaaagagaaagagaagaaagtggggctgtatacgatctatgtgaatcctgccaatacccaccagtttgcagtgggtggacgagatcagtttgtaaggatttatgaccagaggaaaattgatgagaatgagaacaatggagtactcaagaagttctgtcctcatcacctggtgaacagtgagtccaaagcaaacatcacctgtcttgtgtacagccacgacggcacagagctcctggccagttacaatgatgaagacatttacctcttcaactcctctcacagtgatggggcccagtatgttaagagatacaagggccacagaaataatgccacagtaaaaggcgtcaatttctatggccccaagagtgagtttgtggtgagcggtagtgactgtgggcacatcttcctctgggagaaatcatcctgccagattattcagttcatggagggggacaagggaggcgtggtaaactgtcttgagccccaccctcacctgcctgtgctggcaaccagtggcctagaccatgatgtgaagatctgggcacccacagctgaagcttccactgagctgacagggttaaaagatgtgattaagaagaacaagcgggagcgggatgaagatagcttgcaccaaactgacctgtttgatagtcacatgctgtggttccttatgcatcacctgagacagagacgccatcaccggcgctggcgagaacctggggttggggccacagacgcggactctgatgagtctcccagctcctcagacacatcggacgaggaggagggccctgaccgggtgcagtgcatgccatcttgaggcctcatacctagaagacatcccaggagaaggacaaaccagaggagtgaaccaacaaagagtacctaggaatgggagttgagccctggaatggggctccatggagaggtgcataggactcggcagaaatggcctctccccaaagcctctttttgagaggagagggaagcctattttgttaactggtttgggatagggaatggggtttctttttctttaatctcccttgtttcttgggctgggggaggggtggggggaacaactggctattcagtaccaaggggccagagtggagggtaggagtgccactctctctttggtttaggtttttgaccttttcttcctttgttttttaaaagtttatgacagttggctccccccccacccccagcaaccccatcccagaatcctattttcctgggaagtccttaaagcccctaaccatcccacactcttcactttcctttccaccttattcattctctgtacttaccacagtattttgcacttgattacatatccttcactctcttctcttcatcccatcaccccctaaataggtcaggtgagggaggctgggaagaggtgggaggaggggcagaagtgaaggaagaataggaaggatattacctcttctgttatttttttaagaaacattgtttggtggcagcaatctccctgtccctatcactgttagaggcctaattttatatctataaatatattaaaaagcaagtcaaacttggatgtatcaaggtaaaattattgtcaaagtttaaatacctatatattctctgaatgcaataaagggacttaagagtgaacaagagtaatggtgtggaagtgacacctggggtcagtttacctctgtgtatggtcactagagattgggacttaccctttaggttttaggaggcttgagaatggaaggatcctcatttctgcccttcctggttccctgctttggtgtaggggttgggaaaaacaggaaattcctctcagctctgcctcagatctcctacctctccttaagtcttgtagggggttccaaggatggctcttctaaccagaggctggcctgtctttaaaacttaactactttagggtggtgccaccactgcagactattgtggtactttgtgacagaagacatgtacacacacaccacacacatacatacacactctctcactctgtctctcttacctttagctgcttgatcattaagccatccaacttcatgccagttcccttctttatagaagagtgaagggaaagacttcctgggtttgacttaaaccttgtccacctcttgatattttaggattgaggaataagtcattaatctaaggactgattacagtggctggagcttgggcacttgtcttatcactggtcactgagtctgaaagtcccagctgaattcttgcccttaagtgcttttgctgctatttttttgcccccagttccacaagatccaaccaagaattctgtatcctgggacagtcagattcttctaaatcaggccaggaaggaggggaaaagagtgagagaatggtattcccagatacttcttcctcctgccccttttcccagcagctctgagaccagatgttggctgctgtacttactccctgaggtagggaatgtgtggtgatcgagtggtctgtgttcctattgctggtggggtgatagggtgggctaaaaaccatgcactctggaatttgttgtattttctcccagtaaagcttttcttctcccgactgct

SEQ ID NO: 380292 - DNA, 2552 bp, Homo sapiens
gtcagtatctgctccttattgcaggtgaacagtgagtccaaagcaaacatcacctgtcttgtgtacagccacgacggcacagagctcctggccagttacaatgatgaagacatttacctcttcaactcctctcacagtgatggggcccagtatgttaagagatacaagggccacagaaataatgccacagtaaaaggcgtcaatttctatggccccaagagtgagtttgtggtgagcggtagtgactgtgggcacatcttcctctgggagaaatcatcctgccagattattcagttcatggagggggacaagggaggcgtggtaaactgtcttgagccccaccctcacctgcctgtgctggcaaccagtggcctagaccatgatgtgaagatctgggcacccacagctgaagcttccactgagctgacagggttaaaagatgtgattaagaagaacaagcgggagcgggatgaagatagcttgcaccaaactgacctgtttgatagtcacatgctgtggttccttatgcatcacctgagacagagacgccatcaccggcgctggcgagaacctggggttggggccacagacgcggactctgatgagtctcccagctcctcagacacatcggacgaggaggagggccctgaccgggtgcagtgcatgccatcttgaggcctcatacctaggtggggcaggctggggctgccaacctgatcctgcctgggcaaccctttcctgtcccaggccctacattcagcagaaacgcactttggactttttgctttagataaaagaaagacatcccaggagaaggacaaaccagaggagtgaaccaacaaagagtacctaggaatgggagttgagccctggaatggggctccatggagaggtgcataggactcggcagaaatggcctctccccaaagcctctttttgagaggagagggaagcctattttgttaactggtttgggatagggaatggggtttctttttctttaatctcccttgtttcttgggctgggggaggggtggggggaacaactggctattcagtaccaaggggccagagtggagggtaggagtgccactctctctttggtttaggtttttgaccttttcttcctttgttttttaaaagtttatgacagttggctccccccccacccccagcaaccccatcccagaatcctattttcctgggaagtccttaaagcccctaaccatcccacactcttcactttcctttccaccttattcattctctgtacttaccacagtattttgcacttgattacatatccttcactctcttctcttcatcccatcaccccctaaataggtcaggtgagggaggctgggaagaggtgggaggaggggcagaagtgaaggaagaataggaaggatattacctcttctgttatttttttaagaaacattgtttggtggcagcaatctccctgtccctatcactgttagaggcctaattttatatctataaatatattaaaaagcaagtcaaacttggatgtatcaaggtaaaattattgtcaaagtttaaatacctatatattctctgaatgcaataaagggacttaagagtgaacaagagtaatggtgtggaagtgacacctggggtcagtttacctctgtgtatggtcactagagattgggacttaccctttaggttttaggaggcttgagaatggaaggatcctcatttctgcccttcctggttccctgctttggtgtaggggttgggaaaaacaggaaattcctctcagctctgcctcagatctcctacctctccttaagtcttgtagggggttccaaggatggctcttctaaccagaggctggcctgtctttaaaacttaactactttagggtggtgccaccactgcagactattgtggtactttgtgacagaagacatgtacacacacaccacacacatacatacacactctctcactctgtctctcttacctttagctgcttgatcattaagccatccaacttcatgccagttcccttctttatagaagagtgaagggaaagacttcctgggtttgacttaaaccttgtccacctcttgatattttaggattgaggaataagtcattaatctaaggactgattacagtggctggagcttgggcacttgtcttatcactggtcactgagtctgaaagtcccagctgaattcttgcccttaagtgcttttgctgctatttttttgcccccagttccacaagatccaaccaagaattctgtatcctgggacagtcagattcttctaaatcaggccaggaaggaggggaaaagagtgagagaatggtattcccagatacttcttcctcctgccccttttcccagcagctctgagaccagatgttggctgctgtacttactccctgaggtagggaatgtgtggtgatcgagtggtctgtgttcctattgctggtggggtgatagggtgggctaaaaaccatgcactctggaatttgttgtattttctcccagtaaagcttttcttctcccgactgct

SEQ ID NO: 380293 - DNA, 3122 bp, Homo sapiens
gaaagcgtggcagcgcaggcgcaagcgcagagagcggaggcggtggtggtggcggccgctggccagtgtaagatggcggcggcgttggtggtggcagtggacggggcggctgggcctggaacagtcggagcagccgctagcagaaggatgacccaagacgggaagcgggctgctgagcctcgccgattcccgtgcttgtaactgccccagccggacaccccccctcccttgacctacccgtccttcagtgaatctacagacctattttctcaggagctcagcctggccttacttcagtgataaaaggaggaaaggctggctacagcaaacatcattcaagatgtccagcaaagggagcagcacagatggcagaacagacttagctaatggaagcctgtctagcagtccagaggagatgtctggagctgaagaggggagggagacatcctcaggcattgaagtggaggcctcagacctgagtttgagcttgactggggatgatggtggccccaaccgcaccagcacagaaagtcgaggcacagacacagagagctcaggtgaagataaggactctgacagcatggaggacactggtcattactccattaatgatgaaaatcgagtccatgaccgctcagaggaagaggaagaggaggaagaagaggaggaagaagagcagcctcggcgccgtgtacagcgcaagcgggctaaccgtgaccaggactcatcagatgatgagcgggccctagaggactgggtgtcctcagaaacatcagctctaccccgacctcgctggcaagccctccctgcccttcgggagcgggagctgggttcaagtgcccgctttgtctatgaggcctgtggggcaagagtctttgtgcagcgtttccgcctgcagcatgggcttgagggccatactggttgtgtcaataccctgcactttaaccagcgcggcacctggctggccagtggcagcgatgacctgaaggtggtggtgtgggattgggtacggcggcagccagtactggactttgagagtggccacaaaagtaatgtgttccaggccaagtttcttcctaacagtggtgattctactctggccatgtgtgcccgtgacgggcaggttcgagtagcagaactgtctgccacacagtgttgcaagaatacaaaacgtgtggcccagcacaagggagcgtcccacaagttggcactggaaccagactctccctgtacgttcttatctgcaggtgaagatgcagttgttttcaccattgacctgagacaagaccgcccagcgtcgaaactggtggtgacaaaagagaaagagaagaaagtggggctgtatacgatctatgtgaatcctgccaatacccaccagtttgcagtgggtggacgagatcagtttgtaaggatttatgaccagaggaaaattgatgagaatgagaacaatggagtactcaagaagttctgtcctcatcacctggtgaacagtgagtccaaagcaaacatcacctgtcttgtgtacagccacgacggcacagagctcctggccagttacaatgatgaagacatttacctcttcaactcctctcacagtgatggggcccagtatgttaagagatacaagggccacagaaataatgccacagtaaaaggcgtcaatttctatggccccaagagtgagtttgtggtgagcggtagtgactgtgggcacatcttcctctgggagaaatcatcctgccagattattcagttcatggagggggacaagggaggcgtggtaaactgtcttgagccccaccctcacctgcctgtgctggcaaccagtggcctagaccatgatgtgaagatctgggcacccacagctgaagcttccactgagctgacagggttaaaagatgtgattaagaagaacaagcgggagcgggatgaagatagcttgcaccaaactgacctgtttgatagtcacatgctgtggttccttatgcatcacctgagacagagacgccatcaccggcgctggcgagaacctggggttggggccacagacgcggactctgatgagtctcccagctcctcagacacatcggacgaggaggagggccctgaccgggtgcagtgcatgccatcttgaggcctcatacctaggtggggcaggctggggctgccaacctgatcctgcctgggcaaccctttcctgtcccaggccctacattcagcagaaacgcactttggactttttgctttagataaaagaccccagcaaccccatcccagaatcctattttcctgggaagtccttaaagcccctaaccatcccacactcttcactttcctttccaccttattcattcactgttagaggcctaattttatatctataaatatattaaaaagcaagtcaaacttggatgtatcaaggtaaaattattgtcaaagtttaaatacctatatattctctgaatgcaataaagggacttaagagtgaacaagagtaatggtgtggaagtgacacctggggtcagtttacctctgtgtatggtcactagagattgggacttaccctttaggttttaggaggcttgagaatggaaggatcctcatttctgcccttcctggttccctgctttggtgtaggggttgggaaaaacaggaaattcctctcagctctgcctcagatctcctacctctccttaagtcttgtagggggttccaaggatggctcttctaaccagaggctggctacagcaaacatcattcaagatgtccagcaaagggagcagcacagatggcagaacagacttagctaatggaagcctgtttagcagtccagaggagatgtttggagctgaaaaggggagggagacatcctcaggcattgaagtggaggcctcagacctgagtttgagcttgactggggatgatggtggcctcctgccccttttcccagcagctctgagaccagatgttggctgctgtacttactccctgaggtagggaatgtgtggtgatcgagtggtctgtgttcctattgctggtggggtgatagggtgggctaaaaaccatgcactctggaatttgttgtattttctcccagtaaagcttttcttctcccgactgct

SEQ ID NO: 380294 - DNA, 2118 bp, Homo sapiens
gaaagcgtggcagcgcaggcgcaagcgcagagagcggaggcggtggtggtggcggccgctggccagtgtaagatggcggcggcgttggtggtggcagtggacggggcggctgggcctggaacagtcggagcagccgctagcagaaggatgacccaagacgggaagcgggctgctgagcctcgccgattcccgtgcttgtaactgccccagccggacaccccccctcccttgacctacccggtctgtgtctcgttccggctcggcctgcgccccccctcgcttcccagccggtttcccctaaggatgggcctgacccgtatcccaagctcttagcgctcaggtcttttccttccgccgacccgaagtcatcgctgggagtactggttgccctttcctcagtccttcagtgaatctacagacctattttctcaggagctcagcctggccttacttcagtgataaaaggaggaaaggctggctacagcaaacatcattcaagatgtccagcaaagggagcagcacagatggcagaacagacttagctaatggaagcctgtctagcagtccagaggagatgtctggagctgaagaggggagggagacatcctcaggcattgaagtggaggcctcagacctgagtttgagcttgactggggatgatggtggccccaaccgcaccagcacagaaagtcgaggcacagacacagagagctcaggtgaagataaggactctgacagcatggaggacactggtcattactccattaatgatgaaaatcgagtccatgaccgctcagaggaagaggaagaggaggaagaagaggaggaagaagagcagcctcggcgccgtgtacagcgcaagcgggctaaccgtgaccaggactcatcagatgatgagcgggccctagaggactgggtgtcctcagaaacatcagctctaccccgacctcgctggcaagccctccctgcccttcgggagcgggagctgggttcaagtgcccgctttgtctatgaggcctgtggggcaagagtctttgtgcagcgtttccgcctgcagcatgggcttgagggccatactggttgtgtcaataccctgcactttaaccagcgcggcacctggctggccagtggcagcgatgacctgaaggtggtggtgtgggattgggtacggcggcagccagtactggactttgagagtggccacaaaagtaatgtgttccaggccaagtttcttcctaacagtggtgattctactctggccatgtgtgcccgtgacgggcaggttcgagtagcagaactgtctgccacacagtgttgcaagaatacaaaacgtgtggcccagcacaagggagcgtcccacaagttggcactggaaccagactctccctgtacgttcttatctgcaggtgaagatgcagttgttttcaccattgacctgagacaagaccgcccagcgtcgaaactggtggtgacaaaagagaaagagaagaaagtggggctgtatacgatctatgtgaatcctgccaatacccaccagtttgcagtgggtggacgagatcagtttgtaaggatttatgaccagaggaaaattgatgagaatgagaacaatggagtactcaagaagttctgtcctcatcacctggtgaacagtgagtccaaagcaaacatcacctgtcttgtgtacagccacgacggcacagagctcctggccagttacaatgatgaagacatttacctcttcaactcctctcacagtgatggggcccagtatgttaagagatacaagggccacagaaataatgccacagtaaaaggcgtcaatttctatggccccaagagtgagtttgtggtgagcggtagtgactgtgggcacatcttcctctgggagaaatcatcctgccagattattcagttcatggagggggacaagggaggcgtggtaaactgtcttgagccccaccctcacctgcgctgtacttactccctgaggtagggaatgtgtggtgatcgagtggtctgtgttcctattgctggtggggtgatagggtgggctaaaaaccatgcactctggaatttgttgtattttctcccagtaaagcttttcttctcccgactgct

SEQ ID NO: 380295 - DNA, 1514 bp, Homo sapiens
gaaagcgtggcagcgcaggcgcaagcgcagagagcggaggcggtggtggtggcggccgctggccagtgtaagatggcggcggcgttggtggtggcagtggacggggcggctgggcctggaacagtcggagcagccgctagcagaaggatgacccaagacgggaagcgggctgctgagcctcgccgattcccgtgcttgtaactgccccagccggacaccccccctcccttgacctacccggagctcagcctggccttacttcagtgataaaaggaggaaaggctggctacagcaaacatcattcaagatgtccagcaaagggagcagcacagatggcagaacagacttagctaatggaagcctgtctagcagtccagaggagatgtctggagctgaagaggggagggagacatcctcaggcattgaagtggaggcctcagacctgagtttgagcttgactggggatgatggtggccccaaccgcaccagcacagaaagtcgaggcacagacacagagagctcaggtgaagataaggactctgacagcatggaggacactggtcattactccattaatgatgaaaatcgagtccatgaccgctcagaggaagaggaagaggaggaagaagaggaggaagaagagcagcctcggcgccgtgtacagcgcaagcgggctaaccgtgaccaggactcatcagatgatgagcgggccctagaggactgggtgtcctcagaaacatcagctctaccccgacctcgctggcaagccctccctgcccttcgggagcgggagctgggttcaagtgcccgctttgtctatgaggcctgtggggcaagagtctttgtgcagcgtttccgcctgcagcatgggcttgagggccatactggttgtgtcaataccctgcactttaaccagcgcggcacctggctggccagtggcagcgatgacctgaaggtggtggtgtgggattgggtacggcggcagccagtactggactttgagagtggccacaaaagtaatgtgttccaggtgaggcaagggagcataatagcaactgagagaatcaggcatgagttagagaaatctgaactgcagcatggattgggagctgatagtgagttattgtaggaattacatatcgggacatggccctactttggctcccctaatgacctaaatacactgaaagactcttggcaaccctagattccttgagcatgtggactgttggaagcctcataggtagggtgcatgcagcttattaaatgtgtgctggtaggaggcagtgtagtataagcacaggctcttgaaccaaactgcctgagttcaaatcctagcccttctgcttactagctcagtgatcttggccaagttattttacctttgtcttcagtttatctgtaaaatgggactaataacacatagggttatgaggattaagtaacaatagaagctaagcagttagaactgtgactggtacttaataaacatttgataaatgttaaaaaaaaaa

SEQ ID NO: 380296 - DNA, 1332 bp, Homo sapiens
gaaagcgtggcagcgcaggcgcaagcgcagagagcggaggcggtggtggtggcggccgctggccagtgtaagatggcggcggcgttggtggtggcagtggacggggcggctgggcctggaacagtcggagcagccgctagcagaaggatgacccaagacgggaagcgggctgctgagcctcgccgattcccgtgcttgtaactgccccagccggacaccccccctcccttgacctacccggtctgtgtctcgttccggctcggcctgcgccccccctcgcttcccagccggtttcccctaaggatgggcctgacccgtatcccaagctcttagcgctcaggtcttttccttccgccgacccgaagtcatcgctgggagtactggttgccctttcctcagtccttcagtgaatctacagacctattttctcaggagctcagcctggccttacttcagtgataaaaggaggaaaggctggctacagcaaacatcattcaagatgtccagcaaagggagcagcacagatggcagaacagacttagctaatggaagcctgtctagcagtccagaggagatgtctggagctgaagaggggagggagacatcctcaggcattgaagtggaggcctcagacctgagtttgagcttgactggggatgatggtggccccaaccgcaccagcacagaaagtcgaggcacagacacagagagctcaggtgaagataaggactctgacagcatggaggacactggtcattactccattaatgatgaaaatcgagtccatgaccgctcagaggaagaggaagaggaggaagaagaggaggaagaagagcagcctcggcgccgtgtacagcgcaagcgggctaaccgtgaccaggactcatcagatgatgagcgggccctagaggactgggtgtcctcagaaacatcagctctaccccgacctcgctggcaagccctccctgcccttcgggagcgggagctgggttcaagtgcccgctttgtctatgaggcctgtggggcaagagtctttgtgcagcgtttccgcctgcagcatgggcttgagggccatactggttgtgtcaataccctgcactttaaccagcgcggcacctggctggccagtggcagcgatgacctgaaggtggtggtgtgggattgggtacggcggcagccagtactggactttgagagggccacctctgggaaggcttcaccaaggaagtataattggagctctgtcttgatgttcaaataagagctgcagagagggtgctatcgagcagcacataatcacttaattacatattgctttgtattcttcttcga

SEQ ID NO: 380297 - DNA, 812 bp, Homo sapiens
  misc_feature (5)..(6): n is a, c, g, or t
  misc_feature (13)..(13): n is a, c, g, or t
cgacnnacgcgtngcgacccacgcgtcgcccacgcgtggaaaggaagaccctccatcctctggtattaacgccttaatgcccctgtcttttactgtaagttacttaagatcatttttggaagcaggcgtggtagagtcctgtaaatgaatgctctgggctagatacagcttggagaacctgctggccttgttagacagcacttgggcctttgccagcagcaagaggtgaagcgaagccactcttacctctcccttcccctcccacctgccccctgcgtaggcacccagacttggagagacccgtctgctgttaatacttccatcctcttccttcccaaagagcagatcccaaggcatttactccttggtctgtctcgctttatctgtcgcccctcccagcgctgagagcctcccctggctgtcagcagcactgtgtccaggctcttgtctgaacaccgcagcccctccttcgctccttccagagctcagcatgtcacggcaaggactgccgcattggtgatggagggccagctgaggggaagttgctggtgagtttccttttctccatttctagcatatggacacctggcctctgcttgagcacttaggtgacaggaacttccgcacctcctgaggccctggatgattctaattgttagaaattctaattgttagaaatccttccttataatgaatgaattctgctttcctataatttctacctattgggccttgttctgttctctggaactaaacagaacaaccatttacccctccttttcaaactagagaataaagatttggttttagaa

SEQ ID NO: 380298 - DNA, 2592 bp, Homo sapiens
acattgcagccttctgcaaggatggggtggtactgtccttctcacttctcattctcttccattttaaaatgataaacctgggtcagaggatatttaggaagaggcattgtcattaagtccaagacaagatggtcagatttgttatcctagtgggttacaatccaaaatactctggagcatgctgagattaaggtggttgccaagggaacagaaaacagccatgagtaaataaatcaagactttaaaggatttagatcgggtctatggccagttgcagagtgggcaggatcttaagacccgataggtgcagaacccatctggacacggagaccaggaatggagttccatggaggcctggctggcactgcacccgggcatgaggacacatccagtaagaagacctgcctcaagaggtgcactgcggtgaccagtggaggtgactggttggagcctggaattggaagcagattccaagctctggtggacaaactctccaggcctggtgggaatcacagctggggcagacctcatcctggctgcctggccacaggcccccactctctgccactggtggtaggacgatgcctgtgtggagagctggcttctctgctcccgcctggtccaccacttggctagagttcagagacaggaagtgattggtctaagctaacacagcaagttggtggcagacctggttctagaggcaaaaccttcttccagatgtgaatgaaacctgcaggcttcattttcctttctgagcagtgcttcttagctctttggagacacgaagcccttggaaaatctgatgaaggttacggaccttccctaggaaaacagataactgacgtagactcaaaaaccccaagcaatttcaggagccactggactccctgaatgaaacccatccctggactccaggctaagaacctcagccctggggacttcacctgctgccctttccttacctgtcacacattgagccccgagtcaaggccactgtacaagtagtgcccctccctccccctggccaagcctccttcccttgttcaggaataaagaattccgaggagccctttttagtcattcccttctcccagacctaacgaatggtgcgtcaggtttctggagcctcatttcccttccccagacattggcagaggtcccttgggctagattttctcttctggttttgtttcttgttctgcctgactggccgctggcttccacaaaggagccctttgctcctggcctgggctctgatttcactgtgtggtctcaggggaagctggactgctgtggacgctggtgggagcttgagtctggtctgagtctgccccaggaagaaagaatcctgcttccaccaaccaagcccagtcagcggttcctcccaactggccaagtgttcagcccagtgggctggggaggaagaggatgagggcctcgctcctggtgcctgtggctctgggcagggtgagaggtcggtggaggatctttctgtgtgttctctgagtatgcagcagtgcagttgaagggaacagggcccaggcaggcagcaggacgaggactcctcccatcttcacacctgaaccagtcagcctggaagctacaagttctcacctgcctccccagaatgaacatcagaaaaggcaaaactgaccagggctgggatgggtttgggtcagcgtggttggagggcagcctgtggatccctgcactggagtcttgctgtcttcgatgcaggttggatcatacattgttacctcctactgtatgcctcaccctggaatagcagaatgctcagggggagatccgagaacgagaaggtgctcccagccccaggagcttccagtctggctctgatccttggccgacctagaggaaacctccacacacgccccttttgtgctaatggtgcagtttgtgtccccctctgcccatcactgtgctgtgcttgttcctgcctctgtgccttcccctatactgctcggacatgtcccctttcctctcctctacccagctaagcccttctgatccacggggcccggcttcccaaaccacccagcccacattcctccttcctgctccgaacaggtcccgtgtgagcccctgcccccgaattgcgtgctgtcccatggacgctccagtctcttccgtgtgtgtcttgagtccctaactagacagttagctccctgagggcaagggactgtcatttcctcttgagtcctaccagggtctagcacaggactgggctcctaactctcaggaaacacttgtcggctgactggtgcctcaagcgctggagcttgtcggtggccggtaatgggcagtgcacgtggggagagggtatgtgagttaactcaagggtgccttttcttgggctgtgggctggctcccctgggtcaaaagtggatgtcggaggcctcaggctcttacctccttggggcagtgggagcatcagggacccccacccccaccccggctctgcaggagtgcacggaagtggtcgtccagcctggatatttctacaggttgctgactcctgcgggagctgactgagtggaataaatgttctctcaacataaaaaaaagtaa

SEQ ID NO: 380299 - DNA, 765 bp, Homo sapiens
ggggttgcgacgcagagtttaccatatttctccagggttgctccggccgcagaagttggcaaggttgtgtgtaaggtcgggtggggtggggtcagctctcccgattaatgcagctatttgataagagcaacgtcgcgggacgcttgccgtctttatgggggcggggagaaggggcgcgggtgtcgctgcgggagagttaccgtatttgcgttgagcagcgcagactgtagagcaaagagctgcggccggagaccggaggagcaggggctcagctgggctgtgagtgtggcatgggaggaaagaacttgggggagagacggggggcctttcggcgtgcaggcggggcctcagtcaggggtatagctggggagagtgaggaggctgcccagtcacagggccgggctgagattggccaaggggactttgatgatctgtctttgcagatgtcagtgcagctgcctgtggaaaagacttgtgggtggggtctcttgcaagtaggacttgtctccttccccagggtcagttccaccccggcctcgagggtacggaagacagaggaggtggccctgagaccccactctgcagataggttgactgaggctggaagtgaagagaggccttcggggaggtccagtggaatattcagccggcttccctgatggggttggggagaatggatgaggcaggccttagggccctgcaggagcccaagttttggtgggggtcgtgggagtggtggcagtagacagtgcatctacaggagaa

SEQ ID NO: 380300 - DNA, 275 bp, Homo sapiens
cctcaggaggtgcggaagttcctgtcacctaagtgctcaagcagaggccaggtgtccatatgctagaaatggagaaaggaacttccgcacctcctgaggccctggatgattctaattgttagaaattctaattgttagaaatccttccttataatgaatgaattctgctttcctataatttctacctattgggccttgttctgttctctggaactaaacagaacaaccatttacccctccttttcaaactagagaataaagatttggttttagaa

SEQ ID NO: 380301 - DNA, 4523 bp, Homo sapiens
gaacccggcggggggaggttggggacgggcctggcagttgtgaactcgaacctgccgctgtcgccgcggcggggcggggagcgagagtgggccgcggaggccggccttcgggctccatggacgggcgccgcgtccctgcacagcccgccgcagaggtaaggctggcctctctgcagtcagaggtctgagctctgccatggggataggggtgtctttattactgcagttttctctaacacctgggggctaccggagtgtgggccgaagcaggcgctgcagccgcggaagtatccccaggaacatccccaagaggagctggaaaaagcctcatccccagctctgcagtctccagggtagagtctggcctttgctgtgctcccaaaccacgccacaacaggggtgcacgggcgtccccatcccggcggaaggaaatggccctttctcatatcctggggtcttccctgtgcacagtctgacactgggaatgagtgacctttgtgttccctgagaagagagagtgcgctctagggaatttagaaggatgtgtctggagcttgtgagcaggcacagaagggcccttaggagcctaactgcttccttcctccttccgcggaggaggctcctgtgcaggaatctgggctcccctgagctgtggaagagctgaacatggggcagcccctggcgaggttggggcaggaccgggcaggggactgagattgcagtctcatcttccctccccttctattgccccagtaatctccagcaccccgagggaggcagagccggtgatcaggccccgagggcagcaggctgtgggtgttccttggattcagggagagcattccttcctgcaatgtcctaatttgtgtgggtggaagagggcaggcgggcagaatgggggcacagtctgggcaggcggtggtctggcgttagactgccgggagtagcacccagggctctgctcctgttccccgagaagggctgttctcacttgtcctccagcctcctacggagactgcagttagtgatgctgaaagtgcctcccctgtggggctaggaatgaaaagctatagacacctttttctctgagatctttgcaaacccaggcgctttagaggaaagaacactggcctgggagtttaaagacctgttccctagtcttgattctgctgttggcttactgtgtcaccttgggcaggtctcgtcatctttgatgtctcacagttgcttcatctgttaaacagggagctcagtgtctgtttgtccagcttctcagagttgctgtgcagctcggatgtggcataggaaacagcagacacagggagagggcagcataaggcactgtagggagcagtggccacattttctggtgagtcctgtggcaggaatgtttgtgcattcagcactggagcatttactccctgtctgacactggggtagctgccatgagggggattctagtatcagagtccctcccttctggaagtttccagggcaacaaagacataagacaaacatccttgaaatgttatctaaaaacccaagattgaaataatacataccacacaaggaaacaggagagtagtctagctccatgtccggggctctaggggttcatagatggcagctcctgtccggggctgaggttgggaggggagaaacaggggcagagtgagttggtctctggagtgactgtgcttttccaccctcacagaggaagaaccgatgctggaacgtcgttgcaggggccccctggccatgggcctggcccagccccgactcctttctgggccctcccaggagtcaccccagaccctggggaaggagtcccgcgggctgaggcaacaaggcacgtcagtggcccagtctggtgcccaagccccaggcagggcccatcgctgtgcccactgtcgaaggcacttccctggctgggtggctctgtggcttcacacccgccggtgccaggcccggctgcccttgccctgccctgagtgtggccgtcgctttcgccatgcccccttcttagcactgcaccgccaggtccatgctgctgccaccccagacctgggctttgcctgccacctctgtgggcagagcttccgaggctgggtggccctggttctgcatctgcgggcccattcagctgcaaagcggcccatcgcttgtcccaaatgcgagagacgcttctggcgacgaaagcagcttcgagctcatctgcggcggtgccaccctcccgccccggaggcccggcccttcatatgcggcaactgtggccggagctttgcccagtgggaccagctagttgcccacaagcgggtgcacgtagctgaggccctggaggaggccgcagccaaggctctggggccccggcccaggggccgccccgcggtgaccgccccccggcccggtggagatgccgtcgaccgccccttccagtgtgcctgttgtggcaagcgcttccggcacaagcccaacttgatcgctcaccgccgcgtgcacacgggcgagcggccccaccagtgccccgagtgcgggaagcgctttaccaataagccctatctgacttcgcaccggcgcatccacaccggcgagaagccctacccgtgcaaagagtgcggccgccgcttccggcacaaacccaacctgctgtctcacagcaagattcacaagcgatccgaggggtcggcccaggccgcccccggcccggggagcccccagctgccagccggcccccaggagtccgcggccgagcccaccccggcggtacctctgaaaccggcccaggagccgccgccaggggccccgccagagcacccgcaggacccgatcgaagcccccccctccctctacagctgcgacgactgcggcaggagcttccggctggagcgcttcctgcgggcccaccagcggcagcacaccggggagcggcccttcacctgcgccgagtgcgggaagaacttcggcaagaagacgcacctggtggcgcactcgcgcgtgcactccggcgagcggcccttcgcctgcgaggagtgcggccgccgcttctcccagggcagccatctggcggcgcatcggcgcgaccacgcccccgatcggcccttcgtgtgtcccgactgcggcaaggccttccgccacaaaccctacctggcggcgcaccggcgcatccacaccggcgagaagccctacgtctgccccgactgcggcaaagccttcagccagaagtccaacctggtgtcgcaccggcgcatccacacgggcgagcggccctacgcctgtcccgactgcgaccgcagcttcagccagaagtccaacctcatcacccaccgcaagagccacatccgggacggcgccttctgctgtgccatctgtggccagaccttcgacgacgaggagagactcctggcccaccagaagaagcacgatgtctgagacggtgggcggggccgtgttggctgagagagggctggggtccttcgtggtgggagtcgcagtgggctgggggtgcctgcctagtgctggagtaggggacaatgggaatcctagaggggatggaagacgcggggagtgagctgggtgggccctgctagcgagagaggtcaaccccggtggccagggaacccacttccaagcgcagggacgccggcctccagctggtgtgtgctaaggctccgtcctgactgccctgtgccctggaaaagcagcaatagcatccgccccttagagccctctggctagaggagccaccagtggaaaggaagaccctccatcctctggtattaacgccttaatgcccctgtcttttactgtaagttacttaagatcatttttggaagcaggcgtggtagagtcctgtaaatgaatgctctgggctagatacagcttggagaacctgctggccttgttagacagcacttgggcctttgccagcagcaagaggtgaagcgaagccactcttacctctcccttcccctcccacctgccccctgcgtaggcacccagacttggagagacccgtctgctgttaatacttccatcctcttccttcccaaagagcagatcccaaggcatttactccttggtctgtctcgctttatctgtcgcccctcccagcgctgagagcctcccctggctgtcagcagcactgtgtccaggctcttgtctgaacaccgcagcccctccttcgctccttccagagctcagcatgtcacggcaaggactgccgcattggtgatggagggccagctgaggggaagttgctggtgagtttccttttctccatttctagcatatggacacctggcctctgcttgagcacttaggtgacaggaacttccgcacctcctgaggccctggatgattctaattgttagaaattctaattgttagaaatccttccttataatgaatgaattctgctttcctataatttctacctattgggccttgttctgttctctggaactaaacagaacaaccatttacccctccttttcaaactagagaataaagatttggttttagaa

SEQ ID NO: 380302 - DNA, 4550 bp, Homo sapiens
  misc_feature (3)..(3): n is a, c, g, or t
aanggctaggtagaggctgggtttaatcggccgaggcgagagtgggccgcggaggccggccttcgggctccatggacgggcgccgcgtccctgcacagcccgccgcagaggtacggccggggcaggggcgcggggccaccgcgggcccgcggggggccgctccacctgcggggcgcgtgaccgtaaggctggcctctctgcagtcagaggtctgagctctgccatggggataggggtgtctttattactgcagttttctctaacacctgggggctaccggagtgtgggccgaagcaggcgctgcagccgcggaagtatccccaggaacatccccaagaggagctggaaaaagcctcatccccagctctgcagtctccagggtagagtctggcctttgctgtgctcccaaaccacgccacaacaggggtgcacgggcgtccccatcccggcggaaggaaatggccctttctcatatcctggggtcttccctgtgcacagtctgacactgggaatgagtgacctttgtgttccctgagaagagagagtgcgctctagggaatttagaaggatgtgtctggagcttgtgagcaggcacagaagggcccttaggagcctaactgcttccttcctccttccgcggaggaggctcctgtgcaggaatctgggctcccctgagctgtggaagagctgaacatggggcagcccctggcgaggttggggcaggaccgggcaggggactgagattgcagtctcatcttccctccccttctattgccccagtaatctccagcaccccgagggaggcagagccggtgatcaggccccgagggcagcaggctgtgggtgttccttggattcagggagagcattccttcctgcaatgtcctaatttgtgtgggtggaagagggcaggcgggcagaatgggggcacagtctgggcaggcggtggtctggcgttagactgccgggagtagcacccagggctctgctcctgttccccgagaagggctgttctcacttgtcctccagcctcctacggagactgcagttagtgatgctgaaagtgcctcccctgtggggctaggaatgaaaagctatagacacctttttctctgagatctttgcaaacccaggcgctttagaggaaagaacactggcctgggagtttaaagacctgttccctagtcttgattctgctgttggcttactgtgtcaccttgggcaggtctcgtcatctttgatgtctcacagttgcttcatctgttaaacagggagctcagtgtctgtttgtccagcttctcagagttgctgtgcagctcggatgtggcataggaaacagcagacacagggagagggcagcataaggcactgtagggagcagtggccacattttctggtgagtcctgtggcaggaatgtttgtgcattcagcactggagcatttactccctgtctgacactggggtagctgccatgagggggattctagtatcagagtccctcccttctggaagtttccagggcaacaaagacataagacaaacatccttgaaatgttatctaaaaacccaagattgaaataatacataccacacaaggaaacaggagagtagtctagctccatgtccggggctctaggggttcatagatggcagctcctgtccggggctgaggttgggaggggagaaacaggggcagagtgagttggtctctggagtgactgtgcttttccaccctcacagaggaagaaccgatgctggaacgtcgttgcaggggccccctggccatgggcctggcccagccccgactcctttctgggccctcccaggagtcaccccagaccctggggaaggagtcccgcgggctgaggcaacaaggcacgtcagtggcccagtctggtgcccaagccccaggcagggcccatcgctgtgcccactgtcgaaggcacttccctggctgggtggctctgtggcttcacacccgccggtgccaggcccggctgcccttgccctgccctgagtgtggccgtcgctttcgccatgcccccttcttagcactgcaccgccaggtccatgctgctgccaccccagacctgggctttgcctgccacctctgtgggcagagcttccgaggctgggtggccctggttctgcatctgcgggcccattcagctgcaaagcggcccatcgcttgtcccaaatgcgagagacgcttctggcgacgaaagcagcttcgagctcatctgcggcggtgccaccctcccgccccggaggcccggcccttcatatgcggcaactgtggccggagctttgcccagtgggaccagctagttgcccacaagcgggtgcacgtagctgaggccctggaggaggccgcagccaaggctctggggccccggcccaggggccgccccgcggtgaccgccccccggcccggtggagatgccgtcgaccgccccttccagtgtgcctgttgtggcaagcgcttccggcacaagcccaacttgatcgctcaccgccgcgtgcacacgggcgagcggccccaccagtgccccgagtgcgggaagcgctttaccaataagccctatctgacttcgcaccggcgcatccacaccggcgagaagccctacccgtgcaaagagtgcggccgccgcttccggcacaaacccaacctgctgtctcacagcaagattcacaagcgatccgaggggtcggcccaggccgcccccggcccggggagcccccagctgccagccggcccccaggagtccgcggccgagcccaccccggcggtacctctgaaaccggcccaggagccgccgccaggggccccgccagagcacccgcaggacccgatcgaagcccccccctccctctacagctgcgacgactgcggcaggagcttccggctggagcgcttcctgcgggcccaccagcggcagcacaccggggagcggcccttcacctgcgccgagtgcgggaagaacttcggcaagaagacgcacctggtggcgcactcgcgcgtgcactccggcgagcggcccttcgcctgcgaggagtgcggccgccgcttctcccagggcagccatctggcggcgcatcggcgcgaccacgcccccgatcggcccttcgtgtgtcccgactgcggcaaggccttccgccacaaaccctacctggcggcgcaccggcgcatccacaccggcgagaagccctacgtctgccccgactgcggcaaagccttcagccagaagtccaacctggtgtcgcaccggcgcatccacacgggcgagcggccctacgcctgtcccgactgcgaccgcagcttcagccagaagtccaacctcatcacccaccgcaagagccacatccgggacggcgccttctgctgtgccatctgtggccagaccttcgacgacgaggagagactcctggcccaccagaagaagcacgatgtctgagacggtgggcggggccgtgttggctgagagagggctggggtccttcgtggtgggagtcgcagtgggctgggggtgcctgcctagtgctggagtaggggacaatgggaatcctagaggggatggaagacgcggggagtgagctgggtgggccctgctagcgagagaggtcaaccccggtggccagggaacccacttccaagcgcagggacgccggcctccagctggtgtgtgctaaggctccgtcctgactgccctgtgccctggaaaagcagcaatagcatccgccccttagagccctctggctagaggagccaccagtggaaaggaagaccctccatcctctggtattaacgccttaatgcccctgtcttttactgtaagttacttaagatcatttttggaagcaggcgtggtagagtcctgtaaatgaatgctctgggctagatacagcttggagaacctgctggccttgttagacagcacttgggcctttgccagcagcaagaggtgaagcgaagccactcttacctctcccttcccctcccacctgccccctgcgtaggcacccagacttggagagacccgtctgctgttaatacttccatcctcttccttcccaaagagcagatcccaaggcatttactccttggtctgtctcgctttatctgtcgcccctcccagcgctgagagcctcccctggctgtcagcagcactgtgtccaggctcttgtctgaacaccgcagcccctccttcgctccttccagagctcagcatgtcacggcaaggactgccgcattggtgatggagggccagctgaggggaagttgctggtgagtttccttttctccatttctagcatatggacacctggcctctgcttgagcacttaggtgacaggaacttccgcacctcctgaggccctggatgattctaattgttagaaattctaattgttagaaatccttccttataatgaatgaattctgctttcctataatttctacctattgggccttgttctgttctctggaactaaacagaacaaccatttacccctccttttcaaactagagaataaagatttggttttagaa

SEQ ID NO: 380303 - DNA, 4181 bp, Homo sapiens
gaacccggcggggggaggttggggacgggcctggcagttgtgaactcgaacctgccgctgtcgccgcggcggggcggggagcgagagtgggccgcggaggccggccttcgggctccatggacgggcgccgcgtccctgcacagcccgccgcagaggtaaggctggcctctctgcagtcagaggtctgagctctgccatggggataggggtgtctttattactgcagttttctctaacacctgggggctaccggagtgtgggccgaagcaggcgctgcagccgcggaagtatccccaggaacatccccaagaggagctggaaaaagcctcatccccagctctgcagtctccagggtagagtctggcctttgctgtgctcccaaaccacgccacaacaggggtgcacgggcgtccccatcccggcggaaggaaatggccctttctcatatcctggggtcttccctgtgcacagtctgacactgggaatgagtgacctttgtgttccctgagaagagagagtgcgctctagggaatttagaaggatgtgtctggagcttgtgagcaggcacagaagggcccttaggagcctaactgcttccttcctccttccgcggaggaggctcctgtgcaggaatctgggctcccctgagctgtggaagagctgaacatggggcagcccctggcgaggttggggcaggaccgggcaggggactgagattgcagtctcatcttccctccccttctattgccccagtaatctccagcaccccgagggaggcagagccggtgatcaggccccgagggcagcaggctgtgggtgttccttggattcagggagagcattccttcctgcaatgtcctaatttgtgtgggtggaagagggcaggcgggcagaatgggggcacagtctgggcaggcggtggtctggcgttagactgccgggagtagcacccagggctctgctcctgttccccgagaagggctgttctcacttgtcctccagcctcctacggagactgcagttagtgatgctgaaagtgcctcccctgtggggctaggaatgaaaagctatagacacctttttctctgagatctttgcaaacccaggcgctttagaggaaagaacactggcctgggagtttaaagacctgttccctagtcttgattctgctgttggcttactgtgtcaccttgggcaggtctcgtcatctttgatgtctcacagttgcttcatctgttaaacagggagctcagtgtctgtttgtccagcttctcagagttgctgtgcagctcggatgtggcataggaaacagcagacacagggagagggcagcataaggcactgtagggagcagtggccacattttctgcagaggaagaaccgatgctggaacgtcgttgcaggggccccctggccatgggcctggcccagccccgactcctttctgggccctcccaggagtcaccccagaccctggggaaggagtcccgcgggctgaggcaacaaggcacgtcagtggcccagtctggtgcccaagccccaggcagggcccatcgctgtgcccactgtcgaaggcacttccctggctgggtggctctgtggcttcacacccgccggtgccaggcccggctgcccttgccctgccctgagtgtggccgtcgctttcgccatgcccccttcttagcactgcaccgccaggtccatgctgctgccaccccagacctgggctttgcctgccacctctgtgggcagagcttccgaggctgggtggccctggttctgcatctgcgggcccattcagctgcaaagcggcccatcgcttgtcccaaatgcgagagacgcttctggcgacgaaagcagcttcgagctcatctgcggcggtgccaccctcccgccccggaggcccggcccttcatatgcggcaactgtggccggagctttgcccagtgggaccagctagttgcccacaagcgggtgcacgtagctgaggccctggaggaggccgcagccaaggctctggggccccggcccaggggccgccccgcggtgaccgccccccggcccggtggagatgccgtcgaccgccccttccagtgtgcctgttgtggcaagcgcttccggcacaagcccaacttgatcgctcaccgccgcgtgcacacgggcgagcggccccaccagtgccccgagtgcgggaagcgctttaccaataagccctatctgacttcgcaccggcgcatccacaccggcgagaagccctacccgtgcaaagagtgcggccgccgcttccggcacaaacccaacctgctgtctcacagcaagattcacaagcgatccgaggggtcggcccaggccgcccccggcccggggagcccccagctgccagccggcccccaggagtccgcggccgagcccaccccggcggtacctctgaaaccggcccaggagccgccgccaggggccccgccagagcacccgcaggacccgatcgaagcccccccctccctctacagctgcgacgactgcggcaggagcttccggctggagcgcttcctgcgggcccaccagcggcagcacaccggggagcggcccttcacctgcgccgagtgcgggaagaacttcggcaagaagacgcacctggtggcgcactcgcgcgtgcactccggcgagcggcccttcgcctgcgaggagtgcggccgccgcttctcccagggcagccatctggcggcgcatcggcgcgaccacgcccccgatcggcccttcgtgtgtcccgactgcggcaaggccttccgccacaaaccctacctggcggcgcaccggcgcatccacaccggcgagaagccctacgtctgccccgactgcggcaaagccttcagccagaagtccaacctggtgtcgcaccggcgcatccacacgggcgagcggccctacgcctgtcccgactgcgaccgcagcttcagccagaagtccaacctcatcacccaccgcaagagccacatccgggacggcgccttctgctgtgccatctgtggccagaccttcgacgacgaggagagactcctggcccaccagaagaagcacgatgtctgagacggtgggcggggccgtgttggctgagagagggctggggtccttcgtggtgggagtcgcagtgggctgggggtgcctgcctagtgctggagtaggggacaatgggaatcctagaggggatggaagacgcggggagtgagctgggtgggccctgctagcgagagaggtcaaccccggtggccagggaacccacttccaagcgcagggacgccggcctccagctggtgtgtgctaaggctccgtcctgactgccctgtgccctggaaaagcagcaatagcatccgccccttagagccctctggctagaggagccaccagtggaaaggaagaccctccatcctctggtattaacgccttaatgcccctgtcttttactgtaagttacttaagatcatttttggaagcaggcgtggtagagtcctgtaaatgaatgctctgggctagatacagcttggagaacctgctggccttgttagacagcacttgggcctttgccagcagcaagaggtgaagcgaagccactcttacctctcccttcccctcccacctgccccctgcgtaggcacccagacttggagagacccgtctgctgttaatacttccatcctcttccttcccaaagagcagatcccaaggcatttactccttggtctgtctcgctttatctgtcgcccctcccagcgctgagagcctcccctggctgtcagcagcactgtgtccaggctcttgtctgaacaccgcagcccctccttcgctccttccagagctcagcatgtcacggcaaggactgccgcattggtgatggagggccagctgaggggaagttgctggtgagtttccttttctccatttctagcatatggacacctggcctctgcttgagcacttaggtgacaggaacttccgcacctcctgaggccctggatgattctaattgttagaaattctaattgttagaaatccttccttataatgaatgaattctgctttcctataatttctacctattgggccttgttctgttctctggaactaaacagaacaaccatttacccctccttttcaaactagagaataaagatttggttttagaa

SEQ ID NO: 380304 - DNA, 4023 bp, Homo sapiens
  misc_feature (5)..(6): n is a, c, g, or t
  misc_feature (13)..(13): n is a, c, g, or t
cgacnnacgcgtngcgacccacgcgtcgcccacgcgttgtgaactcgaacctgccgctgtcgccgcggcggggcggggagcgagagtgggccgcggaggccggccttcgggctccatggacgggcgccgcgtccctgcacagcccgccgcagaggtacggccggggcaggggcgcggggccaccgcgggcccgcggggggccgctccacctgcggggcgcgtgaccgtgagtgtgcgcgaccgtgtgtgagtgcgcggggggggacgctgctggatctgcgggggtgggggagcgcacctgcgcacaggctccgcgagctgcgccgtgcgtgggacccgaaatggctcactcgcaagaacgggacccgtgtgcccgggagcgtggacggaggacacgcatcagtacaaaagggcggtgtggggcttctgccacccgcggccagccgcgatgcggaaggggattctgacggagtcgtggtcacaccagctggccctgcgcagccccatgggaaataggcctggaattcctgtcgggaggaggctgggggaaggggagccagcagggattccagagttcctgccataggccggcctttggccatcagggaaagcccagactctggccacagaatggagaattcgttccgtgaccttaccagggaagaaagtgaccccgaaagacagcagtgtgcttccttgttgaaggggcacattcatttattaatccaatgtccattaaggtcactctgccaggcaggatgtggggcttatggctggtgcgtgtggctttgtggggggaggggttgtggctggtgaggacacaaagctgactgccctagaggagctcagagcctcacttctgttttctcttccctccccacaggtaaggctggcctctctgcagtcagaggtctgagctctgccatggggataggggtgtctttattactgcagttttctctaacacctgggggctaccggagtgtgggccgaagcaggcgctgcagccgcggaagtatccccaggaacatccccaagaggagctggaaaaagcctcatccccagctctgcagtctccaggaacagggagctcagtgtctgtttgtccagcttctcagagttgctgtgcagctcggatgtggcataggaaacagcagacacagggagagggcagcataaggcactgtagggagcagtggccacattttctgcagaggaagaaccgatgctggaacgtcgttgcaggggccccctggccatgggcctggcccagccccgactcctttctgggccctcccaggagtcaccccagaccctggggaaggagtcccgcgggctgaggcaacaaggcacgtcagtggcccagtctggtgcccaagccccaggcagggcccatcgctgtgcccactgtcgaaggcacttccctggctgggtggctctgtggcttcacacccgccggtgccaggcccggctgcccttgccctgccctgagtgtggccgtcgctttcgccatgcccccttcttagcactgcaccgccaggtccatgctgctgccaccccagacctgggctttgcctgccacctctgtgggcagagcttccgaggctgggtggccctggttctgcatctgcgggcccattcagctgcaaagcggcccatcgcttgtcccaaatgcgagagacgcttctggcgacgaaagcagcttcgagctcatctgcggcggtgccaccctcccgccccggaggcccggcccttcatatgcggcaactgtggccggagctttgcccagtgggaccagctagttgcccacaagcgggtgcacgtagctgaggccctggaggaggccgcagccaaggctctggggccccggcccaggggccgccccgcggtgaccgccccccggcccggtggagatgccgtcgaccgccccttccagtgtgcctgttgtggcaagcgcttccggcacaagcccaacttgatcgctcaccgccgcgtgcacacgggcgagcggccccaccagtgccccgagtgcgggaagcgctttaccaataagccctatctgacttcgcaccggcgcatccacaccggcgagaagccctacccgtgcaaagagtgcggccgccgcttccggcacaaacccaacctgctgtctcacagcaagattcacaagcgatccgaggggtcggcccaggccgcccccggcccggggagcccccagctgccagccggcccccaggagtccgcggccgagcccaccccggcggtacctctgaaaccggcccaggagccgccgccaggggccccgccagagcacccgcaggacccgatcgaagcccccccctccctctacagctgcgacgactgcggcaggagcttccggctggagcgcttcctgcgggcccaccagcggcagcacaccggggagcggcccttcacctgcgccgagtgcgggaagaacttcggcaagaagacgcacctggtggcgcactcgcgcgtgcactccggcgagcggcccttcgcctgcgaggagtgcggccgccgcttctcccagggcagccatctggcggcgcatcggcgcgaccacgcccccgatcggcccttcgtgtgtcccgactgcggcaaggccttccgccacaaaccctacctggcggcgcaccggcgcatccacaccggcgagaagccctacgtctgccccgactgcggcaaagccttcagccagaagtccaacctggtgtcgcaccggcgcatccacacgggcgagcggccctacgcctgtcccgactgcgaccgcagcttcagccagaagtccaacctcatcacccaccgcaagagccacatccgggacggcgccttctgctgtgccatctgtggccagaccttcgacgacgaggagagactcctggcccaccagaagaagcacgatgtctgagacggtgggcggggccgtgttggctgagagagggctggggtccttcgtggtgggagtcgcagtgggctgggggtgcctgcctagtgctggagtaggggacaatgggaatcctagaggggatggaagacgcggggagtgagctgggtgggccctgctagcgagagaggtcaaccccggtggccagggaacccacttccaagcgcagggacgccggcctccagctggtgtgtgctaaggctccgtcctgactgccctgtgccctggaaaagcagcaatagcatccgccccttagagccctctggctagaggagccaccagtggaaaggaagaccctccatcctctggtattaacgccttaatgcccctgtcttttactgtaagttacttaagatcatttttggaagcaggcgtggtagagtcctgtaaatgaatgctctgggctagatacagcttggagaacctgctggccttgttagacagcacttgggcctttgccagcagcaagaggtgaagcgaagccactcttacctctcccttcccctcccacctgccccctgcgtaggcacccagacttggagagacccgtctgctgttaatacttccatcctcttccttcccaaagagcagatcccaaggcatttactccttggtctgtctcgctttatctgtcgcccctcccagcgctgagagcctcccctggctgtcagcagcactgtgtccaggctcttgtctgaacaccgcagcccctccttcgctccttccagagctcagcatgtcacggcaaggactgccgcattggtgatggagggccagctgaggggaagttgctggtgagtttccttttctccatttctagcatatggacacctggcctctgcttgagcacttaggtgacaggaacttccgcacctcctgaggccctggatgattctaattgttagaaattctaattgttagaaatccttccttataatgaatgaattctgctttcctataatttctacctattgggccttgttctgttctctggaactaaacagaacaaccatttacccctccttttcaaactagagaataaagatttggttttagaa

SEQ ID NO: 380305 - DNA, 4787 bp, Homo sapiens
gaacccggcggggggaggttggggacgggcctggcagttgtgaactcgaacctgccgctgtcgccgcggcggggcggggagcgagagtgggccgcggaggccggccttcgggctccatggacgggcgccgcgtccctgcacagcccgccgcagaggtaaggctggcctctctgcagtcagaggtctgagctctgccatggggataggggtgtctttattactgcagttttctctaacacctgggggctaccggagtgtgggccgaagcaggcgctgcagccgcggaagtatccccaggaacatccccaagaggagctggaaaaagcctcatccccagctctgcagtctccagggtagagtctggcctttgctgtgctcccaaaccacgccacaacaggggtgcacgggcgtccccatcccggcggaaggaaatggccctttctcatatcctggggtcttccctgtgcacagtctgacactgggaatgagtgacctttgtgttccctgagaagagagagtgcgctctagggaatttagaaggatgtgtctggagcttgtgagcaggcacagaagggcccttaggagcctaactgcttccttcctccttccgcggaggaggctcctgtgcaggaatctgggctcccctgagctgtggaagagctgaacatggggcagcccctggcgaggttggggcaggaccgggcaggggactgagattgcagtctcatcttccctccccttctattgccccagtaatctccagcaccccgagggaggcagagccggtgatcaggccccgagggcagcaggctgtgggtgttccttggattcagggagagcattccttcctgcaatgtcctaatttgtgtgggtggaagagggcaggcgggcagaatgggggcacagtctgggcaggcggtggtctggcgttagactgccgggagtagcacccagggctctgctcctgttccccgagaagggctgttctcacttgtcctccagcctcctacggagactgcagttagtgatgctgaaagtgcctcccctgtggggctaggaatgaaaagctatagacacctttttctctgagatctttgcaaacccaggcgctttagaggaaagaacactggcctgggagtttaaagacctgttccctagtcttgattctgctgttggcttactgtgtcaccttgggcaggtctcgtcatctttgatgtctcacagttgcttcatctgttaaacagggagctcagtgtctgtttgtccagcttctcagagttgctgtgcagctcggatgtggcataggaaacagcagacacagggagagggcagcataaggcactgtagggagcagtggccacattttctggtgagtcctgtggcaggaatgtttgtgcattcagcactggagcatttactccctgtctgacactggggtagctgccatgagggggattctagtatcagagtccctcccttctggaagtttccagggcaacaaagacataagacaaacatccttgaaatgttatctaaaaacccaagattgaaataatacataccacacaaggaaacaggagagtagtctagctccatgtccggggctctaggggttcatagatggcagctcctgtccggggctgaggttgggaggggagaaacaggggcagagtgagttggtctctggagtgactgtgcttttccaccctcacagaggaagaaccgatgctggaacgtcgttgcaggggccccctggccatgggcctggcccagccccgactcctttctgggccctcccaggagtcaccccagaccctggggaaggagtcccgcgggctgaggcaacaaggcacgtcagtggcccagtctggtgcccaagccccaggcagggcccatcgctgtgcccactgtcgaaggcacttccctggctgggtggctctgtggcttcacacccgccggtgccaggcccggctgcccttgccctgccctgagtgtggccgtcgctttcgccatgcccccttcttagcactgcaccgccaggtccatgctgctgccaccccagacctgggctttgcctgccacctctgtgggcagagcttccgaggctgggtggccctggttctgcatctgcgggcccattcagctgcaaagcggcccatcgcttgtcccaaatgcgagagacgcttctggcgacgaaagcagcttcgagctcatctgcggcggtgccaccctcccgccccggaggcccggcccttcatatgcggcaactgtggccggagctttgcccagtgggaccagctagttgcccacaagcgggtgcacgtagctgaggccctggaggaggccgcagccaaggctctggggccccggcccaggggccgccccgcggtgaccgccccccggcccggtggagatgccgtcgaccgccccttccagtgtgcctgttgtggcaagcgcttccggcacaagcccaacttgatcgctcaccgccgcgtgcacacgggcgagcggccccaccagtgccccgagtgcgggaagcgctttaccaataagccctatctgacttcgcaccggcgcatccacaccggcgagaagccctacccgtgcaaagagtgcggccgccgcttccggcacaaacccaacctgctgtctcacagcaagattcacaagcgatccgaggggtcggcccaggccgcccccggcccggggagcccccagctgccagccggcccccaggagtccgcggccgagcccaccccggcggtacctctgaaaccggcccaggagccgccgccaggggccccgccagagcacccgcaggacccgatcgaagcccccccctccctctacagctgcgacgactgcggcaggagcttccggctggagcgcttcctgcgggcccaccagcggcagcacaccggggagcggcccttcacctgcgccgagtgcgggaagaacttcggcaagaagacgcacctggtggcgcactcgcgcgtgcactccggcgagcggcccttcgcctgcgaggagtgcggccgccgcttctcccagggcagccatctggcggcgcatcggcgcgaccacgcccccgatcggcccttcgtgtgtcccgactgcggcaaggccttccgccacaaaccctacctggcggcgcaccggcgcatccacaccggcgagaagccctacgtctgccccgactgcggcaaagccttcagccagaagtccaacctggtgtcgcaccggcgcatccacacgggcgagcggccctacgcctgtcccgactgcgaccgcagcttcagccagaagtccaacctcatcacccaccgcaagagccacatccgggacggcgccttctgctgtgccatctgtggccagaccttcgacgacgaggagagactcctggcccaccagaagaagcacgatgtctgagacggtgggcggggccgtgttggctgagagagggctggggtccttcgtggtgggagtcgcagtgggctgggggtgcctgcctagtgctggagtaggggacaatgggaatcctagaggggatggaagacgcggggagtgagctgggtgggccctgctagcgagagaggtcaaccccggtggccagggaacccacttccaagcgcagggacgccggcctccagctggtgtgtgctaaggctccgtcctgactgccctgtgccctggaaaagcagcaatagcatccgccccttagagccctctggctagaggagccaccagtggaaaggaagaccctccatcctctggtattaacgccttaatgcccctgtcttttactgtaagttacttaagatcatttttggaagcaggcgtggtagagtcctgtaaatgaatgctctgggctagatacagcttggagaacctgctggccttgttagacagcacttgggcctttgccagcagcaagaggtgaagcgaagccactcttacctctcccttcccctcccacctgccccctgcgtaggcacccagacttggagagacccgtctgctgttaatacttccatcctcttccttcccaaagagcagatcccaaggcatttactccttggtctgtctcgctttatctgtcgcccctcccagcgctgagagcctcccctggctgtcagcagcactgtgtccaggctcttgtctgaacaccgcagcccctccttcgctccttccagagctcagcatgtcacggcaaggactgccgcattggtgatggagggccagctgaggggaagttgctggtgagtttccttttctccatttctagcatatggacacctggcctctgcttgagcacttaggtgacaggaacttccgcacctcctgaggccctggatgattctaattgttagaaattctaattgttagaaatccttccttataatgaatgaattctgctttcctataatttctacctattgggccttgttctgttctctggaactaaacagaacaaccatttacccctccttttcaaactagagaataaagatttggttttagaaaaaaacacgcaaggaaacaacaacacactacttcactaatcacccctgtgtttggccggcatctcgccctagcaaacatcgtctcttacaccacttctctatgacgccgcgcgcccactccgtcggcaccctgggcacagcgcgtgcctgaagccactccgttcagcacccggggcggactcccccgataaaaacgccggggcacgcacgtatagcaactcgccgcgaccgcgccactcggacttcacgcggcagcgctgttta

SEQ ID NO: 380306 - DNA, 3120 bp, Homo sapiens
  misc_feature (3)..(3): n is a, c, g, or t
aanggctaggtagaggctgggtttaatcggccgaggcgagagtgggccgcggaggccggccttcgggctccatggacgggcgccgcgtccctgcacagcccgccgcagaggtaaggctggcctctctgcagtcagaggtctgagctctgccatggggataggggtgtctttattactgcagttttctctaacacctgggggctaccggagtgtgggccgaagcaggcgctgcagccgcggaagtatccccaggaacatccccaagaggagctggaaaaagcctcatccccagctctgcagtctccaggcagaggaagaaccgatgctggaacgtcgttgcaggggccccctggccatgggcctggcccagccccgactcctttctgggccctcccaggagtcaccccagaccctggggaaggagtcccgcgggctgaggcaacaaggcacgtcagtggcccagtctggtgcccaagccccaggcagggcccatcgctgtgcccactgtcgaaggcacttccctggctgggtggctctgtggcttcacacccgccggtgccaggcccggctgcccttgccctgccctgagtgtggccgtcgctttcgccatgcccccttcttagcactgcaccgccaggtccatgctgctgccaccccagacctgggctttgcctgccacctctgtgggcagagcttccgaggctgggtggccctggttctgcatctgcgggcccattcagctgcaaagcggcccatcgcttgtcccaaatgcgagagacgcttctggcgacgaaagcagcttcgagctcatctgcggcggtgccaccctcccgccccggaggcccggcccttcatatgcggcaactgtggccggagctttgcccagtgggaccagctagttgcccacaagcgggtgcacgtagctgaggccctggaggaggccgcagccaaggctctggggccccggcccaggggccgccccgcggtgaccgccccccggcccggtggagatgccgtcgaccgccccttccagtgtgcctgttgtggcaagcgcttccggcacaagcccaacttgatcgctcaccgccgcgtgcacacgggcgagcggccccaccagtgccccgagtgcgggaagcgctttaccaataagccctatctgacttcgcaccggcgcatccacaccggcgagaagccctacccgtgcaaagagtgcggccgccgcttccggcacaaacccaacctgctgtctcacagcaagattcacaagcgatccgaggggtcggcccaggccgcccccggcccggggagcccccagctgccagccggcccccaggagtccgcggccgagcccaccccggcggtacctctgaaaccggcccaggagccgccgccaggggccccgccagagcacccgcaggacccgatcgaagcccccccctccctctacagctgcgacgactgcggcaggagcttccggctggagcgcttcctgcgggcccaccagcggcagcacaccggggagcggcccttcacctgcgccgagtgcgggaagaacttcggcaagaagacgcacctggtggcgcactcgcgcgtgcactccggcgagcggcccttcgcctgcgaggagtgcggccgccgcttctcccagggcagccatctggcggcgcatcggcgcgaccacgcccccgatcggcccttcgtgtgtcccgactgcggcaaggccttccgccacaaaccctacctggcggcgcaccggcgcatccacaccggcgagaagccctacgtctgccccgactgcggcaaagccttcagccagaagtccaacctggtgtcgcaccggcgcatccacacgggcgagcggccctacgcctgtcccgactgcgaccgcagcttcagccagaagtccaacctcatcacccaccgcaagagccacatccgggacggcgccttctgctgtgccatctgtggccagaccttcgacgacgaggagagactcctggcccaccagaagaagcacgatgtctgagacggtgggcggggccgtgttggctgagagagggctggggtccttcgtggtgggagtcgcagtgggctgggggtgcctgcctagtgctggagtaggggacaatgggaatcctagaggggatggaagacgcggggagtgagctgggtgggccctgctagcgagagaggtcaaccccggtggccagggaacccacttccaagcgcagggacgccggcctccagctggtgtgtgctaaggctccgtcctgactgccctgtgccctggaaaagcagcaatagcatccgccccttagagccctctggctagaggagccaccagtggaaaggaagaccctccatcctctggtattaacgccttaatgcccctgtcttttactgtaagttacttaagatcatttttggaagcaggcgtggtagagtcctgtaaatgaatgctctgggctagatacagcttggagaacctgctggccttgttagacagcacttgggcctttgccagcagcaagaggtgaagcgaagccactcttacctctcccttcccctcccacctgccccctgcgtaggcacccagacttggagagacccgtctgctgttaatacttccatcctcttccttcccaaagagcagatcccaaggcatttactccttggtctgtctcgctttatctgtcgcccctcccagcgctgagagcctcccctggctgtcagcagcactgtgtccaggctcttgtctgaacaccgcagcccctccttcgctccttccagagctcagcatgtcacggcaaggactgccgcattggtgatggagggccagctgaggggaagttgctggtgagtttccttttctccatttctagcatatggacacctggcctctgcttgagcacttaggtgacaggaacttccgcacctcctgaggccctggatgattctaattgttagaaattctaattgttagaaatccttccttataatgaatgaattctgctttcctataatttctacctattgggccttgttctgttctctggaactaaacagaacaaccatttacccctccttttcaaactagagaataaagatttggttttagaa

SEQ ID NO: 380307 - DNA, 3164 bp, Homo sapiens
  misc_feature (5)..(6): n is a, c, g, or t
  misc_feature (13)..(13): n is a, c, g, or t
cgacnnacgcgtngcgacccacgcgtcgcccacgcgttgtgaactcgaacctgccgctgtcgccgcggcggggcggggagcgagagtgggccgcggaggccggccttcgggctccatggacgggcgccgcgtccctgcacagcccgccgcagaggtaaggctggcctctctgcagtcagaggtctgagctctgccatggggataggggtgtctttattactgcagttttctctaacacctgggggctaccggagtgtgggccgaagcaggcgctgcagccgcggaagtatccccaggaacatccccaagaggagctggaaaaagcctcatccccagctctgcagtctccaggcagaggaagaaccgatgctggaacgtcgttgcaggggccccctggccatgggcctggcccagccccgactcctttctgggccctcccaggagtcaccccagaccctggggaaggagtcccgcgggctgaggcaacaaggcacgtcagtggcccagtctggtgcccaagccccaggcagggcccatcgctgtgcccactgtcgaaggcacttccctggctgggtggctctgtggcttcacacccgccggtgccaggcccggctgcccttgccctgccctgagtgtggccgtcgctttcgccatgcccccttcttagcactgcaccgccaggtccatgctgctgccaccccagacctgggctttgcctgccacctctgtgggcagagcttccgaggctgggtggccctggttctgcatctgcgggcccattcagctgcaaagcggcccatcgcttgtcccaaatgcgagagacgcttctggcgacgaaagcagcttcgagctcatctgcggcggtgccaccctcccgccccggaggcccggcccttcatatgcggcaactgtggccggagctttgcccagtgggaccagctagttgcccacaagcgggtgcacgtagctgaggccctggaggaggccgcagccaaggctctggggccccggcccaggggccgccccgcggtgaccgccccccggcccggtggagatgccgtcgaccgccccttccagtgtgcctgttgtggcaagcgcttccggcacaagcccaacttgatcgctcaccgccgcgtgcacacgggcgagcggccccaccagtgccccgagtgcgggaagcgctttaccaataagccctatctgacttcgcaccggcgcatccacaccggcgagaagccctacccgtgcaaagagtgcggccgccgcttccggcacaaacccaacctgctgtctcacagcaagattcacaagcgatccgaggggtcggcccaggccgcccccggcccggggagcccccagctgccagccggcccccaggagtccgcggccgagcccaccccggcggtacctctgaaaccggcccaggagccgccgccaggggccccgccagagcacccgcaggacccgatcgaagcccccccctccctctacagctgcgacgactgcggcaggagcttccggctggagcgcttcctgcgggcccaccagcggcagcacaccggggagcggcccttcacctgcgccgagtgcgggaagaacttcggcaagaagacgcacctggtggcgcactcgcgcgtgcactccggcgagcggcccttcgcctgcgaggagtgcggccgccgcttctcccagggcagccatctggcggcgcatcggcgcgaccacgcccccgatcggcccttcgtgtgtcccgactgcggcaaggccttccgccacaaaccctacctggcggcgcaccggcgcatccacaccggcgagaagccctacgtctgccccgactgcggcaaagccttcagccagaagtccaacctggtgtcgcaccggcgcatccacacgggcgagcggccctacgcctgtcccgactgcgaccgcagcttcagccagaagtccaacctcatcacccaccgcaagagccacatccgggacggcgccttctgctgtgccatctgtggccagaccttcgacgacgaggagagactcctggcccaccagaagaagcacgatgtctgagacggtgggcggggccgtgttggctgagagagggctggggtccttcgtggtgggagtcgcagtgggctgggggtgcctgcctagtgctggagtaggggacaatgggaatcctagaggggatggaagacgcggggagtgagctgggtgggccctgctagcgagagaggtcaaccccggtggccagggaacccacttccaagcgcagggacgccggcctccagctggtgtgtgctaaggctccgtcctgactgccctgtgccctggaaaagcagcaatagcatccgccccttagagccctctggctagaggagccaccagtggaaaggaagaccctccatcctctggtattaacgccttaatgcccctgtcttttactgtaagttacttaagatcatttttggaagcaggcgtggtagagtcctgtaaatgaatgctctgggctagatacagcttggagaacctgctggccttgttagacagcacttgggcctttgccagcagcaagaggtgaagcgaagccactcttacctctcccttcccctcccacctgccccctgcgtaggcacccagacttggagagacccgtctgctgttaatacttccatcctcttccttcccaaagagcagatcccaaggcatttactccttggtctgtctcgctttatctgtcgcccctcccagcgctgagagcctcccctggctgtcagcagcactgtgtccaggctcttgtctgaacaccgcagcccctccttcgctccttccagagctcagcatgtcacggcaaggactgccgcattggtgatggagggccagctgaggggaagttgctggtgagtttccttttctccatttctagcatatggacacctggcctctgcttgagcacttaggtgacaggaacttccgcacctcctgaggccctggatgattctaattgttagaaattctaattgttagaaatccttccttataatgaatgaattctgctttcctataatttctacctattgggccttgttctgttctctggaactaaacagaacaaccatttacccctccttttcaaactagagaataaagatttggttttagaa

SEQ ID NO: 380308 - DNA, 2848 bp, Homo sapiens
  misc_feature (3)..(3): n is a, c, g, or t
aanggctaggtagaggctgggtttaatcggccgaggcagaggaagaaccgatgctggaacgtcgttgcaggggccccctggccatgggcctggcccagccccgactcctttctgggccctcccaggagtcaccccagaccctggggaaggagtcccgcgggctgaggcaacaaggcacgtcagtggcccagtctggtgcccaagccccaggcagggcccatcgctgtgcccactgtcgaaggcacttccctggctgggtggctctgtggcttcacacccgccggtgccaggcccggctgcccttgccctgccctgagtgtggccgtcgctttcgccatgcccccttcttagcactgcaccgccaggtccatgctgctgccaccccagacctgggctttgcctgccacctctgtgggcagagcttccgaggctgggtggccctggttctgcatctgcgggcccattcagctgcaaagcggcccatcgcttgtcccaaatgcgagagacgcttctggcgacgaaagcagcttcgagctcatctgcggcggtgccaccctcccgccccggaggcccggcccttcatatgcggcaactgtggccggagctttgcccagtgggaccagctagttgcccacaagcgggtgcacgtagctgaggccctggaggaggccgcagccaaggctctggggccccggcccaggggccgccccgcggtgaccgccccccggcccggtggagatgccgtcgaccgccccttccagtgtgcctgttgtggcaagcgcttccggcacaagcccaacttgatcgctcaccgccgcgtgcacacgggcgagcggccccaccagtgccccgagtgcgggaagcgctttaccaataagccctatctgacttcgcaccggcgcatccacaccggcgagaagccctacccgtgcaaagagtgcggccgccgcttccggcacaaacccaacctgctgtctcacagcaagattcacaagcgatccgaggggtcggcccaggccgcccccggcccggggagcccccagctgccagccggcccccaggagtccgcggccgagcccaccccggcggtacctctgaaaccggcccaggagccgccgccaggggccccgccagagcacccgcaggacccgatcgaagcccccccctccctctacagctgcgacgactgcggcaggagcttccggctggagcgcttcctgcgggcccaccagcggcagcacaccggggagcggcccttcacctgcgccgagtgcgggaagaacttcggcaagaagacgcacctggtggcgcactcgcgcgtgcactccggcgagcggcccttcgcctgcgaggagtgcggccgccgcttctcccagggcagccatctggcggcgcatcggcgcgaccacgcccccgatcggcccttcgtgtgtcccgactgcggcaaggccttccgccacaaaccctacctggcggcgcaccggcgcatccacaccggcgagaagccctacgtctgccccgactgcggcaaagccttcagccagaagtccaacctggtgtcgcaccggcgcatccacacgggcgagcggccctacgcctgtcccgactgcgaccgcagcttcagccagaagtccaacctcatcacccaccgcaagagccacatccgggacggcgccttctgctgtgccatctgtggccagaccttcgacgacgaggagagactcctggcccaccagaagaagcacgatgtctgagacggtgggcggggccgtgttggctgagagagggctggggtccttcgtggtgggagtcgcagtgggctgggggtgcctgcctagtgctggagtaggggacaatgggaatcctagaggggatggaagacgcggggagtgagctgggtgggccctgctagcgagagaggtcaaccccggtggccagggaacccacttccaagcgcagggacgccggcctccagctggtgtgtgctaaggctccgtcctgactgccctgtgccctggaaaagcagcaatagcatccgccccttagagccctctggctagaggagccaccagtggaaaggaagaccctccatcctctggtattaacgccttaatgcccctgtcttttactgtaagttacttaagatcatttttggaagcaggcgtggtagagtcctgtaaatgaatgctctgggctagatacagcttggagaacctgctggccttgttagacagcacttgggcctttgccagcagcaagaggtgaagcgaagccactcttacctctcccttcccctcccacctgccccctgcgtaggcacccagacttggagagacccgtctgctgttaatacttccatcctcttccttcccaaagagcagatcccaaggcatttactccttggtctgtctcgctttatctgtcgcccctcccagcgctgagagcctcccctggctgtcagcagcactgtgtccaggctcttgtctgaacaccgcagcccctccttcgctccttccagagctcagcatgtcacggcaaggactgccgcattggtgatggagggccagctgaggggaagttgctggtgagtttccttttctccatttctagcatatggacacctggcctctgcttgagcacttaggtgacaggaacttccgcacctcctgaggccctggatgattctaattgttagaaattctaattgttagaaatccttccttataatgaatgaattctgctttcctataatttctacctattgggccttgttctgttctctggaactaaacagaacaaccatttacccctccttttcaaactagagaataaagatttggttttagaa

SEQ ID NO: 380309 - DNA, 4378 bp, Homo sapiens
gaacccggcggggggaggttggggacgggcctggcagttgtgaactcgaacctgccgctgtcgccgcggcggggcggggagcgagagtgggccgcggaggccggccttcgggctccatggacgggcgccgcgtccctgcacagcccgccgcagaggtaaggctggcctctctgcagtcagaggtctgagctctgccatggggataggggtgtctttattactgcagttttctctaacacctgggggctaccggagtgtgggccgaagcaggcgctgcagccgcggaagtatccccaggaacatccccaagaggagctggaaaaagcctcatccccagctctgcagtctccagggtagagtctggcctttgctgtgctcccaaaccacgccacaacaggggtgcacgggcgtccccatcccggcggaaggaaatggccctttctcatatcctggggtcttccctgtgcacagtctgacactgggaatgagtgacctttgtgttccctgagaagagagagtgcgctctagggaatttagaaggatgtgtctggagcttgtgagcaggcacagaagggcccttaggagcctaactgcttccttcctccttccgcggaggaggctcctgtgcaggaatctgggctcccctgagctgtggaagagctgaacatggggcagcccctggcgaggttggggcaggaccgggcaggggactgagattgcagtctcatcttccctccccttctattgccccagtaatctccagcaccccgagggaggcagagccggtgatcaggccccgagggcagcaggctgtgggtgttccttggattcagggagagcattccttcctgcaatgtcctaatttgtgtgggtggaagagggcaggcgggcagaatgggggcacagtctgggcaggcggtggtctggcgttagactgccgggagtagcacccagggctctgctcctgttccccgagaagggctgttctcacttgtcctccagcctcctacggagactgcagttagtgatgctgaaagtgcctcccctgtggggctaggaatgaaaagctatagacacctttttctctgagatctttgcaaacccaggcgctttagaggaaagaacactggcctgggagtttaaagacctgttccctagtcttgattctgctgttggcttactgtgtcaccttgggcaggtctcgtcatctttgatgtctcacagttgcttcatctgttaaacagggagctcagtgtctgtttgtccagcttctcagagttgctgtgcagctcggatgtggcataggaaacagcagacacagggagagggcagcataaggcactgtagggagcagtggccacattttctggtgagtcctgtggcaggaatgtttgtgcattcagcactggagcatttactccctgtctgacactggggtagctgccatgagggggattctagtatcagagtccctcccttctggaagtttccagggcaacaaagacataagacaaacatccttgaaatgttatctaaaaacccaagattgaaataatacataccacacaaggaaacaggagagtagtctagctccatgtccggggctctaggggttcatagatggcagctcctgtccggggctgaggttgggaggggagaaacaggggcagagtgagttggtctctggagtgactgtgcttttccaccctcacagaggaagaaccgatgctggaacgtcgttgcaggggccccctggccatgggcctggcccagccccgactcctttctgggccctcccaggagtcaccccagaccctggggaaggagtcccgcgggctgaggcaacaaggcacgtcagtggcccagtctggtgcccaagccccaggcagggcccatcgctgtgcccactgtcgaaggcacttccctggctgggtggctctgtggcttcacacccgccggtgccaggcccggctgcccttgccctgccctgagtgtggccgtcgctttcgccatgcccccttcttagcactgcaccgccaggtccatgctgctgccaccccagacctgggctttgcctgccacctctgtgggcagagcttccgaggctgggtggccctggttctgcatctgcgggcccattcagctgcaaagcggcccatcgcttgtcccaaatgcgagagacgcttctggcgacgaaagcagcttcgagctcatctgcggcggtgccaccctcccgccccggaggcccggcccttcatatgcggcaactgtggccggagctttgcccagtgggaccagctagttgcccacaagcgggtgcacgtagctgaggccctggaggaggccgcagccaaggctctggggccccggcccaggggccgccccgcggtgaccgccccccggcccggtggagatgccgtcgaccgccccttccagtgtgcctgttgtggcaagcgcttccggcacaagcccaacttgatcgctcaccgccgcgtgcacacgggcgagcggccccaccagtgccccgagtgcgggaagcgctttaccaataagccctatctgacttcgcaccggcgcatccacaccggcgagaagccctacccgtgcaaagagtgcggccgccgcttccggcacaaacccaacctgctgtctcacagcaagattcacaagcgatccgaggggtcggcccaggccgcccccggcccggggagcccccagctgccagccggcccccaggagtccgcggccgagcccaccccggcggtacctctgaaaccggcccaggagccgccgccaggggccccgccagagcacccgcaggacccgatcgaagcccccccctccctctacagctgcgacgactgcggcaggagcttccggctggagcgcttcctgcgggcccaccagcggcagcacaccggggagcggcccttcacctgcgccgagtgcgggaagaacttcggcaagaagacgcacctggtggcgcactcgcgcgtgcactccggcgagcggcccttcgcctgcgaggagtgcggccgccgcttctcccagggcagccatctggcggcgcatcggcgcgaccacgcccccgatcggcccttcgtgtgtcccgactgcggcaaggccttccgccacaaaccctacctggcggcgcaccggcgcatccacaccggcgagaagccctacgtctgccccgactgcggcaaagccttcagccagaagtccaacctggtgtcgcaccggcgcatccacacgggcgagcggccctacgcctgtcccgactgcgaccgcagcttcagccagaagtccaacctcatcacccaccgcaagagccacatccgggacggcgccttctgctgtgccatctgtggccagaccttcgacgacgaggagagactcctggcccaccagaagaagcacgatgtctgagacggtgggcggggccgtgttggctgagagagggctggggtccttcgtggtgggagtcgcagtgggctgggggtgcctgcctagtgctggagtaggggacaatgggaatcctagaggggatggaagacgcggggagtgagctgggtgggccctgctagcgagagaggtcaaccccggtggccagggaacccacttccaagcgcagggacgccggcctccagctggtgtgtgctaaggctccgtcctgactgccctgtgccctggaaaagcagcaatagcatccgccccttagagccctctggctagaggagccaccagtggaaaggaagaccctccatcctctggtattaacgccttaatgcccctgtcttttactgtaagttacttaagatcatttttggaagcaggcgtggtagagtcctgtaaatgaatgctctgggctagatacagcttggagaacctgctggccttgttagacagcacttgggcctttgccagcagcaagaggtgaagcgaagccactcttacctctcccttcccctcccacctgccccctgcgtaggcacccagacttggagagacccgtctgctgttaatacttccatcctcttccttcccaaagagcagatcccaaggcatttactccttggtctgtctcgctttatctgtcgcccctcccagcgctgagagcctcccctggctgtcagcagcactgtgtccaggctcttgtctgaacaccgcagcccctccttcgctccttccagagctcagcatgtcacggcaaggactgccgcattggtgatggagggccagctgaggggaagttgctggtgagtttccttttctccatttctagcatatggacacctggcctctgcttgagcacttaggtgacataccgccaggggtttgcccaagtcacggccgctctgggtcgccagggttgtct

SEQ ID NO: 380310 - DNA, 4208 bp, Homo sapiens
gaacccggcggggggaggttggggacgggcctggcagttgtgaactcgaacctgccgctgtcgccgcggcggggcggggagcgagagtgggccgcggaggccggccttcgggctccatggacgggcgccgcgtccctgcacagcccgccgcagaggtaaggctggcctctctgcagtcagaggtctgagctctgccatggggataggggtgtctttattactgcagttttctctaacacctgggggctaccggagtgtgggccgaagcaggcgctgcagccgcggaagtatccccaggaacatccccaagaggagctggaaaaagcctcatccccagctctgcagtctccagggtagagtctggcctttgctgtgctcccaaaccacgccacaacaggggtgcacgggcgtccccatcccggcggaaggaaatggccctttctcatatcctggggtcttccctgtgcacagtctgacactgggaatgagtgacctttgtgttccctgagaagagagagtgcgctctagggaatttagaaggatgtgtctggagcttgtgagcaggcacagaagggcccttaggagcctaactgcttccttcctccttccgcggaggaggctcctgtgcaggaatctgggctcccctgagctgtggaagagctgaacatggggcagcccctggcgaggttggggcaggaccgggcaggggactgagattgcagtctcatcttccctccccttctattgccccagtaatctccagcaccccgagggaggcagagccggtgatcaggccccgagggcagcaggctgtgggtgttccttggattcagggagagcattccttcctgcaatgtcctaatttgtgtgggtggaagagggcaggcgggcagaatgggggcacagtctgggcaggcggtggtctggcgttagactgccgggagtagcacccagggctctgctcctgttccccgagaagggctgttctcacttgtcctccagcctcctacggagactgcagttagtgatgctgaaagtgcctcccctgtggggctaggaatgaaaagctatagacacctttttctctgagatctttgcaaacccaggcgctttagaggaaagaacactggcctgggagtttaaagacctgttccctagtcttgattctgctgttggcttactgtgtcaccttgggcaggtctcgtcatctttgatgtctcacagttgcttcatctgttaaacagggagctcagtgtctgtttgtccagcttctcagagttgctgtgcagctcggatgtggcataggaaacagcagacacagggagagggcagcataaggcactgtagggagcagtggccacattttctggtgagtcctgtggcaggaatgtttgtgcattcagcactggagcatttactccctgtctgacactggggtagctgccatgagggggattctagtatcagagtccctcccttctggaagtttccagggcaacaaagacataagacaaacatccttgaaatgttatctaaaaacccaagattgaaataatacataccacacaaggaaacaggagagtagtctagctccatgtccggggctctaggggttcatagatggcagctcctgtccggggctgaggttgggaggggagaaacaggggcagagtgagttggtctctggagtgactgtgcttttccaccctcacagaggaagaaccgatgctggaacgtcgttgcaggggccccctggccatgggcctggcccagccccgactcctttctgggccctcccaggagtcaccccagaccctggggaaggagtcccgcgggctgaggcaacaaggcacgtcagtggcccagtctggtgcccaagccccaggcagggcccatcgctgtgcccactgtcgaaggcacttccctggctgggtggctctgtggcttcacacccgccggtgccaggcccggctgcccttgccctgccctgagtgtggccgtcgctttcgccatgcccccttcttagcactgcaccgccaggtccatgctgctgccaccccagacctgggctttgcctgccacctctgtgggcagagcttccgaggctgggtggccctggttctgcatctgcgggcccattcagctgcaaagcggcccatcgcttgtcccaaatgcgagagacgcttctggcgacgaaagcagcttcgagctcatctgcggcggtgccaccctcccgccccggaggcccggcccttcatatgcggcaactgtggccggagctttgcccagtgggaccagctagttgcccacaagcgggtgcacgtagctgaggccctggaggaggccgcagccaaggctctggggccccggcccaggggccgccccgcggtgaccgccccccggcccggtggagatgccgtcgaccgccccttccagtgtgcctgttgtggcaagcgcttccggcacaagcccaacttgatcgctcaccgccgcgtgcacacgggcgagcggccccaccagtgccccgagtgcgggaagcgctttaccaataagccctatctgacttcgcaccggcgcatccacaccggcgagaagccctacccgtgcaaagagtgcggccgccgcttccggcacaaacccaacctgctgtctcacagcaagattcacaagcgatccgaggggtcggcccaggccgcccccggcccggggagcccccagctgccagccggcccccaggagtccgcggccgagcccaccccggcggtacctctgaaaccggcccaggagccgccgccaggggccccgccagagcacccgcaggacccgatcgaagcccccccctccctctacagctgcgacgactgcggcaggagcttccggctggagcgcttcctgcgggcccaccagcggcagcacaccggggagcggcccttcacctgcgccgagtgcgggaagaacttcggcaagaagacgcacctggtggcgcactcgcgcgtgcactccggcgagcggcccttcgcctgcgaggagtgcggccgccgcttctcccagggcagccatctggcggcgcatcggcgcgaccacgcccccgatcggcccttcgtgtgtcccgactgcggcaaggccttccgccacaaaccctacctggcggcgcaccggcgcatccacaccggcgagaagccctacgtctgccccgactgcggcaaagccttcagccagaagtccaacctggtgtcgcaccggcgcatccacacgggcgagcggccctacgcctgtcccgactgcgaccgcagcttcagccagaagtccaacctcatcacccaccgcaagagccacatccgggacggcgccttctgctgtgccatctgtggccagaccttcgacgacgaggagagactcctggcccaccagaagaagcacgatgtctgagacggtgggcggggccgtgttggctgagagagggctggggtccttcgtggtgggagtcgcagtgggctgggggtgcctgcctagtgctggagtaggggacaatgggaatcctagaggggatggaagacgcggggagtgagctgggtgggccctgctagcgagagaggtcaaccccggtggccagggaacccacttccaagcgcagggacgccggcctccagctggtgtgtgctaaggctccgtcctgactgccctgtgccctggaaaagcagcaatagcatccgccccttagagccctctggctagaggagccaccagtggaaaggaagaccctccatcctctggtattaacgccttaatgcccctgtcttttactgtaagttacttaagatcatttttggaagcaggctcttgtctgaacaccgcagcccctccttcgctccttccagagctcagcatgtcacggcaaggactgccgcattggtgatggagggccagctgaggggaagttgctggtgagtttccttttctccatttctagcatatggacacctggcctctgcttgagcacttaggtgacaggaacttccgcacctcctgaggccctggatgattctaattgttagaaattctaattgttagaaatccttccttataatgaatgaattctgctttcctataatttctacctattgggccttgttctgttctctggaactaaacagaacaaccatttacccctccttttcaaactagagaataaagatttggttttagaa

SEQ ID NO: 380311 - DNA, 4264 bp, Homo sapiens
gaacccggcggggggaggttggggacgggcctggcagttgtgaactcgaacctgccgctgtcgccgcggcggggcggggagcgagagtgggccgcggaggccggccttcgggctccatggacgggcgccgcgtccctgcacagcccgccgcagaggtaaggctggcctctctgcagtcagaggtctgagctctgccatggggataggggtgtctttattactgcagttttctctaacacctgggggctaccggagtgtgggccgaagcaggcgctgcagccgcggaagtatccccaggaacatccccaagaggagctggaaaaagcctcatccccagctctgcagtctccagggtagagtctggcctttgctgtgctcccaaaccacgccacaacaggggtgcacgggcgtccccatcccggcggaaggaaatggccctttctcatatcctggggtcttccctgtgcacagtctgacactgggaatgagtgacctttgtgttccctgagaagagagagtgcgctctagggaatttagaaggatgtgtctggagcttgtgagcaggcacagaagggcccttaggagcctaactgcttccttcctccttccgcggaggaggctcctgtgcaggaatctgggctcccctgagctgtggaagagctgaacatggggcagcccctggcgaggttggggcaggaccgggcaggggactgagattgcagtctcatcttccctccccttctattgccccagtaatctccagcaccccgagggaggcagagccggtgatcaggccccgagggcagcaggctgtgggtgttccttggattcagggagagcattccttcctgcaatgtcctaatttgtgtgggtggaagagggcaggcgggcagaatgggggcacagtctgggcaggcggtggtctggcgttagactgccgggagtagcacccagggctctgctcctgttccccgagaagggctgttctcacttgtcctccagcctcctacggagactgcagttagtgatgctgaaagtgcctcccctgtggggctaggaatgaaaagctatagacacctttttctctgagatctttgcaaacccaggcgctttagaggaaagaacactggcctgggagtttaaagacctgttccctagtcttgattctgctgttggcttactgtgtcaccttgggcaggtctcgtcatctttgatgtctcacagttgcttcatctgttaaacagggagctcagtgtctgtttgtccagcttctcagagttgctgtgcagctcggatgtggcataggaaacagcagacacagggagagggcagcataaggcactgtagggagcagtggccacattttctggtgagtcctgtggcaggaatgtttgtgcattcagcactggagcatttactccctgtctgacactggggtagctgccatgagggggattctagtatcagagtccctcccttctggaagtttccagggcaacaaagacataagacaaacatccttgaaatgttatctaaaaacccaagattgaaataatacataccacacaaggaaacaggagagtagtctagctccatgtccggggctctaggggttcatagatggcagctcctgtccggggctgaggttgggaggggagaaacaggggcagagtgagttggtctctggagtgactgtgcttttccaccctcacagaggaagaaccgatgctggaacgtcgttgcaggggccccctggccatgggcctggcccagccccgactcctttctgggccctcccaggagtcaccccagaccctggggaaggagtcccgcgggctgaggcaacaaggcacgtcagtggcccagtctggtgcccaagccccaggcagggcccatcgctgtgcccactgtcgaaggcacttccctggctgggtggctctgtggcttcacacccgccggtgccaggcccggctgcccttgccgaggcccggcccttcatatgcggcaactgtggccggagctttgcccagtgggaccagctagttgcccacaagcgggtgcacgtagctgaggccctggaggaggccgcagccaaggctctggggccccggcccaggggccgccccgcggtgaccgccccccggcccggtggagatgccgtcgaccgccccttccagtgtgcctgttgtggcaagcgcttccggcacaagcccaacttgatcgctcaccgccgcgtgcacacgggcgagcggccccaccagtgccccgagtgcgggaagcgctttaccaataagccctatctgacttcgcaccggcgcatccacaccggcgagaagccctacccgtgcaaagagtgcggccgccgcttccggcacaaacccaacctgctgtctcacagcaagattcacaagcgatccgaggggtcggcccaggccgcccccggcccggggagcccccagctgccagccggcccccaggagtccgcggccgagcccaccccggcggtacctctgaaaccggcccaggagccgccgccaggggccccgccagagcacccgcaggacccgatcgaagcccccccctccctctacagctgcgacgactgcggcaggagcttccggctggagcgcttcctgcgggcccaccagcggcagcacaccggggagcggcccttcacctgcgccgagtgcgggaagaacttcggcaagaagacgcacctggtggcgcactcgcgcgtgcactccggcgagcggcccttcgcctgcgaggagtgcggccgccgcttctcccagggcagccatctggcggcgcatcggcgcgaccacgcccccgatcggcccttcgtgtgtcccgactgcggcaaggccttccgccacaaaccctacctggcggcgcaccggcgcatccacaccggcgagaagccctacgtctgccccgactgcggcaaagccttcagccagaagtccaacctggtgtcgcaccggcgcatccacacgggcgagcggccctacgcctgtcccgactgcgaccgcagcttcagccagaagtccaacctcatcacccaccgcaagagccacatccgggacggcgccttctgctgtgccatctgtggccagaccttcgacgacgaggagagactcctggcccaccagaagaagcacgatgtctgagacggtgggcggggccgtgttggctgagagagggctggggtccttcgtggtgggagtcgcagtgggctgggggtgcctgcctagtgctggagtaggggacaatgggaatcctagaggggatggaagacgcggggagtgagctgggtgggccctgctagcgagagaggtcaaccccggtggccagggaacccacttccaagcgcagggacgccggcctccagctggtgtgtgctaaggctccgtcctgactgccctgtgccctggaaaagcagcaatagcatccgccccttagagccctctggctagaggagccaccagtggaaaggaagaccctccatcctctggtattaacgccttaatgcccctgtcttttactgtaagttacttaagatcatttttggaagcaggcgtggtagagtcctgtaaatgaatgctctgggctagatacagcttggagaacctgctggccttgttagacagcacttgggcctttgccagcagcaagaggtgaagcgaagccactcttacctctcccttcccctcccacctgccccctgcgtaggcacccagacttggagagacccgtctgctgttaatacttccatcctcttccttcccaaagagcagatcccaaggcatttactccttggtctgtctcgctttatctgtcgcccctcccagcgctgagagcctcccctggctgtcagcagcactgtgtccaggctcttgtctgaacaccgcagcccctccttcgctccttccagagctcagcatgtcacggcaaggactgccgcattggtgatggagggccagctgaggggaagttgctggtgagtttccttttctccatttctagcatatggacacctggcctctgcttgagcacttaggtgacaggaacttccgcacctcctgaggccctggatgattctaattgttagaaattctaattgttagaaatccttccttataatgaatgaattctgctttcctataatttctacctattgggccttgttctgttctctggaactaaacagaacaaccatttacccctccttttcaaactagagaataaagatttggttttagaa

SEQ ID NO: 380312 - DNA, 3494 bp, Homo sapiens
gaacccggcggggggaggttggggacgggcctggcagttgtgaactcgaacctgccgctgtcgccgcggcggggcggggagcgagagtgggccgcggaggccggccttcgggctccatggacgggcgccgcgtccctgcacagcccgccgcagaggtaaggctggcctctctgcagtcagaggtctgagctctgccatggggataggggtgtctttattactgcagttttctctaacacctgggggctaccggagtgtgggccgaagcaggcgctgcagccgcggaagtatccccaggaacatccccaagaggagctggaaaaagcctcatccccagctctgcagtctccagggtagagtctggcctttgctgtgctcccaaaccacgccacaacaggggtgcacgggcgtccccatcccggcggaaggaaatggccctttctcatatcctggggtcttccctgtgcacagtctgacactgggaatgagtgacctttgtgttccctgagaagagagagtgcgctctagggaatttagaaggatgtgtctggagcttgtgagcaggcacagaagggcccttaggagcctaactgcttccttcctccttccgcggaggaggctcctgtgcaggaatctgggctcccctgagctgtggaagagctgaacatggggcagcccctggcgaggttggggcaggaccgggcaggggactgagattgcagtctcatcttccctccccttctattgccccagtaatctccagcaccccgagggaggcagagccggtgatcaggccccgagggcagcaggctgtgggtgttccttggattcagggagagcattccttcctgcaatgtcctaatttgtgtgggtggaagagggcaggcgggcagaatgggggcacagtctgggcaggcggtggtctggcgttagactgccgggagtagcacccagggctctgctcctgttccccgagaagggctgttctcacttgtcctccagcctcctacggagactgcagttagtgatgctgaaagtgcctcccctgtggggctaggaatgaaaagctatagacacctttttctctgagatctttgcaaacccaggcgctttagaggaaagaacactggcctgggagtttaaagacctgttccctagtcttgattctgctgttggcttactgtgtcaccttgggcaggtctcgtcatctttgatgtctcacagttgcttcatctgttatgtggccggagctttgcccagtgggaccagctagttgcccacaagcgggtgcacgtagctgaggccctggaggaggccgcagccaaggctctggggccccggcccaggggccgccccgcggtgaccgccccccggcccggtggagatgccgtcgaccgccccttccagtgtgcctgttgtggcaagcgcttccggcacaagcccaacttgatcgctcaccgccgcgtgcacacgggcgagcggccccaccagtgccccgagtgcgggaagcgctttaccaataagccctatctgacttcgcaccggcgcatccacaccggcgagaagccctacccgtgcaaagagtgcggccgccgcttccggcacaaacccaacctgctgtctcacagcaagattcacaagcgatccgaggggtcggcccaggccgcccccggcccggggagcccccagctgccagccggcccccaggagtccgcggccgagcccaccccggcggtacctctgaaaccggcccaggagccgccgccaggggccccgccagagcacccgcaggacccgatcgaagcccccccctccctctacagctgcgacgactgcggcaggagcttccggctggagcgcttcctgcgggcccaccagcggcagcacaccggggagcggcccttcacctgcgccgagtgcgggaagaacttcggcaagaagacgcacctggtggcgcactcgcgcgtgcactccggcgagcggcccttcgcctgcgaggagtgcggccgccgcttctcccagggcagccatctggcggcgcatcggcgcgaccacgcccccgatcggcccttcgtgtgtcccgactgcggcaaggccttccgccacaaaccctacctggcggcgcaccggcgcatccacaccggcgagaagccctacgtctgccccgactgcggcaaagccttcagccagaagtccaacctggtgtcgcaccggcgcatccacacgggcgagcggccctacgcctgtcccgactgcgaccgcagcttcagccagaagtccaacctcatcacccaccgcaagagccacatccgggacggcgccttctgctgtgccatctgtggccagaccttcgacgacgaggagagactcctggcccaccagaagaagcacgatgtctgagacggtgggcggggccgtgttggctgagagagggctggggtccttcgtggtgggagtcgcagtgggctgggggtgcctgcctagtgctggagtaggggacaatgggaatcctagaggggatggaagacgcggggagtgagctgggtgggccctgctagcgagagaggtcaaccccggtggccagggaacccacttccaagcgcagggacgccggcctccagctggtgtgtgctaaggctccgtcctgactgccctgtgccctggaaaagcagcaatagcatccgccccttagagccctctggctagaggagccaccagtggaaaggaagaccctccatcctctggtattaacgccttaatgcccctgtcttttactgtaagttacttaagatcatttttggaagcaggcgtggtagagtcctgtaaatgaatgctctgggctagatacagcttggagaacctgctggccttgttagacagcacttgggcctttgccagcagcaagaggtgaagcgaagccactcttacctctcccttcccctcccacctgccccctgcgtaggcacccagacttggagagacccgtctgctgttaatacttccatcctcttccttcccaaagagcagatcccaaggcatttactccttggtctgtctcgctttatctgtcgcccctcccagcgctgagagcctcccctggctgtcagcagcactgtgtccaggctcttgtctgaacaccgcagcccctccttcgctccttccagagctcagcatgtcacggcaaggactgccgcattggtgatggagggccagctgaggggaagttgctggtgagtttccttttctccatttctagcatatggacacctggcctctgcttgagcacttaggtgacaggaacttccgcacctcctgaggccctggatgattctaattgttagaaattctaattgttagaaatccttccttataatgaatgaattctgctttcctataatttctacctattgggccttgttctgttctctggaactaaacagaacaaccatttacccctccttttcaaactagagaataaagatttggttttagaa

SEQ ID NO: 380313 - DNA, 2325 bp, Homo sapiens
  misc_feature (3)..(3): n is a, c, g, or t
aanggctaggtagaggctgggtttaatcggccgaggcgagagtgggccgcggaggccggccttcgggctccatggacgggcgccgcgtccctgcacagcccgccgcagagcagaggaagaaccgatgctggaacgtcgttgcaggggccccctggccatgggcctggcccagccccgactcctttctgggccctcccaggagtcaccccagaccctggggaaggagtcccgcgggctgaggcaacaaggtggcaagcgcttccggcacaagcccaacttgatcgctcaccgccgcgtgcacacgggcgagcggccccaccagtgccccgagtgcgggaagcgctttaccaataagccctatctgacttcgcaccggcgcatccacaccggcgagaagccctacccgtgcaaagagtgcggccgccgcttccggcacaaacccaacctgctgtctcacagcaagattcacaagcgatccgaggggtcggcccaggccgcccccggcccggggagcccccagctgccagccggcccccaggagtccgcggccgagcccaccccggcggtacctctgaaaccggcccaggagccgccgccaggggccccgccagagcacccgcaggacccgatcgaagcccccccctccctctacagctgcgacgactgcggcaggagcttccggctggagcgcttcctgcgggcccaccagcggcagcacaccggggagcggcccttcacctgcgccgagtgcgggaagaacttcggcaagaagacgcacctggtggcgcactcgcgcgtgcactccggcgagcggcccttcgcctgcgaggagtgcggccgccgcttctcccagggcagccatctggcggcgcatcggcgcgaccacgcccccgatcggcccttcgtgtgtcccgactgcggcaaggccttccgccacaaaccctacctggcggcgcaccggcgcatccacaccggcgagaagccctacgtctgccccgactgcggcaaagccttcagccagaagtccaacctggtgtcgcaccggcgcatccacacgggcgagcggccctacgcctgtcccgactgcgaccgcagcttcagccagaagtccaacctcatcacccaccgcaagagccacatccgggacggcgccttctgctgtgccatctgtggccagaccttcgacgacgaggagagactcctggcccaccagaagaagcacgatgtctgagacggtgggcggggccgtgttggctgagagagggctggggtccttcgtggtgggagtcgcagtgggctgggggtgcctgcctagtgctggagtaggggacaatgggaatcctagaggggatggaagacgcggggagtgagctgggtgggccctgctagcgagagaggtcaaccccggtggccagggaacccacttccaagcgcagggacgccggcctccagctggtgtgtgctaaggctccgtcctgactgccctgtgccctggaaaagcagcaatagcatccgccccttagagccctctggctagaggagccaccagtggaaaggaagaccctccatcctctggtattaacgccttaatgcccctgtcttttactgtaagttacttaagatcatttttggaagcaggcgtggtagagtcctgtaaatgaatgctctgggctagatacagcttggagaacctgctggccttgttagacagcacttgggcctttgccagcagcaagaggtgaagcgaagccactcttacctctcccttcccctcccacctgccccctgcgtaggcacccagacttggagagacccgtctgctgttaatacttccatcctcttccttcccaaagagcagatcccaaggcatttactccttggtctgtctcgctttatctgtcgcccctcccagcgctgagagcctcccctggctgtcagcagcactgtgtccaggctcttgtctgaacaccgcagcccctccttcgctccttccagagctcagcatgtcacggcaaggactgccgcattggtgatggagggccagctgaggggaagttgctggtgagtttccttttctccatttctagcatatggacacctggcctctgcttgagcacttaggtgacaggaacttccgcacctcctgaggccctggatgattctaattgttagaaattctaattgttagaaatccttccttataatgaatgaattctgctttcctataatttctacctattgggccttgttctgttctctggaactaaacagaacaaccatttacccctccttttcaaactagagaataaagatttggttttagaa

SEQ ID NO: 380314 - DNA, 3163 bp, Homo sapiens
  misc_feature (5)..(6): n is a, c, g, or t
  misc_feature (13)..(13): n is a, c, g, or t
cgacnnacgcgtngcgacccacgcgtcgcccacgcgttgtgaactcgaacctgccgctgtcgccgcggcggggcggggagcgagagtgggccgcggaggccggccttcgggctccatggacgggcgccgcgtccctgcacagcccgccgcagaggtacggccggggcaggggcgcggggccaccgcgggcccgcggggggccgctccacctgcggggcgcgtgaccgtgagtgtgcgcgaccgtgtgtgagtgcgcggggggggacgctgctggatctgcgggggtgggggagcgcacctgcgcacaggctccgcgagctgcgccgtgcgtgggacccgaaatggctcactcgcaagaacgggacccgtgtgcccgggagcgtggacggaggacacgcatcagtacaaaagggcggtgtggggcttctgccacccgcggccagccgcgatgcggaaggggattctgacggagtcgtggtcacaccagctggccctgcgcagccccatgggaaataggcctggaattcctgtcgggaggaggctgggggaaggggagccagcagggattccagagttcctgccataggccggcctttggccatcagggaaagcccagactctggccacagaatggagaattcgttccgtgaccttaccagggaagaaagtgaccccgaaagacagcagtgtgcttccttgttgaaggggcacattcatttattaatccaatgtccattaaggtcactctgccaggcaggatgtggggcttatggctggtgcgtgtggctttgtggggggaggggttgtggctggtgaggacacaaagctgactgccctagaggagctcagagcctcacttctgttttctcttccctccccacaggtaaggctggcctctctgcagtcagaggtctgagctctgccatggggataggggtgtctttattactgcagttttctctaacacctgggggctaccggagtgtgggccgaagcaggcgctgcagccgcggaagtatccccaggaacatccccaagaggagctggaaaaagcctcatccccagctctgcagtctccagggtagagtctggcctttgctgtgctcccaaaccacgccacaacaggggtgcacgggcgtccccatcccggcggaaggaaatggccctttctcatatcctggggtcttccctgtgcacagtctgacactgggaatgagtgacctttgtgttccctgagaagagagagtgcgctctagggaatttagaaggatgtgtctggagcttgtgagcaggcacagaagggcccttaggagcctaactgcttccttcctccttccgcggaggaggctcctgtgcaggaatctgggctcccctgagctgtggaagagctgaacatggggcagcccctggcgaggttggggcaggaccgggcaggggactgagattgcagtctcatcttccctccccttctattgccccagtaatctccagcaccccgagggaggcagagccggtgatcaggccccgagggcagcaggctgtgggtgttccttggattcagggagagcattccttcctgcgccgagtgcgggaagaacttcggcaagaagacgcacctggtggcgcactcgcgcgtgcactccggcgagcggcccttcgcctgcgaggagtgcggccgccgcttctcccagggcagccatctggcggcgcatcggcgcgaccacgcccccgatcggcccttcgtgtgtcccgactgcggcaaggccttccgccacaaaccctacctggcggcgcaccggcgcatccacaccggcgagaagccctacgtctgccccgactgcggcaaagccttcagccagaagtccaacctggtgtcgcaccggcgcatccacacgggcgagcggccctacgcctgtcccgactgcgaccgcagcttcagccagaagtccaacctcatcacccaccgcaagagccacatccgggacggcgccttctgctgtgccatctgtggccagaccttcgacgacgaggagagactcctggcccaccagaagaagcacgatgtctgagacggtgggcggggccgtgttggctgagagagggctggggtccttcgtggtgggagtcgcagtgggctgggggtgcctgcctagtgctggagtaggggacaatgggaatcctagaggggatggaagacgcggggagtgagctgggtgggccctgctagcgagagaggtcaaccccggtggccagggaacccacttccaagcgcagggacgccggcctccagctggtgtgtgctaaggctccgtcctgactgccctgtgccctggaaaagcagcaatagcatccgccccttagagccctctggctagaggagccaccagtggaaaggaagaccctccatcctctggtattaacgccttaatgcccctgtcttttactgtaagttacttaagatcatttttggaagcaggcgtggtagagtcctgtaaatgaatgctctgggctagatacagcttggagaacctgctggccttgttagacagcacttgggcctttgccagcagcaagaggtgaagcgaagccactcttacctctcccttcccctcccacctgccccctgcgtaggcacccagacttggagagacccgtctgctgttaatacttccatcctcttccttcccaaagagcagatcccaaggcatttactccttggtctgtctcgctttatctgtcgcccctcccagcgctgagagcctcccctggctgtcagcagcactgtgtccaggctcttgtctgaacaccgcagcccctccttcgctccttccagagctcagcatgtcacggcaaggactgccgcattggtgatggagggccagctgaggggaagttgctggtgagtttccttttctccatttctagcatatggacacctggcctctgcttgagcacttaggtgacaggaacttccgcacctcctgaggccctggatgattctaattgttagaaattctaattgttagaaatccttccttataatgaatgaattctgctttcctataatttctacctattgggccttgttctgttctctggaactaaacagaacaaccatttacccctccttttcaaactagagaataaagatttggttttagaa

SEQ ID NO: 380315 - DNA, 1857 bp, Homo sapiens
gaacccggcggggggaggttggggacgggcctggcagttgtgaactcgaacctgccgctgtcgccgcggcggggcggggagcgagagtgggccgcggaggccggccttcgggctccatggacgggcgccgcgtccctgcacagcccgccgcagagcagaggaagaaccgatgctggaacgtcgttgcaggggccccctggccatgggcctggcccagccccgactcctttctgggccctcccaggagtcaccccagaccctggggaaggagtcccgcgggctgaggcaacaaggcacgtcagtggcccagtctggtgcccaagccccaggcagggcccatcgctgtgcccactgtcgaaggcacttccctggctgggtggctctgtggcttcacacccgccggtgccaggcccggctgcccttgccctgccctgagtgtggccgtcgctttcgccatgcccccttcttagcactgcaccgccaggtccatgctgctgccaccccagacctgggctttgcctgccacctctgtgggcagagcttccgaggctgggtggccctggttctgcatctgcgggcccattcagctgcaaagcggcccatcgcttgtcccgactgcgaccgcagcttcagccagaagtccaacctcatcacccaccgcaagagccacatccgggacggcgccttctgctgtgccatctgtggccagaccttcgacgacgaggagagactcctggcccaccagaagaagcacgatgtctgagacggtgggcggggccgtgttggctgagagagggctggggtccttcgtggtgggagtcgcagtgggctgggggtgcctgcctagtgctggagtaggggacaatgggaatcctagaggggatggaagacgcggggagtgagctgggtgggccctgctagcgagagaggtcaaccccggtggccagggaacccacttccaagcgcagggacgccggcctccagctggtgtgtgctaaggctccgtcctgactgccctgtgccctggaaaagcagcaatagcatccgccccttagagccctctggctagaggagccaccagtggaaaggaagaccctccatcctctggtattaacgccttaatgcccctgtcttttactgtaagttacttaagatcatttttggaagcaggcgtggtagagtcctgtaaatgaatgctctgggctagatacagcttggagaacctgctggccttgttagacagcacttgggcctttgccagcagcaagaggtgaagcgaagccactcttacctctcccttcccctcccacctgccccctgcgtaggcacccagacttggagagacccgtctgctgttaatacttccatcctcttccttcccaaagagcagatcccaaggcatttactccttggtctgtctcgctttatctgtcgcccctcccagcgctgagagcctcccctggctgtcagcagcactgtgtccaggctcttgtctgaacaccgcagcccctccttcgctccttccagagctcagcatgtcacggcaaggactgccgcattggtgatggagggccagctgaggggaagttgctggtgagtttccttttctccatttctagcatatggacacctggcctctgcttgagcacttaggtgacaggaacttccgcacctcctgaggccctggatgattctaattgttagaaattctaattgttagaaatccttccttataatgaatgaattctgctttcctataatttctacctattgggccttgttctgttctctggaactaaacagaacaaccatttacccctccttttcaaactagagaataaagatttggttttagaa

SEQ ID NO: 380316 - DNA, 3276 bp, Homo sapiens
gacccctctctctccaccccccacccccgcccccgcttctgtctccctagggactggtgattgcagctggaagtgcccatgaccgagctggcgtcctccgggggcgggtcccctgcgggggacggggaggagggtctgggggacgagcgaggcctggtcatccaccaccctgcagaggagcagccctaccgctgcccgctgtgcggccagaccttctcgcagcagcccagcctggtgcggcaccagaaggcgcacgccggagcgggccgcgcggctgccttcgtgtgtcccgagtgcggcaaggccttcagcgtcaagcacaacctcgaggtgcaccagcgcacgcacaccggggagcggcccttcccctgccccgagtgcggccgctgcttcagcctcaagcagaacctgctcacgcaccagcgcatccacagcggcgagaagccgcaccagtgcgcgcagtgcggccgctgcttccgcgagccgcgcttcctgctcaaccaccagcgcacccacgcgcgcatgcccgcgccgcacccgcgccgccccggcgtcttcggggagcggcggccctacttctgcccccgctgcggcaagagcttcgcgcgcgagggctcgctcaagacccatcagcgcagccacggccacgggcccgagggccaggcggcccacttaggacgcgtgctatgatgcgcccggggcctgctgccgacggctgcttcccgccccgcacgtgcgtccccgacccctggagatggccctgggccgcagctccctctctagatgggatcccgggagaggggcagcgctggcttgggctcttgaaggtgtgggccgccgccaggctccggccgcccgctcgcgttcctccctcgggaccctctggctggctgcgcacagctgcttccggctcctgccatggttctccttctctggcccatccggcctagagcagttgcagagtgggcaggatcttaagacccgataggtgcagaacccatctggacacggagaccaggaatggagttccatggaggcctggctggcactgcacccgggcatgaggacacatccagtaagaagacctgcctcaagaggtgcactgcggtgaccagtggaggtgactggttggagcctggaattggaagcagattccaagctctggtggacaaactctccaggcctggtgggaatcacagctggggcagacctcatcctggctgcctggccacaggcccccactctctgccactggtggtaggacgatgcctgtgtggagagctggcttctctgctcccgcctggtccaccacttggctagagttcagagacaggaagtgattggtctaagctaacacagcaagttggtggcagacctggttctagaggcaaaaccttcttccagatgtgaatgaaacctgcaggcttcattttcctttctgagcagtgcttcttagctctttggagacacgaagcccttggaaaatctgatgaaggttacggaccttccctaggaaaacagataactgacgtagactcaaaaaccccaagcaatttcaggagccactggactccctgaatgaaacccatccctggactccaggctaagaacctcagccctggggacttcacctgctgccctttccttacctgtcacacattgagccccgagtcaaggccactgtacaagtagtgcccctccctccccctggccaagcctccttcccttgttcaggaataaagaattccgaggagccctttttagtcattcccttctcccagacctaacgaatggtgcgtcaggtttctggagcctcatttcccttccccagacattggcagaggtcccttgggctagattttctcttctggttttgtttcttgttctgcctgactggccgctggcttccacaaaggagccctttgctcctggcctgggctctgatttcactgtgtggtctcaggggaagctggactgctgtggacgctggtgggagcttgagtctggtctgagtctgccccaggaagaaagaatcctgcttccaccaaccaagcccagtcagcggttcctcccaactggccaagtgttcagcccagtgggctggggaggaagaggatgagggcctcgctcctggtgcctgtggctctgggcagggtgagaggtcggtggaggatctttctgtgtgttctctgagtatgcagcagtgcagttgaagggaacagggcccaggcaggcagcaggacgaggactcctcccatcttcacacctgaaccagtcagcctggaagctacaagttctcacctgcctccccagaatgaacatcagaaaaggcaaaactgaccagggctgggatgggtttgggtcagcgtggttggagggcagcctgtggatccctgcactggagtcttgctgtcttcgatgcaggttggatcatacattgttacctcctactgtatgcctcaccctggaatagcagaatgctcagggggagatccgagaacgagaaggtgctcccagccccaggagcttccagtctggctctgatccttggccgacctagaggaaacctccacacacgccccttttgtgctaatggtgcagtttgtgtccccctctgcccatcactgtgctgtgcttgttcctgcctctgtgccttcccctatactgctcggacatgtcccctttcctctcctctacccagctaagcccttctgatccacggggcccggcttcccaaaccacccagcccacattcctccttcctgctccgaacaggtcccgtgtgagcccctgcccccgaattgcgtgctgtcccatggacgctccagtctcttccgtgtgtgtcttgagtccctaactagacagttagctccctgagggcaagggactgtcatttcctcttgagtcctaccagggtctagcacaggactgggctcctaactctcaggaaacacttgtcggctgactggtgcctcaagcgctggagcttgtcggtggccggtaatgggcagtgcacgtggggagagggtatgtgagttaactcaagggtgccttttcttgggctgtgggctggctcccctgggtcaaaagtggatgtcggaggcctcaggctcttacctccttggggcagtgggagcatcagggacccccacccccaccccggctctgcaggagtgcacggaagtggtcgtccagcctggatatttctacaggttgctgactcctgcgggagctgactgagtggaataaatgttctctcaacataaaaaaaagtaa

SEQ ID NO: 380317 - DNA, 3340 bp, Homo sapiens
gactggaaggagtgtaggccgtgcttaaaaggcagtggaggaagaggaacaccaattcccagcaggggaacttgagcttgaacaaaacggggcgaaaggtggaggttgtgggagggactggtgattgcagctggaagtgcccatgaccgagctggcgtcctccgggggcgggtcccctgcgggggacggggaggagggtctgggggacgagcgaggcctggtcatccaccaccctgcagaggagcagccctaccgctgcccgctgtgcggccagaccttctcgcagcagcccagcctggtgcggcaccagaaggcgcacgccggagcgggccgcgcggctgccttcgtgtgtcccgagtgcggcaaggccttcagcgtcaagcacaacctcgaggtgcaccagcgcacgcacaccggggagcggcccttcccctgccccgagtgcggccgctgcttcagcctcaagcagaacctgctcacgcaccagcgcatccacagcggcgagaagccgcaccagtgcgcgcagtgcggccgctgcttccgcgagccgcgcttcctgctcaaccaccagcgcacccacgcgcgcatgcccgcgccgcacccgcgccgccccggcgtcttcggggagcggcggccctacttctgcccccgctgcggcaagagcttcgcgcgcgagggctcgctcaagacccatcagcgcagccacggccacgggcccgagggccaggcggcccacttaggacgcgtgctatgatgcgcccggggcctgctgccgacggctgcttcccgccccgcacgtgcgtccccgacccctggagatggccctgggccgcagctccctctctagatgggatcccgggagaggggcagcgctggcttgggctcttgaaggtgtgggccgccgccaggctccggccgcccgctcgcgttcctccctcgggaccctctggctggctgcgcacagctgcttccggctcctgccatggttctccttctctggcccatccggcctagagcagttgcagagtgggcaggatcttaagacccgataggtgcagaacccatctggacacggagaccaggaatggagttccatggaggcctggctggcactgcacccgggcatgaggacacatccagtaagaagacctgcctcaagaggtgcactgcggtgaccagtggaggtgactggttggagcctggaattggaagcagattccaagctctggtggacaaactctccaggcctggtgggaatcacagctggggcagacctcatcctggctgcctggccacaggcccccactctctgccactggtggtaggacgatgcctgtgtggagagctggcttctctgctcccgcctggtccaccacttggctagagttcagagacaggaagtgattggtctaagctaacacagcaagttggtggcagacctggttctagaggcaaaaccttcttccagatgtgaatgaaacctgcaggcttcattttcctttctgagcagtgcttcttagctctttggagacacgaagcccttggaaaatctgatgaaggttacggaccttccctaggaaaacagataactgacgtagactcaaaaaccccaagcaatttcaggagccactggactccctgaatgaaacccatccctggactccaggctaagaacctcagccctggggacttcacctgctgccctttccttacctgtcacacattgagccccgagtcaaggccactgtacaagtagtgcccctccctccccctggccaagcctccttcccttgttcaggaataaagaattccgaggagccctttttagtcattcccttctcccagacctaacgaatggtgcgtcaggtttctggagcctcatttcccttccccagacattggcagaggtcccttgggctagattttctcttctggttttgtttcttgttctgcctgactggccgctggcttccacaaaggagccctttgctcctggcctgggctctgatttcactgtgtggtctcaggggaagctggactgctgtggacgctggtgggagcttgagtctggtctgagtctgccccaggaagaaagaatcctgcttccaccaaccaagcccagtcagcggttcctcccaactggccaagtgttcagcccagtgggctggggaggaagaggatgagggcctcgctcctggtgcctgtggctctgggcagggtgagaggtcggtggaggatctttctgtgtgttctctgagtatgcagcagtgcagttgaagggaacagggcccaggcaggcagcaggacgaggactcctcccatcttcacacctgaaccagtcagcctggaagctacaagttctcacctgcctccccagaatgaacatcagaaaaggcaaaactgaccagggctgggatgggtttgggtcagcgtggttggagggcagcctgtggatccctgcactggagtcttgctgtcttcgatgcaggttggatcatacattgttacctcctactgtatgcctcaccctggaatagcagaatgctcagggggagatccgagaacgagaaggtgctcccagccccaggagcttccagtctggctctgatccttggccgacctagaggaaacctccacacacgccccttttgtgctaatggtgcagtttgtgtccccctctgcccatcactgtgctgtgcttgttcctgcctctgtgccttcccctatactgctcggacatgtcccctttcctctcctctacccagctaagcccttctgatccacggggcccggcttcccaaaccacccagcccacattcctccttcctgctccgaacaggtcccgtgtgagcccctgcccccgaattgcgtgctgtcccatggacgctccagtctcttccgtgtgtgtcttgagtccctaactagacagttagctccctgagggcaagggactgtcatttcctcttgagtcctaccagggtctagcacaggactgggctcctaactctcaggaaacacttgtcggctgactggtgcctcaagcgctggagcttgtcggtggccggtaatgggcagtgcacgtggggagagggtatgtgagttaactcaagggtgccttttcttgggctgtgggctggctcccctgggtcaaaagtggatgtcggaggcctcaggctcttacctccttggggcagtgggagcatcagggacccccacccccaccccggctctgcaggagtgcacggaagtggtcgtccagcctggatatttctacaggttgctgactcctgcgggagctgactgagtggaataaatgttctctcaacataaaaaaaagtaa

SEQ ID NO: 380318 - DNA, 3416 bp, Homo sapiens
  misc_feature (3)..(3): n is a, c, g, or t
aanggctaggtagaggctgggtttaatcggccgaggcgagagtgggccgcggaggccggccttcgggctccatggacgggcgccgcgtccctgcacagcccgccgcagagatggcaggaaagggacacagccggcgctgatgctgggaggcctccagggatggagagtggcctggctggcaacggcacagggactggtgattgcagctggaagtgcccatgaccgagctggcgtcctccgggggcgggtcccctgcgggggacggggaggagggtctgggggacgagcgaggcctggtcatccaccaccctgcagaggagcagccctaccgctgcccgctgtgcggccagaccttctcgcagcagcccagcctggtgcggcaccagaaggcgcacgccggagcgggccgcgcggctgccttcgtgtgtcccgagtgcggcaaggccttcagcgtcaagcacaacctcgaggtgcaccagcgcacgcacaccggggagcggcccttcccctgccccgagtgcggccgctgcttcagcctcaagcagaacctgctcacgcaccagcgcatccacagcggcgagaagccgcaccagtgcgcgcagtgcggccgctgcttccgcgagccgcgcttcctgctcaaccaccagcgcacccacgcgcgcatgcccgcgccgcacccgcgccgccccggcgtcttcggggagcggcggccctacttctgcccccgctgcggcaagagcttcgcgcgcgagggctcgctcaagacccatcagcgcagccacggccacgggcccgagggccaggcggcccacttaggacgcgtgctatgatgcgcccggggcctgctgccgacggctgcttcccgccccgcacgtgcgtccccgacccctggagatggccctgggccgcagctccctctctagatgggatcccgggagaggggcagcgctggcttgggctcttgaaggtgtgggccgccgccaggctccggccgcccgctcgcgttcctccctcgggaccctctggctggctgcgcacagctgcttccggctcctgccatggttctccttctctggcccatccggcctagagcagttgcagagtgggcaggatcttaagacccgataggtgcagaacccatctggacacggagaccaggaatggagttccatggaggcctggctggcactgcacccgggcatgaggacacatccagtaagaagacctgcctcaagaggtgcactgcggtgaccagtggaggtgactggttggagcctggaattggaagcagattccaagctctggtggacaaactctccaggcctggtgggaatcacagctggggcagacctcatcctggctgcctggccacaggcccccactctctgccactggtggtaggacgatgcctgtgtggagagctggcttctctgctcccgcctggtccaccacttggctagagttcagagacaggaagtgattggtctaagctaacacagcaagttggtggcagacctggttctagaggcaaaaccttcttccagatgtgaatgaaacctgcaggcttcattttcctttctgagcagtgcttcttagctctttggagacacgaagcccttggaaaatctgatgaaggttacggaccttccctaggaaaacagataactgacgtagactcaaaaaccccaagcaatttcaggagccactggactccctgaatgaaacccatccctggactccaggctaagaacctcagccctggggacttcacctgctgccctttccttacctgtcacacattgagccccgagtcaaggccactgtacaagtagtgcccctccctccccctggccaagcctccttcccttgttcaggaataaagaattccgaggagccctttttagtcattcccttctcccagacctaacgaatggtgcgtcaggtttctggagcctcatttcccttccccagacattggcagaggtcccttgggctagattttctcttctggttttgtttcttgttctgcctgactggccgctggcttccacaaaggagccctttgctcctggcctgggctctgatttcactgtgtggtctcaggggaagctggactgctgtggacgctggtgggagcttgagtctggtctgagtctgccccaggaagaaagaatcctgcttccaccaaccaagcccagtcagcggttcctcccaactggccaagtgttcagcccagtgggctggggaggaagaggatgagggcctcgctcctggtgcctgtggctctgggcagggtgagaggtcggtggaggatctttctgtgtgttctctgagtatgcagcagtgcagttgaagggaacagggcccaggcaggcagcaggacgaggactcctcccatcttcacacctgaaccagtcagcctggaagctacaagttctcacctgcctccccagaatgaacatcagaaaaggcaaaactgaccagggctgggatgggtttgggtcagcgtggttggagggcagcctgtggatccctgcactggagtcttgctgtcttcgatgcaggttggatcatacattgttacctcctactgtatgcctcaccctggaatagcagaatgctcagggggagatccgagaacgagaaggtgctcccagccccaggagcttccagtctggctctgatccttggccgacctagaggaaacctccacacacgccccttttgtgctaatggtgcagtttgtgtccccctctgcccatcactgtgctgtgcttgttcctgcctctgtgccttcccctatactgctcggacatgtcccctttcctctcctctacccagctaagcccttctgatccacggggcccggcttcccaaaccacccagcccacattcctccttcctgctccgaacaggtcccgtgtgagcccctgcccccgaattgcgtgctgtcccatggacgctccagtctcttccgtgtgtgtcttgagtccctaactagacagttagctccctgagggcaagggactgtcatttcctcttgagtcctaccagggtctagcacaggactgggctcctaactctcaggaaacacttgtcggctgactggtgcctcaagcgctggagcttgtcggtggccggtaatgggcagtgcacgtggggagagggtatgtgagttaactcaagggtgccttttcttgggctgtgggctggctcccctgggtcaaaagtggatgtcggaggcctcaggctcttacctccttggggcagtgggagcatcagggacccccacccccaccccggctctgcaggagtgcacggaagtggtcgtccagcctggatatttctacaggttgctgactcctgcgggagctgactgagtggaataaatgttctctcaacataaaaaaaagtaa

SEQ ID NO: 380319 - DNA, 2337 bp, Homo sapiens
aggctcattgtctctagggctttctgtcttgctgtaacgtctctccagccagctgcagctcctgctgacttatcccaccccagcgcaggtcatccaacggtgacttatggccccggcctcctggctcgatgaggatggcaggaaagggacacagccggcgctgatgctgggaggcctccagggatggagagtggcctggctggcaacggcacaggagctgggctggtgatgaaggtcaagcaggagaagccggagcggctgctgcagacgctggcgccgcaggccatgcttgtggagaaggacaaggagaacatctttcagcagcaccggggcctcccgccacgccagaccatggggcggcctcgagccctggggggacaggaggagtctgggagtccaaggtgggcccctcccactgagcaggatgcggggctggcaggccgggctcccgggtcagcctccggccccctgagcccctcgctttcctccggcgagggtcactttgtatgcctggactgcgggaagaggttcagctggtggtcgtccctgaagatccaccagcgcacccacaccggggagaagccgtacctctgcggcaagtgcggcaagagcttcagccagaagccgaacctggcgcgccaccagcggcaccacacgggcgagcgacccttctgctgccccgagtgcgcgcggcgcttcagccagaagcagcacctgctcaagcaccagaagacccactcccggcccgccacccactcgtgccccgagtgcgagcgctgcttccgtcaccaggtgggcctccgcatccaccagcgcgcgcacgcccgggaccgccagggctcccgcgccggcctgcacgagctgattcaggacgcggcggcgcgccgggcctgtcgcctgcagccggggccgccgcgggggcgccccgagtgggcctggctggggctctgccagggctggtggggccagcccggggcccgggccgcggtctccggccccgaggggccgggcgagccgcgccagttcatctgcaacgagtgtggcaagagcttcacctggtggtcgtcgctgaacatccaccagcgcatccacactggcgagcgcccctatgcgtgccccgagtgcggccgccgcttcagccagaagcccaacttgacgcggcacctgcgcaaccacacaggcgagcgcccgcacccctgcccgcactgtggccgcggcttccgccagaagcagcacctgctcaagcacctgcgcacgcacctgcccggcgcccaggctgcgccctgccccagctgcggtaagagctgccgcagccgcgccgcgctgcgcgcccaccagcgcgcccacgctgtcgctgagcccgccgttccggccggggaaccgggcgaccagccgcaggccgaggccatcccgggcttggccgcgaggccgcggagctcccaacggtccccgggggcccgggacacactgtggggccggggacaagcgggcctcgctgggcctggcgagccgcgccagttcatctgcaacgagtgcggcaagagcttctcgtggtggtcggcgctcaccatccaccagcgcatccacacgggtgagcggccctacccgtgccccgagtgcggccgccgcttcagccagaagcccaacctgacgcggcaccggcgcaaccacacaggcgagcggccctacctgtgtcccgcctgcggccgcggcttcagccagaagcagcacctgctcaagcaccagcgcgtgcaccgcgcggcccctgcgtgcagccccaaggaggaggcgcgctagtggactggacctcagcggacccgtggtggtgcgggggatgtttgcggggtgtgtgtggggagtgggggtggccaggattgctggctcttagaaccccttagagcgggaccggtggattccttaaggctctgaagggctgagaacagttctagaagcgtcccaaagggtgctgggaaaggtcccagcgtgggttgagggaggagggaagatccgagttcctcaccgcgggccgggatgtgaccaccctcttcagaggttggaccccaggcttcaagcaccgagtgaggggtctgttggggacgctgggagagtctctggtgtgaagtggcttaggtctggactggtcagctgtggcaccagccggtcctgcccacgcttcaggatggccgggggctgcccctgtgggagagttgccaagactcggcgataccaaggatggaagccagaggctgtggcgagggagagccaagcatattcccagcaccagggccactgctggcacgtcgtagacatccaataaatatttttggaaggagtaaa

SEQ ID NO: 380320 - DNA, 3333 bp, Homo sapiens
ggggttgcgacgcagagtttaccatatttctccagggttgctccggccgcagaagttggcaaggttgtgtgtaaggtcgggtggggtggggtcagctctcccgattaatgcagctatttgataagagcaacgtcgcgggacgcttgccgtctttatgggggcggggagaaggggcgcgggtgtcgctgcgggagagttaccgtatttgcgttgagcagcgcagactgtagagcaaagagctgcggccggagaccggaggagcaggggctcagctgggctggactggtgattgcagctggaagtgcccatgaccgagctggcgtcctccgggggcgggtcccctgcgggggacggggaggagggtctgggggacgagcgaggcctggtcatccaccaccctgcagaggagcagccctaccgctgcccgctgtgcggccagaccttctcgcagcagcccagcctggtgcggcaccagaaggcgcacgccggagcgggccgcgcggctgccttcgtgtgtcccgagtgcggcaaggccttcagcgtcaagcacaacctcgaggtgcaccagcgcacgcacaccggggagcggcccttcccctgccccgagtgcggccgctgcttcagcctcaagcagaacctgctcacgcaccagcgcatccacagcggcgagaagccgcaccagtgcgcgcagtgcggccgctgcttccgcgagccgcgcttcctgctcaaccaccagcgcacccacgcgcgcatgcccgcgccgcacccgcgccgccccggcgtcttcggggagcggcggccctacttctgcccccgctgcggcaagagcttcgcgcgcgagggctcgctcaagacccatcagccgctggcttgggctcttgaaggtgtgggccgccgccaggctccggccgcccgctcgcgttcctccctcgggaccctctggctggctgcgcacagctgcttccggctcctgccatggttctccttctctggcccatccggcctagagcagttgcagagtgggcaggatcttaagacccgataggtgcagaacccatctggacacggagaccaggaatggagttccatggaggcctggctggcactgcacccgggcatgaggacacatccagtaagaagacctgcctcaagaggtgcactgcggtgaccagtggaggtgactggttggagcctggaattggaagcagattccaagctctggtggacaaactctccaggcctggtgggaatcacagctggggcagacctcatcctggctgcctggccacaggcccccactctctgccactggtggtaggacgatgcctgtgtggagagctggcttctctgctcccgcctggtccaccacttggctagagttcagagacaggaagtgattggtctaagctaacacagcaagttggtggcagacctggttctagaggcaaaaccttcttccagatgtgaatgaaacctgcaggcttcattttcctttctgagcagtgcttcttagctctttggagacacgaagcccttggaaaatctgatgaaggttacggaccttccctaggaaaacagataactgacgtagactcaaaaaccccaagcaatttcaggagccactggactccctgaatgaaacccatccctggactccaggctaagaacctcagccctggggacttcacctgctgccctttccttacctgtcacacattgagccccgagtcaaggccactgtacaagtagtgcccctccctccccctggccaagcctccttcccttgttcaggaataaagaattccgaggagccctttttagtcattcccttctcccagacctaacgaatggtgcgtcaggtttctggagcctcatttcccttccccagacattggcagaggtcccttgggctagattttctcttctggttttgtttcttgttctgcctgactggccgctggcttccacaaaggagccctttgctcctggcctgggctctgatttcactgtgtggtctcaggggaagctggactgctgtggacgctggtgggagcttgagtctggtctgagtctgccccaggaagaaagaatcctgcttccaccaaccaagcccagtcagcggttcctcccaactggccaagtgttcagcccagtgggctggggaggaagaggatgagggcctcgctcctggtgcctgtggctctgggcagggtgagaggtcggtggaggatctttctgtgtgttctctgagtatgcagcagtgcagttgaagggaacagggcccaggcaggcagcaggacgaggactcctcccatcttcacacctgaaccagtcagcctggaagctacaagttctcacctgcctccccagaatgaacatcagaaaaggcaaaactgaccagggctgggatgggtttgggtcagcgtggttggagggcagcctgtggatccctgcactggagtcttgctgtcttcgatgcaggttggatcatacattgttacctcctactgtatgcctcaccctggaatagcagaatgctcagggggagatccgagaacgagaaggtgctcccagccccaggagcttccagtctggctctgatccttggccgacctagaggaaacctccacacacgccccttttgtgctaatggtgcagtttgtgtccccctctgcccatcactgtgctgtgcttgttcctgcctctgtgccttcccctatactgctcggacatgtcccctttcctctcctctacccagctaagcccttctgatccacggggcccggcttcccaaaccacccagcccacattcctccttcctgctccgaacaggtcccgtgtgagcccctgcccccgaattgcgtgctgtcccatggacgctccagtctcttccgtgtgtgtcttgagtccctaactagacagttagctccctgagggcaagggactgtcatttcctcttgagtcctaccagggtctagcacaggactgggctcctaactctcaggaaacacttgtcggctgactggtgcctcaagcgctggagcttgtcggtggccggtaatgggcagtgcacgtggggagagggtatgtgagttaactcaagggtgccttttcttgggctgtgggctggctcccctgggtcaaaagtggatgtcggaggcctcaggctcttacctccttggggcagtgggagcatcagggacccccacccccaccccggctctgcaggagtgcacggaagtggtcgtccagcctggatatttctacaggttgctgactcctgcgggagctgactgagtggaataaatgttctctcaacataaaaaaaagtaa

SEQ ID NO: 380321 - DNA, 1264 bp, Homo sapiens
tggccagggccgggagcccggtgcccaagtcgccctcggggtggcagttcccgttaaccttagccacaaagtcaaagatggcaggaaagggacacagccggcgctgatgctgggaggcctccagggatggagagtggcctggctggcaacggcacaggagctgggctggtgatgaaggtcaagcaggagaagccggagcggctgctgcagacgctggcgccgcaggccatgcttgtggagaaggacaaggagaacatctttcagcagcaccggggcctcccgccacgccagaccatggggcggcctcgagccctggggggacaggaggagtctgggagtccaaggtgggcccctcccactgagcaggatgcggggctggcaggccgggctcccgggtcagcctccggccccctgagcccctcgctttcctccggcgagggtcactttgtatgcctggactgcgggaagaggttcagctggtggtcgtccctgaagatccaccagcgcacccacaccggggagaagccgtacctctgcggcaagtgcggcaagagcttcagccagaagccgaacctggcgcgccaccagcggcaccacacgggcgagcgacccctacctgtgtcccgcctgcggccgcggcttcagccagaagcagcacctgctcaagcaccagcgcgtgcaccgcgcggcccctgcgtgcagccccaaggaggaggcgcgctagtggactggacctcagcggacccgtggtggtgcgggggatgtttgcggggtgtgtgtggggagtgggggtggccaggattgctggctcttagaaccccttagagcgggaccggtggattccttaaggctctgaagggctgagaacagttctagaagcgtcccaaagggtgctgggaaaggtcccagcgtgggttgagggaggagggaagatccgagttcctcaccgcgggccgggatgtgaccaccctcttcagaggttggaccccaggcttcaagcaccgagtgaggggtctgttggggacgctgggagagtctctggtgtgaagtggcttaggtctggactggtcagctgtggcaccagccggtcctgcccacgcttcaggatggccgggggctgcccctgtgggagagttgccaagactcggcgataccaaggatggaagccagaggctgtggcgagggagagccaagcatattcccagcaccagggccactgctggcacgtcgtagacatccaataaatatttttggaaggagtaaa

SEQ ID NO: 380322 - DNA, 2190 bp, Homo sapiens
  misc_feature (12)..(12): n is a, c, g, or t
ggtgtctaaagnttccccttttaaggtttcaacaaatttcattgcactttcctttcaataaagttgttgcattcccagcttgctcagacgtctgagcctggtgggaatcacagctggggcagacctcatcctggctgcctggccacaggcccccactctctgccactggtggtaggacgatgcctgtgtggagagctggcttctctgctcccgcctggtccaccacttggctagagttcagagacaggaagtgattggtctaagctaacacagcaagttggtggcagacctggttctagaggcaaaaccttcttccagatgtgaatgaaacctgcaggcttcattttcctttctgagcagtgcttcttagctctttggagacacgaagcccttggaaaatctgatgaaggttacggaccttccctaggaaaacagataactgacgtagactcaaaaaccccaagcaatttcaggagccactggactccctgaatgaaacccatccctggactccaggctaagaacctcagccctggggacttcacctgctgccctttccttacctgtcacacattgagccccgagtcaaggccactgtacaagtagtgcccctccctccccctggccaagcctccttcccttgttcaggaataaagaattccgaggagccctttttagtcattcccttctcccagacctaacgaatggtgcgtcaggtttctggagcctcatttcccttccccagacattggcagaggtcccttgggctagattttctcttctggttttgtttcttgttctgcctgactggccgctggcttccacaaaggagccctttgctcctggcctgggctctgatttcactgtgtggtctcaggggaagctggactgctgtggacgctggtgggagcttgagtctggtctgagtctgccccaggaagaaagaatcctgcttccaccaaccaagcccagtcagcggttcctcccaactggccaagtgttcagcccagtgggctggggaggaagaggatgagggcctcgctcctggtgcctgtggctctgggcagggtgagaggtcggtggaggatctttctgtgtgttctctgagtatgcagcagtgcagttgaagggaacagggcccaggcaggcagcaggacgaggactcctcccatcttcacacctgaaccagtcagcctggaagctacaagttctcacctgcctccccagaatgaacatcagaaaaggcaaaactgaccagggctgggatgggtttgggtcagcgtggttggagggcagcctgtggatccctgcactggagtcttgctgtcttcgatgcaggttggatcatacattgttacctcctactgtatgcctcaccctggaatagcagaatgctcagggggagatccgagaacgagaaggtgctcccagccccaggagcttccagtctggctctgatccttggccgacctagaggaaacctccacacacgccccttttgtgctaatggtgcagtttgtgtccccctctgcccatcactgtgctgtgcttgttcctgcctctgtgccttcccctatactgctcggacatgtcccctttcctctcctctacccagctaagcccttctgatccacggggcccggcttcccaaaccacccagcccacattcctccttcctgctccgaacaggtcccgtgtgagcccctgcccccgaattgcgtgctgtcccatggacgctccagtctcttccgtgtgtgtcttgagtccctaactagacagttagctccctgagggcaagggactgtcatttcctcttgagtcctaccagggtctagcacaggactgggctcctaactctcaggaaacacttgtcggctgactggtgcctcaagcgctggagcttgtcggtggccggtaatgggcagtgcacgtggggagagggtatgtgagttaactcaagggtgccttttcttgggctgtgggctggctcccctgggtcaaaagtggatgtcggaggcctcaggctcttacctccttggggcagtgggagcatcagggacccccacccccaccccggctctgcaggagtgcacggaagtggtcgtccagcctggatatttctacaggttgctgactcctgcgggagctgactgagtggaataaatgttctctcaacataaaaaaaagtaa

SEQ ID NO: 380323 - DNA, 1320 bp, Homo sapiens
aggctcattgtctctagggctttctgtcttgctgtaacgtctctccagccagctgcagctcctgctgacttatcccaccccagcgcaggtcatccaacggtgacttatggccccggcctcctggctcgatgaggatggcaggaaagggacacagccggcgctgatgctgggaggcctccagggatggagagtggcctggctggcaacggcacaggagctgggctggtgatgaaggtcaagcaggagaagccggagcggctgctgcagacgctggcgccgcaggccatgcttgtggagaaggacaaggagaacatctttcagcagcaccggggcctcccgccacgccagaccatggggcggcctcgagccctggggggacaggaggagtctgggagtccaaggtgggcccctcccactgagcaggatgcggggctggcaggccgggctcccgggtcagcctccggccccctgagcccctcgctttcctccggcgagggtcactttgtatgcctggactgcgggaagaggttcagctggtggtcgtccctgaagatccaccagcgcacccacaccggggagaagccgtacctctgcggcaagtgcggcaagagcttcagccagaagccgaacctggcgcgccaccagcggcaccacacgggcgagcgacccttctgctgccccgagtgcgcgcggcgcttcagccagaagcagcacctgctcaagcaccagcgcgtgcaccgcgcggcccctgcgtgcagccccaaggaggaggcgcgctagtggactggacctcagcggacccgtggtggtgcgggggatgtttgcggggtgtgtgtggggagtgggggtggccaggattgctggctcttagaaccccttagagcgggaccggtggattccttaaggctctgaagggctgagaacagttctagaagcgtcccaaagggtgctgggaaaggtcccagcgtgggttgagggaggagggaagatccgagttcctcaccgcgggccgggatgtgaccaccctcttcagaggttggaccccaggcttcaagcaccgagtgaggggtctgttggggacgctgggagagtctctggtgtgaagtggcttaggtctggactggtcagctgtggcaccagccggtcctgcccacgcttcaggatggccgggggctgcccctgtgggagagttgccaagactcggcgataccaaggatggaagccagaggctgtggcgagggagagccaagcatattcccagcaccagggccactgctggcacgtcgtagacatccaataaatatttttggaaggagtaaa

SEQ ID NO: 380324 - DNA, 429 bp, Homo sapiens
  misc_feature (3)..(3): n is a, c, g, or t
aanggctaggtagaggctgggtttaatcggccgaggcgagagtgggccgcggaggccggccttcgggctccatggacgggcgccgcgtccctgcacagcccgccgcagagatggcaggaaagggacacagccggcgctgatgctgggaggcctccagggatggagagtggcctggctggcaacggcacaggagctgggctggtgatgaaggtcaagcaggagaagccggagcggctgctgcagacgctggcgccgcaggccatgcttgtggagaaggacaaggagaatgttttgtggaccactttggttttcttttttgcgtgtggcagttttaagttattagtttttaaaatcagtactttttaatggaaacaacttgaccaaaaatttgtcacagaattttgagacccattaaaaaagttaaatgag

SEQ ID NO: 380325 - DNA, 2280 bp, Homo sapiens
tggccagggccgggagcccggtgcccaagtcgccctcggggtggcagttcccgttaaccttagccacaaagtcaaagatggcaggaaagggacacagccggcgctgatgctgggaggcctccagggatggagagtggcctggctggcaacggcacaggagctgggctggtgatgaaggtcaagcaggagaagccggagcggctgctgcagacgctggcgccgcaggccatgcttgtggagaaggacaaggagaacatctttcagcagcaccggggcctcccgccacgccagaccatggggcggcctcgagccctggggggacaggaggagtctgggagtccaaggtgggcccctcccactgagcaggatgcggggctggcaggccgggctcccgggtcagcctccggccccctgagcccctcgctttcctccggcgagggtcactttgtatgcctggactgcgggaagaggttcagctggtggtcgtccctgaagatccaccagcgcacccacaccggggagaagccgtacctctgcggcaagtgcggcaagagcttcagccagaagccgaacctggcgcgccaccagcggcaccacacgggcgagcgacccttctgctgccccgagtgcgcgcggcgcttcagccagaagcagcacctgctcaagcaccagaagacccactcccggcccgccacccactcgtgccccgagtgcgagcgctgcttccgtcaccaggtgggcctccgcatccaccagcgcgcgcacgcccgggaccgccagggctcccgcgccggcctgcacgagctgattcaggacgcggcggcgcgccgggcctgtcgcctgcagccggggccgccgcgggggcgccccgagtgggcctggctggggctctgccagggctggtggggccagcccggggcccgggccgcggtctccggccccgaggggccgggcgagccgcgccagttcatctgcaacgagtgtggcaagagcttcacctggtggtcgtcgctgaacatccaccagcgcatccacactggcgagcgcccctatgcgtgccccgagtgcggccgccgcttcagccagaagcccaacttgacgcggcacctgcgcaaccacacaggcgagcgcccgcacccctgcccgcactgtggccgcggcttccgccagaagcagcacctgctcaagcacctgcgcacgcacctgcccggcgcccaggctgcgccctgccccagctgcggtaagagctgccgcagccgcgccgcgctgcgcgcccaccagcgcgcccacgctgtcgctgagcccgccgttccggccggggaaccgggcgaccagccgcaggccgaggccatcccgggcttggccgcgaggccgcggagctcccaacggtccccgggggcccgggacacactgtggggccggggacaagcgggcctcgctgggcctggcgagccgcgccagttcatctgcaacgagtgcggcaagagcttctcgtggtggtcggcgctcaccatccaccagcgcatccacacgggtgagcggccctacccgtgccccgagtgcggccgccgcttcagccagaagcccaacctgacgcggcaccggcgcaaccacacaggcgagcggccctacctgtgtcccgcctgcggccgcggcttcagccagaagcagcacctgctcaagcaccagcgcgtgcaccgcgcggcccctgcgtgcagccccaaggaggaggcgcgctagtggactggacctcagcggacccgtggtggtgcgggggatgtttgcggggtgtgtgtggggagtgggggtggccaggattgctggctcttagaaccccttagagcgggaccggtggattccttaaggctctgaagggctgagaacagttctagaagcgtcccaaagggtgctgggaaaggtcccagcgtgggttgagggaggagggaagatccgagttcctcaccgcgggccgggatgtgaccaccctcttcagaggttggaccccaggcttcaagcaccgagtgaggggtctgttggggacgctgggagagtctctggtgtgaagtggcttaggtctggactggtcagctgtggcaccagccggtcctgcccacgcttcaggatggccgggggctgcccctgtgggagagttgccaagactcggcgataccaaggatggaagccagaggctgtggcgagggagagccaagcatattcccagcaccagggccactgctggcacgtcgtagacatccaataaatatttttggaaggagtaaa

SEQ ID NO: 380326 - DNA, 433 bp, Homo sapiens
taaagtggggctcaataaccctgctccgcccctttctcagggctgttgtgaggacaatgggaaacaatttaagaggaacacagtgtcctgggaagaggatcctttggagaagcagcatgaagggagctgggtttgggggtgttggctgggcactgagggtgctgctcagccttgggccaggctttgctgtgagttaactcaagggtgccttttcttgggctgtgggctggctcccctgggtcaaaagtggatgtcggaggcctcaggctcttacctccttggggcagtgggagcatcagggacccccacccccaccccggctctgcaggagtgcacggaagtggtcgtccagcctggatatttctacaggttgctgactcctgcgggagctgactgagtggaataaatgttctctcaacataaaaaaaagtaa

SEQ ID NO: 380327 - DNA, 5251 bp, Homo sapiens
  misc_feature (5)..(6): n is a, c, g, or t
  misc_feature (13)..(13): n is a, c, g, or t
cgacnnacgcgtngcgacccacgcgtcgcccacgcgttgtgaactcgaacctgccgctgtcgccgcggcggggcggggagcgagagtgggccgcggaggccggccttcgggctccatggacgggcgccgcgtccctgcacagcccgccgcagaggtacggccggggcaggggcgcggggccaccgcgggcccgcggggggccgctccacctgcggggcgcgtgaccgtgagtgtgcgcgaccgtgtgtgagtgcgcggggggggacgctgctggatctgcgggggtgggggagcgcacctgcgcacaggctccgcgagctgcgccgtgcgtgggacccgaaatggctcactcgcaagaacgggacccgtgtgcccgggagcgtggacggaggacacgcatcagtacaaaagggcggtgtggggcttctgccacccgcggccagccgcgatgcggaaggggattctgacggagtcgtggtcacaccagctggccctgcgcagccccatgggaaataggcctggaattcctgtcgggaggaggctgggggaaggggagccagcagggattccagagttcctgccataggccggcctttggccatcagggaaagcccagactctggccacagaatggagaattcgttccgtgaccttaccagggaagaaagtgaccccgaaagacagcagtgtgcttccttgttgaaggggcacattcatttattaatccaatgtccattaaggtcactctgccaggcaggatgtggggcttatggctggtgcgtgtggctttgtggggggaggggttgtggctggtgaggacacaaagctgactgccctagaggagctcagagcctcacttctgttttctcttccctccccacaggtaaggctggcctctctgcagtcagaggtctgagctctgccatggggataggggtgtctttattactgcagttttctctaacacctgggggctaccggagtgtgggccgaagcaggcgctgcagccgcggaagtatccccaggaacatccccaagaggagctggaaaaagcctcatccccagctctgcagtctccagggtagagtctggcctttgctgtgctcccaaaccacgccacaacaggggtgcacgggcgtccccatcccggcggaaggaaatggccctttctcatatcctggggtcttccctgtgcacagtctgacactgggaatgagtgacctttgtgttccctgagaagagagagtgcgctctagggaatttagaaggatgtgtctggagcttgtgagcaggcacagaagggcccttaggagcctaactgcttccttcctccttccgcggaggaggctcctgtgcaggaatctgggctcccctgagctgtggaagagctgaacatggggcagcccctggcgaggttggggcaggaccgggcaggggactgagattgcagtctcatcttccctccccttctattgccccagtaatctccagcaccccgagggaggcagagccggtgatcaggccccgagggcagcaggctgtgggtgttccttggattcagggagagcattccttcctgcaatgtcctaatttgtgtgggtggaagagggcaggcgggcagaatgggggcacagtctgggcaggcggtggtctggcgttagactgccgggagtagcacccagggctctgctcctgttccccgagaagggctgttctcacttgtcctccagcctcctacggagactgcagttagtgatgctgaaagtgcctcccctgtggggctaggaatgaaaagctatagacacctttttctctgagatctttgcaaacccaggcgctttagaggaaagaacactggcctgggagtttaaagacctgttccctagtcttgattctgctgttggcttactgtgtcaccttgggcaggtctcgtcatctttgatgtctcacagttgcttcatctgttaaacagggagctcagtgtctgtttgtccagcttctcagagttgctgtgcagctcggatgtggcataggaaacagcagacacagggagagggcagcataaggcactgtagggagcagtggccacattttctggtgagtcctgtggcaggaatgtttgtgcattcagcactggagcatttactccctgtctgacactggggtagctgccatgagggggattctagtatcagagtccctcccttctggaagtttccagggcaacaaagacataagacaaacatccttgaaatgttatctaaaaacccaagattgaaataatacataccacacaaggaaacaggagagtagtctagctccatgtccggggctctaggggttcatagatggcagctcctgtccggggctgaggttgggaggggagaaacaggggcagagtgagttggtctctggagtgactgtgcttttccaccctcacagaggaagaaccgatgctggaacgtcgttgcaggggccccctggccatgggcctggcccagccccgactcctttctgggccctcccaggagtcaccccagaccctggggaaggagtcccgcgggctgaggcaacaaggcacgtcagtggcccagtctggtgcccaagccccaggcagggcccatcgctgtgcccactgtcgaaggcacttccctggctgggtggctctgtggcttcacacccgccggtgccaggcccggctgcccttgccctgccctgagtgtggccgtcgctttcgccatgcccccttcttagcactgcaccgccaggtccatgctgctgccaccccagacctgggctttgcctgccacctctgtgggcagagcttccgaggctgggtggccctggttctgcatctgcgggcccattcagctgcaaagcggcccatcgcttgtcccaaatgcgagagacgcttctggcgacgaaagcagcttcgagctcatctgcggcggtgccaccctcccgccccggaggcccggcccttcatatgcggcaactgtggccggagctttgcccagtgggaccagctagttgcccacaagcgggtgcacgtagctgaggccctggaggaggccgcagccaaggctctggggccccggcccaggggccgccccgcggtgaccgccccccggcccggtggagatgccgtcgaccgccccttccagtgtgcctgttgtggcaagcgcttccggcacaagcccaacttgatcgctcaccgccgcgtgcacacgggcgagcggccccaccagtgccccgagtgcgggaagcgctttaccaataagccctatctgacttcgcaccggcgcatccacaccggcgagaagccctacccgtgcaaagagtgcggccgccgcttccggcacaaacccaacctgctgtctcacagcaagattcacaagcgatccgaggggtcggcccaggccgcccccggcccggggagcccccagctgccagccggcccccaggagtccgcggccgagcccaccccggcggtacctctgaaaccggcccaggagccgccgccaggggccccgccagagcacccgcaggacccgatcgaagcccccccctccctctacagctgcgacgactgcggcaggagcttccggctggagcgcttcctgcgggcccaccagcggcagcacaccggggagcggcccttcacctgcgccgagtgcgggaagaacttcggcaagaagacgcacctggtggcgcactcgcgcgtgcactccggcgagcggcccttcgcctgcgaggagtgcggccgccgcttctcccagggcagccatctggcggcgcatcggcgcgaccacgcccccgatcggcccttcgtgtgtcccgactgcggcaaggccttccgccacaaaccctacctggcggcgcaccggcgcatccacaccggcgagaagccctacgtctgccccgactgcggcaaagccttcagccagaagtccaacctggtgtcgcaccggcgcatccacacgggcgagcggccctacgcctgtcccgactgcgaccgcagcttcagccagaagtccaacctcatcacccaccgcaagagccacatccgggacggcgccttctgctgtgccatctgtggccagaccttcgacgacgaggagagactcctggcccaccagaagaagcacgatgtctgagacggtgggcggggccgtgttggctgagagagggctggggtccttcgtggtgggagtcgcagtgggctgggggtgcctgcctagtgctggagtaggggacaatgggaatcctagaggggatggaagacgcggggagtgagctgggtgggccctgctagcgagagaggtcaaccccggtggccagggaacccacttccaagcgcagggacgccggcctccagctggtgtgtgctaaggctccgtcctgactgccctgtgccctggaaaagcagcaatagcatccgccccttagagccctctggctagaggagccaccagtggaaaggaagaccctccatcctctggtattaacgccttaatgcccctgtcttttactgtaagttacttaagatcatttttggaagcaggcgtggtagagtcctgtaaatgaatgctctgggctagatacagcttggagaacctgctggccttgttagacagcacttgggcctttgccagcagcaagaggtgaagcgaagccactcttacctctcccttcccctcccacctgccccctgcgtaggcacccagacttggagagacccgtctgctgttaatacttccatcctcttccttcccaaagagcagatcccaaggcatttactccttggtctgtctcgctttatctgtcgcccctcccagcgctgagagcctcccctggctgtcagcagcactgtgtccaggctcttgtctgaacaccgcagcccctccttcgctccttccagagctcagcatgtcacggcaaggactgccgcattggtgatggagggccagctgaggggaagttgctggtgagtttccttttctccatttctagcatatggacacctggcctctgcttgagcacttaggtgacaggaacttccgcacctcctgaggccctggatgattctaattgttagaaattctaattgttagaaatccttccttataatgaatgaattctgctttcctataatttctacctattgggccttgttctgttctctggaactaaacagaacaaccatttacccctccttttcaaactagagaataaagatttggttttagaa

SEQ ID NO: 380328 - DNA, 4614 bp, Homo sapiens
  misc_feature (5)..(6): n is a, c, g, or t
  misc_feature (13)..(13): n is a, c, g, or t
cgacnnacgcgtngcgacccacgcgtcgcccacgcgttgtgaactcgaacctgccgctgtcgccgcggcggggcggggagcgagagtgggccgcggaggccggccttcgggctccatggacgggcgccgcgtccctgcacagcccgccgcagaggtacggccggggcaggggcgcggggccaccgcgggcccgcggggggccgctccacctgcggggcgcgtgaccgtgagtgtgcgcgaccgtgtgtaaggctggcctctctgcagtcagaggtctgagctctgccatggggataggggtgtctttattactgcagttttctctaacacctgggggctaccggagtgtgggccgaagcaggcgctgcagccgcggaagtatccccaggaacatccccaagaggagctggaaaaagcctcatccccagctctgcagtctccagggtagagtctggcctttgctgtgctcccaaaccacgccacaacaggggtgcacgggcgtccccatcccggcggaaggaaatggccctttctcatatcctggggtcttccctgtgcacagtctgacactgggaatgagtgacctttgtgttccctgagaagagagagtgcgctctagggaatttagaaggatgtgtctggagcttgtgagcaggcacagaagggcccttaggagcctaactgcttccttcctccttccgcggaggaggctcctgtgcaggaatctgggctcccctgagctgtggaagagctgaacatggggcagcccctggcgaggttggggcaggaccgggcaggggactgagattgcagtctcatcttccctccccttctattgccccagtaatctccagcaccccgagggaggcagagccggtgatcaggccccgagggcagcaggctgtgggtgttccttggattcagggagagcattccttcctgcaatgtcctaatttgtgtgggtggaagagggcaggcgggcagaatgggggcacagtctgggcaggcggtggtctggcgttagactgccgggagtagcacccagggctctgctcctgttccccgagaagggctgttctcacttgtcctccagcctcctacggagactgcagttagtgatgctgaaagtgcctcccctgtggggctaggaatgaaaagctatagacacctttttctctgagatctttgcaaacccaggcgctttagaggaaagaacactggcctgggagtttaaagacctgttccctagtcttgattctgctgttggcttactgtgtcaccttgggcaggtctcgtcatctttgatgtctcacagttgcttcatctgttaaacagggagctcagtgtctgtttgtccagcttctcagagttgctgtgcagctcggatgtggcataggaaacagcagacacagggagagggcagcataaggcactgtagggagcagtggccacattttctggtgagtcctgtggcaggaatgtttgtgcattcagcactggagcatttactccctgtctgacactggggtagctgccatgagggggattctagtatcagagtccctcccttctggaagtttccagggcaacaaagacataagacaaacatccttgaaatgttatctaaaaacccaagattgaaataatacataccacacaaggaaacaggagagtagtctagctccatgtccggggctctaggggttcatagatggcagctcctgtccggggctgaggttgggaggggagaaacaggggcagagtgagttggtctctggagtgactgtgcttttccaccctcacagaggaagaaccgatgctggaacgtcgttgcaggggccccctggccatgggcctggcccagccccgactcctttctgggccctcccaggagtcaccccagaccctggggaaggagtcccgcgggctgaggcaacaaggcacgtcagtggcccagtctggtgcccaagccccaggcagggcccatcgctgtgcccactgtcgaaggcacttccctggctgggtggctctgtggcttcacacccgccggtgccaggcccggctgcccttgccctgccctgagtgtggccgtcgctttcgccatgcccccttcttagcactgcaccgccaggtccatgctgctgccaccccagacctgggctttgcctgccacctctgtgggcagagcttccgaggctgggtggccctggttctgcatctgcgggcccattcagctgcaaagcggcccatcgcttgtcccaaatgcgagagacgcttctggcgacgaaagcagcttcgagctcatctgcggcggtgccaccctcccgccccggaggcccggcccttcatatgcggcaactgtggccggagctttgcccagtgggaccagctagttgcccacaagcgggtgcacgtagctgaggccctggaggaggccgcagccaaggctctggggccccggcccaggggccgccccgcggtgaccgccccccggcccggtggagatgccgtcgaccgccccttccagtgtgcctgttgtggcaagcgcttccggcacaagcccaacttgatcgctcaccgccgcgtgcacacgggcgagcggccccaccagtgccccgagtgcgggaagcgctttaccaataagccctatctgacttcgcaccggcgcatccacaccggcgagaagccctacccgtgcaaagagtgcggccgccgcttccggcacaaacccaacctgctgtctcacagcaagattcacaagcgatccgaggggtcggcccaggccgcccccggcccggggagcccccagctgccagccggcccccaggagtccgcggccgagcccaccccggcggtacctctgaaaccggcccaggagccgccgccaggggccccgccagagcacccgcaggacccgatcgaagcccccccctccctctacagctgcgacgactgcggcaggagcttccggctggagcgcttcctgcgggcccaccagcggcagcacaccggggagcggcccttcacctgcgccgagtgcgggaagaacttcggcaagaagacgcacctggtggcgcactcgcgcgtgcactccggcgagcggcccttcgcctgcgaggagtgcggccgccgcttctcccagggcagccatctggcggcgcatcggcgcgaccacgcccccgatcggcccttcgtgtgtcccgactgcggcaaggccttccgccacaaaccctacctggcggcgcaccggcgcatccacaccggcgagaagccctacgtctgccccgactgcggcaaagccttcagccagaagtccaacctggtgtcgcaccggcgcatccacacgggcgagcggccctacgcctgtcccgactgcgaccgcagcttcagccagaagtccaacctcatcacccaccgcaagagccacatccgggacggcgccttctgctgtgccatctgtggccagaccttcgacgacgaggagagactcctggcccaccagaagaagcacgatgtctgagacggtgggcggggccgtgttggctgagagagggctggggtccttcgtggtgggagtcgcagtgggctgggggtgcctgcctagtgctggagtaggggacaatgggaatcctagaggggatggaagacgcggggagtgagctgggtgggccctgctagcgagagaggtcaaccccggtggccagggaacccacttccaagcgcagggacgccggcctccagctggtgtgtgctaaggctccgtcctgactgccctgtgccctggaaaagcagcaatagcatccgccccttagagccctctggctagaggagccaccagtggaaaggaagaccctccatcctctggtattaacgccttaatgcccctgtcttttactgtaagttacttaagatcatttttggaagcaggcgtggtagagtcctgtaaatgaatgctctgggctagatacagcttggagaacctgctggccttgttagacagcacttgggcctttgccagcagcaagaggtgaagcgaagccactcttacctctcccttcccctcccacctgccccctgcgtaggcacccagacttggagagacccgtctgctgttaatacttccatcctcttccttcccaaagagcagatcccaaggcatttactccttggtctgtctcgctttatctgtcgcccctcccagcgctgagagcctcccctggctgtcagcagcactgtgtccaggctcttgtctgaacaccgcagcccctccttcgctccttccagagctcagcatgtcacggcaaggactgccgcattggtgatggagggccagctgaggggaagttgctggtgagtttccttttctccatttctagcatatggacacctggcctctgcttgagcacttaggtgacaggaacttccgcacctcctgaggccctggatgattctaattgttagaaattctaattgttagaaatccttccttataatgaatgaattctgctttcctataatttctacctattgggccttgttctgttctctggaactaaacagaacaaccatttacccctccttttcaaactagagaataaagatttggttttagaa

SEQ ID NO: 380329 - DNA, 3250 bp, Homo sapiens
  misc_feature (3)..(3): n is a, c, g, or t
aanggctaggtagaggctgggtttaatcggccgaggcgagagtgggccgcggaggccggccttcgggctccatggacgggcgccgcgtccctgcacagcccgccgcagaggtaaggctggcctctctgcagtcagaggtctgagctctgccatggggataggggtgtctttattactgcagttttctctaacacctgggggctaccggagtgtgggccgaagcaggcgctgcagccgcggaagtatccccaggaacatccccaagaggagctggaaaaagcctcatccccagctctgcagtctccaggaacagggagctcagtgtctgtttgtccagcttctcagagttgctgtgcagctcggatgtggcataggaaacagcagacacagggagagggcagcataaggcactgtagggagcagtggccacattttctgcagaggaagaaccgatgctggaacgtcgttgcaggggccccctggccatgggcctggcccagccccgactcctttctgggccctcccaggagtcaccccagaccctggggaaggagtcccgcgggctgaggcaacaaggcacgtcagtggcccagtctggtgcccaagccccaggcagggcccatcgctgtgcccactgtcgaaggcacttccctggctgggtggctctgtggcttcacacccgccggtgccaggcccggctgcccttgccctgccctgagtgtggccgtcgctttcgccatgcccccttcttagcactgcaccgccaggtccatgctgctgccaccccagacctgggctttgcctgccacctctgtgggcagagcttccgaggctgggtggccctggttctgcatctgcgggcccattcagctgcaaagcggcccatcgcttgtcccaaatgcgagagacgcttctggcgacgaaagcagcttcgagctcatctgcggcggtgccaccctcccgccccggaggcccggcccttcatatgcggcaactgtggccggagctttgcccagtgggaccagctagttgcccacaagcgggtgcacgtagctgaggccctggaggaggccgcagccaaggctctggggccccggcccaggggccgccccgcggtgaccgccccccggcccggtggagatgccgtcgaccgccccttccagtgtgcctgttgtggcaagcgcttccggcacaagcccaacttgatcgctcaccgccgcgtgcacacgggcgagcggccccaccagtgccccgagtgcgggaagcgctttaccaataagccctatctgacttcgcaccggcgcatccacaccggcgagaagccctacccgtgcaaagagtgcggccgccgcttccggcacaaacccaacctgctgtctcacagcaagattcacaagcgatccgaggggtcggcccaggccgcccccggcccggggagcccccagctgccagccggcccccaggagtccgcggccgagcccaccccggcggtacctctgaaaccggcccaggagccgccgccaggggccccgccagagcacccgcaggacccgatcgaagcccccccctccctctacagctgcgacgactgcggcaggagcttccggctggagcgcttcctgcgggcccaccagcggcagcacaccggggagcggcccttcacctgcgccgagtgcgggaagaacttcggcaagaagacgcacctggtggcgcactcgcgcgtgcactccggcgagcggcccttcgcctgcgaggagtgcggccgccgcttctcccagggcagccatctggcggcgcatcggcgcgaccacgcccccgatcggcccttcgtgtgtcccgactgcggcaaggccttccgccacaaaccctacctggcggcgcaccggcgcatccacaccggcgagaagccctacgtctgccccgactgcggcaaagccttcagccagaagtccaacctggtgtcgcaccggcgcatccacacgggcgagcggccctacgcctgtcccgactgcgaccgcagcttcagccagaagtccaacctcatcacccaccgcaagagccacatccgggacggcgccttctgctgtgccatctgtggccagaccttcgacgacgaggagagactcctggcccaccagaagaagcacgatgtctgagacggtgggcggggccgtgttggctgagagagggctggggtccttcgtggtgggagtcgcagtgggctgggggtgcctgcctagtgctggagtaggggacaatgggaatcctagaggggatggaagacgcggggagtgagctgggtgggccctgctagcgagagaggtcaaccccggtggccagggaacccacttccaagcgcagggacgccggcctccagctggtgtgtgctaaggctccgtcctgactgccctgtgccctggaaaagcagcaatagcatccgccccttagagccctctggctagaggagccaccagtggaaaggaagaccctccatcctctggtattaacgccttaatgcccctgtcttttactgtaagttacttaagatcatttttggaagcaggcgtggtagagtcctgtaaatgaatgctctgggctagatacagcttggagaacctgctggccttgttagacagcacttgggcctttgccagcagcaagaggtgaagcgaagccactcttacctctcccttcccctcccacctgccccctgcgtaggcacccagacttggagagacccgtctgctgttaatacttccatcctcttccttcccaaagagcagatcccaaggcatttactccttggtctgtctcgctttatctgtcgcccctcccagcgctgagagcctcccctggctgtcagcagcactgtgtccaggctcttgtctgaacaccgcagcccctccttcgctccttccagagctcagcatgtcacggcaaggactgccgcattggtgatggagggccagctgaggggaagttgctggtgagtttccttttctccatttctagcatatggacacctggcctctgcttgagcacttaggtgacaggaacttccgcacctcctgaggccctggatgattctaattgttagaaattctaattgttagaaatccttccttataatgaatgaattctgctttcctataatttctacctattgggccttgttctgttctctggaactaaacagaacaaccatttacccctccttttcaaactagagaataaagatttggttttagaa

SEQ ID NO: 380330 - DNA, 2967 bp, Homo sapiens
gaacccggcggggggaggttggggacgggcctggcagttgtgaactcgaacctgccgctgtcgccgcggcggggcggggagcgagagtgggccgcggaggccggccttcgggctccatggacgggcgccgcgtccctgcacagcccgccgcagagcagaggaagaaccgatgctggaacgtcgttgcaggggccccctggccatgggcctggcccagccccgactcctttctgggccctcccaggagtcaccccagaccctggggaaggagtcccgcgggctgaggcaacaaggcacgtcagtggcccagtctggtgcccaagccccaggcagggcccatcgctgtgcccactgtcgaaggcacttccctggctgggtggctctgtggcttcacacccgccggtgccaggcccggctgcccttgccctgccctgagtgtggccgtcgctttcgccatgcccccttcttagcactgcaccgccaggtccatgctgctgccaccccagacctgggctttgcctgccacctctgtgggcagagcttccgaggctgggtggccctggttctgcatctgcgggcccattcagctgcaaagcggcccatcgcttgtcccaaatgcgagagacgcttctggcgacgaaagcagcttcgagctcatctgcggcggtgccaccctcccgccccggaggcccggcccttcatatgcggcaactgtggccggagctttgcccagtgggaccagctagttgcccacaagcgggtgcacgtagctgaggccctggaggaggccgcagccaaggctctggggccccggcccaggggccgccccgcggtgaccgccccccggcccggtggagatgccgtcgaccgccccttccagtgtgcctgttgtggcaagcgcttccggcacaagcccaacttgatcgctcaccgccgcgtgcacacgggcgagcggccccaccagtgccccgagtgcgggaagcgctttaccaataagccctatctgacttcgcaccggcgcatccacaccggcgagaagccctacccgtgcaaagagtgcggccgccgcttccggcacaaacccaacctgctgtctcacagcaagattcacaagcgatccgaggggtcggcccaggccgcccccggcccggggagcccccagctgccagccggcccccaggagtccgcggccgagcccaccccggcggtacctctgaaaccggcccaggagccgccgccaggggccccgccagagcacccgcaggacccgatcgaagcccccccctccctctacagctgcgacgactgcggcaggagcttccggctggagcgcttcctgcgggcccaccagcggcagcacaccggggagcggcccttcacctgcgccgagtgcgggaagaacttcggcaagaagacgcacctggtggcgcactcgcgcgtgcactccggcgagcggcccttcgcctgcgaggagtgcggccgccgcttctcccagggcagccatctggcggcgcatcggcgcgaccacgcccccgatcggcccttcgtgtgtcccgactgcggcaaggccttccgccacaaaccctacctggcggcgcaccggcgcatccacaccggcgagaagccctacgtctgccccgactgcggcaaagccttcagccagaagtccaacctggtgtcgcaccggcgcatccacacgggcgagcggccctacgcctgtcccgactgcgaccgcagcttcagccagaagtccaacctcatcacccaccgcaagagccacatccgggacggcgccttctgctgtgccatctgtggccagaccttcgacgacgaggagagactcctggcccaccagaagaagcacgatgtctgagacggtgggcggggccgtgttggctgagagagggctggggtccttcgtggtgggagtcgcagtgggctgggggtgcctgcctagtgctggagtaggggacaatgggaatcctagaggggatggaagacgcggggagtgagctgggtgggccctgctagcgagagaggtcaaccccggtggccagggaacccacttccaagcgcagggacgccggcctccagctggtgtgtgctaaggctccgtcctgactgccctgtgccctggaaaagcagcaatagcatccgccccttagagccctctggctagaggagccaccagtggaaaggaagaccctccatcctctggtattaacgccttaatgcccctgtcttttactgtaagttacttaagatcatttttggaagcaggcgtggtagagtcctgtaaatgaatgctctgggctagatacagcttggagaacctgctggccttgttagacagcacttgggcctttgccagcagcaagaggtgaagcgaagccactcttacctctcccttcccctcccacctgccccctgcgtaggcacccagacttggagagacccgtctgctgttaatacttccatcctcttccttcccaaagagcagatcccaaggcatttactccttggtctgtctcgctttatctgtcgcccctcccagcgctgagagcctcccctggctgtcagcagcactgtgtccaggctcttgtctgaacaccgcagcccctccttcgctccttccagagctcagcatgtcacggcaaggactgccgcattggtgatggagggccagctgaggggaagttgctggtgagtttccttttctccatttctagcatatggacacctggcctctgcttgagcacttaggtgacaggaacttccgcacctcctgaggccctggatgattctaattgttagaaattctaattgttagaaatccttccttataatgaatgaattctgctttcctataatttctacctattgggccttgttctgttctctggaactaaacagaacaaccatttacccctccttttcaaactagagaataaagatttggttttagaa

SEQ ID NO: 380331 - DNA, 3695 bp, Homo sapiens
  misc_feature (5)..(6): n is a, c, g, or t
  misc_feature (13)..(13): n is a, c, g, or t
cgacnnacgcgtngcgacccacgcgtcgcccacgcgttgtgaactcgaacctgccgctgtcgccgcggcggggcggggagcgagagtgggccgcggaggccggccttcgggctccatggacgggcgccgcgtccctgcacagcccgccgcagaggtacggccggggcaggggcgcggggccaccgcgggcccgcggggggccgctccacctgcggggcgcgtgaccgtgagtgtgcgcgaccgtgtgtgagtgcgcggggggggacgctgctggatctgcgggggtgggggagcgcacctgcgcacaggctccgcgagctgcgccgtgcgtgggacccgaaatggctcactcgcaagaacgggacccgtgtgcccgggagcgtggacggaggacacgcatcagtacaaaagggcggtgtggggcttctgccacccgcggccagccgcgatgcggaaggggattctgacggagtcgtggtcacaccagctggccctgcgcagccccatgggaaataggcctggaattcctgtcgggaggaggctgggggaaggggagccagcagggattccagagttcctgccataggccggcctttggccatcagggaaagcccagactctggccacagaatggagaattcgttccgtgaccttaccagggaagaaagtgaccccgaaagacagcagtgtgcttccttgttgaaggggcacattcatttattaatccaatgtccattaaggtcactctgccaggcaggatgtggggcttatggctggtgcgtgtggctttgtggggggaggggttgtggctggtgaggacacaaagctgactgccctagaggagctcagagcctcacttctgttttctcttccctccccacagcagaggaagaaccgatgctggaacgtcgttgcaggggccccctggccatgggcctggcccagccccgactcctttctgggccctcccaggagtcaccccagaccctggggaaggagtcccgcgggctgaggcaacaaggcacgtcagtggcccagtctggtgcccaagccccaggcagggcccatcgctgtgcccactgtcgaaggcacttccctggctgggtggctctgtggcttcacacccgccggtgccaggcccggctgcccttgccctgccctgagtgtggccgtcgctttcgccatgcccccttcttagcactgcaccgccaggtccatgctgctgccaccccagacctgggctttgcctgccacctctgtgggcagagcttccgaggctgggtggccctggttctgcatctgcgggcccattcagctgcaaagcggcccatcgcttgtcccaaatgcgagagacgcttctggcgacgaaagcagcttcgagctcatctgcggcggtgccaccctcccgccccggaggcccggcccttcatatgcggcaactgtggccggagctttgcccagtgggaccagctagttgcccacaagcgggtgcacgtagctgaggccctggaggaggccgcagccaaggctctggggccccggcccaggggccgccccgcggtgaccgccccccggcccggtggagatgccgtcgaccgccccttccagtgtgcctgttgtggcaagcgcttccggcacaagcccaacttgatcgctcaccgccgcgtgcacacgggcgagcggccccaccagtgccccgagtgcgggaagcgctttaccaataagccctatctgacttcgcaccggcgcatccacaccggcgagaagccctacccgtgcaaagagtgcggccgccgcttccggcacaaacccaacctgctgtctcacagcaagattcacaagcgatccgaggggtcggcccaggccgcccccggcccggggagcccccagctgccagccggcccccaggagtccgcggccgagcccaccccggcggtacctctgaaaccggcccaggagccgccgccaggggccccgccagagcacccgcaggacccgatcgaagcccccccctccctctacagctgcgacgactgcggcaggagcttccggctggagcgcttcctgcgggcccaccagcggcagcacaccggggagcggcccttcacctgcgccgagtgcgggaagaacttcggcaagaagacgcacctggtggcgcactcgcgcgtgcactccggcgagcggcccttcgcctgcgaggagtgcggccgccgcttctcccagggcagccatctggcggcgcatcggcgcgaccacgcccccgatcggcccttcgtgtgtcccgactgcggcaaggccttccgccacaaaccctacctggcggcgcaccggcgcatccacaccggcgagaagccctacgtctgccccgactgcggcaaagccttcagccagaagtccaacctggtgtcgcaccggcgcatccacacgggcgagcggccctacgcctgtcccgactgcgaccgcagcttcagccagaagtccaacctcatcacccaccgcaagagccacatccgggacggcgccttctgctgtgccatctgtggccagaccttcgacgacgaggagagactcctggcccaccagaagaagcacgatgtctgagacggtgggcggggccgtgttggctgagagagggctggggtccttcgtggtgggagtcgcagtgggctgggggtgcctgcctagtgctggagtaggggacaatgggaatcctagaggggatggaagacgcggggagtgagctgggtgggccctgctagcgagagaggtcaaccccggtggccagggaacccacttccaagcgcagggacgccggcctccagctggtgtgtgctaaggctccgtcctgactgccctgtgccctggaaaagcagcaatagcatccgccccttagagccctctggctagaggagccaccagtggaaaggaagaccctccatcctctggtattaacgccttaatgcccctgtcttttactgtaagttacttaagatcatttttggaagcaggcgtggtagagtcctgtaaatgaatgctctgggctagatacagcttggagaacctgctggccttgttagacagcacttgggcctttgccagcagcaagaggtgaagcgaagccactcttacctctcccttcccctcccacctgccccctgcgtaggcacccagacttggagagacccgtctgctgttaatacttccatcctcttccttcccaaagagcagatcccaaggcatttactccttggtctgtctcgctttatctgtcgcccctcccagcgctgagagcctcccctggctgtcagcagcactgtgtccaggctcttgtctgaacaccgcagcccctccttcgctccttccagagctcagcatgtcacggcaaggactgccgcattggtgatggagggccagctgaggggaagttgctggtgagtttccttttctccatttctagcatatggacacctggcctctgcttgagcacttaggtgacaggaacttccgcacctcctgaggccctggatgattctaattgttagaaattctaattgttagaaatccttccttataatgaatgaattctgctttcctataatttctacctattgggccttgttctgttctctggaactaaacagaacaaccatttacccctccttttcaaactagagaataaagatttggttttagaa

SEQ ID NO: 380332 - DNA, 2796 bp, Homo sapiens
ggttgaactcaccccaaaatcctgggtgaaggaatccacagcatgctgacgctaggacatcctgtctagatggacccagtgctgaaatgactccattgtcccgctagatctgtatcgacgatgtgccgactgactagtgcactacactcgtagtgctatgtggatctgtggattctaaatcacacggtatcgcggccatttgtcacgttgaacgcctggctctgtaggatgatagcgcctggacagtcatcttctgacgatgcatcacactttcttaggatcgtgtcaacacagtcccaggctcctagtgactagtcgtgtgcaatccacctagaacctgggctttgcctgccacctctgtgggcagagcttccgaggctgggtggccctggttctgcatctgcgggcccattcagctgcaaagcggcccatcgcttgtcccaaatgcgagagacgcttctggcgacgaaagcagcttcgagctcatctgcggcggtgccaccctcccgccccggaggcccggcccttcatatgcggcaactgtggccggagctttgcccagtgggaccagctagttgcccacaagcgggtgcacgtagctgaggccctggaggaggccgcagccaaggctctggggccccggcccaggggccgccccgcggtgaccgccccccggcccggtggagatgccgtcgaccgccccttccagtgtgcctgttgtggcaagcgcttccggcacaagcccaacttgatcgctcaccgccgcgtgcacacgggcgagcggccccaccagtgccccgagtgcgggaagcgctttaccaataagccctatctgacttcgcaccggcgcatccacaccggcgagaagccctacccgtgcaaagagtgcggccgccgcttccggcacaaacccaacctgctgtctcacagcaagattcacaagcgatccgaggggtcggcccaggccgcccccggcccggggagcccccagctgccagccggcccccaggagtccgcggccgagcccaccccggcggtacctctgaaaccggcccaggagccgccgccaggggccccgccagagcacccgcaggacccgatcgaagcccccccctccctctacagctgcgacgactgcggcaggagcttccggctggagcgcttcctgcgggcccaccagcggcagcacaccggggagcggcccttcacctgcgccgagtgcgggaagaacttcggcaagaagacgcacctggtggcgcactcgcgcgtgcactccggcgagcggcccttcgcctgcgaggagtgcggccgccgcttctcccagggcagccatctggcggcgcatcggcgcgaccacgcccccgatcggcccttcgtgtgtcccgactgcggcaaggccttccgccacaaaccctacctggcggcgcaccggcgcatccacaccggcgagaagccctacgtctgccccgactgcggcaaagccttcagccagaagtccaacctggtgtcgcaccggcgcatccacacgggcgagcggccctacgcctgtcccgactgcgaccgcagcttcagccagaagtccaacctcatcacccaccgcaagagccacatccgggacggcgccttctgctgtgccatctgtggccagaccttcgacgacgaggagagactcctggcccaccagaagaagcacgatgtctgagacggtgggcggggccgtgttggctgagagagggctggggtccttcgtggtgggagtcgcagtgggctgggggtgcctgcctagtgctggagtaggggacaatgggaatcctagaggggatggaagacgcggggagtgagctgggtgggccctgctagcgagagaggtcaaccccggtggccagggaacccacttccaagcgcagggacgccggcctccagctggtgtgtgctaaggctccgtcctgactgccctgtgccctggaaaagcagcaatagcatccgccccttagagccctctggctagaggagccaccagtggaaaggaagaccctccatcctctggtattaacgccttaatgcccctgtcttttactgtaagttacttaagatcatttttggaagcaggcgtggtagagtcctgtaaatgaatgctctgggctagatacagcttggagaacctgctggccttgttagacagcacttgggcctttgccagcagcaagaggtgaagcgaagccactcttacctctcccttcccctcccacctgccccctgcgtaggcacccagacttggagagacccgtctgctgttaatacttccatcctcttccttcccaaagagcagatcccaaggcatttactccttggtctgtctcgctttatctgtcgcccctcccagcgctgagagcctcccctggctgtcagcagcactgtgtccaggctcttgtctgaacaccgcagcccctccttcgctccttccagagctcagcatgtcacggcaaggactgccgcattggtgatggagggccagctgaggggaagttgctggtgagtttccttttctccatttctagcatatggacacctggcctctgcttgagcacttaggtgacaggaacttccgcacctcctgaggccctggatgattctaattgttagaaattctaattgttagaaatccttccttataatgaatgaattctgctttcctataatttctacctattgggccttgttctgttctctggaactaaacagaacaaccatttacccctccttttcaaactagagaataaagatttggttttagaa

SEQ ID NO: 380333 - DNA, 4469 bp, Homo sapiens
gaacccggcggggggaggttggggacgggcctggcagttgtgaactcgaacctgccgctgtcgccgcggcggggcggggagcgagagtgggccgcggaggccggccttcgggctccatggacgggcgccgcgtccctgcacagcccgccgcagaggtaaggctggcctctctgcagtcagaggtctgagctctgccatggggataggggtgtctttattactgcagttttctctaacacctgggggctaccggagtgtgggccgaagcaggcgctgcagccgcggaagtatccccaggaacatccccaagaggagctggaaaaagcctcatccccagctctgcagtctccagggtagagtctggcctttgctgtgctcccaaaccacgccacaacaggggtgcacgggcgtccccatcccggcggaaggaaatggccctttctcatatcctggggtcttccctgtgcacagtctgacactgggaatgagtgacctttgtgttccctgagaagagagagtgcgctctagggaatttagaaggatgtgtctggagcttgtgagcaggcacagaagggcccttaggagcctaactgcttccttcctccttccgcggaggaggctcctgtgcaggaatctgggctcccctgagctgtggaagagctgaacatggggcagcccctggcgaggttggggcaggaccgggcaggggactgagattgcagtctcatcttccctccccttctattgccccagtaatctccagcaccccgagggaggcagagccggtgatcaggccccgagggcagcaggctgtgggtgttccttggattcagggagagcattccttcctgcaatgtcctaatttgtgtgggtggaagagggcaggcgggcagaatgggggcacagtctgggcaggcggtggtctggcgttagactgccgggagtagcacccagggctctgctcctgttccccgagaagggctgttctcacttgtcctccagcctcctacggagactgcagttagtgatgctgaaagtgcctcccctgtggggctaggaatgaaaagctatagacacctttttctctgagatctttgcaaacccaggcgctttagaggaaagaacactggcctgggagtttaaagacctgttccctagtcttgattctgctgttggcttactgtgtcaccttgggcaggtctcgtcatctttgatgtctcacagttgcttcatctgttaaacagggagctcagtgtctgtttgtccagcttctcagagttgctgtgcagctcggatgtggcataggaaacagcagacacagggagagggcagcataaggcactgtagggagcagtggccacattttctggtgagtcctgtggcaggaatgtttgtgcattcagcactggagcatttactccctgtctgacactggggtagctgccatgagggggattctagtatcagagtccctcccttctggaagtttccagggcaacaaagacataagacaaacatccttgaaatgttatctaaaaacccaagattgaaataatacataccacacaaggaaacaggagagtagtctagctccatgtccggggctctaggggttcatagatggcagctcctgtccggggctgaggttgggaggggagaaacaggggcagagtgagttggtctctggagtgactgtgcttttccaccctcacagaggaagaaccgatgctggaacgtcgttgcaggggccccctggccatgggcctggcccagccccgactcctttctgggccctcccaggagtcaccccagaccctggggaaggagtcccgcgggctgaggcaacaaggcacgtcagtggcccagtctggtgcccaagccccaggcagggcccatcgctgtgcccactgtcgaaggcacttccctggctgggtggctctgtggcttcacacccgccggtgccaggcccggctgcccttgccctgccctgagtgtggccgtcgctttcgccatgcccccttcttagcactgcaccgccaggtccatgctgctgccaccccagacctgggctttgcctgccacctctgtgggcagagcttccgaggctgggtggccctggttctgcatctgcgggcccattcagctgcaaagcggcccatcgcttgtcccaaatgcgagagacgcttctggcgacgaaagcagcttcgagctcatctgcggcggtgccaccctcccgccccggaggcccggcccttcatatgcggcaactgtggccggagctttgcccagtgggaccagctagttgcccacaagcgggtgcacgtagctgaggccctggaggaggccgcagccaaggctctggggccccggcccaggggccgccccgcggtgaccgccccccggcccggtggagatgccgtcgaccgccccttccagtgtgcctgttgtggcaagcgcttccggcacaagcccaacttgatcgctcaccgccgcgtgcacacgggcgagcggccccaccagtgccccgagtgcgggaagcgctttaccaataagccctatctgacttcgcaccggcgcatccacaccggcgagaagccctacccgtgcaaagagtgcggccgccgcttccggcacaaacccaacctgctgtctcacagcaagattcacaagcgatccgaggggtcggcccaggccgcccccggcccggggagcccccagctgccagccggcccccaggagtccgcggccgagcccaccccggcggtacctctgaaaccggcccaggagccgccgccaggggccccgccagagcacccgcaggacccgatcgaagcccccccctccctctacagctgcgacgactgcggcaggagcttccggctggagcgcttcctgcgggcccaccagcggcagcacaccggggagcggcccttcacctgcgccgagtgcgggaagaacttcggcaagaagacgcacctggtggcgcactcgcgcgtgcactccggcgagcggcccttcgcctgcgaggagtgcggccgccgcttctcccagggcagccatctggcggcgcatcggcgcgaccacgcccccgatcggcccttcgtgtgtcccgactgcggcaaggccttccgccacaaaccctacctggcggcgcaccggcgcatccacaccggcgagaagccctacgtctgccccgactgcggcaaagccttcagccagaagtccaacctggtgtcgcaccggcgcatccacacgggcgagcggccctacgcctgtcccgactgcgaccgcagcttcagccagaagtccaacctcatcacccaccgcaagagccacatccgggacggcgccttctgctgtgccatctgtggccagaccttcgacgacgaggagagactcctggcccaccagaagaagcacgatgtctgagacggtgggcggggccgtgttggctgagagagggctggggtccttcgtggtgggagtcgcagtgggctgggggtgcctgcctagtgctggagtaggggacaatgggaatcctagaggggatggaagacgcggggagtgagctgggtgggccctgctagcgagagaggtcaaccccggtggccagggaacccacttccaagcgcagggacgccggcctccagctggtgtgtgctaaggctccgtcctgactgccctgtgccctggaaaagcagcaatagcatccgccccttagagccctctggctagaggagccaccagtggaaaggaagaccctccatcctctggtattaacgccttaatgcccctgtcttttactgtaagttacttaagatcatttttggaagcaggcgtggtagagtcctgtaaatgaatgctctgggctagatacagcttggagaacctgctggccttgttagacagcacttgggcctttgccagcagcaagaggtgaagcgaagccactcttacctctcccttcccctcccacctgccccctgcgtaggcacccagacttggagagacccgtctgctgttaatacttccatcctcttccttcccaaagagcagatcccaaggcatttactccttggtctgtctcgctttatctgtcgcccctcccagcgctgagagcctcccctggctgtcagcagcactgtgtccaggctcttgtctgaacaccgcagcccctccttcgctccttccagagctcagcatgtcacggcaaggactgctccatttctagcatatggacacctggcctctgcttgagcacttaggtgacaggaacttccgcacctcctgaggccctggatgattctaattgttagaaattctaattgttagaaatccttccttataatgaatgaattctgctttcctataatttctacctattgggccttgttctgttctctggaactaaacagaacaaccatttacccctccttttcaaactagagaataaagatttggttttagaa

SEQ ID NO: 380334 - DNA, 4140 bp, Homo sapiens
gaacccggcggggggaggttggggacgggcctggcagttgtgaactcgaacctgccgctgtcgccgcggcggggcggggagcgagagtgggccgcggaggccggccttcgggctccatggacgggcgccgcgtccctgcacagcccgccgcagaggtaaggctggcctctctgcagtcagaggtctgagctctgccatggggataggggtgtctttattactgcagttttctctaacacctgggggctaccggagtgtgggccgaagcaggcgctgcagccgcggaagtatccccaggaacatccccaagaggagctggaaaaagcctcatccccagctctgcagtctccagggtagagtctggcctttgctgtgctcccaaaccacgccacaacaggggtgcacgggcgtccccatcccggcggaaggaaatggccctttctcatatcctggggtcttccctgtgcacagtctgacactgggaatgagtgacctttgtgttccctgagaagagagagtgcgctctagggaatttagaaggatgtgtctggagcttgtgagcaggcacagaagggcccttaggagcctaactgcttccttcctccttccgcggaggaggctcctgtgcaggaatctgggctcccctgagctgtggaagagctgaacatggggcagcccctggcgaggttggggcaggaccgggcaggggactgagattgcagtctcatcttccctccccttctattgccccagtaatctccagcaccccgagggaggcagagccggtgatcaggccccgagggcagcaggctgtgggtgttccttggattcagggagagcattccttcctgcaatgtcctaatttgtgtgggtggaagagggcaggcgggcagaatgggggcacagtctgggcaggcggtggtctggcgttagactgccgggagtagcacccagggctctgctcctgttccccgagaagggctgttctcacttgtcctccagcctcctacggagactgcagttagtgatgctgaaagtgcctcccctgtggggctaggaatgaaaagctatagacacctttttctctgagatctttgcaaacccaggcgctttagaggaaagaacactggcctgggagtttaaagacctgttccctagtcttgattctgctgttggcttactgtgtcaccttgggcaggtctcgtcatctttgatgtctcacagttgcttcatctgttaaacagggagctcagtgtctgtttgtccagcttctcagagttgctgtgcagctcggatgtggcataggaaacagcagacacagggagagggcagcataaggcactgtagggagcagtggccacattttctggtgagtcctgtggcaggaatgtttgtgcattcagcactggagcatttactccctgtctgacactggggtagctgccatgagggggattctagtatcagagtccctcccttctggaagtttccagggcaacaaagacataagacaaacatccttgaaatgttatctaaaaacccaagattgaaataatacataccacacaaggaaacaggagagtagtctagctccatgtccggggctctaggggttcatagatggcagctcctgtccggggctgaggttgggaggggagaaacaggggcagagtgagttggtctctggagtgactgtgcttttccaccctcacagaggaagaaccgatgctggaacgtcgttgcaggggccccctggccatgggcctggcccagccccgactcctttctgggccctcccaggagtcaccccagaccctggggaaggagtcccgcgggctgaggcaacaaggcacgtcagtggcccagtctggtgcccaagccccaggcagggcccatcgctgtgcccactgtcgaaggcacttccctggctgggtggctctgtggcttcacacccgccggtgccaggcccggctgcccttgccctgccctgagtgtggccgtcgctttcgccatgcccccttcttagcactgcaccgccaggtccatgctgctgccaccccagacctgggctttgcctgccacctctgtgggcagagcttccgaggctgggtggccctggttctgcatctgcgggcccattcagctgcaaagcggcccatcgcttgtcccaaatgcgagagacgcttctggcgacgaaagcagcttcgagctcatctgcggcggtgccaccctcccgccccggaggcccggcccttcatatgcggcaactgtggccggagctttgcccagtgggaccagctagttgcccacaagcgggtgcacgtagctgaggccctggaggaggccgcagccaaggctctggggccccggcccaggggccgccccgcggtgaccgccccccggcccggtggagatgccgtcgaccgccccttccagtgtgcctgttgtggcaagcgcttccggcacaagcccaacttgatcgctcaccgccgcgtgcacacgggcgagcggccccaccagtgccccgagtgcgggaagcgctttaccaataagccctatctgacttcgcaccggcgcatccacaccggcgagaagccctacccgtgcaaagagtgcggccgccgcttccggcacaaacccaacctgctgtctcacagcaagattcacaagcgatccgaggggtcggcccaggccgcccccggcccggggagcccccagctgccagccggcccccaggagtccgcggccgagcccaccccggcggtacctctgaaaccggcccaggagccgccgccaggggccccgccagagcacccgcaggacccgatcgaagcccccccctccctctacagctgcgacgactgcggcaggagcttccggctggagcgcttcctgcgggcccaccagcggcagcacaccggggagcggcccttcacctgcgccgagtgcgggaagaacttcggcaagaagacgcacctggtggcgcactcgcgcgtgcactccggcgagcggcccttcgcctgcgaggagtgcggccgccgcttctcccagggcagccatctggcggcgcatcggcgcgaccacgcccccgatcggcccttcgtgtgtcccgactgcggcaaggccttccgccacaaaccctacctggcggcgcaccggcgcatccacaccggcgagaagccctacgtctgccccgactgcggcaaagccttcagccagaagtccaacctggtgtcgcaccggcgcatccacacgggcgagcggccctacgcctgtcccgactgcgaccgcagcttcagccagaagtccaacctcatcacccaccgcaagagccacatccgggacggcgccttctgctgtgccatctgtggccagaccttcgacgacgaggagagactcctggcccaccagaagaagcacgatgtctgagacggtgggcggggccgtgttggctgagagagggctggggtccttcgtggtgggagtcgcagtgggctgggggtgcctgcctagtgctggagtaggggacaatgggaatcctagaggggatggaagacgcggggagtgagctgggtgggccctgctagcgagagaggtcaaccccggtggccagggaacccacttccaagcgcagggacgccggcctccagctggtgtgtgctaaggctccgtcctgactgccctgtgccctggaaaagcagcaatagcatccgccccttagagccctctggctagaggagccaccagtggaaaggaagaccctccatcctctggtattaacgccttaatcccctccttcgctccttccagagctcagcatgtcacggcaaggactgccgcattggtgatggagggccagctgaggggaagttgctggtgagtttccttttctccatttctagcatatggacacctggcctctgcttgagcacttaggtgacaggaacttccgcacctcctgaggccctggatgattctaattgttagaaattctaattgttagaaatccttccttataatgaatgaattctgctttcctataatttctacctattgggccttgttctgttctctggaactaaacagaacaaccatttacccctccttttcaaactagagaataaagatttggttttagaa

SEQ ID NO: 380335 - DNA, 3909 bp, Homo sapiens
gaacccggcggggggaggttggggacgggcctggcagttgtgaactcgaacctgccgctgtcgccgcggcggggcggggagcgagagtgggccgcggaggccggccttcgggctccatggacgggcgccgcgtccctgcacagcccgccgcagaggtaaggctggcctctctgcagtcagaggtctgagctctgccatggggataggggtgtctttattactgcagttttctctaacacctgggggctaccggagtgtgggccgaagcaggcgctgcagccgcggaagtatccccaggaacatccccaagaggagctggaaaaagcctcatccccagctctgcagtctccagggtagagtctggcctttgctgtgctcccaaaccacgccacaacaggggtgcacgggcgtccccatcccggcggaaggaaatggccctttctcatatcctggggtcttccctgtgcacagtctgacactgggaatgagtgacctttgtgttccctgagaagagagagtgcgctctagggaatttagaaggatgtgtctggagcttgtgagcaggcacagaagggcccttaggagcctaactgcttccttcctccttccgcggaggaggctcctgtgcaggaatctgggctcccctgagctgtggaagagctgaacatggggcagcccctggcgaggttggggcaggaccgggcaggggactgagattgcagtctcatcttccctccccttctattgccccagtaatctccagcaccccgagggaggcagagccggtgatcaggccccgagggcagcaggctgtgggtgttccttggattcagggagagcattccttcctgcaatgtcctaatttgtgtgggtggaagagggcaggcgggcagaatgggggcacagtctgggcaggcggtggtctggcgttagactgccgggagtagcacccagggctctgctcctgttccccgagaagggctgttctcacttgtcctccagcctcctacggagactgcagttagtgatgctgaaagtgcctcccctgtggggctaggaatgaaaagctatagacacctttttctctgagatctttgcaaacccaggcgctttagaggaaagaacactggcctgggagtttaaagacctgttccctagtcttgattctgctgttggcttactgtgtcaccttgggcaggtctcgtcatctttgatgtctcacagttgcttcatctgttaaacagggagctcagtgtctgtttgtccagcttctcagagttgctgtgcagctcggatgtggcataggaaacagcagacacagggagagggcagcataaggcactgtagggagcagtggccacattttctggtgagtcctgtggcaggaatgtttgtgcattcagcactggagcatttactccctgtctgacactggggtagctgccatgagggggattctagtatcagagtccctcccttctggaagtttccagggcaacaaagacataagacaaacatccttgaaatgttatctaaaaacccaagattgaaataatacataccacacaaggaaacaggagagtagtctagctccatgtccggggctctaggggttcatagatggcaggaggcccggcccttcatatgcggcaactgtggccggagctttgcccagtgggaccagctagttgcccacaagcgggtgcacgtagctgaggccctggaggaggccgcagccaaggctctggggccccggcccaggggccgccccgcggtgaccgccccccggcccggtggagatgccgtcgaccgccccttccagtgtgcctgttgtggcaagcgcttccggcacaagcccaacttgatcgctcaccgccgcgtgcacacgggcgagcggccccaccagtgccccgagtgcgggaagcgctttaccaataagccctatctgacttcgcaccggcgcatccacaccggcgagaagccctacccgtgcaaagagtgcggccgccgcttccggcacaaacccaacctgctgtctcacagcaagattcacaagcgatccgaggggtcggcccaggccgcccccggcccggggagcccccagctgccagccggcccccaggagtccgcggccgagcccaccccggcggtacctctgaaaccggcccaggagccgccgccaggggccccgccagagcacccgcaggacccgatcgaagcccccccctccctctacagctgcgacgactgcggcaggagcttccggctggagcgcttcctgcgggcccaccagcggcagcacaccggggagcggcccttcacctgcgccgagtgcgggaagaacttcggcaagaagacgcacctggtggcgcactcgcgcgtgcactccggcgagcggcccttcgcctgcgaggagtgcggccgccgcttctcccagggcagccatctggcggcgcatcggcgcgaccacgcccccgatcggcccttcgtgtgtcccgactgcggcaaggccttccgccacaaaccctacctggcggcgcaccggcgcatccacaccggcgagaagccctacgtctgccccgactgcggcaaagccttcagccagaagtccaacctggtgtcgcaccggcgcatccacacgggcgagcggccctacgcctgtcccgactgcgaccgcagcttcagccagaagtccaacctcatcacccaccgcaagagccacatccgggacggcgccttctgctgtgccatctgtggccagaccttcgacgacgaggagagactcctggcccaccagaagaagcacgatgtctgagacggtgggcggggccgtgttggctgagagagggctggggtccttcgtggtgggagtcgcagtgggctgggggtgcctgcctagtgctggagtaggggacaatgggaatcctagaggggatggaagacgcggggagtgagctgggtgggccctgctagcgagagaggtcaaccccggtggccagggaacccacttccaagcgcagggacgccggcctccagctggtgtgtgctaaggctccgtcctgactgccctgtgccctggaaaagcagcaatagcatccgccccttagagccctctggctagaggagccaccagtggaaaggaagaccctccatcctctggtattaacgccttaatgcccctgtcttttactgtaagttacttaagatcatttttggaagcaggcgtggtagagtcctgtaaatgaatgctctgggctagatacagcttggagaacctgctggccttgttagacagcacttgggcctttgccagcagcaagaggtgaagcgaagccactcttacctctcccttcccctcccacctgccccctgcgtaggcacccagacttggagagacccgtctgctgttaatacttccatcctcttccttcccaaagagcagatcccaaggcatttactccttggtctgtctcgctttatctgtcgcccctcccagcgctgagagcctcccctggctgtcagcagcactgtgtccaggctcttgtctgaacaccgcagcccctccttcgctccttccagagctcagcatgtcacggcaaggactgccgcattggtgatggagggccagctgaggggaagttgctggtgagtttccttttctccatttctagcatatggacacctggcctctgcttgagcacttaggtgacaggaacttccgcacctcctgaggccctggatgattctaattgttagaaattctaattgttagaaatccttccttataatgaatgaattctgctttcctataatttctacctattgggccttgttctgttctctggaactaaacagaacaaccatttacccctccttttcaaactagagaataaagatttggttttagaa

SEQ ID NO: 380336 - DNA, 3420 bp, Homo sapiens
  misc_feature (5)..(6): n is a, c, g, or t
  misc_feature (13)..(13): n is a, c, g, or t
cgacnnacgcgtngcgacccacgcgtcgcccacgcgttgtgaactcgaacctgccgctgtcgccgcggcggggcggggagcgagagtgggccgcggaggccggccttcgggctccatggacgggcgccgcgtccctgcacagcccgccgcagaggtacggccggggcaggggcgcggggccaccgcgggcccgcggggggccgctccacctgcggggcgcgtgaccgtgagtgtgcgcgaccgtgtgtgagtgcgcggggggggacgctgctggatctgcgggggtgggggagcgcacctgcgcacaggctccgcgagctgcgccgtgcgtgggacccgaaatggctcactcgcaagaacgggacccgtgtgcccgggagcgtggacggaggacacgcatcagtacaaaagggcggtgtggggcttctgccacccgcggccagccgcgatgcggaaggggattctgacggagtcgtggtcacaccagctggccctgcgcagccccatgggaaataggcctggaattcctgtcgggaggaggctgggggaaggggagccagcagggattccagagttcctgccataggccggcctttggccatcagggaaagcccagactctggccacagaatggagaattcgttccgtgaccttaccagggaagaaagtgaccccgaaagacagcagtgtgcttccttgttgaaggggcacattcatttattaatccaatgtccattaaggtcactctgccaggcaggatgtggggcttatggctggtgcgtgtggctttgtggggggaggggttgtggctggtgaggacacaaagctgactgccctagaggagctcagagcctcacttctgttttctcttccctccccacaggtaaggctggcctctctgcagtcagaggtctgagctctgccatggggataggggtgtctttattactgcagttttctctaacacctgggggctaccggagtgtgggccgaagcaggcgctgcagccgcggaagtatccccaggaacatccccaagaggagctggaaaaagcctcatccccagctctgcagtctccagggtagagtctggcctttgctgtgctcccaaaccacgccacaacaggggtgcacgggcgtccccatcccggcggaaggaaatggccctttctcatatcctggggtcttccctgtgcacagtctgacactgggaatgagtgacctttgtgttccctgagaagagagagtgcgctctagggaatttagaaggatgtgtctggagcttgtgagcaggcacagaagggcccttaggagcctaactgcttccttcctccttccgcggaggaggctcctgtgcaggaatctgggctcccctgagctgtggaagagctgaacatggggcagcccctggcgaggttggggcaggaccgggcaggggactgagattgcagtctcatcttccctccccttctattgccccagtaatctccagcaccccgagggaggcagagccggtgatcaggccccgagggcagcaggctgtgggtgttccttggattcagggagagcattccttcctgcaatgtcctaatttgtgtgggtggaagagggcaggcgggcagaatgggggcacagtctgggcaggcggtggtctggcgttagactgccgggagtagcacccagggctctgctcctgttccccgagaagggctgttctcacttgtcctccagcctcctacggagactacagctgcgacgactgcggcaggagcttccggctggagcgcttcctgcgggcccaccagcggcagcacaccggggagcggcccttcacctgcgccgagtgcgggaagaacttcggcaagaagacgcacctggtggcgcactcgcgcgtgcactccggcgagcggcccttcgcctgcgaggagtgcggccgccgcttctcccagggcagccatctggcggcgcatcggcgcgaccacgcccccgatcggcccttcgtgtgtcccgactgcggcaaggccttccgccacaaaccctacctggcggcgcaccggcgcatccacaccggcgagaagccctacgtctgccccgactgcggcaaagccttcagccagaagtccaacctggtgtcgcaccggcgcatccacacgggcgagcggccctacgcctgtcccgactgcgaccgcagcttcagccagaagtccaacctcatcacccaccgcaagagccacatccgggacggcgccttctgctgtgccatctgtggccagaccttcgacgacgaggagagactcctggcccaccagaagaagcacgatgtctgagacggtgggcggggccgtgttggctgagagagggctggggtccttcgtggtgggagtcgcagtgggctgggggtgcctgcctagtgctggagtaggggacaatgggaatcctagaggggatggaagacgcggggagtgagctgggtgggccctgctagcgagagaggtcaaccccggtggccagggaacccacttccaagcgcagggacgccggcctccagctggtgtgtgctaaggctccgtcctgactgccctgtgccctggaaaagcagcaatagcatccgccccttagagccctctggctagaggagccaccagtggaaaggaagaccctccatcctctggtattaacgccttaatgcccctgtcttttactgtaagttacttaagatcatttttggaagcaggcgtggtagagtcctgtaaatgaatgctctgggctagatacagcttggagaacctgctggccttgttagacagcacttgggcctttgccagcagcaagaggtgaagcgaagccactcttacctctcccttcccctcccacctgccccctgcgtaggcacccagacttggagagacccgtctgctgttaatacttccatcctcttccttcccaaagagcagatcccaaggcatttactccttggtctgtctcgctttatctgtcgcccctcccagcgctgagagcctcccctggctgtcagcagcactgtgtccaggctcttgtctgaacaccgcagcccctccttcgctccttccagagctcagcatgtcacggcaaggactgccgcattggtgatggagggccagctgaggggaagttgctggtgagtttccttttctccatttctagcatatggacacctggcctctgcttgagcacttaggtgacaggaacttccgcacctcctgaggccctggatgattctaattgttagaaattctaattgttagaaatccttccttataatgaatgaattctgctttcctataatttctacctattgggccttgttctgttctctggaactaaacagaacaaccatttacccctccttttcaaactagagaataaagatttggttttagaa

SEQ ID NO: 380337 - DNA, 1483 bp, Homo sapiens
ttttttttattgtatttatttggttgtgcatttgttctaccactctcttttatcggtcttttttgtgttctgactgttgtaaggccttccgccacaaaccctacctggcggcgcaccggcgcatccacaccggcgagaagccctacgtctgccccgactgcggcaaagccttcagccagaagtccaacctggtgtcgcaccggcgcatccacacgggcgagcggccctacgcctgtcccgactgcgaccgcagcttcagccagaagtccaacctcatcacccaccgcaagagccacatccgggacggcgccttctgctgtgccatctgtggccagaccttcgacgacgaggagagactcctggcccaccagaagaagcacgatgtctgagacggtgggcggggccgtgttggctgagagagggctggggtccttcgtggtgggagtcgcagtgggctgggggtgcctgcctagtgctggagtaggggacaatgggaatcctagaggggatggaagacgcggggagtgagctgggtgggccctgctagcgagagaggtcaaccccggtggccagggaacccacttccaagcgcagggacgccggcctccagctggtgtgtgctaaggctccgtcctgactgccctgtgccctggaaaagcagcaatagcatccgccccttagagccctctggctagaggagccaccagtggaaaggaagaccctccatcctctggtattaacgccttaatgcccctgtcttttactgtaagttacttaagatcatttttggaagcaggcgtggtagagtcctgtaaatgaatgctctgggctagatacagcttggagaacctgctggccttgttagacagcacttgggcctttgccagcagcaagaggtgaagcgaagccactcttacctctcccttcccctcccacctgccccctgcgtaggcacccagacttggagagacccgtctgctgttaatacttccatcctcttccttcccaaagagcagatcccaaggcatttactccttggtctgtctcgctttatctgtcgcccctcccagcgctgagagcctcccctggctgtcagcagcactgtgtccaggctcttgtctgaacaccgcagcccctccttcgctccttccagagctcagcatgtcacggcaaggactgccgcattggtgatggagggccagctgaggggaagttgctggtgagtttccttttctccatttctagcatatggacacctggcctctgcttgagcacttaggtgacaggaacttccgcacctcctgaggccctggatgattctaattgttagaaattctaattgttagaaatccttccttataatgaatgaattctgctttcctataatttctacctattgggccttgttctgttctctggaactaaacagaacaaccatttacccctccttttcaaactagagaataaagatttggttttagaa

SEQ ID NO: 380338 - DNA, 3505 bp, Homo sapiens
ggggttgcgacgcagagtttaccatatttctccagggttgctccggccgcagaagttggcaaggttgtgtgtaaggtcgggtggggtggggtcagctctcccgattaatgcagctatttgataagagcaacgtcgcgggacgcttgccgtctttatgggggcggggagaaggggcgcgggtgtcgctgcgggagagttaccgtatttgcgttgagcagcgcagactgtagagcaaagagctgcggccggagaccggaggagcaggggctcagctgggctggactggtgattgcagctggaagtgcccatgaccgagctggcgtcctccgggggcgggtcccctgcgggggacggggaggagggtctgggggacgagcgaggcctggtcatccaccaccctgcagaggagcagccctaccgctgcccgctgtgcggccagaccttctcgcagcagcccagcctggtgcggcaccagaaggcgcacgccggagcgggccgcgcggctgccttcgtgtgtcccgagtgcggcaaggccttcagcgtcaagcacaacctcgaggtgcaccagcgcacgcacaccggggagcggcccttcccctgccccgagtgcggccgctgcttcagcctcaagcagaacctgctcacgcaccagcgcatccacagcggcgagaagccgcaccagtgcgcgcagtgcggccgctgcttccgcgagccgcgcttcctgctcaaccaccagcgcacccacgcgcgcatgcccgcgccgcacccgcgccgccccggcgtcttcggggagcggcggccctacttctgcccccgctgcggcaagagcttcgcgcgcgagggctcgctcaagacccatcagcgcagccacggccacgggcccgagggccaggcggcccacttaggacgcgtgctatgatgcgcccggggcctgctgccgacggctgcttcccgccccgcacgtgcgtccccgacccctggagatggccctgggccgcagctccctctctagatgggatcccgggagaggggcagcgctggcttgggctcttgaaggtgtgggccgccgccaggctccggccgcccgctcgcgttcctccctcgggaccctctggctggctgcgcacagctgcttccggctcctgccatggttctccttctctggcccatccggcctagagcagttgcagagtgggcaggatcttaagacccgataggtgcagaacccatctggacacggagaccaggaatggagttccatggaggcctggctggcactgcacccgggcatgaggacacatccagtaagaagacctgcctcaagaggtgcactgcggtgaccagtggaggtgactggttggagcctggaattggaagcagattccaagctctggtggacaaactctccaggcctggtgggaatcacagctggggcagacctcatcctggctgcctggccacaggcccccactctctgccactggtggtaggacgatgcctgtgtggagagctggcttctctgctcccgcctggtccaccacttggctagagttcagagacaggaagtgattggtctaagctaacacagcaagttggtggcagacctggttctagaggcaaaaccttcttccagatgtgaatgaaacctgcaggcttcattttcctttctgagcagtgcttcttagctctttggagacacgaagcccttggaaaatctgatgaaggttacggaccttccctaggaaaacagataactgacgtagactcaaaaaccccaagcaatttcaggagccactggactccctgaatgaaacccatccctggactccaggctaagaacctcagccctggggacttcacctgctgccctttccttacctgtcacacattgagccccgagtcaaggccactgtacaagtagtgcccctccctccccctggccaagcctccttcccttgttcaggaataaagaattccgaggagccctttttagtcattcccttctcccagacctaacgaatggtgcgtcaggtttctggagcctcatttcccttccccagacattggcagaggtcccttgggctagattttctcttctggttttgtttcttgttctgcctgactggccgctggcttccacaaaggagccctttgctcctggcctgggctctgatttcactgtgtggtctcaggggaagctggactgctgtggacgctggtgggagcttgagtctggtctgagtctgccccaggaagaaagaatcctgcttccaccaaccaagcccagtcagcggttcctcccaactggccaagtgttcagcccagtgggctggggaggaagaggatgagggcctcgctcctggtgcctgtggctctgggcagggtgagaggtcggtggaggatctttctgtgtgttctctgagtatgcagcagtgcagttgaagggaacagggcccaggcaggcagcaggacgaggactcctcccatcttcacacctgaaccagtcagcctggaagctacaagttctcacctgcctccccagaatgaacatcagaaaaggcaaaactgaccagggctgggatgggtttgggtcagcgtggttggagggcagcctgtggatccctgcactggagtcttgctgtcttcgatgcaggttggatcatacattgttacctcctactgtatgcctcaccctggaatagcagaatgctcagggggagatccgagaacgagaaggtgctcccagccccaggagcttccagtctggctctgatccttggccgacctagaggaaacctccacacacgccccttttgtgctaatggtgcagtttgtgtccccctctgcccatcactgtgctgtgcttgttcctgcctctgtgccttcccctatactgctcggacatgtcccctttcctctcctctacccagctaagcccttctgatccacggggcccggcttcccaaaccacccagcccacattcctccttcctgctccgaacaggtcccgtgtgagcccctgcccccgaattgcgtgctgtcccatggacgctccagtctcttccgtgtgtgtcttgagtccctaactagacagttagctccctgagggcaagggactgtcatttcctcttgagtcctaccagggtctagcacaggactgggctcctaactctcaggaaacacttgtcggctgactggtgcctcaagcgctggagcttgtcggtggccggtaatgggcagtgcacgtggggagagggtatgtgagttaactcaagggtgccttttcttgggctgtgggctggctcccctgggtcaaaagtggatgtcggaggcctcaggctcttacctccttggggcagtgggagcatcagggacccccacccccaccccggctctgcaggagtgcacggaagtggtcgtccagcctggatatttctacaggttgctgactcctgcgggagctgactgagtggaataaatgttctctcaacataaaaaaaagtaa

SEQ ID NO: 380339 - DNA, 3398 bp, Homo sapiens
cgcatggtcgccgctccggcccgggcgggcgcagcgctggcagccccgttttccgccagccgggctgccggagagttagacctcccagcctcacggggctgctgtgcggctgcgacgacgccggcgactgcggcgctgcagcggagacggaaggctcgggaggcggcgccatggactggtgattgcagctggaagtgcccatgaccgagctggcgtcctccgggggcgggtcccctgcgggggacggggaggagggtctgggggacgagcgaggcctggtcatccaccaccctgcagaggagcagccctaccgctgcccgctgtgcggccagaccttctcgcagcagcccagcctggtgcggcaccagaaggcgcacgccggagcgggccgcgcggctgccttcgtgtgtcccgagtgcggcaaggccttcagcgtcaagcacaacctcgaggtgcaccagcgcacgcacaccggggagcggcccttcccctgccccgagtgcggccgctgcttcagcctcaagcagaacctgctcacgcaccagcgcatccacagcggcgagaagccgcaccagtgcgcgcagtgcggccgctgcttccgcgagccgcgcttcctgctcaaccaccagcgcacccacgcgcgcatgcccgcgccgcacccgcgccgccccggcgtcttcggggagcggcggccctacttctgcccccgctgcggcaagagcttcgcgcgcgagggctcgctcaagacccatcagcgcagccacggccacgggcccgagggccaggcggcccacttaggacgcgtgctatgatgcgcccggggcctgctgccgacggctgcttcccgccccgcacgtgcgtccccgacccctggagatggccctgggccgcagctccctctctagatgggatcccgggagaggggcagcgctggcttgggctcttgaaggtgtgggccgccgccaggctccggccgcccgctcgcgttcctccctcgggaccctctggctggctgcgcacagctgcttccggctcctgccatggttctccttctctggcccatccggcctagagcagttgcagagtgggcaggatcttaagacccgataggtgcagaacccatctggacacggagaccaggaatggagttccatggaggcctggctggcactgcacccgggcatgaggacacatccagtaagaagacctgcctcaagaggtgcactgcggtgaccagtggaggtgactggttggagcctggaattggaagcagattccaagctctggtggacaaactctccaggcctggtgggaatcacagctggggcagacctcatcctggctgcctggccacaggcccccactctctgccactggtggtaggacgatgcctgtgtggagagctggcttctctgctcccgcctggtccaccacttggctagagttcagagacaggaagtgattggtctaagctaacacagcaagttggtggcagacctggttctagaggcaaaaccttcttccagatgtgaatgaaacctgcaggcttcattttcctttctgagcagtgcttcttagctctttggagacacgaagcccttggaaaatctgatgaaggttacggaccttccctaggaaaacagataactgacgtagactcaaaaaccccaagcaatttcaggagccactggactccctgaatgaaacccatccctggactccaggctaagaacctcagccctggggacttcacctgctgccctttccttacctgtcacacattgagccccgagtcaaggccactgtacaagtagtgcccctccctccccctggccaagcctccttcccttgttcaggaataaagaattccgaggagccctttttagtcattcccttctcccagacctaacgaatggtgcgtcaggtttctggagcctcatttcccttccccagacattggcagaggtcccttgggctagattttctcttctggttttgtttcttgttctgcctgactggccgctggcttccacaaaggagccctttgctcctggcctgggctctgatttcactgtgtggtctcaggggaagctggactgctgtggacgctggtgggagcttgagtctggtctgagtctgccccaggaagaaagaatcctgcttccaccaaccaagcccagtcagcggttcctcccaactggccaagtgttcagcccagtgggctggggaggaagaggatgagggcctcgctcctggtgcctgtggctctgggcagggtgagaggtcggtggaggatctttctgtgtgttctctgagtatgcagcagtgcagttgaagggaacagggcccaggcaggcagcaggacgaggactcctcccatcttcacacctgaaccagtcagcctggaagctacaagttctcacctgcctccccagaatgaacatcagaaaaggcaaaactgaccagggctgggatgggtttgggtcagcgtggttggagggcagcctgtggatccctgcactggagtcttgctgtcttcgatgcaggttggatcatacattgttacctcctactgtatgcctcaccctggaatagcagaatgctcagggggagatccgagaacgagaaggtgctcccagccccaggagcttccagtctggctctgatccttggccgacctagaggaaacctccacacacgccccttttgtgctaatggtgcagtttgtgtccccctctgcccatcactgtgctgtgcttgttcctgcctctgtgccttcccctatactgctcggacatgtcccctttcctctcctctacccagctaagcccttctgatccacggggcccggcttcccaaaccacccagcccacattcctccttcctgctccgaacaggtcccgtgtgagcccctgcccccgaattgcgtgctgtcccatggacgctccagtctcttccgtgtgtgtcttgagtccctaactagacagttagctccctgagggcaagggactgtcatttcctcttgagtcctaccagggtctagcacaggactgggctcctaactctcaggaaacacttgtcggctgactggtgcctcaagcgctggagcttgtcggtggccggtaatgggcagtgcacgtggggagagggtatgtgagttaactcaagggtgccttttcttgggctgtgggctggctcccctgggtcaaaagtggatgtcggaggcctcaggctcttacctccttggggcagtgggagcatcagggacccccacccccaccccggctctgcaggagtgcacggaagtggtcgtccagcctggatatttctacaggttgctgactcctgcgggagctgactgagtggaataaatgttctctcaacataaaaaaaagtaa

SEQ ID NO: 380340 - DNA, 1982 bp, Homo sapiens
ggggttgcgacgcagagtttaccatatttctccagggttgctccggccgcagaagttggcaaggttgtgtgtaaggtcgggtggggtggggtcagctctcccgattaatgcagctatttgataagagcaacgtcgcgggacgcttgccgtctttatgggggcggggagaaggggcgcgggtgtcgctgcgggagagttaccgtatttgcgttgagcagcgcagactgtagagcaaagagctgcggccggagaccggaggagcaggggctcagctgggctggactggtgattgcagctggaagtgcccatgaccgagctggcgtcctccgggggcgggtcccctgcgggggacggggaggagggtctgggggacgagcgaggcctggtcatccaccaccctgcagaggagcagccctaccgctgcccgctgtgcggccagaccttctcgcagcagcccagcctggtgcggcaccagaaggcgcacgccggagcgggccgcgcggctgccttcgtgtgtcccgagtgcggcaaggccttcagcgtcaagcacaacctcgaggtgcaccagcgcacgcacaccggggagcggcccttcccctgccccgagtgcggccgctgcttcagcctcaagcagaacctgctcacgcaccagcgcatccacagcggcgagaagccgcaccagtgcgcgcagtgcggccgctgcttccgcgagccgcgcttcctgctcaaccaccagcgcacccacgcgcgcatgcccgcgccgcacccgcgccgccccggcgtcttcggggagcggcggccctacttctgcccccgctgcggcaagagcttcgcgcgcgagggctcgctcaagacccatcagcgcagccacggccacgggcccgagggccaggcggcccacttaggacgcgtgctatgatgcgcccggggcctgctgccgacggctgcttcccgccccgcacgtgcgtccccgacccctggagatggccctgggccgcagctccctctctagatgggatcccgggagaggggcagcgctggcttgggctcttgaaggtgtgggccgccgccaggctccggccgcccgctcgcgttcctccctcgggaccctctggctggctgcgcacagctgcttccggctcctgccatggttctccttctctggcccatccggcctagagcagttgcagagtgggcaggatcttaagacccgataggtgcagaacccatctggacacggagaccaggaatggagttccatggaggcctggctggcactgcacccgggcatgaggacacatccagtaagaagacctgcctcaagaggtgcactgcggtgaccagtggaggtgactggttggagcctggaattggaagcagattccaagctctggtggacaaactctccaggcctggtgggaatcacagctggggcagacctcatcctggctgcctggccacaggcccccactctctgccactggtggtaggacgatgcctgtgtggagagctggcttctctgctcccgcctggtccaccacttggctagagttcagagacaggaagtgattggtctaagctaacacagcaagttggtggcagacctggttctagaggcaaaaccttcttccagatgtgaatgaaacctgcaggcttcattttcctttctgagcagtgcttcttagctctttggagacacgaagcccttggaaaatctgatgaaggttacggaccttccctaggaaaacagataactgacgtagactcaaaaaccccaagcaatttcaggagccactggactccctgaatgaaacccatccctggactccaggctaagaacctcagccctggggacttcacctgctgccctttccttacctgtcacacattgagccccgagtcaaggccactgtacaagtagtgcccctccctccccctggccaagcctccttcccttgttcaggaataaagaattccgagga

SEQ ID NO: 380341 - DNA, 2358 bp, Homo sapiens
gaacccggcggggggaggttggggacgggcctggcagttgtgaactcgaacctgccgctgtcgccgcggcggggcggggagcgagagtgggccgcggaggccggccttcgggctccatggacgggcgccgcgtccctgcacagcccgccgcagagatggcaggaaagggacacagccggcgctgatgctgggaggcctccagggatggagagtggcctggctggcaacggcacaggagctgggctggtgatgaaggtcaagcaggagaagccggagcggctgctgcagacgctggcgccgcaggccatgcttgtggagaaggacaaggagaacatctttcagcagcaccggggcctcccgccacgccagaccatggggcggcctcgagccctggggggacaggaggagtctgggagtccaaggtgggcccctcccactgagcaggatgcggggctggcaggccgggctcccgggtcagcctccggccccctgagcccctcgctttcctccggcgagggtcactttgtatgcctggactgcgggaagaggttcagctggtggtcgtccctgaagatccaccagcgcacccacaccggggagaagccgtacctctgcggcaagtgcggcaagagcttcagccagaagccgaacctggcgcgccaccagcggcaccacacgggcgagcgacccttctgctgccccgagtgcgcgcggcgcttcagccagaagcagcacctgctcaagcaccagaagacccactcccggcccgccacccactcgtgccccgagtgcgagcgctgcttccgtcaccaggtgggcctccgcatccaccagcgcgcgcacgcccgggaccgccagggctcccgcgccggcctgcacgagctgattcaggacgcggcggcgcgccgggcctgtcgcctgcagccggggccgccgcgggggcgccccgagtgggcctggctggggctctgccagggctggtggggccagcccggggcccgggccgcggtctccggccccgaggggccgggcgagccgcgccagttcatctgcaacgagtgtggcaagagcttcacctggtggtcgtcgctgaacatccaccagcgcatccacactggcgagcgcccctatgcgtgccccgagtgcggccgccgcttcagccagaagcccaacttgacgcggcacctgcgcaaccacacaggcgagcgcccgcacccctgcccgcactgtggccgcggcttccgccagaagcagcacctgctcaagcacctgcgcacgcacctgcccggcgcccaggctgcgccctgccccagctgcggtaagagctgccgcagccgcgccgcgctgcgcgcccaccagcgcgcccacgctgtcgctgagcccgccgttccggccggggaaccgggcgaccagccgcaggccgaggccatcccgggcttggccgcgaggccgcggagctcccaacggtccccgggggcccgggacacactgtggggccggggacaagcgggcctcgctgggcctggcgagccgcgccagttcatctgcaacgagtgcggcaagagcttctcgtggtggtcggcgctcaccatccaccagcgcatccacacgggtgagcggccctacccgtgccccgagtgcggccgccgcttcagccagaagcccaacctgacgcggcaccggcgcaaccacacaggcgagcggccctacctgtgtcccgcctgcggccgcggcttcagccagaagcagcacctgctcaagcaccagcgcgtgcaccgcgcggcccctgcgtgcagccccaaggaggaggcgcgctagtggactggacctcagcggacccgtggtggtgcgggggatgtttgcggggtgtgtgtggggagtgggggtggccaggattgctggctcttagaaccccttagagcgggaccggtggattccttaaggctctgaagggctgagaacagttctagaagcgtcccaaagggtgctgggaaaggtcccagcgtgggttgagggaggagggaagatccgagttcctcaccgcgggccgggatgtgaccaccctcttcagaggttggaccccaggcttcaagcaccgagtgaggggtctgttggggacgctgggagagtctctggtgtgaagtggcttaggtctggactggtcagctgtggcaccagccggtcctgcccacgcttcaggatggccgggggctgcccctgtgggagagttgccaagactcggcgataccaaggatggaagccagaggctgtggcgagggagagccaagcatattcccagcaccagggccactgctggcacgtcgtagacatccaataaatatttttggaaggagtaaa

SEQ ID NO: 380342 - DNA, 3046 bp, Homo sapiens
ggggttgcgacgcagagtttaccatatttctccagggttgctccggccgcagaagttggcaaggttgtgtgtaaggtcgggtggggtggggtcagctctcccgattaatgcagctatttgataagagcaacgtcgcgggacgcttgccgtctttatgggggcggggagaaggggcgcgggtgtcgctgcgggagagttaccgtatttgcgttgagcagcgcagactgtagagcaaagagctgcggccggagaccggaggagcaggggctcagctgggctggactggtgattgcagctggaagtgcccatgaccgagctggcgtcctccgggggcgggtcccctgcgggggacggggaggagggtctgggggacgagcgaggcctggtcatccaccaccctgcagaggagcagccctaccgctgcccgctgtgcggccagaccttctcgcagcagcccagcctggtgcggcaccagaaggcgcacgccggagcgggccgcgcggctgccttcgtgtgtcccgagtgcggcaaggccttcagcgtcaagcacaacctcgaggtgcaccagcgcacgcacaccggggagcggcccttcccctgccccgagtgcggccgctgcttcagcctcaagcagaacctgctcacgcaccagcgcatccacagcggcgagaagccgcaccagtgcgcgcagtgcggccgctgcttccgcgagccgcgcttcctgctcaaccaccagcgcacccacgcgcgcatgcccgcgccgcacccgcgccgccccggcgtcttcggggagcggcggccctacttctgcccccgctgcggcaagagcttcgcgcgcgagggctcgctcaagacccatcagcgcagccacggccacgggcccgagggccaggcggcccacttaggacgcgtgctatgatgcgcccggggcctgctgccgacggctgcttcccgccccgcacgtgcgtccccgacccctggagatggccctgggccgcagctccctctctagatgggatcccgggagaggggcagcgctggcttgggctcttgaaggtgtgggccgccgccaggctccggccgcccgctcgcgttcctccctcgggaccctctggctggctgcgcacagctgcttccggctcctgccatggttctccttctctggcccatccggcctagagcagttgcagagtgggcaggatcttaagacccgataggtgcagaacccatctggacacggagaccaggaatggagttccatggaggcctggctggcactgcacccgggcatgaggacacatccagtaagaagacctgcctcaagaggtgcactgcggtgaccagtggaggtgactggttggagcctggaattggaagcagattccaagctctggtggacaaactctccaggcctggtgggaatcacagctggggcagacctcatcctggctgcctggccacaggcccccactctctgccactggtggtaggacgatgcctgtgtggagagctggcttctctgctcccgcctggtccaccacttggctagagttcagagacaggaagtgattggtctaagctaacacagcaagttggtggcagacctggttctagaggcaaaaccttcttccagatgtgaatgaaacctgcaggcttcattttcctttctgagcagtgcttcttagctctttggagacacgaagcccttggaaaatctgatgaaggttacggaccttccctaggaaaacagataactgacgtagactcaaaaaccccaagcaatttcaggagccactggactccctgaatgaaacccatccctggactccaggctaagaacctcagccctggggacttcacctgctgccctttccttacctgtcacacattgagccccgagtcaaggccactgtacaagtagtgcccctccctccccctggccaagcctccttcccttgttcaggaataaagaattccgaggagccctttttagtcattcccttctcccagacctaacgaatggtgcgtcaggtttctggagcctcatttcccttccccagacattggcagaggtcccttgggctagattttctcttctggttttgtttcttgttctgcctgactggccgctggcttccacaaaggagccctttgctcctggcctgggctctgatttcactgtgtggtctcaggggaagctggactgctgtggacgctggtgggagcttgagtctggtctgagtctgccccaggaagaaagaatcctgcttccaccaaccaagcccagtcagcggttcctcccaactggccaagtgttcagcccagtgggctggggaggaagaggatgagggcctcgctcctggtgcctgtggctctgggcagggtgagaggtcggtggaggatctttctgtgtgttctctgagtatgcagcagtgcagttgaagggaacagggcccaggcaggcagcaggacgaggactcctcccatcttcacacctgaaccagtcagcctggaagctacaagttctcacctgcctccccagaatgaacatcagaaaaggcaaaactgaccagggctgggatgggtttgggtcagcgtggttggagggcagcctgtggatccctgcactggagtcttgctgtcttcgatgcaggttggatcatacattgttacctcctactgtatgcctcaccctggaatagcagaatgctcagggggagatccgagaacgagaaggtgctcccagccccaggagcttccagtctggctctgatccttggccgacctagaggaaacctccacacacgccccttttgtgctaatggtgcagtttgtgtccccctctgcccatcactgtgctgtgtgtctgctctgtgcttccttttgtcgattgtccttctctcctaccgtagcttgattccgggcgttccaccccgcctccctctgtcgaggccgtgcctcccatgttggtcgggccttcggttgcacaggccgggggctcgccgggaggcccaggccccgcgggggtgtttctgtctcggggtgc

SEQ ID NO: 380343 - DNA, 1991 bp, Homo sapiens
gaacccggcggggggaggttggggacgggcctggcagttgtgaactcgaacctgccgctgtcgccgcggcggggcggggagcgagagtgggccgcggaggccggccttcgggctccatggacgggcgccgcgtccctgcacagcccgccgcagaggtaaggctggcctctctgcagtcagaggtctgagctctgccatggggataggggtgtctttattactgcagttttctctaacacctgggggctaccggagtgtgggccgaagcaggcgctgcagccgcggaagtatccccaggaacatccccaagaggagctggaaaaagcctcatccccagctctgcagtctccagggtagagtctggcctttgctgtgctcccaaaccacgccacaacaggggtgcacgggcgtccccatcccggcggaaggaaatggccctttctcatatcctggggtcttccctgtgcacagtctgacactgggaatgagtgacctttgtgttccctgagaagagagagtgcgctctagggaatttagaaggatgtgtctggagcttgtgagcaggcacagaagggcccttaggagcctaactgcttccttcctccttccgcggaggaggctcctgtgcaggaatctgggctcccctgagctgtggaagagctgaacatggggcagcccctggcgaggttggggcaggaccgggcaggggactgagattgcagtctcatcttccctccccttctattgccccagtaatctccagcaccccgagggaggcagagccggtgatcaggccccgagggcagcaggctgtgggtgttccttggattcagggagagcattccttcctgcaatgtcctaatttgtgtgggtggaagagggcaggcgggcagaatgggggcacagtctgggcaggcggtggtctggcgttagactgccgggagtagcacccagggctctgctcctgttccccgagaagggctgttctcacttgtcctccagcctcctacggagactgcagttagtgatgctgaaagtgcctcccctgtggggctaggaatgaaaagctatagacacctttttctctgagatctttgcaaacccaggcgctttagaggaaagaacactggcctgggagtttaaagacctgttccctagtcttgattctgctgttggcttactgtgtcaccttgggcaggtctcgtcatctttgatgtctcacagttgcttcatctgttaaacagggagctcagtgtctgtttgtccagcttctcagagttgctgtgcagctcggatgtggcataggaaacagcagacacagggagagggcagcataaggcactgtagggagcagtggccacattttctggtgagtcctgtggcaggaatgtttgtgcattcagcactggagcatttactccctgtctgacactggggtagctgccatgagggggattctagtatcagagtccctcccttctggaagtttccagggcaacaaagacataagacaaacatccttgaaatgttatctaaaaacccaagattgaaataatacataccacacaaggaaacaggagagtagtctagctccatgtccggggctctaggggttcatagatggcagctcctgtccggggctgaggttgggaggggagaaacaggggcagagtgagttggtctctggagtgactgtgcttttccaccctcagcgggactcagaagagacgatgtgaagtgggagggccctgcatggctgccaccgatcttctggcctccagagtcccagacctgggaggatccgggtgaggacagcagtcagtggccatctgtgccagccaggaggccatcgtggccactgtaagccttccggtggtgtctgggtcacaccgcgtgcagcgctgcctgctgcctgatgtgcgtgttcgcatgccctttaatgcgcagtctgtgtgcaccaactggttgctgcactctgtggagtcagtggg

SEQ ID NO: 380344 - DNA, 475 bp, Homo sapiens
tttggtggagatggggttgcaccatgttgctcaggctggttttgaactcctgagcttaggagatccacctccctcagccttccaaagtgctgggattacaggtgtgatccacggagcccggccatacttgtgtatcattaataagaaggtgaaaatagtagaggttctagttttctcagatgcaaaataagatctcttttactatcatgtatgaaaaattttattttgtactcttatttcatgctcccatttgggaactgtattattttccactattgctgtaacaaatcaccacaaactagtggcttaaaacaacatcaatttattatcttacagttcaggaggtcaaattcttagttcaaggctgggaccgcaggcgtacgaccacacccggcctgatacatatgtattttagaaaacatgaaaaatattaaaaagtaggccaggcgtggtggcttatgcctgtgatcccaga

SEQ ID NO: 380345 - DNA, 351 bp, Homo sapiens
  misc_feature (24)..(24): n is a, c, g, or t
ggcaagaaggcgtcggcggcgcantgcggatccagaaggacataaacggcagcttgttcctccaggctggtgggcttggtgccctcggccttgggatgcttatcacagtcctttgggaccagaacactggatatcagtgcagcctctgggccagcttcagaggctgttagagcatcattgctgctgtggctgatgcttcctttcctcagtaagtcacaaaagtcgtgttggccatccaggttaccgagtgacttaatttccagaaaatttaatattgagtcattattgtatgcattttcactgttgccattttgtatcctcgtaggtagtctatgaagtaccactgggtca

SEQ ID NO: 380346 - DNA, 413 bp, Homo sapiens
gagctcggtccccacttatgcggggcttctcgtttggggaacaaaaaaataaagttaagaaaaacattttgcatagattcttctaaaatacacacacacatatacacacactcatacttaggattgttctttttgtaatagtaataccaacagacaaaactccaaaaaagaaaattctaatagtattctccagatttcatcatccacctactgccccttgtggagagggaagatctcatatccttcctgatgtcaacatccacctatatgctaatgcttcccacatccatctcaagcccccatctgcgatgtcagtattgtatacgtcattgcctgctgggtctccactgcccttcctcaaaatcaacttaggtaaaatgaaattctcttcttccctcccttctccctcaccc

SEQ ID NO: 380347 - DNA, 878 bp, Homo sapiens
gcaggaaattaaataatagattactttctattagtaaagaccaatatagtggctataattatagaacactaaaatttttgtcgggcatgttagctcacgtctataatcccagcactttggtaggccaaggcaggagtatcgctgagcccatgagtttgagaccagcctgggcaacatagcaagaccctgtctctacaaaaaattaaaaagttagccacatgcagtagtgcatacctctggtcccagctagttgggaggctaaggcaggaggattccttgagcccaggagttcaagtctgcagtgagctgtgactgtgccactgcattccagcctgggcaacagagtgagactctgtctcaaaaaaaaaaaaaaagaaaaagaaaaaaaaatacatatatatatacacacacacacacatatatgtagtcttaaattatatgtggggttaaaacaagtcagcaagttttccagcttatattaccttaatatcttctcgtttggggaacaaaaaaataaagttaagaaaaacattttgcatagattcttctaaaatacacacacacatatacacacactcatacttaggattgttctttttgtaatagtaataccaacagacaaaactccaaaaaagaaaattctaatagtattctccagatttcatcatccacctactgccccttgtggagagggaagatctcatatccttcctgatgtcaacatccacctatatgctaatgcttcccacatccatctcaagcccccatctgcgatgtcagtattgtatacgtcattgcctgctgggtctccactgcccttcctcaaaatcaacttaggtaaaatgaaattctcttcttccctcccttctccctcaccc

SEQ ID NO: 380348 - DNA, 1049 bp, Homo sapiens
ggaggactgagcccgggagagagaggggaggggtcggcgcgcgaccgggtcatgctaggtgcagactggccggtcgcttcccgccctccagccacccgcagctccccggcaggcgaagggcggccgcgcgggtgtgggccgagagagggaggcggctcggctggagcgcgccgtccgcccgacccccgccgcctctcgggcgcctgcgctcacgctgcggggcccagcgcattgtgagccgggtcgagctccacgctggcagcgtctgagagctgtcctgggccggaggtggcgcgaaccctgtgcggcctagagtgggcctggggaagccagctgccatgttctgagtactctctggaagggcctgcatggcaaggaactgatgtttccagccagcagccagcaagaactgcaagccttgtgaatgagcttggaagcagatcctcccctcactcaagccatgatatgacaacagcctgagacccagaggacacaaaccacagtcaaaaaaggtcttcctgagttctgaaggtcaagcaattagaattttctcaggcttgtagaagagtggaattctggaaaccagtcttcgcctcaggggagcatctgttggaagttcttagggatgctcaggcatatggcctcagaaacatgggctattgagacagagaaaaagacaactctggaaggagagagcctggccttacagaagacatctgaactatcaatcaacagaaatctcacgtatagttgaagaatcagaaatctgagcgtaggaagaagtgggttagccctggagaaaggaaaaggaggatcatggttctctgcaaagagctggaagctaaaaagcaggctgtgtttacttaccaaccaggactcagtgggatctttgccagcttccaatatggccttaaaagtatatgaaatccaagaaatatttctgcaaagcaagagatcttcactgctttattttccaccacctgaatccttgcagtgagtgtagtgtgtatctaatcaatctattaaaaaatacttcaaaagttctaaaa

SEQ ID NO: 380349 - DNA, 646 bp, Homo sapiens
ggaggactgagcccgggagagagaggggaggggtcggcgcgcgaccgggtcatgctaggtgcagactggccggtcgcttcccgccctccagccacccgcagctccccggcaggcgaagggcggccgcgcgggtgtgggccgagagagggaggcggctcggctggagcgcgccgtccgcccgacccccgccgcctctcgggcgcctgcgctcacgctgcggggcccagcgcattgtgagccgggtcgagctccacgctggcagcgtctgagagctgtcctgggccggaggtggcgcgaaccctgtgcggcctagagtgggcctgggatgcctcagcactaatgatcatgatcagagaccccgagttctctcgtgctgctacgcttcgcaacacatagcacaaatggaatatgtgttgacacacccctctgaagttaagatctttgatattaagaccctgacttttttccctttcattcttccgaaccctctgtgtactttgagcagcactgtggttgattaataaatcatcaaatgtgaaaggaagaaagcgaccttcctgtgtggaaaagcagggtatcttgcgaggctgtatgagagagtattcggtagaatcaggagctgtggacgcattcctgattttgtttt

SEQ ID NO: 380350 - DNA, 502 bp, Homo sapiens
acagtgtaggatccagccaacaggaccaggacagcactggctacactggcttatcgattacatcccacaatagaaaggatgctcaggcatatggcctcagaaacatgggctattgagacagagaaaaagacaactctggaaggagagagcctggccttacagaagacatctgaactatcaatcaacagaaatctcacgtatagttgaagaatcagaaatctgagcgtaggaagaagtgggttagccctggagaaaggaaaaggaggatcatggttctctgcaaagagctggaagctaaaaagcaggctgtgtttacttaccaaccaggactcagtgggatctttgccagcttccaatatggccttaaaagtatatgaaatccaagaaatatttctgcaaagcaagagatcttcactgctttattttccaccacctgaatccttgcagtgagtgtagtgtgtatctaatcaatctattaaaaaatacttcaaaagttctaaaa

SEQ ID NO: 380351 - DNA, 782 bp, Homo sapiens
ggaggactgagcccgggagagagaggggaggggtcggcgcgcgaccgggtcatgctaggtgcagactggccggtcgcttcccgccctccagccacccgcagctccccggcaggcgaagggcggccgcgcgggtgtgggccgagagagggaggcggctcggctggagcgcgccgtccgcccgacccccgccgcctctcgggcgcctgcgctcacgctgcggggcccagcgcattgtgagccgggtcgagctccacgctggcagcgtctgagagctgtcctgggccggaggtggcgcgaaccctgtgcggcctagagtgggcctggggaagccagctgccatgttctgagtactctctggaagggcctgcatggcaaggaactgatgtttccagccagcagccagcaagaactgcaagccttgtgaatgagcttggaagcagatcctcccctcactcaagccatgatatgacaacagcctgagacccagagaatcagaaatctgagcgtaggaagaagtgggttagccctggagaaaggaaaaggaggatcatggttctctgcaaagagctggaagctaaaaagcaggctgtgtttacttaccaaccaggactcagtgggatctttgccagcttccaatatggccttaaaagtatatgaaatccaagaaatatttctgcaaagcaagagatcttcactgctttattttccaccacctgaatccttgcagtgagtgtagtgtgtatctaatcaatctattaaaaaatacttcaaaagttctaaaa

SEQ ID NO: 380352 - DNA, 668 bp, Homo sapiens
actgaagtaactgaggcacccatgctggcctgcaccagacagtgtgtgtgagacccttgaacacagtggaaatgcaggcatcactgaggcacccagcctcaggctgaggacagagtgcctgtgctgtaattagatgtgactcctccacagccaagagggcctacactctcagtgacgattcttccatgacattcaggcactttccccaggtacagccatggcagaagatggctgggcacaagggaccagctgcacgctgctcctggagtcagctctccaggacaggcctcaaccttgggcctcttcagaagcactgctcctatttcttgccagccgatctcagcccaagccacccaagtctgcacccccctgagtacagtggagatattacattaactttgaaataaaaggagagactctaggtctcactgctcccttccagaagcttcttttgcctcttgcaaacatgggtggctttgggaggattgccagcacacttcatataccagaagcacctcagccctgaggtcttggggacatagataggttcttcatctcacgtgatggggactgagctctttttggtgggtaaagtggattgaaataaaggaggagggctgacaggaatttgagactagcctgggcaacaaagcaagaccgcatctcta

SEQ ID NO: 380353 - DNA, 646 bp, Homo sapiens
ggaggactgagcccgggagagagaggggaggggtcggcgcgcgaccgggtcatgctaggtgcagactggccggtcgcttcccgccctccagccacccgcagctccccggcaggcgaagggcggccgcgcgggtgtgggccgagagagggaggcggctcggctggagcgcgccgtccgcccgacccccgccgcctctcgggcgcctgcgctcacgctgcggggcccagcgcattgtgagccgggtcgagctccacgctggcagcgtctgagagctgtcctgggccggaggtggcgcgaaccctgtgcggcctagagtgggcctggggaagccagctgccatgttctgagtactctctggaagggcctgcatggcaaggaactgatgtttccagccagcagccagcaagaactgcaagccttgtgaatgagcttggaagcagatcctcccctcactcaagccatgatatgacaacagcctgagacccagaggtcagtaaattgtcaagtttgtatatctagcaaatagcagagccaaaattcctgtcactcaaactcaagatttcctcatctataaaatgtagttgttccacatggccagatgcaaagtgtcatttagctataagagtctaatgaatctaggtcccaa

SEQ ID NO: 380354 - DNA, 730 bp, Homo sapiens
ggaggactgagcccgggagagagaggggaggggtcggcgcgcgaccgggtcatgctaggtgcagactggccggtcgcttcccgccctccagccacccgcagctccccggcaggcgaagggcggccgcgcgggtgtgggccgagagagggaggcggctcggctggagcgcgccgtccgcccgacccccgccgcctctcgggcgcctgcgctcacgctgcggggcccagcgcattgtgagccgggtcgagctccacgctggcagcgtctgagagctgtcctgggccggaggtggcgcgaaccctgtgcggcctagagtgggcctggggattggtggagtcagtcccaagcaggacccgcgttggagaggggattactgatgttacaagcgcacattacttcaatcccctagatgcctcagcactaatgatcatgatcagagaccccgagttctctcgtgctgctacgcttcgcaacacatagcacaaatggaatatgtgttgacacacccctctgaagttaagatctttgatattaagaccctgacttttttccctttcattcttccgaaccctctgtgtactttgagcagcactgtggttgattaataaatcatcaaatgtgaaaggaagaaagcgaccttcctgtgtggaaaagcagggtatcttgcgaggctgtatgagagagtattcggtagaatcaggagctgtggacgcattcctgattttgtttt

SEQ ID NO: 380355 - DNA, 679 bp, Homo sapiens
gatctaccaagtagacacactcaaggatgttattcaagaacaggaactagtttcaagaagcaggaactggccagttcctgcttcttgaaacacatctcatctcctcatacctcccatgcctcatctccatcatatacaatcagttaacaggttacagtccggtccatttgtcatgataccactgcttctctttttaaatgtgtattgaaaaatagaaaaacccatcctaaaatttatatgaaatctcaagggcccctgaatagccaaaacaactgatgtagaacaaagttggaggggttcacactttctgatttcaagacttactacaaatctacagtagtcaaaacaatatggtactagtgtgaggacatatagaccaatggaatagaatagagagcccagaaataaaccctcacatatatggtcaattgattttcaagaaggatgccaagaccattcaatgggaaaaggacaatctttgtaacaaatggtgctgggaaaactgcatatccatatgcaaaagaatgaagttggattcttaccttacatcatatatacaaattaactcaaaatggatcaaacatctaaaggtaagacctactcttagaagaaaatgcaggagaaaatatgacattggatttggcatatttgtttgatgtgataccaaagacaaaggtaa

SEQ ID NO: 380356 - DNA, 1110 bp, Homo sapiens
ggaggactgagcccgggagagagaggggaggggtcggcgcgcgaccgggtcatgctaggtgcagactggccggtcgcttcccgccctccagccacccgcagctccccggcaggcgaagggcggccgcgcgggtgtgggccgagagagggaggcggctcggctggagcgcgccgtccgcccgacccccgccgcctctcgggcgcctgcgctcacgctgcggggcccagcgcattgtgagccgggtcgagctccacgctggcagcgtctgagagctgtcctgggccggaggtggcgcgaaccctgtgcggcctagagtgggcctggggaagccagctgccatgttctgagtactctctggaagggcctgcatggcaaggaactgatgtttccagccagcagccagcaagaactgcaagccttgtgaatgagcttggaagcagatcctcccctcactcaagccatgatatgacaacagcctgagacccagagttttatggatacttcaaaaatcaagaaagaataagaagatagtaaagaatgttcctctcagccaccctgcatccatccatttcccaccccaacctgcaaaaggtaaccactggatgggcccggtggctcgcacctgtaatcccagcatcttgggaggccaaggtacagccatggcagaagatggctgggcacaagggaccagctgcacgctgctcctggagtcagctctccaggacaggcctcaaccttgggcctcttcagaagcactgctcctatttcttgccagccgatctcagcccaagccacccaagtctgcacccccctgagtacagtggagatattacattaactttgaaataaaaggagagactctaggtctcactgctcccttccagaagcttcttttgcctcttgcaaacatgggtggctttgggaggattgccagcacacttcatataccagaagcacctcagccctgaggtcttggggacatagataggttcttcatctcacgtgatggggactgagctctttttggtgggtaaagtggattgaaataaaggaggagggctgacaggaatttgagactagcctgggcaacaaagcaagaccgcatctcta

SEQ ID NO: 380357 - DNA, 1017 bp, Homo sapiens
ggaggactgagcccgggagagagaggggaggggtcggcgcgcgaccgggtcatgctaggtgcagactggccggtcgcttcccgccctccagccacccgcagctccccggcaggcgaagggcggccgcgcgggtgtgggccgagagagggaggcggctcggctggagcgcgccgtccgcccgacccccgccgcctctcgggcgcctgcgctcacgctgcggggcccagcgcattgtgagccgggtcgagctccacgctggcagcgtctgagagctgtcctgggccggaggtggcgcgaaccctgtgcggcctagagtgggcctggggtaagcctgtcggcgccgctgccgagccttcgcgtccagctccctccgctttgtgaggcctgtagtttaccctggggagtgtcctcccgggctgaggcgcccgccctcggtgatgcggtactcctttagggaagcgagttcctcgtggccagaaaggaccggcccagtgtccgggtgttaaaaagggttgtgaccacgtgaaaatgtcctcagtgctcgaacgttgcaatacggtgcagtggaaattctttaaaggaatatggcttttatgtcttcatttttaaaaggattggtggagtcagtcccaagcaggacccgcgttggagaggggattactgatgttacaagcgcacattacttcaatcccctagatgcctcagcactaatgatcatgatcagagaccccgagttctctcgtgctgctacgcttcgcaacacatagcacaaatggaatatgtgttgacacacccctctgaagttaagatctttgatattaagaccctgacttttttccctttcattcttccgaaccctctgtgtactttgagcagcactgtggttgattaataaatcatcaaatgtgaaaggaagaaagcgaccttcctgtgtggaaaagcagggtatcttgcgaggctgtatgagagagtattcggtagaatcaggagctgtggacgcattcctgattttgtttt

SEQ ID NO: 380358 - DNA, 768 bp, Homo sapiens
ggaggactgagcccgggagagagaggggaggggtcggcgcgcgaccgggtcatgctaggtgcagactggccggtcgcttcccgccctccagccacccgcagctccccggcaggcgaagggcggccgcgcgggtgtgggccgagagagggaggcggctcggctggagcgcgccgtccgcccgacccccgccgcctctcgggcgcctgcgctcacgctgcggggcccagcgcattgtgagccgggtcgagctccacgctggcagcgtctgagagctgtcctgggccggaggtggcgcgaaccctgtgcggcctagagtgggcctggggaagccagctgccatgttctgagtactctctggaagggcctgcatggcaaggaactgatgtttccagccagcagccagcaagaactgcaagccttgtgaatgagcttggaagcagatcctcccctcactcaagccatgatatgacaacagcctgagacccagagttttatggatacttcaaaaatcaagaaagaataagaagatagtaaagaatgttcctctcagccaccctgcatccatccatttcccaccccaacctgcaaaaggtaaccactggatgggcccggtggctcgcacctgtaatcccagcatcttgggaggccaaggtgagcagatcacttgagcccaggagttcaagaccagcctaggtaacatggggaaaccccatctctacaaaaacaccaaaattagctggacgtggtggcgcatgcctgtagtctcag

SEQ ID NO: 380359 - DNA, 556 bp, Homo sapiens
ggaggactgagcccgggagagagaggggaggggtcggcgcgcgaccgggtcatgctaggtgcagactggccggtcgcttcccgccctccagccacccgcagctccccggcaggcgaagggcggccgcgcgggtgtgggccgagagagggaggcggctcggctggagcgcgccgtccgcccgacccccgccgcctctcgggcgcctgcgctcacgctgcggggcccagcgcattgtgagccgggtcgagctccacgctggcagcgtctgagagctgtcctgggccggaggtggcgcgaaccctgtgcggcctagagtgggcctggggaagccagctgccatgttctgagtactctctggaagggcctgcatggcaaggaactgatgtttccagccagcagccagcaagaactgcaagccttgtgaatgagcttggaagcagatcctcccctcactcaagccatgatatgacaacagcctgagacccagagttctgcatggctggagaggcctcaggaaacttacaatcatcttggaaggaaaaggggaagcagggcg

SEQ ID NO: 380360 - DNA, 158 bp, Homo sapiens
tggagaggggattactgatgttacaagcgcacattacttcaatcccctaggtctcattttcgcggtcgttttaatttttctactccacaacagacttttttttactaggggttctaagattacctacatagcttttaatttattttcatcttttttag

SEQ ID NO: 380361 - DNA, 915 bp, Homo sapiens
ggaggactgagcccgggagagagaggggaggggtcggcgcgcgaccgggtcatgctaggtgcagactggccggtcgcttcccgccctccagccacccgcagctccccggcaggcgaagggcggccgcgcgggtgtgggccgagagagggaggcggctcggctggagcgcgccgtccgcccgacccccgccgcctctcgggcgcctgcgctcacgctgcggggcccagcgcattgtgagccgggtcgagctccacgctggcagcgtctgagagctgtcctgggccggaggtggcgcgaaccctgtgcggcctagagtgggcctggggaagccagctgccatgttctgagtactctctggaagggcctgcatggcaaggaactgatgtttccagccagcagccagcaagaactgcaagccttgtgaatgagcttggaagcagatcctcccctcactcaagccatgatatgacaacagcctgagacccagagggatgctcaggcatatggcctcagaaacatgggctattgagacagagaaaaagacaactctggaaggagagagcctggccttacagaagacatctgaactatcaatcaacagaaatctcacgtatagttgaagaatcagaaatctgagcgtaggaagaagtgggttagccctggagaaaggaaaaggaggatcatggttctctgcaaagagctggaagctaaaaagcaggctgtgtttacttaccaaccaggactcagtgggatctttgccagcttccaatatggccttaaaagtatatgaaatccaagaaatatttctgcaaagcaagagatcttcactgctttattttccaccacctgaatccttgcagtgagtgtagtgtgtatctaatcaatctattaaaaaatacttcaaaagttctaaaa

SEQ ID NO: 380362 - DNA, 959 bp, Homo sapiens
ggaggactgagcccgggagagagaggggaggggtcggcgcgcgaccgggtcatgctaggtgcagactggccggtcgcttcccgccctccagccacccgcagctccccggcaggcgaagggcggccgcgcgggtgtgggccgagagagggaggcggctcggctggagcgcgccgtccgcccgacccccgccgcctctcgggcgcctgcgctcacgctgcggggcccagcgcattgtgagccgggtcgagctccacgctggcagcgtctgagagctgtcctgggccggaggtggcgcgaaccctgtgcggcctagagtgggcctggggaagccagctgccatgttctgagtactctctggaagggcctgcatggcaaggaactgatgtttccagccagcagccagcaagaactgcaagccttgtgaatgagcttggaagcagatcctcccctcactcaagccatgatatgacaacagcctgagacccagagaaatagaaaaacccatcctaaaatttatatgaaatctcaagggcccctgaatagccaaaacaactgatgtagaacaaagttggaggggttcacactttctgatttcaagacttactacaaatctacagtagtcaaaacaatatggtactagtgtgaggacatatagaccaatggaatagaatagagagcccagaaataaaccctcacatatatggtcaattgattttcaagaaggatgccaagaccattcaatgggaaaaggacaatctttgtaacaaatggtgctgggaaaactgcatatccatatgcaaaagaatgaagttggattcttaccttacatcatatatacaaattaactcaaaatggatcaaacatctaaaggtaagacctactcttagaagaaaatgcaggagaaaatatgacattggatttggcatatttgtttgatgtgataccaaagacaaaggtaa

SEQ ID NO: 380363 - DNA, 885 bp, Homo sapiens
ggaggactgagcccgggagagagaggggaggggtcggcgcgcgaccgggtcatgctaggtgcagactggccggtcgcttcccgccctccagccacccgcagctccccggcaggcgaagggcggccgcgcgggtgtgggccgagagagggaggcggctcggctggagcgcgccgtccgcccgacccccgccgcctctcgggcgcctgcgctcacgctgcggggcccagcgcattgtgagccgggtcgagctccacgctggcagcgtctgagagctgtcctgggccggaggtggcgcgaaccctgtgcggcctagagtgggcctggggaagccagctgccatgttctgagtactctctggaagggcctgcatggcaaggaactgatgtttccagccagcagccagcaagaactgcaagccttgtgaatgagcttggaagcagatcctcccctcactcaagccatgatatgacaacagcctgagacccagaggacacaaaccacagtcaaaaaaggtcttcctgagttctgaaggtcaagcaattagaattttctcaggcttgtagaagagtggaattctggaaaccagtcttcgcctcaggggagcatctgttggaagttcttagggatgctcaggcatatggcctcagaaacatgggctattgagacagagaaaaagacaactctggaaggagagagcctggccttacagaagacatctgaactatcaatcaacagaaatctcacgtatagttgaaggactctcttgtagggtaggtctaccagctgcacatgtcaggacaaggaggtggaaccaacttacgggtgtctggggaagacacttggcagccctttcctagaagccaaaatcagagccaaactccgcca

SEQ ID NO: 380364 - DNA, 944 bp, Homo sapiens
ggaggactgagcccgggagagagaggggaggggtcggcgcgcgaccgggtcatgctaggtgcagactggccggtcgcttcccgccctccagccacccgcagctccccggcaggcgaagggcggccgcgcgggtgtgggccgagagagggaggcggctcggctggagcgcgccgtccgcccgacccccgccgcctctcgggcgcctgcgctcacgctgcggggcccagcgcattgtgagccgggtcgagctccacgctggcagcgtctgagagctgtcctgggccggaggtggcgcgaaccctgtgcggcctagagtgggcctggggaagccagctgccatgttctgagtactctctggaagggcctgcatggcaaggaactgatgtttccagccagcagccagcaagaactgcaagccttgtgaatgagcttggaagcagatcctcccctcactcaagccatgatatgacaacagcctgagacccagagttttatggatacttcaaaaatcaagaaagaataagaagatagtaaagaatgttcctctcagccaccctgcatccatccatttcccaccccaacctgcaaaaggtaaccactggatgggcccggtggctcgcacctgtaatcccagcatcttgggaggccaagaatcagaaatctgagcgtaggaagaagtgggttagccctggagaaaggaaaaggaggatcatggttctctgcaaagagctggaagctaaaaagcaggctgtgtttacttaccaaccaggactcagtgggatctttgccagcttccaatatggccttaaaagtatatgaaatccaagaaatatttctgcaaagcaagagatcttcactgctttattttccaccacctgaatccttgcagtgagtgtagtgtgtatctaatcaatctattaaaaaatacttcaaaagttctaaaa

SEQ ID NO: 380365 - DNA, 116 bp, Homo sapiens
cttaaagaagaaaatatataaaataggtcaatgagaaaaagttgaaaggacaggcaaagggtaatttaaatccatacttagaagggaaacatttctctaatgaaaactgtgaaaac

SEQ ID NO: 380366 - DNA, 430 bp, Homo sapiens
tccatagctatcttataccctgctgtatcctcagcatttggcttggtaccttactcatggtaccagcttaatgaataatgattaaattcatgaatcaatcaactgatatttaagtaacttatcctccacagacataaagtttagcaatggagctggagttctaaattcagatctttagtctattttatcatcttatctcttatatctctttattttatgatgccatctattatagaatcttgatactcttttatagattcaaaagtatctatccctttcctttatttaccccacccccaacaaccataagcttttttgtaaatgggattcctttattgcaaatcggttgtaatgctataatctttacatcttttgaatttacacattgtttttgctaattcagacacatacaaagcccttgaggcatagg

SEQ ID NO: 380367 - DNA, 453 bp, Homo sapiens
aagagggtctctttctgttgcccaggctggagtgtagtggtgcaatatgcaatcatctgttgacactgcttgctattgccacaattagctaaaaactaaactaataattccacactggccactataaccctgacactgtagcttaagaatatatagtcaatcgctaatcaatgttatttctgtaaatgaatgagaattcctggaaaacaactttgtatcagcccactctttttgtatctgtcccccttttaaaaatccacttgtggccaggcgcaatggcttaggcctgtaatcccggcactttgggaggccaaggcaggtggatcacaaggtcaggggttcaagatcagcctggccaagatggtgaaatcccatctctattaaaaatacaaaaattagctgggtgtgatggtggacgcctgtaatcgcagctacttgggaggctgaggcaga

SEQ ID NO: 380368 - DNA, 547 bp, Homo sapiens
  misc_feature (494)..(494): n is a, c, g, or t
  misc_feature (497)..(497): n is a, c, g, or t
  misc_feature (507)..(507): n is a, c, g, or t
  misc_feature (540)..(540): n is a, c, g, or t
  misc_feature (543)..(543): n is a, c, g, or t
cgcctgtaaacccagaactttggaaggccaaggcaggtgtattgcttgagcccaggggtttgggaccagcctgggcaacataagtagactctgtctctacaaaaaatgcaaaaagtagccgggagtggtggctcatgcctgtgatcccagctacttggaaggctgaggcaggaggatcacttgagcctgggagatggaggtggcagtgaggtgaaattgcaccactgcactccagcctgggtgacagagtgaacccttgatttaaaaaaaaaaagtagaacttacagatagaaaagtacacaaaataatatagatttatagctgaattaattaccagaaaacaaaaacatctgtataactactatccaggtcaaggaatagaatattaccggcatctaagaaattacccccttgagttaccccttccaatgtttatcttcttcatcttccccagattattctgattttttttttttcttgaagtgagcagaganttnccactgcacntcaccctgggtgacagagcgagactccatctcnggnaaga

SEQ ID NO: 380369 - DNA, 1783 bp, Homo sapiens
gcggtcctctgcgcgggatgtggctctgagcttcggggtagtccgcgaggctgggttccgtgctgaggggcgtcgcgtctggccgtgcgctgcgggagcgcgcgggcctggcccgctgtcctggccgctgcgaggcgctcagcttctttctgagtgttccgccgggttcgacagggtcgaggtcgccggcgcgaggctcccggatagctgaggggcgcgagggcgcctccagtctcccacctgccctcccgcgccgcggactaggctgccagtctaccccaccgggacgtctgcccccgcatgcaggagggggtgtgtcggcccaacggggtctcaggacctgtccctgctcctccaaagcccacgtcgcctgcggcgcccctcgggtctgcgccgcgttctcctttagcctcccgggcctctccgctgcccctcgcccccaggcaccagccacacctgcttccttctgttcccgcccgtggcctctgacacgccgtgccctggacccgaaatgcccgccccactcctggagcctccggtgtgtgagaggcacctttccttggggtcaggggcccggactctgaagccggcctggctttgcctgtgggccccgatcctcccagctcgagtccctcgccccagccgccgcgggccttcacctgtgctttggggacgacaggatggccaccctccttcccccaaagatttgagggttttgctccacgcgggagaaggtctgcctgtgccaccagccggcagcctttcacatgctgttgcgttacggggccctctgtgacctttccctaggccgaggggtgcttcgtctctgttcctgagagaccagaatttattcttggtttgtcaagccacatctgtaggaatgttgcccagttgcagcaggctggggtctgggacttgctcctttggcgaattgagaagtaaggatatagaaggcattttagcactaatggaaaccagaaccactcttagacctgggcaagaggggccccagaaattagcaagcgattagcaagcagctggatttcgatgacctccactgtacttagagcaacggcattcgattcgttggatcatttcaaagatgacatactgggttgtttgtttgtttctggcggtgtctaaagatggaacatcttgaagcattttgaatttgacctgtggctaccctcagatacaatgatggtaaccccatgagtgctgttaaagcaatttgacttattgtagacaggttaacacatgagatgcgttaaaagagttaagtgaaataataggcagcattcaaagagcaaatcgtggtctttggcagaaaatagagttaattttgtatttgagctgtccagttattacaattagaaaacgttttaaagaatccaaaaggatttaaaatattgcataaagttttaggagaaaatggtttccaaaaagcaactgcatatgaaataagcactaaaatgacattaaagtacaatgtaagaaaatcggaactagaagcatttgctggagtctgaagaaaaagatttatggatgaatgattctgaaactaacttctatagagacaattttccggcgatggtagatcaaggtgtagattgtactgaagagagagattcaaacaaagtgagtaatctaccgcagttttcagttttcttggtaataccccaacaacgtaaaagaaaaacgtaagaaatcctgtatggatctaaatgtaagaaacgatgataatggtgaaataataacattattttatataatgaaaaaattg

SEQ ID NO: 380370 - DNA, 412 bp, Homo sapiens
atgaaaactagaccataaaaagtactcttcttcacagataagggaggcataggagaagaggctttaagaacaagggatactcctcacttgctgggatacatggtcttccctgggggaaggtggaaaggctcaatttagattcaagaaaaatttgagtatcttgtacatgttgtgcactgtgccggtgagttcacatatattattttatctgccataatgaggtagtattcaaggctcagtaagttaagcagtttctcccagatcacccagctagtcagtggcaaaactgggatttcagcctcagttcgtctagcaacagttctaccataataaaggcagatttaacgacctcccttccaaagggcattcggtctcctcttcagcttcaggcacagaggagaaaaagggatgg

SEQ ID NO: 380371 - DNA, 381 bp, Homo sapiens
ttttatatatcaacttggaaggtgttttgggatgagattaacgttcaaattggtgaaccttgagtaaaatgaattgccttctttaatgtaggtgggcctcactcaatcaattggaaacctgaatagaacaaaaaggctggcctccgtgagccagaaggtacccccccgcagactcctttctagacttcatctgcaccattggctctcctgagtctccagcctgctggcccacactacagattttggacttaccagcctccataattattacattagccagttagctataatacattttttaaatatatatctctcctgttgattctgtttttttttttttttttttttttttaactctgactgatacaggtggagttaggg

SEQ ID NO: 380372 - DNA, 467 bp, Homo sapiens
aattatagctacatggtgatactatattccatctaatggactggcagatattgaaaaggaatgataatgtctggtattggcatgagaacaatgaatttatataatatatggtgtgagtgcaaatggatacaaactttctaaagggacattttccttaattatttaggcttaattccctggaagcagaattgactgtcaaacagattgcatcaaggcatttgctgctttgaagttgggttgaagggtacattcagactcagatccaattccactccttccatgacatcttacatgattttcttctgctcctgactcttcatatttcttaaagaaacaatttgccataaaggaaaaggcaaggactttgaaatcagacctggggctttccccctacttgggtaagcgatttggttctctgagccttggtttctacacctgtgaaatgggagttcataatacttgcctca

SEQ ID NO: 380373 - DNA, 2532 bp, Homo sapiens
gctgggcgggcgcagcgcggccaccgccccgggacccgcgccgctgccctccggctccgcgggcggcccacggcgagatttcatgtgttctttgtatacaagcgacgtcccagattataattctctgctgagatttgagttggatttgaggatttggagaatccctgcagctttgtaacttcagaggtgtaattagctgaaaacatcatcgttttgaagagttctgcgttttgccagtcacctctcaactgtgtgccaaagaaggactccatgaaagatgacagaagaagttattgtgatagccaagtgggactacaccgcccagcaggaccaggagctggacatcaagaagaacgagcggctgtggttgctggacgactccaagacgtggtggcgggtgaggaacgcggccaacaggacgggctatgtaccgtccaactacgtggagcggaagaacagcctgaagaagggctccctcgtgaagaacctgaaggacacactaggcctcggcaagacgcgcaggaagaccagcgcgcgggatgcgtcccccacgcccagcacggacgccgagtaccccgccaatggcagcggcgccgaccgcatctacgacctcaacatcccggccttcgtcaagttcgcctatgtggccgagcgggaggatgagttgtccctggtgaaggggtcgcgcgtcaccgtcatggagaagtgcagcgacggttggtggcggggcagctacaacgggcagatcggctggttcccctccaactacgtcttggaggaggtggacgaggcggctgcggagtccccaagcttcctgagcctgcgcaagggcgcctcgctgagcaatggccagggctcccgcgtgctgcatgtggtccagacgctgtaccccttcagctcagtcaccgaggaggagctcaacttcgagaagggggagaccatggaggtgattgagaagccggagaacgaccccgagtggtggaaatgcaaaaatgcccggggccaggtgggcctcgtccccaaaaactacgtggtggtcctcagtgacgggcctgccctgcaccctgcgcacgccccacagataagctacaccgggccctcgtccagcgggcgcttcgcgggcagagagtggtactacgggaacgtgacgcggcaccaggccgagtgcgccctcaacgagcggggcgtggagggcgacttcctcattagggacagcgagtcctcgcccagcgacttctccgtgtcccttaaagcgtcagggaagaacaaacacttcaaggtgcagctcgtggacaatgtctactgcattgggcagcggcgcttccacaccatggacgagctggtggaacactacaaaaaggcgcccatcttcaccagcgagcacggggagaagctctacctcgtcagggccctgcagtgacggcgccccggccccacactcgcctcccgggccccacggtggagctgcccgcccggccttgtggcagaggctcctcccgcggggacggccccgacggcttctctgcgagtctctctttatgttcaggtcgcttggtcggttcgtctcccatttgccatccaggcctcacacccacactcgagcccacccggccggccagctttagaggaggggaggagcagggcgagttcacattattccttttccatcggaagtggcgctcgtgcattcaactcgttcccgctcatggaacccctctttaaaaagacgcagggcacctgtgagcgcaggagcgagcctaaggccacccagcggcagcgcccgtgtcctgggcactcagcgtgctgggcagagcaggtgcgatggccccagtcctagcagccctcgcccatgtcctgtgcccttacatggctcccggactgtgcagggagccgatacgtttgctgatagcaatactggaaccaccgggtgcgatggcagtgaggagactgcccagtgcctttggggctgtgcttgcaataaagaaagaatttcctggaaaggcagtctgcaaaagagggaaccggtgactcagaaagacagatgttttggtaatttaccccaaatgtgccatccacatagtgctttttcctcttgcccttcggcttgtttgaatctcacaattatgtatttaattctcaaagaaatatgtatctgtagccgtttgttgacactaatacagatgattaaggaaaacagctgatctttggggaagggagctaccaacactttatacacacacacacgtgcacacacacacacacacacacactatatatatatatattatttacagggaaatttttcagggtttacaaaagagtatgtgattggtagtaagagacacacagaatgtttatgaagaaattgcattttctttttcctttacatttgaacttctttatagtttaaatataacgtcttgagatggcacattcctacgattgaagaaggggtcttgagatcccctaaacttgcatacccagttttttggatattgtaataaaaaaaagtattatgacaaaaaaaaaaat

SEQ ID NO: 380374 - DNA, 2805 bp, Homo sapiens
gctgggcgggcgcagcgcggccaccgccccgggacccgcgccgctgccctccggctccgcgggcggcccacggcgagatttcatgtgttctttgtatacaagcgacgtcccagattataattctctgctgagatttgagttggatttgaggatttggagaatccctgcagctttgtaacttcagaggtgtaattagctgaaaacatcatcgttttgaagagttctgcgttttgccagtcacctctcaactgtgtgccaaagaaggactccatgaaagatgacagaagaagttattgtgatagccaagtgggactacaccgcccagcaggaccaggagctggacatcaagaagaacgagcggctgtggttgctggacgactccaagacgtggtggcgggtgaggaacgcggccaacaggacgggctatgtaccgtccaactacgtggagcggaagaacagcctgaagaagggctccctcgtgaagaacctgaaggacacactaggcctcggcaagacgcgcaggaagaccagcgcgcgggatgcgtcccccacgcccagcacggacgccgagtaccccgccaatggcagcggcgccgaccgcatctacgacctcaacatcccggccttcgtcaagttcgcctatgtggccgagcgggaggatgagttgtccctggtgaaggggtcgcgcgtcaccgtcatggagaagtgcagcgacggttggtggcggggcagctacaacgggcagatcggctggttcccctccaactacgtcttggaggaggtggacgaggcggctgcggagtccccaagcttcctgagcctgcgcaagggcgcctcgctgagcaatggccagggctcccgcgtgctgcatgtggtccagacgctgtaccccttcagctcagtcaccgaggaggagctcaacttcgagaagggggagaccatggaggtgattgagaagccggagaacgaccccgagtggtggaaatgcaaaaatgcccggggccaggtgggcctcgtccccaaaaactacgtggtggtcctcagtgacgggcctgccctgcaccctgcgcacgccccacagataagctacaccgggccctcgtccagcgggcgcttcgcgggcagagagtggtactacgggaacgtgacgcggcaccaggccgagtgcgccctcaacgagcggggcgtggagggcgacttcctcattagggacagcgagtcctcgcccagcgacttctccgtgtcccttaaagcgtcagggaagaacaaacacttcaaggtgcagctcgtggacaatgtctactgcattgggcagcggcgcttccacaccatggacgagctggtggaacactacaaaaaggcgcccatcttcaccagcgagcacggggagaagctctacctcgtcagggccctgcagtgacggcgccccggccccacactcgcctcccgggccccacggtggagctgcccgcccggccttgtggcagaggctcctcccgcggggacggccccgacggcttctctgcgagtctctctttatgttcaggtcgcttggtcggttcgtctcccatttgccatccaggcctcacacccacactcgagcccacccggccggccagctttagaggaggggaggagcagggcgagttcacattattccttttccatcggaagtggcgctcgtgcattcaactcgttcccgctcatggaacccctctttaaaaagacgcagggcacctgtgagcgcaggagcgagcctaaggccacccagcggcagcgcccgtgtcctgggcactcagcgtgctgggcagagcaggtgcgatggccccagtcctagcagccctcgcccatgtcctgtgcccttacatggctcccggactgtgcagggagccgatacgtttgctgatagcaatactggaaccaccgggtgcgatggcagtgaggagactgcccagtgcctttggggctgtgcttgcaataaagaaagaatttcctggaaaggcagtctgcaaaagagggaaccggtgactcagaaagacagatgttttggtaatttaccccaaatgtgccatccacatagtgctttttcctcttgcccttcggcttgtttgaatctcacaattatgtatttaattctcaaagaaatatgtatctgtagccgtttgttgacactaatacagatgattaaggaaaacagctgatctttggggaagggagctaccaacactttatacacacacacacgtgcacacacacacacacacacacactatatatatatatattatttacagggaaatttttcagggtttacaaaagagtatgtgattggtagtaagagacacacagaatgtttatgaagaaattgcattttctttttcctttacatttgaacttctttatagtttaaatataacgtcttgagatggcacattcctacgattgaagaaggggtcttgagatcccctaaacttgcatacccagttttttggatattgtgagcgtcttgtgaccaaaacaatcacaaatcgaaacaaaaaaaaagggggggcccctccaaaaattcccccgggggggccccattttcccgttcccccgcgtttttgtggatagcaagtgggcccccctttgtaggagcgtctggcttttccaaccctgaaccgcgcggggccgctgtatccacccccttgtgatcgggaccaccctcgctggccgggaactgtttggcgagagccctcatcctctctgggggggcacatcttggggcctgtccccccggaacattttagacgtgctaggagactc

SEQ ID NO: 380375 - DNA, 2390 bp, Homo sapiens
gctgggcgggcgcagcgcggccaccgccccgggacccgcgccgctgccctccggctccgcgggcggcccacggcgagatttcatgtgttctttgtatacaagcgacgtcccagattataattctctgctgagatttgagttggatttgaggatttggagaatccctgcagctttgtaacttcagaggtgtaattagctgaaaacatcatcgttttgaagagttctgcgttttgccagtcacctctcaactgtgtgccaaagaaggactccatgaaagatgacagaagaagttattgtgatagccaagtgggactacaccgcccagcaggaccaggagctggacatcaagaagaacgagcggctgtggttgctggacgactccaagacgtggtggcgggtgaggaacgcggccaacaggacgggctatgtaccgtccaactacgtggagcggaagaacagcctgaagaagggctccctcgtgaagaacctgaaggacacactaggcctcggcaagacgcgcaggaagaccagcgcgcgggatgcgtcccccacgcccagcacggacgccgagtaccccgccaatggcagcggcgccgaccgcatctacgacctcaacatcccggccttcgtcaagttcgcctatgtggccgagcgggaggatgagttgtccctggtgaaggggtcgcgcgtcaccgtcatggagaagtgcagcgacggttggtggcggggcagctacaacgggcagatcggctggttcccctccaactacgtcttggaggaggtggacgaggcggctgcggagtccccaagcttcctgagcctgcgcaagggcgcctcgctgagcaatggccagggctcccgcgtgctgcatgtggtccagacgctgtaccccttcagctcagtcaccgaggaggagctcaacttcgagaagggggagaccatggaggtgattgagaagccggagaacgaccccgagtggtggaaatgcaaaaatgcccggggccaggtgggcctcgtccccaaaaactacgtggtggtcctcagtgacgggcctgccctgcaccctgcgcacgccccacagataagctacaccgggccctcgtccagcgggcgcttcgcgggcagagagtggtactacgggaacgtgacgcggcaccaggccgagtgcgccctcaacgagcggggcgtggagggcgacttcctcattagggacagcgagtcctcgcccagcgacttctccgtgtcccttaaagcgtcagggaagaacaaacacttcaaggtgcagctcgtggacaatgtctactgcattgggcagcggcgcttccacaccatggacgagctggtggaacactacaaaaaggcgcccatcttcaccagcgagcacggggagaagctctacctcgtcagggccctgcagtgacggcgccccggccccacactcgcctcccgggccccacggtggagctgcccgcccggccttgtggcagaggctcctcccgcggggacggccccgacggcttctctgcgagtctctctttatgttcaggtcgcttggtcggttcgtctcccatttgccatccaggcctcacacccacactcgagcccacccggccggccagctttagaggaggggaggagcagggcgagttcacattattccttttccatcggaagtggcgctcgtgcattcaactcgttcccgctcatggaacccctctttaaaaagacgcagggcacctgtgagcgcaggagcgagcctaaggccacccagcggcagcgcccgtgtcctgggcactcagcgtgctgggcagagcaggtgcgatggccccagtcctagcagccctcgcccatgtcctgtgcccttacatggctcccggactgtgcagggagccgatacgtttgctgatagcaatactggaaccaccgggtgcgatggcagtgaggagactgcccagtgcctttggggctgtgcttgcaataaagaaagaatttcctggaaaggcagtctgcaaaagagggaaccggtgactcagaaagacagatgttttggtaatttaccccaaatgtgccatccacatagtgctttttcctcttgcccttcggcttgtttgaatctcacaattatgtatttaaatatatatattatttacagggaaatttttcagggtttacaaaagagtatgtgattggtagtaagagacacacagaatgtttatgaagaaattgcattttctttttcctttacatttgaacttctttatagtttaaatataacgtcttgagatggcacattcctacgattgaagaaggggtcttgagatcccctaaacttgcatacccagttttttggatattgtaataaaaaaaagtattatgacaaaaaaaaaaat

SEQ ID NO: 380376 - DNA, 1810 bp, Homo sapiens
gctgggcgggcgcagcgcggccaccgccccgggacccgcgccgctgccctccggctccgcgggcggcccacggcgagatttcatgtgttctttgtatacaagcgacgtcccagattataattctctgctgagatttgagttggatttgaggatttggagaatccctgcagctttgtaacttcagaggtgtaattagctgaaaacatcatcgttttgaagagttctgcgttttgccagtcacctctcaactgtgtgccaaagaaggactccatgaaagatgacagaagaagttattgtgatagccaagtgggactacaccgcccagcaggaccaggagctggacatcaagaagaacgagcggctgtggttgctggacgactccaagacgtggtggcgggtgaggaacgcggccaacaggacgggctatgtaccgtccaactacgtggagcggaagaacagcctgaagaagggctccctcgtgaagaacctgaaggacacactagcccagcgacttctccgtgtcccttaaagcgtcagggaagaacaaacacttcaaggtgcagctcgtggacaatgtctactgcattgggcagcggcgcttccacaccatggacgagctggtggaacactacaaaaaggcgcccatcttcaccagcgagcacggggagaagctctacctcgtcagggccctgcagtgacggcgccccggccccacactcgcctcccgggccccacggtggagctgcccgcccggccttgtggcagaggctcctcccgcggggacggccccgacggcttctctgcgagtctctctttatgttcaggtcgcttggtcggttcgtctcccatttgccatccaggcctcacacccacactcgagcccacccggccggccagctttagaggaggggaggagcagggcgagttcacattattccttttccatcggaagtggcgctcgtgcattcaactcgttcccgctcatggaacccctctttaaaaagacgcagggcacctgtgagcgcaggagcgagcctaaggccacccagcggcagcgcccgtgtcctgggcactcagcgtgctgggcagagcaggtgcgatggccccagtcctagcagccctcgcccatgtcctgtgcccttacatggctcccggactgtgcagggagccgatacgtttgctgatagcaatactggaaccaccgggtgcgatggcagtgaggagactgcccagtgcctttggggctgtgcttgcaataaagaaagaatttcctggaaaggcagtctgcaaaagagggaaccggtgactcagaaagacagatgttttggtaatttaccccaaatgtgccatccacatagtgctttttcctcttgcccttcggcttgtttgaatctcacaattatgtatttaattctcaaagaaatatgtatctgtagccgtttgttgacactaatacagatgattaaggaaaacagctgatctttggggaagggagctaccaacactttatacacacacacacgtgcacacacacacacacacacacactatatatatatatattatttacagggaaatttttcagggtttacaaaagagtatgtgattggtagtaagagacacacagaatgtttatgaagaaattgcattttctttttcctttacatttgaacttctttatagtttaaatataacgtcttgagatggcacattcctacgattgaagaaggggtcttgagatcccctaaacttgcatacccagttttttggatattgtaataaaaaaaagtattatgacaaaaaaaaaaat

SEQ ID NO: 380377 - DNA, 1617 bp, Homo sapiens
ggtgaattggtgggcgtcagtgcagtaagtgaggagccggacgtcgattgactggtcttcagaagcagaaggactccatgaaagatgacagaagaagttattgtgatagccaagtgggactacaccgcccagcaggaccaggagctggacatcaagaagaacgagcggctgtggttgctggacgactccaagacgtggtggcgggtgaggaacgcggccaacaggacgggctatgtaccgtccaactacgtggagcggaagaacagcctgaagaagggctccctcgtgaagaacctgaaggacacactagcccagcgacttctccgtgtcccttaaagcgtcagggaagaacaaacacttcaaggtgcagctcgtggacaatgtctactgcattgggcagcggcgcttccacaccatggacgagctggtggaacactacaaaaaggcgcccatcttcaccagcgagcacggggagaagctctacctcgtcagggccctgcagtgacggcgccccggccccacactcgcctcccgggccccacggtggagctgcccgcccggccttgtggcagaggctcctcccgcggggacggccccgacggcttctctgcgagtctctctttatgttcaggtcgcttggtcggttcgtctcccatttgccatccaggcctcacacccacactcgagcccacccggccggccagctttagaggaggggaggagcagggcgagttcacattattccttttccatcggaagtggcgctcgtgcattcaactcgttcccgctcatggaacccctctttaaaaagacgcagggcacctgtgagcgcaggagcgagcctaaggccacccagcggcagcgcccgtgtcctgggcactcagcgtgctgggcagagcaggtgcgatggccccagtcctagcagccctcgcccatgtcctgtgcccttacatggctcccggactgtgcagggagccgatacgtttgctgatagcaatactggaaccaccgggtgcgatggcagtgaggagactgcccagtgcctttggggctgtgcttgcaataaagaaagaatttcctggaaaggcagtctgcaaaagagggaaccggtgactcagaaagacagatgttttggtaatttaccccaaatgtgccatccacatagtgctttttcctcttgcccttcggcttgtttgaatctcacaattatgtatttaattctcaaagaaatatgtatctgtagccgtttgttgacactaatacagatgattaaggaaaacagctgatctttggggaagggagctaccaacactttatacacacacacacgtgcacacacacacacacacacacactatatatatatatattatttacagggaaatttttcagggtttacaaaagagtatgtgattggtagtaagagacacacagaatgtttatgaagaaattgcattttctttttcctttacatttgaacttctttatagtttaaatataacgtcttgagatggcacattcctacgattgaagaaggggtcttgagatcccctaaacttgcatacccagttttttggatattgtaataaaaaaaagtattatgacaaaaaaaaaaat

SEQ ID NO: 380378 - DNA, 583 bp, Homo sapiens
gctgggcgggcgcagcgcggccaccgccccgggacccgcgccgctgccctccggctccgcgggcggcccacggcgagatttcatgtgttctttgtatacaagcgacgtcccagattataattctctgctgagatttgagttggatttgaggatttggagaatccctgcagctttgtaacttcagaggtgtaattagctgaaaacatcatcgttttgaagagttctgcgttttgccagtcacctctcaactgtgtgccaaagaaggactccatgaaagatgacagaagaagttattgtgatagccaagtgggactacaccgcccagcaggaccaggagctggacatcaagaagaacgagcggctgtggttgctggacgactccaagacgtggtggcgggtgaggaacgcggccaacaggacgggctatgtaccgtccaactacgtggagcggaagaacagcctgaagaagggctccctcgtgaagaacctgaaggacacactaggtgagtgtttcaccctcgagagaggaagccttgtgcatttcaagggacactgttcgtctttctagttagtttgctgtttc

SEQ ID NO: 380379 - DNA, 2339 bp, Homo sapiens
ggtgaattggtgggcgtcagtgcagtaagtgaggagccggacgtcgattgactggtcttcagaagcagaaggactccatgaaagatgacagaagaagttattgtgatagccaagtgggactacaccgcccagcaggaccaggagctggacatcaagaagaacgagcggctgtggttgctggacgactccaagacgtggtggcgggtgaggaacgcggccaacaggacgggctatgtaccgtccaactacgtggagcggaagaacagcctgaagaagggctccctcgtgaagaacctgaaggacacactaggcctcggcaagacgcgcaggaagaccagcgcgcgggatgcgtcccccacgcccagcacggacgccgagtaccccgccaatggcagcggcgccgaccgcatctacgacctcaacatcccggccttcgtcaagttcgcctatgtggccgagcgggaggatgagttgtccctggtgaaggggtcgcgcgtcaccgtcatggagaagtgcagcgacggttggtggcggggcagctacaacgggcagatcggctggttcccctccaactacgtcttggaggaggtggacgaggcggctgcggagtccccaagcttcctgagcctgcgcaagggcgcctcgctgagcaatggccagggctcccgcgtgctgcatgtggtccagacgctgtaccccttcagctcagtcaccgaggaggagctcaacttcgagaagggggagaccatggaggtgattgagaagccggagaacgaccccgagtggtggaaatgcaaaaatgcccggggccaggtgggcctcgtccccaaaaactacgtggtggtcctcagtgacgggcctgccctgcaccctgcgcacgccccacagataagctacaccgggccctcgtccagcgggcgcttcgcgggcagagagtggtactacgggaacgtgacgcggcaccaggccgagtgcgccctcaacgagcggggcgtggagggcgacttcctcattagggacagcgagtcctcgcccagcgacttctccgtgtcccttaaagcgtcagggaagaacaaacacttcaaggtgcagctcgtggacaatgtctactgcattgggcagcggcgcttccacaccatggacgagctggtggaacactacaaaaaggcgcccatcttcaccagcgagcacggggagaagctctacctcgtcagggccctgcagtgacggcgccccggccccacactcgcctcccgggccccacggtggagctgcccgcccggccttgtggcagaggctcctcccgcggggacggccccgacggcttctctgcgagtctctctttatgttcaggtcgcttggtcggttcgtctcccatttgccatccaggcctcacacccacactcgagcccacccggccggccagctttagaggaggggaggagcagggcgagttcacattattccttttccatcggaagtggcgctcgtgcattcaactcgttcccgctcatggaacccctctttaaaaagacgcagggcacctgtgagcgcaggagcgagcctaaggccacccagcggcagcgcccgtgtcctgggcactcagcgtgctgggcagagcaggtgcgatggccccagtcctagcagccctcgcccatgtcctgtgcccttacatggctcccggactgtgcagggagccgatacgtttgctgatagcaatactggaaccaccgggtgcgatggcagtgaggagactgcccagtgcctttggggctgtgcttgcaataaagaaagaatttcctggaaaggcagtctgcaaaagagggaaccggtgactcagaaagacagatgttttggtaatttaccccaaatgtgccatccacatagtgctttttcctcttgcccttcggcttgtttgaatctcacaattatgtatttaattctcaaagaaatatgtatctgtagccgtttgttgacactaatacagatgattaaggaaaacagctgatctttggggaagggagctaccaacactttatacacacacacacgtgcacacacacacacacacacacactatatatatatatattatttacagggaaatttttcagggtttacaaaagagtatgtgattggtagtaagagacacacagaatgtttatgaagaaattgcattttctttttcctttacatttgaacttctttatagtttaaatataacgtcttgagatggcacattcctacgattgaagaaggggtcttgagatcccctaaacttgcatacccagttttttggatattgtaataaaaaaaagtattatgacaaaaaaaaaaat

SEQ ID NO: 380380 - DNA, 2305 bp, Homo sapiens
gctgggcgggcgcagcgcggccaccgccccgggacccgcgccgctgccctccggctccgcgggcggcccacggcgagatttcatgtgttctttgtatacaagcgacgtcccagattataattctctgctgagatttgagttggatttgaggatttggagaatccctgcagctttgtaacttcagaggtgtaattagctgaaaacatcatcgttttgaagagttctgcgttttgccagtcacctctcaactgtgtgccaaagaaggactccatgaaagatgacagaagaagttattgtgatagccaagtgggactacaccgcccagcaggaccaggagctggacatcaagaagaacgagcggctgtggttgctggacgactccaagacgtggtggcgggtgaggaacgcggccaacaggacgggctatgtaccgtccaactacgtggagcggaagaacagcctgaagaagggctccctcgtgaagaacctgaaggacacactaggcctcggcaagacgcgcaggaagaccagcgcgcgggatgcgtcccccacgcccagcacggacgccgagtaccccgccaatggcagcggcgccgaccgcatctacgacctcaacatcccggccttcgtcaagttcgcctatgtggccgagcgggaggatgagttgtccctggtgaaggggtcgcgcgtcaccgtcatggagaagtgcagcgacggttggtggcggggcagctacaacgggcagatcggctggttcccctccaactacgtcttggaggaggtggacgaggcggctgcggagtccccaagcttcctgagcctgcgcaagggcgcctcgctgagcaatggccagggctcccgcgtgctgcatgtggtccagacgctgtaccccttcagctcagtcaccgaggaggagctcaacttcgagaagggggagaccatggaggtgattgagaagccggagaacgaccccgagtggtggaaatgcaaaaatgcccggggccaggtgggcctcgtccccaaaaactacgtggtggtcctcagtgacgggcctgccctgcaccctgcgcacgccccacagataagctacaccgggccctcgtccagcgggcgcttcgcgggcagagagtggtactacgggaacgtgacgcggcaccaggccgagtgcgccctcaacgagcggggcgtggagggcgacttcctcattagggacagcgagtcctcgcccagcgacttctccgtgtcccttaaagcgtcagggaagaacaaacacttcaaggtgcagctcgtggacaatgtctactgcattgggcagcggcgcttccacaccatggacgagctggtggaacactacaaaaaggcgcccatcttcaccagcgagcacggggagaagctctacctcgtcagggccctgcagtgacggcgccccggccccacactcgcctcccgggccccacggtggagctgcccgcccggccttgtggcagaggctcctcccgcggggacggccccgacggcttctctgcgagtctctctttatgttcaggtcgcttggtcggttcgtctcccatttgccatccaggcctcacacccacactcgagcccacccggccggccagctttagaggaggggaggagcagggcgagttcacattattccttttccatcggaagtggcgctcgtgcattcaactcgttcccgctcatggaacccctctttaaaaagacgcagggcacctgtgagcgcaggagcgagcctaaggccacccagcggcagcgcccgtgtcctgggcactcagcgtgctgggcagagcaggtgcgatggccccagtcctagcagccctcgcccatgtcctgtgcccttacatggctcccggactgtgcagggagccgatacgtttgctgatagcaatactggaaccaccgggtgcgatggcagtgaggagactgcccagtgcctttggggctgtgcttgcaataaagaaagaatttcctggaaaggcagtctgcaaaagagggaaccggtgactcagaaagacagatgttttggtaatttaccccaaatgtgccatccacatagtgctttttcctcttgcccttcggcttgtttgaatctcacaattatgtatttaattctcaaagaaatatgtatctgtagccgtttgttgacactaatacagatgattaaggaaaacagctgatctttggggaagggagctaccaacactttatacacacacacacgtgcacacacacacacacacacacactatatacgggatggaaggtcgatatagagaactaa

SEQ ID NO: 380381 - DNA, 2087 bp, Homo sapiens
actttaagtaacttcgcaactacaggaggcagctgccagcaaccgtatttttctcatggcctcggcaagacgcgcaggaagaccagcgcgcgggatgcgtcccccacgcccagcacggacgccgagtaccccgccaatggcagcggcgccgaccgcatctacgacctcaacatcccggccttcgtcaagttcgcctatgtggccgagcgggaggatgagttgtccctggtgaaggggtcgcgcgtcaccgtcatggagaagtgcagcgacggttggtggcggggcagctacaacgggcagatcggctggttcccctccaactacgtcttggaggaggtggacgaggcggctgcggagtccccaagcttcctgagcctgcgcaagggcgcctcgctgagcaatggccagggctcccgcgtgctgcatgtggtccagacgctgtaccccttcagctcagtcaccgaggaggagctcaacttcgagaagggggagaccatggaggtgattgagaagccggagaacgaccccgagtggtggaaatgcaaaaatgcccggggccaggtgggcctcgtccccaaaaactacgtggtggtcctcagtgacgggcctgccctgcaccctgcgcacgccccacagataagctacaccgggccctcgtccagcgggcgcttcgcgggcagagagtggtactacgggaacgtgacgcggcaccaggccgagtgcgccctcaacgagcggggcgtggagggcgacttcctcattagggacagcgagtcctcgcccagcgacttctccgtgtcccttaaagcgtcagggaagaacaaacacttcaaggtgcagctcgtggacaatgtctactgcattgggcagcggcgcttccacaccatggacgagctggtggaacactacaaaaaggcgcccatcttcaccagcgagcacggggagaagctctacctcgtcagggccctgcagtgacggcgccccggccccacactcgcctcccgggccccacggtggagctgcccgcccggccttgtggcagaggctcctcccgcggggacggccccgacggcttctctgcgagtctctctttatgttcaggtcgcttggtcggttcgtctcccatttgccatccaggcctcacacccacactcgagcccacccggccggccagctttagaggaggggaggagcagggcgagttcacattattccttttccatcggaagtggcgctcgtgcattcaactcgttcccgctcatggaacccctctttaaaaagacgcagggcacctgtgagcgcaggagcgagcctaaggccacccagcggcagcgcccgtgtcctgggcactcagcgtgctgggcagagcaggtgcgatggccccagtcctagcagccctcgcccatgtcctgtgcccttacatggctcccggactgtgcagggagccgatacgtttgctgatagcaatactggaaccaccgggtgcgatggcagtgaggagactgcccagtgcctttggggctgtgcttgcaataaagaaagaatttcctggaaaggcagtctgcaaaagagggaaccggtgactcagaaagacagatgttttggtaatttaccccaaatgtgccatccacatagtgctttttcctcttgcccttcggcttgtttgaatctcacaattatgtatttaattctcaaagaaatatgtatctgtagccgtttgttgacactaatacagatgattaaggaaaacagctgatctttggggaagggagctaccaacactttatacacacacacacgtgcacacacacacacacacacacactatatatatatatattatttacagggaaatttttcagggtttacaaaagagtatgtgattggtagtaagagacacacagaatgtttatgaagaaattgcattttctttttcctttacatttgaacttctttatagtttaaatataacgtcttgagatggcacattcctacgattgaagaaggggtcttgagatcccctaaacttgcatacccagttttttggatattgtaataaaaaaaagtattatgacaaaaaaaaaaat

SEQ ID NO: 380382 - DNA, 1621 bp, Homo sapiens
gctgggcgggcgcagcgcggccaccgccccgggacccgcgccgctgccctccggctccgcgggcggcccacggcgagatttcatgtgttctttgtatacaagcgacgtcccagattataattctctgctgagatttgagttggatttgaggatttggagaatccctgcagctttgtaacttcagaggtgtaattagctgaaaacatcatcgttttgaagagttctgcgttttgccagtcacctctcaactgtgtgccaaagaaggactccatgaaagatgacagaagaagttattgtgatagccaagtgggactacaccgcccagcaggaccaggagctggacatcaagaagaacgagcggctgtggttgctggacgactccaagacgtggtggcgggtgaggaacgcggccaacaggacgggctatgtaccgtccaactacgtggagcggaagaacagcctgaagaagggctccctcgtgaagaacctgaaggacacactaggcctcggcaagacgcgcaggaagaccagcgcgcgggatgcgtcccccacgcccagcacggacgccgagtaccccgccaatggcagcggcgccgaccgcatctacgacctcaacatcccggccttcgtcaagttcgcctatgtggccgagcgggaggatgagttgtccctggtgaaggggtcgcgcgtcaccgtcatggagaagtgcagcgacggttggtggcggggcagctacaacgggcagatcggctggttcccctccaactacgtcttggaggaggtggacgaggcggctgcggagtccccaagcttcctgagcctgcgcaagggcgcctcgctgagcaatggccagggctcccgcgtgctgcatgtggtccagacgctgtaccccttcagctcagtcaccgaggaggagctcaacttcgagaagggggagaccatggaggtgattgagaagccggagaacgaccccgagtggtggaaatgcaaaaatgcccggggccaggtgggcctcgtccccaaaaactacgtggtggtcctcagtgacgggcctgccctgcaccctgcgcacgccccacagataagctacaccgggccctcgtccagcgggcgcttcgcgggcagagagtggtactacgggaacgtgacgcggcaccaggccgagtgcgccctcaacgagcggggcgtggagggcgacttcctcattagggacagcgagtcctcgcccagcgacttctccgtgtcccttaaagcgtcagggaagaacaaacacttcaaggtgcagctcgtggacaatgtctactgcattgggcagcggcgcttccacaccatggacgagctggtggaacactacaaaaaggcgcccatcttcaccagcgagcacggggagaagctctacctcgtcagggccctgcagtgacggcgccccggccccacactcgcctcccgggccccacggtggagctgcccgcccggccttgtggcagaggctcctcccgcggggacggccccgacggcttctctgcgagtctctctttatgtcagtcgtggcggtcgctcccttgcatcggctcaaccaattgagcacggggcattaaggggggcggggttccttcttcgg

SEQ ID NO: 380383 - DNA, 249 bp, Homo sapiens
ccatgaagccctttcacattcatgagactggttattctcatgcaactctggaatagttattattactcccattttgtagacggattctctgagtcttggagactttgtctgaattcctaaaggacaaataacaaataacagaggcagaattcaaactctggtctgcttggttccaaattccatgatcttcccatgatatcctgctgcttcctgccagggccacaacaagagtttttttctgggctggtt

SEQ ID NO: 380384 - DNA, 466 bp, Homo sapiens
tggaatttaaacagtattccagaaccaagtcactgcacttctgttctttctcagtctggtgaagactcttagtactggagcttaaacacttccctggaactatattgctggccttacattatttcccaacctgggaaatccttaagtgggtactgcaacttaatcctgaccttttagttgtttccaggccaaggaaagactttatacagtcacctgggctttgtggaaaatacatctagggatttgatccttcgcttggattgtgccccttgcagtgcttttgcactggccactcccttcaacatggcattcccactggccaatgtgccgagtggctgccaagatccgtgcaccagttgctgtgatgtgcaccagttgctgtgatcagcaccctattctttctccccagttcaccccaggtgtttctggcctccaggcactcccagtggttccgtgggatggaact

SEQ ID NO: 380385 - DNA, 287 bp, Homo sapiens
taaaataaattagatgccatctagaaattttccttttcccttcattcattatatgtgtctcataagttcaacaaaggcaaactttaaatgatattcagttgaaatgaatacagttccaaactactgaattacacagcaatactcttaaattgtggttctagaggggcaaggtctagatgtcaagagttgtggggcccctggctacttgtgggtaccttgtaggccctgcagtcactgagacccaggatttcagtctctactcttctaagttcagaacctccatcttt

SEQ ID NO: 380386 - DNA, 589 bp, Homo sapiens
gctgggcatggtagtgtggtatgcctgtggtcccatctactcaggagggtgaggtgggaggattgcctgagtgtcggaggtcaaggctgcagagtcgtggtcacactattgcactccagccaggatgacaaagcgagaccctatctcaaaaaaaaaaatgaataaatgcaaataatcaatagaatggctggcatttaatgggtatctattaaatgtgttgggcactatgctgtatatttctgataccttattcatttaatttgctcaataatcctatgaaacaaatattattcctatttctcaagaagaaaaatagacctaataatagttattttccaaaattacatacctagaaactgggacagttcatgacacaaaaatttatattctttttactgtattaacagttttcaagcttttgaatctcaggactccttttatacttctaaaaattattaaggatcacaaaaccttttgtatagatatatctattgatatttatcatattagaaattaagatttttaaaattttaaatgtattaattttagaactataatactcactacgtgttaatataaaatttcttat

SEQ ID NO: 380387 - DNA, 1360 bp, Homo sapiens
gcagccttgacctcccgggcccaggtagtcctcccacctcagcctcccatgtagcaggaaccacaggcaggcaccaccatacccagctaatttttgtattttttgtagagatggggtttcgccatgttgcccaggctagtcttttctttcttctctttttttttccccacagtatatattatacagcagtcataatatctataaatacatagagtttatgttgtgaagtttcccagttcactgaaatgttaggtttcctaaagggtacagtgccgtataaaacaacctgcctcatatatttctcctcaaaacgttggactatttgggaaaaggaaaagagttgggaaaattggttttaaggtaagttttagtcaaaagaattctttcttgaaactagctggtttgtggattcagatactctgatccttacagaatccaagaggaagctttcataaaaacaattcagcaaatatttccaatataatttgaatggctaattttcagttgctaattaattagcagctttgtaatacttgatttgggagcatttacttggaaatcctaaggactataataaaagttttcaacatatttctaaattgtgtgagtttccagctgtagcttttgtctttgtcacattttaaaaaataataagcaagacacattggggacactggcagcagttgccaggttttagctgccaccgcttcagtatgagatatagctgtcccatcttcccccattcagggtaggagatatagtgacccagacttcatgcaaatggaaaaaaagttttaactgaaatatttatttagatttcagggtctagatggatgggaaagtagaaaaacatatgcaaatctcagtgttctcactatgaccactcttgagcagagatttggttttgtttccttttgtaacaaagtgaaaacaggtgagacaatgtgcccaaaacaaagggaagaagagaaccttctgtgactcctaaaatgttccatgctgcatttttgtttcattttttatttttccttgctttgtttttaaacatgaatataatgcttacttcaaattgtttagtaaaacaaaataactaaagaaatgtgagcttcccaaggtttctaaactatcgctgttgtatattctatagcgttccttattctttgagggaaactgtgcttgctgtgatccattttgtctctagcttctagttgtgattcttgtccataagcaccaaatttgatgcccatgatttcaaaaggtcatttcttttatctgaatgaaaatggtggtactaagactgtgaaaattatgtgaaacctaaagtagttgccaaagtggctcagggttgtaaaattcattg

SEQ ID NO: 380388 - DNA, 319 bp, Homo sapiens
ccaggcaggttaccttaaaataccttgcccaaagtcacttaaagtaattcttctctatggttctgtcaccaaactgctgggtaaatcaggtttgtttgtttcagtttctctttagtgtttgcaagtggatctgatttattttctttttggttgaatgctgctttgtaaattgcataaaacattttcatggttccaaagtcagatctatgaaataaggcacatgccctgtcctctcaactctgcctcccaacccctacaccagataaacagcttttattagtgtttgtttatccttctgtcatttcattgtacaaatacg

SEQ ID NO: 380389 - DNA, 286 bp, Homo sapiens
ttattaatggctaaagatgtgtgtttttcattcactgacatttgttgtctttttgcttcctatagagctcatgttctttgaccccttaccaagttgaatctggatattaactttgtttttttatttaaaaaaaagtactatttaaaacttacaactagggctgggcgccatggctcatgcctgtaatcccagctacttgggaggctgaggcgggagaatcactttaacccgggaggcagaggttgcagtgagccaagatcgtgccattgtattccagcctggatga

SEQ ID NO: 380390 - DNA, 1196 bp, Homo sapiens
ccgtggctgaagtcaagcaggagaatggcagaagatgaggttggatgaggctggatgaagtagaaggggcccagtggcatgggactttggatttttctttggagtcagaaacccatacaatggtacaatggattgacatgtgtagacaaatgccgagacagccacgaaaatctgaaatccatacatataaatacacaagtggacaactacataggaaaatccacttaaaatacatgcaaatatatggggggaaattatgggacttgatgaatcagagggttggtgtacagaaagggaaaagaagtaagaaaaagtgacaagatgggagataattgggtgactattagaaaccaatgttaactacaagaattcaaagtccaggtgtagcccagaacgaggtttcttccatttggtgcctcccctgtcttctggggcctcagagtctgtccttgtcccctctgttgtccacttgtgacagcagacggggagagagaggtagtggagggtcacaaggggtctcaagggccagaccttcaagtggcaaacatcatttctgccctctttccattgcccagaattttccactggcccactgtactaccaggagagattggggtagggcaggctgagaaatatactactcctgtgtgctcgggaagaaaatatattgtctctgccttgtctggactctcagtttaccttctctcctctgtggtttgtttcaggactaggatctgagctcatcacttaagagttgtcatagctatccttggtcatccctaacttgggagcctcccaaatatctaagaaacaggctggtggctctagttctcttcacaattaacctccaggttcactttcttagtctcacacctgggactagaggaaggacttaaactcatacctaacttcaccttttgatcttgatgcccctgggtgtgtagtgccagtcctgagcccttggtcatggggcctttcctgtaccctcaggacccctgactcatggctccccaccccccaaccccatgccattgccaattctctaaatgcattcacaaacacaaaagaaaagaacatctttttctggaaaaagacttcaaacatgtaaaaacaccttttattatttgtttatttgtgaatacaagggtgtggtcttttatctaaagcattaaccaagtggagggtggcaggttata

SEQ ID NO: 380391 - DNA, 909 bp, Homo sapiens
gcattgtcggtgttgtataatactccttttggtgaatagtgccacgatttatagattagttgtccggtgaatagacatttgggtttccattgttttgctattgcaaacgtatgctgctatggacattcttgaacctgtcttctggggcctcagagtctgtccttgtcccctctgttgtccacttgtgacagcagacggggagagagaggtagtggagggtcacaaggggtctcaagggccagaccttcaagtggcaaacatcatttctgccctctttccattgcccagaattttccactggcccactgtactaccaggagagattggggtagggcaggctgagaaatatactactcctgtgtgctcgggaagaaaatatattgtctctgccttgtctggactctcagtttaccttctctcctctgtggtttgtttcaggactaggatctgagctcatcacttaagagttgtcatagctatccttggtcatccctaacttgggagcctcccaaatatctaagaaacaggctggtggctctagttctcttcacaattaacctccaggttcactttcttagtctcacacctgggactagaggaaggacttaaactcatacctaacttcaccttttgatcttgatgcccctgggtgtgtagtgccagtcctgagcccttggtcatggggcctttcctgtaccctcaggacccctgactcatggctccccaccccccaaccccatgccattgccaattctctaaatgcattcacaaacacaaaagaaaagaacatctttttctggaaaaagacttcaaacatgtaaaaacaccttttattatttgtttatttgtgaatacaagggtgtggtcttttatctaaagcattaaccaagtggagggtggcaggttata

SEQ ID NO: 380392 - DNA, 306 bp, Homo sapiens
tgaccatggatgacccaccagaatgtcatgggatccagctacagccaaggaagcacagagcaccgtgggagcgatttattgtgcttggggatggggaaggggacatgggaggagccatattgagaaagtagcatgggtacttggcttcacagagtgtggcagctttcatcaggaagtgatggtgggggaacagcgtctctggcggagggaagcagcaggtgcagaggtgcagaggtgtgaggagtctgtcacattctgggaagggagtatggttgggtgacaatgcaagacagagaaagcaaggag

SEQ ID NO: 380393 - DNA, 393 bp, Homo sapiens
gagaaatggtaacaagtggttggattatgattatagttgaaggtcgaacaactagatttgctgatagattggataaaatggtcctctctttatggatctcataatacagtaggagaaacagacacataaatagtcatcactgcaggatgggtattagaaatattttgcaagggtgtaaaaggtgctaagaaagctttcttgtgtgacaaagctggttaaagaaagaaaagaaagcttcctagaagtgaaacctaaaatatacacttagataaatgaataaaagttatgaaagaatgtgagggctgggcacagtggctcatacctgtaatcctagcactttgggaggttgagtcgggggtattgcttgagtccaggagtttgaaaccagcctgg

SEQ ID NO: 380394 - DNA, 969 bp, Homo sapiens
tctcagatttattttggactattttgatgccaagtgagtataagagcttgtactgaaaccatttatttctttctattttgctatttgcaaatgcttgttatcttccctacatgaagtggcagtaacctttttcacatttaagctacccttctaccttttgaagtgatttgcagttactcatctgagacagcatcagtatttgactaaatcattgtttcacaactgaatagtcttgttcttttagtagcaatgaaatcctaagctcttgaggccattcacctgccaacctgaccatactgctttcaaaagtcttttctcatcagtagaatctattttggtcacttctagtcaatgaaaaatgtaaacttttaggagagaatgtttcctaggactcacccactccattcaatgttacatataaaatagtgtgatcaatcacaatgtccatctttagacagttggttaaataaattatctggtctttgaaaagaccgtgctgggcgcggtggctcttgcctgtaatcccagcactttgggaggctgaggcgggcagatcacctgagatcgggagtttgagaccaagcctgaccaatatggagaaaccctgtctctactaagaatacaaaattagctgggcatggtggtgcatgcctgtaatcccagctacttgggaggccgaggcaggagaattgcttgaacccgggaggcagaggttgcagtgaggtgagatagcgccattgcactccagcctgggcaacaagagcaaaactctgtctcaaaaaaaaaaaaaaattcagtcactatactctggcacaattttcattgtgtatatgagccaaaccacataccttaatgattggggaagttaggcaaatatgagatatgtagacatatctatgctgatcgttgcttgagaaataattactaattctagaacaaaatcaatcctgtatctttccatcatgaatc

SEQ ID NO: 380395 - DNA, 688 bp, Homo sapiens
  misc_feature (2)..(2): n is a, c, g, or t
tnacgtgatcttccgagcccaccacggtcttttcaaagaccttataatctattttggtcacttctagtcaatgaaaaatgtaaacttttaggagagaatgtttcctaggactcacccactccattcaatgttacatataaaatagtgtgatcaatcacaatgtccatctttagacagttggttaaataaattatctggtctttgaaaagaccgtgctgggcgcggtggctcttgcctgtaatcccagcactttgggaggctgaggcgggcagatcacctgagatcgggagtttgagaccaagcctgaccaatatggagaaaccctgtctctactaagaatacaaaattagctgggcatggtggtgcatgcctgtaatcccagctacttgggaggccgaggcaggagaattgcttgaacccgggaggcagaggttgcagtgaggtgagatagcgccattgcactccagcctgggcaacaagagcaaaactctgtctcaaaaaaaaaaaaaaattcagtcactatactctggcacaattttcattgtgtatatgagccaaaccacataccttaatgattggggaagttaggcaaatatgagatatgtagacatatctatgctgatcgttgcttgagaaataattactaattctagaacaaaatcaatcctgtatctttccatcatgaatc

SEQ ID NO: 380396 - DNA, 227 bp, Homo sapiens
cttcaagtgtcagggatggacgaatgtccctgtcaggagatgttggtccctggcagccaggcatggtggcagcactcccagcctggcctgccctgcacaaaccttcaggcacacaggcctcttgacagagtgatgattgggattccatgcctgcaccagtggtgggagagatgcaggtgaaacaaggcggaaaggaccgtaattacctcctaacaggtttccacatt

SEQ ID NO: 380397 - DNA, 451 bp, Homo sapiens
tctggcctatggtcattaacaggcttttgggacctttcagtagtattttcagaaaaatgaaaatttaaattcttagtaattacagtgagaaaactgtcatctggaggtaagacccctctccaaaggcttcacaaagttttggtgtattaaacctttccggattaaaaaattgtttaaaaggccagatgtggtggctcacacctgtaaaacccagcactttgggaggctgaggctggatcacttgggcctaggagttcgagaccagcctgggcaacatgtggaaatctcatctctacaaaaaacataagaattagctgggcatggttgtgcatgcctgtagtccctcctactcgggaggattacctgggcctggggggtttgaggatgcagtgagccgatattgcaacactgcactctagcctgagtgcagccgacgcaagaccctgtctcc

SEQ ID NO: 380398 - DNA, 1350 bp, Homo sapiens
ggcctagttcttttatatcttttaccttggtctcctaacctaaaaatgaagaatctgaattagatgaacatagaagtcacagctagctctcatatactgtgaatcatttttcattttatgctctagatgagtcattgaccaagcaagcactgtcaaggatggtagtattgtggcaagctgaaaatttatgctaaacaattttaatctgccctgaacccccagccatccagttggtgggatattcaatctcactcctcagtagggttctctacctcctcaggtcccagagaatagctggtgggaggagttggagaagagtcctctagacctctgtccatgctggtctctgttaagttcaccatccctgcccacatggtcttctgacggtaggcaggggatatctgtgccattgctcccaggactatattcttggagtccaccagcctgagactgtgcaatcctggggtgatacttttgctcagcacagaatcacccccaccgcctcccagaacccgactccatctgttagtctcaggaatcttcctctccccttgggtcccacagcttctacctgttaagtttcatgcacttactttctacataactctcactgagccaaggttattgcaaacaaaaggctaagaaggagttgtcttctcttgcttggcaatgtctgcttcctgatggaatacaaaaaccacctaggtaaaaacaaaaacaaaaaacacaagacgtggctaccttcttagcttgggaaagggaaaaatatctacagcagcaagaataaaggacaaattactgccttgataaagtagcagcctgggtgacagagtgagattctgcctcaaaaaaaaaaagaagactgcaagtaatctgtattcaaaacaaaaataaatgcagataatacaataatacagaagagtataaaatgcaaagtgaaaggtcttcctaaccagtttcaatcactagtggcaatcctgtcaacaatacctggttttatttcttcaaaggagaggcattaattttataaaacatacttttattttctgaaattttcacatctttcccttcttttacaacccatggtgtcctctttcttgtattctttttttatttccctgaagcaatttttttaaaagatgcatgaacagtaagcattctgatcctaacatctaaacatgtctacagtgtgccctcacacttacctattagttggctgggtatattcaggttgaaaatctttttttttcttttttttttttattatactttaagttttagggtacatgtgcacactgtgcaggttagttacatatgtatacatgtgccatgctggtgcgctgcacccac

SEQ ID NO: 380399 - DNA, 319 bp, Homo sapiens
ccaacatggtgaaacctcgtctctactaaaaatacaaaaattatccaggcatggtggcgcccgcctataatgccagctactcaggaggttgaagcatgagaattgcttgaatccaggaggcagaggttgcagtgagccaaagctgtgcggctgcactccagcctgggtgacagagtgagattctgcctcaaaaaaaaaaagaagactgcaagtaatctgtattcaaaacaaaaataaatgcagataatacaataatacagaagagtataaaatgcaaagtgaaaggtcttcctaaccagtttcaatcactagtggcaat

SEQ ID NO: 380400 - DNA, 307 bp, Homo sapiens
attatattggacttcagtgttttatcggagcatgtaattaccatagattgaagagctgtctataattaatttgctctacttcttattctcattgttcaacttaccaaaccttctagtaccttggtgatgctttatcgacctctgagaatccctttgtgatctgcagtgctactgtggttcacaaaatctgtgttcttgctctccctgatagcatctgacatttgtcatcaggggttggcaatcccatatacagggccccatttactacataccatagccagtcaccaaattagagaaactcagttta

SEQ ID NO: 380401 - DNA, 736 bp, Homo sapiens
cgggcggcggcgtgagggctccgggtcgctggcggcgtggacacctgagtcccggggtaggggtctcccgcgaggagtgagctgttgccgcagaatgggctgctggctcctgccctgcttcctgtgatcgagccggccctgaggactctgtggagatgcctgtaacccaccggaaatcagacgcatctgacatgaactcagacacgtcccccagctgcaggctccgagccttcagcagaggcggcagcctggagagtcgaagcagcagctctcgctccagaagcttcactttggatgatgagagcctgaagtacctcacccatgaggaaaaggatgtgctcctgttttttgaagagacgattgactccctagacgaggactttgaggagccagtgctgtgcgatggaggagtgtgctgcctctgctccccgtctctggaggagagcacctccagtccctccgagcctgaagatgtcatcgacttagtgcagccagcacctggcgccggggaagccgagggccttccagaggggacccaggcagcagggcctgcacctgctgggaaggagcacaggaaacaagatgctgagactcctccacctccagaccccccggctcccgagacccttcttgcgccaccacccctgcctagcacccccgatccccccaggagggagctgcgcgccccctccccgccggtggagcaccccagactcctgcgctctgttcccacgcc

SEQ ID NO: 380402 - DNA, 543 bp, Homo sapiens
ccaatcagatgtctggtcaagattgttttcaggtgagattttactttaggaaaatctggttttggtatctttttcagtgatggcgaaccgacactaggaaacttcttccctcgaggcctgttaaaacccagcctctctaggagtgagctgttgccgcagaatgggctgctggctcctgccctgcttcctgtgatcgagccggccctgaggactctgtggagatgcctggctggggcctcctggctgagcacgcaccgcaagctccagccaccggcacagagaactcttccctaaaggaatctggccgagggcttgtctcccttttcccaagaactgagagagagagaataacctgttagacccataggtttccgtgatgtgtaaatgccatcttttgggggttgggaggagtaggactggtctgattatcattcttgagtctcatctaccctcttctcgaagtacatgacatgaaagttcagatcccttccactcaggattctcgccgccttttctaagaaaataataaaaaaaaatgcttgt

SEQ ID NO: 380403 - DNA, 802 bp, Homo sapiens
ccaatcagatgtctggtcaagattgttttcaggtgagattttactttaggaaaatctggttttggtatctttttcagtgatggcgaaccgacactaggaaacttcttccctcgaggcctgttaaaacccagcctctctaggagtgagctgttgccgcagaatgggctgctggctcctgccctgcttcctgtgatcgagccggccctgaggactctgtggagatgcctgtaacccaccggaaatcagacgcatctgacatgaactcagacacgtcccccagctgcaggctccgagccttcagcagaggcggcagcctggagagtcgaagcagcagctctcgctccagaagcttcactttggatgatgagagcctgaagtacctcacccatgaggaaaaggatgtgctcctgttttttgaagagacgattgactccctagacgaggactttgaggagccagtgctgtgcgatggaggagtgtgctgcctctgctccccgtctctggaggagagcacctccagtccctccgagcctgaagatgtcatcgacttagtgcagccagcacctggcgccggggaagccgagggccttccagaggggacccaggcagcagggcctgcacctgctgggaaggagcacaggaaacaagatgctgagactcctccacctccagaccccccggctcccgagacccttcttgcgccaccacccctgcctagcacccccgatccccccaggagggagctgcgcgccccctccccgccggtggagcaccccagactcctgcgctctgttcccacgcc

SEQ ID NO: 380404 - DNA, 152 bp, Homo sapiens
ccggtggagcaccccagactcctgcgctctgttcccacgcccctcgttatggcgcagaagatttccgagaggatggcggggaacgaagccctctcgcccacctccccgttcagggagggccggcccggggagtggaggacacctgccgcccg

SEQ ID NO: 380405 - DNA, 296 bp, Homo sapiens
gcctcagcctcccaaagtgctggaattacaggcacaggccaccatgctcagcctcatttttatactattttagactttatgtttaaaaaaattttaagatgctattaagtcttgaaacaaacatttttcattcattttctaactcctgggtaatttgctaggattataaactacttaaatttttttgctttagtttgggtgcagtggctcatgcctgtaatcccagcactttgggagtccaaggtaggtggatcgcctgaggtcaggagttcaagaccaggctggccaacatgaca

SEQ ID NO: 380406 - DNA, 641 bp, Homo sapiens
tgtcacctccactaggcagggacctcccagggcagggacggacgcacctgtcccagtcatggctgatcagcgagagccaaacatatcatagcacatggggtactgtaggtgttcaaaggatgctggctgaatggatggagacttccttcatagagccccattttccttcctgatttcttagtctcagttcccattttctctcaaagatccaggggtcacaatgagagtgattataaaacaaactacacatgcaacacgaactcctcagtcaatcccaagagggctctcactccacacttcatcatctgccctgtgacctcagattaaaactcaggcttaacatttcctgaggccctgctcggtgccaggttctgggtctgtgctttccagttgttttatgtatccttgataacctctgtatggttggtggtaaaatggagagatgtattttcctgcggggaaactgagtcctgagaaacgagctagcccacagagagctggtggctggtagagcccggatccaaaattgggagcgtcttgccccaagtccagtgctgtttcctttatacccaatgccacagagccaaagtggtacctggccgagatctggccctgaatgtagaagaggccagggaaaggtg

SEQ ID NO: 380407 - DNA, 437 bp, Homo sapiens
ttttttttttgggactgccccaaaggaatgcaggtttattgggcagcagctgggacacccaggttggagtgcacccaggttggagtgcagtggcgtcatcttggctcactgcaacctccgcctccctggttcaagccattctcctgcctcagcctcccgaatagctgggattacagacatctaccaccatgcctagctaatttttgtggttagtaaagacagcgtttcaccatgttggccaggctggtctcaaactcttgacctcaggtgatccacccacctcggcctcccaaagtgctggtattacaggcgtgagcctctgcgcccggcccagactcttcctttgtatccatagccagatgactgaactgtctgttttgactttttacaacatactatgtgtgtgtgctaaacaccgggaccccttagctggtgtc

SEQ ID NO: 380408 - DNA, 697 bp, Homo sapiens
tgtatgcatatatcagcagggatggtgaaatattgaaaaaagaaaacatatatcaaaacatcatgttataacctgaaatgtataccagttttatttgtcagttatatctaattaaaactggtaagggaaaagatgttggaaagttaaaaaaaaaaaaaaagtttaggcataggaaaaagcaaactaccttctcaagtctgtgttcattcacccagactctttctttgttttttgtttttgtttttttgagacagagtctcgctctgtcacccaggttggagttcacccaggttggagttcacccaggttggagttcacccaggttggagtgcacccaggttggagtgcagtggcgtcatcttggctcactgcaacctccgcctccctggttcaagccattctcctgcctcagcctcccgaatagctgggattacagacatctaccaccatgcctagctaatttttgtggttagtaaagacagcgtttcaccatgttggccaggctggtctcaaactcttgacctcaggtgatccacccacctcggcctcccaaagtgctggtattacaggcgtgagcctctgcgcccggcccagactcttcctttgtatccatagccagatgactgaactgtctgttttgactttttacaacatactatgtgtgtgtgctaaacaccgggaccccttagctggtgtc

SEQ ID NO: 380409 - DNA, 239 bp, Homo sapiens
ggtgatgtgcacacgctgctgatgtgtgggctggtgacagctgattgacagcccaagactgagagacaaggaagatgaagcttgcttagaacgcctgacgtgcactgtttatgcagcgctttgagctcaggcgctggtaccttaacccgttcgaggtccaggcatgctgtgccaggctgggcagactcctggctgtcctggggctagaagctgcagctcttccttcatgcttccaggga

SEQ ID NO: 380410 - DNA, 1027 bp, Homo sapiens
attttttttgtattttttagtagagacattgtttcaccgtgttagccaggatagtctcgatctcctgacctcatgatccgcccgcctcgacctcccaaagtgctgagattacaggcctgagccaccgcgcccggccacatagttttttttttttttttttataatacagactttccatgaactttttgaaaataccttgtatgtacaccacaaaacccattttctttatccatcctaaatgtcaatgggcacttagtttgtttccttatcttggctattgtgaataacataacaatgaacaggggagtgcagacatgtttacaaggtgatgatttcctctcctttgggaatatactcaggagagggattgctgcatcatatggtagttccatttttaatttctttaggaacctccatactgtttcctataatgactgtaccaatctacattcccactaacagtgtactgtggacctgaaaccataaaactcctagaagagaacacaggggaaaaacctcttgacatttgccttgacaatgattgttttttgaaacggaatctctcgttctgtcacccaggctggagtgcagtggcgcaatcttggttcactgcaacttctgcctcccgggttcaagcaattctcctgcctcagcctcccgagtagctgggactacaggcacgtgccaccacgcctggctaatttttgtatttttagtagagatggggtttcaccatgttggccaggctggtctcgaactattgacctcaaatgatccacccgccttgacctcgcaacgtgctgagattacaggtgtgagccactgcgcccggcctgatttttctttttcttaatatcacatcagaagctcaggctacaaaaacaaaaataaataaagggactacatcaaactaaaaaattctgcacaggagaggaaacaatcaacaaacttgaaaagcaacctatggactaggaaaatataattgcaaaccacatatctgataaggaattaatatccaaaaaatata

SEQ ID NO: 380411 - DNA, 383 bp, Homo sapiens
tggaaatcaaaatttaaaaaacaataccatttacaatagcgccaaacccaaagaaatacttatgtataaagctaataaaacatgagcataatctatatgctacgcaaaaaactacaaagctctaacaaaaaaaacgtcaaagacctaaatacatggagactatgtcatgttcttggtttagaggacttaatattgttaagatgtcaattctctccaattcatctgtaaattgaatgtaattccaatcaaataccagtgtttcttatagatatttgacaagctaattctaaaatttataaagaaaggtaaagaaattagaacagccaaaacaatcttgaaaaataagaaaaaaattgaaaggctcaatatacctgatttcaaaa

SEQ ID NO: 380412 - DNA, 370 bp, Homo sapiens
ctcacttgagatgccatatttgatcctccctagcattcctcaacttaagggctgttctttcttctgcaggaagaaggcttaagatgtgaactggaaagttcttattctccactgagaactaattgcctgcagcaggtttcggctcacttctagttgtttactattttccaagtcactgtgattccagaaggtattgggcctcagtggagctcaaaatggatattagctcttgggtgtgtttcatcgatttgggcacaggagggaaattatacacagaggattgtcatcctggacagttaaaaatttaaagtaaatgaactgaacaaacctcctcccttaaatagtgctcagaaatcaaagagctgaaaaa

SEQ ID NO: 380413 - DNA, 567 bp, Homo sapiens
cccccccccgagagtttttatttaataaacaaattatatgaagacatttttttttttaaaaacctggaaaaatgtttttattaaacacttacatttacttattttgtgctagacataaagcactcatgacaattatacctgatttgtcccccaacaaccctctgaggtaggtttattctgtctcctttaacagatgaatctggggcatagaggggcagtcacttgcccaaggttccccagtggtagagctggggtttgaccctgggcagcctggcctgagttcttggcttgtcaccactcatcttcctctgtcagtgccatgatgagtctaggtgagaggagatgaagcagaccagggaaaggacatgagcatggagtggggtgtggttagttgctgttcaggaagcttggtgattgggctcgccaagcaggacgacattggattatgcccacgttcatggcttgggggcactcttagccagagttaagggcccgggattcccagcacaattgtgacacttagctgtggggagtcctccatgcccttctcaggcggtgatgggctgc

SEQ ID NO: 380414 - DNA, 282 bp, Homo sapiens
aggcccactctagaggttcccctgctcatccctcctatccctccttggtggaaactaattctaagccagactgctggagatcaccctgttctagtgtgtggaggcttccaccaggaggtaagtcaaaatggtttctgccctctagtttttgataggtcagctttgtcctgagcaggatctctaccatttactttttccctgacccagattcttcaaagtgattgtctttgtctttcaattatttgaggcaaacaggttactgaaggagggatgagcatgagg

SEQ ID NO: 380415 - DNA, 907 bp, Homo sapiens
  misc_feature (857)..(857): n is a, c, g, or t
tgacagtggagggaaaggcccagacaaggttttttgacaagggcggggccagattgtcactaaagtgtcccacggataacctcgggggaatcactgcccccacaaggagggaatatttgtctattgaagatctctgccctgagtctgtctctttaaatatgaagccacagatgtgcccaatacaatctcggcgctcgtgtataagaatgatatagtaacgccctgatgcagtctcttcttattctcacaccttctcccgtcgggtgtgcccccgggcgtagtgaccacacaaatggggtgccacatagaggtgcacacacaagacgcgtcactagggggagtagagccctgtgtccccgcgccagagcagcccccacgcgtcacgggcccaatatcagggtcacgacgccagcacccgacgagagcgaccagatcccctgtcgcgcaatcacgacccatgaccagagattcagagtgggttgggctagagaaaccatctactatatacatgtgtgtgtgtgtgtgtgtgtgtgtgtgtgtgtgtgtgtgtataaatgcttgtgcctgggtctgtgacccaagttccaacacaaagacactttgtactggaacgctggagccattccaacatgaacagcaagaatagaacctgtgctggctggtctaagatcaacctcgagatggtggtttgaagttcttcttcaaagaaagcttgaaaatgaaatctcagtaggcaagacagataaaagcagagttattctggtgcggcggaaatgggaggagggctggaaacctatcctttgcctccactcccatcttcccactttagcatcccctgacaagctctgtggaatatncggggttcccctcgtccgattaaccccggcctcgacctagcctatgttgg

SEQ ID NO: 380416 - DNA, 808 bp, Homo sapiens
ctttgccttcaagtacaggccggggtccggaagcggtgataccccttctctttcccagtggccctcaaacttccttttcccgggtccttaagcgggccccgccgacagaggccaatcagagggcagcgcgagggggcggggccatagtttaaactaattgtgcgctcacagcgctggcgcgagcccacgaagaggtacgattccggagaatcgcgaggcagagcgggagcgcgcagccaggtggaaactaattctaagccagactgctggagatcaccctgttctagtgtgtggaggcttccaccaggaggaaactgcagctgaggagccattgcagtcccatctccagaagacccccagaaagagttggaagagttcttcaggctgtggcagccactgcccaccaacacacccaaatcaatcaagatgaatcccaggtggtgaggctgaagcagatggtttggtagctccagtctttttttaggcagaaatgatgtattaaatcactacattgatttttttgttgttgttagcagttgtgggtttgaaaaaaggtaggcaggaagatggtgaaggggtcaagcctaggggctgttatcttgaatatatgcaaattaagctgattatattgtagtgccctgtaacctgttcctggaaacagtggtcttgaaaactcatcagttaaatgaggtgttagacagcctggtcaaaagattctgtgactaagttactgtataatcatttgcaattctctttcttactctaaacattgttttcctcatttttatattgaaagagttaagagatg

SEQ ID NO: 380417 - DNA, 461 bp, Homo sapiens
gccagataccagggcctgcaatttgtgtacctgtccttcgtttatcccaacgactacactcgcctcacccacatggagacggacaacaagtgcttctaccgcgagtctccgctgtatctggagaggtttgggttctataaatacatgaagatggacagcgcctggagaattcaccaagttcaactcccaagtgtccaagcccaggcggctcatggcttcccggaggtactactttgagttgctgcacaagcaggacgaccgcggctcggaccacgtggaagtgggctggcgagctttcctgcccggcctgaagttcgaggccttcagcagcagctcacaccctaccttccccagacttgcactggggtgggatttggagtgatgggaaggtttttaagggccggggatggatcttttctaaatgttattacttgtaaataaagtctatttttctcccgtga

SEQ ID NO: 380418 - DNA, 261 bp, Homo sapiens
aggagtctgaagcacctgtggagccccagtggctggtgcagataagcggacttgggtagagcggccagaccagctttcctgagtggcctttcttctcaggctgtccaggctcagggaggcgagagccagcaggaggcccagcgcctccaggcccagctgaatgaactgcaagcccagttgagccagaaggagcaggcagctgagcactataagctgcaggtaaggagcccagccccagcccatgccaccttcctcctgccc

SEQ ID NO: 380419 - DNA, 7241 bp, Homo sapiens
ctttgccttcaagtacaggccggggtccggaagcggtgataccccttctctttcccagtggccctcaaacttccttttcccgggtccttaagcgggccccgccgacagaggccaatcagagggcagcgcgagggggcggggccatagtttaaactaattgtgcgctcacagcgctggcgcgagcccacgaagaggtacgattccggagaatcgcgaggcagagcgggagcgcgcagccaggcgcattggagtgactgtctggcatcaccaagatgacactccacgccacccggggggctgcactcctctcttgggtgaacagtctacacgtggctgaccctgtggaggctgtgctgcagctccaggactgcagcatcttcatcaagatcattgacagaatccatggcactgaagagggacagcaaatcttgaagcagccggtgtcagagagactggactttgtgtgcagttttctgcagaaaaatcgaaaacatccctcttccccagaatgcctggtatctgcacagaaggtgctagagggatcagagctggaactggcgaagatgaccatgctgctcttataccactctaccatgagctccaaaagtcccagggactgggaacagtttgaatataaaattcaggctgagttggctgtcattcttaaatttgtgctggaccatgaggacgggctaaaccttaatgaggacctagagaacttcctacagaaagctcctgtgccttctacctgttctagcacattccctgaagagctctccccacctagccaccaggccaagagggagattcgcttcctagagctacagaaggttgcctcctcttccagtgggaacaactttctctcaggttctccagcttctcccatgggtgatatcctgcagaccccacagttccagatgagacggctgaagaagcagcttgctgatgagagaagtaatagggatgagctggagctggagctagctgagaaccgcaagctcctcaccgagaaggatgcacagatagccatgatgcagcagcgcattgaccgcctagccctgctgaatgagaagcaggcggccagcccactggagcccaaggagcttgaggagctgcgtgacaagaatgagagccttaccatgcggctgcatgaaaccctgaagcagtgccaggacctgaagacagagaagagccagatggatcgcaaaatcaaccagctttcggaggagaatggagacctttcctttaagctgcgggagtttgccagtcatctgcagcagctacaggatgccctcaatgagctgacggaggagcacagcaaggccactcaggagtggctagagaagcaggcccagctggagaaggagctcagcgcagccctgcaggacaagaaatgccttgaagagaagaacgaaatccttcagggaaaactttcacagctggaagaacacttgtcccagctgcaggataacccaccccaggagaagggcgaggtgctgggtgatgtcttgcagctggaaaccttgaagcaagaggcagccactcttgctgcaaacaacacacagctccaagccagggtagagatgctggagactgagcgaggccagcaggaagccaagctgcttgctgagcggggccacttcgaagaagaaaagcagcagctgtctagcctgatcactgacctgcagagctccatctccaacctcagccaggccaaggaagagctggagcaggcctcccaggctcatggggcccggttgactgcccaggtggcctctctgacctctgagctcaccacactcaatgccaccatccagcaacaggatcaagaactggctggcctgaagcagcaggccaaagagaagcaggcccagctagcacagaccctccaacagcaagaacaggcctcccagggcctccgccaccaggtggagcagctaagcagtagcctgaagcagaaggagcagcagttgaaggaggtagcggagaagcaggaggcaactaggcaggaccatgcccagcaactggccactgctgcagaggagcgagaggcctccttaagggagcgggatgcggctctcaagcagctggaggcactggagaaggagaaggctgccaagctggagattctgcagcagcaacttcaggtggctaatgaagcccgggacagtgcccagacctcagtgacacaggcccagcgggagaaggcagagctgagccggaaggtggaggaactccaggcctgtgttgagacagcccgccaggaacagcatgaggcccaggcccaggttgcagagctagagttgcagctgcggtctgagcagcaaaaagcaactgagaaagaaagggtggcccaggagaaggaccagctccaggagcagctccaggccctcaaagagtccttgaaggtcaccaagggcagccttgaagaggagaagcgcagggctgcagatgccctggaagagcagcagcgttgtatctctgagctgaaggcagagacccgaagcctggtggagcagcataagcgggaacgaaaggagctggaagaagagagggctgggcgcaaggggctggaggctcgattacagcagcttggggaggcccatcaggctgagactgaagtcctgcggcgggagctggcagaggccatggctgcccagcacacagctgagagtgagtgtgagcagctcgtcaaagaagtagctgcctggcgtgagcggtatgaggatagccagcaagaggaggcacagtatggcgccatgttccaggaacagctgatgactttgaaggaggaatgtgagaaggcccgccaggagctgcaggaggcaaaggagaaggtggcaggcatagaatcccacagcgagctccagataagccggcagcagaacgaactagctgagctccatgccaacctggccagagcactccagcaggtccaagagaaggaagtcagggcccagaagcttgcagatgacctctccactctgcaggaaaagatggctgccaccagcaaagaggtggcccgcttggagaccttggtgcgcaaggcaggtgagcagcaggaaacagcctcccgggagttagtcaaggagcctgcgagggcaggagacagacagcccgagtggctggaagagcaacagggacgccagttctgcagcacacaggcagcgctgcaggctatggagcgggaggcagagcagatgggcaatgagctggaacggctgcgggccgcgctgatggagagccaggggcagcagcaggaggagcgtgggcagcaggaaagggaggtggcgcggctgacccaggagcggggccgtgcccaggctgaccttgccctggagaaggcggccagagcagagcttgagatgcggctgcagaacgccctcaacgagcagcgtgtggagttcgctaccctgcaagaggcactggctcatgccctgacggaaaaggaaggcaaggaccaggagttggccaagcttcgtggtctggaggcagcccagataaaagagctggaggaacttcggcaaaccgtgaagcaactgaaggaacagctggctaagaaagaaaaggagcacgcatctggctcaggagcccaatctgaggctgctggcaggacagagccaacaggccccaagctggaggcactgcgggcagaggtgagcaagctggaacagcaatgccagaagcagcaggagcaggctgacagcctggaacgcagcctcgaggctgagcgggcctcccgggctgagcgggacagtgctctggagactctgcagggccagttagaggagaaggcccaggagctagggcacagtcagagtgccttagcctcggcccaacgggagttggctgccttccgcaccaaggtacaagaccacagcaaggctgaagatgagtggaaggcccaggtggcccggggccggcaagaggctgagaggaaaaatagcctcatcagcagcttggaggaggaggtgtccatcctgaatcgccaggtcctggagaaggagggggagagcaaggagttgaagcggctggtgatggccgagtcagagaagagccagaagctggaggagaggctgcgcctgctgcaggcagagacagccagcaacagtgccagagctgcagaacgcagctctgctctgcgggaggaggtgcagagcctccgggaggaggctgagaaacagcgggtggcttcagagaacctgcggcaggagctgacctcacaggctgagcgtgcggaggagctgggccaagaattgaaggcgtggcaggagaagttcttccagaaagagcaggccctctccaccctgcagctcgagcacaccagcacacaggccctggtgagtgagctgctgccagctaagcacctctgccagcagctgcaggccgagcaggccgctgccgagaaacgccaccgtgaggagctggagcagagcaagcaggccgctgggggactgcgggcagagctgctgcgggcccagcgggagcttggggagctgattcctctgcggcagaaggtggcagagcaggagcgaacagctcagcagctgcgggcagagaaggccagctatgcagagcagctgagcatgctgaagaaggcgcatggcctgctggcagaggagaaccgggggctgggtgagcgggccaaccttggccggcagtttctggaagtggagttggaccaggcccgggagaagtatgtccaagagttggcagccgtacgtgctgatgctgagacccgtctggctgaggtgcagcgagaagcacagagcactgcccgggagctggaggtgatgactgccaagtatgagggtgccaaggtcaaggtcctggaggagaggcagcggttccaggaagagaggcagaaactcactgcccaggtggaagaactgagtaagaaactggctgactctgaccaagccagcaaggtgcagcagcagaagctgaaggctgtccaggctcagggaggcgagagccagcaggaggcccagcgcctccaggcccagctgaatgaactgcaagcccagttgagccagaaggagcaggcagctgagcactataagctgcagatggagaaagccaaaacacattatgatgccaagaagcagcagaaccaagagctgcaggagcagctgcggagcctggagcagctgcagaaggaaaacaaagagctgcgagctgaagctgaacggctgggccatgagctacagcaggctgggctgaagaccaaggaggctgaacagacctgccgccaccttactgcccaggtgcgcagcctggaggcacaggttgcccatgcagaccagcagcttcgagacctgggcaaattccaggtggcaactgatgctttaaagagccgtgagccccaggctaagccccagctggacttgagtattgacagcctggatctgagctgcgaggaggggaccccactcagtatcaccagcaagctgcctcgtacccagccagacggcaccagcgtccctggagaaccagcctcacctatctcccagcgcctgccccccaaggtagaatccctggagagtctctacttcactcccatccctgctcggagtcaggcccccctggagagcagcctggactccctgggagacgtcttcctggactcgggtcgtaagacccgctccgctcgtcggcgcaccacgcagatcatcaacatcaccatgaccaagaagctagatgtggaagagccagacagcgccaactcatcgttctacagcacgcggtctgctcctgcttcccaggctagcctgcgagccacctcctctactcagtctctagctcgcctgggttctcccgattatggcaactcagccctgctcagcttgcctggctaccgccccaccactcgcagttctgctcgtcgttcccaggccggggtgtccagtggggcccctccaggaaggaacagcttctacatgggcacttgccaggatgagcctgagcagctggatgactggaaccgcattgcagagctgcagcagcgcaatcgagtgtgccccccacatctgaagacctgctatcccctggagtccaggccttccctgagcctgggcaccatcacagatgaggagatgaaaactggagacccccaagagaccctgcgccgagccagcatgcagccaatccagatagccgagggcactggcatcaccacccggcagcagcgcaaacgggtctccctagagccccaccagggccctggaactcctgagtctaagaaggccaccagctgtttcccacgccccatgactccccgagaccgacatgaagggcgcaaacagagcactactgaggcccagaagaaagcagctccagcttctactaaacaggctgaccggcgccagtcgatggccttcagcatcctcaacacacccaagaagctagggaacagccttctgcggcggggagcctcaaagaaggccctgtccaaggcttcccccaacactcgcagtggaacccgccgttctccgcgcattgccaccaccacagccagcgccgccactgctgccgccattggtgccacccctcgagccaagggcaaggcaaagcactaaagggccagtaccagtgagtggccccacctgtgtccccgatgctgccgtcacctggtcctccgcctactgtccctctcagtgccttctctcagctcccaggccaacagtagccaaacccctagagacagtgatgcctgcccgcaccctggcctggtccctggtccttcactggcgccttctcggagctggcccagggggcctggagcatggacagtgtgggcgctctccctaccttgcctccttttttcttaaagcaaagtcacttctccatcacaaccagatttgaggctggttttgatggctgggtccttgggcctggccagtcttcctcttagcctctggatctagaagggaccataagaggagtaggccctggttcctgctgtcctggtggctgggcccagcaggggccctcactcttgaagtccaggactgggtctgacctggtgggagcacctgccagaggatgctctttcccaggacggatgggccctgtgtctcaggagtggggttgggggacagccttcagcagcagctcacaccctaccttccccagacttgcactggggtgggatttggagtgatgggaaggtttttaagggccggggatggatcttttctaaatgttattacttgtaaataaagtctatttttctcccgtga

SEQ ID NO: 380420 - DNA, 6896 bp, Homo sapiens
aagtcaggcccgcgttccttttcgccaagacacatttcattcgaagaaagaacgacctctctatctcatactcttggagcaggtggtgttggtgaccccgtccagagaagagagtgtgcccatgctgcccgcactgtgaccatcctggtttggcaattcatcgtccaggatgtctgtctcccgctcagatgctaacgccccaccgagaactggcgaagatgaccatgctgctcttataccactctaccatgagctccaaaagtcccagggactgggaacagtttgaatataaaattcaggctgagttggctgtcattcttaaatttgtgctggaccatgaggacgggctaaaccttaatgaggacctagagaacttcctacagaaagctcctgtgccttctacctgttctagcacattccctgaagagctctccccacctagccaccaggccaagagggagattcgcttcctagagctacagaaggttgcctcctcttccagtgggaacaactttctctcaggttctccagcttctcccatgggtgatatcctgcagaccccacagttccagatgagacggctgaagaagcagcttgctgatgagagaagtaatagggatgagctggagctggagctagctgagaaccgcaagctcctcaccgagaaggatgcacagatagccatgatgcagcagcgcattgaccgcctagccctgctgaatgagaagcaggcggccagcccactggagcccaaggagcttgaggagctgcgtgacaagaatgagagccttaccatgcggctgcatgaaaccctgaagcagtgccaggacctgaagacagagaagagccagatggatcgcaaaatcaaccagctttcggaggagaatggagacctttcctttaagctgcgggagtttgccagtcatctgcagcagctacaggatgccctcaatgagctgacggaggagcacagcaaggccactcaggagtggctagagaagcaggcccagctggagaaggagctcagcgcagccctgcaggacaagaaatgccttgaagagaagaacgaaatccttcagggaaaactttcacagctggaagaacacttgtcccagctgcaggataacccaccccaggagaagggcgaggtgctgggtgatgtcttgcagctggaaaccttgaagcaagaggcagccactcttgctgcaaacaacacacagctccaagccagggtagagatgctggagactgagcgaggccagcaggaagccaagctgcttgctgagcggggccacttcgaagaagaaaagcagcagctgtctagcctgatcactgacctgcagagctccatctccaacctcagccaggccaaggaagagctggagcaggcctcccaggctcatggggcccggttgactgcccaggtggcctctctgacctctgagctcaccacactcaatgccaccatccagcaacaggatcaagaactggctggcctgaagcagcaggccaaagagaagcaggcccagctagcacagaccctccaacagcaagaacaggcctcccagggcctccgccaccaggtggagcagctaagcagtagcctgaagcagaaggagcagcagttgaaggaggtagcggagaagcaggaggcaactaggcaggaccatgcccagcaactggccactgctgcagaggagcgagaggcctccttaagggagcgggatgcggctctcaagcagctggaggcactggagaaggagaaggctgccaagctggagattctgcagcagcaacttcaggtggctaatgaagcccgggacagtgcccagacctcagtgacacaggcccagcgggagaaggcagagctgagccggaaggtggaggaactccaggcctgtgttgagacagcccgccaggaacagcatgaggcccaggcccaggttgcagagctagagttgcagctgcggtctgagcagcaaaaagcaactgagaaagaaagggtggcccaggagaaggaccagctccaggagcagctccaggccctcaaagagtccttgaaggtcaccaagggcagccttgaagaggagaagcgcagggctgcagatgccctggaagagcagcagcgttgtatctctgagctgaaggcagagacccgaagcctggtggagcagcataagcgggaacgaaaggagctggaagaagagagggctgggcgcaaggggctggaggctcgattacagcagcttggggaggcccatcaggctgagactgaagtcctgcggcgggagctggcagaggccatggctgcccagcacacagctgagagtgagtgtgagcagctcgtcaaagaagtagctgcctggcgtgagcggtatgaggatagccagcaagaggaggcacagtatggcgccatgttccaggaacagctgatgactttgaaggaggaatgtgagaaggcccgccaggagctgcaggaggcaaaggagaaggtggcaggcatagaatcccacagcgagctccagataagccggcagcagaacgaactagctgagctccatgccaacctggccagagcactccagcaggtccaagagaaggaagtcagggcccagaagcttgcagatgacctctccactctgcaggaaaagatggctgccaccagcaaagaggtggcccgcttggagaccttggtgcgcaaggcaggtgagcagcaggaaacagcctcccgggagttagtcaaggagcctgcgagggcaggagacagacagcccgagtggctggaagagcaacagggacgccagttctgcagcacacaggcagcgctgcaggctatggagcgggaggcagagcagatgggcaatgagctggaacggctgcgggccgcgctgatggagagccaggggcagcagcaggaggagcgtgggcagcaggaaagggaggtggcgcggctgacccaggagcggggccgtgcccaggctgaccttgccctggagaaggcggccagagcagagcttgagatgcggctgcagaacgccctcaacgagcagcgtgtggagttcgctaccctgcaagaggcactggctcatgccctgacggaaaaggaaggcaaggaccaggagttggccaagcttcgtggtctggaggcagcccagataaaagagctggaggaacttcggcaaaccgtgaagcaactgaaggaacagctggctaagaaagaaaaggagcacgcatctggctcaggagcccaatctgaggctgctggcaggacagagccaacaggccccaagctggaggcactgcgggcagaggtgagcaagctggaacagcaatgccagaagcagcaggagcaggctgacagcctggaacgcagcctcgaggctgagcgggcctcccgggctgagcgggacagtgctctggagactctgcagggccagttagaggagaaggcccaggagctagggcacagtcagagtgccttagcctcggcccaacgggagttggctgccttccgcaccaaggtacaagaccacagcaaggctgaagatgagtggaaggcccaggtggcccggggccggcaagaggctgagaggaaaaatagcctcatcagcagcttggaggaggaggtgtccatcctgaatcgccaggtcctggagaaggagggggagagcaaggagttgaagcggctggtgatggccgagtcagagaagagccagaagctggaggagaggctgcgcctgctgcaggcagagacagccagcaacagtgccagagctgcagaacgcagctctgctctgcgggaggaggtgcagagcctccgggaggaggctgagaaacagcgggtggcttcagagaacctgcggcaggagctgacctcacaggctgagcgtgcggaggagctgggccaagaattgaaggcgtggcaggagaagttcttccagaaagagcaggccctctccaccctgcagctcgagcacaccagcacacaggccctggtgagtgagctgctgccagctaagcacctctgccagcagctgcaggccgagcaggccgctgccgagaaacgccaccgtgaggagctggagcagagcaagcaggccgctgggggactgcgggcagagctgctgcgggcccagcgggagcttggggagctgattcctctgcggcagaaggtggcagagcaggagcgaacagctcagcagctgcgggcagagaaggccagctatgcagagcagctgagcatgctgaagaaggcgcatggcctgctggcagaggagaaccgggggctgggtgagcgggccaaccttggccggcagtttctggaagtggagttggaccaggcccgggagaagtatgtccaagagttggcagccgtacgtgctgatgctgagacccgtctggctgaggtgcagcgagaagcacagagcactgcccgggagctggaggtgatgactgccaagtatgagggtgccaaggtcaaggtcctggaggagaggcagcggttccaggaagagaggcagaaactcactgcccaggtggaagaactgagtaagaaactggctgactctgaccaagccagcaaggtgcagcagcagaagctgaaggctgtccaggctcagggaggcgagagccagcaggaggcccagcgcctccaggcccagctgaatgaactgcaagcccagttgagccagaaggagcaggcagctgagcactataagctgcagatggagaaagccaaaacacattatgatgccaagaagcagcagaaccaagagctgcaggagcagctgcggagcctggagcagctgcagaaggaaaacaaagagctgcgagctgaagctgaacggctgggccatgagctacagcaggctgggctgaagaccaaggaggctgaacagacctgccgccaccttactgcccaggtgcgcagcctggaggcacaggttgcccatgcagaccagcagcttcgagacctgggcaaattccaggtggcaactgatgctttaaagagccgtgagccccaggctaagccccagctggacttgagtattgacagcctggatctgagctgcgaggaggggaccccactcagtatcaccagcaagctgcctcgtacccagccagacggcaccagcgtccctggagaaccagcctcacctatctcccagcgcctgccccccaaggtagaatccctggagagtctctacttcactcccatccctgctcggagtcaggcccccctggagagcagcctggactccctgggagacgtcttcctggactcgggtcgtaagacccgctccgctcgtcggcgcaccacgcagatcatcaacatcaccatgaccaagaagctagatgtggaagagccagacagcgccaactcatcgttctacagcacgcggtctgctcctgcttcccaggctagcctgcgagccacctcctctactcagtctctagctcgcctgggttctcccgattatggcaactcagccctgctcagcttgcctggctaccgccccaccactcgcagttctgctcgtcgttcccaggccggggtgtccagtggggcccctccaggaaggaacagcttctacatgggcacttgccaggatgagcctgagcagctggatgactggaaccgcattgcagagctgcagcagcgcaatcgagtgtgccccccacatctgaagacctgctatcccctggagtccaggccttccctgagcctgggcaccatcacagatgaggagatgaaaactggagacccccaagagaccctgcgccgagccagcatgcagccaatccagatagccgagggcactggcatcaccacccggcagcagcgcaaacgggtctccctagagccccaccagggccctggaactcctgagtctaagaaggccaccagctgtttcccacgccccatgactccccgagaccgacatgaagggcgcaaacagagcactactgaggcccagaagaaagcagctccagcttctactaaacaggctgaccggcgccagtcgatggccttcagcatcctcaacacacccaagaagctagggaacagccttctgcggcggggagcctcaaagaaggccctgtccaaggcttcccccaacactcgcagtggaacccgccgttctccgcgcattgccaccaccacagccagcgccgccactgctgccgccattggtgccacccctcgagccaagggcaaggcaaagcactaaagggccagtaccagtgagtggccccacctgtgtccccgatgctgccgtcacctggtcctccgcctactgtccctctcagtgccttctctcagctcccaggccaacagtagccaaacccctagagacagtgatgcctgcccgcaccctggcctggtccctggtccttcactggcgccttctcggagctggcccagggggcctggagcatggacagtgtgggcgctctccctaccttgcctccttttttcttaaagcaaagtcacttctccatcacaaccagatttgaggctggttttgatggctgggtccttgggcctggccagtcttcctcttagcctctggatctagaagggaccataagaggagtaggccctggttcctgctgtcctggtggctgggcccagcaggggccctcactcttgaagtccaggactgggtctgacctggtgggagcacctgccagaggatgctctttcccaggacggatgggccctgtgtctcaggagtggggttgggggacagccttcagcagcagctcacaccctaccttccccagacttgcactggggtgggatttggagtgatgggaaggtttttaagggccggggatggatcttttctaaatgttattacttgtaaataaagtctatttttctcccgtga

SEQ ID NO: 380421 - DNA, 7365 bp, Homo sapiens
ctttgccttcaagtacaggccggggtccggaagcggtgataccccttctctttcccagtggccctcaaacttccttttcccgggtccttaagcgggccccgccgacagaggccaatcagagggcagcgcgagggggcggggccatagtttaaactaattgtgcgctcacagcgctggcgcgagcccacgaagaggtacgattccggagaatcgcgaggcagagcgggagcgcgcagccaggtggaaactaattctaagccagactgctggagatcaccctgttctagtgtgtggaggcttccaccaggaggcgcattggagtgactgtctggcatcaccaagatgacactccacgccacccggggggctgcactcctctcttgggtgaacagtctacacgtggctgaccctgtggaggctgtgctgcagctccaggactgcagcatcttcatcaagatcattgacagaatccatggcactgaagagggacagcaaatcttgaagcagccggtgtcagagagactggactttgtgtgcagttttctgcagaaaaatcgaaaacatccctcttccccagaatgcctggtatctgcacagaaggtgctagagggatcagagctggaactggcgaagatgaccatgctgctcttataccactctaccatgagctccaaaagtcccagggactgggaacagtttgaatataaaattcaggctgagttggctgtcattcttaaatttgtgctggaccatgaggacgggctaaaccttaatgaggacctagagaacttcctacagaaagctcctgtgccttctacctgttctagcacattccctgaagagctctccccacctagccaccaggccaagagggagattcgcttcctagagctacagaaggttgcctcctcttccagtgggaacaactttctctcaggttctccagcttctcccatgggtgatatcctgcagaccccacagttccagatgagacggctgaagaagcagcttgctgatgagagaagtaatagggatgagctggagctggagctagctgagaaccgcaagctcctcaccgagaaggatgcacagatagccatgatgcagcagcgcattgaccgcctagccctgctgaatgagaagcaggcggccagcccactggagcccaaggagcttgaggagctgcgtgacaagaatgagagccttaccatgcggctgcatgaaaccctgaagcagtgccaggacctgaagacagagaagagccagatggatcgcaaaatcaaccagctttcggaggagaatggagacctttcctttaagctgcgggagtttgccagtcatctgcagcagctacaggatgccctcaatgagctgacggaggagcacagcaaggccactcaggagtggctagagaagcaggcccagctggagaaggagctcagcgcagccctgcaggacaagaaatgccttgaagagaagaacgaaatccttcagggaaaactttcacagctggaagaacacttgtcccagctgcaggataacccaccccaggagaagggcgaggtgctgggtgatgtcttgcagctggaaaccttgaagcaagaggcagccactcttgctgcaaacaacacacagctccaagccagggtagagatgctggagactgagcgaggccagcaggaagccaagctgcttgctgagcggggccacttcgaagaagaaaagcagcagctgtctagcctgatcactgacctgcagagctccatctccaacctcagccaggccaaggaagagctggagcaggcctcccaggctcatggggcccggttgactgcccaggtggcctctctgacctctgagctcaccacactcaatgccaccatccagcaacaggatcaagaactggctggcctgaagcagcaggccaaagagaagcaggcccagctagcacagaccctccaacagcaagaacaggcctcccagggcctccgccaccaggtggagcagctaagcagtagcctgaagcagaaggagcagcagttgaaggaggtagcggagaagcaggaggcaactaggcaggaccatgcccagcaactggccactgctgcagaggagcgagaggcctccttaagggagcgggatgcggctctcaagcagctggaggcactggagaaggagaaggctgccaagctggagattctgcagcagcaacttcaggtggctaatgaagcccgggacagtgcccagacctcagtgacacaggcccagcgggagaaggcagagctgagccggaaggtggaggaactccaggcctgtgttgagacagcccgccaggaacagcatgaggcccaggcccaggttgcagagctagagttgcagctgcggtctgagcagcaaaaagcaactgagaaagaaagggtggcccaggagaaggaccagctccaggagcagctccaggccctcaaagagtccttgaaggtcaccaagggcagccttgaagaggagaagcgcagggctgcagatgccctggaagagcagcagcgttgtatctctgagctgaaggcagagacccgaagcctggtggagcagcataagcgggaacgaaaggagctggaagaagagagggctgggcgcaaggggctggaggctcgattacagcagcttggggaggcccatcaggctgagactgaagtcctgcggcgggagctggcagaggccatggctgcccagcacacagctgagagtgagtgtgagcagctcgtcaaagaagtagctgcctggcgtgagcggtatgaggatagccagcaagaggaggcacagtatggcgccatgttccaggaacagctgatgactttgaaggaggaatgtgagaaggcccgccaggagctgcaggaggcaaaggagaaggtggcaggcatagaatcccacagcgagctccagataagccggcagcagaacgaactagctgagctccatgccaacctggccagagcactccagcaggtccaagagaaggaagtcagggcccagaagcttgcagatgacctctccactctgcaggaaaagatggctgccaccagcaaagaggtggcccgcttggagaccttggtgcgcaaggcaggtgagcagcaggaaacagcctcccgggagttagtcaaggagcctgcgagggcaggagacagacagcccgagtggctggaagagcaacagggacgccagttctgcagcacacaggcagcgctgcaggctatggagcgggaggcagagcagatgggcaatgagctggaacggctgcgggccgcgctgatggagagccaggggcagcagcaggaggagcgtgggcagcaggaaagggaggtggcgcggctgacccaggagcggggccgtgcccaggctgaccttgccctggagaaggcggccagagcagagcttgagatgcggctgcagaacgccctcaacgagcagcgtgtggagttcgctaccctgcaagaggcactggctcatgccctgacggaaaaggaaggcaaggaccaggagttggccaagcttcgtggtctggaggcagcccagataaaagagctggaggaacttcggcaaaccgtgaagcaactgaaggaacagctggctaagaaagaaaaggagcacgcatctggctcaggagcccaatctgaggctgctggcaggacagagccaacaggccccaagctggaggcactgcgggcagaggtgagcaagctggaacagcaatgccagaagcagcaggagcaggctgacagcctggaacgcagcctcgaggctgagcgggcctcccgggctgagcgggacagtgctctggagactctgcagggccagttagaggagaaggcccaggagctagggcacagtcagagtgccttagcctcggcccaacgggagttggctgccttccgcaccaaggtacaagaccacagcaaggctgaagatgagtggaaggcccaggtggcccggggccggcaagaggctgagaggaaaaatagcctcatcagcagcttggaggaggaggtgtccatcctgaatcgccaggtcctggagaaggagggggagagcaaggagttgaagcggctggtgatggccgagtcagagaagagccagaagctggaggagaggctgcgcctgctgcaggcagagacagccagcaacagtgccagagctgcagaacgcagctctgctctgcgggaggaggtgcagagcctccgggaggaggctgagaaacagcgggtggcttcagagaacctgcggcaggagctgacctcacaggctgagcgtgcggaggagctgggccaagaattgaaggcgtggcaggagaagttcttccagaaagagcaggccctctccaccctgcagctcgagcacaccagcacacaggccctggtgagtgagctgctgccagctaagcacctctgccagcagctgcaggccgagcaggccgctgccgagaaacgccaccgtgaggagctggagcagagcaagcaggccgctgggggactgcgggcagagctgctgcgggcccagcgggagcttggggagctgattcctctgcggcagaaggtggcagagcaggagcgaacagctcagcagctgcgggcagagaaggccagctatgcagagcagctgagcatgctgaagaaggcgcatggcctgctggcagaggagaaccgggggctgggtgagcgggccaaccttggccggcagtttctggaagtggagttggaccaggcccgggagaagtatgtccaagagttggcagccgtacgtgctgatgctgagacccgtctggctgaggtgcagcgagaagcacagagcactgcccgggagctggaggtgatgactgccaagtatgagggtgccaaggtcaaggtcctggaggagaggcagcggttccaggaagagaggcagaaactcactgcccaggtggaagaactgagtaagaaactggctgactctgaccaagccagcaaggtgcagcagcagaagctgaaggctgtccaggctcagggaggcgagagccagcaggaggcccagcgcctccaggcccagctgaatgaactgcaagcccagttgagccagaaggagcaggcagctgagcactataagctgcagatggagaaagccaaaacacattatgatgccaagaagcagcagaaccaagagctgcaggagcagctgcggagcctggagcagctgcagaaggaaaacaaagagctgcgagctgaagctgaacggctgggccatgagctacagcaggctgggctgaagaccaaggaggctgaacagacctgccgccaccttactgcccaggtgcgcagcctggaggcacaggttgcccatgcagaccagcagcttcgagacctgggcaaattccaggtggcaactgatgctttaaagagccgtgagccccaggctaagccccagctggacttgagtattgacagcctggatctgagctgcgaggaggggaccccactcagtatcaccagacataaagcactcatgacaattatacctgatttgtcccccaacaaccctctgagcaagctgcctcgtacccagccagacggcaccagcgtccctggagaaccagcctcacctatctcccagcgcctgccccccaaggtagaatccctggagagtctctacttcactcccatccctgctcggagtcaggcccccctggagagcagcctggactccctgggagacgtcttcctggactcgggtcgtaagacccgctccgctcgtcggcgcaccacgcagatcatcaacatcaccatgaccaagaagctagatgtggaagagccagacagcgccaactcatcgttctacagcacgcggtctgctcctgcttcccaggctagcctgcgagccacctcctctactcagtctctagctcgcctgggttctcccgattatggcaactcagccctgctcagcttgcctggctaccgccccaccactcgcagttctgctcgtcgttcccaggccggggtgtccagtggggcccctccaggaaggaacagcttctacatgggcacttgccaggatgagcctgagcagctggatgactggaaccgcattgcagagctgcagcagcgcaatcgagtgtgccccccacatctgaagacctgctatcccctggagtccaggccttccctgagcctgggcaccatcacagatgaggagatgaaaactggagacccccaagagaccctgcgccgagccagcatgcagccaatccagatagccgagggcactggcatcaccacccggcagcagcgcaaacgggtctccctagagccccaccagggccctggaactcctgagtctaagaaggccaccagctgtttcccacgccccatgactccccgagaccgacatgaagggcgcaaacagagcactactgaggcccagaagaaagcagctccagcttctactaaacaggctgaccggcgccagtcgatggccttcagcatcctcaacacacccaagaagctagggaacagccttctgcggcggggagcctcaaagaaggccctgtccaaggcttcccccaacactcgcagtggaacccgccgttctccgcgcattgccaccaccacagccagcgccgccactgctgccgccattggtgccacccctcgagccaagggcaaggcaaagcactaaagggccagtaccagtgagtggccccacctgtgtccccgatgctgccgtcacctggtcctccgcctactgtccctctcagtgccttctctcagctcccaggccaacagtagccaaacccctagagacagtgatgcctgcccgcaccctggcctggtccctggtccttcactggcgccttctcggagctggcccagggggcctggagcatggacagtgtgggcgctctccctaccttgcctccttttttcttaaagcaaagtcacttctccatcacaaccagatttgaggctggttttgatggctgggtccttgggcctggccagtcttcctcttagcctctggatctagaagggaccataagaggagtaggccctggttcctgctgtcctggtggctgggcccagcaggggccctcactcttgaagtccaggactgggtctgacctggtgggagcacctgccagaggatgctctttcccaggacggatgggccctgtgtctcaggagtggggttgggggacagccttcagcagcagctcacaccctaccttccccagacttgcactggggtgggatttggagtgatgggaaggtttttaagggccggggatggatcttttctaaatgttattacttgtaaataaagtctatttttctcccgtga

SEQ ID NO: 380422 - DNA, 3871 bp, Homo sapiens
tgagatcctcactctgaccgagtcccccacctctgaccgagttcccacctctgaccgagtctcccttcgtggtctggaggcagcccagataaaagagctggaggaacttcggcaaaccgtgaagcaactgaaggaacagctggctaagaaagaaaaggagcacgcatctggctcaggagcccaatctgaggctgctggcaggacagagccaacaggccccaagctggaggcactgcgggcagaggtgagcaagctggaacagcaatgccagaagcagcaggagcaggctgacagcctggaacgcagcctcgaggctgagcgggcctcccgggctgagcgggacagtgctctggagactctgcagggccagttagaggagaaggcccaggagctagggcacagtcagagtgccttagcctcggcccaacgggagttggctgccttccgcaccaaggtacaagaccacagcaaggctgaagatgagtggaaggcccaggtggcccggggccggcaagaggctgagaggaaaaatagcctcatcagcagcttggaggaggaggtgtccatcctgaatcgccaggtcctggagaaggagggggagagcaaggagttgaagcggctggtgatggccgagtcagagaagagccagaagctggaggagaggctgcgcctgctgcaggcagagacagccagcaacagtgccagagctgcagaacgcagctctgctctgcgggaggaggtgcagagcctccgggaggaggctgagaaacagcgggtggcttcagagaacctgcggcaggagctgacctcacaggctgagcgtgcggaggagctgggccaagaattgaaggcgtggcaggagaagttcttccagaaagagcaggccctctccaccctgcagctcgagcacaccagcacacaggccctggtgagtgagctgctgccagctaagcacctctgccagcagctgcaggccgagcaggccgctgccgagaaacgccaccgtgaggagctggagcagagcaagcaggccgctgggggactgcgggcagagctgctgcgggcccagcgggagcttggggagctgattcctctgcggcagaaggtggcagagcaggagcgaacagctcagcagctgcgggcagagaaggccagctatgcagagcagctgagcatgctgaagaaggcgcatggcctgctggcagaggagaaccgggggctgggtgagcgggccaaccttggccggcagtttctggaagtggagttggaccaggcccgggagaagtatgtccaagagttggcagccgtacgtgctgatgctgagacccgtctggctgaggtgcagcgagaagcacagagcactgcccgggagctggaggtgatgactgccaagtatgagggtgccaaggtcaaggtcctggaggagaggcagcggttccaggaagagaggcagaaactcactgcccaggtggagcagctagaggtatttcagagagagcaaactaagcaggtggaagaactgagtaagaaactggctgactctgaccaagccagcaaggtgcagcagcagaagctgaaggctgtccaggctcagggaggcgagagccagcaggaggcccagcgcctccaggcccagctgaatgaactgcaagcccagttgagccagaaggagcaggcagctgagcactataagctgcagatggagaaagccaaaacacattatgatgccaagaagcagcagaaccaagagctgcaggagcagctgcggagcctggagcagctgcagaaggaaaacaaagagctgcgagctgaagctgaacggctgggccatgagctacagcaggctgggctgaagaccaaggaggctgaacagacctgccgccaccttactgcccaggtgcgcagcctggaggcacaggttgcccatgcagaccagcagcttcgagacctgggcaaattccaggtggcaactgatgctttaaagagccgtgagccccaggctaagccccagctggacttgagtattgacagcctggatctgagctgcgaggaggggaccccactcagtatcaccagcaagctgcctcgtacccagccagacggcaccagcgtccctggagaaccagcctcacctatctcccagcgcctgccccccaaggtagaatccctggagagtctctacttcactcccatccctgctcggagtcaggcccccctggagagcagcctggactccctgggagacgtcttcctggactcgggtcgtaagacccgctccgctcgtcggcgcaccacgcagatcatcaacatcaccatgaccaagaagctagatgtggaagagccagacagcgccaactcatcgttctacagcacgcggtctgctcctgcttcccaggctagcctgcgagccacctcctctactcagtctctagctcgcctgggttctcccgattatggcaactcagccctgctcagcttgcctggctaccgccccaccactcgcagttctgctcgtcgttcccaggccggggtgtccagtggggcccctccaggaaggaacagcttctacatgggcacttgccaggatgagcctgagcagctggatgactggaaccgcattgcagagctgcagcagcgcaatcgagtgtgccccccacatctgaagacctgctatcccctggagtccaggccttccctgagcctgggcaccatcacagatgaggagatgaaaactggagacccccaagagaccctgcgccgagccagcatgcagccaatccagatagccgagggcactggcatcaccacccggcagcagcgcaaacgggtctccctagagccccaccagggccctggaactcctgagtctaagaaggccaccagctgtttcccacgccccatgactccccgagaccgacatgaagggcgcaaacagagcactactgaggcccagaagaaagcagctccagcttctactaaacaggctgaccggcgccagtcgatggccttcagcatcctcaacacacccaagaagctagggaacagccttctgcggcggggagcctcaaagaaggccctgtccaaggcttcccccaacactcgcagtggaacccgccgttctccgcgcattgccaccaccacagccagcgccgccactgctgccgccattggtgccacccctcgagccaagggcaaggcaaagcactaaagggccagtaccagtgagtggccccacctgtgtccccgatgctgccgtcacctggtcctccgcctactgtccctctcagtgccttctctcagctcccaggccaacagtagccaaacccctagagacagtgatgcctgcccgcaccctggcctggtccctggtccttcactggcgccttctcggagctggcccagggggcctggagcatggacagtgtgggcgctctccctaccttgcctccttttttcttaaagcaaagtcacttctccatcacaaccagatttgaggctggttttgatggctgggtccttgggcctggccagtcttcctcttagcctctggatctagaagggaccataagaggagtaggccctggttcctgctgtcctggtggctgggcccagcaggggccctcactcttgaagtccaggactgggtctgacctggtgggagcacctgccagaggatgctctttcccaggacggatgggccctgtgtctcaggagtggggttgggggacagccttcagcagcagctcacaccctaccttccccagacttgcactggggtgggatttggagtgatgggaaggtttttaagggccggggatggatcttttctaaatgttattacttgtaaataaagtctatttttctcccgtga

SEQ ID NO: 380423 - DNA, 3295 bp, Homo sapiens
ggagcagagggaagggagaatttcaagaaggagcatcggcaagcagaacgacactacaggtcacgctaagactgcaaggtgtccggtggagttagggagagaggcagagacagccagcaacagtgccagagctgcagaacgcagctctgctctgcgggaggaggtgcagagcctccgggaggaggctgagaaacagcgggtggcttcagagaacctgcggcaggagctgacctcacaggctgagcgtgcggaggagctgggccaagaattgaaggcgtggcaggagaagttcttccagaaagagcaggccctctccaccctgcagctcgagcacaccagcacacaggccctggtgagtgagctgctgccagctaagcacctctgccagcagctgcaggccgagcaggccgctgccgagaaacgccaccgtgaggagctggagcagagcaagcaggccgctgggggactgcgggcagagctgctgcgggcccagcgggagcttggggagctgattcctctgcggcagaaggtggcagagcaggagcgaacagctcagcagctgcgggcagagaaggccagctatgcagagcagctgagcatgctgaagaaggcgcatggcctgctggcagaggagaaccgggggctgggtgagcgggccaaccttggccggcagtttctggaagtggagttggaccaggcccgggagaagtatgtccaagagttggcagccgtacgtgctgatgctgagacccgtctggctgaggtgcagcgagaagcacagagcactgcccgggagctggaggtgatgactgccaagtatgagggtgccaaggtcaaggtcctggaggagaggcagcggttccaggaagagaggcagaaactcactgcccaggtggagcagctagaggtatttcagagagagcaaactaagcaggtggaagaactgagtaagaaactggctgactctgaccaagccagcaaggtgcagcagcagaagctgaaggctgtccaggctcagggaggcgagagccagcaggaggcccagcgcctccaggcccagctgaatgaactgcaagcccagttgagccagaaggagcaggcagctgagcactataagctgcagatggagaaagccaaaacacattatgatgccaagaagcagcagaaccaagagctgcaggagcagctgcggagcctggagcagctgcagaaggaaaacaaagagctgcgagctgaagctgaacggctgggccatgagctacagcaggctgggctgaagaccaaggaggctgaacagacctgccgccaccttactgcccaggtgcgcagcctggaggcacaggttgcccatgcagaccagcagcttcgagacctgggcaaattccaggtggcaactgatgctttaaagagccgtgagccccaggctaagccccagctggacttgagtattgacagcctggatctgagctgcgaggaggggaccccactcagtatcaccagcaagctgcctcgtacccagccagacggcaccagcgtccctggagaaccagcctcacctatctcccagcgcctgccccccaaggtagaatccctggagagtctctacttcactcccatccctgctcggagtcaggcccccctggagagcagcctggactccctgggagacgtcttcctggactcgggtcgtaagacccgctccgctcgtcggcgcaccacgcagatcatcaacatcaccatgaccaagaagctagatgtggaagagccagacagcgccaactcatcgttctacagcacgcggtctgctcctgcttcccaggctagcctgcgagccacctcctctactcagtctctagctcgcctgggttctcccgattatggcaactcagccctgctcagcttgcctggctaccgccccaccactcgcagttctgctcgtcgttcccaggccggggtgtccagtggggcccctccaggaaggaacagcttctacatgggcacttgccaggatgagcctgagcagctggatgactggaaccgcattgcagagctgcagcagcgcaatcgagtgtgccccccacatctgaagacctgctatcccctggagtccaggccttccctgagcctgggcaccatcacagatgaggagatgaaaactggagacccccaagagaccctgcgccgagccagcatgcagccaatccagatagccgagggcactggcatcaccacccggcagcagcgcaaacgggtctccctagagccccaccagggccctggaactcctgagtctaagaaggccaccagctgtttcccacgccccatgactccccgagaccgacatgaagggcgcaaacagagcactactgaggcccagaagaaagcagctccagcttctactaaacaggctgaccggcgccagtcgatggccttcagcatcctcaacacacccaagaagctagggaacagccttctgcggcggggagcctcaaagaaggccctgtccaaggcttcccccaacactcgcagtggaacccgccgttctccgcgcattgccaccaccacagccagcgccgccactgctgccgccattggtgccacccctcgagccaagggcaaggcaaagcactaaagggccagtaccagtgagtggccccacctgtgtccccgatgctgccgtcacctggtcctccgcctactgtccctctcagtgccttctctcagctcccaggccaacagtagccaaacccctagagacagtgatgcctgcccgcaccctggcctggtccctggtccttcactggcgccttctcggagctggcccagggggcctggagcatggacagtgtgggcgctctccctaccttgcctccttttttcttaaagcaaagtcacttctccatcacaaccagatttgaggctggttttgatggctgggtccttgggcctggccagtcttcctcttagcctctggatctagaagggaccataagaggagtaggccctggttcctgctgtcctggtggctgggcccagcaggggccctcactcttgaagtccaggactgggtctgacctggtgggagcacctgccagaggatgctctttcccaggacggatgggccctgtgtctcaggagtggggttgggggacagccttcagcagcagctcacaccctaccttccccagacttgcactggggtgggatttggagtgatgggaaggtttttaagggccggggatggatcttttctaaatgttattacttgtaaataaagtctatttttctcccgtga

SEQ ID NO: 380424 - DNA, 2267 bp, Homo sapiens
ctttacaagtattttcttattaaagcttcacaaccctatgaaatagatacaattacagtctctgtaaagaacttgagtagcatatctaaagtcatgcagttaaaaaacagtttcaagaagcaggaactggccagttcctgcttcttgaaatgggagatgcaggaggaagaacagagaagtgggcttagattgggacgtgtttgctgtgaagcagccatgggcatctggtggggatgggacatctgggtctgggcattgccactatgaggagctattaggagaagccaggggagtggactgaaaggaaggcccaggtcaagtgctttccttggtacctctgaaaaatcagagagatgggctgcttgacctcatctgcttgtagtaaggatgggaaatggtcactttcaaaaagggctggacaaaatgccttctagcgtgaaggactgtacctcagcaggtttcctttccatagcaagctgcctcgtacccagccagacggcaccagcgtccctggagaaccagcctcacctatctcccagcgcctgccccccaaggtagaatccctggagagtctctacttcactcccatccctgctcggagtcaggcccccctggagagcagcctggactccctgggagacgtcttcctggactcgggtcgtaagacccgctccgctcgtcggcgcaccacgcagatcatcaacatcaccatgaccaagaagctagatgtggaagagccagacagcgccaactcatcgttctacagcacgcggtctgctcctgcttcccaggctagcctgcgagccacctcctctactcagtctctagctcgcctgggttctcccgattatggcaactcagccctgctcagcttgcctggctaccgccccaccactcgcagttctgctcgtcgttcccaggccggggtgtccagtggggcccctccaggaaggaacagcttctacatgggcacttgccaggatgagcctgagcagctggatgactggaaccgcattgcagagctgcagcagcgcaatcgagtgtgccccccacatctgaagacctgctatcccctggagtccaggccttccctgagcctgggcaccatcacagatgaggagatgaaaactggagacccccaagagaccctgcgccgagccagcatgcagccaatccagatagccgagggcactggcatcaccacccggcagcagcgcaaacgggtctccctagagccccaccagggccctggaactcctgagtctaagaaggccaccagctgtttcccacgccccatgactccccgagaccgacatgaagggcgcaaacagagcactactgaggcccagaagaaagcagctccagcttctactaaacaggctgaccggcgccagtcgatggccttcagcatcctcaacacacccaagaagctagggaacagccttctgcggcggggagcctcaaagaaggccctgtccaaggcttcccccaacactcgcagtggaacccgccgttctccgcgcattgccaccaccacagccagcgccgccactgctgccgccattggtgccacccctcgagccaagggcaaggcaaagcactaaagggccagtaccagtgagtggccccacctgtgtccccgatgctgccgtcacctggtcctccgcctactgtccctctcagtgccttctctcagctcccaggccaacagtagccaaacccctagagacagtgatgcctgcccgcaccctggcctggtccctggtccttcactggcgccttctcggagctggcccagggggcctggagcatggacagtgtgggcgctctccctaccttgcctccttttttcttaaagcaaagtcacttctccatcacaaccagatttgaggctggttttgatggctgggtccttgggcctggccagtcttcctcttagcctctggatctagaagggaccataagaggagtaggccctggttcctgctgtcctggtggctgggcccagcaggggccctcactcttgaagtccaggactgggtctgacctggtgggagcacctgccagaggatgctctttcccaggacggatgggccctgtgtctcaggagtggggttgggggacagccttcagcagcagctcacaccctaccttccccagacttgcactggggtgggatttggagtgatgggaaggtttttaagggccggggatggatcttttctaaatgttattacttgtaaataaagtctatttttctcccgtga

SEQ ID NO: 380425 - DNA, 7725 bp, Homo sapiens
ctttgccttcaagtacaggccggggtccggaagcggtgataccccttctctttcccagtggccctcaaacttccttttcccgggtccttaagcgggccccgccgacagaggccaatcagagggcagcgcgagggggcggggccatagtttaaactaattgtgcgctcacagcgctggcgcgagcccacgaagaggtacgattccggagaatcgcgaggcagagcgggagcgcgcagccaggtggaaactaattctaagccagactgctggagatcaccctgttctagtgtgtggaggcttccaccaggaggcgcattggagtgactgtctggcatcaccaagatgacactccacgccacccggggggctgcactcctctcttgggtgaacagtctacacgtggctgaccctgtggaggctgtgctgcagctccaggactgcagcatcttcatcaagatcattgacagaatccatggcactgaagagggacagcaaatcttgaagcagccggtgtcagagagactggactttgtgtgcagttttctgcagaaaaatcgaaaacatccctcttccccagaatgcctggtatctgcacagaaggtgctagagggatcagagctggaactggcgaagatgaccatgctgctcttataccactctaccatgagctccaaaagtcccagggactgggaacagtttgaatataaaattcaggctgagttggctgtcattcttaaatttgtgctggaccatgaggacgggctaaaccttaatgaggacctagagaacttcctacagaaagctcctgtgccttctacctgttctagcacattccctgaagagctctccccacctagccaccaggccaagagggagattcgcttcctagagctacagaaggttgcctcctcttccagtgggaacaactttctctcaggttctccagcttctcccatgggtgatatcctgcagaccccacagttccagatgagacggctgaagaagcagcttgctgatgagagaagtaatagggatgagctggagctggagctagctgagaaccgcaagctcctcaccgagaaggatgcacagatagccatgatgcagcagcgcattgaccgcctagccctgctgaatgagaagcaggcggccagcccactggagcccaaggagcttgaggagctgcgtgacaagaatgagagccttaccatgcggctgcatgaaaccctgaagcagtgccaggacctgaagacagagaagagccagatggatcgcaaaatcaaccagctttcggaggagaatggagacctttcctttaagctgcgggagtttgccagtcatctgcagcagctacaggatgccctcaatgagctgacggaggagcacagcaaggccactcaggagtggctagagaagcaggcccagctggagaaggagctcagcgcagccctgcaggacaagaaatgccttgaagagaagaacgaaatccttcagggaaaactttcacagctggaagaacacttgtcccagctgcaggataacccaccccaggagaagggcgaggtgctgggtgatgtcttgcagctggaaaccttgaagcaagaggcagccactcttgctgcaaacaacacacagctccaagccagggtagagatgctggagactgagcgaggccagcaggaagccaagctgcttgctgagcggggccacttcgaagaagaaaagcagcagctgtctagcctgatcactgacctgcagagctccatctccaacctcagccaggccaaggaagagctggagcaggcctcccaggctcatggggcccggttgactgcccaggtggcctctctgacctctgagctcaccacactcaatgccaccatccagcaacaggatcaagaactggctggcctgaagcagcaggccaaagagaagcaggcccagctagcacagaccctccaacagcaagaacaggcctcccagggcctccgccaccaggtggagcagctaagcagtagcctgaagcagaaggagcagcagttgaaggaggtagcggagaagcaggaggcaactaggcaggaccatgcccagcaactggccactgctgcagaggagcgagaggcctccttaagggagcgggatgcggctctcaagcagctggaggcactggagaaggagaaggctgccaagctggagattctgcagcagcaacttcaggtggctaatgaagcccgggacagtgcccagacctcagtgacacaggcccagcgggagaaggcagagctgagccggaaggtggaggaactccaggcctgtgttgagacagcccgccaggaacagcatgaggcccaggcccaggttgcagagctagagttgcagctgcggtctgagcagcaaaaagcaactgagaaagaaagggtggcccaggagaaggaccagctccaggagcagctccaggccctcaaagagtccttgaaggtcaccaagggcagccttgaagaggagaagcgcagggctgcagatgccctggaagagcagcagcgttgtatctctgagctgaaggcagagacccgaagcctggtggagcagcataagcgggaacgaaaggagctggaagaagagagggctgggcgcaaggggctggaggctcgattacagcagcttggggaggcccatcaggctgagactgaagtcctgcggcgggagctggcagaggccatggctgcccagcacacagctgagagtgagtgtgagcagctcgtcaaagaagtagctgcctggcgtgagcggtatgaggatagccagcaagaggaggcacagtatggcgccatgttccaggaacagctgatgactttgaaggaggaatgtgagaaggcccgccaggagctgcaggaggcaaaggagaaggtggcaggcatagaatcccacagcgagctccagataagccggcagcagaacgaactagctgagctccatgccaacctggccagagcactccagcaggtccaagagaaggaagtcagggcccagaagcttgcagatgacctctccactctgcaggaaaagatggctgccaccagcaaagaggtggcccgcttggagaccttggtgcgcaaggcaggtgagcagcaggaaacagcctcccgggagttagtcaaggagcctgcgagggcaggagacagacagcccgagtggctggaagagcaacagggacgccagttctgcagcacacaggcagcgctgcaggctatggagcgggaggcagagcagatgggcaatgagctggaacggctgcgggccgcgctgatggagagccaggggcagcagcaggaggagcgtgggcagcaggaaagggaggtggcgcggctgacccaggagcggggccgtgcccaggctgaccttgccctggagaaggcggccagagcagagcttgagatgcggctgcagaacgccctcaacgagcagcgtgtggagttcgctaccctgcaagaggcactggctcatgccctgacggaaaaggaaggcaaggaccaggagttggccaagcttcgtggtctggaggcagcccagataaaagagctggaggaacttcggcaaaccgtgaagcaactgaaggaacagctggctaagaaagaaaaggagcacgcatctggctcaggagcccaatctgaggctgctggcaggacagagccaacaggccccaagctggaggcactgcgggcagaggtgagcaagctggaacagcaatgccagaagcagcaggagcaggctgacagcctggaacgcagcctcgaggctgagcgggcctcccgggctgagcgggacagtgctctggagactctgcagggccagttagaggagaaggcccaggagctagggcacagtcagagtgccttagcctcggcccaacgggagttggctgccttccgcaccaaggtacaagaccacagcaaggctgaagatgagtggaaggcccaggtggcccggggccggcaagaggctgagaggaaaaatagcctcatcagcagcttggaggaggaggtgtccatcctgaatcgccaggtcctggagaaggagggggagagcaaggagttgaagcggctggtgatggccgagtcagagaagagccagaagctggaggagaggctgcgcctgctgcaggcagagacagccagcaacagtgccagagctgcagaacgcagctctgctctgcgggaggaggtgcagagcctccgggaggaggctgagaaacagcgggtggcttcagagaacctgcggcaggagctgacctcacaggctgagcgtgcggaggagctgggccaagaattgaaggcgtggcaggagaagttcttccagaaagagcaggccctctccaccctgcagctcgagcacaccagcacacaggccctggtgagtgagctgctgccagctaagcacctctgccagcagctgcaggccgagcaggccgctgccgagaaacgccaccgtgaggagctggagcagagcaagcaggccgctgggggactgcgggcagagctgctgcgggcccagcgggagcttggggagctgattcctctgcggcagaaggtggcagagcaggagcgaacagctcagcagctgcgggcagagaaggccagctatgcagagcagctgagcatgctgaagaaggcgcatggcctgctggcagaggagaaccgggggctgggtgagcgggccaaccttggccggcagtttctggaagtggagttggaccaggcccgggagaagtatgtccaagagttggcagccgtacgtgctgatgctgagacccgtctggctgaggtgcagcgagaagcacagagcactgcccgggagctggaggtgatgactgccaagtatgagggtgccaaggtcaaggtcctggaggagaggcagcggttccaggaagagaggcagaaactcactgcccaggtggagcagctagaggtatttcagagagagcaaactaagcaggtggaagaactgagtaagaaactggctgactctgaccaagccagcaaggtgcagcagcagaagctgaaggctgtccaggctcagggaggcgagagccagcaggaggcccagcgcctccaggcccagctgaatgaactgcaagcccagttgagccagaaggagcaggcagctgagcactataagctgcagatggagaaagccaaaacacattatgatgccaagaagcagcagaaccaagagctgcaggagcagctgcggagcctggagcagctgcagaaggaaaacaaagagctgcgagctgaagctgaacggctgggccatgagctacagcaggctgggctgaagaccaaggaggctgaacagacctgccgccaccttactgcccaggtgcgcagcctggaggcacaggttgcccatgcagaccagcagcttcgagacctgggcaaattccaggtggcaactgatgctttaaagagccgtgagccccaggctaagccccagctggacttgagtattgacagcctggatctgagctgcgaggaggggaccccactcagtatcaccagcaagctgcctcgtacccagccagacggcaccagcgtccctggagaaccagcctcacctatctcccagcgcctgccccccaaggtagaatccctggagagtctctacttcactcccatccctgctcggagtcaggcccccctggagagcagcctggactccctgggagacgtcttcctggactcgggtcgtaagacccgctccgctcgtcggcgcaccacgcagatcatcaacatcaccatgaccaagaagctagatgtggaagagccagacagcgccaactcatcgttctacagcacgcggtctgctcctgcttcccaggctagcctgcgagccacctcctctactcagtctctagctcgcctgggttctcccgattatggcaactcagccctgctcagcttgcctggctaccgccccaccactcgcagttctgctcgtcgttcccaggccggggtgtccagtggggcccctccaggaaggaacagcttctacatgggcacttgccaggatgagcctgagcagctggatgactggaaccgcattgcagagctgcagcagcgcaatcgagtgtgccccccacatctgaagacctgctatcccctggagtccaggccttccctgagcctgggcaccatcacagatgaggagatgaaaactggagacccccaagagaccctgcgccgagccagcatgcagccaatccagatagccgagggcactggcatcaccacccggcagcagcgcaaacgggtctccctagagccccaccagggccctggaactcctgagtctaagaaggccaccagctgtttcccacgccccatgactccccgagaccgacatgaagggcgcaaacagagcactactgaggcccagaagaaagcagctccagcttctactaaacaggctgaccggcgccagtcgatggccttcagcatcctcaacacacccaagaagctagggaacagccttctgcggcggggagcctcaaagaaggccctgtccaaggcttcccccaacactcgcagtggaacccgccgttctccgcgcattgccaccaccacagccagcgccgccactgctgccgccattggtgccacccctcgagccaagggcaaggcaaagcactaaagggccagtaccagtgagtggccccacctgtgtccccgatgctgccgtcacctggtcctccgcctactgtccctctcagtgccttctctcagctcccaggccaacagtagccaaacccctagagacagtgatgcctgcccgcaccctggcctggtccctggtccttcactggcgccttctcggagctggcccagggggcctggagcatggacagtgtgggcgctctccctaccttgcctccttttttcttaaagcaaagtcacttctccatcacaaccagatttgaggctggttttgatggctgggtccttgggcctggccagtcttcctcttagcctctggatctagaagggaccataagaggagtaggccctggttcctgctgtcctggtggctgggcccagcaggggccctcactcttgaagtccaggactgggtctgacctggtgggagcacctgccagaggatgctctttcccaggacggatgggccctgtgtctcaggagtggggttgggggacagccttcagcagcagctcacaccctaccttccccagacttgcactggggtgggatttggagtgatgggaaggtttttaagggccggggatggatcttttctaaatgttattacttgtaaataaagtctatttttctcccgtgagaaaacacgacatatagataatagcactgatatttacgagacagagaaaacagacaggggggggcgtcgaacagagaaatatccccagggggcgcaccctgtagaccagcgcgacattttggggaaggggggggcgccccgtaagagagggctgagataaagacacagagcgggggggcacgtgtaaccaagggcgaggtggggtgacaactggtccccaggcggtactggggagaggcaccgcgacctcgggggcgggcctgtaggcgggcaactgcctgaaggacaagcgctgtagcacaaaaaaggccgcggtaggtgcacacaaccgacacctcggcggggaactggccacgaggtgtgagacaattc

SEQ ID NO: 380426 - DNA, 7299 bp, Homo sapiens
ctttgccttcaagtacaggccggggtccggaagcggtgataccccttctctttcccagtggccctcaaacttccttttcccgggtccttaagcgggccccgccgacagaggccaatcagagggcagcgcgagggggcggggccatagtttaaactaattgtgcgctcacagcgctggcgcgagcccacgaagaggtacgattccggagaatcgcgaggcagagcgggagcgcgcagccaggtggaaactaattctaagccagactgctggagatcaccctgttctagtgtgtggaggcttccaccaggaggcgcattggagtgactgtctggcatcaccaagatgacactccacgccacccggggggctgcactcctctcttgggtgaacagtctacacgtggctgaccctgtggaggctgtgctgcagctccaggactgcagcatcttcatcaagatcattgacagaatccatggcactgaagagggacagcaaatcttgaagcagccggtgtcagagagactggactttgtgtgcagttttctgcagaaaaatcgaaaacatccctcttccccagaatgcctggtatctgcacagaaggtgctagagggatcagagctggaactggcgaagatgaccatgctgctcttataccactctaccatgagctccaaaagtcccagggactgggaacagtttgaatataaaattcaggctgagttggctgtcattcttaaatttgtgctggaccatgaggacgggctaaaccttaatgaggacctagagaacttcctacagaaagctcctgtgccttctacctgttctagcacattccctgaagagctctccccacctagccaccaggccaagagggagattcgcttcctagagctacagaaggttgcctcctcttccagtgggaacaactttctctcaggttctccagcttctcccatgggtgatatcctgcagaccccacagttccagatgagacggctgaagaagcagcttgctgatgagagaagtaatagggatgagctggagctggagctagctgagaaccgcaagctcctcaccgagaaggatgcacagatagccatgatgcagcagcgcattgaccgcctagccctgctgaatgagaagcaggcggccagcccactggagcccaaggagcttgaggagctgcgtgacaagaatgagagccttaccatgcggctgcatgaaaccctgaagcagtgccaggacctgaagacagagaagagccagatggatcgcaaaatcaaccagctttcggaggagaatggagacctttcctttaagctgcgggagtttgccagtcatctgcagcagctacaggatgccctcaatgagctgacggaggagcacagcaaggccactcaggagtggctagagaagcaggcccagctggagaaggagctcagcgcagccctgcaggacaagaaatgccttgaagagaagaacgaaatccttcagggaaaactttcacagctggaagaacacttgtcccagctgcaggataacccaccccaggagaagggcgaggtgctgggtgatgtcttgcagctggaaaccttgaagcaagaggcagccactcttgctgcaaacaacacacagctccaagccagggtagagatgctggagactgagcgaggccagcaggaagccaagctgcttgctgagcggggccacttcgaagaagaaaagcagcagctgtctagcctgatcactgacctgcagagctccatctccaacctcagccaggccaaggaagagctggagcaggcctcccaggctcatggggcccggttgactgcccaggtggcctctctgacctctgagctcaccacactcaatgccaccatccagcaacaggatcaagaactggctggcctgaagcagcaggccaaagagaagcaggcccagctagcacagaccctccaacagcaagaacaggcctcccagggcctccgccaccaggtggagcagctaagcagtagcctgaagcagaaggagcagcagttgaaggaggtagcggagaagcaggaggcaactaggcaggaccatgcccagcaactggccactgctgcagaggagcgagaggcctccttaagggagcgggatgcggctctcaagcagctggaggcactggagaaggagaaggctgccaagctggagattctgcagcagcaacttcaggtggctaatgaagcccgggacagtgcccagacctcagtgacacaggcccagcgggagaaggcagagctgagccggaaggtggaggaactccaggcctgtgttgagacagcccgccaggaacagcatgaggcccaggcccaggttgcagagctagagttgcagctgcggtctgagcagcaaaaagcaactgagaaagaaagggtggcccaggagaaggaccagctccaggagcagctccaggccctcaaagagtccttgaaggtcaccaagggcagccttgaagaggagaagcgcagggctgcagatgccctggaagagcagcagcgttgtatctctgagctgaaggcagagacccgaagcctggtggagcagcataagcgggaacgaaaggagctggaagaagagagggctgggcgcaaggggctggaggctcgattacagcagcttggggaggcccatcaggctgagactgaagtcctgcggcgggagctggcagaggccatggctgcccagcacacagctgagagtgagtgtgagcagctcgtcaaagaagtagctgcctggcgtgagcggtatgaggatagccagcaagaggaggcacagtatggcgccatgttccaggaacagctgatgactttgaaggaggaatgtgagaaggcccgccaggagctgcaggaggcaaaggagaaggtggcaggcatagaatcccacagcgagctccagataagccggcagcagaacgaactagctgagctccatgccaacctggccagagcactccagcaggtccaagagaaggaagtcagggcccagaagcttgcagatgacctctccactctgcaggaaaagatggctgccaccagcaaagaggtggcccgcttggagaccttggtgcgcaaggcaggtgagcagcaggaaacagcctcccgggagttagtcaaggagcctgcgagggcaggagacagacagcccgagtggctggaagagcaacagggacgccagttctgcagcacacaggcagcgctgcaggctatggagcgggaggcagagcagatgggcaatgagctggaacggctgcgggccgcgctgatggagagccaggggcagcagcaggaggagcgtgggcagcaggaaagggaggtggcgcggctgacccaggagcggggccgtgcccaggctgaccttgccctggagaaggcggccagagcagagcttgagatgcggctgcagaacgccctcaacgagcagcgtgtggagttcgctaccctgcaagaggcactggctcatgccctgacggaaaaggaaggcaaggaccaggagttggccaagcttcgtggtctggaggcagcccagataaaagagctggaggaacttcggcaaaccgtgaagcaactgaaggaacagctggctaagaaagaaaaggagcacgcatctggctcaggagcccaatctgaggctgctggcaggacagagccaacaggccccaagctggaggcactgcgggcagaggtgagcaagctggaacagcaatgccagaagcagcaggagcaggctgacagcctggaacgcagcctcgaggctgagcgggcctcccgggctgagcgggacagtgctctggagactctgcagggccagttagaggagaaggcccaggagctagggcacagtcagagtgccttagcctcggcccaacgggagttggctgccttccgcaccaaggtacaagaccacagcaaggctgaagatgagtggaaggcccaggtggcccggggccggcaagaggctgagaggaaaaatagcctcatcagcagcttggaggaggaggtgtccatcctgaatcgccaggtcctggagaaggagggggagagcaaggagttgaagcggctggtgatggccgagtcagagaagagccagaagctggaggagaggctgcgcctgctgcaggcagagacagccagcaacagtgccagagctgcagaacgcagctctgctctgcgggaggaggtgcagagcctccgggaggaggctgagaaacagcgggtggcttcagagaacctgcggcaggagctgacctcacaggctgagcgtgcggaggagctgggccaagaattgaaggcgtggcaggagaagttcttccagaaagagcaggccctctccaccctgcagctcgagcacaccagcacacaggccctggtgagtgagctgctgccagctaagcacctctgccagcagctgcaggccgagcaggccgctgccgagaaacgccaccgtgaggagctggagcagagcaagcaggccgctgggggactgcgggcagagctgctgcgggcccagcgggagcttggggagctgattcctctgcggcagaaggtggcagagcaggagcgaacagctcagcagctgcgggcagagaaggccagctatgcagagcagctgagcatgctgaagaaggcgcatggcctgctggcagaggagaaccgggggctgggtgagcgggccaaccttggccggcagtttctggaagtggagttggaccaggcccgggagaagtatgtccaagagttggcagccgtacgtgctgatgctgagacccgtctggctgaggtgcagcgagaagcacagagcactgcccgggagctggaggtgatgactgccaagtatgagggtgccaaggtcaaggtcctggaggagaggcagcggttccaggaagagaggcagaaactcactgcccaggtggagcagctagaggtatttcagagagagcaaactaagcaggtggaagaactgagtaagaaactggctgactctgaccaagccagcaaggtgcagcagcagaagctgaaggctgtccaggctcagggaggcgagagccagcaggaggcccagcgcctccaggcccagctgaatgaactgcaagcccagttgagccagaaggagcaggcagctgagcactataagctgcagatggagaaagccaaaacacattatgatgccaagaagcagcagaaccaagagctgcaggagcagctgcggagcctggagcagctgcagaaggaaaacaaagagctgcgagctgaagctgaacggctgggccatgagctacagcaggctgggctgaagaccaaggaggctgaacagacctgccgccaccttactgcccaggtgcgcagcctggaggcacaggttgcccatgcagaccagcagcttcgagacctgggcaaattccaggtggcaactgatgctttaaagagccgtgagccccaggctaagccccagctggacttgagtattgacagcctggatctgagctgcgaggaggggaccccactcagtatcaccagcaagctgcctcgtacccagccagacggcaccagcgtccctggagaaccagcctcacctatctcccagcgcctgccccccaaggtagaatccctggagagtctctacttcactcccatccctgctcggagtcaggcccccctggagagcagcctggactccctgggagacgtcttcctggactcgggtcgtaagacccgctccgctcgtcggcgcaccacgcagatcatcaacatcaccatgaccaagaagctagatgtggaagagccagacagcgccaactcatcgttctacagcacgcggtctgctcctgcttcccaggctagcctgcgagccacctcctctactcagtctctagctcgcctgggttctcccgattatggcaactcagccctgctcagcttgcctggctaccgccccaccactcgcagttctgctcgtcgttcccaggccggggtgtccagtggggcccctccaggaaggaacagcttctacatgggcacttgccaggatgagcctgagcagctggatgactggaaccgcattgcagagctgcagcagcgcaatcgagtgtgccccccacatctgaagacctgctatcccctggagtccaggccttccctgagcctgggcaccatcacagatgaggagatgatagccgagggcactggcatcaccacccggcagcagcgcaaacgggtctccctagagccccaccagggccctggaactcctgagtctaagaaggccaccagctgtttcccacgccccatgactccccgagaccgacatgaagggcgcaaacagagcactactgaggcccagaagaaagcagctccagcttctactaaacaggctgaccggcgccagtcgatggccttcagcatcctcaacacacccaagaagctagggaacagccttctgcggcggggagcctcaaagaaggccctgtccaaggcttcccccaacactcgcagtggaacccgccgttctccgcgcattgccaccaccacagccagcgccgccactgctgccgccattggtgccacccctcgagccaagggcaaggcaaagcactaaagggccagtaccagtgagtggccccacctgtgtccccgatgctgccgtcacctggtcctccgcctactgtccctctcagtgccttctctcagctcccaggccaacagtagccaaacccctagagacagtgatgcctgcccgcaccctggcctggtccctggtccttcactggcgccttctcggagctggcccagggggcctggagcatggacagtgtgggcgctctccctaccttgcctccttttttcttaaagcaaagtcacttctccatcacaaccagatttgaggctggttttgatggctgggtccttgggcctggccagtcttcctcttagcctctggatctagaagggaccataagaggagtaggccctggttcctgctgtcctggtggctgggcccagcaggggccctcactcttgaagtccaggactgggtctgacctggtgggagcacctgccagaggatgctctttcccaggacggatgggccctgtgtctcaggagtggggttgggggacagccttcagcagcagctcacaccctaccttccccagacttgcactggggtgggatttggagtgatgggaaggtttttaagggccggggatggatcttttctaaatgttattacttgtaaataaagtctatttttctcccgtga

SEQ ID NO: 380427 - DNA, 1552 bp, Homo sapiens
tagccttggacaggcttctttgaggctccccgccgcagaaggctgttccctagcttcttgggtgtgttgaggatgctgaaggccatcgactggcgccggtcagcctgtttagtagaagctggagctgctttcttatggcaactcagccctgctcagcttgcctggctaccgccccaccactcgcagttctgctcgtcgttcccaggccggggtgtccagtggggcccctccaggaaggaacagcttctacatgggcacttgccaggatgagcctgagcagctggatgactggaaccgcattgcagagctgcagcagcgcaatcgagtgtgccccccacatctgaagacctgctatcccctggagtccaggccttccctgagcctgggcaccatcacagatgaggagatgaaaactggagacccccaagagaccctgcgccgagccagcatgcagccaatccagatagccgagggcactggcatcaccacccggcagcagcgcaaacgggtctccctagagccccaccagggccctggaactcctgagtctaagaaggccaccagctgtttcccacgccccatgactccccgagaccgacatgaagggcgcaaacagagcactactgaggcccagaagaaagcagctccagcttctactaaacaggctgaccggcgccagtcgatggccttcagcatcctcaacacacccaagaagctagggaacagccttctgcggcggggagcctcaaagaaggccctgtccaaggcttcccccaacactcgcagtggaacccgccgttctccgcgcattgccaccaccacagccagcgccgccactgctgccgccattggtgccacccctcgagccaagggcaaggcaaagcactaaagggccagtaccagtgagtggccccacctgtgtccccgatgctgccgtcacctggtcctccgcctactgtccctctcagtgccttctctcagctcccaggccaacagtagccaaacccctagagacagtgatgcctgcccgcaccctggcctggtccctggtccttcactggcgccttctcggagctggcccagggggcctggagcatggacagtgtgggcgctctccctaccttgcctccttttttcttaaagcaaagtcacttctccatcacaaccagatttgaggctggttttgatggctgggtccttgggcctggccagtcttcctcttagcctctggatctagaagggaccataagaggagtaggccctggttcctgctgtcctggtggctgggcccagcaggggccctcactcttgaagtccaggactgggtctgacctggtgggagcacctgccagaggatgctctttcccaggacggatgggccctgtgtctcaggagtggggttgggggacagccttcagcagcagctcacaccctaccttccccagacttgcactggggtgggatttggagtgatgggaaggtttttaagggccggggatggatcttttctaaatgttattacttgtaaataaagtctatttttctcccgtga

SEQ ID NO: 380428 - DNA, 6744 bp, Homo sapiens
  misc_feature (6703)..(6703): n is a, c, g, or t
ctttgccttcaagtacaggccggggtccggaagcggtgataccccttctctttcccagtggccctcaaacttccttttcccgggtccttaagcgggccccgccgacagaggccaatcagagggcagcgcgagggggcggggccatagtttaaactaattgtgcgctcacagcgctggcgcgagcccacgaagaggtacgattccggagaatcgcgaggcagagcgggagcgcgcagccaggtggaaactaattctaagccagactgctggagatcaccctgttctagtgtgtggaggcttccaccaggaggcgcattggagtgactgtctggcatcaccaagatgacactccacgccacccggggggctgcactcctctcttgggtgaacagtctacacgtggctgaccctgtggaggctgtgctgcagctccaggactgcagcatcttcatcaagatcattgacagaatccatggcactgaagagggacagcaaatcttgaagcagccggtgtcagagagactggactttgtgtgcagttttctgcagaaaaatcgaaaacatccctcttccccagaatgcctggtatctgcacagaaggtgctagagggatcagagctggaactggcgaagatgaccatgctgctcttataccactctaccatgagctccaaaagtcccagggactgggaacagtttgaatataaaattcaggctgagttggctgtcattcttaaatttgtgctggaccatgaggacgggctaaaccttaatgaggacctagagaacttcctacagaaagctcctgtgccttctacctgttctagcacattccctgaagagctctccccacctagccaccaggccaagagggagattcgcttcctagagctacagaaggttgcctcctcttccagtgggaacaactttctctcaggttctccagcttctcccatgggtgatatcctgcagaccccacagttccagatgagacggctgaagaagcagcttgctgatgagagaagtaatagggatgagctggagctggagctagctgagaaccgcaagctcctcaccgagaaggatgcacagatagccatgatgcagcagcgcattgaccgcctagccctgctgaatgagaagcaggcggccagcccactggagcccaaggagcttgaggagctgcgtgacaagaatgagagccttaccatgcggctgcatgaaaccctgaagcagtgccaggacctgaagacagagaagagccagatggatcgcaaaatcaaccagctttcggaggagaatggagacctttcctttaagctgcgggagtttgccagtcatctgcagcagctacaggatgccctcaatgagctgacggaggagcacagcaaggccactcaggagtggctagagaagcaggcccagctggagaaggagctcagcgcagccctgcaggacaagaaatgccttgaagagaagaacgaaatccttcagggaaaactttcacagctggaagaacacttgtcccagctgcaggataacccaccccaggagaagggcgaggtgctgggtgatgtcttgcagctggaaaccttgaagcaagaggcagccactcttgctgcaaacaacacacagctccaagccagggtagagatgctggagactgagcgaggccagcaggaagccaagctgcttgctgagcggggccacttcgaagaagaaaagcagcagctgtctagcctgatcactgacctgcagagctccatctccaacctcagccaggccaaggaagagctggagcaggcctcccaggctcatggggcccggttgactgcccaggtggcctctctgacctctgagctcaccacactcaatgccaccatccagcaacaggatcaagaactggctggcctgaagcagcaggccaaagagaagcaggcccagctagcacagaccctccaacagcaagaacaggcctcccagggcctccgccaccaggtggagcagctaagcagtagcctgaagcagaaggagcagcagttgaaggaggtagcggagaagcaggaggcaactaggcaggaccatgcccagcaactggccactgctgcagaggagcgagaggcctccttaagggagcgggatgcggctctcaagcagctggaggcactggagaaggagaaggctgccaagctggagattctgcagcagcaacttcaggtggctaatgaagcccgggacagtgcccagacctcagtgacacaggcccagcgggagaaggcagagctgagccggaaggtggaggaactccaggcctgtgttgagacagcccgccaggaacagcatgaggcccaggcccaggttgcagagctagagttgcagctgcggtctgagcagcaaaaagcaactgagaaagaaagggtggcccaggagaaggaccagctccaggagcagctccaggccctcaaagagtccttgaaggtcaccaagggcagccttgaagaggagaagcgcagggctgcagatgccctggaagagcagcagcgttgtatctctgagctgaaggcagagacccgaagcctggtggagcagcataagcgggaacgaaaggagctggaagaagagagggctgggcgcaaggggctggaggctcgattacagcagcttggggaggcccatcaggctgagactgaagtcctgcggcgggagctggcagaggccatggctgcccagcacacagctgagagtgagtgtgagcagctcgtcaaagaagtagctgcctggcgtgagcggtatgaggatagccagcaagaggaggcacagtatggcgccatgttccaggaacagctgatgactttgaaggaggaatgtgagaaggcccgccaggagctgcaggaggcaaaggagaaggtggcaggcatagaatcccacagcgagctccagataagccggcagcagaacgaactagctgagctccatgccaacctggccagagcactccagcaggtccaagagaaggaagtcagggcccagaagcttgcagatgacctctccactctgcaggaaaagatggctgccaccagcaaagaggtggcccgcttggagaccttggtgcgcaaggcaggtgagcagcaggaaacagcctcccgggagttagtcaaggagcctgcgagggcaggagacagacagcccgagtggctggaagagcaacagggacgccagttctgcagcacacaggcagcgctgcaggctatggagcgggaggcagagcagatgggcaatgagctggaacggctgcgggccgcgctgatggagagccaggggcagcagcaggaggagcgtgggcagcaggaaagggaggtggcgcggctgacccaggagcggggccgtgcccaggctgaccttgccctggagaaggcggccagagcagagcttgagatgcggctgcagaacgccctcaacgagcagcgtgtggagttcgctaccctgcaagaggcactggctcatgccctgacggaaaaggaaggcaaggaccaggagttggccaagcttcgtggtctggaggcagcccagataaaagagctggaggaacttcggcaaaccgtgaagcaactgaaggaacagctggctaagaaagaaaaggagcacgcatctggctcaggagcccaatctgaggctgctggcaggacagagccaacaggccccaagctggaggcactgcgggcagaggtgagcaagctggaacagcaatgccagaagcagcaggagcaggctgacagcctggaacgcagcctcgaggctgagcgggcctcccgggctgagcgggacagtgctctggagactctgcagggccagttagaggagaaggcccaggagctagggcacagtcagagtgccttagcctcggcccaacgggagttggctgccttccgcaccaaggtacaagaccacagcaaggctgaagatgagtggaaggcccaggtggcccggggccggcaagaggctgagaggaaaaatagcctcatcagcagcttggaggaggaggtgtccatcctgaatcgccaggtcctggagaaggagggggagagcaaggagttgaagcggctggtgatggccgagtcagagaagagccagaagctggaggagaggctgcgcctgctgcaggcagagacagccagcaacagtgccagagctgcagaacgcagctctgctctgcgggaggaggtgcagagcctccgggaggaggctgagaaacagcgggtggcttcagagaacctgcggcaggagctgacctcacaggctgagcgtgcggaggagctgggccaagaattgaaggcgtggcaggagaagttcttccagaaagagcaggccctctccaccctgcagctcgagcacaccagcacacaggccctggtgagtgagctgctgccagctaagcacctctgccagcagctgcaggccgagcaggccgctgccgagaaacgccaccgtgaggagctggagcagagcaagcaggccgctgggggactgcgggcagagctgctgcgggcccagcgggagcttggggagctgattcctctgcggcagaaggtggcagagcaggagcgaacagctcagcagctgcgggcagagaaggccagctatgcagagcagctgagcatgctgaagaaggcgcatggcctgctggcagaggagaaccgggggctgggtgagcgggccaaccttggccggcagtttctggaagtggagttggaccaggcccgggagaagtatgtccaagagttggcagccgtacgtgctgatgctgagacccgtctggctgaggtgcagcgagaagcacagagcactgcccgggagctggaggtgatgactgccaagtatgagggtgccaaggtcaaggtcctggaggagaggcagcggttccaggaagagaggcagaaactcactgcccaggtggagcagctagaggtatttcagagagagcaaactaagcaggtggaagaactgagtaagaaactggctgactctgaccaagccagcaaggtgcagcagcagaagctgaaggctgtccaggctcagggaggcgagagccagcaggaggcccagcgcctccaggcccagctgaatgaactgcaagcccagttgagccagaaggagcaggcagctgagcactataagctgcagatggagaaagccaaaacacattatgatgccaagaagcagcagaaccaagagctgcaggagcagctgcggagcctggagcagctgcagaaggaaaacaaagagctgcgagctgaagctgaacggctgggccatgagctacagcaggctgggctgaagaccaaggaggctgaacagacctgccgccaccttactgcccaggtgcgcagcctggaggcacaggttgcccatgcagaccagcagcttcgagacctgggcaaattccaggtggcaactgatgctttaaagagccgtgagccccaggctaagccccagctggacttgagtattgacagcctggatctgagctgcgaggaggggaccccactcagtatcaccagcaagctgcctcgtacccagccagacggcaccagcgtccctggagaaccagcctcacctatctcccagcgcctgccccccaaggtagaatccctggagagtctctacttcactcccatccctgctcggagtcaggcccccctggagagcagcctggactccctgggagacgtcttcctggactcgggtcgtaagacccgctccgctcgtcggcgcaccacgcagatcatcaacatcaccatgaccaagaagctagatgtggaagagccagacagcgccaactcatcgttctacagcacgcggtctgctcctgcttcccaggctagcctgcgagccacctcctctactcagtctctagctcgcctgggttctcccgattatggcaactcagccctgctcagcttgcctggctaccgccccaccactcgcagttctgctcgtcgttcccaggccggggtgtccagtggggcccctccaggaaggaacagcttctacatgggcacttgccaggatgagcctgagcagctggatgactggaaccgcattgcagagctgcagcagcgcaatcgagtgtgccccccacatctgaagacctgctatcccctggagtccaggccttccctgagcctgggcaccatcacagatgaggagatgaaaactggagacccccaagagaccctgcgccgagccagcatgcagccaatccagatagccgagggcactggcatcaccacccggcagcagcgcaaacgggtctccctagagccccaccagggccctggaactcctgagtctaagaaggccaccagctgtttcccacgccccatgactccccgagaccgacatgaagggcgcaaacagagcactactgaggcccagaagaaagcagctccagcttctactaaacaggctgaccggcgccagtcgatggccttcagcatcctcaacacacccaagaagctagggaacagccttctgcggcggggagcctcaaagaaggccctgtccaaggcttcccccaacactcgcagtggaacccgccgttctccgcgcattgccaccaccacagccagcgccgccactgctgccgccattggtgccacccctcgagccaagggcaagcaagcataagggccagtaccagtgngtgcctcacctgttctcttcgggatccttagagtcggcctt

SEQ ID NO: 380429 - DNA, 6917 bp, Homo sapiens
ctttgccttcaagtacaggccggggtccggaagcggtgataccccttctctttcccagtggccctcaaacttccttttcccgggtccttaagcgggccccgccgacagaggccaatcagagggcagcgcgagggggcggggccatagtttaaactaattgtgcgctcacagcgctggcgcgagcccacgaagaggtacgattccggagaatcgcgaggcagagcgggagcgcgcagccaggtggaaactaattctaagccagactgctggagatcaccctgttctagtgtgtggaggcttccaccaggaggcgcattggagtgactgtctggcatcaccaagatgacactccacgccacccggggggctgcactcctctcttgggtgaacagtctacacgtggctgaccctgtggaggctgtgctgcagctccaggactgcagcatcttcatcaagatcattgacagaatccatggcactgaagagggacagcaaatcttgaagcagccggtgtcagagagactggactttgtgtgcagttttctgcagaaaaatcgaaaacatccctcttccccagaatgcctggtatctgcacagaaggtgctagagggatcagagctggaactggcgaagatgaccatgctgctcttataccactctaccatgagctccaaaagtcccagggactgggaacagtttgaatataaaattcaggctgagttggctgtcattcttaaatttgtgctggaccatgaggacgggctaaaccttaatgaggacctagagaacttcctacagaaagctcctgtgccttctacctgttctagcacattccctgaagagctctccccacctagccaccaggccaagagggagattcgcttcctagagctacagaaggttgcctcctcttccagtgggaacaactttctctcaggttctccagcttctcccatgggtgatatcctgcagaccccacagttccagatgagacggctgaagaagcagcttgctgatgagagaagtaatagggatgagctggagctggagctagctgagaaccgcaagctcctcaccgagaaggatgcacagatagccatgatgcagcagcgcattgaccgcctagccctgctgaatgagaagcaggcggccagcccactggagcccaaggagcttgaggagctgcgtgacaagaatgagagccttaccatgcggctgcatgaaaccctgaagcagtgccaggacctgaagacagagaagagccagatggatcgcaaaatcaaccagctttcggaggagaatggagacctttcctttaagctgcgggagtttgccagtcatctgcagcagctacaggatgccctcaatgagctgacggaggagcacagcaaggccactcaggagtggctagagaagcaggcccagctggagaaggagctcagcgcagccctgcaggacaagaaatgccttgaagagaagaacgaaatccttcagggaaaactttcacagctggaagaacacttgtcccagctgcaggataacccaccccaggagaagggcgaggtgctgggtgatgtcttgcagctggaaaccttgaagcaagaggcagccactcttgctgcaaacaacacacagctccaagccagggtagagatgctggagactgagcgaggccagcaggaagccaagctgcttgctgagcggggccacttcgaagaagaaaagcagcagctgtctagcctgatcactgacctgcagagctccatctccaacctcagccaggccaaggaagagctggagcaggcctcccaggctcatggggcccggttgactgcccaggtggcctctctgacctctgagctcaccacactcaatgccaccatccagcaacaggatcaagaactggctggcctgaagcagcaggccaaagagaagcaggcccagctagcacagaccctccaacagcaagaacaggcctcccagggcctccgccaccaggtggagcagctaagcagtagcctgaagcagaaggagcagcagttgaaggaggtagcggagaagcaggaggcaactaggcaggaccatgcccagcaactggccactgctgcagaggagcgagaggcctccttaagggagcgggatgcggctctcaagcagctggaggcactggagaaggagaaggctgccaagctggagattctgcagcagcaacttcaggtggctaatgaagcccgggacagtgcccagacctcagtgacacaggcccagcgggagaaggcagagctgagccggaaggtggaggaactccaggcctgtgttgagacagcccgccaggaacagcatgaggcccaggcccaggttgcagagctagagttgcagctgcggtctgagcagcaaaaagcaactgagaaagaaagggtggcccaggagaaggaccagctccaggagcagctccaggccctcaaagagtccttgaaggtcaccaagggcagccttgaagaggagaagcgcagggctgcagatgccctggaagagcagcagcgttgtatctctgagctgaaggcagagacccgaagcctggtggagcagcataagcgggaacgaaaggagctggaagaagagagggctgggcgcaaggggctggaggctcgattacagcagcttggggaggcccatcaggctgagactgaagtcctgcggcgggagctggcagaggccatggctgcccagcacacagctgagagtgagtgtgagcagctcgtcaaagaagtagctgcctggcgtgagcggtatgaggatagccagcaagaggaggcacagtatggcgccatgttccaggaacagctgatgactttgaaggaggaatgtgagaaggcccgccaggagctgcaggaggcaaaggagaaggtggcaggcatagaatcccacagcgagctccagataagccggcagcagaacgaactagctgagctccatgccaacctggccagagcactccagcaggtccaagagaaggaagtcagggcccagaagcttgcagatgacctctccactctgcaggaaaagatggctgccaccagcaaagaggtggcccgcttggagaccttggtgcgcaaggcaggtgagcagcaggaaacagcctcccgggagttagtcaaggagcctgcgagggcaggagacagacagcccgagtggctggaagagcaacagggacgccagttctgcagcacacaggcagcgctgcaggctatggagcgggaggcagagcagatgggcaatgagctggaacggctgcgggccgcgctgatggagagccaggggcagcagcaggaggagcgtgggcagcaggaaagggaggtggcgcggctgacccaggagcggggccgtgcccaggctgaccttgccctggagaaggcggccagagcagagcttgagatgcggctgcagaacgccctcaacgagcagcgtgtggagttcgctaccctgcaagaggcactggctcatgccctgacggaaaaggaaggcaaggaccaggagttggccaagcttcgtggtctggaggcagcccagataaaagagctggaggaacttcggcaaaccgtgaagcaactgaaggaacagctggctaagaaagaaaaggagcacgcatctggctcaggagcccaatctgaggctgctggcaggacagagccaacaggccccaagctggaggcactgcgggcagaggtgagcaagctggaacagcaatgccagaagcagcaggagcaggctgacagcctggaacgcagcctcgaggctgagcgggcctcccgggctgagcgggacagtgctctggagactctgcagggccagttagaggagaaggcccaggagctagggcacagtcagagtgccttagcctcggcccaacgggagttggctgccttccgcaccaaggtacaagaccacagcaaggctgaagatgagtggaaggcccaggtggcccggggccggcaagaggctgagaggaaaaatagcctcatcagcagcttggaggaggaggtgtccatcctgaatcgccaggtcctggagaaggagggggagagcaaggagttgaagcggctggtgatggccgagtcagagaagagccagaagctggaggagaggctgcgcctgctgcaggcagagacagccagcaacagtgccagagctgcagaacgcagctctgctctgcgggaggaggtgcagagcctccgggaggaggctgagaaacagcgggtggcttcagagaacctgcggcaggagctgacctcacaggctgagcgtgcggaggagctgggccaagaattgaaggcgtggcaggagaagttcttccagaaagagcaggccctctccaccctgcagctcgagcacaccagcacacaggccctggtgagtgagctgctgccagctaagcacctctgccagcagctgcaggccgagcaggccgctgccgagaaacgccaccgtgaggagctggagcagagcaagcaggccgctgggggactgcgggcagagctgctgcgggcccagcgggagcttggggagctgattcctctgcggcagaaggtggcagagcaggagcgaacagctcagcagctgcgggcagagaaggccagctatgcagagcagctgagcatgctgaagaaggcgcatggcctgctggcagaggagaaccgggggctgggtgagcgggccaaccttggccggcagtttctggaagtggagttggaccaggcccgggagaagtatgtccaagagttggcagccgtacgtgctgatgctgagacccgtctggctgaggtgcagcgagaagcacagagcactgcccgggagctggaggtgatgactgccaagtatgagggtgccaaggtcaaggtcctggaggagaggcagcggttccaggaagagaggcagaaactcactgcccaggtggagcagctagaggtatttcagagagagcaaactaagcaggtggaagaactgagtaagaaactggctgactctgaccaagccagcaaggtgcagcagcagaagctgaaggctgtccaggctcagggaggcgagagccagcaggaggcccagcgcctccaggcccagctgaatgaactgcaagcccagttgagccagaaggagcaggcagctgagcactataagctgcagatggagaaagccaaaacacattatgatgccaagaagcagcagaaccaagagctgcaggagcagctgcggagcctggagcagctgcagaaggaaaacaaagagctgcgagctgaagctgaacggctgggccatgagctacagcaggctgggctgaagaccaaggaggctgaacagacctgccgccaccttactgcccaggtgcgcagcctggaggcacaggttgcccatgcagaccagcagcttcgagacctgggcaaattccaggtggcaactgatgctttaaagagccgtgagccccaggctaagccccagctggacttgagtattgacagcctggatctgagctgcgaggaggggaccccactcagtatcaccaggtcaggaggcagccttcctccctatgtctgtttatggagtgcctgctgtttatcaggctgtatcctagtgagataaataagatgtgatctaaatttattcttagagaagaataaagaaaaacgggtattataccagatatctatttagggcacagttggaataaaaagcaagtggtcaagaaaggcttcgtggaagctatcgctcctgctgagtcttgaaagcatccataggtgtgtgtgccaggttgacgagaagagcagtgtgaacagaggctgtgaaagagcctgactaagctgagatgtgaggccaggaaggcccattggagaccggctattaagacttgatcctaaaggcattgaggaaaccttggtggctgtaattgaaaggtttaggagaaaaaaaaaggaaccttggaagaatttgaaactgaagagtacatggttaatttgcatcttaaaaagattattctaatagctagtatagaagttaagactggaaaaatgtttttattaaacacttacatttacttattttgtgctagacataaagcactcatgacaattatacctgatttttcccccaacactcgcagtggaacccgccgttctccgcgcattgccaccaccacagccagcgccgccactgctgccgccattggtgccacccctcgagccaagggcaaggcaaagcactaaagggccagtaccagtgagtggccccacctgtgtccccgatgctgccgtcacctggtcctccgcctactgtccctctcagtgccttctctcagctcccaggccaacagtagccaaacccctagagacagtgatgcctgcccgcaccctggcctggtccctggtccttcactggcgccttctcggagctggcccagggggcctggagcatggacagtgtgggcgctctccctaccttgcctccttttttcttaaagcaaagtcacttctccatcacaaccagatttgaggctggttttgatggctgggtccttgggcctggccagtcttcctcttagcctctggatctagaagggaccataagaggagtaggccctggttcctgctgtcctggtggctgggcccagcaggggccctcactcttgaagtccaggactgggtctgacctggtgggagcacctgccagaggatgctctttcccaggacggatgggccctgtgtctcaggagtggggttgggggacagccttcagcagcagctcacaccctaccttccccagacttgcactggggtgggatttggagtgatgggaaggtttttaagggccggggatggatcttttctaaatgttattacttgtaaataaagtctatttttctcccgtga

SEQ ID NO: 380430 - DNA, 6689 bp, Homo sapiens
ctttgccttcaagtacaggccggggtccggaagcggtgataccccttctctttcccagtggccctcaaacttccttttcccgggtccttaagcgggccccgccgacagaggccaatcagagggcagcgcgagggggcggggccatagtttaaactaattgtgcgctcacagcgctggcgcgagcccacgaagaggtacgattccggagaatcgcgaggcagagcgggagcgcgcagccaggtggaaactaattctaagccagactgctggagatcaccctgttctagtgtgtggaggcttccaccaggaggcgcattggagtgactgtctggcatcaccaagatgacactccacgccacccggggggctgcactcctctcttgggtgaacagtctacacgtggctgaccctgtggaggctgtgctgcagctccaggactgcagcatcttcatcaagatcattgacagaatccatggcactgaagagggacagcaaatcttgaagcagccggtgtcagagagactggactttgtgtgcagttttctgcagaaaaatcgaaaacatccctcttccccagaatgcctggtatctgcacagaaggtgctagagggatcagagctggaactggcgaagatgaccatgctgctcttataccactctaccatgagctccaaaagtcccagggactgggaacagtttgaatataaaattcaggctgagttggctgtcattcttaaatttgtgctggaccatgaggacgggctaaaccttaatgaggacctagagaacttcctacagaaagctcctgtgccttctacctgttctagcacattccctgaagagctctccccacctagccaccaggccaagagggagattcgcttcctagagctacagaaggttgcctcctcttccagtgggaacaactttctctcaggttctccagcttctcccatgggtgatatcctgcagaccccacagttccagatgagacggctgaagaagcagcttgctgatgagagaagtaatagggatgagctggagctggagctagctgagaaccgcaagctcctcaccgagaaggatgcacagatagccatgatgcagcagcgcattgaccgcctagccctgctgaatgagaagcaggcggccagcccactggagcccaaggagcttgaggagctgcgtgacaagaatgagagccttaccatgcggctgcatgaaaccctgaagcagtgccaggacctgaagacagagaagagccagatggatcgcaaaatcaaccagctttcggaggagaatggagacctttcctttaagctgcgggagtttgccagtcatctgcagcagctacaggatgccctcaatgagctgacggaggagcacagcaaggccactcaggagtggctagagaagcaggcccagctggagaaggagctcagcgcagccctgcaggacaagaaatgccttgaagagaagaacgaaatccttcagggaaaactttcacagctggaagaacacttgtcccagctgcaggataacccaccccaggagaagggcgaggtgctgggtgatgtcttgcagctggaaaccttgaagcaagaggcagccactcttgctgcaaacaacacacagctccaagccagggtagagatgctggagactgagcgaggccagcaggaagccaagctgcttgctgagcggggccacttcgaagaagaaaagcagcagctgtctagcctgatcactgacctgcagagctccatctccaacctcagccaggccaaggaagagctggagcaggcctcccaggctcatggggcccggttgactgcccaggtggcctctctgacctctgagctcaccacactcaatgccaccatccagcaacaggatcaagaactggctggcctgaagcagcaggccaaagagaagcaggcccagctagcacagaccctccaacagcaagaacaggcctcccagggcctccgccaccaggtggagcagctaagcagtagcctgaagcagaaggagcagcagttgaaggaggtagcggagaagcaggaggcaactaggcaggaccatgcccagcaactggccactgctgcagaggagcgagaggcctccttaagggagcgggatgcggctctcaagcagctggaggcactggagaaggagaaggctgccaagctggagattctgcagcagcaacttcaggtggctaatgaagcccgggacagtgcccagacctcagtgacacaggcccagcgggagaaggcagagctgagccggaaggtggaggaactccaggcctgtgttgagacagcccgccaggaacagcatgaggcccaggcccaggttgcagagctagagttgcagctgcggtctgagcagcaaaaagcaactgagaaagaaagggtggcccaggagaaggaccagctccaggagcagctccaggccctcaaagagtccttgaaggtcaccaagggcagccttgaagaggagaagcgcagggctgcagatgccctggaagagcagcagcgttgtatctctgagctgaaggcagagacccgaagcctggtggagcagcataagcgggaacgaaaggagctggaagaagagagggctgggcgcaaggggctggaggctcgattacagcagcttggggaggcccatcaggctgagactgaagtcctgcggcgggagctggcagaggccatggctgcccagcacacagctgagagtgagtgtgagcagctcgtcaaagaagtagctgcctggcgtgagcggtatgaggatagccagcaagaggaggcacagtatggcgccatgttccaggaacagctgatgactttgaaggaggaatgtgagaaggcccgccaggagctgcaggaggcaaaggagaaggtggcaggcatagaatcccacagcgagctccagataagccggcagcagaacgaactagctgagctccatgccaacctggccagagcactccagcaggtccaagagaaggaagtcagggcccagaagcttgcagatgacctctccactctgcaggaaaagatggctgccaccagcaaagaggtggcccgcttggagaccttggtgcgcaaggcaggtgagcagcaggaaacagcctcccgggagttagtcaaggagcctgcgagggcaggagacagacagcccgagtggctggaagagcaacagggacgccagttctgcagcacacaggcagcgctgcaggctatggagcgggaggcagagcagatgggcaatgagctggaacggctgcgggccgcgctgatggagagccaggggcagcagcaggaggagcgtgggcagcaggaaagggaggtggcgcggctgacccaggagcggggccgtgcccaggctgaccttgccctggagaaggcggccagagcagagcttgagatgcggctgcagaacgccctcaacgagcagcgtgtggagttcgctaccctgcaagaggcactggctcatgccctgacggaaaaggaaggcaaggaccaggagttggccaagcttcgtggtctggaggcagcccagataaaagagctggaggaacttcggcaaaccgtgaagcaactgaaggaacagctggctaagaaagaaaaggagcacgcatctggctcaggagcccaatctgaggctgctggcaggacagagccaacaggccccaagctggaggcactgcgggcagaggtgagcaagctggaacagcaatgccagaagcagcaggagcaggctgacagcctggaacgcagcctcgaggctgagcgggcctcccgggctgagcgggacagtgctctggagactctgcagggccagttagaggagaaggcccaggagctagggcacagtcagagtgccttagcctcggcccaacgggagttggctgccttccgcaccaaggtacaagaccacagcaaggctgaagatgagtggaaggcccaggtggcccggggccggcaagaggctgagaggaaaaatagcctcatcagcagcttggaggaggaggtgtccatcctgaatcgccaggtcctggagaaggagggggagagcaaggagttgaagcggctggtgatggccgagtcagagaagagccagaagctggaggagaggctgcgcctgctgcaggcagagacagccagcaacagtgccagagctgcagaacgcagctctgctctgcgggaggaggtgcagagcctccgggaggaggctgagaaacagcgggtggcttcagagaacctgcggcaggagctgacctcacaggctgagcgtgcggaggagctgggccaagaattgaaggcgtggcaggagaagttcttccagaaagagcaggccctctccaccctgcagctcgagcacaccagcacacaggccctggtgagtgagctgctgccagctaagcacctctgccagcagctgcaggccgagcaggccgctgccgagaaacgccaccgtgaggagctggagcagagcaagcaggccgctgggggactgcgggcagagctgctgcgggcccagcgggagcttggggagctgattcctctgcggcagaaggtggcagagcaggagcgaacagctcagcagctgcgggcagagaaggccagctatgcagagcagctgagcatgctgaagaaggcgcatggcctgctggcagaggagaaccgggggctgggtgagcgggccaaccttggccggcagtttctggaagtggagttggaccaggcccgggagaagtatgtccaagagttggcagccgtacgtgctgatgctgagacccgtctggctgaggtgcagcgagaagcacagagcactgcccgggagctggaggtgatgactgccaagtatgagggtgccaaggtcaaggtcctggaggagaggcagcggttccaggaagagaggcagaaactcactgcccaggtggagcagctagaggtatttcagagagagcaaactaagcaggtggaagaactgagtaagaaactggctgactctgaccaagccagcaaggtgcagcagcagaagctgaaggctgtccaggctcagggaggcgagagccagcaggaggcccagcgcctccaggcccagctgaatgaactgcaagcccagttgagccagaaggagcaggcagctgagcactataagctgcagatggagaaagccaaaacacattatgatgccaagaagcagcagaaccaagagctgcaggagcagctgcggagcctggagcagctgcagaaggaaaacaaagagctgcgagctgaagctgaacggctgggccatgagctacagcaggctgggctgaagaccaaggaggctgaacagacctgccgccaccttactgcccaggtgcgcagcctggaggcacaggttgcccatgcagaccagcagcttcgagacctgggcaaattccaggtggcaactgatgctttaaagagccgtgagccccaggctaagccccagctggacttgagtattgacagcctggatctgagctgcgaggaggggaccccactcagtatcaccagcaagctgcctcgtacccagccagacggcaccagcgtccctggagaaccagcctcacctatctcccagcgcctgccccccaaggtagaatccctggagagtctctacttcactcccatccctgctcggagtcaggcccccctggagagcagcctggactccctgggagacgtcttcctggactcgggtcgtaagacccgctccgctcgtcggcgcaccacgcagatcatcaacatcaccatgaccaagaagctagatgtggaagagccagacagcgccaactcatcgttctacagcacgcggtctgctcctgcttcccaggctagcctgcgagccacctcctctactcagtctctagctcgcctgggttctcccgattatggcaactcagccctgctcagcttgcctggctaccgccccaccactcgcagttctgctcgtcgttcccaggccggggtgtccagtggggcccctccaggaaggaacagcttctacatgggcacttgccaggatgagcctgagcagctggatgactggaaccgcattgcagagctgcagcagcgcaatcgagtgtgccccccacatctgaagacctgctatcccctggagtccaggccttccctgagcctgggcaccatcacagatgaggagatgaaaactggagacccccaagagaccctgcgccgagccagcatgcagccaatccagatagccgagggcactggcatcaccacccggcagcagcgcaaacgggtctccctagagccccaccagggccctggaactcctgagtctaagaaggccaccagctgtttcccacgccccatgactccccgagaccgacatgaagggcgcaaacagagcactactgaggcccagaagaaagcagctccagcttctactaaacaggctgaccggcgccagtcgatggccttcagcatcctcaacacacccaagaagctagggaacagccttctgcggcggggagcctcaaagaaggccctgtccaaggctcccacatgcatgaccccttcgcgcattgcaccaccagcagcgcgcactctccgccattgtcacctcgaccaggcaagcaagcataaggcagtacatgatgcccactatccgatggacta

SEQ ID NO: 380431 - DNA, 7684 bp, Homo sapiens
ctttgccttcaagtacaggccggggtccggaagcggtgataccccttctctttcccagtggccctcaaacttccttttcccgggtccttaagcgggccccgccgacagaggccaatcagagggcagcgcgagggggcggggccatagtttaaactaattgtgcgctcacagcgctggcgcgagcccacgaagaggtacgattccggagaatcgcgaggcagagcgggagcgcgcagccaggtggaaactaattctaagccagactgctggagatcaccctgttctagtgtgtggaggcttccaccaggaggcgcattggagtgactgtctggcatcaccaagatgacactccacgccacccggggggctgcactcctctcttgggtgaacagtctacacgtggctgaccctgtggaggctgtgctgcagctccaggactgcagcatcttcatcaagatcattgacagaatccatggcactgaagagggacagcaaatcttgaagcagccggtgtcagagagactggactttgtgtgcagttttctgcagaaaaatcgaaaacatccctcttccccagaatgcctggtatctgcacagaaggtgctagagggatcagagctggaactggcgaagatgaccatgctgctcttataccactctaccatgagctccaaaagtcccagggactgggaacagtttgaatataaaattcaggctgagttggctgtcattcttaaatttgtgctggaccatgaggacgggctaaaccttaatgaggacctagagaacttcctacagaaagctcctgtgccttctacctgttctagcacattccctgaagagctctccccacctagccaccaggccaagagggagattcgcttcctagagctacagaaggttgcctcctcttccagtgggaacaactttctctcaggttctccagcttctcccatgggtgatatcctgcagaccccacagttccagatgagacggctgaagaagcagcttgctgatgagagaagtaatagggatgagctggagctggagctagctgagaaccgcaagctcctcaccgagaaggatgcacagatagccatgatgcagcagcgcattgaccgcctagccctgctgaatgagaagcaggcggccagcccactggagcccaaggagcttgaggagctgcgtgacaagaatgagagccttaccatgcggctgcatgaaaccctgaagcagtgccaggacctgaagacagagaagagccagatggatcgcaaaatcaaccagctttcggaggagaatggagacctttcctttaagctgcgggagtttgccagtcatctgcagcagctacaggatgccctcaatgagctgacggaggagcacagcaaggccactcaggagtggctagagaagcaggcccagctggagaaggagctcagcgcagccctgcaggacaagaaatgccttgaagagaagaacgaaatccttcagggaaaactttcacagctggaagaacacttgtcccagctgcaggataacccaccccaggagaagggcgaggtgctgggtgatgtcttgcagctggaaaccttgaagcaagaggcagccactcttgctgcaaacaacacacagctccaagccagggtagagatgctggagactgagcgaggccagcaggaagccaagctgcttgctgagcggggccacttcgaagaagaaaagcagcagctgtctagcctgatcactgacctgcagagctccatctccaacctcagccaggccaaggaagagctggagcaggcctcccaggctcatggggcccggttgactgcccaggtggcctctctgacctctgagctcaccacactcaatgccaccatccagcaacaggatcaagaactggctggcctgaagcagcaggccaaagagaagcaggcccagctagcacagaccctccaacagcaagaacaggcctcccagggcctccgccaccaggtggagcagctaagcagtagcctgaagcagaaggagcagcagttgaaggaggtagcggagaagcaggaggcaactaggcaggaccatgcccagcaactggccactgctgcagaggagcgagaggcctccttaagggagcgggatgcggctctcaagcagctggaggcactggagaaggagaaggctgccaagctggagattctgcagcagcaacttcaggtggctaatgaagcccgggacagtgcccagacctcagtgacacaggcccagcgggagaaggcagagctgagccggaaggtggaggaactccaggcctgtgttgagacagcccgccaggaacagcatgaggcccaggcccaggttgcagagctagagttgcagctgcggtctgagcagcaaaaagcaactgagaaagaaagggtggcccaggagaaggaccagctccaggagcagctccaggccctcaaagagtccttgaaggtcaccaagggcagccttgaagaggagaagcgcagggctgcagatgccctggaagagcagcagcgttgtatctctgagctgaaggcagagacccgaagcctggtggagcagcataagcgggaacgaaaggagctggaagaagagagggctgggcgcaaggggctggaggctcgattacagcagcttggggaggcccatcaggctgagactgaagtcctgcggcgggagctggcagaggccatggctgcccagcacacagctgagagtgagtgtgagcagctcgtcaaagaagtagctgcctggcgtgagcggtatgaggatagccagcaagaggaggcacagtatggcgccatgttccaggaacagctgatgactttgaaggaggaatgtgagaaggcccgccaggagctgcaggaggcaaaggagaaggtggcaggcatagaatcccacagcgagctccagataagccggcagcagaacgaactagctgagctccatgccaacctggccagagcactccagcaggtccaagagaaggaagtcagggcccagaagcttgcagatgacctctccactctgcaggaaaagatggctgccaccagcaaagaggtggcccgcttggagaccttggtgcgcaaggcaggtgagcagcaggaaacagcctcccgggagttagtcaaggagcctgcgagggcaggagacagacagcccgagtggctggaagagcaacagggacgccagttctgcagcacacaggcagcgctgcaggctatggagcgggaggcagagcagatgggcaatgagctggaacggctgcgggccgcgctgatggagagccaggggcagcagcaggaggagcgtgggcagcaggaaagggaggtggcgcggctgacccaggagcggggccgtgcccaggctgaccttgccctggagaaggcggccagagcagagcttgagatgcggctgcagaacgccctcaacgagcagcgtgtggagttcgctaccctgcaagaggcactggctcatgccctgacggaaaaggaaggcaaggaccaggagttggccaagcttcgtggtctggaggcagcccagataaaagagctggaggaacttcggcaaaccgtgaagcaactgaaggaacagctggctaagaaagaaaaggagcacgcatctggctcaggagcccaatctgaggctgctggcaggacagagccaacaggccccaagctggaggcactgcgggcagaggtgagcaagctggaacagcaatgccagaagcagcaggagcaggctgacagcctggaacgcagcctcgaggctgagcgggcctcccgggctgagcgggacagtgctctggagactctgcagggccagttagaggagaaggcccaggagctagggcacagtcagagtgccttagcctcggcccaacgggagttggctgccttccgcaccaaggtacaagaccacagcaaggctgaagatgagtggaaggcccaggtggcccggggccggcaagaggctgagaggaaaaatagcctcatcagcagcttggaggaggaggtgtccatcctgaatcgccaggtcctggagaaggagggggagagcaaggagttgaagcggctggtgatggccgagtcagagaagagccagaagctggaggagaggctgcgcctgctgcaggcagagacagccagcaacagtgccagagctgcagaacgcagctctgctctgcgggaggaggtgcagagcctccgggaggaggctgagaaacagcgggtggcttcagagaacctgcggcaggagctgacctcacaggctgagcgtgcggaggagctgggccaagaattgaaggcgtggcaggagaagttcttccagaaagagcaggccctctccaccctgcagctcgagcacaccagcacacaggccctggtgagtgagctgctgccagctaagcacctctgccagcagctgcaggccgagcaggccgctgccgagaaacgccaccgtgaggagctggagcagagcaagcaggccgctgggggactgcgggcagagctgctgcgggcccagcgggagcttggggagctgattcctctgcggcagaaggtggcagagcaggagcgaacagctcagcagctgcgggcagagaaggccagctatgcagagcagctgagcatgctgaagaaggcgcatggcctgctggcagaggagaaccgggggctgggtgagcgggccaaccttggccggcagtttctggaagtggagttggaccaggcccgggagaagtatgtccaagagttggcagccgtacgtgctgatgctgagacccgtctggctgaggtgcagcgagaagcacagagcactgcccgggagctggaggtgatgactgccaagtatgagggtgccaaggtcaaggtcctggaggagaggcagcggttccaggaagagaggcagaaactcactgcccaggtggaagaactgagtaagaaactggctgactctgaccaagccagcaaggtgcagcagcagaagctgaaggctgtccaggctcagggaggcgagagccagcaggaggcccagcgcctccaggcccagctgaatgaactgcaagcccagttgagccagaaggagcaggcagctgagcactataagctgcagatggagaaagccaaaacacattatgatgccaagaagcagcagaaccaagagctgcaggagcagctgcggagcctggagcagctgcagaaggaaaacaaagagctgcgagctgaagctgaacggctgggccatgagctacagcaggctgggctgaagaccaaggaggctgaacagacctgccgccaccttactgcccaggtgcgcagcctggaggcacaggttgcccatgcagaccagcagcttcgagacctgggcaaattccaggtggcaactgatgctttaaagagccgtgagccccaggctaagccccagctggacttgagtattgacagcctggatctgagctgcgaggaggggaccccactcagtatcaccaggtcaggaggcagccttcctccctatgtctgtttatggagtgcctgctgtttatcaggctgtatcctagtgagataaataagatgtgatctaaatttattcttagagaagaataaagaaaaacgggtattataccagatatctatttagggcacagttggaataaaaagcaagtggtcaagaaaggcttcgtggaagctatcgctcctgctgagtcttgaaagcatccataggtgtgtgtgccaggttgacgagaagagcagtgtgaacagaggctgtgaaagagcctgactaagctgagatgtgaggccaggaaggcccattggagaccggctattaagacttgatcctaaaggcattgaggaaaccttggtggctgtaattgaaaggtttaggagaaaaaaaaaggaaccttggaagaatttgaaactgaagagtacatggttaatttgcatcttaaaaagattattctaatagctagtatagaagttaagactggaaaaatgtttttattaaacacttacatttacttattttgtgctagacataaagcactcatgacaattatacctgatttgtcccccaacaaccctctgaggtaggtttattctgtctcctttaacagatgaatctggggcatagaggggcagtcacttgcccaaggttccccagtggtagagctggggtttgaccctgggcagcctggcctgagttcttggcttgtcaccactcatcttcctctgtcagtgccatgatgagtctaggtgagaggagatgaagcagaccagggaaaggacatgagcatggagtggggtgtggttagttgctgttcaggaagcttggtgattgggctcgccaagcaggacgacattggattatgcccacgttcatggcttgggggcctgagtggggggcgttcctattcactgaaatgggagatgcaggaggaagaacagagaagtgggcttagattgggacgtgtttgctgtgaagcagccatgggcatctggtggggatgggacatctgggtctgggcattgccactatgaggagctattaggagaagccaggggagtggactgaaaggaaggcccaggtcaagtgctttccttggtacctctgaaaaatcagagagatgggctgcttgacctcatctgcttgtagtaaggatgggaaatggtcactttcaaaaagggctggacaaaatgccttctagcgtgaaggactgtacctcagcaggtttcctttccatagcaagctgcctcgtacccagccagacggcaccagcgtccctggagaaccagcctcacctatctcccagcgcctgccccccaaggtagaatccctggagagtctctacttcactcccatccctgctcggagtcaggcccccctggagagcagcctggactccctgggagacgtcttcctggactcgggtcgtaagacccgctccgctcgtcggcgcaccacgcagatcatcaacatcaccatgaccaaggtcaggctgctgggacaggggctgcagggcagcaattcccacttcctctcaagggcatctttgcactgggcactcagtcaggagcagggagggatgagcagccagtccatgttacagtgggaaagctgagaggtcttaaaaagggcagtgacttggttaagggcacttctgaagaaaaaggcagggctaggattagatccctgcctcctgactaaggctagcattctctccatgcgtagcactgagcctgtgcagggtgaagggagagaacgtggcgaagctgcagcccatcctgtgcctcccagcatgccccatgcagctgagaggcattgttgctgcccagtggactgcctgacaggctacaggcccttgcctttgtttccacatcttgaaggggaggtttgggaggaggggagaggggcccctggtacagcaggggggacctgtgtgtttagggtgccccctgctaccaagaagttggggaagttctggaacatggtaagggccctggaagtttggactgagggacagcagaggctgtgggatgagcctgactagtcaggagacatggggcctagccccagctctgatacttcctagcagtgtgatttggggctagtcactttatttctttgcacttcatctccaaaatgggccgataaacactct

SEQ ID NO: 380432 - DNA, 6513 bp, Homo sapiens
ctttgccttcaagtacaggccggggtccggaagcggtgataccccttctctttcccagtggccctcaaacttccttttcccgggtccttaagcgggccccgccgacagaggccaatcagagggcagcgcgagggggcggggccatagtttaaactaattgtgcgctcacagcgctggcgcgagcccacgaagaggtacgattccggagaatcgcgaggcagagcgggagcgcgcagccaggtggaaactaattctaagccagactgctggagatcaccctgttctagtgtgtggaggcttccaccaggaggcgcattggagtgactgtctggcatcaccaagatgacactccacgccacccggggggctgcactcctctcttgggtgaacagtctacacgtggctgaccctgtggaggctgtgctgcagctccaggactgcagcatcttcatcaagatcattgacagaatccatggcactgaagagggacagcaaatcttgaagcagccggtgtcagagagactggactttgtgtgcagttttctgcagaaaaatcgaaaacatccctcttccccagaatgcctggtatctgcacagaaggtgctagagggatcagagctggaactggcgaagatgaccatgctgctcttataccactctaccatgagctccaaaagtcccagggactgggaacagtttgaatataaaattcaggctgagttggctgtcattcttaaatttgtgctggaccatgaggacgggctaaaccttaatgaggacctagagaacttcctacagaaagctcctgtgccttctacctgttctagcacattccctgaagagctctccccacctagccaccaggccaagagggagattcgcttcctagagctacagaaggttgcctcctcttccagtgggaacaactttctctcaggttctccagcttctcccatgggtgatatcctgcagaccccacagttccagatgagacggctgaagaagcagcttgctgatgagagaagtaatagggatgagctggagctggagctagctgagaaccgcaagctcctcaccgagaaggatgcacagatagccatgatgcagcagcgcattgaccgcctagccctgctgaatgagaagcaggcggccagcccactggagcccaaggagcttgaggagctgcgtgacaagaatgagagccttaccatgcggctgcatgaaaccctgaagcagtgccaggacctgaagacagagaagagccagatggatcgcaaaatcaaccagctttcggaggagaatggagacctttcctttaagctgcgggagtttgccagtcatctgcagcagctacaggatgccctcaatgagctgacggaggagcacagcaaggccactcaggagtggctagagaagcaggcccagctggagaaggagctcagcgcagccctgcaggacaagaaatgccttgaagagaagaacgaaatccttcagggaaaactttcacagctggaagaacacttgtcccagctgcaggataacccaccccaggagaagggcgaggtgctgggtgatgtcttgcagctggaaaccttgaagcaagaggcagccactcttgctgcaaacaacacacagctccaagccagggtagagatgctggagactgagcgaggccagcaggaagccaagctgcttgctgagcggggccacttcgaagaagaaaagcagcagctgtctagcctgatcactgacctgcagagctccatctccaacctcagccaggccaaggaagagctggagcaggcctcccaggctcatggggcccggttgactgcccaggtggcctctctgacctctgagctcaccacactcaatgccaccatccagcaacaggatcaagaactggctggcctgaagcagcaggccaaagagaagcaggcccagctagcacagaccctccaacagcaagaacaggcctcccagggcctccgccaccaggtggagcagctaagcagtagcctgaagcagaaggagcagcagttgaaggaggtagcggagaagcaggaggcaactaggcaggaccatgcccagcaactggccactgctgcagaggagcgagaggcctccttaagggagcgggatgcggctctcaagcagctggaggcactggagaaggagaaggctgccaagctggagattctgcagcagcaacttcaggtggctaatgaagcccgggacagtgcccagacctcagtgacacaggcccagcgggagaaggcagagctgagccggaaggtggaggaactccaggcctgtgttgagacagcccgccaggaacagcatgaggcccaggcccaggttgcagagctagagttgcagctgcggtctgagcagcaaaaagcaactgagaaagaaagggtggcccaggagaaggaccagctccaggagcagctccaggccctcaaagagtccttgaaggtcaccaagggcagccttgaagaggagaagcgcagggctgcagatgccctggaagagcagcagcgttgtatctctgagctgaaggcagagacccgaagcctggtggagcagcataagcgggaacgaaaggagctggaagaagagagggctgggcgcaaggggctggaggctcgattacagcagcttggggaggcccatcaggctgagactgaagtcctgcggcgggagctggcagaggccatggctgcccagcacacagctgagagtgagtgtgagcagctcgtcaaagaagtagctgcctggcgtgagcggtatgaggatagccagcaagaggaggcacagtatggcgccatgttccaggaacagctgatgactttgaaggaggaatgtgagaaggcccgccaggagctgcaggaggcaaaggagaaggtggcaggcatagaatcccacagcgagctccagataagccggcagcagaacgaactagctgagctccatgccaacctggccagagcactccagcaggtccaagagaaggaagtcagggcccagaagcttgcagatgacctctccactctgcaggaaaagatggctgccaccagcaaagaggtggcccgcttggagaccttggtgcgcaaggcaggtgagcagcaggaaacagcctcccgggagttagtcaaggagcctgcgagggcaggagacagacagcccgagtggctggaagagcaacagggacgccagttctgcagcacacaggcagcgctgcaggctatggagcgggaggcagagcagatgggcaatgagctggaacggctgcgggccgcgctgatggagagccaggggcagcagcaggaggagcgtgggcagcaggaaagggaggtggcgcggctgacccaggagcggggccgtgcccaggctgaccttgccctggagaaggcggccagagcagagcttgagatgcggctgcagaacgccctcaacgagcagcgtgtggagttcgctaccctgcaagaggcactggctcatgccctgacggaaaaggaaggcaaggaccaggagttggccaagcttcgtggtctggaggcagcccagataaaagagctggaggaacttcggcaaaccgtgaagcaactgaaggaacagctggctaagaaagaaaaggagcacgcatctggctcaggagcccaatctgaggctgctggcaggacagagccaacaggccccaagctggaggcactgcgggcagaggtgagcaagctggaacagcaatgccagaagcagcaggagcaggctgacagcctggaacgcagcctcgaggctgagcgggcctcccgggctgagcgggacagtgctctggagactctgcagggccagttagaggagaaggcccaggagctagggcacagtcagagtgccttagcctcggcccaacgggagttggctgccttccgcaccaaggtacaagaccacagcaaggctgaagatgagtggaaggcccaggtggcccggggccggcaagaggctgagaggaaaaatagcctcatcagcagcttggaggaggaggtgtccatcctgaatcgccaggtcctggagaaggagggggagagcaaggagttgaagcggctggtgatggccgagtcagagaagagccagaagctggaggagaggctgcgcctgctgcaggcagagacagccagcaacagtgccagagctgcagaacgcagctctgctctgcgggaggaggtgcagagcctccgggaggaggctgagaaacagcgggtggcttcagagaacctgcggcaggagctgacctcacaggctgagcgtgcggaggagctgggccaagaattgaaggcgtggcaggagaagttcttccagaaagagcaggccctctccaccctgcagctcgagcacaccagcacacaggccctggtgagtgagctgctgccagctaagcacctctgccagcagctgcaggccgagcaggccgctgccgagaaacgccaccgtgaggagctggagcagagcaagcaggccgctgggggactgcgggcagagctgctgcgggcccagcgggagcttggggagctgattcctctgcggcagaaggtggcagagcaggagcgaacagctcagcagctgcgggcagagaaggccagctatgcagagcagctgagcatgctgaagaaggcgcatggcctgctggcagaggagaaccgggggctgggtgagcgggccaaccttggccggcagtttctggaagtggagttggaccaggcccgggagaagtatgtccaagagttggcagccgtacgtgctgatgctgagacccgtctggctgaggtgcagcgagaagcacagagcactgcccgggagctggaggtgatgactgccaagtatgagggtgccaaggtcaaggtcctggaggagaggcagcggttccaggaagagaggcagaaactcactgcccaggtggaagaactgagtaagaaactggctgactctgaccaagccagcaaggtgcagcagcagaagctgaaggctgtccaggctcagggaggcgagagccagcaggaggcccagcgcctccaggcccagctgaatgaactgcaagcccagttgagccagaaggagcaggcagctgagcactataagctgcagatggagaaagccaaaacacattatgatgccaagaagcagcagaaccaagagctgcaggagcagctgcggagcctggagcagctgcagaaggaaaacaaagagctgcgagctgaagctgaacggctgggccatgagctacagcaggctgggctgaagaccaaggaggctgaacagacctgccgccaccttactgcccaggtgcgcagcctggaggcacaggttgcccatgcagaccagcagcttcgagacctgggcaaattccaggtggcaactgatgctttaaagagccgtgagccccaggctaagccccagctggacttgagtattgacagcctggatctgagctgcgaggaggggaccccactcagtatcaccaggtcaggaggcagccttcctccctatgtctgtttatggagtgcctgctgtttatcaggctgtatcctagtgagataaataagatgtgatctaaatttattcttagagaagaataaagaaaaacgggtattataccagatatctatttagggcacagttggaataaaaagcaagtggtcaagaaaggcttcgtggaagctatcgctcctgctgagtcttgaaagcatccataggtgtgtgtgccaggttgacgagaagagcagtgtgaacagaggctgtgaaagagcctgactaagctgagatgtgaggccaggaaggcccattggagaccggctattaagacttgatcctaaaggcattgaggaaaccttggtggctgtaattgaaaggtttaggagaaaaaaaaaggaaccttggaagaatttgaaactgaagagtacatggttaatttgcatcttaaaaagattattctaatagctagtatagaagttaagactggaaaaatgtttttattaaacacttacatttacttattttgtgctagacataaagcactcatgacaattatacctgatttgtcccccaacaaccctctgaggtaggtttattctgtctcctttaacagatgaatctggggcatagaggggcagtcacttgcccaaggttccccagtggtagagctggggtttgaccctgggcagcctggcctgagttcttggcttgtcaccactcatcttcctctgtcagtgccatgatgagtctaggtgagaggagatgaagcagaccagggaaaggacatgagcatggagtggggtgtggttagttgctgttcaggaagcttggtgattgggctcgccaagcaggacgacattggattatgcccacgttcatggcttgggggcactcttagccagagttaagggcccgggattcccagcacaattgtgacacttagctgtggggagtcctccatgcccttctcaggcggtgatgggctgc

SEQ ID NO: 380433 - DNA, 6151 bp, Homo sapiens
ctttgccttcaagtacaggccggggtccggaagcggtgataccccttctctttcccagtggccctcaaacttccttttcccgggtccttaagcgggccccgccgacagaggccaatcagagggcagcgcgagggggcggggccatagtttaaactaattgtgcgctcacagcgctggcgcgagcccacgaagaggtacgattccggagaatcgcgaggcagagcgggagcgcgcagccaggtggaaactaattctaagccagactgctggagatcaccctgttctagtgtgtggaggcttccaccaggaggcgcattggagtgactgtctggcatcaccaagatgacactccacgccacccggggggctgcactcctctcttgggtgaacagtctacacgtggctgaccctgtggaggctgtgctgcagctccaggactgcagcatcttcatcaagatcattgacagaatccatggcactgaagagggacagcaaatcttgaagcagccggtgtcagagagactggactttgtgtgcagttttctgcagaaaaatcgaaaacatccctcttccccagaatgcctggtatctgcacagaaggtgctagagggatcagagctggaactggcgaagatgaccatgctgctcttataccactctaccatgagctccaaaagtcccagggactgggaacagtttgaatataaaattcaggctgagttggctgtcattcttaaatttgtgctggaccatgaggacgggctaaaccttaatgaggacctagagaacttcctacagaaagctcctgtgccttctacctgttctagcacattccctgaagagctctccccacctagccaccaggccaagagggagattcgcttcctagagctacagaaggttgcctcctcttccagtgggaacaactttctctcaggttctccagcttctcccatgggtgatatcctgcagaccccacagttccagatgagacggctgaagaagcagcttgctgatgagagaagtaatagggatgagctggagctggagctagctgagaaccgcaagctcctcaccgagaaggatgcacagatagccatgatgcagcagcgcattgaccgcctagccctgctgaatgagaagcaggcggccagcccactggagcccaaggagcttgaggagctgcgtgacaagaatgagagccttaccatgcggctgcatgaaaccctgaagcagtgccaggacctgaagacagagaagagccagatggatcgcaaaatcaaccagctttcggaggagaatggagacctttcctttaagctgcgggagtttgccagtcatctgcagcagctacaggatgccctcaatgagctgacggaggagcacagcaaggccactcaggagtggctagagaagcaggcccagctggagaaggagctcagcgcagccctgcaggacaagaaatgccttgaagagaagaacgaaatccttcagggaaaactttcacagctggaagaacacttgtcccagctgcaggataacccaccccaggagaagggcgaggtgctgggtgatgtcttgcagctggaaaccttgaagcaagaggcagccactcttgctgcaaacaacacacagctccaagccagggtagagatgctggagactgagcgaggccagcaggaagccaagctgcttgctgagcggggccacttcgaagaagaaaagcagcagctgtctagcctgatcactgacctgcagagctccatctccaacctcagccaggccaaggaagagctggagcaggcctcccaggctcatggggcccggttgactgcccaggtggcctctctgacctctgagctcaccacactcaatgccaccatccagcaacaggatcaagaactggctggcctgaagcagcaggccaaagagaagcaggcccagctagcacagaccctccaacagcaagaacaggcctcccagggcctccgccaccaggtggagcagctaagcagtagcctgaagcagaaggagcagcagttgaaggaggtagcggagaagcaggaggcaactaggcaggaccatgcccagcaactggccactgctgcagaggagcgagaggcctccttaagggagcgggatgcggctctcaagcagctggaggcactggagaaggagaaggctgccaagctggagattctgcagcagcaacttcaggtggctaatgaagcccgggacagtgcccagacctcagtgacacaggcccagcgggagaaggcagagctgagccggaaggtggaggaactccaggcctgtgttgagacagcccgccaggaacagcatgaggcccaggcccaggttgcagagctagagttgcagctgcggtctgagcagcaaaaagcaactgagaaagaaagggtggcccaggagaaggaccagctccaggagcagctccaggccctcaaagagtccttgaaggtcaccaagggcagccttgaagaggagaagcgcagggctgcagatgccctggaagagcagcagcgttgtatctctgagctgaaggcagagacccgaagcctggtggagcagcataagcgggaacgaaaggagctggaagaagagagggctgggcgcaaggggctggaggctcgattacagcagcttggggaggcccatcaggctgagactgaagtcctgcggcgggagctggcagaggccatggctgcccagcacacagctgagagtgagtgtgagcagctcgtcaaagaagtagctgcctggcgtgagcggtatgaggatagccagcaagaggaggcacagtatggcgccatgttccaggaacagctgatgactttgaaggaggaatgtgagaaggcccgccaggagctgcaggaggcaaaggagaaggtggcaggcatagaatcccacagcgagctccagataagccggcagcagaacgaactagctgagctccatgccaacctggccagagcactccagcaggtccaagagaaggaagtcagggcccagaagcttgcagatgacctctccactctgcaggaaaagatggctgccaccagcaaagaggtggcccgcttggagaccttggtgcgcaaggcaggtgagcagcaggaaacagcctcccgggagttagtcaaggagcctgcgagggcaggagacagacagcccgagtggctggaagagcaacagggacgccagttctgcagcacacaggcagcgctgcaggctatggagcgggaggcagagcagatgggcaatgagctggaacggctgcgggccgcgctgatggagagccaggggcagcagcaggaggagcgtgggcagcaggaaagggaggtggcgcggctgacccaggagcggggccgtgcccaggctgaccttgccctggagaaggcggccagagcagagcttgagatgcggctgcagaacgccctcaacgagcagcgtgtggagttcgctaccctgcaagaggcactggctcatgccctgacggaaaaggaaggcaaggaccaggagttggccaagcttcgtggtctggaggcagcccagataaaagagctggaggaacttcggcaaaccgtgaagcaactgaaggaacagctggctaagaaagaaaaggagcacgcatctggctcaggagcccaatctgaggctgctggcaggacagagccaacaggccccaagctggaggcactgcgggcagaggtgagcaagctggaacagcaatgccagaagcagcaggagcaggctgacagcctggaacgcagcctcgaggctgagcgggcctcccgggctgagcgggacagtgctctggagactctgcagggccagttagaggagaaggcccaggagctagggcacagtcagagtgccttagcctcggcccaacgggagttggctgccttccgcaccaaggtacaagaccacagcaaggctgaagatgagtggaaggcccaggtggcccggggccggcaagaggctgagaggaaaaatagcctcatcagcagcttggaggaggaggtgtccatcctgaatcgccaggtcctggagaaggagggggagagcaaggagttgaagcggctggtgatggccgagtcagagaagagccagaagctggaggagaggctgcgcctgctgcaggcagagacagccagcaacagtgccagagctgcagaacgcagctctgctctgcgggaggaggtgcagagcctccgggaggaggctgagaaacagcgggtggcttcagagaacctgcggcaggagctgacctcacaggctgagcgtgcggaggagctgggccaagaattgaaggcgtggcaggagaagttcttccagaaagagcaggccctctccaccctgcagctcgagcacaccagcacacaggccctggtgagtgagctgctgccagctaagcacctctgccagcagctgcaggccgagcaggccgctgccgagaaacgccaccgtgaggagctggagcagagcaagcaggccgctgggggactgcgggcagagctgctgcgggcccagcgggagcttggggagctgattcctctgcggcagaaggtggcagagcaggagcgaacagctcagcagctgcgggcagagaaggccagctatgcagagcagctgagcatgctgaagaaggcgcatggcctgctggcagaggagaaccgggggctgggtgagcgggccaaccttggccggcagtttctggaagtggagttggaccaggcccgggagaagtatgtccaagagttggcagccgtacgtgctgatgctgagacccgtctggctgaggtgcagcgagaagcacagagcactgcccgggagctggaggtgatgactgccaagtatgagggtgccaaggtcaaggtcctggaggagaggcagcggttccaggaagagaggcagaaactcactgcccaggtggaagaactgagtaagaaactggctgactctgaccaagccagcaaggtgcagcagcagaagctgaaggctgtccaggctcagggaggcgagagccagcaggaggcccagcgcctccaggcccagctgaatgaactgcaagcccagttgagccagaaggagcaggcagctgagcactataagctgcagatggagaaagccaaaacacattatgatgccaagaagcagcagaaccaagagctgcaggagcagctgcggagcctggagcagctgcagaaggaaaacaaagagctgcgagctgaagctgaacggctgggccatgagctacagcaggctgggctgaagaccaaggaggctgaacagacctgccgccaccttactgcccaggtgcgcagcctggaggcacaggtaagaatttggctggcagactcacctcactcctattccactggacccctgtgccctctcctcctaggccactgctgccttaggcttttcttcactctccccctggccctctccttctcaggttgcccatgcagaccagcagcttcgagacctgggcaaattccaggtggcaactgatgctttaaagagccgtgagccccaggctaagccccagctggacttgagtattgacagcctggtccctggtccttcactggcgccttctcggagctggcccagggggcctggagcatggacagtgtgggcgctctccctaccttgcctccttttttcttaaagcaaagtcacttctccatcacaaccagatttgaggctggttttgatggctgggtccttgggcctggccagtcttcctcttagcctctggatctagaagggaccataagaggagtaggccctggttcctgctgtcctggtggctgggcccagcaggggccctcactcttgaagtccaggactgggtctgacctggtgggagcacctgccagaggatgctctttcccaggacggatgggccctgtgtctcaggagtggggttgggggacagccttcagcagcagctcacaccctaccttccccagacttgcactggggtgggatttggagtgatgggaaggtttttaagggccggggatggatcttttctaaatgttattacttgtaaataaagtctatttttctcccgtgaagtactgagttgacttgatcggtgtgggaaaaagaggaatatagg

SEQ ID NO: 380434 - DNA, 328 bp, Homo sapiens
agtcgacctgctgctacctatcactgcaatctaggccctggttcctgctgtcctggtggctgggcccagcaggggccctcactcttgaagtccaggactgggtctgacctggtgggagcacctgccagaggatgctctttcccaggacggatgggccctgtgtctcaggagtggggttgggggacagccttcagcagcagctcacaccctaccttccccagacttgcactggggtgggatttggagtgatgggaaggtttttaagggccggggatggatcttttctaaatgttattacttgtaaataaagtctatttttctcccgtga

SEQ ID NO: 380435 - DNA, 2147 bp, Homo sapiens
ctttgccttcaagtacaggccggggtccggaagcggtgataccccttctctttcccagtggccctcaaacttccttttcccgggtccttaagcgggccccgccgacagaggccaatcagagggcagcgcgagggggcggggccatagtttaaactaattgtgcgctcacagcgctggcgcgagcccacgaagaggtacgattccggagaatcgcgaggcagagcgggagcgcgcagccaggtggaaactaattctaagccagactgctggagatcaccctgttctagtgtgtggaggcttccaccaggaggcgcattggagtgactgtctggcatcaccaagatgacactccacgccacccggggggctgcactcctctcttgggtgaacagtctacacgtggctgaccctgtggaggctgtgctgcagctccaggactgcagcatcttcatcaagatcattgacagaatccatggcactgaagagggacagcaaatcttgaagcagccggtgtcagagagactggactttgtgtgcagttttctgcagaaaaatcgaaaacatccctcttccccagaatgcctggtatctgcacagaaggtgctagagggatcagagctggaactggcgaagatgaccatgctgctcttataccactctaccatgagctccaaaagtcccagggactgggaacagtttgaatataaaattcaggctgagttggctgtcattcttaaatttgtgctggaccatgaggacgggctaaaccttaatgaggacctagagaacttcctacagaaagctcctgtgccttctacctgttctagcacattccctgaagagctctccccacctagccaccaggccaagagggagattcgcttcctagagctacagaaggttgcctcctcttccagtgggaacaactttctctcaggttctccagcttctcccatgggtgatatcctgcagaccccacagttccagatgagacggctgaagaagcagcttgctgatgagagaagtaatagggatgagctggagctggagctagctgagaaccgcaagctcctcaccgagaaggatgcacagatagccatgatgcagcagcgcattgaccgcctagccctgctgaatgagaagcaggcggccagcccactggagcccaaggagcttgaggagctgcgtgacaagaatgagagccttaccatgcggctgcatgaaaccctgaagcagtgccaggacctgaagacagagaagagccagatggatcgcaaaatcaaccagctttcggaggagaatggagacctttcctttaagctgcgggagtttgccagtcatctgcagcagctacaggatgccctcaatgagctgacggaggagcacagcaaggccactcaggagtggctagagaagcaggcccagctggagaaggagctcagcgcagccctgcaggacaaggtaaccctctgctggggtcacagccacagtcttgaccacatgtgcaaagctgagtccagtttaccactgtgctcttctgggcctttgggtattaagttgctttctcttcaaggttcaatagtgtgctgtaattgaaagattgtgggcttcagtctagtacaccttttttttttaacttattttttttttccccagtcaatgccctcactttatagtacacctttcaatcctatctctgctgttcacaagatgtggatcttggacaagttaatcagtctgtttttctaagcatcctttccctaaaatgggagtagtaacgagtagctgcctcatcacctattatgagaaaacgtatgtaaagcacttcacacatcgtgtagtgtaaagtaagctctcagtgaaccagttgtgattgttactattggtaagaacccaatttggccacttactaataaccatgtagcccttgatcaaggcacttagcatctgcttcaggttcttgctctgtaagaggaatggtagtagctgcctcccacataagctgggtgtggtgatgcatgcctgtagtcccagctactcgggaggctgagacagaagaagctctcgaatctgggaggtggaggttgcagtaagccaagatctcgccactgcactccagcctaggcgatagagcgagactctgtctc

SEQ ID NO: 380436 - DNA, 1265 bp, Homo sapiens
ctttgccttcaagtacaggccggggtccggaagcggtgataccccttctctttcccagtggccctcaaacttccttttcccgggtccttaagcgggccccgccgacagaggccaatcagagggcagcgcgagggggcggggccatagtttaaactaattgtgcgctcacagcgctggcgcgagcccacgaagaggtacgattccggagaatcgcgaggcagagcgggagcgcgcagccaggtggaaactaattctaagccagactgctggagatcaccctgttctagtgtgtggaggcttccaccaggaggcgcattggagtgactgtctggcatcaccaagatgacactccacgccacccggggggctgcactcctctcttgggtgaacagtctacacgtggctgaccctgtggaggctgtgctgcagctccaggactgcagcatcttcatcaagatcattgacagaatccatggcactgaagagggacagcaaatcttgaagcagccggtgtcagagagactggactttgtgtgcagttttctgcagaaaaatcgaaaacatccctcttccccagaatgcctggtatctgcacagaaggtgctagagggatcagagctggaactggcgaagatgaccatgctgctcttataccactctaccatgagctccaaaagtcccagggactgggaacagtttgaatataaaattcaggctgagttggctgtcattcttaaatttgtgctggaccatgaggacgggctaaaccttaatgaggacctagagaacttcctacagaaagctcctgtgccttctacctgttctagcacattccctgaagagctctccccacctagccaccaggccaagagggagattcgcttcctagagctacagaaggttgcctcctcttccagtgggaacaactttctctcaggttctccagcttctcccatgggtgatatcctgcagaccccacagttccagatgagacggctgaagaagcagcttgctgatgactctttcctgctggcttcaggtttgatgatccttacattctggaattcctctgtcagtctcctctgtaaccgacggctttgacttccagcccaggttttacaaaggaatgtccccccagcttgcaggatgtctggggtcacgctgagaaggcgtcccccacaggctgatgagcctgtcatgatcgagtcccgaacctgtggcattggcgccatgtcgctcagtatcacatctgctctcatgaccct

SEQ ID NO: 380437 - DNA, 602 bp, Homo sapiens
aggcccactctagaggttcccctgctcatccctcctatccctccttggtggaaactaattctaagccagactgctggagatcaccctgttctagtgtgtggaggcttccaccaggaggcgcattggagtgactgtctggcatcaccaagatgacactccacgccacccggggggctgcactcctctcttgggtgaacagtctacacgtggctgaccctgtggaggctgtgctgcagctccaggactgcagcatcttcatcaagatcattgacagaatccatggcactgaagagggacagcaaatcttgaagcagccggtgtcagagagactggactttgtgtgcagttttctgcagaaaaatcgaaaacatccctcttccccagaatgcctggtatctgcacagaaggtgctagagggatcagagctggaactggcgaagatgaccatgctgctcttataccactctaccatgagctccaaaagtcccagggactgggaacagtttgaatataaaattcaggctgagttggctgtcattcgtaaatttgtgctggaccagagcgactgacagcccagagcgactacaggcccagagcgactg

SEQ ID NO: 380438 - DNA, 335 bp, Homo sapiens
gccattggtgccacccctcgagccaagggcaaggtagaggcactggcaggatgggggagggaaacccgatgagagcatgggcaccccccagaccgccccaccaagtagcatccaagatggggccacgccaggctgctggagggtgtggggtaagaggtgtccctgtcctggtagctcctctccaaggagagaagacagatggccccattctcatggagagcacccagagctgctcaggcacagccagcaactgataaccctggggctcacaagggaggggatccagacaggggcgtgggagcaggaagagatcttcccagccagtgggtgcaggc

SEQ ID NO: 380439 - DNA, 617 bp, Homo sapiens
ctgtctctgcaggctcagggtagacgcaagaacagttggccctggcaacatctatgtgttaggttgcctcattcaggccctgccaagcagcctgggcagcaggctgttccgtaattggaggccagagaaagggcctgagtttattctaggaacactggggatcctggtctgggaaaccccatgatgggtggacatccaggatgaacatccaggggaagtcctcctgagtcttctgtcctcctcttccctccccaggtggaagaactgagtaagaaactggctgactctgaccaagccagcaaggtgcagcagcagaagctgaaggtggggcagctgggggaatgggtctggcctctggacaagggagggaagctattctctaagctctggggccgtggggggtgtcggggcagaagaggggcaccctgcattccaggtagccctcctaggaagcctgtggcttagaagcccctgcatgtgtcttctgggagctctcgagagacaaccagggtggttcccatctctcaactgtcactgtccacttcagcagctactagtcacgtgtggttattgaaatttattaaagtaaatccagttcttcaatcacactagctaca

SEQ ID NO: 380440 - DNA, 7409 bp, Homo sapiens
ctttgccttcaagtacaggccggggtccggaagcggtgataccccttctctttcccagtggccctcaaacttccttttcccgggtccttaagcgggccccgccgacagaggccaatcagagggcagcgcgagggggcggggccatagtttaaactaattgtgcgctcacagcgctggcgcgagcccacgaagaggtacgattccggagaatcgcgaggcagagcgggagcgcgcagccaggtggaaactaattctaagccagactgctggagatcaccctgttctagtgtgtggaggcttccaccaggagtctggagtgcaatggcacgatctcggctcactgcaacctccacctcccaggttcaagcgattctcctgcctcagcctcccaagtagctgggattacaggcgcattggagtgactgtctggcatcaccaagatgacactccacgccacccggggggctgcactcctctcttgggtgaacagtctacacgtggctgaccctgtggaggctgtgctgcagctccaggactgcagcatcttcatcaagatcattgacagaatccatggcactgaagagggacagcaaatcttgaagcagccggtgtcagagagactggactttgtgtgcagttttctgcagaaaaatcgaaaacatccctcttccccagaatgcctggtatctgcacagaaggtgctagagggatcagagctggaactggcgaagatgaccatgctgctcttataccactctaccatgagctccaaaagtcccagggactgggaacagtttgaatataaaattcaggctgagttggctgtcattcttaaatttgtgctggaccatgaggacgggctaaaccttaatgaggacctagagaacttcctacagaaagctcctgtgccttctacctgttctagcacattccctgaagagctctccccacctagccaccaggccaagagggagattcgcttcctagagctacagaaggttgcctcctcttccagtgggaacaactttctctcaggttctccagcttctcccatgggtgatatcctgcagaccccacagttccagatgagacggctgaagaagcagcttgctgatgagagaagtaatagggatgagctggagctggagctagctgagaaccgcaagctcctcaccgagaaggatgcacagatagccatgatgcagcagcgcattgaccgcctagccctgctgaatgagaagcaggcggccagcccactggagcccaaggagcttgaggagctgcgtgacaagaatgagagccttaccatgcggctgcatgaaaccctgaagcagtgccaggacctgaagacagagaagagccagatggatcgcaaaatcaaccagctttcggaggagaatggagacctttcctttaagctgcgggagtttgccagtcatctgcagcagctacaggatgccctcaatgagctgacggaggagcacagcaaggccactcaggagtggctagagaagcaggcccagctggagaaggagctcagcgcagccctgcaggacaagaaatgccttgaagagaagaacgaaatccttcagggaaaactttcacagctggaagaacacttgtcccagctgcaggataacccaccccaggagaagggcgaggtgctgggtgatgtcttgcagctggaaaccttgaagcaagaggcagccactcttgctgcaaacaacacacagctccaagccagggtagagatgctggagactgagcgaggccagcaggaagccaagctgcttgctgagcggggccacttcgaagaagaaaagcagcagctgtctagcctgatcactgacctgcagagctccatctccaacctcagccaggccaaggaagagctggagcaggcctcccaggctcatggggcccggttgactgcccaggtggcctctctgacctctgagctcaccacactcaatgccaccatccagcaacaggatcaagaactggctggcctgaagcagcaggccaaagagaagcaggcccagctagcacagaccctccaacagcaagaacaggcctcccagggcctccgccaccaggtggagcagctaagcagtagcctgaagcagaaggagcagcagttgaaggaggtagcggagaagcaggaggcaactaggcaggaccatgcccagcaactggccactgctgcagaggagcgagaggcctccttaagggagcgggatgcggctctcaagcagctggaggcactggagaaggagaaggctgccaagctggagattctgcagcagcaacttcaggtggctaatgaagcccgggacagtgcccagacctcagtgacacaggcccagcgggagaaggcagagctgagccggaaggtggaggaactccaggcctgtgttgagacagcccgccaggaacagcatgaggcccaggcccaggttgcagagctagagttgcagctgcggtctgagcagcaaaaagcaactgagaaagaaagggtggcccaggagaaggaccagctccaggagcagctccaggccctcaaagagtccttgaaggtcaccaagggcagccttgaagaggagaagcgcagggctgcagatgccctggaagagcagcagcgttgtatctctgagctgaaggcagagacccgaagcctggtggagcagcataagcgggaacgaaaggagctggaagaagagagggctgggcgcaaggggctggaggctcgattacagcagcttggggaggcccatcaggctgagactgaagtcctgcggcgggagctggcagaggccatggctgcccagcacacagctgagagtgagtgtgagcagctcgtcaaagaagtagctgcctggcgtgagcggtatgaggatagccagcaagaggaggcacagtatggcgccatgttccaggaacagctgatgactttgaaggaggaatgtgagaaggcccgccaggagctgcaggaggcaaaggagaaggtggcaggcatagaatcccacagcgagctccagataagccggcagcagaacgaactagctgagctccatgccaacctggccagagcactccagcaggtccaagagaaggaagtcagggcccagaagcttgcagatgacctctccactctgcaggaaaagatggctgccaccagcaaagaggtggcccgcttggagaccttggtgcgcaaggcaggtgagcagcaggaaacagcctcccgggagttagtcaaggagcctgcgagggcaggagacagacagcccgagtggctggaagagcaacagggacgccagttctgcagcacacaggcagcgctgcaggctatggagcgggaggcagagcagatgggcaatgagctggaacggctgcgggccgcgctgatggagagccaggggcagcagcaggaggagcgtgggcagcaggaaagggaggtggcgcggctgacccaggagcggggccgtgcccaggctgaccttgccctggagaaggcggccagagcagagcttgagatgcggctgcagaacgccctcaacgagcagcgtgtggagttcgctaccctgcaagaggcactggctcatgccctgacggaaaaggaaggcaaggaccaggagttggccaagcttcgtggtctggaggcagcccagataaaagagctggaggaacttcggcaaaccgtgaagcaactgaaggaacagctggctaagaaagaaaaggagcacgcatctggctcaggagcccaatctgaggctgctggcaggacagagccaacaggccccaagctggaggcactgcgggcagaggtgagcaagctggaacagcaatgccagaagcagcaggagcaggctgacagcctggaacgcagcctcgaggctgagcgggcctcccgggctgagcgggacagtgctctggagactctgcagggccagttagaggagaaggcccaggagctagggcacagtcagagtgccttagcctcggcccaacgggagttggctgccttccgcaccaaggtacaagaccacagcaaggctgaagatgagtggaaggcccaggtggcccggggccggcaagaggctgagaggaaaaatagcctcatcagcagcttggaggaggaggtgtccatcctgaatcgccaggtcctggagaaggagggggagagcaaggagttgaagcggctggtgatggccgagtcagagaagagccagaagctggaggagaggctgcgcctgctgcaggcagagacagccagcaacagtgccagagctgcagaacgcagctctgctctgcgggaggaggtgcagagcctccgggaggaggctgagaaacagcgggtggcttcagagaacctgcggcaggagctgacctcacaggctgagcgtgcggaggagctgggccaagaattgaaggcgtggcaggagaagttcttccagaaagagcaggccctctccaccctgcagctcgagcacaccagcacacaggccctggtgagtgagctgctgccagctaagcacctctgccagcagctgcaggccgagcaggccgctgccgagaaacgccaccgtgaggagctggagcagagcaagcaggccgctgggggactgcgggcagagctgctgcgggcccagcgggagcttggggagctgattcctctgcggcagaaggtggcagagcaggagcgaacagctcagcagctgcgggcagagaaggccagctatgcagagcagctgagcatgctgaagaaggcgcatggcctgctggcagaggagaaccgggggctgggtgagcgggccaaccttggccggcagtttctggaagtggagttggaccaggcccgggagaagtatgtccaagagttggcagccgtacgtgctgatgctgagacccgtctggctgaggtgcagcgagaagcacagagcactgcccgggagctggaggtgatgactgccaagtatgagggtgccaaggtcaaggtcctggaggagaggcagcggttccaggaagagaggcagaaactcactgcccaggtggaagaactgagtaagaaactggctgactctgaccaagccagcaaggtgcagcagcagaagctgaaggctgtccaggctcagggaggcgagagccagcaggaggcccagcgcctccaggcccagctgaatgaactgcaagcccagttgagccagaaggagcaggcagctgagcactataagctgcagatggagaaagccaaaacacattatgatgccaagaagcagcagaaccaagagctgcaggagcagctgcggagcctggagcagctgcagaaggaaaacaaagagctgcgagctgaagctgaacggctgggccatgagctacagcaggctgggctgaagaccaaggaggctgaacagacctgccgccaccttactgcccaggtgcgcagcctggaggcacaggttgcccatgcagaccagcagcttcgagacctgggcaaattccaggtggcaactgatgctttaaagagccgtgagccccaggctaagccccagctggacttgagtattgacagcctggatctgagctgcgaggaggggaccccactcagtatcaccagcaagctgcctcgtacccagccagacggcaccagcgtccctggagaaccagcctcacctatctcccagcgcctgccccccaaggtagaatccctggagagtctctacttcactcccatccctgctcggagtcaggcccccctggagagcagcctggactccctgggagacgtcttcctggactcgggtcgtaagacccgctccgctcgtcggcgcaccacgcagatcatcaacatcaccatgaccaagaagctagatgtggaagagccagacagcgccaactcatcgttctacagcacgcggtctgctcctgcttcccaggctagcctgcgagccacctcctctactcagtctctagctcgcctgggttctcccgattatggcaactcagccctgctcagcttgcctggctaccgccccaccactcgcagttctgctcgtcgttcccaggccggggtgtccagtggggcccctccaggaaggaacagcttctacatgggcacttgccaggatgagcctgagcagctggatgactggaaccgcattgcagagctgcagcagcgcaatcgagtgtgccccccacatctgaagacctgctatcccctggagtccaggccttccctgagcctgggcaccatcacagatgaggagatgaaaactggagacccccaagagaccctgcgccgagccagcatgcagccaatccagatagccgagggcactggcatcaccacccggcagcagcgcaaacgggtctccctagagccccaccagggccctggaactcctgagtctaagaaggccaccagctgtttcccacgccccatgactccccgagaccgacatgaagggcgcaaacagagcactactgaggcccagaagaaagcagctccagcttctactaaacaggctgaccggcgccagtcgatggccttcagcatcctcaacacacccaagaagctagggaacagccttctgcggcggggagcctcaaagaaggccctgtccaaggcttcccccaacactcgcagtggaacccgccgttctccgcgcattgccaccaccacagccagcgccgccactgctgccgccattggtgccacccctcgagccaagggcaaggcaaagcactaaagggccagtaccagtgagtggccccacctgtgtccccgatgctgccgtcacctggtcctccgcctactgtccctctcagtgccttctctcagctcccaggccaacagtagccaaacccctagagacagtgatgcctgcccgcaccctggcctggtccctggtccttcactggcgccttctcggagctggcccagggggcctggagcatggacagtgtgggcgctctccctaccttgcctccttttttcttaaagcaaagtcacttctccatcacaaccagatttgaggctggttttgatggctgggtccttgggcctggccagtcttcctcttagcctctggatctagaagggaccataagaggagtaggccctggttcctgctgtcctggtggctgggcccagcaggggccctcactcttgaagtccaggactgggtctgacctggtgggagcacctgccagaggatgctctttcccaggacggatgggccctgtgtctcaggagtggggttgggggacagccttcagcagcagctcacaccctaccttccccagacttgcactggggtgggatttggagtgatgggaaggtttttaagggccggggatggatcttttctaaatgttattacttgtaaataaagtctatttttctcccgtga

SEQ ID NO: 380441 - DNA, 7353 bp, Homo sapiens
ctttgccttcaagtacaggccggggtccggaagcggtgataccccttctctttcccagtggccctcaaacttccttttcccgggtccttaagcgggccccgccgacagaggccaatcagagggcagcgcgagggggcggggccatagtttaaactaattgtgcgctcacagcgctggcgcgagcccacgaagaggtacgattccggagaatcgcgaggcagagcgggagcgcgcagccaggtggaaactaattctaagccagactgctggagatcaccctgttctagtgtgtggaggcttccaccaggaggcgcattggagtgactgtctggcatcaccaagatgacactccacgccacccggggggctgcactcctctcttgggtgaacagtctacacgtggctgaccctgtggaggctgtgctgcagctccaggactgcagcatcttcatcaagatcattgacagaatccatggcactgaagagggacagcaaatcttgaagcagccggtgtcagagagactggactttgtgtgcagttttctgcagaaaaatcgaaaacatccctcttccccagaatgcctggtatctgcacagaaggtgctagagggatcagagctggaactggcgaagatgaccatgctgctcttataccactctaccatgagctccaaaagtcccagggactgggaacagtttgaatataaaattcaggctgagttggctgtcattcttaaatttgtgctggaccatgaggacgggctaaaccttaatgaggacctagagaacttcctacagaaagctcctgtgccttctacctgttctagcacattccctgaagagctctccccacctagccaccaggccaagagggagattcgcttcctagagctacagaaggttgcctcctcttccagtgggaacaactttctctcaggttctccagcttctcccatgggtgatatcctgcagaccccacagttccagatgagacggctgaagaagcagcttgctgatgagagaagtaatagggatgagctggagctggagctagctgagaaccgcaagctcctcaccgagaaggatgcacagatagccatgatgcagcagcgcattgaccgcctagccctgctgaatgagaagcaggcggccagcccactggagcccaaggagcttgaggagctgcgtgacaagaatgagagccttaccatgcggctgcatgaaaccctgaagcagtgccaggacctgaagacagagaagagccagatggatcgcaaaatcaaccagctttcggaggagaatggagacctttcctttaagctgcgggagtttgccagtcatctgcagcagctacaggatgccctcaatgagctgacggaggagcacagcaaggccactcaggagtggctagagaagcaggcccagctggagaaggagctcagcgcagccctgcaggacaagaaatgccttgaagagaagaacgaaatccttcagggaaaactttcacagctggaagaacacttgtcccagctgcaggataacccaccccaggagaagggcgaggtgctgggtgatgtcttgcagctggaaaccttgaagcaagaggcagccactcttgctgcaaacaacacacagctccaagccagggtagagatgctggagactgagcgaggccagcaggaagccaagctgcttgctgagcggggccacttcgaagaagaaaagcagcagctgtctagcctgatcactgacctgcagagctccatctccaacctcagccaggccaaggaagagctggagcaggcctcccaggctcatggggcccggttgactgcccaggtggcctctctgacctctgagctcaccacactcaatgccaccatccagcaacaggatcaagaactggctggcctgaagcagcaggccaaagagaagcaggcccagctagcacagaccctccaacagcaagaacaggcctcccagggcctccgccaccaggtggagcagctaagcagtagcctgaagcagaaggagcagcagttgaaggaggtagcggagaagcaggaggcaactaggcaggaccatgcccagcaactggccactgctgcagaggagcgagaggcctccttaagggagcgggatgcggctctcaagcagctggaggcactggagaaggagaaggctgccaagctggagattctgcagcagcaacttcaggtggctaatgaagcccgggacagtgcccagacctcagtgacacaggcccagcgggagaaggcagagctgagccggaaggtggaggaactccaggcctgtgttgagacagcccgccaggaacagcatgaggcccaggcccaggttgcagagctagagttgcagctgcggtctgagcagcaaaaagcaactgagaaagaaagggtggcccaggagaaggaccagctccaggagcagctccaggccctcaaagagtccttgaaggtcaccaagggcagccttgaagaggagaagcgcagggctgcagatgccctggaagagcagcagcgttgtatctctgagctgaaggcagagacccgaagcctggtggagcagcataagcgggaacgaaaggagctggaagaagagagggctgggcgcaaggggctggaggctcgattacagcagcttggggaggcccatcaggctgagactgaagtcctgcggcgggagctggcagaggccatggctgcccagcacacagctgagagtgagtgtgagcagctcgtcaaagaagtagctgcctggcgtgagcggtatgaggatagccagcaagaggaggcacagtatggcgccatgttccaggaacagctgatgactttgaaggaggaatgtgagaaggcccgccaggagctgcaggaggcaaaggagaaggtggcaggcatagaatcccacagcgagctccagataagccggcagcagaacgaactagctgagctccatgccaacctggccagagcactccagcaggtccaagagaaggaagtcagggcccagaagcttgcagatgacctctccactctgcaggaaaagatggctgccaccagcaaagaggtggcccgcttggagaccttggtgcgcaaggcaggtgagcagcaggaaacagcctcccgggagttagtcaaggagcctgcgagggcaggagacagacagcccgagtggctggaagagcaacagggacgccagttctgcagcacacaggcagcgctgcaggctatggagcgggaggcagagcagatgggcaatgagctggaacggctgcgggccgcgctgatggagagccaggggcagcagcaggaggagcgtgggcagcaggaaagggaggtggcgcggctgacccaggagcggggccgtgcccaggctgaccttgccctggagaaggcggccagagcagagcttgagatgcggctgcagaacgccctcaacgagcagcgtgtggagttcgctaccctgcaagaggcactggctcatgccctgacggaaaaggaaggcaaggaccaggagttggccaagcttcgtggtctggaggcagcccagataaaagagctggaggaacttcggcaaaccgtgaagcaactgaaggaacagctggctaagaaagaaaaggagcacgcatctggctcaggagcccaatctgaggctgctggcaggacagagccaacaggccccaagctggaggcactgcgggcagaggtgagcaagctggaacagcaatgccagaagcagcaggagcaggctgacagcctggaacgcagcctcgaggctgagcgggcctcccgggctgagcgggacagtgctctggagactctgcagggccagttagaggagaaggcccaggagctagggcacagtcagagtgccttagcctcggcccaacgggagttggctgccttccgcaccaaggtacaagaccacagcaaggctgaagatgagtggaaggcccaggtggcccggggccggcaagaggctgagaggaaaaatagcctcatcagcagcttggaggaggaggtgtccatcctgaatcgccaggtcctggagaaggagggggagagcaaggagttgaagcggctggtgatggccgagtcagagaagagccagaagctggaggagaggctgcgcctgctgcaggcagagacagccagcaacagtgccagagctgcagaacgcagctctgctctgcgggaggaggtgcagagcctccgggaggaggctgagaaacagcgggtggcttcagagaacctgcggcaggagctgacctcacaggctgagcgtgcggaggagctgggccaagaattgaaggcgtggcaggagaagttcttccagaaagagcaggccctctccaccctgcagctcgagcacaccagcacacaggccctggtgagtgagctgctgccagctaagcacctctgccagcagctgcaggccgagcaggccgctgccgagaaacgccaccgtgaggagctggagcagagcaagcaggccgctgggggactgcgggcagagctgctgcgggcccagcgggagcttggggagctgattcctctgcggcagaaggtggcagagcaggagcgaacagctcagcagctgcgggcagagaaggccagctatgcagagcagctgagcatgctgaagaaggcgcatggcctgctggcagaggagaaccgggggctgggtgagcgggccaaccttggccggcagtttctggaagtggagttggaccaggcccgggagaagtatgtccaagagttggcagccgtacgtgctgatgctgagacccgtctggctgaggtgcagcgagaagcacagagcactgcccgggagctggaggtgatgactgccaagtatgagggtgccaaggtcaaggtcctggaggagaggcagcggttccaggaagagaggcagaaactcactgcccaggtggagcagctagaggtatttcagagagagcaaactaagcaggtggaagaactgagtaagaaactggctgactctgaccaagccagcaaggtgcagcagcagaagctgaaggctgtccaggctcagggaggcgagagccagcaggaggcccagcgcctccaggcccagctgaatgaactgcaagcccagttgagccagaaggagcaggcagctgagcactataagctgcagatggagaaagccaaaacacattatgatgccaagaagcagcagaaccaagagctgcaggagcagctgcggagcctggagcagctgcagaaggaaaacaaagagctgcgagctgaagctgaacggctgggccatgagctacagcaggctgggctgaagaccaaggaggctgaacagacctgccgccaccttactgcccaggtgcgcagcctggaggcacaggttgcccatgcagaccagcagcttcgagacctgggcaaattccaggtggcaactgatgctttaaagagccgtgagccccaggctaagccccagctggacttgagtattgacagcctggatctgagctgcgaggaggggaccccactcagtatcaccagcaagctgcctcgtacccagccagacggcaccagcgtccctggagaaccagcctcacctatctcccagcgcctgccccccaaggtagaatccctggagagtctctacttcactcccatccctgctcggagtcaggcccccctggagagcagcctggactccctgggagacgtcttcctggactcgggtcgtaagacccgctccgctcgtcggcgcaccacgcagatcatcaacatcaccatgaccaagaagctagatgtggaagagccagacagcgccaactcatcgttctacagcacgcggtctgctcctgcttcccaggctagcctgcgagccacctcctctactcagtctctagctcgcctgggttctcccgattatggcaactcagccctgctcagcttgcctggctaccgccccaccactcgcagttctgctcgtcgttcccaggccggggtgtccagtggggcccctccaggaaggaacagcttctacatgggcacttgccaggatgagcctgagcagctggatgactggaaccgcattgcagagctgcagcagcgcaatcgagtgtgccccccacatctgaagacctgctatcccctggagtccaggccttccctgagcctgggcaccatcacagatgaggagatgaaaactggagacccccaagagaccctgcgccgagccagcatgcagccaatccagatagccgagggcactggcatcaccacccggcagcagcgcaaacgggtctccctagagccccaccagggccctggaactcctgagtctaagaaggccaccagctgtttcccacgccccatgactccccgagaccgacatgaagggcgcaaacagagcactactgaggcccagaagaaagcagctccagcttctactaaacaggctgaccggcgccagtcgatggccttcagcatcctcaacacacccaagaagctagggaacagccttctgcggcggggagcctcaaagaaggccctgtccaaggcttcccccaacactcgcagtggaacccgccgttctccgcgcattgccaccaccacagccagcgccgccactgctgccgccattggtgccacccctcgagccaagggcaaggcaaagcactaaagggccagtaccagtgagtggccccacctgtgtccccgatgctgccgtcacctggtcctccgcctactgtccctctcagtgccttctctcagctcccaggccaacagtagccaaacccctagagacagtgatgcctgcccgcaccctggcctggtccctggtccttcactggcgccttctcggagctggcccagggggcctggagcatggacagtgtgggcgctctccctaccttgcctccttttttcttaaagcaaagtcacttctccatcacaaccagatttgaggctggttttgatggctgggtccttgggcctggccagtcttcctcttagcctctggatctagaagggaccataagaggagtaggccctggttcctgctgtcctggtggctgggcccagcaggggccctcactcttgaagtccaggactgggtctgacctggtgggagcacctgccagaggatgctctttcccaggacggatgggccctgtgtctcaggagtggggttgggggacagccttcagcagcagctcacaccctaccttccccagacttgcactggggtgggatttggagtgatgggaaggtttttaagggccggggatggatcttttctaaatgttattacttgtaaataaagtctatttttctcccgtga

SEQ ID NO: 380442 - DNA, 3784 bp, Homo sapiens
  misc_feature (5)..(6): n is a, c, g, or t
ggcannagggtgctggagaggccgctgcgagcggaaggcctcctccataaccgagtccgaaagggcagaatctatgggggtggaaactaattctaagccagactgctggagatcaccctgttctagtgtgtggaggcttccaccaggaggcgcattggagtgactgtctggcatcaccaagatgacactccacgccacccggggggctgcactcctctcttgggtgaacagtctacacgtggctgaccctgtggaggctgtgctgcagctccaggactgcagcatcttcatcaagatcattgacagaatccatggcactgaagagggacagcaaatcttgaagcagccggtgtcagagagactggactttgtgtgcagttttctgcagaaaaatcgaaaacatccctcttccccagaatgcctggtatctgcacagaaggtgctagagggatcagagctggaactggcgaagatgaccatgctgctcttataccactctaccatgagctccaaaagtcccagggactgggaacagtttgaatataaaattcaggctgagttggctgtcattcttaaatttgtgctggaccatgaggacgggctaaaccttaatgaggacctagagaacttcctacagaaagctcctgtgccttctacctgttctagcacattccctgaagagctctccccacctagccaccaggccaagagggagattcgcttcctagagctacagaaggttgcctcctcttccagtgggaacaactttctctcaggttctccagcttctcccatgggtgatatcctgcagaccccacagttccagatgagacggctgaagaagcagcttgctgatgagagaagtaatagggatgagctggagctggagctagctgagaaccgcaagctcctcaccgagaaggatgcacagatagccatgatgcagcagcgcattgaccgcctagccctgctgaatgagaagcaggcggccagcccactggagcccaaggagcttgaggagctgcgtgacaagaatgagagccttaccatgcggctgcatgaaaccctgaagcagtgccaggacctgaagacagagaagagccagatggatcgcaaaatcaaccagctttcggaggagaatggagacctttcctttaagctgcgggagtttgccagtcatctgcagcagctacaggatgccctcaatgagctgacggaggagcacagcaaggccactcaggagtggctagagaagcaggcccagctggagaaggagctcagcgcagccctgcaggacaagaaatgccttgaagagaagaacgaaatccttcagggaaaactttcacagctggaagaacacttgtcccagctgcaggataacccaccccaggagaagggcgaggtgctgggtgatgtcttgcaggtggaagaactgagtaagaaactggctgactctgaccaagccagcaaggtgcagcagcagaagctgaaggctgtccaggctcagggaggcgagagccagcaggaggcccagcgcctccaggcccagctgaatgaactgcaagcccagttgagccagaaggagcaggcagctgagcactataagctgcagatggagaaagccaaaacacattatgatgccaagaagcagcagaaccaagagctgcaggagcagctgcggagcctggagcagctgcagaaggaaaacaaagagctgcgagctgaagctgaacggctgggccatgagctacagcaggctgggctgaagaccaaggaggctgaacagacctgccgccaccttactgcccaggtgcgcagcctggaggcacaggttgcccatgcagaccagcagcttcgagacctgggcaaattccaggtggcaactgatgctttaaagagccgtgagccccaggctaagccccagctggacttgagtattgacagcctggatctgagctgcgaggaggggaccccactcagtatcaccagcaagctgcctcgtacccagccagacggcaccagcgtccctggagaaccagcctcacctatctcccagcgcctgccccccaaggtagaatccctggagagtctctacttcactcccatccctgctcggagtcaggcccccctggagagcagcctggactccctgggagacgtcttcctggactcgggtcgtaagacccgctccgctcgtcggcgcaccacgcagatcatcaacatcaccatgaccaagaagctagatgtggaagagccagacagcgccaactcatcgttctacagcacgcggtctgctcctgcttcccaggctagcctgcgagccacctcctctactcagtctctagctcgcctgggttctcccgattatggcaactcagccctgctcagcttgcctggctaccgccccaccactcgcagttctgctcgtcgttcccaggccggggtgtccagtggggcccctccaggaaggaacagcttctacatgggcacttgccaggatgagcctgagcagctggatgactggaaccgcattgcagagctgcagcagcgcaatcgagtgtgccccccacatctgaagacctgctatcccctggagtccaggccttccctgagcctgggcaccatcacagatgaggagatgaaaactggagacccccaagagaccctgcgccgagccagcatgcagccaatccagatagccgagggcactggcatcaccacccggcagcagcgcaaacgggtctccctagagccccaccagggccctggaactcctgagtctaagaaggccaccagctgtttcccacgccccatgactccccgagaccgacatgaagggcgcaaacagagcactactgaggcccagaagaaagcagctccagcttctactaaacaggctgaccggcgccagtcgatggccttcagcatcctcaacacacccaagaagctagggaacagccttctgcggcggggagcctcaaagaaggccctgtccaaggcttcccccaacactcgcagtggaacccgccgttctccgcgcattgccaccaccacagccagcgccgccactgctgccgccattggtgccacccctcgagccaagggcaaggcaaagcactaaagggccagtaccagtgagtggccccacctgtgtccccgatgctgccgtcacctggtcctccgcctactgtccctctcagtgccttctctcagctcccaggccaacagtagccaaacccctagagacagtgatgcctgcccgcaccctggcctggtccctggtccttcactggcgccttctcggagctggcccagggggcctggagcatggacagtgtgggcgctctccctaccttgcctccttttttcttaaagcaaagtcacttctccatcacaaccagatttgaggctggttttgatggctgggtccttgggcctggccagtcttcctcttagcctctggatctagaagggaccataagaggagtaggccctggttcctgctgtcctggtggctgggcccagcaggggccctcactcttgaagtccaggactgggtctgacctggtgggagcacctgccagaggatgctctttcccaggacggatgggccctgtgtctcaggagtggggttgggggacagccttcagcagcagctcacaccctaccttccccagacttgcactggggtgggatttggagtgatgggaaggtttttaagggccggggatggatcttttctaaatgttattacttgtaaataaagtctatttttctcccgtga

SEQ ID NO: 380443 - DNA, 6926 bp, Homo sapiens
ctgtagtcagctcttggcctgtagtcgctcttggcctgtcagtcgcctatgggtacacgtgggtcccccggcacagaatccggccccatggcactgaagagggacagcaaatcttgaagcagccggtgtcagagagactggactttgtgtgcagttttctgcagaaaaatcgaaaacatccctcttccccagaatgcctggtatctgcacagaaggtgctagagggatcagagctggaactggcgaagatgaccatgctgctcttataccactctaccatgagctccaaaagtcccagggactgggaacagtttgaatataaaattcaggctgagttggctgtcattcttaaatttgtgctggaccatgaggacgggctaaaccttaatgaggacctagagaacttcctacagaaagctcctgtgccttctacctgttctagcacattccctgaagagctctccccacctagccaccaggccaagagggagattcgcttcctagagctacagaaggttgcctcctcttccagtgggaacaactttctctcaggttctccagcttctcccatgggtgatatcctgcagaccccacagttccagatgagacggctgaagaagcagcttgctgatgagagaagtaatagggatgagctggagctggagctagctgagaaccgcaagctcctcaccgagaaggatgcacagatagccatgatgcagcagcgcattgaccgcctagccctgctgaatgagaagcaggcggccagcccactggagcccaaggagcttgaggagctgcgtgacaagaatgagagccttaccatgcggctgcatgaaaccctgaagcagtgccaggacctgaagacagagaagagccagatggatcgcaaaatcaaccagctttcggaggagaatggagacctttcctttaagctgcgggagtttgccagtcatctgcagcagctacaggatgccctcaatgagctgacggaggagcacagcaaggccactcaggagtggctagagaagcaggcccagctggagaaggagctcagcgcagccctgcaggacaagaaatgccttgaagagaagaacgaaatccttcagggaaaactttcacagctggaagaacacttgtcccagctgcaggataacccaccccaggagaagggcgaggtgctgggtgatgtcttgcagctggaaaccttgaagcaagaggcagccactcttgctgcaaacaacacacagctccaagccagggtagagatgctggagactgagcgaggccagcaggaagccaagctgcttgctgagcggggccacttcgaagaagaaaagcagcagctgtctagcctgatcactgacctgcagagctccatctccaacctcagccaggccaaggaagagctggagcaggcctcccaggctcatggggcccggttgactgcccaggtggcctctctgacctctgagctcaccacactcaatgccaccatccagcaacaggatcaagaactggctggcctgaagcagcaggccaaagagaagcaggcccagctagcacagaccctccaacagcaagaacaggcctcccagggcctccgccaccaggtggagcagctaagcagtagcctgaagcagaaggagcagcagttgaaggaggtagcggagaagcaggaggcaactaggcaggaccatgcccagcaactggccactgctgcagaggagcgagaggcctccttaagggagcgggatgcggctctcaagcagctggaggcactggagaaggagaaggctgccaagctggagattctgcagcagcaacttcaggtggctaatgaagcccgggacagtgcccagacctcagtgacacaggcccagcgggagaaggcagagctgagccggaaggtggaggaactccaggcctgtgttgagacagcccgccaggaacagcatgaggcccaggcccaggttgcagagctagagttgcagctgcggtctgagcagcaaaaagcaactgagaaagaaagggtggcccaggagaaggaccagctccaggagcagctccaggccctcaaagagtccttgaaggtcaccaagggcagccttgaagaggagaagcgcagggctgcagatgccctggaagagcagcagcgttgtatctctgagctgaaggcagagacccgaagcctggtggagcagcataagcgggaacgaaaggagctggaagaagagagggctgggcgcaaggggctggaggctcgattacagcagcttggggaggcccatcaggctgagactgaagtcctgcggcgggagctggcagaggccatggctgcccagcacacagctgagagtgagtgtgagcagctcgtcaaagaagtagctgcctggcgtgagcggtatgaggatagccagcaagaggaggcacagtatggcgccatgttccaggaacagctgatgactttgaaggaggaatgtgagaaggcccgccaggagctgcaggaggcaaaggagaaggtggcaggcatagaatcccacagcgagctccagataagccggcagcagaacgaactagctgagctccatgccaacctggccagagcactccagcaggtccaagagaaggaagtcagggcccagaagcttgcagatgacctctccactctgcaggaaaagatggctgccaccagcaaagaggtggcccgcttggagaccttggtgcgcaaggcaggtgagcagcaggaaacagcctcccgggagttagtcaaggagcctgcgagggcaggagacagacagcccgagtggctggaagagcaacagggacgccagttctgcagcacacaggcagcgctgcaggctatggagcgggaggcagagcagatgggcaatgagctggaacggctgcgggccgcgctgatggagagccaggggcagcagcaggaggagcgtgggcagcaggaaagggaggtggcgcggctgacccaggagcggggccgtgcccaggctgaccttgccctggagaaggcggccagagcagagcttgagatgcggctgcagaacgccctcaacgagcagcgtgtggagttcgctaccctgcaagaggcactggctcatgccctgacggaaaaggaaggcaaggaccaggagttggccaagcttcgtggtctggaggcagcccagataaaagagctggaggaacttcggcaaaccgtgaagcaactgaaggaacagctggctaagaaagaaaaggagcacgcatctggctcaggagcccaatctgaggctgctggcaggacagagccaacaggccccaagctggaggcactgcgggcagaggtgagcaagctggaacagcaatgccagaagcagcaggagcaggctgacagcctggaacgcagcctcgaggctgagcgggcctcccgggctgagcgggacagtgctctggagactctgcagggccagttagaggagaaggcccaggagctagggcacagtcagagtgccttagcctcggcccaacgggagttggctgccttccgcaccaaggtacaagaccacagcaaggctgaagatgagtggaaggcccaggtggcccggggccggcaagaggctgagaggaaaaatagcctcatcagcagcttggaggaggaggtgtccatcctgaatcgccaggtcctggagaaggagggggagagcaaggagttgaagcggctggtgatggccgagtcagagaagagccagaagctggaggagaggctgcgcctgctgcaggcagagacagccagcaacagtgccagagctgcagaacgcagctctgctctgcgggaggaggtgcagagcctccgggaggaggctgagaaacagcgggtggcttcagagaacctgcggcaggagctgacctcacaggctgagcgtgcggaggagctgggccaagaattgaaggcgtggcaggagaagttcttccagaaagagcaggccctctccaccctgcagctcgagcacaccagcacacaggccctggtgagtgagctgctgccagctaagcacctctgccagcagctgcaggccgagcaggccgctgccgagaaacgccaccgtgaggagctggagcagagcaagcaggccgctgggggactgcgggcagagctgctgcgggcccagcgggagcttggggagctgattcctctgcggcagaaggtggcagagcaggagcgaacagctcagcagctgcgggcagagaaggccagctatgcagagcagctgagcatgctgaagaaggcgcatggcctgctggcagaggagaaccgggggctgggtgagcgggccaaccttggccggcagtttctggaagtggagttggaccaggcccgggagaagtatgtccaagagttggcagccgtacgtgctgatgctgagacccgtctggctgaggtgcagcgagaagcacagagcactgcccgggagctggaggtgatgactgccaagtatgagggtgccaaggtcaaggtcctggaggagaggcagcggttccaggaagagaggcagaaactcactgcccaggtggaagaactgagtaagaaactggctgactctgaccaagccagcaaggtgcagcagcagaagctgaaggctgtccaggctcagggaggcgagagccagcaggaggcccagcgcctccaggcccagctgaatgaactgcaagcccagttgagccagaaggagcaggcagctgagcactataagctgcagatggagaaagccaaaacacattatgatgccaagaagcagcagaaccaagagctgcaggagcagctgcggagcctggagcagctgcagaaggaaaacaaagagctgcgagctgaagctgaacggctgggccatgagctacagcaggctgggctgaagaccaaggaggctgaacagacctgccgccaccttactgcccaggtgcgcagcctggaggcacaggttgcccatgcagaccagcagcttcgagacctgggcaaattccaggtggcaactgatgctttaaagagccgtgagccccaggctaagccccagctggacttgagtattgacagcctggatctgagctgcgaggaggggaccccactcagtatcaccagcaagctgcctcgtacccagccagacggcaccagcgtccctggagaaccagcctcacctatctcccagcgcctgccccccaaggtagaatccctggagagtctctacttcactcccatccctgctcggagtcaggcccccctggagagcagcctggactccctgggagacgtcttcctggactcgggtcgtaagacccgctccgctcgtcggcgcaccacgcagatcatcaacatcaccatgaccaagaagctagatgtggaagagccagacagcgccaactcatcgttctacagcacgcggtctgctcctgcttcccaggctagcctgcgagccacctcctctactcagtctctagctcgcctgggttctcccgattatggcaactcagccctgctcagcttgcctggctaccgccccaccactcgcagttctgctcgtcgttcccaggccggggtgtccagtggggcccctccaggaaggaacagcttctacatgggcacttgccaggatgagcctgagcagctggatgactggaaccgcattgcagagctgcagcagcgcaatcgagtgtgccccccacatctgaagacctgctatcccctggagtccaggccttccctgagcctgggcaccatcacagatgaggagatgaaaactggagacccccaagagaccctgcgccgagccagcatgcagccaatccagatagccgagggcactggcatcaccacccggcagcagcgcaaacgggtctccctagagccccaccagggccctggaactcctgagtctaagaaggccaccagctgtttcccacgccccatgactccccgagaccgacatgaagggcgcaaacagagcactactgaggcccagaagaaagcagctccagcttctactaaacaggctgaccggcgccagtcgatggccttcagcatcctcaacacacccaagaagctagggaacagccttctgcggcggggagcctcaaagaaggccctgtccaaggcttcccccaacactcgcagtggaacccgccgttctccgcgcattgccaccaccacagccagcgccgccactgctgccgccattggtgccacccctcgagccaagggcaaggcaaagcactaaagggccagtaccagtgagtggccccacctgtgtccccgatgctgccgtcacctggtcctccgcctactgtccctctcagtgccttctctcagctcccaggccaacagtagccaaacccctagagacagtgatgcctgcccgcaccctggcctggtccctggtccttcactggcgccttctcggagctggcccagggggcctggagcatggacagtgtgggcgctctccctaccttgcctccttttttcttaaagcaaagtcacttctccatcacaaccagatttgaggctggttttgatggctgggtccttgggcctggccagtcttcctcttagcctctggatctagaagggaccataagaggagtaggccctggttcctgctgtcctggtggctgggcccagcaggggccctcactcttgaagtccaggactgggtctgacctggtgggagcacctgccagaggatgctctttcccaggacggatgggccctgtgtctcaggagtggggttgggggacagccttcagcagcagctcacaccctaccttccccagacttgcactggggtgggatttggagtgatgggaaggtttttaagggccggggatggatcttttctaaatgttattacttgtaaataaagtctatttttctcccgtga

SEQ ID NO: 380444 - DNA, 8563 bp, Homo sapiens
ctttgccttcaagtacaggccggggtccggaagcggtgataccccttctctttcccagtggccctcaaacttccttttcccgggtccttaagcgggccccgccgacagaggccaatcagagggcagcgcgagggggcggggccatagtttaaactaattgtgcgctcacagcgctggcgcgagcccacgaagaggtacgattccggagaatcgcgaggcagagcgggagcgcgcagccaggtggaaactaattctaagccagactgctggagatcaccctgttctagtgtgtggaggcttccaccaggaggcgcattggagtgactgtctggcatcaccaagatgacactccacgccacccggggggctgcactcctctcttgggtgaacagtctacacgtggctgaccctgtggaggctgtgctgcagctccaggactgcagcatcttcatcaagatcattgacagaatccatggcactgaagagggacagcaaatcttgaagcagccggtgtcagagagactggactttgtgtgcagttttctgcagaaaaatcgaaaacatccctcttccccagaatgcctggtatctgcacagaaggtgctagagggatcagagctggaactggcgaagatgaccatgctgctcttataccactctaccatgagctccaaaagtcccagggactgggaacagtttgaatataaaattcaggctgagttggctgtcattcttaaatttgtgctggaccatgaggacgggctaaaccttaatgaggacctagagaacttcctacagaaagctcctgtgccttctacctgttctagcacattccctgaagagctctccccacctagccaccaggccaagagggagattcgcttcctagagctacagaaggttgcctcctcttccagtgggaacaactttctctcaggttctccagcttctcccatgggtgatatcctgcagaccccacagttccagatgagacggctgaagaagcagcttgctgatgagagaagtaatagggatgagctggagctggagctagctgagaaccgcaagctcctcaccgagaaggatgcacagatagccatgatgcagcagcgcattgaccgcctagccctgctgaatgagaagcaggcggccagcccactggagcccaaggagcttgaggagctgcgtgacaagaatgagagccttaccatgcggctgcatgaaaccctgaagcagtgccaggacctgaagacagagaagagccagatggatcgcaaaatcaaccagctttcggaggagaatggagacctttcctttaagctgcgggagtttgccagtcatctgcagcagctacaggatgccctcaatgagctgacggaggagcacagcaaggccactcaggagtggctagagaagcaggcccagctggagaaggagctcagcgcagccctgcaggacaagaaatgccttgaagagaagaacgaaatccttcagggaaaactttcacagctggaagaacacttgtcccagctgcaggataacccaccccaggagaagggcgaggtgctgggtgatgtcttgcagctggaaaccttgaagcaagaggcagccactcttgctgcaaacaacacacagctccaagccagggtagagatgctggagactgagcgaggccagcaggaagccaagctgcttgctgagcggggccacttcgaagaagaaaagcagcagctgtctagcctgatcactgacctgcagagctccatctccaacctcagccaggccaaggaagagctggagcaggcctcccaggctcatggggcccggttgactgcccaggtggcctctctgacctctgagctcaccacactcaatgccaccatccagcaacaggatcaagaactggctggcctgaagcagcaggccaaagagaagcaggcccagctagcacagaccctccaacagcaagaacaggcctcccagggcctccgccaccaggtggagcagctaagcagtagcctgaagcagaaggagcagcagttgaaggaggtagcggagaagcaggaggcaactaggcaggaccatgcccagcaactggccactgctgcagaggagcgagaggcctccttaagggagcgggatgcggctctcaagcagctggaggcactggagaaggagaaggctgccaagctggagattctgcagcagcaacttcaggtggctaatgaagcccgggacagtgcccagacctcagtgacacaggcccagcgggagaaggcagagctgagccggaaggtggaggaactccaggcctgtgttgagacagcccgccaggaacagcatgaggcccaggcccaggttgcagagctagagttgcagctgcggtctgagcagcaaaaagcaactgagaaagaaagggtggcccaggagaaggaccagctccaggagcagctccaggccctcaaagagtccttgaaggtcaccaagggcagccttgaagaggagaagcgcagggctgcagatgccctggaagagcagcagcgttgtatctctgagctgaaggcagagacccgaagcctggtggagcagcataagcgggaacgaaaggagctggaagaagagagggctgggcgcaaggggctggaggctcgattacagcagcttggggaggcccatcaggctgagactgaagtcctgcggcgggagctggcagaggccatggctgcccagcacacagctgagagtgagtgtgagcagctcgtcaaagaagtagctgcctggcgtgagcggtatgaggatagccagcaagaggaggcacagtatggcgccatgttccaggaacagctgatgactttgaaggaggaatgtgagaaggcccgccaggagctgcaggaggcaaaggagaaggtggcaggcatagaatcccacagcgagctccagataagccggcagcagaacgaactagctgagctccatgccaacctggccagagcactccagcaggtccaagagaaggaagtcagggcccagaagcttgcagatgacctctccactctgcaggaaaagatggctgccaccagcaaagaggtggcccgcttggagaccttggtgcgcaaggcaggtgagcagcaggaaacagcctcccgggagttagtcaaggagcctgcgagggcaggagacagacagcccgagtggctggaagagcaacagggacgccagttctgcagcacacaggcagcgctgcaggctatggagcgggaggcagagcagatgggcaatgagctggaacggctgcgggccgcgctgatggagagccaggggcagcagcaggaggagcgtgggcagcaggaaagggaggtggcgcggctgacccaggagcggggccgtgcccaggctgaccttgccctggagaaggcggccagagcagagcttgagatgcggctgcagaacgccctcaacgagcagcgtgtggagttcgctaccctgcaagaggcactggctcatgccctgacggaaaaggaaggcaaggaccaggagttggccaagcttcgtggtctggaggcagcccagataaaagagctggaggaacttcggcaaaccgtgaagcaactgaaggaacagctggctaagaaagaaaaggagcacgcatctggctcaggagcccaatctgaggctgctggcaggacagagccaacaggccccaagctggaggcactgcgggcagaggtgagcaagctggaacagcaatgccagaagcagcaggagcaggctgacagcctggaacgcagcctcgaggctgagcgggcctcccgggctgagcgggacagtgctctggagactctgcagggccagttagaggagaaggcccaggagctagggcacagtcagagtgccttagcctcggcccaacgggagttggctgccttccgcaccaaggtacaagaccacagcaaggctgaagatgagtggaaggcccaggtggcccggggccggcaagaggctgagaggaaaaatagcctcatcagcagcttggaggaggaggtgtccatcctgaatcgccaggtcctggagaaggagggggagagcaaggagttgaagcggctggtgatggccgagtcagagaagagccagaagctggaggagaggctgcgcctgctgcaggcagagacagccagcaacagtgccagagctgcagaacgcagctctgctctgcgggaggaggtgcagagcctccgggaggaggctgagaaacagcgggtggcttcagagaacctgcggcaggagctgacctcacaggctgagcgtgcggaggagctgggccaagaattgaaggcgtggcaggagaagttcttccagaaagagcaggccctctccaccctgcagctcgagcacaccagcacacaggccctggtgagtgagctgctgccagctaagcacctctgccagcagctgcaggccgagcaggccgctgccgagaaacgccaccgtgaggagctggagcagagcaagcaggccgctgggggactgcgggcagagctgctgcgggcccagcgggagcttggggagctgattcctctgcggcagaaggtggcagagcaggagcgaacagctcagcagctgcgggcagagaaggccagctatgcagagcagctgagcatgctgaagaaggcgcatggcctgctggcagaggagaaccgggggctgggtgagcgggccaaccttggccggcagtttctggaagtggagttggaccaggcccgggagaagtatgtccaagagttggcagccgtacgtgctgatgctgagacccgtctggctgaggtgcagcgagaagcacagagcactgcccgggagctggaggtgatgactgccaagtatgagggtgccaaggtcaaggtcctggaggagaggcagcggttccaggaagagaggcagaaactcactgcccaggtggaagaactgagtaagaaactggctgactctgaccaagccagcaaggtgcagcagcagaagctgaaggctgtccaggctcagggaggcgagagccagcaggaggcccagcgcctccaggcccagctgaatgaactgcaagcccagttgagccagaaggagcaggcagctgagcactataagctgcagatggagaaagccaaaacacattatgatgccaagaagcagcagaaccaagagctgcaggagcagctgcggagcctggagcagctgcagaaggaaaacaaagagctgcgagctgaagctgaacggctgggccatgagctacagcaggctgggctgaagaccaaggaggctgaacagacctgccgccaccttactgcccaggtgcgcagcctggaggcacaggttgcccatgcagaccagcagcttcgagacctgggcaaattccaggtggcaactgatgctttaaagagccgtgagccccaggctaagccccagctggacttgagtattgacagcctggatctgagctgcgaggaggggaccccactcagtatcaccaggtcaggaggcagccttcctccctatgtctgtttatggagtgcctgctgtttatcaggctgtatcctagtgagataaataagatgtgatctaaatttattcttagagaagaataaagaaaaacgggtattataccagatatctatttagggcacagttggaataaaaagcaagtggtcaagaaaggcttcgtggaagctatcgctcctgctgagtcttgaaagcatccataggtgtgtgtgccaggttgacgagaagagcagtgtgaacagaggctgtgaaagagcctgactaagctgagatgtgaggccaggaaggcccattggagaccggctattaagacttgatcctaaaggcattgaggaaaccttggtggctgtaattgaaaggtttaggagaaaaaaaaaggaaccttggaagaatttgaaactgaagagtacatggttaatttgcatcttaaaaagattattctaatagctagtatagaagttaagactggaaaaatgtttttattaaacacttacatttacttattttgtgctagacataaagcactcatgacaattatacctgatttgtcccccaacaaccctctgaggtaggtttattctgtctcctttaacagatgaatctggggcatagaggggcagtcacttgcccaaggttccccagtggtagagctggggtttgaccctgggcagcctggcctgagttcttggcttgtcaccactcatcttcctctgtcagtgccatgatgagtctaggtgagaggagatgaagcagaccagggaaaggacatgagcatggagtggggtgtggttagttgctgttcaggaagcttggtgattgggctcgccaagcaggacgacattggattatgcccacgttcatggcttgggggcctgagtggggggcgttcctattcactgaaatgggagatgcaggaggaagaacagagaagtgggcttagattgggacgtgtttgctgtgaagcagccatgggcatctggtggggatgggacatctgggtctgggcattgccactatgaggagctattaggagaagccaggggagtggactgaaaggaaggcccaggtcaagtgctttccttggtacctctgaaaaatcagagagatgggctgcttgacctcatctgcttgtagtaaggatgggaaatggtcactttcaaaaagggctggacaaaatgccttctagcgtgaaggactgtacctcagcaggtttcctttccatagcaagctgcctcgtacccagccagacggcaccagcgtccctggagaaccagcctcacctatctcccagcgcctgccccccaaggtagaatccctggagagtctctacttcactcccatccctgctcggagtcaggcccccctggagagcagcctggactccctgggagacgtcttcctggactcgggtcgtaagacccgctccgctcgtcggcgcaccacgcagatcatcaacatcaccatgaccaagaagctagatgtggaagagccagacagcgccaactcatcgttctacagcacgcggtctgctcctgcttcccaggctagcctgcgagccacctcctctactcagtctctagctcgcctgggttctcccgattatggcaactcagccctgctcagcttgcctggctaccgccccaccactcgcagttctgctcgtcgttcccaggccggggtgtccagtggggcccctccaggaaggaacagcttctacatgggcacttgccaggatgagcctgagcagctggatgactggaaccgcattgcagagctgcagcagcgcaatcgagtgtgccccccacatctgaagacctgctatcccctggagtccaggccttccctgagcctgggcaccatcacagatgaggagatgaaaactggagacccccaagagaccctgcgccgagccagcatgcagccaatccagatagccgagggcactggcatcaccacccggcagcagcgcaaacgggtctccctagagccccaccagggccctggaactcctgagtctaagaaggccaccagctgtttcccacgccccatgactccccgagaccgacatgaagggcgcaaacagagcactactgaggcccagaagaaagcagctccagcttctactaaacaggctgaccggcgccagtcgatggccttcagcatcctcaacacacccaagaagctagggaacagccttctgcggcggggagcctcaaagaaggccctgtccaaggcttcccccaacactcgcagtggaacccgccgttctccgcgcattgccaccaccacagccagcgccgccactgctgccgccattggtgccacccctcgagccaagggcaaggcaaagcactaaagggccagtaccagtgagtggccccacctgtgtccccgatgctgccgtcacctggtcctccgcctactgtccctctcagtgccttctctcagctcccaggccaacagtagccaaacccctagagacagtgatgcctgcccgcaccctggcctggtccctggtccttcactggcgccttctcggagctggcccagggggcctggagcatggacagtgtgggcgctctccctaccttgcctccttttttcttaaagcaaagtcacttctccatcacaaccagatttgaggctggttttgatggctgggtccttgggcctggccagtcttcctcttagcctctggatctagaagggaccataagaggagtaggccctggttcctgctgtcctggtggctgggcccagcaggggccctcactcttgaagtccaggactgggtctgacctggtgggagcacctgccagaggatgctctttcccaggacggatgggccctgtgtctcaggagtggggttgggggacagccttcagcagcagctcacaccctaccttccccagacttgcactggggtgggatttggagtgatgggaaggtttttaagggccggggatggatcttttctaaatgttattacttgtaaataaagtctatttttctcccgtga

SEQ ID NO: 380445 - DNA, 3867 bp, Homo sapiens
ttgggccaacgcaccgtgttgggccaacgcaccgtgttgggcctttttgcctatttcctgctgtgtgagatattcttctagtctttgcaggccttcctgggaagacagatcaacaaaacagcccagaaattcccagtattcaacccagggataccccagctcatgagctagctccctgtaagaaacacaacacaattataccagctgtacggtgcgatggccccacgttgggccaacgcaccgtgcaagctggaacagcaatgccagaagcagcaggagcaggctgacagcctggaacgcagcctcgaggctgagcgggcctcccgggctgagcgggacagtgctctggagactctgcagggccagttagaggagaaggcccaggagctagggcacagtcagagtgccttagcctcggcccaacgggagttggctgccttccgcaccaaggtacaagaccacagcaaggctgaagatgagtggaaggcccaggtggcccggggccggcaagaggctgagaggaaaaatagcctcatcagcagcttggaggaggaggtgtccatcctgaatcgccaggtcctggagaaggagggggagagcaaggagttgaagcggctggtgatggccgagtcagagaagagccagaagctggaggagaggctgcgcctgctgcaggcagagacagccagcaacagtgccagagctgcagaacgcagctctgctctgcgggaggaggtgcagagcctccgggaggaggctgagaaacagcgggtggcttcagagaacctgcggcaggagctgacctcacaggctgagcgtgcggaggagctgggccaagaattgaaggcgtggcaggagaagttcttccagaaagagcaggccctctccaccctgcagctcgagcacaccagcacacaggccctggtgagtgagctgctgccagctaagcacctctgccagcagctgcaggccgagcaggccgctgccgagaaacgccaccgtgaggagctggagcagagcaagcaggccgctgggggactgcgggcagagctgctgcgggcccagcgggagcttggggagctgattcctctgcggcagaaggtggcagagcaggagcgaacagctcagcagctgcgggcagagaaggccagctatgcagagcagctgagcatgctgaagaaggcgcatggcctgctggcagaggagaaccgggggctgggtgagcgggccaaccttggccggcagtttctggaagtggagttggaccaggcccgggagaagtatgtccaagagttggcagccgtacgtgctgatgctgagacccgtctggctgaggtgcagcgagaagcacagagcactgcccgggagctggaggtgatgactgccaagtatgagggtgccaaggtcaaggtcctggaggagaggcagcggttccaggaagagaggcagaaactcactgcccaggtggagcagctagaggtatttcagagagagcaaactaagcaggtggaagaactgagtaagaaactggctgactctgaccaagccagcaaggtgcagcagcagaagctgaaggctgtccaggctcagggaggcgagagccagcaggaggcccagcgcctccaggcccagctgaatgaactgcaagcccagttgagccagaaggagcaggcagctgagcactataagctgcagatggagaaagccaaaacacattatgatgccaagaagcagcagaaccaagagctgcaggagcagctgcggagcctggagcagctgcagaaggaaaacaaagagctgcgagctgaagctgaacggctgggccatgagctacagcaggctgggctgaagaccaaggaggctgaacagacctgccgccaccttactgcccaggtgcgcagcctggaggcacaggttgcccatgcagaccagcagcttcgagacctgggcaaattccaggtggcaactgatgctttaaagagccgtgagccccaggctaagccccagctggacttgagtattgacagcctggatctgagctgcgaggaggggaccccactcagtatcaccagcaagctgcctcgtacccagccagacggcaccagcgtccctggagaaccagcctcacctatctcccagcgcctgccccccaaggtagaatccctggagagtctctacttcactcccatccctgctcggagtcaggcccccctggagagcagcctggactccctgggagacgtcttcctggactcgggtcgtaagacccgctccgctcgtcggcgcaccacgcagatcatcaacatcaccatgaccaagaagctagatgtggaagagccagacagcgccaactcatcgttctacagcacgcggtctgctcctgcttcccaggctagcctgcgagccacctcctctactcagtctctagctcgcctgggttctcccgattatggcaactcagccctgctcagcttgcctggctaccgccccaccactcgcagttctgctcgtcgttcccaggccggggtgtccagtggggcccctccaggaaggaacagcttctacatgggcacttgccaggatgagcctgagcagctggatgactggaaccgcattgcagagctgcagcagcgcaatcgagtgtgccccccacatctgaagacctgctatcccctggagtccaggccttccctgagcctgggcaccatcacagatgaggagatgaaaactggagacccccaagagaccctgcgccgagccagcatgcagccaatccagatagccgagggcactggcatcaccacccggcagcagcgcaaacgggtctccctagagccccaccagggccctggaactcctgagtctaagaaggccaccagctgtttcccacgccccatgactccccgagaccgacatgaagggcgcaaacagagcactactgaggcccagaagaaagcagctccagcttctactaaacaggctgaccggcgccagtcgatggccttcagcatcctcaacacacccaagaagctagggaacagccttctgcggcggggagcctcaaagaaggccctgtccaaggcttcccccaacactcgcagtggaacccgccgttctccgcgcattgccaccaccacagccagcgccgccactgctgccgccattggtgccacccctcgagccaagggcaaggcaaagcactaaagggccagtaccagtgagtggccccacctgtgtccccgatgctgccgtcacctggtcctccgcctactgtccctctcagtgccttctctcagctcccaggccaacagtagccaaacccctagagacagtgatgcctgcccgcaccctggcctggtccctggtccttcactggcgccttctcggagctggcccagggggcctggagcatggacagtgtgggcgctctccctaccttgcctccttttttcttaaagcaaagtcacttctccatcacaaccagatttgaggctggttttgatggctgggtccttgggcctggccagtcttcctcttagcctctggatctagaagggaccataagaggagtaggccctggttcctgctgtcctggtggctgggcccagcaggggccctcactcttgaagtccaggactgggtctgacctggtgggagcacctgccagaggatgctctttcccaggacggatgggccctgtgtctcaggagtggggttgggggacagccttcagcagcagctcacaccctaccttccccagacttgcactggggtgggatttggagtgatgggaaggtttttaagggccggggatggatcttttctaaatgttattacttgtaaataaagtctatttttctcccgtga

SEQ ID NO: 380446 - DNA, 8509 bp, Homo sapiens
ctttgccttcaagtacaggccggggtccggaagcggtgataccccttctctttcccagtggccctcaaacttccttttcccgggtccttaagcgggccccgccgacagaggccaatcagagggcagcgcgagggggcggggccatagtttaaactaattgtgcgctcacagcgctggcgcgagcccacgaagaggtacgattccggagaatcgcgaggcagagcgggagcgcgcagccaggtggaaactaattctaagccagactgctggagatcaccctgttctagtgtgtggaggcttccaccaggaggcgcattggagtgactgtctggcatcaccaagatgacactccacgccacccggggggctgcactcctctcttgggtgaacagtctacacgtggctgaccctgtggaggctgtgctgcagctccaggactgcagcatcttcatcaagatcattgacagaatccatggcactgaagagggacagcaaatcttgaagcagccggtgtcagagagactggactttgtgtgcagttttctgcagaaaaatcgaaaacatccctcttccccagaatgcctggtatctgcacagaaggtgctagagggatcagagctggaactggcgaagatgaccatgctgctcttataccactctaccatgagctccaaaagtcccagggactgggaacagtttgaatataaaattcaggctgagttggctgtcattcttaaatttgtgctggaccatgaggacgggctaaaccttaatgaggacctagagaacttcctacagaaagctcctgtgccttctacctgttctagcacattccctgaagagctctccccacctagccaccaggccaagagggagattcgcttcctagagctacagaaggttgcctcctcttccagtgggaacaactttctctcaggttctccagcttctcccatgggtgatatcctgcagaccccacagttccagatgagacggctgaagaagcagcttgctgatgagagaagtaatagggatgagctggagctggagctagctgagaaccgcaagctcctcaccgagaaggatgcacagatagccatgatgcagcagcgcattgaccgcctagccctgctgaatgagaagcaggcggccagcccactggagcccaaggagcttgaggagctgcgtgacaagaatgagagccttaccatgcggctgcatgaaaccctgaagcagtgccaggacctgaagacagagaagagccagatggatcgcaaaatcaaccagctttcggaggagaatggagacctttcctttaagctgcgggagtttgccagtcatctgcagcagctacaggatgccctcaatgagctgacggaggagcacagcaaggccactcaggagtggctagagaagcaggcccagctggagaaggagctcagcgcagccctgcaggacaagaaatgccttgaagagaagaacgaaatccttcagggaaaactttcacagctggaagaacacttgtcccagctgcaggataacccaccccaggagaagggcgaggtgctgggtgatgtcttgcagctggaaaccttgaagcaagaggcagccactcttgctgcaaacaacacacagctccaagccagggtagagatgctggagactgagcgaggccagcaggaagccaagctgcttgctgagcggggccacttcgaagaagaaaagcagcagctgtctagcctgatcactgacctgcagagctccatctccaacctcagccaggccaaggaagagctggagcaggcctcccaggctcatggggcccggttgactgcccaggtggcctctctgacctctgagctcaccacactcaatgccaccatccagcaacaggatcaagaactggctggcctgaagcagcaggccaaagagaagcaggcccagctagcacagaccctccaacagcaagaacaggcctcccagggcctccgccaccaggtggagcagctaagcagtagcctgaagcagaaggagcagcagttgaaggaggtagcggagaagcaggaggcaactaggcaggaccatgcccagcaactggccactgctgcagaggagcgagaggcctccttaagggagcgggatgcggctctcaagcagctggaggcactggagaaggagaaggctgccaagctggagattctgcagcagcaacttcaggtggctaatgaagcccgggacagtgcccagacctcagtgacacaggcccagcgggagaaggcagagctgagccggaaggtggaggaactccaggcctgtgttgagacagcccgccaggaacagcatgaggcccaggcccaggttgcagagctagagttgcagctgcggtctgagcagcaaaaagcaactgagaaagaaagggtggcccaggagaaggaccagctccaggagcagctccaggccctcaaagagtccttgaaggtcaccaagggcagccttgaagaggagaagcgcagggctgcagatgccctggaagagcagcagcgttgtatctctgagctgaaggcagagacccgaagcctggtggagcagcataagcgggaacgaaaggagctggaagaagagagggctgggcgcaaggggctggaggctcgattacagcagcttggggaggcccatcaggctgagactgaagtcctgcggcgggagctggcagaggccatggctgcccagcacacagctgagagtgagtgtgagcagctcgtcaaagaagtagctgcctggcgtgagcggtatgaggatagccagcaagaggaggcacagtatggcgccatgttccaggaacagctgatgactttgaaggaggaatgtgagaaggcccgccaggagctgcaggaggcaaaggagaaggtggcaggcatagaatcccacagcgagctccagataagccggcagcagaacgaactagctgagctccatgccaacctggccagagcactccagcaggtccaagagaaggaagtcagggcccagaagcttgcagatgacctctccactctgcaggaaaagatggctgccaccagcaaagaggtggcccgcttggagaccttggtgcgcaaggcaggtgagcagcaggaaacagcctcccgggagttagtcaaggagcctgcgagggcaggagacagacagcccgagtggctggaagagcaacagggacgccagttctgcagcacacaggcagcgctgcaggctatggagcgggaggcagagcagatgggcaatgagctggaacggctgcgggccgcgctgatggagagccaggggcagcagcaggaggagcgtgggcagcaggaaagggaggtggcgcggctgacccaggagcggggccgtgcccaggctgaccttgccctggagaaggcggccagagcagagcttgagatgcggctgcagaacgccctcaacgagcagcgtgtggagttcgctaccctgcaagaggcactggctcatgccctgacggaaaaggaaggcaaggaccaggagttggccaagcttcgtggtctggaggcagcccagataaaagagctggaggaacttcggcaaaccgtgaagcaactgaaggaacagctggctaagaaagaaaaggagcacgcatctggctcaggagcccaatctgaggctgctggcaggacagagccaacaggccccaagctggaggcactgcgggcagaggtgagcaagctggaacagcaatgccagaagcagcaggagcaggctgacagcctggaacgcagcctcgaggctgagcgggcctcccgggctgagcgggacagtgctctggagactctgcagggccagttagaggagaaggcccaggagctagggcacagtcagagtgccttagcctcggcccaacgggagttggctgccttccgcaccaaggtacaagaccacagcaaggctgaagatgagtggaaggcccaggtggcccggggccggcaagaggctgagaggaaaaatagcctcatcagcagcttggaggaggaggtgtccatcctgaatcgccaggtcctggagaaggagggggagagcaaggagttgaagcggctggtgatggccgagtcagagaagagccagaagctggaggagaggctgcgcctgctgcaggcagagacagccagcaacagtgccagagctgcagaacgcagctctgctctgcgggaggaggtgcagagcctccgggaggaggctgagaaacagcgggtggcttcagagaacctgcggcaggagctgacctcacaggctgagcgtgcggaggagctgggccaagaattgaaggcgtggcaggagaagttcttccagaaagagcaggccctctccaccctgcagctcgagcacaccagcacacaggccctggtgagtgagctgctgccagctaagcacctctgccagcagctgcaggccgagcaggccgctgccgagaaacgccaccgtgaggagctggagcagagcaagcaggccgctgggggactgcgggcagagctgctgcgggcccagcgggagcttggggagctgattcctctgcggcagaaggtggcagagcaggagcgaacagctcagcagctgcgggcagagaaggccagctatgcagagcagctgagcatgctgaagaaggcgcatggcctgctggcagaggagaaccgggggctgggtgagcgggccaaccttggccggcagtttctggaagtggagttggaccaggcccgggagaagtatgtccaagagttggcagccgtacgtgctgatgctgagacccgtctggctgaggtgcagcgagaagcacagagcactgcccgggagctggaggtgatgactgccaagtatgagggtgccaaggtcaaggtcctggaggagaggcagcggttccaggaagagaggcagaaactcactgcccaggtggaagaactgagtaagaaactggctgactctgaccaagccagcaaggtgcagcagcagaagctgaaggctgtccaggctcagggaggcgagagccagcaggaggcccagcgcctccaggcccagctgaatgaactgcaagcccagttgagccagaaggagcaggcagctgagcactataagctgcagatggagaaagccaaaacacattatgatgccaagaagcagcagaaccaagagctgcaggagcagctgcggagcctggagcagctgcagaaggaaaacaaagagctgcgagctgaagctgaacggctgggccatgagctacagcaggctgggctgaagaccaaggaggctgaacagacctgccgccaccttactgcccaggtgcgcagcctggaggcacaggttgcccatgcagaccagcagcttcgagacctgggcaaattccaggtggcaactgatgctttaaagagccgtgagccccaggctaagccccagctggacttgagtattgacagcctggatctgagctgcgaggaggggaccccactcagtatcaccaggtcaggaggcagccttcctccctatgtctgtttatggagtgcctgctgtttatcaggctgtatcctagtgagataaataagatgtgatctaaatttattcttagagaagaataaagaaaaacgggtattataccagatatctatttagggcacagttggaataaaaagcaagtggtcaagaaaggcttcgtggaagctatcgctcctgctgagtcttgaaagcatccataggtgtgtgtgccaggttgacgagaagagcagtgtgaacagaggctgtgaaagagcctgactaagctgagatgtgaggccaggaaggcccattggagaccggctattaagacttgatcctaaaggcattgaggaaaccttggtggctgtaattgaaaggtttaggagaaaaaaaaaggaaccttggaagaatttgaaactgaagagtacatggttaatttgcatcttaaaaagattattctaatagctagtatagaagttaagactggaaaaatgtttttattaaacacttacatttacttattttgtgctagacataaagcactcatgacaattatacctgatttgtcccccaacaaccctctgaggtaggtttattctgtctcctttaacagatgaatctggggcatagaggggcagtcacttgcccaaggttccccagtggtagagctggggtttgaccctgggcagcctggcctgagttcttggcttgtcaccactcatcttcctctgtcagtgccatgatgagtctaggtgagaggagatgaagcagaccagggaaaggacatgagcatggagtggggtgtggttagttgctgttcaggaagcttggtgattgggctcgccaagcaggacgacattggattatgcccacgttcatggcttgggggcctgagtggggggcgttcctattcactgaaatgggagatgcaggaggaagaacagagaagtgggcttagattgggacgtgtttgctgtgaagcagccatgggcatctggtggggatgggacatctgggtctgggcattgccactatgaggagctattaggagaagccaggggagtggactgaaaggaaggcccaggtcaagtgctttccttggtacctctgaaaaatcagagagatgggctgcttgacctcatctgcttgtagtaaggatgggaaatggtcactttcaaaaagggctggacaaaatgccttctagcgtgaaggactgtacctcagcaggtttcctttccatagcaagctgcctcgtacccagccagacggcaccagcgtccctggagaaccagcctcacctatctcccagcgcctgccccccaaggtagaatccctggagagtctctacttcactcccatccctgctcggagtcaggcccccctggagagcagcctggactccctgggagacgtcttcctggactcgggtcgtaagacccgctccgctcgtcggcgcaccacgcagatcatcaacatcaccatgaccaagaagctagatgtggaagagccagacagcgccaactcatcgttctacagcacgcggtctgctcctgcttcccaggctagcctgcgagccacctcctctactcagtctctagctcgcctgggttctcccgattatggcaactcagccctgctcagcttgcctggctaccgccccaccagaaggaacagcttctacatgggcacttgccaggatgagcctgagcagctggatgactggaaccgcattgcagagctgcagcagcgcaatcgagtgtgccccccacatctgaagacctgctatcccctggagtccaggccttccctgagcctgggcaccatcacagatgaggagatgaaaactggagacccccaagagaccctgcgccgagccagcatgcagccaatccagatagccgagggcactggcatcaccacccggcagcagcgcaaacgggtctccctagagccccaccagggccctggaactcctgagtctaagaaggccaccagctgtttcccacgccccatgactccccgagaccgacatgaagggcgcaaacagagcactactgaggcccagaagaaagcagctccagcttctactaaacaggctgaccggcgccagtcgatggccttcagcatcctcaacacacccaagaagctagggaacagccttctgcggcggggagcctcaaagaaggccctgtccaaggcttcccccaacactcgcagtggaacccgccgttctccgcgcattgccaccaccacagccagcgccgccactgctgccgccattggtgccacccctcgagccaagggcaaggcaaagcactaaagggccagtaccagtgagtggccccacctgtgtccccgatgctgccgtcacctggtcctccgcctactgtccctctcagtgccttctctcagctcccaggccaacagtagccaaacccctagagacagtgatgcctgcccgcaccctggcctggtccctggtccttcactggcgccttctcggagctggcccagggggcctggagcatggacagtgtgggcgctctccctaccttgcctccttttttcttaaagcaaagtcacttctccatcacaaccagatttgaggctggttttgatggctgggtccttgggcctggccagtcttcctcttagcctctggatctagaagggaccataagaggagtaggccctggttcctgctgtcctggtggctgggcccagcaggggccctcactcttgaagtccaggactgggtctgacctggtgggagcacctgccagaggatgctctttcccaggacggatgggccctgtgtctcaggagtggggttgggggacagccttcagcagcagctcacaccctaccttccccagacttgcactggggtgggatttggagtgatgggaaggtttttaagggccggggatggatcttttctaaatgttattacttgtaaataaagtctatttttctcccgtga

SEQ ID NO: 380447 - DNA, 7398 bp, Homo sapiens
ctttgccttcaagtacaggccggggtccggaagcggtgataccccttctctttcccagtggccctcaaacttccttttcccgggtccttaagcgggccccgccgacagaggccaatcagagggcagcgcgagggggcggggccatagtttaaactaattgtgcgctcacagcgctggcgcgagcccacgaagaggtacgattccggagaatcgcgaggcagagcgggagcgcgcagccaggtggaaactaattctaagccagactgctggagatcaccctgttctagtgtgtggaggcttccaccaggaggcgcattggagtgactgtctggcatcaccaagatgacactccacgccacccggggggctgcactcctctcttgggtgaacagtctacacgtggctgaccctgtggaggctgtgctgcagctccaggactgcagcatcttcatcaagatcattgacagaatccatggcactgaagagggacagcaaatcttgaagcagccggtgtcagagagactggactttgtgtgcagttttctgcagaaaaatcgaaaacatccctcttccccagaatgcctggtatctgcacagaaggtgctagagggatcagagctggaactggcgaagatgaccatgctgctcttataccactctaccatgagctccaaaagtcccagggactgggaacagtttgaatataaaattcaggctgagttggctgtcattcttaaatttgtgctggaccatgaggacgggctaaaccttaatgaggacctagagaacttcctacagaaagctcctgtgccttctacctgttctagcacattccctgaagagctctccccacctagccaccaggccaagagggagattcgcttcctagagctacagaaggttgcctcctcttccagtgggaacaactttctctcaggttctccagcttctcccatgggtgatatcctgcagaccccacagttccagatgagacggctgaagaagcagcttgctgatgagagaagtaatagggatgagctggagctggagctagctgagaaccgcaagctcctcaccgagaaggatgcacagatagccatgatgcagcagcgcattgaccgcctagccctgctgaatgagaagcaggcggccagcccactggagcccaaggagcttgaggagctgcgtgacaagaatgagagccttaccatgcggctgcatgaaaccctgaagcagtgccaggacctgaagacagagaagagccagatggatcgcaaaatcaaccagctttcggaggagaatggagacctttcctttaagctgcgggagtttgccagtcatctgcagcagctacaggatgccctcaatgagctgacggaggagcacagcaaggccactcaggagtggctagagaagcaggcccagctggagaaggagctcagcgcagccctgcaggacaagaaatgccttgaagagaagaacgaaatccttcagggaaaactttcacagctggaagaacacttgtcccagctgcaggataacccaccccaggagaagggcgaggtgctgggtgatgtcttgcagctggaaaccttgaagcaagaggcagccactcttgctgcaaacaacacacagctccaagccagggtagagatgctggagactgagcgaggccagcaggaagccaagctgcttgctgagcggggccacttcgaagaagaaaagcagcagctgtctagcctgatcactgacctgcagagctccatctccaacctcagccaggccaaggaagagctggagcaggcctcccaggctcatggggcccggttgactgcccaggtggcctctctgacctctgagctcaccacactcaatgccaccatccagcaacaggatcaagaactggctggcctgaagcagcaggccaaagagaagcaggcccagctagcacagaccctccaacagcaagaacaggcctcccagggcctccgccaccaggtggagcagctaagcagtagcctgaagcagaaggagcagcagttgaaggaggtagcggagaagcaggaggcaactaggcaggaccatgcccagcaactggccactgctgcagaggagcgagaggcctccttaagggagcgggatgcggctctcaagcagctggaggcactggagaaggagaaggctgccaagctggagattctgcagcagcaacttcaggtggctaatgaagcccgggacagtgcccagacctcagtgacacaggcccagcgggagaaggcagagctgagccggaaggtggaggaactccaggcctgtgttgagacagcccgccaggaacagcatgaggcccaggcccaggttgcagagctagagttgcagctgcggtctgagcagcaaaaagcaactgagaaagaaagggtggcccaggagaaggaccagctccaggagcagctccaggccctcaaagagtccttgaaggtcaccaagggcagccttgaagaggagaagcgcagggctgcagatgccctggaagagcagcagcgttgtatctctgagctgaaggcagagacccgaagcctggtggagcagcataagcgggaacgaaaggagctggaagaagagagggctgggcgcaaggggctggaggctcgattacagcagcttggggaggcccatcaggctgagactgaagtcctgcggcgggagctggcagaggccatggctgcccagcacacagctgagagtgagtgtgagcagctcgtcaaagaagtagctgcctggcgtgagcggtatgaggatagccagcaagaggaggcacagtatggcgccatgttccaggaacagctgatgactttgaaggaggaatgtgagaaggcccgccaggagctgcaggaggcaaaggagaaggtggcaggcatagaatcccacagcgagctccagataagccggcagcagaacgaactagctgagctccatgccaacctggccagagcactccagcaggtccaagagaaggaagtcagggcccagaagcttgcagatgacctctccactctgcaggaaaagatggctgccaccagcaaagaggtggcccgcttggagaccttggtgcgcaaggcaggtgagcagcaggaaacagcctcccgggagttagtcaaggagcctgcgagggcaggagacagacagcccgagtggctggaagagcaacagggacgccagttctgcagcacacaggcagcgctgcaggctatggagcgggaggcagagcagatgggcaatgagctggaacggctgcgggccgcgctgatggagagccaggggcagcagcaggaggagcgtgggcagcaggaaagggaggtggcgcggctgacccaggagcggggccgtgcccaggctgaccttgccctggagaaggcggccagagcagagcttgagatgcggctgcagaacgccctcaacgagcagcgtgtggagttcgctaccctgcaagaggcactggctcatgccctgacggaaaaggaaggcaaggaccaggagttggccaagcttcgtggtctggaggcagcccagataaaagagctggaggaacttcggcaaaccgtgaagcaactgaaggaacagctggctaagaaagaaaaggagcacgcatctggctcaggagcccaatctgaggctgctggcaggacagagccaacaggccccaagctggaggcactgcgggcagaggtgagcaagctggaacagcaatgccagaagcagcaggagcaggctgacagcctggaacgcagcctcgaggctgagcgggcctcccgggctgagcgggacagtgctctggagactctgcagggccagttagaggagaaggcccaggagctagggcacagtcagagtgccttagcctcggcccaacgggagttggctgccttccgcaccaaggtacaagaccacagcaaggctgaagatgagtggaaggcccaggtggcccggggccggcaagaggctgagaggaaaaatagcctcatcagcagcttggaggaggaggtgtccatcctgaatcgccaggtcctggagaaggagggggagagcaaggagttgaagcggctggtgatggccgagtcagagaagagccagaagctggaggagaggctgcgcctgctgcaggcagagacagccagcaacagtgccagagctgcagaacgcagctctgctctgcgggaggaggtgcagagcctccgggaggaggctgagaaacagcgggtggcttcagagaacctgcggcaggagctgacctcacaggctgagcgtgcggaggagctgggccaagaattgaaggcgtggcaggagaagttcttccagaaagagcaggccctctccaccctgcagctcgagcacaccagcacacaggccctggtgagtgagctgctgccagctaagcacctctgccagcagctgcaggccgagcaggccgctgccgagaaacgccaccgtgaggagctggagcagagcaagcaggccgctgggggactgcgggcagagctgctgcgggcccagcgggagcttggggagctgattcctctgcggcagaaggtggcagagcaggagcgaacagctcagcagctgcgggcagagaaggccagctatgcagagcagctgagcatgctgaagaaggcgcatggcctgctggcagaggagaaccgggggctgggtgagcgggccaaccttggccggcagtttctggaagtggagttggaccaggcccgggagaagtatgtccaagagttggcagccgtacgtgctgatgctgagacccgtctggctgaggtgcagcgagaagcacagagcactgcccgggagctggaggtgatgactgccaagtatgagggtgccaaggtcaaggtcctggaggagaggcagcggttccaggaagagaggcagaaactcactgcccaggtggagcagctagaggtatttcagagagagcaaactaagcaggtggaagaactgagtaagaaactggctgactctgaccaagccagcaaggtgcagcagcagaagctgaaggctgtccaggctcagggaggcgagagccagcaggaggcccagcgcctccaggcccagctgaatgaactgcaagcccagttgagccagaaggagcaggcagctgagcactataagctgcagatggagaaagccaaaacacattatgatgccaagaagcagcagaaccaagagctgcaggagcagctgcggagcctggagcagctgcagaaggaaaacaaagagctgcgagctgaagctgaacggctgggccatgagctacagcaggctgggctgaagaccaaggaggctgaacagacctgccgccaccttactgcccaggtgcgcagcctggaggcacaggttgcccatgcagaccagcagcttcgagacctgggcaaattccaggtggcaactgatgctttaaagagccgtgagccccaggctaagccccagctggacttgagtattgacagcctggatctgagctgcgaggaggggaccccactcagtatcaccagcaagctgcctcgtacccagccagacggcaccagcgtccctggagaaccagcctcacctatctcccagcgcctgccccccaaggtagaatccctggagagtctctacttcactcccatccctgctcggagtcaggcccccctggagagcagcctggactccctgggagacgtcttcctggactcgggtcgtaagacccgctccgctcgtcggcgcaccacgcagatcatcaacatcaccatgaccaagaagctagatgtggaagagccagacagcgccaactcatcgttctacagcacgcggtctgctcctgcttcccaggctagcctgcgagccacctcctctactcagtctctagctcgcctgggttctcccgattatggcaactcagccctgctcagcttgcctggctaccgccccaccactcgcagttctgctcgtcgttcccaggccggggtgtccagtggggcccctccaggaaggaacagcttctacatgggcacttgccaggatgagcctgagcagctggatgactggaaccgcattgcagagctgcagcagcgcaatcgagtgtgccccccacatctgaagacctgctatcccctggagtccaggccttccctgagcctgggcaccatcacagatgaggagatgaaaactggagacccccaagagaccctgcgccgagccagcatgcagccaatccagatagccgagggcactggcatcaccacccggcagcagcgcaaacgggtctccctagagccccaccagggccctggaactcctgagtctaagaaggccaccagctgtttcccacgccccatgactccccgagaccgacatgaagggcgcaaacagagcactactgaggcccagaagaaagcagctccagcttctactaaacaggctgaccggcgccagtcgatggccttcagcatcctcaacacacccaagaagctagggaacagccttctgcggcggggagcctcaaagaaggccctgtccaaggcttcccccaacactcgcagtggaacccgccgttctccgcgcattgccaccaccacagccagcgccgccactgctgccgccattggtgccacccctcgagccaagggcaaggcaaagcactaaagggccagtaccagtgagtggccccacctgtgtccccgatgctgccgtcacctggtcctccgcctactgtccctctcagtgccttctctcagctcccaggccaacagtagccaaacccctagagacagtgatgcctgcccgcaccctggcctggtccctggtccttcactggcgccttctcggagctggcccagggggcctggagcatggacagtgtgggcgctctccctaccttgcctccttttttcttaaagcaaagtcacttctccatcacaaccagatttgaggctggttttgatggctgggtccttgggcctggccagtcttcctcttagcctctggatctagaagggaccataagaggagtaggccctggttcctgctgtcctggtggctgggcccagcaggggccctcactcttgaagtccaggactgggtctgacctggtgggagcacctgccagaggatgctctttcccaggacggatgggccctgtgtctcaggagtggggttgggggacagccttcagcagcagctcacaccctaccttccccagacttgcactggggtgggatttggagtgatgggaaggtttttaagggccggggatggatcttttctaaatgttattacttgtaaataaagtctatttttctcccgtgaagtactgagttgacttgatcggtgtgggaaaaagaggaatatagg

SEQ ID NO: 380448 - DNA, 1582 bp, Homo sapiens
tcggcaccgacttgcagtggtggggacgtggatcacggtgagtgtgttggcctgggaatgcgccaactcatcgttctacagcacgcggtctgctcctgcttcccaggctagcctgcgagccacctcctctactcagtctctagctcgcctgggttctcccgattatggcaactcagccctgctcagcttgcctggctaccgccccaccactcgcagttctgctcgtcgttcccaggccggggtgtccagtggggcccctccaggaaggaacagcttctacatgggcacttgccaggatgagcctgagcagctggatgactggaaccgcattgcagagctgcagcagcgcaatcgagtgtgccccccacatctgaagacctgctatcccctggagtccaggccttccctgagcctgggcaccatcacagatgaggagatgaaaactggagacccccaagagaccctgcgccgagccagcatgcagccaatccagatagccgagggcactggcatcaccacccggcagcagcgcaaacgggtctccctagagccccaccagggccctggaactcctgagtctaagaaggccaccagctgtttcccacgccccatgactccccgagaccgacatgaagggcgcaaacagagcactactgaggcccagaagaaagcagctccagcttctactaaacaggctgaccggcgccagtcgatggccttcagcatcctcaacacacccaagaagctagggaacagccttctgcggcggggagcctcaaagaaggccctgtccaaggcttcccccaacactcgcagtggaacccgccgttctccgcgcattgccaccaccacagccagcgccgccactgctgccgccattggtgccacccctcgagccaagggcaaggcaaagcactaaagggccagtaccagtgagtggccccacctgtgtccccgatgctgccgtcacctggtcctccgcctactgtccctctcagtgccttctctcagctcccaggccaacagtagccaaacccctagagacagtgatgcctgcccgcaccctggcctggtccctggtccttcactggcgccttctcggagctggcccagggggcctggagcatggacagtgtgggcgctctccctaccttgcctccttttttcttaaagcaaagtcacttctccatcacaaccagatttgaggctggttttgatggctgggtccttgggcctggccagtcttcctcttagcctctggatctagaagggaccataagaggagtaggccctggttcctgctgtcctggtggctgggcccagcaggggccctcactcttgaagtccaggactgggtctgacctggtgggagcacctgccagaggatgctctttcccaggacggatgggccctgtgtctcaggagtggggttgggggacagccttcagcagcagctcacaccctaccttccccagacttgcactggggtgggatttggagtgatgggaaggtttttaagggccggggatggatcttttctaaatgttattacttgtaaataaagtctatttttctcccgtga

SEQ ID NO: 380449 - DNA, 1425 bp, Homo sapiens
gagaaataggcaattaagaggctgtccagcttgcctggggatcgctgctatcactcgcagttctgctcaacggtccctcgccgtagatgtccagagaggcccctccgaaggaacagcttctacatgggcacttgccaggatgagcctgagcagctggatgactggaaccgcattgcagagctgcagcagcgcaatcgagtgtgccccccacatctgaagacctgctatcccctggagtccaggccttccctgagcctgggcaccatcacagatgaggagatgaaaactggagacccccaagagaccctgcgccgagccagcatgcagccaatccagatagccgagggcactggcatcaccacccggcagcagcgcaaacgggtctccctagagccccaccagggccctggaactcctgagtctaagaaggccaccagctgtttcccacgccccatgactccccgagaccgacatgaagggcgcaaacagagcactactgaggcccagaagaaagcagctccagcttctactaaacaggctgaccggcgccagtcgatggccttcagcatcctcaacacacccaagaagctagggaacagccttctgcggcggggagcctcaaagaaggccctgtccaaggcttcccccaacactcgcagtggaacccgccgttctccgcgcattgccaccaccacagccagcgccgccactgctgccgccattggtgccacccctcgagccaagggcaaggcaaagcactaaagggccagtaccagtgagtggccccacctgtgtccccgatgctgccgtcacctggtcctccgcctactgtccctctcagtgccttctctcagctcccaggccaacagtagccaaacccctagagacagtgatgcctgcccgcaccctggcctggtccctggtccttcactggcgccttctcggagctggcccagggggcctggagcatggacagtgtgggcgctctccctaccttgcctccttttttcttaaagcaaagtcacttctccatcacaaccagatttgaggctggttttgatggctgggtccttgggcctggccagtcttcctcttagcctctggatctagaagggaccataagaggagtaggccctggttcctgctgtcctggtggctgggcccagcaggggccctcactcttgaagtccaggactgggtctgacctggtgggagcacctgccagaggatgctctttcccaggacggatgggccctgtgtctcaggagtggggttgggggacagccttcagcagcagctcacaccctaccttccccagacttgcactggggtgggatttggagtgatgggaaggtttttaagggccggggatggatcttttctaaatgttattacttgtaaataaagtctatttttctcccgtga

SEQ ID NO: 380450 - DNA, 6081 bp, Homo sapiens
ctttgccttcaagtacaggccggggtccggaagcggtgataccccttctctttcccagtggccctcaaacttccttttcccgggtccttaagcgggccccgccgacagaggccaatcagagggcagcgcgagggggcggggccatagtttaaactaattgtgcgctcacagcgctggcgcgagcccacgaagaggtacgattccggagaatcgcgaggcagagcgggagcgcgcagccaggtggaaactaattctaagccagactgctggagatcaccctgttctagtgtgtggaggcttccaccaggaggcgcattggagtgactgtctggcatcaccaagatgacactccacgccacccggggggctgcactcctctcttgggtgaacagtctacacgtggctgaccctgtggaggctgtgctgcagctccaggactgcagcatcttcatcaagatcattgacagaatccatggcactgaagagggacagcaaatcttgaagcagccggtgtcagagagactggactttgtgtgcagttttctgcagaaaaatcgaaaacatccctcttccccagaatgcctggtatctgcacagaaggtgctagagggatcagagctggaactggcgaagatgaccatgctgctcttataccactctaccatgagctccaaaagtcccagggactgggaacagtttgaatataaaattcaggctgagttggctgtcattcttaaatttgtgctggaccatgaggacgggctaaaccttaatgaggacctagagaacttcctacagaaagctcctgtgccttctacctgttctagcacattccctgaagagctctccccacctagccaccaggccaagagggagattcgcttcctagagctacagaaggttgcctcctcttccagtgggaacaactttctctcaggttctccagcttctcccatgggtgatatcctgcagaccccacagttccagatgagacggctgaagaagcagcttgctgatgagagaagtaatagggatgagctggagctggagctagctgagaaccgcaagctcctcaccgagaaggatgcacagatagccatgatgcagcagcgcattgaccgcctagccctgctgaatgagaagcaggcggccagcccactggagcccaaggagcttgaggagctgcgtgacaagaatgagagccttaccatgcggctgcatgaaaccctgaagcagtgccaggacctgaagacagagaagagccagatggatcgcaaaatcaaccagctttcggaggagaatggagacctttcctttaagctgcgggagtttgccagtcatctgcagcagctacaggatgccctcaatgagctgacggaggagcacagcaaggccactcaggagtggctagagaagcaggcccagctggagaaggagctcagcgcagccctgcaggacaagaaatgccttgaagagaagaacgaaatccttcagggaaaactttcacagctggaagaacacttgtcccagctgcaggataacccaccccaggagaagggcgaggtgctgggtgatgtcttgcagctggaaaccttgaagcaagaggcagccactcttgctgcaaacaacacacagctccaagccagggtagagatgctggagactgagcgaggccagcaggaagccaagctgcttgctgagcggggccacttcgaagaagaaaagcagcagctgtctagcctgatcactgacctgcagagctccatctccaacctcagccaggccaaggaagagctggagcaggcctcccaggctcatggggcccggttgactgcccaggtggcctctctgacctctgagctcaccacactcaatgccaccatccagcaacaggatcaagaactggctggcctgaagcagcaggccaaagagaagcaggcccagctagcacagaccctccaacagcaagaacaggcctcccagggcctccgccaccaggtggagcagctaagcagtagcctgaagcagaaggagcagcagttgaaggaggtagcggagaagcaggaggcaactaggcaggaccatgcccagcaactggccactgctgcagaggagcgagaggcctccttaagggagcgggatgcggctctcaagcagctggaggcactggagaaggagaaggctgccaagctggagattctgcagcagcaacttcaggtggctaatgaagcccgggacagtgcccagacctcagtgacacaggcccagcgggagaaggcagagctgagccggaaggtggaggaactccaggcctgtgttgagacagcccgccaggaacagcatgaggcccaggcccaggttgcagagctagagttgcagctgcggtctgagcagcaaaaagcaactgagaaagaaagggtggcccaggagaaggaccagctccaggagcagctccaggccctcaaagagtccttgaaggtcaccaagggcagccttgaagaggagaagcgcagggctgcagatgccctggaagagcagcagcgttgtatctctgagctgaaggcagagacccgaagcctggtggagcagcataagcgggaacgaaaggagctggaagaagagagggctgggcgcaaggggctggaggctcgattacagcagcttggggaggcccatcaggctgagactgaagtcctgcggcgggagctggcagaggccatggctgcccagcacacagctgagagtgagtgtgagcagctcgtcaaagaagtagctgcctggcgtgagcggtatgaggatagccagcaagaggaggcacagtatggcgccatgttccaggaacagctgatgactttgaaggaggaatgtgagaaggcccgccaggagctgcaggaggcaaaggagaaggtggcaggcatagaatcccacagcgagctccagataagccggcagcagaacgaactagctgagctccatgccaacctggccagagcactccagcaggtccaagagaaggaagtcagggcccagaagcttgcagatgacctctccactctgcaggaaaagatggctgccaccagcaaagaggtggcccgcttggagaccttggtgcgcaaggcaggtgagcagcaggaaacagcctcccgggagttagtcaaggagcctgcgagggcaggagacagacagcccgagtggctggaagagcaacagggacgccagttctgcagcacacaggcagcgctgcaggctatggagcgggaggcagagcagatgggcaatgagctggaacggctgcgggccgcgctgatggagagccaggggcagcagcaggaggagcgtgggcagcaggaaagggaggtggcgcggctgacccaggagcggggccgtgcccaggctgaccttgccctggagaaggcggccagagcagagcttgagatgcggctgcagaacgccctcaacgagcagcgtgtggagttcgctaccctgcaagaggcactggctcatgccctgacggaaaaggaaggcaaggaccaggagttggccaagcttcgtggtctggaggcagcccagataaaagagctggaggaacttcggcaaaccgtgaagcaactgaaggaacagctggctaagaaagaaaaggagcacgcatctggctcaggagcccaatctgaggctgctggcaggacagagccaacaggccccaagctggaggcactgcgggcagaggtgagcaagctggaacagcaatgccagaagcagcaggagcaggctgacagcctggaacgcagcctcgaggctgagcgggcctcccgggctgagcgggacagtgctctggagactctgcagggccagttagaggagaaggcccaggagctagggcacagtcagagtgccttagcctcggcccaacgggagttggctgccttccgcaccaaggtacaagaccacagcaaggctgaagatgagtggaaggcccaggtggcccggggccggcaagaggctgagaggaaaaatagcctcatcagcagcttggaggaggaggtgtccatcctgaatcgccaggtcctggagaaggagggggagagcaaggagttgaagcggctggtgatggccgagtcagagaagagccagaagctggaggagaggctgcgcctgctgcaggcagagacagccagcaacagtgccagagctgcagaacgcagctctgctctgcgggaggaggtgcagagcctccgggaggaggctgagaaacagcgggtggcttcagagaacctgcggcaggagctgacctcacaggctgagcgtgcggaggagctgggccaagaattgaaggcgtggcaggagaagttcttccagaaagagcaggccctctccaccctgcagctcgagcacaccagcacacaggccctggtgagtgagctgctgccagctaagcacctctgccagcagctgcaggccgagcaggccgctgccgagaaacgccaccgtgaggagctggagcagagcaagcaggccgctgggggactgcgggcagagctgctgcgggcccagcgggagcttggggagctgattcctctgcggcagaaggtggcagagcaggagcgaacagctcagcagctgcgggcagagaaggccagctatgcagagcagctgagcatgctgaagaaggcgcatggcctgctggcagaggagaaccgggggctgggtgagcgggccaaccttggccggcagtttctggaagtggagttggaccaggcccgggagaagtatgtccaagagttggcagccgtacgtgctgatgctgagacccgtctggctgaggtgcagcgagaagcacagagcactgcccgggagctggaggtgatgactgccaagtatgagggtgccaaggtcaaggtcctggaggagaggcagcggttccaggaagagaggcagaaactcactgcccaggtggagcagctagaggtatttcagagagagcaaactaagcaggtggaagaactgagtaagaaactggctgactctgaccaagccagcaaggtgcagcagcagaagctgaaggctgtccaggctcagggaggcgagagccagcaggaggcccagcgcctccaggcccagctgaatgaactgcaagcccagttgagccagaaggagcaggcagctgagcactataagctgcagatggagaaagccaaaacacattatgatgccaagaagcagcagaaccaagagctgcaggagcagctgcggagcctggagcagctgcagaaggaaaacaaagagctgcgagctgaagctgaacggctgggccatgagctacagcaggctgggctgaagaccaaggaggctgaacagacctgccgccaccttactgcccaggtgcgcagcctggaggcacaggttgcccatgcagaccagcagcttcgagacctgggcaaattccaggtggcaactgatgctttaaagagccgtgagccccaggctaagccccagctggacttgagtattgacagccaggccaacagtagccaaacccctagagacagtgatgcctgcccgcaccctggcctggtccctggtccttcactggcgccttctcggagctggcccagggggcctggagcatggacagtgtgggcgctctccctaccttgcctccttttttcttaaagcaaagtcacttctccatcacaaccagatttgaggctggttttgatggctgggtccttgggcctggccagtcttcctcttagcctctggatctagaagggaccataagaggagtaggccctggttcctgctgtcctggtggctgggcccagcaggggccctcactcttgaagtccaggactgggtctgacctggtgggagcacctgccagaggatgctctttcccaggacggatgggccctgtgtctcaggagtggggttgggggacagccttcagcagcagctcacaccctaccttccccagacttgcactggggtgggatttggagtgatgggaaggtttttaagggccggggatggatcttttctaaatgttattacttgtaaataaagtctatttttctcccgtga

SEQ ID NO: 380451 - DNA, 6106 bp, Homo sapiens
ctttgccttcaagtacaggccggggtccggaagcggtgataccccttctctttcccagtggccctcaaacttccttttcccgggtccttaagcgggccccgccgacagaggccaatcagagggcagcgcgagggggcggggccatagtttaaactaattgtgcgctcacagcgctggcgcgagcccacgaagaggtacgattccggagaatcgcgaggcagagcgggagcgcgcagccaggtggaaactaattctaagccagactgctggagatcaccctgttctagtgtgtggaggcttccaccaggaggcgcattggagtgactgtctggcatcaccaagatgacactccacgccacccggggggctgcactcctctcttgggtgaacagtctacacgtggctgaccctgtggaggctgtgctgcagctccaggactgcagcatcttcatcaagatcattgacagaatccatggcactgaagagggacagcaaatcttgaagcagccggtgtcagagagactggactttgtgtgcagttttctgcagaaaaatcgaaaacatccctcttccccagaatgcctggtatctgcacagaaggtgctagagggatcagagctggaactggcgaagatgaccatgctgctcttataccactctaccatgagctccaaaagtcccagggactgggaacagtttgaatataaaattcaggctgagttggctgtcattcttaaatttgtgctggaccatgaggacgggctaaaccttaatgaggacctagagaacttcctacagaaagctcctgtgccttctacctgttctagcacattccctgaagagctctccccacctagccaccaggccaagagggagattcgcttcctagagctacagaaggttgcctcctcttccagtgggaacaactttctctcaggttctccagcttctcccatgggtgatatcctgcagaccccacagttccagatgagacggctgaagaagcagcttgctgatgagagaagtaatagggatgagctggagctggagctagctgagaaccgcaagctcctcaccgagaaggatgcacagatagccatgatgcagcagcgcattgaccgcctagccctgctgaatgagaagcaggcggccagcccactggagcccaaggagcttgaggagctgcgtgacaagaatgagagccttaccatgcggctgcatgaaaccctgaagcagtgccaggacctgaagacagagaagagccagatggatcgcaaaatcaaccagctttcggaggagaatggagacctttcctttaagctgcgggagtttgccagtcatctgcagcagctacaggatgccctcaatgagctgacggaggagcacagcaaggccactcaggagtggctagagaagcaggcccagctggagaaggagctcagcgcagccctgcaggacaagaaatgccttgaagagaagaacgaaatccttcagggaaaactttcacagctggaagaacacttgtcccagctgcaggataacccaccccaggagaagggcgaggtgctgggtgatgtcttgcagctggaaaccttgaagcaagaggcagccactcttgctgcaaacaacacacagctccaagccagggtagagatgctggagactgagcgaggccagcaggaagccaagctgcttgctgagcggggccacttcgaagaagaaaagcagcagctgtctagcctgatcactgacctgcagagctccatctccaacctcagccaggccaaggaagagctggagcaggcctcccaggctcatggggcccggttgactgcccaggtggcctctctgacctctgagctcaccacactcaatgccaccatccagcaacaggatcaagaactggctggcctgaagcagcaggccaaagagaagcaggcccagctagcacagaccctccaacagcaagaacaggcctcccagggcctccgccaccaggtggagcagctaagcagtagcctgaagcagaaggagcagcagttgaaggaggtagcggagaagcaggaggcaactaggcaggaccatgcccagcaactggccactgctgcagaggagcgagaggcctccttaagggagcgggatgcggctctcaagcagctggaggcactggagaaggagaaggctgccaagctggagattctgcagcagcaacttcaggtggctaatgaagcccgggacagtgcccagacctcagtgacacaggcccagcgggagaaggcagagctgagccggaaggtggaggaactccaggcctgtgttgagacagcccgccaggaacagcatgaggcccaggcccaggttgcagagctagagttgcagctgcggtctgagcagcaaaaagcaactgagaaagaaagggtggcccaggagaaggaccagctccaggagcagctccaggccctcaaagagtccttgaaggtcaccaagggcagccttgaagaggagaagcgcagggctgcagatgccctggaagagcagcagcgttgtatctctgagctgaaggcagagacccgaagcctggtggagcagcataagcgggaacgaaaggagctggaagaagagagggctgggcgcaaggggctggaggctcgattacagcagcttggggaggcccatcaggctgagactgaagtcctgcggcgggagctggcagaggccatggctgcccagcacacagctgagagtgagtgtgagcagctcgtcaaagaagtagctgcctggcgtgagcggtatgaggatagccagcaagaggaggcacagtatggcgccatgttccaggaacagctgatgactttgaaggaggaatgtgagaaggcccgccaggagctgcaggaggcaaaggagaaggtggcaggcatagaatcccacagcgagctccagataagccggcagcagaacgaactagctgagctccatgccaacctggccagagcactccagcaggtccaagagaaggaagtcagggcccagaagcttgcagatgacctctccactctgcaggaaaagatggctgccaccagcaaagaggtggcccgcttggagaccttggtgcgcaaggcaggtgagcagcaggaaacagcctcccgggagttagtcaaggagcctgcgagggcaggagacagacagcccgagtggctggaagagcaacagggacgccagttctgcagcacacaggcagcgctgcaggctatggagcgggaggcagagcagatgggcaatgagctggaacggctgcgggccgcgctgatggagagccaggggcagcagcaggaggagcgtgggcagcaggaaagggaggtggcgcggctgacccaggagcggggccgtgcccaggctgaccttgccctggagaaggcggccagagcagagcttgagatgcggctgcagaacgccctcaacgagcagcgtgtggagttcgctaccctgcaagaggcactggctcatgccctgacggaaaaggaaggcaaggaccaggagttggccaagcttcgtggtctggaggcagcccagataaaagagctggaggaacttcggcaaaccgtgaagcaactgaaggaacagctggctaagaaagaaaaggagcacgcatctggctcaggagcccaatctgaggctgctggcaggacagagccaacaggccccaagctggaggcactgcgggcagaggtgagcaagctggaacagcaatgccagaagcagcaggagcaggctgacagcctggaacgcagcctcgaggctgagcgggcctcccgggctgagcgggacagtgctctggagactctgcagggccagttagaggagaaggcccaggagctagggcacagtcagagtgccttagcctcggcccaacgggagttggctgccttccgcaccaaggtacaagaccacagcaaggctgaagatgagtggaaggcccaggtggcccggggccggcaagaggctgagaggaaaaatagcctcatcagcagcttggaggaggaggtgtccatcctgaatcgccaggtcctggagaaggagggggagagcaaggagttgaagcggctggtgatggccgagtcagagaagagccagaagctggaggagaggctgcgcctgctgcaggcagagacagccagcaacagtgccagagctgcagaacgcagctctgctctgcgggaggaggtgcagagcctccgggaggaggctgagaaacagcgggtggcttcagagaacctgcggcaggagctgacctcacaggctgagcgtgcggaggagctgggccaagaattgaaggcgtggcaggagaagttcttccagaaagagcaggccctctccaccctgcagctcgagcacaccagcacacaggccctggtgagtgagctgctgccagctaagcacctctgccagcagctgcaggccgagcaggccgctgccgagaaacgccaccgtgaggagctggagcagagcaagcaggccgctgggggactgcgggcagagctgctgcgggcccagcgggagcttggggagctgattcctctgcggcagaaggtggcagagcaggagcgaacagctcagcagctgcgggcagagaaggccagctatgcagagcagctgagcatgctgaagaaggcgcatggcctgctggcagaggagaaccgggggctgggtgagcgggccaaccttggccggcagtttctggaagtggagttggaccaggcccgggagaagtatgtccaagagttggcagccgtacgtgctgatgctgagacccgtctggctgaggtgcagcgagaagcacagagcactgcccgggagctggaggtgatgactgccaagtatgagggtgccaaggtcaaggtcctggaggagaggcagcggttccaggaagagaggcagaaactcactgcccaggtggaagaactgagtaagaaactggctgactctgaccaagccagcaaggtgcagcagcagaagctgaaggctgtccaggctcagggaggcgagagccagcaggaggcccagcgcctccaggcccagctgaatgaactgcaagcccagttgagccagaaggagcaggcagctgagcactataagctgcagatggagaaagccaaaacacattatgatgccaagaagcagcagaaccaagagctgcaggagcagctgcggagcctggagcagctgcagaaggaaaacaaagagctgcgagctgaagctgaacggctgggccatgagctacagcaggctgggctgaagaccaaggaggctgaacagacctgccgccaccttactgcccaggtgcgcagcctggaggcacaggtaagaatttggctggcagactcacctcactcctattccactggacccctgtgccctctcctcctaggccactgctgccttaggcttttcttcactctccccctggccctctccttctcaggttgcccatgcagaccagcagcttcgagacctgggcaaattccaggtggcaactgatgctttaaagagccgtgagccccaggctaagccccagctggacttgagtattgacagcctggtccctggtccttcactggcgccttctcggagctggcccagggggcctggagcatggacagtgtgggcgctctccctaccttgcctccttttttcttaaagcaaagtcacttctccatcacaaccagatttgaggctggttttgatggctgggtccttgggcctggccagtcttcctcttagcctctggatctagaagggaccataagaggagtaggccctggttcctgctgtcctggtggctgggcccagcaggggccctcactcttgaagtccaggactgggtctgacctggtgggagcacctgccagaggatgctctttcccaggacggatgggccctgtgtctcaggagtggggttgggggacagccttcagcagcagctcacaccctaccttccccagacttgcactggggtgggatttggagtgatgggaaggtttttaagggccggggatggatcttttctaaatgttattacttgtaaataaagtctatttttctcccgtga

SEQ ID NO: 380452 - DNA, 1402 bp, Homo sapiens
ctttgccttcaagtacaggccggggtccggaagcggtgataccccttctctttcccagtggccctcaaacttccttttcccgggtccttaagcgggccccgccgacagaggccaatcagagggcagcgcgagggggcggggccatagtttaaactaattgtgcgctcacagcgctggcgcgagcccacgaagaggtacgattccggagaatcgcgaggcagagcgggagcgcgcagccaggtggaaactaattctaagccagactgctggagatcaccctgttctagtgtgtggaggcttccaccaggaggcgcattggagtgactgtctggcatcaccaagatgacactccacgccacccggggggctgcactcctctcttgggtgaacagtctacacgtggctgaccctgtggaggctgtgctgcagctccaggactgcagcatcttcatcaagatcattgacagaatccatggcactgaagagggacagcaaatcttgaagcagccggtgtcagagagactggactttgtgtgcagttttctgcagaaaaatcgaaaacatccctcttccccagaatgcctggtatctgcacagaaggtgctagagggatcagagctggaactggcgaagatgaccatgctgctcttataccactctaccatgagctccaaaagtcccagggactgggaacagtttgaatataaaattcaggctgagttggctgtcattcttaaatttgtgctggaccatgaggacgggctaaaccttaatgaggacctagagaacttcctacagaaagctcctgtgccttctacctgttctagcacattccctgaagagctctccccacctagccaccaggccaagagggagattcgcttcctagagctacagaaggttgcctcctcttccagtgggaacaactttctctcaggttctccagcttctcccatgggtgatatcctgcagaccccacagttccagatgagacggctgaagaagcagcttgctgatgagagaagtaatagggatgagctggagctggagctagctgagaaccgcaagctcctcaccgagaaggatgcacagatagccatgatgcagcagcgcattgaccgcctagccctgctgaatgagaagcaggcggccagcccactggagcccaaggagcttgaggagctgcgtgacaagaatgagagccttaccatgcggctgcatgaaaccctgaagcagtgccaggacctgaagacagagaagagccagatggatcgcaaaatcaaccagctttcggaggagaatggagacctttcctttaagctgcgggagtttgccagtcatctgcagcagctcgcccctgagttagcagctcgcccctgagttagcagctcgcccctgagtt

SEQ ID NO: 380453 - DNA, 490 bp, Homo sapiens
gatttggggctagtcactttatttctttgcacttcatctccaaaatgggccgataaacactctgcattccctacctcaaagcattatgaatagactccatgaaaaaaatgcgtagaagagtcttgacaacatcagcaccaccttgtgagggcttctgtcgacaaggcccatttcttgcagacacacactttaaggacctttgcaaagcagttgggaatacatggatgtgccgtgggatctgagggcttcggaagggaatgggaagcttctgtacagtgccagggactgtacactgcaacagattcactctgtcttccagaagctagatgtggaagagccagacagcgccaactcatcgttctacagcacgcggtctgctcctgcttcccaggctagcctgcgagccacctcctctactcagtctctagctcgcctgggttctcccgattatggcaactcagccctgctcagcttgcctggctaccgcccc

SEQ ID NO: 380454 - DNA, 333 bp, Homo sapiens
aaaccagaatgtcaaaggggtatcgccattccactacatattgcagtattaatcacagtagccaatgtatggaatcaacctaaagaatgtttttaatgacaaacaaccaggaacacattttgttaatctaatgtgctccaacttactacacaggttgaccttgcataaaagtaactttacaagaatattagcactaaataattcctaacatcttggagacaattttcaaaataatgcgtttgtttactcattcaagatgtatttactgagctaccactgttatatgccaagtgatgttctaggtcctagacatgtagcaaaaaccaaactgaa

SEQ ID NO: 380455 - DNA, 713 bp, Homo sapiens
aaatctttgttttttttttccaacttaaaaatgctgagggttttgtgtgtgtgtgtgtgagctagagggagaaaaataagtgacatgacatttaaataccatattaatatttgggtcagttgtgtttaagagtaaacatacgactaaccgctttctaggaaggcttaatcttccttttaaatattgttctcaaaagatgagcaatatttatgtattgaaacaacattttcttgaagtatgaaaattgaggtactgaaaacaggtatgtattcaagaagatgtgccttgctttaccaaaaaaatgtgcttttgaaaagttttgctgtgaactgattcatgttttgaaatgcttcccatctggtgtcatagaaaagttgaaaaggaggcaaggattttttttctccccaggggaggggtggtgattttatgtgataaatgtctgtagtgccgagtcttccacgtacttttccccacgctttttcttttttttgttttaaggtccatgctaatctctgtatattccaattttagtatatgtgccgctgaagcaagcactcccgtgcttttttacttgctgcagtaactggtgagttgaccaaagtcatgttgttagcaaaggctgctgtggttttcagcacaaagtgaaagacaggcattcctctgttttggttttaccagttgtattagtctgttcttgcattgctgactggatt

SEQ ID NO: 380456 - DNA, 226 bp, Homo sapiens
tcacccaaagaaatccactgataatatttagtcttctcaaaaatctcttccctgtttttggttactgggatcattattgtctgaatctttcaaagtagaaatctgggtctcatatgtcattaaatttaagaagttctgctatttctgtgtcactctcagtgggacaacaagacattatgtgtgtcctaatgtaatggattaggaaagtacatgtatcacctatgga

SEQ ID NO: 380457 - DNA, 1349 bp, Homo sapiens
ttttattgtgtttttggtgtcatatctaaggcataattgccaaacccaaggtcacaaagagttacacctatcttgtcttctaagaggtttatagttttaactcttacatttaggttcatgattcattttgagttcctttttgtgtatggtgtgaggtagggggccaactacatttttctcctgtgggtatgcaggtgtcccagcaccatttgttgacataaataggatcttaaaggacacctggagccctttaaaacccaccacctggggagcaggaggtaggtggagcacctagcgtggggcctggcctggggaaagtgctcttggaaaatgccctttcctgctggaagagcaccagtgagcagctccccagcccctgcttctcagccttttgtgttgatattgtacaattctgtgtgtgtgtaacttgctgttcactagacccagaatggtgcttgctatggtttgaatatttgtcctctccaaatcttgggttgaaatctatctatctatctatctatctatctatctatctatctatctgtctgtctgttgttttagagatagggtctcactctgtcacccaggctggaatgcagtgggtgcactccagctcactgcagccttgaatgctggggctcaagccatcttcccgcttcagccttccgaagtgttgggattacaggcatgagccatggtgcctgcctggcctcctcaggttgaaatttgatcccagtgttgggggtgtggcctaatgggaggtgtttgggtcatgaggacggatccctcatgaatagattaatgtcctccctggcgagtgagtacatcctcactgtaatagttcctgtgagagctgattgtttaagagcttggcacctggcacctccccccactgtcttgcttcctctctcaccatgtgatatctgcctatgccgactcgcttctgccttccaccatgagcagaagcagcctgaggcctcagcagatgctcagacatcagaatcgtgagccaaataaaccttttccctgatcaatcatccagcttcaggtattcctttataacaacacaaaacagactaagacagtgctgtatgcagctgcatgctaaataattgattcaggtgatggtgaaggtcagaacaggaggatgtgggcttacatcatagcaggggagtgtccctggctgagagacctgcaggaaccaacagcagagaggttatcaactcttgttctacctggagaggtatttgagggcccctaggtccagctgatggggctcttggaagctgttgatcaagccagggaaaagatgatagtgacagccaagaccagaggtgatgaatgtttag

SEQ ID NO: 380458 - DNA, 1556 bp, Homo sapiens
cggcaaacaaggcccacactggacagggcagctgctgggttgctactctcgcctccgccatgattccgcccgcagactctttgctcaagtacgacaccccagtgctggtgagccggaacacggagaaacggagccccaaggctcggctactgaaagtcagcccccagcagcctggaccttcaggttcagccccacagccacccaagaccaagctcccctcaactccctgtgtcccagatcctacaaagcaggcagaagaaatcttgaatgccatactacccccaagggagtgggtggaagacacgcagctatggatccagcaggtgtccagcacccctagcaccaggatggacgtggtgcacctccaggagcagttagacttaaagctgcagcagcggcaggccagggaaacaggcatctgccctgtccgcagggaactctactcacagtgttttgatgagttgatccgggaggtcaccatcaactgtgcggagagggggctgctgctgctgcgagtccgggacgagatccgcatgaccatcgctgcctaccagaccctgtacgagagcagcgtggcgtttggcatgaggaaggcactgcaggctgagcaggggaagtcagacatggagaggaaaatcgcagaattggagacggaaaagagagacctggagaggcaagtgaacgagcagaaggcaaaatgtgaagccactgagaagcgggagagcgagaggcggcaggtggaggagaagaagcacaatgaggagattcagttcctgaagcgaacaaatcagcagctgaaggcccaactggaaggcattattgcaccaaagaagtgataatttccacatgattaatttccaacaagacacttgggagttatttactgtgttcctctggcagccaataaaatcatcataagccctttgtaataaaaagctagtttcctgagtgaacaagccataacctcccctaaacaccacctaggtatttgttagaagtcacactattactccaatgtcatcagacacctaaggtctgccagccaggctcctggctgggcaatggaagatggtgtggccctgttagtctccgtgtgtggcttactagccagccttgggaactgccaactcaaattctaagaaagccactgctttctcatcatcactctataccaatacttatttctggccaaatgaatctgcttctctgcccctcaaacttttagttcacaattcatcttctaccttaacttgggcttcttgggcctctggccttccttacttaatgtcttcttttccctactctaatgcatttctaactcactttggagctttggttttctaatgtattatccccacttgccagtcaactggaccccttcctcctcggtttcagactgcctacattaggaaacaatggcagtcaaacccatggctttggagaaagtaaatgtttgccagaaaggaatactagtcacagtggcctttgtgagttgtctgcaactcagctcttcccccagcacagatctgttccccttatcctgcagaaaatcaagc

SEQ ID NO: 380459 - DNA, 1002 bp, Homo sapiens
tagagaaagaaaggtgggcccaggggaccggcactcagcatacggaggacccgcaccggcactggtctctgagtttcctcagtatttattgattactattttcactatctcagcaagaggcaagtgaacgagcagaaggcaaaatgtgaagccactgagaagcgggagagcgagaggcggcaggtggaggagaagaagcacaatgaggagattcagttcctgaagcgaacaaatcagcagctgaaggcccaactggaaggcattattgcaccaaagaagtgataatttccacatgattaatttccaacaagacacttgggagttatttactgtgttcctctggcagccaataaaatcatcataagccctttgtaataaaaagctagtttcctgagtgaacaagccataacctcccctaaacaccacctaggtatttgttagaagtcacactattactccaatgtcatcagacacctaaggtctgccagccaggctcctggctgggcaatggaagatggtgtggccctgttagtctccgtgtgtggcttactagccagccttgggaactgccaactcaaattctaagaaagccactgctttctcatcatcactctataccaatacttatttctggccaaatgaatctgcttctctgcccctcaaacttttagttcacaattcatcttctaccttaacttgggcttcttgggcctctggccttccttacttaatgtcttcttttccctactctaatgcatttctaactcactttggagctttggttttctaatgtattatccccacttgccagtcaactggaccccttcctcctcggtttcagactgcctacattaggaaacaatggcagtcaaacccatggctttggagaaagtaaatgtttgccagaaaggaatactagtcacagtggcctttgtgagttgtctgcaactcagctcttcccccagcacagatctgttccccttatcctgcagaaaatcaagc

SEQ ID NO: 380460 - DNA, 1219 bp, Homo sapiens
accgttaaagtgcactcttctatatctccaggagcagttagacttaaagctgcagcagcggcaggccagggaaacaggcatctgccctgtccgcagggaactctactcacagtgttttgatgagttgatccgggaggtcaccatcaactgtgcggagagggggctgctgctgctgcgagtccgggacgagatccgcatgaccatcgctgcctaccagaccctgtacgagagcagcgtggcgtttggcatgaggaaggcactgcaggctgagcaggggaagtcagacatggagaggaaaatcgcagaattggagacggaaaagagagacctggagaggcaagtgaacgagcagaaggcaaaatgtgaagccactgagaagcgggagagcgagaggcggcaggtggaggagaagaagcacaatgaggagattcagttcctgaagcgaacaaatcagcagctgaaggcccaactggaaggcattattgcaccaaagaagtgataatttccacatgattaatttccaacaagacacttgggagttatttactgtgttcctctggcagccaataaaatcatcataagccctttgtaataaaaagctagtttcctgagtgaacaagccataacctcccctaaacaccacctaggtatttgttagaagtcacactattactccaatgtcatcagacacctaaggtctgccagccaggctcctggctgggcaatggaagatggtgtggccctgttagtctccgtgtgtggcttactagccagccttgggaactgccaactcaaattctaagaaagccactgctttctcatcatcactctataccaatacttatttctggccaaatgaatctgcttctctgcccctcaaacttttagttcacaattcatcttctaccttaacttgggcttcttgggcctctggccttccttacttaatgtcttcttttccctactctaatgcatttctaactcactttggagctttggttttctaatgtattatccccacttgccagtcaactggaccccttcctcctcggtttcagactgcctacattaggaaacaatggcagtcaaacccatggctttggagaaagtaaatgtttgccagaaaggaatactagtcacagtggcctttgtgagttgtctgcaactcagctcttcccccagcacagatctgttccccttatcctgcagaaaatcaagc

SEQ ID NO: 380461 - DNA, 447 bp, Homo sapiens
tgagaagcgggagagcgagaggcggcaggtggaggagaagaagcacaatgaggagattcagttcctgaagcgaacaaatcagcagctgaaggtaatcaacgcgcagggtggggtggaggtgccccctgccctgcgacccagccccacaggccaggcattcggttccttttccatggcttttaaatgtttgtccacatgcactgccaaaggataaaggaagctgactttggtggtgggagaaggggagggctccagagggggtctctactctcaactccaaatctctgaggcgcctcagcctggctctccagtggaggattcttctccctggaaaaaagttgcccatcctcaaggaagaggtggatatggcaaaaagtggaactccattcccctggaagctggtatgttggagcctttctggagggggctgggctccaggtggcttgc

SEQ ID NO: 380462 - DNA, 573 bp, Homo sapiens
cggcaaacaaggcccacactggacagggcagctgctgggttgctactctcgcctccgccatgattccgcccgcagactctttgctcaagtacgacaccccagtgctggtgagccggaacacggagaaacggagccccaaggctcggctactgaaagtcagcccccagcagcctggaccttcaggttcagccccacagccacccaagaccaagctcccctcaactccctgtgtcccagatcctacaaagcaggcagaagaaatcttgaatgccatactacccccaaggtaagaaagtaggagcagtggctgggagaaggcctaagcttttacatcgtggattttgggagtgtggggggaggcactctgcctctgttcctggctggggtttcctcccagtatcacagagctcctagaacttacatatggctggatcctggcagggtggtgggagacctcttctcaatctaccctcatttcctgcatgctgtcacccaatctcatggctttagataccacctatgtgctgatggctcccaaatgtgtatttccagccctgtcttctccactaaact

SEQ ID NO: 380463 - DNA, 1386 bp, Homo sapiens
cggcaaacaaggcccacactggacagggcagctgctgggttgctactctcgcctccgccatgattccgcccgcagactctttgctcaagtacgacaccccagtgctggtgagccggaacacggagaaacggagccccaaggctcggctactgaaagtcagcccccagcagcctggaccttcaggttcagccccacagccacccaagaccaagctcccctcaactccctgtgtcccagatcctacaaagcaggcagaagaaatcttgaatgccatactacccccaagatgagttgatccgggaggtcaccatcaactgtgcggagagggggctgctgctgctgcgagtccgggacgagatccgcatgaccatcgctgcctaccagaccctgtacgagagcagcgtggcgtttggcatgaggaaggcactgcaggctgagcaggggaagtcagacatggagaggaaaatcgcagaattggagacggaaaagagagacctggagaggcaagtgaacgagcagaaggcaaaatgtgaagccactgagaagcgggagagcgagaggcggcaggtggaggagaagaagcacaatgaggagattcagttcctgaagcgaacaaatcagcagctgaaggcccaactggaaggcattattgcaccaaagaagtgataatttccacatgattaatttccaacaagacacttgggagttatttactgtgttcctctggcagccaataaaatcatcataagccctttgtaataaaaagctagtttcctgagtgaacaagccataacctcccctaaacaccacctaggtatttgttagaagtcacactattactccaatgtcatcagacacctaaggtctgccagccaggctcctggctgggcaatggaagatggtgtggccctgttagtctccgtgtgtggcttactagccagccttgggaactgccaactcaaattctaagaaagccactgctttctcatcatcactctataccaatacttatttctggccaaatgaatctgcttctctgcccctcaaacttttagttcacaattcatcttctaccttaacttgggcttcttgggcctctggccttccttacttaatgtcttcttttccctactctaatgcatttctaactcactttggagctttggttttctaatgtattatccccacttgccagtcaactggaccccttcctcctcggtttcagactgcctacattaggaaacaatggcagtcaaacccatggctttggagaaagtaaatgtttgccagaaaggaatactagtcacagtggcctttgtgagttgtctgcaactcagctcttcccccagcacagatctgttccccttatcctgcagaaaatcaagc

SEQ ID NO: 380464 - DNA, 311 bp, Homo sapiens
ccaaagtgctgggattacaggcctgagccactgtacctggcctgacctttgatttttgtatagagcatagtgcattttatgtagagaataatgaattccagagagatttctgaaaatagctagttagatggagttaattgaaaatatgttgctttgatcatcgttctaaaaatattaatgactttgaatgaattttttgcttaacttagttgttctatgatcaagtagtgaacttgagcactattctatttattttgcacatttttaggtttttagtaaacctattctatgtccattaagccacttttatt

SEQ ID NO: 380465 - DNA, 3316 bp, Homo sapiens
  misc_feature (2324)..(2324): n is a, c, g, or t
gagcgaacatggcagcagaatgaggaggctggcgccgggtcgtggccgccgctgccgcgctgcagctcgggatcccagtccggcgcgctccgggccgcatccttagccggcctcctggcggccgcgggattatttcattcccaacggagagctagggagaaaggagactcccccgcggagcggttccgtgctctggcagggtgtagacgtttgtctgtgcgattcgccggctgcgcaaacgacgcgggagagagccggtcccgggctgcggcggcgcggccgcggggatgagccggccatggagcggccttggcggggcgcacgcagcggactggcgctgccgcgggagcgcagcctgagccggggctccagggggcttcgaagcctccggcgccctgggggggtccctgccgccgactccgggaaggacgcgagccccgcgtggcggacactgccgcagtcaccgttctgaggcgccccgagcttgctccgcctgcagctcggtgcgctctgggcacccgggcgccttgcccggtgcacggcggctggcgcaccgcggctagattggctacaggagcggggtgcaggactggctagaggtgggtgtgtgcgcgcgttggactggagatccgagcagaagcagaaccaggcggctctgagcagccatgcttcccggggtgggcgtgttcggcaccagcctcacggcccgtgtcatcatcccgctgctgaaagacgagggcttcgcggtgaaggcgctgtggggccgcacgcaggaagaagcggaggagctggccaaggagatgagtgtccccttctacactagccgcattgatgaggtgctgctgcatcaggacgtggacttggtgtgcattaacctgccgccgcccctcaccagacagatcgctgtcaaaaccctaggcatcggcaagaacgtcatctgcgaccgcacggccacgccgctggacgctttccgcatgacctcggccgcccactactaccccaagctcatgagcatcatgggcaacgtgctgcgcttcctgccggctttcgtgcgcatgaagcagctgatcgaggagggctacgtgggcgagccgctggtgtgtgaggtgcaggtgcacggcggcagcctgctgggcaagaagtacaactggagctgcgacgacttgatgggcggcggcggcctgcactccgtgggcacctacatcatcgacctgctcaccttcctcaccggccaaaaggccgtcaaggtccacgggctgctcaagaccttcgtgaagcagactgaccacatcaagggcatccgacagatcaccagcgatgacttctgcaccttccagatggtgctggagggcggggtgtgctgcaccgtcaccctcaacttcaacgtgcccggcgagttcaagcaggatgtcactgtggtgggctcagccgggcgcctgctggccgtgggcaccgacctgtacgggcagcgcaacagcgccccggagcaggagctgctggtgcaggacgccacgccggtgagcaactccctgcttccggagaaggccttcagcgacatcccctcgccctacctgcgcggcaccatcaagatgatgcaggcggtgcgccaggccttccaggaccaggacgaccggcgcacgtgggatgggcggcccctcaccatggccgccaccttcgacgactgcctgtatgccttgtgcgtggtggacaccatcaagaggtccagccagacgggcgagtggcagaacattgccatcatgaccgaggagccggagctgagccccgcctacctgatcagcgaggccatgcgccgcagcaggatgtccctctactgttagcacagattgagaacctcggggacttgagccttctgcaggggatgtccacagagagggaagggccgaggggagagggtgaccatggggaatgtggggatcagggaggtggagggacagtgtgaataaatggcatctaggaaggtaaactccaatcccggtgaccgaccccaaaccagactgttggtgggctgagctcctagcctggaagcattcaggagagcctgccattcctgggatgatccctgctgggtatttgcacgagagtggtttggtttagctgcctctgctgccctttactgtgacaagcaaggaggggttgcttccctccctacctcatccatcccacacaccttggccttctgcaagccaagtggttctgcaaggtcaaggcactagtatcagatggcaagctcagtgcccgggattcccactgctggcaggagaaggcccattttcacagtccacagaagcgtgttaggctggggntgggggtgggatgggctggtgagaaagttcaaattccaggaagccactttttattggatataaggtatctaacggcaaaagtacttagtagcaaagtggccaccttttgattgattgggcttcctcataggaagcactgagggtgtgtctttgtacttggttcattgcccttcacctggtagagaaagagaggtcagaaatagcaagcaaaaagcaggactcccaggagccacaagaaaagagcacaggctgcaccaaagcaggggcagcagagaataaaatatccctttgaacttgtcaacaattaaaaaactgcaaggagtcaccttataacactatttccagtaaaggtggaattgagtatcagagggattactgcggtgttaaggtagccctgccacgtggctctccaggcagggccaagaagacagcacaaagtatgggtttggccataagctcatatgctgcccccaaagactggggagagctgtgtgcctcagtgttgcagtgtgaattcctaaatagagggtaaagtgagcctagccaggaggtgtttggggctctatcgcgcatctctcctaccaagctgggcaagagcttttaggagattcatccagctttgtggatttagaaaggaagccttcagttccaatcagaatcctctttccttataaaaaaaaaaaaaaaaaaaaaaaaaaaaggattttccttagctccagcatttgctttcaggattctgacacctgagaatttgggggtaggtactaaacgaaacaaaacaaaaggacaacaaggaacattatttctagtgtttctaaaatgggggtttagaaccccttaaggggccatacttaggcttgaaaaggctaatgttggaaaaaacatgttcttctaattggtctgctgtctgtcttgtccttgcacactctgcttacagagttttgttagagatgctgaactgcaggctgggagcaggcagtgccaaaagggaa

SEQ ID NO: 380466 - DNA, 858 bp, Homo sapiens
gtaagaagtgcttttcacctccccccatgattccgaggcctccccagccacatggaactaaccaggacatcagaggaagaaaatcagcagacagaaaaatactggggaaaaaaaaatgccacgtggttctgttcagctgagcttctgctccctccagcacccccacatgggacatttgtttaccccccacgatgctgctcttggagagtcccaggggacaggtttcaagcccttagggatgcagcctgtctaacttaatatgcacagccgttcacatccagggcacagaggcagcctggctttccctggaggcccacggggaccacaatgctgcatttgtctgtggaactgagatttagctgcacattcttgcctgaatgcagcgggcctccagccacagcctgctggcatgggggattccaggagggatgtgcttcatgagccggcaattgcccttctttccagtccccagacccagtcaagattacagatagatgcgttcatcgcgcgcaggtgctggggaagccagtgggacatcactggctacattcaccaacaggattttccaactgcagtatttatcggtttttcaaacgaattcaacatctgtattcctcacccatttactgagtggctacaatgtgtaaggaaatattctcagtcatggggagttagaaaaggtccaaaggcatataagatatggcatgtgctctggagagaactcatcatctatccagaacctactcatcacttttggaacgagaagagaactagcttctatggaggacttaccatgtgccgattgtggtgtgagacatagtacgagtgttactcatttacgtctcatggccaacctcc

SEQ ID NO: 380467 - DNA, 1717 bp, Homo sapiens
gagcgaacatggcagcagaatgaggaggctggcgccgggtcgtggccgccgctgccgcgctgcagctcgggatcccagtccggcgcgctccgggccgcatccttagccggcctcctggcggccgcgggattatttcattcccaacggagagctagggagaaaggagactcccccgcggagcggttccgtgctctggcagggtgtagacgtttgtctgtgcgattcgccggctgcgcaaacgacgcgggagagagccggtcccgggctgcggcggcgcggccgcggggatgagccggccatggagcggccttggcggggcgcacgcagcggactggcgctgccgcgggagcgcagcctgagccggggctccagggggcttcgaagcctccggcgccctgggggggtccctgccgccgactccgggaaggacgcgagccccgcgtggcggacactgccgcagtcaccgttctgaggcgccccgagcttgctccgcctgcagctcggtgcgctctgggcacccgggcgccttgcccggtgcacggcggctggcgcaccgcggctagattggctacaggagcggggtgcaggactggctagaggtgggtgtgtgcgcgcgttggactggagatccgagcagaagcagaaccaggcggctctgagcagccatgcttcccggggtgggcgtgttcggcaccagcctcacggcccgtgtcatcatcccgctgctgaaagacgagggcttcgcggtgaaggcgctgtggggccgcacgcaggaagaagcggaggagctggccaaggagatgagtgtccccttctacactagccgcattgatgaggtgctgctgcatcaggacgtggacttggtgtgcattaacctgccgccgcccctcaccagacagatcgctgtcaaaaccctagaaccaggacatcagaggaagaaaatcagcagacagaaaaatactggggaaaaaaaaatgccacgtggttctgttcagctgagcttctgctccctccagcacccccacatgggacatttgtttaccccccacgatgctgctcttggagagtcccaggggacaggtttcaagcccttagggatgcagcctgtctaacttaatatgcacagccgttcacatccagggcacagaggcagcctggctttccctggaggcccacggggaccacaatgctgcatttgtctgtggaactgagatttagctgcacattcttgcctgaatgcagcgggcctccagccacagcctgctggcatgggggattccaggagggatgtgcttcatgagccggcaattgcccttctttccagtccccagacccagtcaagattacagatagatgcgttcatcgcgcgcaggtgctggggaagccagtgggacatcactggctacattcaccaacaggattttccaactgcagtatttatcggtttttcaaacgaattcaacatctgtattcctcacccatttactgagtggctacaatgtgtaaggaaatattctcagtcatggggagttagaaaaggtccaaaggcatataagatatggcatgtgctctggagagaactcatcatctatccagaacctactcatcacttttggaacgagaagagaactagcttctatggaggacttaccatgtgccgattgtggtgtgagacatagtacgagtgttactcatttacgtctcatggccaacctcc

SEQ ID NO: 380468 - DNA, 2626 bp, Homo sapiens
  misc_feature (1634)..(1634): n is a, c, g, or t
acttcataaagactctatgtggaggatagatgctaccgtggccgggctctcagccacgttcttctgcagtatgcagtagggaagggcacatttctcacatgccttcaccagattatagttttctgggagcaaagccaagtgctcccacctttgggtgctgacccaagaagagatattctgtgaacttctgctctttggttgggcaatctccgagagtcagttggttgggcatcggcaagaacgtcatctgcgaccgcacggccacgccgctggacgctttccgcatgacctcggccgcccactactaccccaagctcatgagcatcatgggcaacgtgctgcgcttcctgccggctttcgtgcgcatgaagcagctgatcgaggagggctacgtgggcgagccgctggtgtgtgaggtgcaggtgcacggcggcagcctgctgggcaagaagtacaactggagctgcgacgacttgatgggcggcggcggcctgcactccgtgggcacctacatcatcgacctgctcaccttcctcaccggccaaaaggccgtcaaggtccacgggctgctcaagaccttcgtgaagcagactgaccacatcaagggcatccgacagatcaccagcgatgacttctgcaccttccagatggtgctggagggcggggtgtgctgcaccgtcaccctcaacttcaacgtgcccggcgagttcaagcaggatgtcactgtggtgggctcagccgggcgcctgctggccgtgggcaccgacctgtacgggcagcgcaacagcgccccggagcaggagctgctggtgcaggacgccacgccggtgagcaactccctgcttccggagaaggccttcagcgacatcccctcgccctacctgcgcggcaccatcaagatgatgcaggcggtgcgccaggccttccaggaccaggacgaccggcgcacgtgggatgggcggcccctcaccatggccgccaccttcgacgactgcctgtatgccttgtgcgtggtggacaccatcaagaggtccagccagacgggcgagtggcagaacattgccatcatgaccgaggagccggagctgagccccgcctacctgatcagcgaggccatgcgccgcagcaggatgtccctctactgttagcacagattgagaacctcggggacttgagccttctgcaggggatgtccacagagagggaagggccgaggggagagggtgaccatggggaatgtggggatcagggaggtggagggacagtgtgaataaatggcatctaggaaggtaaactccaatcccggtgaccgaccccaaaccagactgttggtgggctgagctcctagcctggaagcattcaggagagcctgccattcctgggatgatccctgctgggtatttgcacgagagtggtttggtttagctgcctctgctgccctttactgtgacaagcaaggaggggttgcttccctccctacctcatccatcccacacaccttggccttctgcaagccaagtggttctgcaaggtcaaggcactagtatcagatggcaagctcagtgcccgggattcccactgctggcaggagaaggcccattttcacagtccacagaagcgtgttaggctggggntgggggtgggatgggctggtgagaaagttcaaattccaggaagccactttttattggatataaggtatctaacggcaaaagtacttagtagcaaagtggccaccttttgattgattgggcttcctcataggaagcactgagggtgtgtctttgtacttggttcattgcccttcacctggtagagaaagagaggtcagaaatagcaagcaaaaagcaggactcccaggagccacaagaaaagagcacaggctgcaccaaagcaggggcagcagagaataaaatatccctttgaacttgtcaacaattaaaaaactgcaaggagtcaccttataacactatttccagtaaaggtggaattgagtatcagagggattactgcggtgttaaggtagccctgccacgtggctctccaggcagggccaagaagacagcacaaagtatgggtttggccataagctcatatgctgcccccaaagactggggagagctgtgtgcctcagtgttgcagtgtgaattcctaaatagagggtaaagtgagcctagccaggaggtgtttggggctctatcgcgcatctctcctaccaagctgggcaagagcttttaggagattcatccagctttgtggatttagaaaggaagccttcagttccaatcagaatcctctttccttataaaaaaaaaaaaaaaaaaaaaaaaaaaaggattttccttagctccagcatttgctttcaggattctgacacctgagaatttgggggtaggtactaaacgaaacaaaacaaaaggacaacaaggaacattatttctagtgtttctaaaatgggggtttagaaccccttaaggggccatacttaggcttgaaaaggctaatgttggaaaaaacatgttcttctaattggtctgctgtctgtcttgtccttgcacactctgcttacagagttttgttagagatgctgaactgcaggctgggagcaggcagtgccaaaagggaa

SEQ ID NO: 380469 - DNA, 1169 bp, Homo sapiens
gagcgaacatggcagcagaatgaggaggctggcgccgggtcgtggccgccgctgccgcgctgcagctcgggatcccagtccggcgcgctccgggccgcatccttagccggcctcctggcggccgcgggattatttcattcccaacggagagctagggagaaaggagactcccccgcggagcggttccgtgctctggcagggtgtagacgtttgtctgtgcgattcgccggctgcgcaaacgacgcgggagagagccggtcccgggctgcggcggcgcggccgcggggatgagccggccatggagcggccttggcggggcgcacgcagcggactggcgctgccgcgggagcgcagcctgagccggggctccagggggcttcgaagcctccggcgccctgggggggtccctgccgccgactccgggaaggacgcgagccccgcgtggcggacactgccgcagtcaccgttctgaggcgccccgagcttgctccgcctgcagctcggtgcgctctgggcacccgggcgccttgcccggtgcacggcggctggcgcaccgcggctagattggctacaggagcggggtgcaggactggctagaggtgggtgtgtgcgcgcgttggactggagatccgagcagaagcagaaccaggcggctctgagcagccatgcttcccggggtgggcgtgttcggcaccagcctcacggcccgtgtcatcatcccgctgctgaaagacgagggcttcgcggtgaaggcgctgtggggccgcacgcaggaagaagcggaggagctggccaaggagatgagtgtccccttctacactagccgcattgatgaggtgctgctgcatcaggacgtggacttggtgtgcattaacctgccgccgcccctcaccagacagatcgctgtcaaaaccctagatgtcatcttgcagtttagtaggaccagagctccatgggggcaggtacctgggtggaatctctcctgcctgtcctgtcttgagatacctacacggaaggctggcacacgcccgagattagactgtcaacctcacaccggacacacacctcctctgctggccccagtattggatggcagtggttgccaagcaaccaggttatctgcactctcccggttactgagcagatacagaagacaggcctgcaactct

SEQ ID NO: 380470 - DNA, 1128 bp, Homo sapiens
ctacaagtcccagcgggctgctcgcgcaccgcgccacgtgttttctcctcccgccaatgggcggaagcgccgcctgagcctgctcccgccccccaggctcgcctgagccaatcggaaggggcggggtgtgtgtgtgtctgtgtgtgtttgtgtgttgtgtgtctgtgagtgtctgtgtgtgtgtatgtgtgcgcgagggcaagtcgggagggggacccagctcaggactgggaggccctgctcgcaggtccctgggtcccggtggcggccggagcgcttgctccgcaggcagcgggcgggtggtcgcccctcccgcccccaccccgcgcgtgcgcgccccggcctctccctccccgccaccctcctcggctcccgcgcggcggcggcggttcctctcccactccccccagccctggctccgggggaccccgcgatgccggtccgcaccgagtgtcccccgccggccggtgcctccgctgcctccgcggcctcactcatcccgccgccgcccatcaacacccagcagcccggcgtggccaccagcctgctctacagcggctccaagttccgcggccaccagaagagcaaggggaactcgtacgacgtagaggtggtgctgcagcacgtggacacgggaaactcttacctttgtgggtacttgaagattaaaggccttactgaggagtatccaacccttacaaccttcttcgaaggagaaataatcagcaaaaaacaccctttcttaactcgcaagtgggatgcagatgaagatgttgatcggaaacactggggcaagtttctggctttttatcagtatgcaaaatcatttaactcagatgactttgattatgaagagctgaagaatggagactacgtcttcatgaggtggaaggaacagtttctggtcccagatcacacgatcaaagacatcagtggtgcttcttttgccgggttctactacatctgctttcagaagtcagcagcctccatagagggctactactaccataggagttcagaatggtatcagtccctcaatctaacccatgttcctgaacacagtgcacccatctatgaattccggtgacaacggttcagaacagcaaccaaataaaactgaacttggca

SEQ ID NO: 380471 - DNA, 2276 bp, Homo sapiens
ctacaagtcccagcgggctgctcgcgcaccgcgccacgtgttttctcctcccgccaatgggcggaagcgccgcctgagcctgctcccgccccccaggctcgcctgagccaatcggaaggggcggggtgtgtgtgtgtctgtgtgtgtttgtgtgttgtgtgtctgtgagtgtctgtgtgtgtgtatgtgtgcgcgagggcaagtcgggagggggacccagctcaggactgggaggccctgctcgcaggtccctgggtcccggtggcggccggagcgcttgctccgcaggcagcgggcgggtggtcgcccctcccgcccccaccccgcgcgtgcgcgccccggcctctccctccccgccaccctcctcggctcccgcgcggcggcggcggttcctctcccactccccccagccctggctccgggggaccccgcgatgccggtccgcaccgagtgtcccccgccggccggtgcctccgctgcctccgcggcctcactcatcccgccgccgcccatcaacacccagcagcccggcgtggccaccagcctgctctacagcggctccaagttccgcggccaccagaagagcaaggggaactcgtacgacgtagaggtggtgctgcagcacgtggacacgggaaactcttacctttgtgggtacttgaagattaaaggccttactgaggagtatccaacccttacaaccttcttcgaaggagaaataatcagcaaaaaacaccctttcttaactcgcaagtgggatgcagatgaagatgttgatcggaaacactggggcaagtttctggctttttatcagtatgcaaaatcatttaactcagatgactttgattatgaagagctgaagaatggagactacgtcttcatgaggtggaaggaacagtttctggtcccagatcacacgatcaaagacatcagtggtgcttcttttgccgggttctactacatctgctttcagaagtcagcagcctccatagagggctactactaccataggagttcagaatggtatcagtccctcaatctaacccatgttcctgaacacagtgcacccatctatgaattccggtgacaacggttcagaacagcaaccaaataaaactgaacttggcaaaaaagaactttgccgagaaaattgtgtacctgccagaaccaggagaagtgtgttcctgtttcttcacgagcagactcgcatcacaaagcatgaatgttaacccacagaatccaaggagcatggctggcccgtggggcaggtggagggagcagtcttcgttcttcctcccctcagtggcagtttggtcttcacctgtttttaagctaccttaaacgcacttttccttcctgcacagctaacttctacatcactgaaatgcccattccttcctccgtcccacctccagccgaatagaaggtctgctcccggatcaccctcagccttggtgctcagtggtcccgaggccctagacccccaccccccgccagttgctttgtctggtagctcaagagaaggcagagccccagcacctctgtgccccccagagctctgtgcagggagttggccagctgccgcatcatcggccaccaagggcacaagaggcggaggctccagtccctgctgggctgcctcagtcttcagtgctgattgtgtcacgggtcagcgtgcgctgctgagccctgtactgttaacagtgcaaagctagtgagtagctgtcaggttccctgggcctgccatcagggatcactaaatttaaggcttccagatccctggcaggaacagattccagtcctgcttactcagtacatttgctccaaacttttcaacttgagggcaatactaaacttaaaaataagagtttttttattacaaaattatttttatggtccctttaacgaggaccctatggcaaatgcacaattattcagaattacattttatcgttttcacattgaaaacagcaaatgttgacttagtaatttttatatcgatatctatatgtatatgtatatttaatcaaccagcagttttgaaactagtcatcctggtacaaaagttttgcagcattgcctaaattatagtgctcaacacaagaactgtttttggggccagtttagcatttgtgccgcctccttttgctactcaaaacagcaatgcttggcggcagccttccatgaggcagaaggggtcgtcgttctctgaaaacagtgactctgaaatgttgggacaggggaaggggtgggaaacatgaacatgctcaaataac

SEQ ID NO: 380472 - DNA, 1923 bp, Homo sapiens
aaggtactgaggctgggtgtttcgtgcggggtggggttcctctcccactccccccagccctggctccgggggaccccgcgatgccggtccgcaccgagtgtcccccgccggccggtgcctccgctgcctccgcggcctcactcatcccgccgccgcccatcaacacccagcagcccggcgtggccaccagcctgctctacagcggctccaagttccgcggccaccagaagagcaaggggaactcgtacgacgtagaggtggtgctgcagcacgtggacacgggaaactcttacctttgtgggtacttgaagattaaaggccttactgaggagtatccaacccttacaaccttcttcgaaggagaaataatcagcaaaaaacaccctttcttaactcgcaagtgggatgcagatgaagatgttgatcggaaacactggggcaagtttctggctttttatcagtatgcaaaatcatttaactcagatgactttgattatgaagagctgaagaatggagactacgtcttcatgaggtggaaggaacagtttctggtcccagatcacacgatcaaagacatcagtggtgcttcttttgccgggttctactacatctgctttcagaagtcagcagcctccatagagggctactactaccataggagttcagaatggtatcagtccctcaatctaacccatgttcctgaacacagtgcacccatctatgaattccggtgacaacggttcagaacagcaaccaaataaaactgaacttggcaaaaaagaactttgccgagaaaattgtgtacctgccagaaccaggagaagtgtgttcctgtttcttcacgagcagactcgcatcacaaagcatgaatgttaacccacagaatccaaggagcatggctggcccgtggggcaggtggagggagcagtcttcgttcttcctcccctcagtggcagtttggtcttcacctgtttttaagctaccttaaacgcacttttccttcctgcacagctaacttctacatcactgaaatgcccattccttcctccgtcccacctccagccgaatagaaggtctgctcccggatcaccctcagccttggtgctcagtggtcccgaggccctagacccccaccccccgccagttgctttgtctggtagctcaagagaaggcagagccccagcacctctgtgccccccagagctctgtgcagggagttggccagctgccgcatcatcggccaccaagggcacaagaggcggaggctccagtccctgctgggctgcctcagtcttcagtgctgattgtgtcacgggtcagcgtgcgctgctgagccctgtactgttaacagtgcaaagctagtgagtagctgtcaggttccctgggcctgccatcagggatcactaaatttaaggcttccagatccctggcaggaacagattccagtcctgcttactcagtacatttgctccaaacttttcaacttgagggcaatactaaacttaaaaataagagtttttttattacaaaattatttttatggtccctttaacgaggaccctatggcaaatgcacaattattcagaattacattttatcgttttcacattgaaaacagcaaatgttgacttagtaatttttatatcgatatctatatgtatatgtatatttaatcaaccagcagttttgaaactagtcatcctggtacaaaagttttgcagcattgcctaaattatagtgctcaacacaagaactgtttttggggccagtttagcatttgtgccgcctccttttgctactcaaaacagcaatgcttggcggcagccttccatgaggcagaaggggtcgtcgttctctgaaaacagtgactctgaaatgttgggacaggggaaggggtgggaaacatgaacatgctcaaataac

SEQ ID NO: 380473 - DNA, 1185 bp, Homo sapiens
ctacaagtcccagcgggctgctcgcgcaccgcgccacgtgttttctcctcccgccaatgggcggaagcgccgcctgagcctgctcccgccccccaggctcgcctgagccaatcggaaggggcggggtgtgtgtgtgtctgtgtgtgtttgtgtgttgtgtgtctgtgagtgtctgtgtgtgtgtatgtgtgcgcgagggcaagtcgggagggggacccagctcaggactgggaggccctgctcgcaggtccctgggtcccggtggcggccggagcgcttgctccgcaggcagcgggcgggtggtcgcccctcccgcccccaccccgcgcgtgcgcgccccggcctctccctccccgccaccctcctcggctcccgcgcggcggcggcggttcctctcccactccccccagccctggctccgggggaccccgcgatgccggtccgcaccgagtgtcccccgccggccggtgcctccgctgcctccgcggcctcactcatcccgccgccgcccatcaacacccagcagcccggcgtggccaccagcctgctctacagcggctccaagttccgcggccaccagaagagcaaggggaactcgtacgacgtagaggtggtgctgcagcacgtggacacgggaaactcttacctttgtgggtacttgaagattaaaggccttactgaggagtatccaacccttacaaccttcttcgaaggagaaataatcagcaaaaaacaccctttcttaactcgcaagtgggatgcagatgaagatgttgatcggaaacactggaacattggaagatatctggatctgcagactctgctagactggactgaaacattttggggcaagtttctggctttttatcagtatgcaaaatcatttaactcagatgactttgattatgaagagctgaagaatggagactacgtcttcatgaggtggaaggaacagtttctggtcccagatcacacgatcaaagacatcagtggtgcttcttttgccgggttctactacatctgctttcagaagtcagcagcctccatagagggctactactaccataggagttcagaatggtatcagtccctcaatctaacccatgttcctgaacacagtgcacccatctatgaattccggtgacaacggttcagaacagcaaccaaataaaactgaacttggca

SEQ ID NO: 380474 - DNA, 440 bp, Homo sapiens
taatcagcaaaaaacaccctttcttaacttgccccagtgtttccgatcaacatcttcatctgcatcccacttgcgagttaagatgttgatcggaaacactggggcaagtttctggctttttatcagtatgcaaaatcatttaactcagatgactttgattatgaagagctgaagaatggagactacgtcttcatgaggtggaaggaacagtttctggtcccagatcacacgatcaaagacatcagtggtgcttcttttgccgggttctactacatctgctttcagaagtcagcagcctccatagagggctactactaccataggagttcagaatggtatcagtccctcaatctaacccatgttcctgaacacagtgcacccatctatgaattccggtgacaacggttcagaacagcaaccaaataaaactgaacttggca

SEQ ID NO: 380475 - DNA, 1231 bp, Homo sapiens
ctacaagtcccagcgggctgctcgcgcaccgcgccacgtgttttctcctcccgccaatgggcggaagcgccgcctgagcctgctcccgccccccaggctcgcctgagccaatcggaaggggcggggtgtgtgtgtgtctgtgtgtgtttgtgtgttgtgtgtctgtgagtgtctgtgtgtgtgtatgtgtgcgcgagggcaagtcgggagggggacccagctcaggactgggaggccctgctcgcaggtccctgggtcccggtggcggccggagcgcttgctccgcaggcagcgggcgggtggtcgcccctcccgcccccaccccgcgcgtgcgcgccccggcctctccctccccgccaccctcctcggctcccgcgcggcggcggcggttcctctcccactccccccagccctggctccgggggaccccgcgatgccggtccgcaccgagtgtcccccgccggccggtgcctccgctgcctccgcggcctcactcatcccgccgccgcccatcaacacccagcagcccggcgtggccaccagcctgctctacagcggctccaagttccgcggccaccagaagagcaaggggaactcgtacgacgtagaggtggtgctgcagcacgtggacacgggaaactcttacctttgtgggtacttgaagattaaaggccttactgaggagtatccaacccttacaaccttcttcgaaggagaaataatcagcaaaaaacaccctttcttaactcgcaagtgggatgcagatgaagatgttgatcggaaacactggggcaagtttctggctttttatcagtatgcaaaatcatttaactcagatgactttgattatgaagagctgaagaatggagactacgtcttcatgaggtggaaggaacagtttctggtcccagatcacacgatcaaagacatcagtggtgcttcttttgccgggttctactacatctgctttcagaagtcagcagcctccatagagggctactactaccataggagttcagaatggtgaggacctctgaggacagaggccacggggagggcttgctgcccagctggctctcccttggctcatcaaacccaaaagcaacatcttagcctgtctctgtatagattctgtgctttatttggatgctgagagcttatttcagtgatctcagttgctcacaataaggccttatccctatgcacagagcagagtaaatgagatgaaaat

SEQ ID NO: 380476 - DNA, 5193 bp, Homo sapiens
tgggaatccaactgaagagcagccagaggagagctgaagagaggagggggaggccgatgacctgggctctgggcctctgaaggtctggcgtattctgacaggacacagtgagcatctgtagaggagaggcttgaaataaaggaggagcacgaatattccctggatttctggaggcctgctttaaggctggccagttctgcaagaaaggcaaggaggaggagactggctcacacctctggaggacccccttctgtcagctgtggggcttgacactacttgaacaagaaaaggagggggaaactgcaccacataagtgaagatccacctccagtggctgctctgctggtggtggggttgctgctgacaaccaccctcaacgggtctgcacccatccaggaaatctctgtcttcctcaagcttggttgtgcctgttctacactctatctgtattattgaattactgactgagactgtgtttgggaaggaggctgagtgactactggactggatattgactctaactcttgtttccaagcttatatcctcaatcacctaaagatcagagtgtgaagaaacaaacctgtgacagatctgtggttgaggtttagactgggggaggagtatagtactggactttctttgtaacttgtaccatgactggggcagagattgagtctggtgcccaggtcaagcctgaaaagaagcctggggaagaggttgtaggtggggctgagatagagaatgatgtccctctggtggtcagacccaaggttaggacccaggcccagataatgcctggggcaaggcccaagaataagtccaaggttatgcctggagcaagcaccaaagttgagacaagtgcagtgggtggggcacgccctaagagtaaggccaaggcaatacctgtttcacgatttaaggaagaagcccagatgtgggctcagcccaggtttggtgctgaaagattgtctaagacagagagaaactcccagaccaatatcatagcctctccacttgtcagtactgattctgtcttggttgctaaaacaaagtacctgtctgaggatagagaactggttaatacagacactgagagctttcctagaaggaaggcccattaccaagcaggattccagccttcttttaggtcaaaggaggagaccaatatggggtcctggtgctgtcctaggcctacatccaaacaagaagcctctcctaattctgatttcaaatgggtagacaaatctgtgagttccttgttctggagtggagatgaggtcactgcaaaatttcatcctgggaatagggtaaaagacagtaacagatccatgcacatggccaatcaagaggctaataccatgtctaggtcccaaactaaccaggagctctatattgcatctagttctggttctgaggatgagtctgttaagacaccctggttctgggccagagataaaaccaatacctggtctgggcccagggaagatcccaatagcaggtccaggtttaggtctaagaaagaagtctatgttgaatcaagttctggatctgagcatgaagaccatttggagtcctggtttggggctggaaaggagggcaaattcaggtccaaaatgagagctgggaaggaggccaataacagggccaggcacagggccaagcgagaagcttgcattgatttcatgcctgggtctatagatgtaattaaaaaagagtcctgtttctggcctgaagaaaatgctaataccttttcaaggcccatgatcaagaaagaggccagggccagagcaatgacaaaggaagaggccaaaaccaaggcccgagccagggccaagcaagaagccaggtcagaggaggaagccctcattgggacctggttctgggctacagacgagtccagcatggcagatgaagccagcatagagtccagtctacaagtggaggatgagtccataattgggagttggttctggactgaagaagaggccagtatggggactggggctagcagtaaatccagaccaaggactgatggggagcgtattggtgattccttatttggggctagggaaaagaccagtatgaaaactggggctgaggccacctctgaatctatactagcagctgatgatgaacaggtcattattggttcctggttctgggctggtgaagaggtcaaccaagaggctgaggaagagaccatttttgggtcgtggttctgggtcattgatgcggccagtgtggaatctggtgttggggtcagctgtgagtccaggacaaggtctgaggaagaagaggtcattggtccctggttttggtctggagaacaagttgatatagaggctggaatcggagaagaggccaggccaggagctgaagaagagacaatattcgggtcctggttttgggctgaaaaccagacctatatggattgtagggctgaaactagctgtgacaccatgcaaggggctgaggaggaggagcccattattgggtcctggttttggaccagagtagaagcttgtgtggagggtgatgtcaacagcaagtctagcctggaggacaaggaagaggccatgataccatgttttggagccaaagaagaggtcagtatgaagcatgggactggtgtcagatgcagatttatggcaggggctgaggagaccaataataagtcttgcttctgggcagaaaaagaaccctgtatgtatcctgccggtggaggaagttggaagtctaggccagaggaggaagaggacattgtcaattcgtggttctggtccagaaaatacacaaagccagaggccattatagggtcctggttatgggctacagaagagagtaatatagatgggactggagaaaaggccaagttactgactgaagaggagaccataatcaattcctggttctggaaagaagatgaagccatttcagaggctactgacagagaagagtccaggccagaagctgaggagggggacattattggttcttggttctgggctggagaagaggacagactagagccagctgctgagactagagaagaagacaggctagcagctgagaaagaaggtattgttgggtcctggtttggggccagagaagagaccattagaagagaggctgggtcttgcagcaaatccagtcctaaagctgaagaggaagaagtcattattgggtcctggttctgggaagaagaggccagtccggaggcagtggcaggagtcggctttgagtcaaagcctgggactgaggaggaagaaatcactgttgggtcctggttctggcctgaagaagaagccagtatacaggctggatctcaggcagtagaggaaatggagtcagagactgaagaggaaaccatttttgggtcctggttctgggatggaaaagaagtcagtgaagaagcaggaccatgctgtgtatccaagccagaggatgatgaagagatgattgttgagtcctggttctggtctagagacaaagccattaaggaaactggaactgtggccacctgtgagtccaagccagaaaatgaggaaggggccattgttgggtcttggtttgaggctgaagatgaggtagataacaggactgacaatggaagcaactgtgggtccaggacattagctgatgaagatgaggccatagtggggtcctggttctgggcaggagatgaggcccattttgaatcaaatcctagccccgtgttcagggccatttgcaggtccacgtgttcagttgaacaggagcctgatccttcacgcaggcctcagagttgggaggaggtcactgttcagttcaagcctggtccatggggtagggtcggcttcccatctataagcccctttagatttccgaaagaggcagcatctttattctgtgaaatgtttgggggcaaacccaggaacatggtacttagcccagaaggggaagatcaggaatctttgcttcagcctgatcagcctagtcctgagttcccatttcagtatgatccttcctacaggtcagtccaggaaattcgagagcatcttagggccaaggagagtacagagcctgagagttcatcctgtaactgcatacaatgtgagctgaaaattggttctgaagagtttgaagaactccttttattaatggaaaaaattcgggatccttttattcatgaaatatctaaaatcgcaatgggtatgagaagtgcttctcaatttacccgagatttcattcgagattcaggtgttgtctcacttattgaaaccttgcttaattatccgtcctcccgagttagaacaagttttttggaaaatatgattcgcatggccccaccttatccgaatctaaacataattcagacatacatatgtaaagtgtgtgaggaaacccttgcttatagcgtggattccccggaacagctgtctggaataaggatgattagacatctcactactactactgactatcacacactggttgccaattatatgtctgggtttctctccttattagctacaggcaatgccaaaacaaggtttcatgttttgaaaatgctactgaatttgtctgaaaatcttttcatgacaaaagaactactcagtgctgaagcagtgtcagaatttataggcctctttaacagggaagagacaaatgacaatattcaaattgttcttgcaatatttgagaatattggcaacaatatcaaaaaagaaacagtgttctctgatgatgatttcaatattgagccgcttatttctgcattccacaaagttgagaaatttgctaaggaactgcaaggcaaaacagacaatcaaaatgaccctgaaggggaccaagaaaattagtaatggttaattgctggcctcagattgtccttatgttcctgagttatgatccttgagtaatgctttgattttaatagttggttctgtgttgcaacatatatctttagtgctgacactaactttgtccaactctgtctgtaagctggagcatttttctgatgccagctgaatattagagctgaaaacacatttgttgatatttgtcttgtccacattgtgatgttcagtatttgagcttatagtgaactgagcaatcataaataagccacccttctgattgtcgttctactgtatatatatatatatttgagtgttgtttgtgtttcaataaagtcctatgttaaagttggca

SEQ ID NO: 380477 - DNA, 601 bp, Homo sapiens
ggagaggcttgaaataaaggaggagcacgaatattccctggatttctggaggtgtgtggggatgtggggtgggtgccaaacactggagaaccgaatcggggtgggggactgcgaccagagcaggtcaggcatccaggagcacctcttaatcttcccctctctaatggtgttccaggcgcttcccccaccttccatccccatctgcctcccccaccgtcctaaactgggggcttgaaagggtgagctttggaggtaggggtgatgagggagacatactgacaagtaccaattcacgacctgttttctagaatatgtggcgcccttcccccattttctgctgcgcagagcaaggggatgtggcgcacctagtggtgaatcctcagaattggagaagggagtaatgagaagagtatgacgtcaagagaaggagttgttatctctagaaccttgaagcagggcctaaacaaaacgagaatattccaccagcaaaaccccgaatgttgaaagacagatatcaataatatggggattcttatccttagcgttggtctctctaccaagggctttactgccacccctcatttcctgtcttactttttca

SEQ ID NO: 380478 - DNA, 357 bp, Homo sapiens
ttcaacatcagtctcactgcatatgtctctgcatgggatgacataattggaagagactcaaagccccatttcattctctctccctagatccacctccagtggctgctctgctggtggtggggttgctgctgacaaccaccctcaacgggtctgcacccatccaggaaatctctgtcttcctcaagcttggttgtgcctgttctacactctatctgtattattgaattactgactgagactgtgtttgggaaggaggctgagtgactactggactggatattgactctaactcttgtttccaagcttatatcctcaatcacctaaagatcagagtgtgaagaaacaaacctgtgacag

SEQ ID NO: 380479 - DNA, 5821 bp, Homo sapiens
tgggaatccaactgaagagcagccagaggagagctgaagagaggagggggaggccgatgacctgggctctgggcctctgaaggtctggcgtattctgacaggacacagtgagcatctgtagaggagaggcttgaaataaaggaggagcacgaatattccctggatttctggaggcctgctttaaggctggccagttctgcaagaaaggcaaggaggaggagactggctcacacctctggaggacccccttctgtcagctgtggggcttgacactacttgaacaagaaaaggagggggaaactgcaccacataagtgaagatccacctccagtggctgctctgctggtggtggggttgctgctgacaaccaccctcaacgggtctgcacccatccaggaaatctctgtcttcctcaagcttggttgtgcctgttctacactctatctgtattattgaattactgactgagactgtgtttgggaaggaggctgagtgactactggactggatattgactctaactcttgtttccaagcttatatcctcaatcacctaaagatcagagtgtgaagaaacaaacctgtgacagatctgtggttgaggtttagactgggggaggagtatagtactggactttctttgtaacttgtaccatgactggggcagagattgagtctggtgcccaggtcaagcctgaaaagaagcctggggaagaggttgtaggtggggctgagatagagaatgatgtccctctggtggtcagacccaaggttaggacccaggcccagataatgcctggggcaaggcccaagaataagtccaaggttatgcctggagcaagcaccaaagttgagacaagtgcagtgggtggggcacgccctaagagtaaggccaaggcaatacctgtttcacgatttaaggaagaagcccagatgtgggctcagcccaggtttggtgctgaaagattgtctaagacagagagaaactcccagaccaatatcatagcctctccacttgtcagtactgattctgtcttggttgctaaaacaaagtacctgtctgaggatagagaactggttaatacagacactgagagctttcctagaaggaaggcccattaccaagcaggattccagccttcttttaggtcaaaggaggagaccaatatggggtcctggtgctgtcctaggcctacatccaaacaagaagcctctcctaattctgatttcaaatgggtagacaaatctgtgagttccttgttctggagtggagatgaggtcactgcaaaatttcatcctgggaatagggtaaaagacagtaacagatccatgcacatggccaatcaagaggctaataccatgtctaggtcccaaactaaccaggagctctatattgcatctagttctggttctgaggatgagtctgttaagacaccctggttctgggccagagataaaaccaatacctggtctgggcccagggaagatcccaatagcaggtccaggtttaggtctaagaaagaagtctatgttgaatcaagttctggatctgagcatgaagaccatttggagtcctggtttggggctggaaaggagggcaaattcaggtccaaaatgagagctgggaaggaggccaataacagggccaggcacagggccaagcgagaagcttgcattgatttcatgcctgggtctatagatgtaattaaaaaagagtcctgtttctggcctgaagaaaatgctaataccttttcaaggcccatgatcaagaaagaggccagggccagagcaatgacaaaggaagaggccaaaaccaaggcccgagccagggccaagcaagaagccaggtcagaggaggaagccctcattgggacctggttctgggctacagacgagtccagcatggcagatgaagccagcatagagtccagtctacaagtggaggatgagtccataattgggagttggttctggactgaagaagaggccagtatggggactggggctagcagtaaatccagaccaaggactgatggggagcgtattggtgattccttatttggggctagggaaaagaccagtatgaaaactggggctgaggccacctctgaatctatactagcagctgatgatgaacaggtcattattggttcctggttctgggctggtgaagaggtcaaccaagaggctgaggaagagaccatttttgggtcgtggttctgggtcattgatgcggccagtgtggaatctggtgttggggtcagctgtgagtccaggacaaggtctgaggaagaagaggtcattggtccctggttttggtctggagaacaagttgatatagaggctggaatcggagaagaggccaggccaggagctgaagaagagacaatattcgggtcctggttttgggctgaaaaccagacctatatggattgtagggctgaaactagctgtgacaccatgcaaggggctgaggaggaggagcccattattgggtcctggttttggaccagagtagaagcttgtgtggagggtgatgtcaacagcaagtctagcctggaggacaaggaagaggccatgataccatgttttggagccaaagaagaggtcagtatgaagcatgggactggtgtcagatgcagatttatggcaggggctgaggagaccaataataagtcttgcttctgggcagaaaaagaaccctgtatgtatcctgccggtggaggaagttggaagtctaggccagaggaggaagaggacattgtcaattcgtggttctggtccagaaaatacacaaagccagaggccattatagggtcctggttatgggctacagaagagagtaatatagatgggactggagaaaaggccaagttactgactgaagaggagaccataatcaattcctggttctggaaagaagatgaagccatttcagaggctactgacagagaagagtccaggccagaagctgaggagggggacattattggttcttggttctgggctggagaagaggacagactagagccagctgctgagactagagaagaagacaggctagcagctgagaaagaaggtattgttgggtcctggtttggggccagagaagagaccattagaagagaggctgggtcttgcagcaaatccagtcctaaagctgaagaggaagaagtcattattgggtcctggttctgggaagaagaggccagtccggaggcagtggcaggagtcggctttgagtcaaagcctgggactgaggaggaagaaatcactgttgggtcctggttctggcctgaagaagaagccagtatacaggctggatctcaggcagtagaggaaatggagtcagagactgaagaggaaaccatttttgggtcctggttctgggatggaaaagaagtcagtgaagaagcaggaccatgctgtgtatccaagccagaggatgatgaagagatgattgttgagtcctggttctggtctagagacaaagccattaaggaaactggaactgtggccacctgtgagtccaagccagaaaatgaggaaggggccattgttgggtcttggtttgaggctgaagatgaggtagataacaggactgacaatggaagcaactgtgggtccaggacattagctgatgaagatgaggccatagtggggtcctggttctgggcaggagatgaggcccattttgaatcaaatcctagccccgtgttcagggccatttgcaggtccacgtgttcagttgaacaggagcctgatccttcacgcaggcctcagagttgggaggaggtcactgttcagttcaagcctggtccatggggtagggtcggcttcccatctataagcccctttagatttccgaaagaggcagcatctttattctgtgaaatgtttgggggcaaacccaggaacatggtacttagcccagaaggggaagatcaggaatctttgcttcagcctgatcagcctagtcctgagttcccatttcagtatgatccttcctacaggtcagtccaggaaattcgagagcatcttagggccaaggagagtacagagcctgagagttcatcctgtaactgcatacaatgtgagctgaaaattggttctgaagagtttgaagaactccttttattaatggaaaaaattcgggatccttttattcatgaaatatctaaaatcgcaatgggtatgagaagtgcttctcaatttacccgagatttcattcgagattcaggtgttgtctcacttattgaaaccttgcttaattatccgtcctcccgagttagaacaagttttttggaaaatatgattcgcatggccccaccttatccgaatctaaacataattcagacatacatatgtaaagtgtgtgaggaaacccttgcttatagcgtggattccccggaacagctgtctggaataaggatgattagacatctcactactactactgactatcacacactggttgccaattatatgtctgggtttctctccttattagctacaggcaatgccaaaacaaggtttcatgttttgaaaatgctactgaatttgtctgaaaatcttttcatgacaaaagaactactcagtgctgaagcagtgtcagaatttataggcctctttaacagggaagagacaaatgacaatattcaaattgttcttgcaatatttgagaatattggcaacaatatcaaaaaagaaacagtgttctctgatgatgatttcaatattgagccgcttatttctgcattccacaaagttgagaaatttgctaaggaactgcaaggcaaaacagacaatcaaaatgaccctgaaggggaccaagaaaattagtaatggttaattgctggcctcagattgtccttatgttcctgagttatgatccttgagtaatgctttgattttaatagttggttctgtgttgcaacatatatctttagtgctgacactaactttgtccaactctgtctgtaagctggagcatttttctgatgccagctgaatattagagctgaaaacacatttgttgatatttgtcttgtccacattgtgatgttcagtatttgagcttatagtgaactgagcaatcataaataagccacccttctgattgtcgttctactgtatatatatatatatttgagtgttgtttgtgtttcaataaagtcctatgttaaagttggcagaaatcacccttcttcttgaaattaaaatacagacccaatgataacacatgaacacacatagagataattaatatatgaataatatgttcctttcaaaagtttttttctcagctttaaacgcaaaaattaccaggggctgctatgtagggcatacttcagagaaaaagtagctacttcggttggactctgaagtttgggaaagatattggtggtgtaaaaaaaaaaaaaagcatggagttaggaaaaattttcctatgggagtgaggtatcctgtttgcctagagtgagtgagaggaatatattgagcaacatagaggatgacataagttttaaagagctgaggatttgcattttacagctcaaagtacaactgctgcttccatactacctaaagggcaaaagaataagacaggaaagcatagggatttgattgagtcaggaagacaatttaatcatgatggtaccatggtaagtgttaaggcaacatcatacagccattaaacatgatgatgtatagggttttaggaaaagccctgacatttttgatatttcatataatagagaacactggtgtcatacatgggaagtatgatcccatttgaaaaataaatgtgaataaattgacca

SEQ ID NO: 380480 - DNA, 417 bp, Homo sapiens
aggcgcggtggcacggctgtagtcccacctactcgggaggctgagtcaggagaatcactggaacctggtaagcagaggttgcagtgagccaagatcacgccactgcactccagcttgggtgacagagtaagactgtctcaaaaataaaataaaataaaaggctcctattgttcctaacttaggagcagggatcaggcctatcattctagcatcatctaacaaagttccacaaacagagcaaccagatatccaagatctttgatcttaatatcaaattcatatattgtcttttttctataaaactttgaaatgtctcagaaatcccagtattttggcattcacactactgtcctggggtcttattcagtggtttagagaccactcgcatatgtgtatacagtatttctcaatgaatcc

SEQ ID NO: 380481 - DNA, 385 bp, Homo sapiens
ggccctctctcccacagtggaatggtgcctggaagcagccatgtggccagggggaggtgggagagcccctgaggggagggagatgtgggctggagttgtgtctctgtccttcagatccctctcagaatcccacaaaaagaatgttttcagcagatgataaaactgactgtttttagtgcagcaactcatatgatggtccagcttgctaaacatcacacttgtattgtcattttttcctattttttctaggtttgggatatagtgtcacacacttgtgttatttttacatgtcaagatgatggcattcatagaacaatgcatttgcttctaaatttggagtataattttaaactaagacaataaagtcaatctgttttgtatcaca

SEQ ID NO: 380482 - DNA, 446 bp, Homo sapiens
gagaaattgatttcctctcccaaagagctaactttgccatttctgcatgcaaatgtgccctaagagtacctgcaaacaaagttgtaatttttccctgaaactcatgtttggttcttttcaaatgagtggttgttgcccttgagctctgcacatgctttatgtcaatccagaaatgtggcaggttttttcttttttttgtttgtttgttttgttttgttttgttttgagatggaatcttgctctgtcacacaggctggagtgcagtggcgcgatcttggctcactgcaagctccgccttccgggttcacgccgtctctactaaaaatacaaaaatcacccgggtgtggtggcaggcactgtagtccagctacccgggaggctgaggcaggagaatcacttgaacctgggaggtggaggttgcggtgagctgagatcacaccactgta

SEQ ID NO: 380483 - DNA, 253 bp, Homo sapiens
ggaataaaggagacccattttaaaagggggtcagaaaaggcctttctgcaaaaatgacatttaaactgagacctaaaaactgagaaggagccgggcgtggtggctcacgcctgtaatcctagcactttgggaggctgaggcgggcggatcacaaggtcaagagatcgagaccatcctggctaacatggtgaaaccccatctctactaaaaatacaaaaaattagccgggtgtggtggcgggcacctgtagttc

SEQ ID NO: 380484 - DNA, 480 bp, Homo sapiens
ccatacatactctgtacatgtataatttctcataacatttggaaccaggtggtgtttttgagggaatttaaaagaaatgaaacgttaagatagtttagcgacaaatgaactcatggagataggaagtagaatgatggtcagcagaggctgggaaaggtagtgggggcgggaatgggggggaagatgaggtggttaatgggtacaaaattagaaagaatgagtaagatgtctgccgggcgcggtggcttacacctgtaatcccagcactttgggaggccaaggcgggtggatcccttgaggttaggagttacagaccagcctgaccaatgtggtgaaaccctgcctctactaaaaacacaaaaattagctgggcgtggtggctggcacctgtaatcctagctactcgggaggctgaggcaggagaattgcttgaacccaggaggtggaagttgcgtgagctgagatcacgtcgctgcactc

SEQ ID NO: 380485 - DNA, 315 bp, Homo sapiens
cttgaagccatccagcctgaaaaggaaagtgttgatttcttgcctaccctgtctcagccagacgcagcagaattaggaggctccagggcaacatcaccgcttctctcctgtgggcatgtttctagcagaagtattctgacacatctatgcaagcatttgacaaggaggttgtgaaatgggaggtccagagggctgtgcctttaaactaagcccctggggggtgttaaaatggtcccaacctgccccaaagagcgcataataaaattttctcatcagattttggttctcacgcaccatacttaggtttgcacttcc

SEQ ID NO: 380486 - DNA, 1061 bp, Homo sapiens
  misc_feature (1)..(1): n is a, c, g, or t
  misc_feature (3)..(5): n is a, c, g, or t
  misc_feature (699)..(699): n is a, c, g, or t
ngnnnaagaaaccttaacattatctattcaaaataagttttttcagaaactgtgttgcacattggtgtacatctctttaaatagatttcaccttggcattcacactttgtctggctctgtgtgtgttagggttggggtagggggagcattgttaatgcccaaatcctttccaagtctcatcagtgaatagtctgggggaaggagggttgggaatgtgtatattgaacaaaatcctctaaatgattctgacttgcctctgggttgaaaatcaatttaacaatactatgtgttttctgaagtaaaagtcacacttaaagtaactggtgatcttggaaatttttaccaaggatactgactaatgagatggcctaccccaaatccagaatttaacttaaattccacctccccctgttttccttaaactaatctctcaccatattttccaaaaatgttatacttttcttctcatatgtactgcaatttgtcttgcattgtatttatctttgtgatttcagctagtatatggactcatggatgtctgatggggaggagggtggagaatctataagttttttcatctttctaatctttattatgctttagtcaatagtatatattcaataaatgctgaatgaattggattaaatataaaacattaaatgttatgaaaagtatgcttaattttcaaattatcaaatnattctctctattgaagggaaatcaatggtgtttttcaactttgaactgaaactctaaactatatgaaatcataacaatgtgaaattttaaacagtattattcttcataaaacagtaatataggctttaattcacaagaactgcaatggggtctcatcctttaagcagtcatttttaatgttctaaccaaatccttatactaaaacagaaacaactgctgaatgtgataaagtaatggaaaatatagaaaaactcccattttctctatctcattgtgtgtgaaatcattcttaaaaagaatcacttccacttctatttgaatcaaaaatagccaatagggcaattctaactggttaaaaaaaa

SEQ ID NO: 380487 - DNA, 257 bp, Homo sapiens
gctgggtgtggtggtacacctgtaatcccagctatttgggaggctgaggcagaagaattgcttgaacccgggagacagagtttgcagtgagctgagattgcaccactgcgcaccaacctgggtgacagagtgagatgcagtctaaaaaaaaacttattaaaaaaatatattatatatatggaaataaacaataattaggaaataagaatttcttatttgtgcttagaatacacagtgaagtaaacagaaaaaaaaaa

SEQ ID NO: 380488 - DNA, 5555 bp, Homo sapiens
gtgatgagatataatgcatcctccagtccatgcacgcttcctcttgcaatttgggcatcattcctcagtggaaacctttaaaccctgaaatccaggaaaagaaaataaatacattatcatggacctgagggatttttacctgttggctgctctgattgcctgtttaaggctggattccgcaatagctcaagaacttatttacactattagagaggaattgcctgaaaatgtgcccataggaaacataccaaaggatctgaacatttctcacatcaatgctgccacagggaccagcgccagccttgtctacagactggtttctaaagctggggatgcccctttggtgaaagtatccagcagcactggggaaattttcacaacctccaacagaatagacagagaaaaactctgtgctggcgcctcatatgctgaggagaatgagtgtttctttgaacttgaggtggtgatcctccccaatgatttcttcaggctgatcaaaataaaaataattgtcaaggataccaatgataatgcccccatgtttccatctcctgtcatcaatatttccattccagaaaacactttgatcaacagccgctttccaattccatcagcaacagatcctgacacaggcttcaatggtgtacagcattatgaattgttaaatgggcagagtgtttttggactggatatcgtggaaactccagagggagagaagtggccacaactgattgttcagcaaaacttggatagagaacagaaagatacctatgtgatgaaaatcaaagtagaggatggaggcactccacagaaatccagtacggccatactgcaggtcacagtaagtgatgtaaatgacaacaggccagtgtttaaagagggtcaagtggaggtgcatattccagagaatgctcccgtaggtacctctgtaattcagctccatgccactgatgcagatataggcagtaatgctgaaatccggtacatttttggtgcccaggtcgcccctgcaaccaaaagactctttgctttaaataatactactgggctgattacagttcagaggtccttagatagagaggagacagccattcacaaagtgacagtgctggctagtgacggcagctccactcctgctcgagcaacggttaccatcaatgtcaccgatgtaaatgataaccctcctaatatagacctcaggtacattataagtcccatcaatggcaccgtgtatttatctgagaaagatcctgtcaatacaaagattgccctaattacagtttcagataaggacacagatgtgaatggcaaagtgatctgttttattgaaagagaggtcccatttcatttgaaggcggtatatgacaaccaatatttgttagagacctcttctttgttggactatgagggcaccaaagaattcagctttaaaattgttgcctctgattctgggaagcccagtttaaatcagactgccctggtaagggttaagcttgaggatgaaaatgacaacccaccaattttcaaccagcctgtaattgagctgtcagtttctgaaaacaaccgacgtgggttatacttaacaactattagtgccacagatgaagacagtgggaaaaatgcagacattgtttatcagcttggaccgaatgcctccttctttgatctggaccgaaaaacaggagttttgacagcctccagagtatttgacagagaagaacaagaacgattcatttttacagtaactgccagggataatgggacccctcccctccaaagccaagcggctgtgattgttactgttctggatgagaatgacaatagccccaagtttactcataatcattttcaattttttgtgtctgaggaatctgccaaagtatagtactgtggggggtaatcacagtgacagatgcagatgctgggagagaataaagctgtgactctttccattctaaatgacaatgataattttgtgttggatccctattctggagtcataaagtcaaatgtctcatttgatagagagcagcagagttcctacacttttgatgtcaaagccactgatggaggacaaccacctcgttcctctactgcaaaagtaactatcaacgtcatggatgtcaatgacaacagcccagttgtcatttctccaccgtctaatacttcctttaagttggtgcccctctcagccattcctggctccgtggtagcagaagtttttgcagtggatgttgacactggaatgaacgctgaactaaagtatactatagtgagtggaaacaataaaggcttattccggattgatccagtaacaggtaacattactctggaagaaaaaccagcacctactgatgtgggattgcatcgtttggtggtcaacataagtgacctggggtaccctaagtctttgcacacgcttgtgcttgtattcctttatgttaacgacactgctggaaatgcctcctatatctatgacttgatccgcaggactatggagaccccgttggacaggaacataggggatagtagccaaccctatcaaaatgaggactatctaaccatcatgattgccatcatcgccggtgccatggtggtcattgttgtgatcttcgtcaccgttctggtgcgctgtcgccatgcatcaaggttcaaagcagctcagaggagcaagcaaggtgccgaatggatgtccccaaaccaggagaacaagcaaaacaagaaaaagaaaagaaagaaaaggaagtctcccaaaagctctcttttgaactttgttactatcgaagagtccaaacccgatgatgcagttcatgaacctatcaatgggacaataagcctgccggctgaactggaggagcaaagtataggaagatttgactggggcccggcacctccaacaacattcaagcctaacagtcctgacctggccaagcactacaaatctgcttctccacagcctgcttttcatctcaaaccagacactccagtttccgtgaaaaagcaccacgtgattcaggaactccctttggacaacacctttgttgggggttgtgacaccctttctaaacgctcttccactagttcagatcacttcagtgcctcagagtgcagttcccaaggaggcttcaagacaaagggccccttacacaccagacagtcgcagcgccgtgttacgtttcatctccctgatggctcccaggaaagctgcagtgacagtggtctaggagaccatgagccggtgggtagtggaaccctgatctcacaccctcttcctctggttcagccacaggacgaattctatgaccaggcctctccggacaagaggactgaagcagatggcaactctgatcccaactctgatgggcctttgggtccccgaggattagctgaagctacagagatgtgcactcaagagtgcttggttttgggtcactctgataattgctggatgcctcctggcttgggtccatatcaacaccccaaatctcctctctcaacctttgcaccccagaaagaatgggtgaagaaggacaagcttgtgaatgggcacaccctgaccagagcctggaaagaagacagcaacaggaaccagttcaatgaccgtaagcagtatggctccaatgaaggccatttcaacaatggcagccacatgacagacattcctctggcaaatctgaagtcttataagcaagcaggaggtgctactgagagtcctaaggagcaccaactctaagaaaaggctatatgggacctaataactttaaatagacatgctaataccgtgtgcgtcagagctttatgtattcaatagatctctacaactatgccccttctagcagggatacctataactttgtgttagcaccatggagaatacaatgtttttgcaacatatgagagaagatagttctagccatgcaattttgtttactagaattgattacactctccagagatctctccattgtgcaaattttttttattattgcattttattttgaccctggactgctgctatgaacaatagaatatgcatttggaaagtaagaaagtttcatggattagagtgactgaaaaacatatccagttagaaaattgtgcttttttttttttttttttttgtcattgatttgtgctgggactgctatacttgacattatactgcaaacaaaacttaaagagataagcattaaacctattgtgctgttaacaacgttagtggacacttgtaagtcaatcagtgttaaagtatttgtaaatagaagcaagctattattaacaacttttgtgtacttataatgttcacctaaaaatgttgtagcataattctgtgttttatggttgcttctgtccttctttttatttacctctttgttgttatttttgttgtttctttcagtgaggtgtttctgtgttagtagtctgtcttgacacacattgttcaaacaatctcaagcacttgtgtttaaaaaaggttctgaaatcttgcttctcatatgatagcttatgatgccggaattctgtaaacaataaagatgaaagaaaaaatgaaaactttatacaaaaaaggacttctgcaaaagcttggaaattcagaacctattttttatcatcttattttcaaagtaggcaaaagcaaaatcacttaattagtaccattaagtgagagagtaatggaaaacggttatccaccaaaagtgatataatatcctgtacttgtcactcatgtaaaactaatgtatcaaaattagcatatatggaagaaaaatcactattcaaaaatagtttcaattgggcaaatgtgtgtctacaactttgttgaaatggcacagtctgtgttgatcctcatatacaataatgttgttgtaacacaagtgttattagaccatagccacaaaatatttaatgtgttgtgccttcatgatgtaacagaacattctccaggtagggtagttgggggaaataaagggataaatctctaattattgctgtttaactgtttgttatcatagttggtcaatgcctggcaggtaccagcatattgtcacttaggtcaaaccaataaagtggcaactaatgttaataagatttcagttgcacgtgcaaacaaatccaaattcgaacattcttaggaggtttttgttaaggcatgacagatgatttaaacaaataaatagcatgcaacaaaatgtctttattgaaagaagtggaagttatcttaatgccacggttcaccatcaatttaaaagtaaaaaaaacaaaaaaaaaacaaaaaatttaaaaaaaaggtttgctaatctgatagttaatttgttcttaccaaaaaataaaattactttgtaaatagcagttcacatttttccacagtataatggaaaataatgggtaggggtgcattgcttattgaagtacatttttgtcggtttgtgaggggtgtttgatgactttgacagaataaatatctaaacaattatccttgttactgctttgccagttctacgttatttacaattattcagctcttgcaataaatgttctgaattcctgaaaaaaaa

SEQ ID NO: 380489 - DNA, 1148 bp, Homo sapiens
gtcgccagtcagtttcctctccgtggaaggctgagtcccaattccatagggctctgtgccagacttttagtctctgataactccgaaatccttccttctgtttcctaagctctacagtgtaactcacacagcaaaagtgacaatattcctgtcactcctcagaaatgtcccagctccacgggtttccacattcaggagaatgaagaaagccattacgagtcgcagcgccgtgttacgtttcatctccctgatggctcccaggaaagctgcagtgacagtggtctaggagaccatgagccggtgggtagtggaaccctgatctcacaccctcttcctctggttcagccacaggacgaattctatgaccaggcctctccggacaagaggactgaagcagatggcaactctgatcccaactctggtgagtccccttcaaaattttgattgcttggagttgttctggttttgtagtgcacttgagctttcaaaaataattgtagggggcaaggatgaacatttagttatttttttgctggctttattgttgttgctgtattctttgagatatacatttaatatgtttgatatgattttggctgttaaattgtatgatgtgtcttcattttatgaaccattaaaaaagaaaaaaacatgctataaatataactgaaagaagccatttgttgcaagatattctgatgtcagagatcttatgaaatttgaacacattttagaactgcaaaaatacagttaagtagaatagtcaatgaaaaaaagaaatctatttgcatatataaatgtcctatgaaatttgattttccagtgaacactttacaaaaacaaataaagaatattagagttaaaggtattttagaatttgtctatcagattttctggtttttaccagaaaatttaaaaaaaaaaggattaaatcatgattaaaacaagtgtgaagaggagagataacaatttgggggttgtttttcctttattgtctacttgaattcttggataatttgtttttttactactatgctgagggagatatatttggccaaaacttttattctccacagacccataccccactccagaaatcactgcccactccaaataagcattgttggggggtgttttccttggccttt

SEQ ID NO: 380490 - DNA, 5486 bp, Homo sapiens
gtgatgagatataatgcatcctccagtccatgcacgcttcctcttgcaatttgggcatcattcctcagtggaaacctttaaaccctgaaatccaggaaaagaaaataaatacattatcatggacctgagggatttttacctgttggctgctctgattgcctgtttaaggctggattccgcaatagctcaagaacttatttacactattagagaggaattgcctgaaaatgtgcccataggaaacataccaaaggatctgaacatttctcacatcaatgctgccacagggaccagcgccagccttgtctacagactggtttctaaagctggggatgcccctttggtgaaagtatccagcagcactggggaaattttcacaacctccaacagaatagacagagaaaaactctgtgctggcgcctcatatgctgaggagaatgagtgtttctttgaacttgaggtggtgatcctccccaatgatttcttcaggctgatcaaaataaaaataattgtcaaggataccaatgataatgcccccatgtttccatctcctgtcatcaatatttccattccagaaaacactttgatcaacagccgctttccaattccatcagcaacagatcctgacacaggcttcaatggtgtacagcattatgaattgttaaatgggcagagtgtttttggactggatatcgtggaaactccagagggagagaagtggccacaactgattgttcagcaaaacttggatagagaacagaaagatacctatgtgatgaaaatcaaagtagaggatggaggcactccacagaaatccagtacggccatactgcaggtcacagtaagtgatgtaaatgacaacaggccagtgtttaaagagggtcaagtggaggtgcatattccagagaatgctcccgtaggtacctctgtaattcagctccatgccactgatgcagatataggcagtaatgctgaaatccggtacatttttggtgcccaggtcgcccctgcaaccaaaagactctttgctttaaataatactactgggctgattacagttcagaggtccttagatagagaggagacagccattcacaaagtgacagtgctggctagtgacggcagctccactcctgctcgagcaacggttaccatcaatgtcaccgatgtaaatgataaccctcctaatatagacctcaggtacattataagtcccatcaatggcaccgtgtatttatctgagaaagatcctgtcaatacaaagattgccctaattacagtttcagataaggacacagatgtgaatggcaaagtgatctgttttattgaaagagaggtcccatttcatttgaaggcggtatatgacaaccaatatttgttagagacctcttctttgttggactatgagggcaccaaagaattcagctttaaaattgttgcctctgattctgggaagcccagtttaaatcagactgccctggtaagggttaagcttgaggatgaaaatgacaacccaccaattttcaaccagcctgtaattgagctgtcagtttctgaaaacaaccgacgtgggttatacttaacaactattagtgccacagatgaagacagtgggaaaaatgcagacattgtttatcagcttggaccgaatgcctccttctttgatctggaccgaaaaacaggagttttgacagcctccagagtatttgacagagaagaacaagaacgattcatttttacagtaactgccagggataatgggacccctcccctccaaagccaagcggctgtgattgttactgttctggatgagaatgacaatagccccaagtttactcataatcattttcaattttttgtgtctgaggaatctgccaaagtatagtactgtggggggtaatcacagtgacagatgcagatgctgggagagaataaagctgtgactctttccattctaaatgacaatgataattttgtgttggatccctattctggagtcataaagtcaaatgtctcatttgatagagagcagcagagttcctacacttttgatgtcaaagccactgatggaggacaaccacctcgttcctctactgcaaaagtaactatcaacgtcatggatgtcaatgacaacagcccagttgtcatttctccaccgtctaatacttcctttaagttggtgcccctctcagccattcctggctccgtggtagcagaagtttttgcagtggatgttgacactggaatgaacgctgaactaaagtatactatagtgagtggaaacaataaaggcttattccggattgatccagtaacaggtaacattactctggaagaaaaaccagcacctactgatgtgggattgcatcgtttggtggtcaacataagtgacctggggtaccctaagtctttgcacacgcttgtgcttgtattcctttatgttaacgacactgctggaaatgcctcctatatctatgacttgatccgcaggactatggagaccccgttggacaggaacataggggatagtagccaaccctatcaaaatgaggactatctaaccatcatgattgccatcatcgccggtgccatggtggtcattgttgtgatcttcgtcaccgttctggtgcgctgtcgccatgcatcaaggttcaaagcagctcagaggagcaagcaaggtgccgaatggatgtccccaaaccaggagaacaagcaaaacaagaaaaagaaaagaaagaaaaggaagtctcccaaaagctctcttttgaactttgttactatcgaagagtccaaacccgatgatgcagttcatgaacctatcaatgggacaataagcctgccggctgaactggaggagcaaagtataggaagatttgactggggcccggcacctccaacaacattcaagcctaacagtcctgacctggccaagcactacaaatctgcttctccacagcctgcttttcatctcaaaccagacactccagtttccgtgaaaaagcaccacgtgattcaggaactccctttggacaacacctttgttgggggttgtgacaccctttctaaacgctcttccactagttcagatcacttcagtgcctcagagtgcagttcccaaggaggcttcaagacaaagggccccttacacaccagacagaaatgtcccagctccacgggtttccacattcaggagaatgaagaaagccattacgagccacaggacgaattctatgaccaggcctctccggacaagaggactgaagcagatggcaactctgatcccaactctgatgggcctttgggtccccgaggattagctgaagctacagagatgtgcactcaagagtgcttggttttgggtcactctgataattgctggatgcctcctggcttgggtccatatcaacaccccaaatctcctctctcaacctttgcaccccagaaagaatgggtgaagaaggacaagcttgtgaatgggcacaccctgaccagagcctggaaagaagacagcaacaggaaccagttcaatgaccgtaagcagtatggctccaatgaaggccatttcaacaatggcagccacatgacagacattcctctggcaaatctgaagtcttataagcaagcaggaggtgctactgagagtcctaaggagcaccaactctaagaaaaggctatatgggacctaataactttaaatagacatgctaataccgtgtgcgtcagagctttatgtattcaatagatctctacaactatgccccttctagcagggatacctataactttgtgttagcaccatggagaatacaatgtttttgcaacatatgagagaagatagttctagccatgcaattttgtttactagaattgattacactctccagagatctctccattgtgcaaattttttttattattgcattttattttgaccctggactgctgctatgaacaatagaatatgcatttggaaagtaagaaagtttcatggattagagtgactgaaaaacatatccagttagaaaattgtgcttttttttttttttttttttgtcattgatttgtgctgggactgctatacttgacattatactgcaaacaaaacttaaagagataagcattaaacctattgtgctgttaacaacgttagtggacacttgtaagtcaatcagtgttaaagtatttgtaaatagaagcaagctattattaacaacttttgtgtacttataatgttcacctaaaaatgttgtagcataattctgtgttttatggttgcttctgtccttctttttatttacctctttgttgttatttttgttgtttctttcagtgaggtgtttctgtgttagtagtctgtcttgacacacattgttcaaacaatctcaagcacttgtgtttaaaaaaggttctgaaatcttgcttctcatatgatagcttatgatgccggaattctgtaaacaataaagatgaaagaaaaaatgaaaactttatacaaaaaaggacttctgcaaaagcttggaaattcagaacctattttttatcatcttattttcaaagtaggcaaaagcaaaatcacttaattagtaccattaagtgagagagtaatggaaaacggttatccaccaaaagtgatataatatcctgtacttgtcactcatgtaaaactaatgtatcaaaattagcatatatggaagaaaaatcactattcaaaaatagtttcaattgggcaaatgtgtgtctacaactttgttgaaatggcacagtctgtgttgatcctcatatacaataatgttgttgtaacacaagtgttattagaccatagccacaaaatatttaatgtgttgtgccttcatgatgtaacagaacattctccaggtagggtagttgggggaaataaagggataaatctctaattattgctgtttaactgtttgttatcatagttggtcaatgcctggcaggtaccagcatattgtcacttaggtcaaaccaataaagtggcaactaatgttaataagatttcagttgcacgtgcaaacaaatccaaattcgaacattcttaggaggtttttgttaaggcatgacagatgatttaaacaaataaatagcatgcaacaaaatgtctttattgaaagaagtggaagttatcttaatgccacggttcaccatcaatttaaaagtaaaaaaaacaaaaaaaaaacaaaaaatttaaaaaaaaggtttgctaatctgatagttaatttgttcttaccaaaaaataaaattactttgtaaatagcagttcacatttttccacagtataatggaaaataatgggtaggggtgcattgcttattgaagtacatttttgtcggtttgtgaggggtgtttgatgactttgacagaataaatatctaaacaattatccttgttactgctttgccagttctacgttatttacaattattcagctcttgcaataaatgttctgaattcctgaaaaaaaa

SEQ ID NO: 380491 - DNA, 4066 bp, Homo sapiens
gtgatgagatataatgcatcctccagtccatgcacgcttcctcttgcaatttgggcatcattcctcagtggaaacctttaaaccctgaaatccaggaaaagaaaataaatacattatcatggacctgagggatttttacctgttggctgctctgattgcctgtttaaggctggattccgcaatagctcaagaacttatttacactattagagaggaattgcctgaaaatgtgcccataggaaacataccaaaggatctgaacatttctcacatcaatgctgccacagggaccagcgccagccttgtctacagactggtttctaaagctggggatgcccctttggtgaaagtatccagcagcactggggaaattttcacaacctccaacagaatagacagagaaaaactctgtgctggcgcctcatatgctgaggagaatgagtgtttctttgaacttgaggtggtgatcctccccaatgatttcttcaggctgatcaaaataaaaataattgtcaaggataccaatgataatgcccccatgtttccatctcctgtcatcaatatttccattccagaaaacactttgatcaacagccgctttccaattccatcagcaacagatcctgacacaggcttcaatggtgtacagcattatgaattgttaaatgggcagagtgtttttggactggatatcgtggaaactccagagggagagaagtggccacaactgattgttcagcaaaacttggatagagaacagaaagatacctatgtgatgaaaatcaaagtagaggatggaggcactccacagaaatccagtacggccatactgcaggtcacagtaagtgatgtaaatgacaacaggccagtgtttaaagagggtcaagtggaggtgcatattccagagaatgctcccgtaggtacctctgtaattcagctccatgccactgatgcagatataggcagtaatgctgaaatccggtacatttttggtgcccaggtcgcccctgcaaccaaaagactctttgctttaaataatactactgggctgattacagttcagaggtccttagatagagaggagacagccattcacaaagtgacagtgctggctagtgacggcagctccactcctgctcgagcaacggttaccatcaatgtcaccgatgtaaatgataaccctcctaatatagacctcaggtacattataagtcccatcaatggcaccgtgtatttatctgagaaagatcctgtcaatacaaagattgccctaattacagtttcagataaggacacagatgtgaatggcaaagtgatctgttttattgaaagagaggtcccatttcatttgaaggcggtatatgacaaccaatatttgttagagacctcttctttgttggactatgagggcaccaaagaattcagctttaaaattgttgcctctgattctgggaagcccagtttaaatcagactgccctggtaagggttaagcttgaggatgaaaatgacaacccaccaattttcaaccagcctgtaattgagctgtcagtttctgaaaacaaccgacgtgggttatacttaacaactattagtgccacagatgaagacagtgggaaaaatgcagacattgtttatcagcttggaccgaatgcctccttctttgatctggaccgaaaaacaggagttttgacagcctccagagtatttgacagagaagaacaagaacgattcatttttacagtaactgccagggataatgggacccctcccctccaaagccaagcggctgtgattgttactgttctggatgagaatgacaatagccccaagtttactcataatcattttcaattttttgtgtctgaggaatctgccaaagtatagtactgtggggggtaatcacagtgacagatgcagatgctgggagagaataaagctgtgactctttccattctaaatgacaatgataattttgtgttggatccctattctggagtcataaagtcaaatgtctcatttgatagagagcagcagagttcctacacttttgatgtcaaagccactgatggaggacaaccacctcgttcctctactgcaaaagtaactatcaacgtcatggatgtcaatgacaacagcccagttgtcatttctccaccgtctaatacttcctttaagttggtgcccctctcagccattcctggctccgtggtagcagaagtttttgcagtggatgttgacactggaatgaacgctgaactaaagtatactatagtgagtggaaacaataaaggcttattccggattgatccagtaacaggtaacattactctggaagaaaaaccagcacctactgatgtgggattgcatcgtttggtggtcaacataagtgacctggggtaccctaagtctttgcacacgcttgtgcttgtattcctttatgttaacgacactgctggaaatgcctcctatatctatgacttgatccgcaggactatggagaccccgttggacaggaacataggggatagtagccaaccctatcaaaatgaggactatctaaccatcatgattgccatcatcgccggtgccatggtggtcattgttgtgatcttcgtcaccgttctggtgcgctgtcgccatgcatcaaggttcaaagcagctcagaggagcaagcaaggtgccgaatggatgtccccaaaccaggagaacaagcaaaacaagaaaaagaaaagaaagaaaaggaagtctcccaaaagctctcttttgaactttgttactatcgaagagtccaaacccgatgatgcagttcatgaacctatcaatgggacaataagcctgccggctgaactggaggagcaaagtataggaagatttgactggggcccggcacctccaacaacattcaagcctaacagtcctgacctggccaagcactacaaatctgcttctccacagcctgcttttcatctcaaaccagacactccagtttccgtgaaaaagcaccacgtgattcaggaactccctttggacaacacctttgttgggggttgtgacaccctttctaaacgctcttccactagttcagatcacttcagtgcctcagagtgcagttcccaaggaggcttcaagacaaagggccccttacacaccagacaggtaaacgagcacttttactggtctataagtactgcatacaagtgcccagtcaaccagtattaacgtgccagtatgtctattgttttggtctaactttagcttagttagaaagaggtaaaaaaaaacttgaccccttttctattcctctggggctcagtcaagaatttttagaacagctttgaaatttctgagttctgagaatattttctcctttcagtttccttcaaatggcaaaagatgaaaagagaaaattattccaaaatgtcccaagataatgtttgctgaagaagaaaaaacctgtcctgatatgccaaattctgctcctgggggtttccaaattgactgcttcaagactttcaccttaccttttgatctaaaaagtcaccttcaaatctcaagttttcaatgacttttgaaggtgtgactgcaattatgttgcagctatggttgctaaaggggttaattttttttttagtctctaaacaggatagtagaatattaaatgtacatcagctgtgaagcacatgatcgttgatagattgcaactaagccatataggaagtcttctctttgatttcaaattattttattgtaatatattaaattcgatacttaatagaaagatttttagtgtccgcagtggccaaatactctttcaaaaaaaaaaaaaaaagaatgcttgctgcctaatataactgatttaaaaagaaaagaatgaatccattgtaaatattctctcatcttagtaatgcataagtgatctgtcataactcattttaaactgtgaaatatgccatatgaagagggattaagaggctgagaaactcatatttcaaccaaatccagaattagtttttcttaggtctaataattccttgttaataaagatttaaatgcagcgctgtctaa

SEQ ID NO: 380492 - DNA, 4017 bp, Homo sapiens
gtgatgagatataatgcatcctccagtccatgcacgcttcctcttgcaatttgggcatcattcctcagtggaaacctttaaaccctgaaatccaggaaaagaaaataaatacattatcatggacctgagggatttttacctgttggctgctctgattgcctgtttaaggctggattccgcaatagctcaagaacttatttacactattagagaggaattgcctgaaaatgtgcccataggaaacataccaaaggatctgaacatttctcacatcaatgctgccacagggaccagcgccagccttgtctacagactggtttctaaagctggggatgcccctttggtgaaagtatccagcagcactggggaaattttcacaacctccaacagaatagacagagaaaaactctgtgctggcgcctcatatgctgaggagaatgagtgtttctttgaacttgaggtggtgatcctccccaatgatttcttcaggctgatcaaaataaaaataattgtcaaggataccaatgataatgcccccatgtttccatctcctgtcatcaatatttccattccagaaaacactttgatcaacagccgctttccaattccatcagcaacagatcctgacacaggcttcaatggtgtacagcattatgaattgttaaatgggcagagtgtttttggactggatatcgtggaaactccagagggagagaagtggccacaactgattgttcagcaaaacttggatagagaacagaaagatacctatgtgatgaaaatcaaagtagaggatggaggcactccacagaaatccagtacggccatactgcaggtcacagtaagtgatgtaaatgacaacaggccagtgtttaaagagggtcaagtggaggtgcatattccagagaatgctcccgtaggtacctctgtaattcagctccatgccactgatgcagatataggcagtaatgctgaaatccggtacatttttggtgcccaggtcgcccctgcaaccaaaagactctttgctttaaataatactactgggctgattacagttcagaggtccttagatagagaggagacagccattcacaaagtgacagtgctggctagtgacggcagctccactcctgctcgagcaacggttaccatcaatgtcaccgatgtaaatgataaccctcctaatatagacctcaggtacattataagtcccatcaatggcaccgtgtatttatctgagaaagatcctgtcaatacaaagattgccctaattacagtttcagataaggacacagatgtgaatggcaaagtgatctgttttattgaaagagaggtcccatttcatttgaaggcggtatatgacaaccaatatttgttagagacctcttctttgttggactatgagggcaccaaagaattcagctttaaaattgttgcctctgattctgggaagcccagtttaaatcagactgccctggtaagggttaagcttgaggatgaaaatgacaacccaccaattttcaaccagcctgtaattgagctgtcagtttctgaaaacaaccgacgtgggttatacttaacaactattagtgccacagatgaagacagtgggaaaaatgcagacattgtttatcagcttggaccgaatgcctccttctttgatctggaccgaaaaacaggagttttgacagcctccagagtatttgacagagaagaacaagaacgattcatttttacagtaactgccagggataatgggacccctcccctccaaagccaagcggctgtgattgttactgttctggatgagaatgacaatagccccaagtttactcataatcattttcaattttttgtgtctgaggaatctgccaaagtatagtactgtggggggtaatcacagtgacagatgcagatgctgggagagaataaagctgtgactctttccattctaaatgacaatgataattttgtgttggatccctattctggagtcataaagtcaaatgtctcatttgatagagagcagcagagttcctacacttttgatgtcaaagccactgatggaggacaaccacctcgttcctctactgcaaaagtaactatcaacgtcatggatgtcaatgacaacagcccagttgtcatttctccaccgtctaatacttcctttaagttggtgcccctctcagccattcctggctccgtggtagcagaagtttttgcagtggatgttgacactggaatgaacgctgaactaaagtatactatagtgagtggaaacaataaaggcttattccggattgatccagtaacaggtaacattactctggaagaaaaaccagcacctactgatgtgggattgcatcgtttggtggtcaacataagtgacctggggtaccctaagtctttgcacacgcttgtgcttgtattcctttatgttaacgacactgctggaaatgcctcctatatctatgacttgatccgcaggactatggagaccccgttggacaggaacataggggatagtagccaaccctatcaaaatgaggactatctaaccatcatgattgccatcatcgccggtgccatggtggtcattgttgtgatcttcgtcaccgttctggtgcgctgtcgccatgcatcaaggttcaaagcagctcagaggagcaagcaaggtgccgaatggatgtccccaaaccaggagaacaagcaaaacaagaaaaagaaaagaaagaaaaggaagtctcccaaaagctctcttttgaactttgttactatcgaagagtccaaacccgatgatgcagttcatgaacctatcaatgggacaataagcctgccggctgaactggaggagcaaagtataggaagatttgactggggcccggcacctccaacaacattcaagcctaacagtcctgacctggccaagcactacaaatctgcttctccacagcctgcttttcatctcaaaccagacactccagtttccgtgaaaaagcaccacgtgattcaggaactccctttggacaacacctttgttgggggttgtgacaccctttctaaacgctcttccactagttcagatcacttcagtgcctcagagtgcagttcccaaggaggcttcaagacaaagggccccttacacaccagacagaaatgtcccagctccacgggtttccacattcaggagaatgaagaaagccattacgagccacaggacgaattctatgaccaggcctctccggacaagaggactgaagcagatggcaactctgatcccaactctggtgagtccccttcaaaattttgattgcttggagttgttctggttttgtagtgcacttgagctttcaaaaataattgtagggggcaaggatgaacatttagttatttttttgctggctttattgttgttgctgtattctttgagatatacatttaatatgtttgatatgattttggctgttaaattgtatgatgtgtcttcattttatgaaccattaaaaaagaaaaaaacatgctataaatataactgaaagaagccatttgttgcaagatattctgatgtcagagatcttatgaaatttgaacacattttagaactgcaaaaatacagttaagtagaatagtcaatgaaaaaaagaaatctatttgcatatataaatgtcctatgaaatttgattttccagtgaacactttacaaaaacaaataaagaatattagagttaaaggtattttagaatttgtctatcagattttctggtttttaccagaaaatttaaaaaaaaaaggattaaatcatgattaaaacaagtgtgaagaggagagataacaatttgggggttgtttttcctttattgtctacttgaattcttggataatttgtttttttactactatgctgagggagatatatttggccaaaacttttattctccacagacccataccccactccagaaatcactgcccactccaaataagcattgttggggggtgttttccttggccttt

SEQ ID NO: 380493 - DNA, 305 bp, Homo sapiens
cataatgatgaagtgaatgggtcgacttttaaatgctcatattatattggcttgtatagatatagtcatggtagtgttagccacaaatttatgttttcacactcatcattatcctaagaggtgaaaaaattgttttattcaaattatttaaactgtttattaagaaaataaagaattatattcctataacacattttaggagtgtaatgatcaataggaaagtataataccccgtcttgaaataacagtatagagttagtagattgtatatttattttatgtcttatatatattattttccagtt

SEQ ID NO: 380494 - DNA, 426 bp, Homo sapiens
gcttcaggtatggctctatccagggcctctctatctcatcttatcacagcttcatggagccgtagcttccatggagagagaagtggagtgatgggccagaggccattggcacgcgtggctttctgattggggcaccacctaaaccaagatttgccttctaaagtcgaagacttgctttctttcccactctcccagaggaaactaagaaaaaagtgaaatgtaagcactgctgccgaagctgcctttgccccacgaccaccgtctcgtcccagctcatacctcacggggtcagatagcttcagtcttccagcgagagaaatcctggtgccccaggcacctggggagaagctcacagttactgtggctattgtcgctgttggtttgaactttctaataaaactgtatctgtggccaggcgcagtggct

SEQ ID NO: 380495 - DNA, 268 bp, Homo sapiens
tgatcaagaaaatacctatcaatcagtcaacatttattttaaacactaacttacatgtaatattgatgaatggaaaaaagatattcaggtattttaaactatcccattcactagtaacatatatgtccctaccctgggctatctttctttaacgtcaagtatgtatttcttccttgaagaagcatcaacacaattgtaaataggaaaaaacatctcaagtattgtaaacatatattttaaagtaaagctatgaaatatgaaaatgctc

SEQ ID NO: 380496 - DNA, 224 bp, Homo sapiens
taattcatgaattttaaagttttgttgtgtgacatatacatactttacattatatttgtattgactattaatattttaatattgatatggttgtatttttatctaccattgctagttgatttctatttgtctttcttgcctcttttaatctgcactctttgccattttggattgtggttttttaatgaattcattctatctccaatgttaagttattattagtt

SEQ ID NO: 380497 - DNA, 2029 bp, Homo sapiens
tttcctctttctctaagagtctctctctccctttccctctctctccccccaatctgtctttctagcatgttgccctttttcaaccacatttgtgtttcaggtgtagagaggagagagagtgaacagggagcggggcttttgtctgttggtctccctggactgaagagagggagaatagaagcccaagactaagattctcaaaatggtttattacccagaactctttgtctgggtcagtcaagaaccatttccaaacaaggacatggagggaaggcttcctaagggaagacttcctgtcccaaaggaagtgaaccgcaagaagaacgatgagacaaacgctgcctccctgactccactgggcagcagtgaactccgctccccaagaatcagttacctccactttttttaatcgtaacacctccatttgtattacatatggtgtatgggtattgatgaggtcatggtatcatatatgggatttttttctgtgtaaatcatcaagtataagaagaaactatgggactctgagccttgctttagagaatttacagtggacaaataggtgtcatcaaaccagtttttaatcattctgactcaagtgaaaacgctcagaatttcacactgtgaatccacgtttacaacccttacaggtgggccttcaggcctggttcgctacaacaatgtcttccacaactcaaactcccaccgcgctcacacaaccggtccactcctgccttttcactcacacagctcccgactgcttcttgcagaggctgagagtcccccccccccaccttttttttcatttagatgtaacaaacctagtagtttatgttcatcaattgtctgtatatctctatattttatccatgtactcttttgatgtatagaagtagtttgaaactcattgtttccttgtggtaagtgaccgagatgctgccacaggacctgagacactgatgaatggtgctattttggactttcaacatgctccttggcgaggtagctctgatggagttattttttatttccatgttctaagaaggtgttggtactctgtttccctgaatgttgttctctagactggattgacttgttttccttgtgtcttcagtgtggctttcttcctcagtgttgtaggttgagcgaatgctaccagagtgtgagagaccattgtctcgttggctggcgctcacggacatgcagtcacggtagcgggagcaatcacaaaactgtaatttacttaccaaatctcttcctttccgtagcctcgcctgcctgacttagagaaagaaaagcaataattttacaggcattttgaggtgtctctttgggttctttctgtttgaaaggatatttgtcgaaaaaaagagcaaaaccgttttaaataaactccccctggaaaaaaacccaaaacactggcatctgagtaggaatatgaaaatgacaccttttccaaatattaaattggaaaacaaggtctacaaaatcatgatacttttttaaaaggcagagcattcttttttcggcaattttgataagcaaggtgtagatttacatttttgtccttgctcccaacgaaatggataaacaaaaataaattaccatctactcatggaatgttgttgtgttagccagtctgaaagcccaccttaatttttatataactgtctttagctcttcttttgacagggcaggccttgttctgaactgtttcgcttctgactgttaaacaccgatgacgcatgcactgcacttcttcgttttcttcttgctcccccattggcctgagtttcttgtgcattactcctctccctccttcgttagaataggtatatcagctgtgtaaatagagcaagaaaacagtattctgcatctgtggcatttatgtagagttgcagttgtgtactgctgaaaatgcaggcttttgtaacagtgtgatctttactgatgcactcatgacaagtacccaatgtattttagctattttagtagtatttgttcaataaatacgcaagctgtaaggtaa

SEQ ID NO: 380498 - DNA, 413 bp, Homo sapiens
gcacgaggcaaggacaaaaatgtaaatctacacaccttaatttttatataactgtctttagctcttcttttgacagggcaggccttgttctgaactgtttcgcttctgactgttaaacaccgatgacgcatgcactgcacttcttcgttttcttcttgctcccccattggcctgagtttcttgtgcattactcctctccctccttcgttagaataggtatatcagctgtgtaaatagagcaagaaaacagtattctgcatctgtggcatttatgtagagttgcagttgtgtactgctgaaaatgcaggcttttgtaacagtgtgatctttactgatgcactcatgacaagtacccaatgtattttagctattttagtagtatttgttcaataaatacgcaagctgtaaggtaa

SEQ ID NO: 380499 - DNA, 912 bp, Homo sapiens
  misc_feature (85)..(85): n is a, c, g, or t
aagtgatatggggaggagactgcgtttaaggtcaggcagggagttagtgttcatgtgtgtatacgatggacaggagagtgaacanggagcggggcttttgtctgttggtctccctggactgaagagagggagaatagaagcccaagactaagattctcaaaatggtttattacccagaactctttgtctgggtcagtcaagaaccatttccaaacaaggacatggagggaaggcttcctaagggaagacttcctgtcccaaaggaagtgaaccgcaagaagaacgatgagacaaacgctgcctccctgactccactgggcagcagtgaactccgctccccaagaatcagttacctccactttttttaatcgtaacacctccatttgtattacatatggtgtatgggtattgatgaggtcatggtatcatatatgggatttttttctgtgtaaatcatcaagtataagaagaaactatgggactctgagccttgctttagagaatttacagtggacaaataggtgtcatcaaaccagtttttaatcattctgactcaagtgaaaacgctcagaatttcacactgtgaatccacgtttacaacccttacaggtgggccttcaggcctggttcgctacaacaatgtcttccacaactcaaactcccaccgcgctcacacaaccggtccactcctgccttttcactcacacagctcccgactgcttcttgcagaggctgagagtcccccccccccacctttttcattagatgtaaaacctgtaggtaggtcccaagccgaatcaattaaccaagccgtgggtagagatggacctgtcgtggagaccaatgtcgacgacaaggagagggggacacggggcaggatttacagggggctcttgtgtctttcccgtgata

SEQ ID NO: 380500 - DNA, 2071 bp, Homo sapiens
cgctttgtctccccggggcgccgcgcggtgcagtggggacggcgcggcgagcggggcgcccggggcgcgggtgcggggtgtcggggcgcgcgcgcctgttggccgctcgccgacggggcccagagccgccgattcctgccgagtgtagagaggagagagagtgaacagggagcggggcttttgtctgttggtctccctggactgaagagagggagaatagaagcccaagactaagattctcaaaatggtttattacccagaactctttgtctgggtcagtcaagaaccatttccaaacaaggacatggagggaaggcttcctaagggaagacttcctgtcccaaaggaagtgaaccgcaagaagaacgatgagacaaacgctgcctccctgactccactgggcagcagtgaactccgctccccaagaatcagttacctccactttttttaatcgtaacacctccatttgtattacatatggtgtatgggtattgatgaggtcatggtatcatatatgggatttttttctgtgtaaatcatcaagtataagaagaaactatgggactctgagccttgctttagagaatttacagtggacaaataggtgtcatcaaaccagtttttaatcattctgactcaagtgaaaacgctcagaatttcacactgtgaatccacgtttacaacccttacaggtgggccttcaggcctggttcgctacaacaatgtcttccacaactcaaactcccaccgcgctcacacaaccggtccactcctgccttttcactcacacagctcccgactgcttcttgcagaggctgagagtcccccccccccaccttttttttcatttagatgtaacaaacctagtagtttatgttcatcaattgtctgtatatctctatattttatccatgtactcttttgatgtatagaagtagtttgaaactcattgtttccttgtggtaagtgaccgagatgctgccacaggacctgagacactgatgaatggtgctattttggactttcaacatgctccttggcgaggtagctctgatggagttattttttatttccatgttctaagaaggtgttggtactctgtttccctgaatgttgttctctagactggattgacttgttttccttgtgtcttcagtgtggctttcttcctcagtgttgtaggttgagcgaatgctaccagagtgtgagagaccattgtctcgttggctggcgctcacggacatgcagtcacggtagcgggagcaatcacaaaactgtaatttacttaccaaatctcttcctttccgtagcctcgcctgcctgacttagagaaagaaaagcaataattttacaggcattttgaggtgtctctttgggttctttctgtttgaaaggatatttgtcgaaaaaaagagcaaaaccgttttaaataaactccccctggaaaaaaacccaaaacactggcatctgagtaggaatatgaaaatgacaccttttccaaatattaaattggaaaacaaggtctacaaaatcatgatacttttttaaaaggcagagcattcttttttcggcaattttgataagcaaggtgtagatttacatttttgtccttgctcccaacgaaatggataaacaaaaataaattaccatctactcatggaatgttgttgtgttagccagtctgaaagcccaccttaatttttatataactgtctttagctcttcttttgacagggcaggccttgttctgaactgtttcgcttctgactgttaaacaccgatgacgcatgcactgcacttcttcgttttcttcttgctcccccattggcctgagtttcttgtgcattactcctctccctccttcgttagaataggtatatcagctgtgtaaatagagcaagaaaacagtattctgcatctgtggcatttatgtagagttgcagttgtgtactgctgaaaatgcaggcttttgtaacagtgtgatctttactgatgcactcatgacaagtacccaatgtattttagctattttagtagtatttgttcaataaatacgcaagctgtaaggtaa

SEQ ID NO: 380501 - DNA, 1987 bp, Homo sapiens
agagagagactcttagagaaagagagagacacacacactcttggagagagagcgcgaggtgtagagaggagagagagtgaacagggagcggggcttttgtctgttggtctccctggactgaagagagggagaatagaagcccaagactaagattctcaaaatggtttattacccagaactctttgtctgggtcagtcaagaaccatttccaaacaaggacatggagggaaggcttcctaagggaagacttcctgtcccaaaggaagtgaaccgcaagaagaacgatgagacaaacgctgcctccctgactccactgggcagcagtgaactccgctccccaagaatcagttacctccactttttttaatcgtaacacctccatttgtattacatatggtgtatgggtattgatgaggtcatggtatcatatatgggatttttttctgtgtaaatcatcaagtataagaagaaactatgggactctgagccttgctttagagaatttacagtggacaaataggtgtcatcaaaccagtttttaatcattctgactcaagtgaaaacgctcagaatttcacactgtgaatccacgtttacaacccttacaggtgggccttcaggcctggttcgctacaacaatgtcttccacaactcaaactcccaccgcgctcacacaaccggtccactcctgccttttcactcacacagctcccgactgcttcttgcagaggctgagagtcccccccccccaccttttttttcatttagatgtaacaaacctagtagtttatgttcatcaattgtctgtatatctctatattttatccatgtactcttttgatgtatagaagtagtttgaaactcattgtttccttgtggtaagtgaccgagatgctgccacaggacctgagacactgatgaatggtgctattttggactttcaacatgctccttggcgaggtagctctgatggagttattttttatttccatgttctaagaaggtgttggtactctgtttccctgaatgttgttctctagactggattgacttgttttccttgtgtcttcagtgtggctttcttcctcagtgttgtaggttgagcgaatgctaccagagtgtgagagaccattgtctcgttggctggcgctcacggacatgcagtcacggtagcgggagcaatcacaaaactgtaatttacttaccaaatctcttcctttccgtagcctcgcctgcctgacttagagaaagaaaagcaataattttacaggcattttgaggtgtctctttgggttctttctgtttgaaaggatatttgtcgaaaaaaagagcaaaaccgttttaaataaactccccctggaaaaaaacccaaaacactggcatctgagtaggaatatgaaaatgacaccttttccaaatattaaattggaaaacaaggtctacaaaatcatgatacttttttaaaaggcagagcattcttttttcggcaattttgataagcaaggtgtagatttacatttttgtccttgctcccaacgaaatggataaacaaaaataaattaccatctactcatggaatgttgttgtgttagccagtctgaaagcccaccttaatttttatataactgtctttagctcttcttttgacagggcaggccttgttctgaactgtttcgcttctgactgttaaacaccgatgacgcatgcactgcacttcttcgttttcttcttgctcccccattggcctgagtttcttgtgcattactcctctccctccttcgttagaataggtatatcagctgtgtaaatagagcaagaaaacagtattctgcatctgtggcatttatgtagagttgcagttgtgtactgctgaaaatgcaggcttttgtaacagtgtgatctttactgatgcactcatgacaagtacccaatgtattttagctattttagtagtatttgttcaataaatacgcaagctgtaaggtaa

SEQ ID NO: 380502 - DNA, 1982 bp, Homo sapiens
gagatgatctcctcctcctttttccaaggctgcacttcttggaagtgaagccggtgtagagaggagagagagtgaacagggagcggggcttttgtctgttggtctccctggactgaagagagggagaatagaagcccaagactaagattctcaaaatggtttattacccagaactctttgtctgggtcagtcaagaaccatttccaaacaaggacatggagggaaggcttcctaagggaagacttcctgtcccaaaggaagtgaaccgcaagaagaacgatgagacaaacgctgcctccctgactccactgggcagcagtgaactccgctccccaagaatcagttacctccactttttttaatcgtaacacctccatttgtattacatatggtgtatgggtattgatgaggtcatggtatcatatatgggatttttttctgtgtaaatcatcaagtataagaagaaactatgggactctgagccttgctttagagaatttacagtggacaaataggtgtcatcaaaccagtttttaatcattctgactcaagtgaaaacgctcagaatttcacactgtgaatccacgtttacaacccttacaggtgggccttcaggcctggttcgctacaacaatgtcttccacaactcaaactcccaccgcgctcacacaaccggtccactcctgccttttcactcacacagctcccgactgcttcttgcagaggctgagagtcccccccccccaccttttttttcatttagatgtaacaaacctagtagtttatgttcatcaattgtctgtatatctctatattttatccatgtactcttttgatgtatagaagtagtttgaaactcattgtttccttgtggtaagtgaccgagatgctgccacaggacctgagacactgatgaatggtgctattttggactttcaacatgctccttggcgaggtagctctgatggagttattttttatttccatgttctaagaaggtgttggtactctgtttccctgaatgttgttctctagactggattgacttgttttccttgtgtcttcagtgtggctttcttcctcagtgttgtaggttgagcgaatgctaccagagtgtgagagaccattgtctcgttggctggcgctcacggacatgcagtcacggtagcgggagcaatcacaaaactgtaatttacttaccaaatctcttcctttccgtagcctcgcctgcctgacttagagaaagaaaagcaataattttacaggcattttgaggtgtctctttgggttctttctgtttgaaaggatatttgtcgaaaaaaagagcaaaaccgttttaaataaactccccctggaaaaaaacccaaaacactggcatctgagtaggaatatgaaaatgacaccttttccaaatattaaattggaaaacaaggtctacaaaatcatgatacttttttaaaaggcagagcattcttttttcggcaattttgataagcaaggtgtagatttacatttttgtccttgctcccaacgaaatggataaacaaaaataaattaccatctactcatggaatgttgttgtgttagccagtctgaaagcccaccttaatttttatataactgtctttagctcttcttttgacagggcaggccttgttctgaactgtttcgcttctgactgttaaacaccgatgacgcatgcactgcacttcttcgttttcttcttgctcccccattggcctgagtttcttgtgcattactcctctccctccttcgttagaataggtatatcagctgtgtaaatagagcaagaaaacagtattctgcatctgtggcatttatgtagagttgcagttgtgtactgctgaaaatgcaggcttttgtaacagtgtgatctttactgatgcactcatgacaagtacccaatgtattttagctattttagtagtatttgttcaataaatacgcaagctgtaaggtaa

SEQ ID NO: 380503 - DNA, 2067 bp, Homo sapiens
cgcggactctttgtgtgtctgagcgcggctccgcgccgccgcaggcaccattttctgcttcgctcaggacaggcacataaaaggaaggcggctgccgcccgtcgccgtcctcttttcctcagatgccctctgctgcaggtgtagagaggagagagagtgaacagggagcggggcttttgtctgttggtctccctggactgaagagagggagaatagaagcccaagactaagattctcaaaatggtttattacccagaactctttgtctgggtcagtcaagaaccatttccaaacaaggacatggagggaaggcttcctaagggaagacttcctgtcccaaaggaagtgaaccgcaagaagaacgatgagacaaacgctgcctccctgactccactgggcagcagtgaactccgctccccaagaatcagttacctccactttttttaatcgtaacacctccatttgtattacatatggtgtatgggtattgatgaggtcatggtatcatatatgggatttttttctgtgtaaatcatcaagtataagaagaaactatgggactctgagccttgctttagagaatttacagtggacaaataggtgtcatcaaaccagtttttaatcattctgactcaagtgaaaacgctcagaatttcacactgtgaatccacgtttacaacccttacaggtgggccttcaggcctggttcgctacaacaatgtcttccacaactcaaactcccaccgcgctcacacaaccggtccactcctgccttttcactcacacagctcccgactgcttcttgcagaggctgagagtcccccccccccaccttttttttcatttagatgtaacaaacctagtagtttatgttcatcaattgtctgtatatctctatattttatccatgtactcttttgatgtatagaagtagtttgaaactcattgtttccttgtggtaagtgaccgagatgctgccacaggacctgagacactgatgaatggtgctattttggactttcaacatgctccttggcgaggtagctctgatggagttattttttatttccatgttctaagaaggtgttggtactctgtttccctgaatgttgttctctagactggattgacttgttttccttgtgtcttcagtgtggctttcttcctcagtgttgtaggttgagcgaatgctaccagagtgtgagagaccattgtctcgttggctggcgctcacggacatgcagtcacggtagcgggagcaatcacaaaactgtaatttacttaccaaatctcttcctttccgtagcctcgcctgcctgacttagagaaagaaaagcaataattttacaggcattttgaggtgtctctttgggttctttctgtttgaaaggatatttgtcgaaaaaaagagcaaaaccgttttaaataaactccccctggaaaaaaacccaaaacactggcatctgagtaggaatatgaaaatgacaccttttccaaatattaaattggaaaacaaggtctacaaaatcatgatacttttttaaaaggcagagcattcttttttcggcaattttgataagcaaggtgtagatttacatttttgtccttgctcccaacgaaatggataaacaaaaataaattaccatctactcatggaatgttgttgtgttagccagtctgaaagcccaccttaatttttatataactgtctttagctcttcttttgacagggcaggccttgttctgaactgtttcgcttctgactgttaaacaccgatgacgcatgcactgcacttcttcgttttcttcttgctcccccattggcctgagtttcttgtgcattactcctctccctccttcgttagaataggtatatcagctgtgtaaatagagcaagaaaacagtattctgcatctgtggcatttatgtagagttgcagttgtgtactgctgaaaatgcaggcttttgtaacagtgtgatctttactgatgcactcatgacaagtacccaatgtattttagctattttagtagtatttgttcaataaatacgcaagctgtaaggtaa

SEQ ID NO: 380504 - DNA, 1968 bp, Homo sapiens
tttcctctttctctaagagtctctctctccctttccctctctctccccccaatctgtctttctagcatgttgccctttttcaaccacatttgtgtttcaggtgtagagaggagagagagtgaacagggagcggggcttttgtctgtttattacccagaactctttgtctgggtcagtcaagaaccatttccaaacaaggacatggagggaaggcttcctaagggaagacttcctgtcccaaaggaagtgaaccgcaagaagaacgatgagacaaacgctgcctccctgactccactgggcagcagtgaactccgctccccaagaatcagttacctccactttttttaatcgtaacacctccatttgtattacatatggtgtatgggtattgatgaggtcatggtatcatatatgggatttttttctgtgtaaatcatcaagtataagaagaaactatgggactctgagccttgctttagagaatttacagtggacaaataggtgtcatcaaaccagtttttaatcattctgactcaagtgaaaacgctcagaatttcacactgtgaatccacgtttacaacccttacaggtgggccttcaggcctggttcgctacaacaatgtcttccacaactcaaactcccaccgcgctcacacaaccggtccactcctgccttttcactcacacagctcccgactgcttcttgcagaggctgagagtcccccccccccaccttttttttcatttagatgtaacaaacctagtagtttatgttcatcaattgtctgtatatctctatattttatccatgtactcttttgatgtatagaagtagtttgaaactcattgtttccttgtggtaagtgaccgagatgctgccacaggacctgagacactgatgaatggtgctattttggactttcaacatgctccttggcgaggtagctctgatggagttattttttatttccatgttctaagaaggtgttggtactctgtttccctgaatgttgttctctagactggattgacttgttttccttgtgtcttcagtgtggctttcttcctcagtgttgtaggttgagcgaatgctaccagagtgtgagagaccattgtctcgttggctggcgctcacggacatgcagtcacggtagcgggagcaatcacaaaactgtaatttacttaccaaatctcttcctttccgtagcctcgcctgcctgacttagagaaagaaaagcaataattttacaggcattttgaggtgtctctttgggttctttctgtttgaaaggatatttgtcgaaaaaaagagcaaaaccgttttaaataaactccccctggaaaaaaacccaaaacactggcatctgagtaggaatatgaaaatgacaccttttccaaatattaaattggaaaacaaggtctacaaaatcatgatacttttttaaaaggcagagcattcttttttcggcaattttgataagcaaggtgtagatttacatttttgtccttgctcccaacgaaatggataaacaaaaataaattaccatctactcatggaatgttgttgtgttagccagtctgaaagcccaccttaatttttatataactgtctttagctcttcttttgacagggcaggccttgttctgaactgtttcgcttctgactgttaaacaccgatgacgcatgcactgcacttcttcgttttcttcttgctcccccattggcctgagtttcttgtgcattactcctctccctccttcgttagaataggtatatcagctgtgtaaatagagcaagaaaacagtattctgcatctgtggcatttatgtagagttgcagttgtgtactgctgaaaatgcaggcttttgtaacagtgtgatctttactgatgcactcatgacaagtacccaatgtattttagctattttagtagtatttgttcaataaatacgcaagctgtaaggtaa

SEQ ID NO: 380505 - DNA, 2140 bp, Homo sapiens
cgcggactctttgtgtgtctgagcgcggctccgcgccgccgcaggcaccattttctgcttcgctcaggacaggcacataaaaggaaggcggctgccgcccgtcgccgtcctcttttcctcagatgccctctgctgcaggtgtagagaggagagagagtgaacagggagcggggcttttgtctgttggtctccctggactgaagagagggagaatagaagcccaagactaagattctcaaaatggtttattacccagaactctttgtctgggtcagtcaagaaccatttccaaacaaggacatggagggaaggcttcctaagttaagaaagaaaaacagaatccactgaaaataaaatttctatttgaaagtttcataagtgtaattgactaacgggaagacttcctgtcccaaaggaagtgaaccgcaagaagaacgatgagacaaacgctgcctccctgactccactgggcagcagtgaactccgctccccaagaatcagttacctccactttttttaatcgtaacacctccatttgtattacatatggtgtatgggtattgatgaggtcatggtatcatatatgggatttttttctgtgtaaatcatcaagtataagaagaaactatgggactctgagccttgctttagagaatttacagtggacaaataggtgtcatcaaaccagtttttaatcattctgactcaagtgaaaacgctcagaatttcacactgtgaatccacgtttacaacccttacaggtgggccttcaggcctggttcgctacaacaatgtcttccacaactcaaactcccaccgcgctcacacaaccggtccactcctgccttttcactcacacagctcccgactgcttcttgcagaggctgagagtcccccccccccaccttttttttcatttagatgtaacaaacctagtagtttatgttcatcaattgtctgtatatctctatattttatccatgtactcttttgatgtatagaagtagtttgaaactcattgtttccttgtggtaagtgaccgagatgctgccacaggacctgagacactgatgaatggtgctattttggactttcaacatgctccttggcgaggtagctctgatggagttattttttatttccatgttctaagaaggtgttggtactctgtttccctgaatgttgttctctagactggattgacttgttttccttgtgtcttcagtgtggctttcttcctcagtgttgtaggttgagcgaatgctaccagagtgtgagagaccattgtctcgttggctggcgctcacggacatgcagtcacggtagcgggagcaatcacaaaactgtaatttacttaccaaatctcttcctttccgtagcctcgcctgcctgacttagagaaagaaaagcaataattttacaggcattttgaggtgtctctttgggttctttctgtttgaaaggatatttgtcgaaaaaaagagcaaaaccgttttaaataaactccccctggaaaaaaacccaaaacactggcatctgagtaggaatatgaaaatgacaccttttccaaatattaaattggaaaacaaggtctacaaaatcatgatacttttttaaaaggcagagcattcttttttcggcaattttgataagcaaggtgtagatttacatttttgtccttgctcccaacgaaatggataaacaaaaataaattaccatctactcatggaatgttgttgtgttagccagtctgaaagcccaccttaatttttatataactgtctttagctcttcttttgacagggcaggccttgttctgaactgtttcgcttctgactgttaaacaccgatgacgcatgcactgcacttcttcgttttcttcttgctcccccattggcctgagtttcttgtgcattactcctctccctccttcgttagaataggtatatcagctgtgtaaatagagcaagaaaacagtattctgcatctgtggcatttatgtagagttgcagttgtgtactgctgaaaatgcaggcttttgtaacagtgtgatctttactgatgcactcatgacaagtacccaatgtattttagctattttagtagtatttgttcaataaatacgcaagctgtaaggtaa

SEQ ID NO: 380506 - DNA, 1980 bp, Homo sapiens
tttcctctttctctaagagtctctctctccctttccctctctctccccccaatctgtctttctagcatgttgccctttttcaaccacatttgtgtttcaggtgtagagaggagagagagtgaacagggagcggggcttttgtctgttggtctccctggactgaagagagggagaatagaagcccaagactaagattctcaaaatggtttattacccagaactctttgtctgggtcagtcaagaaccatttccaaacaaggacatggagggaaggcttcctaagggaagacttcctgtcccaaaggaagtgaaccgcaagaagaacgatgagacaaacgctgcctccctgactccactgggcagcagtgaactccgctccccaagaatcagttacctccactttttttaatcgtaacacctccatttgtattacatatggtgtatgggtattgatgaggtcatggtatcatatatgggatttttttctgtgtaaatcatcaagtataagaagaaactatgggactctgagccttgctttagagaatttacagtggacaaataggtgtcatcaaaccagtttttaatcattctgactttacaggtgggccttcaggcctggttcgctacaacaatgtcttccacaactcaaactcccaccgcgctcacacaaccggtccactcctgccttttcactcacacagctcccgactgcttcttgcagaggctgagagtcccccccccccaccttttttttcatttagatgtaacaaacctagtagtttatgttcatcaattgtctgtatatctctatattttatccatgtactcttttgatgtatagaagtagtttgaaactcattgtttccttgtggtaagtgaccgagatgctgccacaggacctgagacactgatgaatggtgctattttggactttcaacatgctccttggcgaggtagctctgatggagttattttttatttccatgttctaagaaggtgttggtactctgtttccctgaatgttgttctctagactggattgacttgttttccttgtgtcttcagtgtggctttcttcctcagtgttgtaggttgagcgaatgctaccagagtgtgagagaccattgtctcgttggctggcgctcacggacatgcagtcacggtagcgggagcaatcacaaaactgtaatttacttaccaaatctcttcctttccgtagcctcgcctgcctgacttagagaaagaaaagcaataattttacaggcattttgaggtgtctctttgggttctttctgtttgaaaggatatttgtcgaaaaaaagagcaaaaccgttttaaataaactccccctggaaaaaaacccaaaacactggcatctgagtaggaatatgaaaatgacaccttttccaaatattaaattggaaaacaaggtctacaaaatcatgatacttttttaaaaggcagagcattcttttttcggcaattttgataagcaaggtgtagatttacatttttgtccttgctcccaacgaaatggataaacaaaaataaattaccatctactcatggaatgttgttgtgttagccagtctgaaagcccaccttaatttttatataactgtctttagctcttcttttgacagggcaggccttgttctgaactgtttcgcttctgactgttaaacaccgatgacgcatgcactgcacttcttcgttttcttcttgctcccccattggcctgagtttcttgtgcattactcctctccctccttcgttagaataggtatatcagctgtgtaaatagagcaagaaaacagtattctgcatctgtggcatttatgtagagttgcagttgtgtactgctgaaaatgcaggcttttgtaacagtgtgatctttactgatgcactcatgacaagtacccaatgtattttagctattttagtagtatttgttcaataaatacgcaagctgtaaggtaa

SEQ ID NO: 380507 - DNA, 2018 bp, Homo sapiens
cgcggactctttgtgtgtctgagcgcggctccgcgccgccgcaggcaccattttctgcttcgctcaggacaggcacataaaaggaaggcggctgccgcccgtcgccgtcctcttttcctcagatgccctctgctgcaggtgtagagaggagagagagtgaacagggagcggggcttttgtctgttggtctccctggactgaagagagggagaatagaagcccaagactaagattctcaaaatggtttattacccagaactctttgtctgggtcagtcaagaaccatttccaaacaaggacatggagggaaggcttcctaagggaagacttcctgtcccaaaggaagtgaaccgcaagaagaacgatgagacaaacgctgcctccctgactccactgggcagcagtgaactccgctccccaagaatcagttacctccactttttttaatcgtaacacctccatttgtattacatatggtgtatgggtattgatgaggtcatggtatcatatatgggatttttttctgtgtaaatcatcaagtataagaagaaactatgggactctgagccttgctttagagaatttacagtggacaaataggtgtcatcaaaccagtttttaatcattctgactttacaggtgggccttcaggcctggttcgctacaacaatgtcttccacaactcaaactcccaccgcgctcacacaaccggtccactcctgccttttcactcacacagctcccgactgcttcttgcagaggctgagagtcccccccccccaccttttttttcatttagatgtaacaaacctagtagtttatgttcatcaattgtctgtatatctctatattttatccatgtactcttttgatgtatagaagtagtttgaaactcattgtttccttgtggtaagtgaccgagatgctgccacaggacctgagacactgatgaatggtgctattttggactttcaacatgctccttggcgaggtagctctgatggagttattttttatttccatgttctaagaaggtgttggtactctgtttccctgaatgttgttctctagactggattgacttgttttccttgtgtcttcagtgtggctttcttcctcagtgttgtaggttgagcgaatgctaccagagtgtgagagaccattgtctcgttggctggcgctcacggacatgcagtcacggtagcgggagcaatcacaaaactgtaatttacttaccaaatctcttcctttccgtagcctcgcctgcctgacttagagaaagaaaagcaataattttacaggcattttgaggtgtctctttgggttctttctgtttgaaaggatatttgtcgaaaaaaagagcaaaaccgttttaaataaactccccctggaaaaaaacccaaaacactggcatctgagtaggaatatgaaaatgacaccttttccaaatattaaattggaaaacaaggtctacaaaatcatgatacttttttaaaaggcagagcattcttttttcggcaattttgataagcaaggtgtagatttacatttttgtccttgctcccaacgaaatggataaacaaaaataaattaccatctactcatggaatgttgttgtgttagccagtctgaaagcccaccttaatttttatataactgtctttagctcttcttttgacagggcaggccttgttctgaactgtttcgcttctgactgttaaacaccgatgacgcatgcactgcacttcttcgttttcttcttgctcccccattggcctgagtttcttgtgcattactcctctccctccttcgttagaataggtatatcagctgtgtaaatagagcaagaaaacagtattctgcatctgtggcatttatgtagagttgcagttgtgtactgctgaaaatgcaggcttttgtaacagtgtgatctttactgatgcactcatgacaagtacccaatgtattttagctattttagtagtatttgttcaataaatacgcaagctgtaaggtaa

SEQ ID NO: 380508 - DNA, 1911 bp, Homo sapiens
tttcctctttctctaagagtctctctctccctttccctctctctccccccaatctgtctttctagcatgttgccctttttcaaccacatttgtgtttcaggtgtagagaggagagagagtgaacagggagcggggcttttgtctgtttattacccagaactctttgtctgggtcagtcaagaaccatttccaaacaaggacatggagggaaggcttcctaaggtaagatccttagatgccatattcagtgaactccgctccccaagaatcagttacctccactttttttaatcgtaacacctccatttgtattacatatggtgtatgggtattgatgaggtcatggtatcatatatgggatttttttctgtgtaaatcatcaagtataagaagaaactatgggactctgagccttgctttagagaatttacagtggacaaataggtgtcatcaaaccagtttttaatcattctgactcaagtgaaaacgctcagaatttcacactgtgaatccacgtttacaacccttacaggtgggccttcaggcctggttcgctacaacaatgtcttccacaactcaaactcccaccgcgctcacacaaccggtccactcctgccttttcactcacacagctcccgactgcttcttgcagaggctgagagtcccccccccccaccttttttttcatttagatgtaacaaacctagtagtttatgttcatcaattgtctgtatatctctatattttatccatgtactcttttgatgtatagaagtagtttgaaactcattgtttccttgtggtaagtgaccgagatgctgccacaggacctgagacactgatgaatggtgctattttggactttcaacatgctccttggcgaggtagctctgatggagttattttttatttccatgttctaagaaggtgttggtactctgtttccctgaatgttgttctctagactggattgacttgttttccttgtgtcttcagtgtggctttcttcctcagtgttgtaggttgagcgaatgctaccagagtgtgagagaccattgtctcgttggctggcgctcacggacatgcagtcacggtagcgggagcaatcacaaaactgtaatttacttaccaaatctcttcctttccgtagcctcgcctgcctgacttagagaaagaaaagcaataattttacaggcattttgaggtgtctctttgggttctttctgtttgaaaggatatttgtcgaaaaaaagagcaaaaccgttttaaataaactccccctggaaaaaaacccaaaacactggcatctgagtaggaatatgaaaatgacaccttttccaaatattaaattggaaaacaaggtctacaaaatcatgatacttttttaaaaggcagagcattcttttttcggcaattttgataagcaaggtgtagatttacatttttgtccttgctcccaacgaaatggataaacaaaaataaattaccatctactcatggaatgttgttgtgttagccagtctgaaagcccaccttaatttttatataactgtctttagctcttcttttgacagggcaggccttgttctgaactgtttcgcttctgactgttaaacaccgatgacgcatgcactgcacttcttcgttttcttcttgctcccccattggcctgagtttcttgtgcattactcctctccctccttcgttagaataggtatatcagctgtgtaaatagagcaagaaaacagtattctgcatctgtggcatttatgtagagttgcagttgtgtactgctgaaaatgcaggcttttgtaacagtgtgatctttactgatgcactcatgacaagtacccaatgtattttagctattttagtagtatttgttcaataaatacgcaagctgtaaggtaa

SEQ ID NO: 380509 - DNA, 1843 bp, Homo sapiens
tttcctctttctctaagagtctctctctccctttccctctctctccccccaatctgtctttctagcatgttgccctttttcaaccacatttgtgtttcaggtgtagagaggagagagagtgaacagggagcggggcttttgtctgttggtctccctggactgaagagagggagaatagaagcccaagactaagattctcaaaatgtacctccactttttttaatcgtaacacctccatttgtattacatatggtgtatgggtattgatgaggtcatggtatcatatatgggatttttttctgtgtaaatcatcaagtataagaagaaactatgggactctgagccttgctttagagaatttacagtggacaaataggtgtcatcaaaccagtttttaatcattctgactcaagtgaaaacgctcagaatttcacactgtgaatccacgtttacaacccttacaggtgggccttcaggcctggttcgctacaacaatgtcttccacaactcaaactcccaccgcgctcacacaaccggtccactcctgccttttcactcacacagctcccgactgcttcttgcagaggctgagagtcccccccccccaccttttttttcatttagatgtaacaaacctagtagtttatgttcatcaattgtctgtatatctctatattttatccatgtactcttttgatgtatagaagtagtttgaaactcattgtttccttgtggtaagtgaccgagatgctgccacaggacctgagacactgatgaatggtgctattttggactttcaacatgctccttggcgaggtagctctgatggagttattttttatttccatgttctaagaaggtgttggtactctgtttccctgaatgttgttctctagactggattgacttgttttccttgtgtcttcagtgtggctttcttcctcagtgttgtaggttgagcgaatgctaccagagtgtgagagaccattgtctcgttggctggcgctcacggacatgcagtcacggtagcgggagcaatcacaaaactgtaatttacttaccaaatctcttcctttccgtagcctcgcctgcctgacttagagaaagaaaagcaataattttacaggcattttgaggtgtctctttgggttctttctgtttgaaaggatatttgtcgaaaaaaagagcaaaaccgttttaaataaactccccctggaaaaaaacccaaaacactggcatctgagtaggaatatgaaaatgacaccttttccaaatattaaattggaaaacaaggtctacaaaatcatgatacttttttaaaaggcagagcattcttttttcggcaattttgataagcaaggtgtagatttacatttttgtccttgctcccaacgaaatggataaacaaaaataaattaccatctactcatggaatgttgttgtgttagccagtctgaaagcccaccttaatttttatataactgtctttagctcttcttttgacagggcaggccttgttctgaactgtttcgcttctgactgttaaacaccgatgacgcatgcactgcacttcttcgttttcttcttgctcccccattggcctgagtttcttgtgcattactcctctccctccttcgttagaataggtatatcagctgtgtaaatagagcaagaaaacagtattctgcatctgtggcatttatgtagagttgcagttgtgtactgctgaaaatgcaggcttttgtaacagtgtgatctttactgatgcactcatgacaagtacccaatgtattttagctattttagtagtatttgttcaataaatacgcaagctgtaaggtaa

SEQ ID NO: 380510 - DNA, 1939 bp, Homo sapiens
tttcctctttctctaagagtctctctctccctttccctctctctccccccaatctgtctttctagcatgttgccctttttcaaccacatttgtgtttcaggtgtagagaggagagagagtgaacagggagcggggcttttgtctgttggtctccctggactgaagagagggagaatagaagcccaagactaagattctcaaaatggtttattacccagaactctttgtctgggtcagtcaagaaccatttccaaacaaggacatggagggaaggcttcctaagggaagacttcctgtcccaaaggaagtgaaccgcaagaagaacgatctccatttgtattacatatggtgtatgggtattgatgaggtcatggtatcatatatgggatttttttctgtgtaaatcatcaagtataagaagaaactatgggactctgagccttgctttagagaatttacagtggacaaataggtgtcatcaaaccagtttttaatcattctgactcaagtgaaaacgctcagaatttcacactgtgaatccacgtttacaacccttacaggtgggccttcaggcctggttcgctacaacaatgtcttccacaactcaaactcccaccgcgctcacacaaccggtccactcctgccttttcactcacacagctcccgactgcttcttgcagaggctgagagtcccccccccccaccttttttttcatttagatgtaacaaacctagtagtttatgttcatcaattgtctgtatatctctatattttatccatgtactcttttgatgtatagaagtagtttgaaactcattgtttccttgtggtaagtgaccgagatgctgccacaggacctgagacactgatgaatggtgctattttggactttcaacatgctccttggcgaggtagctctgatggagttattttttatttccatgttctaagaaggtgttggtactctgtttccctgaatgttgttctctagactggattgacttgttttccttgtgtcttcagtgtggctttcttcctcagtgttgtaggttgagcgaatgctaccagagtgtgagagaccattgtctcgttggctggcgctcacggacatgcagtcacggtagcgggagcaatcacaaaactgtaatttacttaccaaatctcttcctttccgtagcctcgcctgcctgacttagagaaagaaaagcaataattttacaggcattttgaggtgtctctttgggttctttctgtttgaaaggatatttgtcgaaaaaaagagcaaaaccgttttaaataaactccccctggaaaaaaacccaaaacactggcatctgagtaggaatatgaaaatgacaccttttccaaatattaaattggaaaacaaggtctacaaaatcatgatacttttttaaaaggcagagcattcttttttcggcaattttgataagcaaggtgtagatttacatttttgtccttgctcccaacgaaatggataaacaaaaataaattaccatctactcatggaatgttgttgtgttagccagtctgaaagcccaccttaatttttatataactgtctttagctcttcttttgacagggcaggccttgttctgaactgtttcgcttctgactgttaaacaccgatgacgcatgcactgcacttcttcgttttcttcttgctcccccattggcctgagtttcttgtgcattactcctctccctccttcgttagaataggtatatcagctgtgtaaatagagcaagaaaacagtattctgcatctgtggcatttatgtagagttgcagttgtgtactgctgaaaatgcaggcttttgtaacagtgtgatctttactgatgcactcatgacaagtacccaatgtattttagctattttagtagtatttgttcaataaatacgcaagctgtaaggtaa

SEQ ID NO: 380511 - DNA, 1919 bp, Homo sapiens
tttcctctttctctaagagtctctctctccctttccctctctctccccccaatctgtctttctagcatgttgccctttttcaaccacatttgtgtttcaggtgtagagaggagagagagtgaacagggagcggggcttttgtctgtttattacccagaactctttgtctgggtcagtcaagaaccatttccaaacaaggacatggagggaaggcttcctaagggaagacttcctgtcccaaaggaagtgaaccgcaagaagaacgatgagacaaacgctgcctccctgactccactgggcagcagtgaactccgctccccaagaatcagttacctccactttttttaatcgtaacacctccatttgtattacatatggtgtatgggtattgatgaggtcatggtatcatatatgggatttttttctgtgtaaatcatcaagtataagaagaaactatgggactctgagccttgctttagagaatttacagtggacaaataggtgtcatcaaaccagtttttaatcattctgactttacaggtgggccttcaggcctggttcgctacaacaatgtcttccacaactcaaactcccaccgcgctcacacaaccggtccactcctgccttttcactcacacagctcccgactgcttcttgcagaggctgagagtcccccccccccaccttttttttcatttagatgtaacaaacctagtagtttatgttcatcaattgtctgtatatctctatattttatccatgtactcttttgatgtatagaagtagtttgaaactcattgtttccttgtggtaagtgaccgagatgctgccacaggacctgagacactgatgaatggtgctattttggactttcaacatgctccttggcgaggtagctctgatggagttattttttatttccatgttctaagaaggtgttggtactctgtttccctgaatgttgttctctagactggattgacttgttttccttgtgtcttcagtgtggctttcttcctcagtgttgtaggttgagcgaatgctaccagagtgtgagagaccattgtctcgttggctggcgctcacggacatgcagtcacggtagcgggagcaatcacaaaactgtaatttacttaccaaatctcttcctttccgtagcctcgcctgcctgacttagagaaagaaaagcaataattttacaggcattttgaggtgtctctttgggttctttctgtttgaaaggatatttgtcgaaaaaaagagcaaaaccgttttaaataaactccccctggaaaaaaacccaaaacactggcatctgagtaggaatatgaaaatgacaccttttccaaatattaaattggaaaacaaggtctacaaaatcatgatacttttttaaaaggcagagcattcttttttcggcaattttgataagcaaggtgtagatttacatttttgtccttgctcccaacgaaatggataaacaaaaataaattaccatctactcatggaatgttgttgtgttagccagtctgaaagcccaccttaatttttatataactgtctttagctcttcttttgacagggcaggccttgttctgaactgtttcgcttctgactgttaaacaccgatgacgcatgcactgcacttcttcgttttcttcttgctcccccattggcctgagtttcttgtgcattactcctctccctccttcgttagaataggtatatcagctgtgtaaatagagcaagaaaacagtattctgcatctgtggcatttatgtagagttgcagttgtgtactgctgaaaatgcaggcttttgtaacagtgtgatctttactgatgcactcatgacaagtacccaatgtattttagctattttagtagtatttgttcaataaatacgcaagctgtaaggtaa

SEQ ID NO: 380512 - DNA, 1546 bp, Homo sapiens
agagagagactcttagagaaagagagagacacacacactcttggagagagagcgcgaggtgtagagaggagagagagtgaacagggagcggggcttttgtctgttggtctccctggactgaagagagggagaatagaagcccaagactaagattctcaaaatggtttattacccagaactctttgtctgggtcagtcaagaaccatttccaaacaaggacatggagggaaggcttcctaagggaagacttcctgtcccaaaggaagtgaaccgcaagaagaacgatgagacaaacgctgcctccctgactccactgggcagcagtgaactccgctccccaagaatcagttacctccactttttttaatcgtaacacctccatttgtattacatatggtgtatgggtattgatgaggtcatggtatcatatatgggatttttttctgtgtaaatcatcaagtataagaagaaactatgggactctgagccttgctttagagaatttacagtggacaaataggtgtcatcaaaccagtttttaatcattctgactcaagtgaaaacgctcagaatttcacactgtgaatccacgtttacaacccttacaggtgggccttcaggcctggttcgctacaacaatgtcttccacaactcaaactcccaccgcgctcacacaaccggtccactcctgccttttcactcacacagctcccgactgcttcttgcagaggctgagagtcccccccccccaccttttttttcatttagatgtaacaaacctagtagtttatgttcatcaattgtagaaagaaaagcaataattttacaggcattttgaggtgtctctttgggttctttctgtttgaaaggatatttgtcgaaaaaaagagcaaaaccgttttaaataaactccccctggaaaaaaacccaaaacactggcatctgagtaggaatatgaaaatgacaccttttccaaatattaaattggaaaacaaggtctacaaaatcatgatacttttttaaaaggcagagcattcttttttcggcaattttgataagcaaggtgtagatttacatttttgtccttgctcccaacgaaatggataaacaaaaataaattaccatctactcatggaatgttgttgtgttagccagtctgaaagcccaccttaatttttatataactgtctttagctcttcttttgacagggcaggccttgttctgaactgtttcgcttctgactgttaaacaccgatgacgcatgcactgcacttcttcgttttcttcttgctcccccattggcctgagtttcttgtgcattactcctctccctccttcgttagaataggtatatcagctgtgtaaatagagcaagaaaacagtattctgcatctgtggcatttatgtagagttgcagttgtgtactgctgaaaatgcaggcttttgtaacagtgtgatctttactgatgcactcatgacaagtacccaatgtattttagctattttagtagtatttgttcaataaatacgcaagctgtaaggtaa

SEQ ID NO: 380513 - DNA, 962 bp, Homo sapiens
acgtattatagcattgatacgtattccttgggtctatctgttgtagcgctcgcgaactcagtagtaagccaggtaagagcgaatgctaccagagtgtgagagaccattgtctcgttggctggcgctcacggacatgcagtcacggtagcgggagcaatcacaaaactgtaatttacttaccaaatctcttcctttccgtagcctcgcctgcctgacttagagaaagaaaagcaataattttacaggcattttgaggtgtctctttgggttctttctgtttgaaaggatatttgtcgaaaaaaagagcaaaaccgttttaaataaactccccctggaaaaaaacccaaaacactggcatctgagtaggaatatgaaaatgacaccttttccaaatattaaattggaaaacaaggtctacaaaatcatgatacttttttaaaaggcagagcattcttttttcggcaattttgataagcaaggtgtagatttacatttttgtccttgctcccaacgaaatggataaacaaaaataaattaccatctactcatggaatgttgttgtgttagccagtctgaaagcccaccttaatttttatataactgtctttagctcttcttttgacagggcaggccttgttctgaactgtttcgcttctgactgttaaacaccgatgacgcatgcactgcacttcttcgttttcttcttgctcccccattggcctgagtttcttgtgcattactcctctccctccttcgttagaataggtatatcagctgtgtaaatagagcaagaaaacagtattctgcatctgtggcatttatgtagagttgcagttgtgtactgctgaaaatgcaggcttttgtaacagtgtgatctttactgatgcactcatgacaagtacccaatgtattttagctattttagtagtatttgttcaataaatacgcaagctgtaaggtaa

SEQ ID NO: 380514 - DNA, 1105 bp, Homo sapiens
tttcctctttctctaagagtctctctctccctttccctctctctccccccaatctgtctttctagcatgttgccctttttcaaccacatttgtgtttcaggtgtagagaggagagagagtgaacagggagcggggcttttgtctgttggtctccctggactgaagagagggagaatagaagcccaagactaagattctcaaaatggtttattacccagaactctttgtctgggtcagtcaagaaccatttccaaacaaggacatggagggaaggcttcctaagggaagacttcctgtcccaaaggaagtgaaccgcaagaagaacgatgagacaaacgctgcctccctgactccactgggcagcagtgaactccgctccccaagaatcagtttttgaggtgtctctttgggttctttctgtttgaaaggatatttgtcgaaaaaaagagcaaaaccgttttaaataaactccccctggaaaaaaacccaaaacactggcatctgagtaggaatatgaaaatgacaccttttccaaatattaaattggaaaacaaggtctacaaaatcatgatacttttttaaaaggcagagcattcttttttcggcaattttgataagcaaggtgtagatttacatttttgtccttgctcccaacgaaatggataaacaaaaataaattaccatctactcatggaatgttgttgtgttagccagtctgaaagcccaccttaatttttatataactgtctttagctcttcttttgacagggcaggccttgttctgaactgtttcgcttctgactgttaaacaccgatgacgcatgcactgcacttcttcgttttcttcttgctcccccattggcctgagtttcttgtgcattactcctctccctccttcgttagaataggtatatcagctgtgtaaatagagcaagaaaacagtattctgcatctgtggcatttatgtagagttgcagttgtgtactgctgaaaatgcaggcttttgtaacagtgtgatctttactgatgcactcatgacaagtacccaatgtattttagctattttagtagtatttgttcaataaatacgcaagctgtaaggtaa

SEQ ID NO: 380515 - DNA, 1095 bp, Homo sapiens
tttcctctttctctaagagtctctctctccctttccctctctctccccccaatctgtctttctagcatgttgccctttttcaaccacatttgtgtttcaggtgtagagaggagagagagtgaacagggagcggggcttttgtctgttggtctccctggactgaagagagggagaatagaagcccaagactaagattctcaaaatggtttattacccagaactctttgtctgggtcagtcaagaaccatttccaaacaaggacatggagggaaggcttcctaagggaagacttcctgtcccaaaggaagtgaaccgcaagaagaacgatgagacaaacgctgcctccctgactccactgggcagcagtgaactccgctccccaagaatcagttacctccactttttttaatcgtaacacctccatttgtattacatatggtgtatgggtattgatgaggtcatggtatcatatatgggatttttttctgtgtaaatcatcaagtataagaagaaactatgggactctgagccttgctttagagaatttacagtggacaaataggtgtcatcaaaccagtttttaatcattctgactcaagtgaaaacgctcagaatttcacactgtgaatccacgtttacaacccttacaggtgggccttcaggcctggttcgctacaacaatgtcttccacaactcaaactcccaccgcgctcacaccttaatttttatataactgtctttagctcttcttttgacagggcaggccttgttctgaactgtttcgcttctgactgttaaacaccgatgacgcatgcactgcacttcttcgttttcttcttgctcccccattggcctgagtttcttgtgcattactcctctccctccttcgttagaataggtatatcagctgtgtaaatagagcaagaaaacagtattctgcatctgtggcatttatgtagagttgcagttgtgtactgctgaaaatgcaggcttttgtaacagtgtgatctttactgatgcactcatgacaagtacccaatgtattttagctattttagtagtatttgttcaataaatacgcaagctgtaaggtaa

SEQ ID NO: 380516 - DNA, 1137 bp, Homo sapiens
cgctttgtctccccggggcgccgcgcggtgcagtggggacggcgcggcgagcggggcgcccggggcgcgggtgcggggtgtcggggcgcgcgcgcctgttggccgctcgccgacggggcccagagccgccgattcctgccgagtgtagagaggagagagagtgaacagggagcggggcttttgtctgttggtctccctggactgaagagagggagaatagaagcccaagactaagattctcaaaatggtttattacccagaactctttgtctgggtcagtcaagaaccatttccaaacaaggacatggagggaaggcttcctaagggaagacttcctgtcccaaaggaagtgaaccgcaagaagaacgatgagacaaacgctgcctccctgactccactgggcagcagtgaactccgctccccaagaatcagttacctccactttttttaatcgtaacacctccatttgtattacatatggtgtatgggtattgatgaggtcatggtatcatatatgggatttttttctgtgtaaatcatcaagtataagaagaaactatgggactctgagccttgctttagagaatttacagtggacaaataggtgtcatcaaaccagtttttaatcattctgactcaagtgaaaacgctcagaatttcacactgtgaatccacgtttacaacccttacaggtgggccttcaggcctggttcgctacaacaatgtcttccacaactcaaactcccaccgcgctcacaccttaatttttatataactgtctttagctcttcttttgacagggcaggccttgttctgaactgtttcgcttctgactgttaaacaccgatgacgcatgcactgcacttcttcgttttcttcttgctcccccattggcctgagtttcttgtgcattactcctctccctccttcgttagaataggtatatcagctgtgtaaatagagcaagaaaacagtattctgcatctgtggcatttatgtagagttgcagttgtgtactgctgaaaatgcaggcttttgtaacagtgtgatctttactgatgcactcatgacaagtacccaatgtattttagctattttagtagtatttgttcaataaatacgcaagctgtaaggtaa

SEQ ID NO: 380517 - DNA, 1024 bp, Homo sapiens
tttcctctttctctaagagtctctctctccctttccctctctctccccccaatctgtctttctagcatgttgccctttttcaaccacatttgtgtttcaggtgtagagaggagagagagtgaacagggagcggggcttttgtctgttggtctccctggactgaagagagggagaatagaagcccaagactaagattctcaaaatggtttattacccagaactctttgtctgggtcagtcaagaaccatttccaaacaaggacatggagggaaggcttcctaagggaagacttcctgtcccaaaggaagtgaaccgcaagaagaacgatgagacaaacgctgcctccctgactccactgggcagcagtgaactccgctccccaagaatcagttacctccactttttttaatcgtaacacctccatttgtattacatatggtgtatgggtattgatgaggtcatggtatcatatatgggatttttttctgtgtaaatcatcaagtataagaagaaactatgggactctgagccttgctttagagaatttacagtggacaaataggtgtcatcaaaccagtttttaatcattctgactcaagtgaaaacgctcagaatttcacactgtgaatccacgtttacaacccaccttaatttttatataactgtctttagctcttcttttgacagggcaggccttgttctgaactgtttcgcttctgactgttaaacaccgatgacgcatgcactgcacttcttcgttttcttcttgctcccccattggcctgagtttcttgtgcattactcctctccctccttcgttagaataggtatatcagctgtgtaaatagagcaagaaaacagtattctgcatctgtggcatttatgtagagttgcagttgtgtactgctgaaaatgcaggcttttgtaacagtgtgatctttactgatgcactcatgacaagtacccaatgtattttagctattttagtagtatttgttcaataaatacgcaagctgtaaggtaa

SEQ ID NO: 380518 - DNA, 917 bp, Homo sapiens
tttcctctttctctaagagtctctctctccctttccctctctctccccccaatctgtctttctagcatgttgccctttttcaaccacatttgtgtttcaggtgtagagaggagagagagtgaacagggagcggggcttttgtctgttggtctccctggactgaagagagggagaatagaagcccaagactaagattctcaaaatggtttattacccagaactctttgtctgggtcagtcaagaaccatttccaaacaaggacatggagggaaggcttcctaagggaagacttcctgtcccaaaggaagtgaaccgcaagaagaacgatgagacaaacgctgcctccctgactccactgggcagcagtgaactccgctccccaagaatcagttacctccactttttttaatcgtaacacctccatttgtattacatatggtgtatgggtattgatgaggtcatggtatcatatatgggatttttttctgtgtaaatcatcaagtataagaagaaactatgggactctgagccttgctttagagaatttacagtggacaaataggtgtcatcaaaccagtttttaatcattctgactcaagtgaaaacgctcagaatttcacactgtgaatccacgtttacaacccttacaggtgggccttcaggcctggttcgctacaacaatgtcttccacaactcaaactcccaccgcgctcacctttgggacaggaagtcttcccttaggaagccttccctccatgtccttgtttggaaatggttcttgactgacccagacaaagagttctgggtaataaaccattttgagaatcttagtcttgggcttctattctccctctcttcagtccagggagaccacagacaaagccccgctcctgttcactctctctcatcagtccgga

SEQ ID NO: 380519 - DNA, 792 bp, Homo sapiens
tttcctctttctctaagagtctctctctccctttccctctctctccccccaatctgtctttctagcatgttgccctttttcaaccacatttgtgtttcaggtgtagagaggagagagagtgaacagggagcggggcttttgtctgttggtctccctggactgaagagagggagaatagaagcccaagactaagattctcaaaatggtttattacccagaactctttgtctgggtcagtcaagaaccatttccaaacaaggacatggagggaaggcttcctaagggaagacttcctgtcccaaaggaagtgaaccgcaagaagaacgatgagacaaacgctgcctccctgactccactgggcagcagtgaactccgctccccaagaatcagttacctccactttttttaatcgtaacacctccatttgtattacatatggtgtatgggtattgatgaggtcatggtatcatatatgggatttttttctgtgtaaatcatcaagtataagaagaaactatgggactctgagccttgctttagagaatttacagtggacaaataggtgtcatcaaaccagtttttaatcattctgactcaagtgaaaacgctcagaatttcacactgtgaatccacgtttacaacccttacaggtgggccttcaggcctggttcgctacaacaatgtcttccacaactcaaactcccaccgcgctcacccatgtgcatatgtaatatttgaggcaaagctgggaagtttcctttatttcgctttacaatattgtatctcatcatg

SEQ ID NO: 380520 - DNA, 754 bp, Homo sapiens
tttcctctttctctaagagtctctctctccctttccctctctctccccccaatctgtctttctagcatgttgccctttttcaaccacatttgtgtttcaggtgtagagaggagagagagtgaacagggagcggggcttttgtctgttggtctccctggactgaagagagggagaatagaagcccaagactaagattctcaaaatggtttattacccagaactctttgtctgggtcagtcaagaaccatttccaaacaaggacatggagggaaggcttcctaagggaagacttcctgtcccaaaggaagtgaaccgcaagaagaacgatgagacaaacgctgcctccctgactccactgggcagcagtgaactccgctccccaagaatcagttacctccactttttttaatcgtaacacctccatttgtattacatatggtgtatgggtattgatgaggtcatggtatcatatatgggatttttttctgtgtaaatcatcaagtataagaagaaactatgggactctgagccttgctttagagaatttacagtggacaaataggtgtcatcaaaccagtttttaatcattctgactctgcatctgtggcatttatgtagagttgcagttgtgtactgctgaaaatgcaggcttttgtaacagtgtgatctttactgatgcactcatgacaagtacccaatgtattttagctattttagtagtatttgttcaataaatacgcaagctgtaaggtaa

SEQ ID NO: 380521 - DNA, 2241 bp, Homo sapiens
  misc_feature (449)..(449): n is a, c, g, or t
cgctttgtctccccggggcgccgcgcggtgcagtggggacggcgcggcgagcggggcgcccggggcgcgggtgcggggtgtcggggcgcgcgcgcctgttggccgctcgccgacggggcccagagccgccgattcctgccgagtgtagagaggagagagagtgaacagggagcggggcttttgtctgttggtctccctggactgaagagagggagaatagaagcccaagactaagattctcaaaatggtttattacccagaactctttgtctgggtcagtcaagaaccatttccaaacaaggacatggagggaaggcttcctaaggtaagatccttagatgccatattgttaacactattttcaatatagaaacaattgttttaaaatatcagagctttttcatttgaatacccattataggctgctataacaatccattaatctgatnctatgatgaccttggaaataatgtacttttaaaaaatatcctaaagtcctatgacttaaagttcacattatcttccttcataaatgaaaaattttcatttaaaacatggaatcagtttatcaaagtacagtttacaggttttaagtctgttccatttctggttagacaaactcaaatacaatgatcaaactaaaagatttcttaaaagtatgatgactattaattgtctgctaatgaagtctgaaggtctgataagattatccatgaagcaaaagggaggaacaaaaaaactgttacatttctttcttctaatttttgagcctaaaaaccattttttataaacgtggtttcattgttctgacatcttaggtgtggcagttctctgcctcaagaaaatttgtaaaatttatattttagattttagcataatttctgaaacaaacaataacaactacttaccagtttttactgtagatactggactttgcctcttagggtgaatacttgtttgacttcaagcggggagagtatactttttaaccaatgacttgctgattttgcagttaagaaagaaaaacagaatccactgaaaataaaatttctatttgaaagtttcataagtgtaattgactaacggtgagtcctcccccagctgttactggtatttcaatgtttaagaaattattttatttacactaaatagtctcaacaattccctatcttatactggcaggcagaaactgaagaggttgtatcaactggcagtttgcactgaaagaaaacaatcttaaatcacttttaatcttgcagagcatttttgaaggtcaaggttgaaatcactggcaggaaagtaggtgaacaaaatggtttgaccctgcctgaactagacttgcactgatttgtagagctggagtggaagagagctaaaatagtagcgctttccttaaaagacacccacaccccaccacctcaccagcagcacaccagcggcagcagcagtataaccacagacattcgtcactgtgccagatcagggcataattctcttaaggcagctgaggccttcacattagttcttgcctcattcaggcatccagaggtcctctctctttgatactggtgacataaaccagaggggcaagactaggcatagttccttgatgagttcagtggtgcctcaccgtacccttagaaagccagccctgctgtgctaggtcttgtctcacacaaagacatgctcccaggggtgggcaccgtggatcatggtattcaggtcttctgctattttaagttctttcttctctaaatatgtgaataatattttaagcatagtgttatttgttctttttccagaagttcccttctggaaaagcatatctttgtataattgtaggaaaaataatcttgacttacttggtccaaagcacattattaactggggattaatttcctagtagtcatctgtcgggagggctgatccaccccgaggcacattaactggcgtgactttcaggacggcggggctgtgggagccactggacacatctgccccccaacccctagcctcttgaattactcaagtccctcagctctgttggcacaaatacgtgctggatgatagaagaaccgtttttcccatggatgaactttttttggcttgaattcttacaaggcctgacttctggatctggagaaagaagacttctttgtgtcccatcttcaaaatgcctcctccacttgttgcagaagcctaaaattcctttagttggggcagaaagcctattattattta

SEQ ID NO: 380522 - DNA, 764 bp, Homo sapiens
agagagagactcttagagaaagagagagacacacacactcttggagagagagcgcgaggtgtagagaggagagagagtgaacagggagcggggcttttgtctgttggtctccctggactgaagagagggagaatagaagcccaagactaagattctcaaaatggtttattacccagaactctttgtctgggtcagtcaagaaccatttccaaacaaggacatggagggaaggcttcctaaggaaacttctctgtcccctttcatggagtcataacaatggaagaggttcaggagaaaggaatcagctccttgcaaggtttctgatactgtccttcctgaaatgaagagctcctctaccttaacccagcctgctaagactgctacagcaagattgacagctggtcagattgctgtcctcataaaagcatggtcatcaccttcagctgggctctcaaatggaacagccgggcaatctttgtttccctggtcagtttgtcttcccatttccatgtcaaaattcctgtcaaacttctgaatctctcacctatctcagcaaatgggaagtctccacatctctacacctacctgttctcatgctcctgtcctgcttcgctcctcacatttgacaaggagctcctcctcctatgaaaggccacttgtcccatagctttcttccatcccatcgtgtctcagcatctcagggatcttgcactgatcattgtcccattttcagagccggtccaagaggcagattacctgagcag

SEQ ID NO: 380523 - DNA, 982 bp, Homo sapiens
  misc_feature (11)..(11): n is a, c, g, or t
  misc_feature (64)..(64): n is a, c, g, or t
  misc_feature (76)..(76): n is a, c, g, or t
  misc_feature (117)..(117): n is a, c, g, or t
  misc_feature (153)..(153): n is a, c, g, or t
  misc_feature (200)..(200): n is a, c, g, or t
  misc_feature (323)..(323): n is a, c, g, or t
  misc_feature (372)..(372): n is a, c, g, or t
  misc_feature (433)..(433): n is a, c, g, or t
  misc_feature (513)..(513): n is a, c, g, or t
  misc_feature (515)..(515): n is a, c, g, or t
  misc_feature (519)..(519): n is a, c, g, or t
  misc_feature (563)..(563): n is a, c, g, or t
  misc_feature (639)..(639): n is a, c, g, or t
  misc_feature (668)..(668): n is a, c, g, or t
  misc_feature (709)..(709): n is a, c, g, or t
acagagccatnggaactggggccttccctgaacagtgatcatgccaggcctggacctttagccntgcctccccagnactccttagatccaactctttcaacaaacttctgtgatcancagccccctgcgggcaggggggttctccctccaccnactctcaaggctcctcagcctaagactatggctcatgagaaacactnaggcctgacctaggcttgggagtcaaactgctcatattgagcatattgttaagtgggtaaagccaagtaaaggtactgggtgtttttgtgaccacttgtgaatgggtgtatggagcactgaanagggtctctgcctgaaggctcctgtctgactattcccggatcccttatnactgccttctgagacttcctctttggggtacccttcatgtatgcccacgggggtgattgtnattcgtgagactgcagttgcttggagtacttctttgcccaaggaatcccacagaccccctcccgatagcacagtggctcngntctnacttgctcctgcttacgaagtattcccaatcactggtcctctgnccctacttggacactcctggacagtcatgttttttaaattcttcctttttatcaagtcagagggtatacttctatnatttttactcatggatgttaggaaatctngtcttcttccctgtgattgccctgttaagtatttaaccatngctttcatgtgtttcccaaatcttctctagattaaatttcttgtgcattactcctctccctccttcgttagaataggtatatcagctgtgtaaatagagcaagaaaacagtattctgcatctgtggcatttatgtagagttgcagttgtgtactgctgaaaatgcaggcttttgtaacagtgtgatctttactgatgcactcatgacaagtacccaatgtattttagctattttagtagtatttgttcaataaatacgcaagctgtaaggtaa

SEQ ID NO: 380524 - DNA, 1942 bp, Homo sapiens
cccacgcgtacgcccacgcgtcgaggagagagagtgaacaggagcggggctttgtctgttggtctccctggactgaagagagggagaatagaagcccaagactaagattctcaaaatggtttattacccagaactctttgtctgggtcagtcaagaaccatttccaaacaaggacatggagggaaggcttcctaagggaagacttcctgtcccaaaggaagtgaaccgcaagaagaacgatgagacaaacgctgcctccctgactccactgggcagcagtgaactccgctccccaagaatcagttacctccactttttttaatcgtaacacctccatttgtattacatatggtgtatgggtattgatgaggtcatggtatcatatatgggatttttttctgtgtaaatcatcaagtataagaagaaactatgggactctgagccttgctttagagaatttacagtggacaaataggtgtcatcaaaccagtttttaatcattctgactcaagtgaaaacgctcagaatttcacactgtgaatccacgtttacaacccttacaggtgggccttcaggcctggttcgctacaacaatgtcttccacaactcaaactcccaccgcgctcacacaaccggtccactcctgccttttcactcacacagctcccgactgcttcttgcagaggctgagagtcccccccccccaccttttttttcatttagatgtaacaaacctagtagtttatgttcatcaattgtctgtatatctctatattttatccatgtactcttttgatgtatagaagtagtttgaaactcattgtttccttgtggtaagtgaccgagatgctgccacaggacctgagacactgatgaatggtgctattttggactttcaacatgctccttggcgaggtagctctgatggagttattttttatttccatgttctaagaaggtgttggtactctgtttccctgaatgttgttctctagactggattgacttgttttccttgtgtcttcagtgtggctttcttcctcagtgttgtaggttgagcgaatgctaccagagtgtgagagaccattgtctcgttggctggcgctcacggacatgcagtcacggtagcgggagcaatcacaaaactgtaatttacttaccaaatctcttcctttccgtagcctcgcctgcctgacttagagaaagaaaagcaataattttacaggcattttgaggtgtctctttgggttctttctgtttgaaaggatatttgtcgaaaaaaagagcaaaaccgttttaaataaactccccctggaaaaaaacccaaaacactggcatctgagtaggaatatgaaaatgacaccttttccaaatattaaattggaaaacaaggtctacaaaatcatgatacttttttaaaaggcagagcattcttttttcggcaattttgataagcaaggtgtagatttacatttttgtccttgctcccaacgaaatggataaacaaaaataaattaccatctactcatggaatgttgttgtgttagccagtctgaaagcccaccttaatttttatataactgtctttagctcttcttttgacagggcaggccttgttctgaactgtttcgcttctgactgttaaacaccgatgacgcatgcactgcacttcttcgttttcttcttgctcccccattggcctgagtttcttgtgcattactcctctccctccttcgttagaataggtatatcagctgtgtaaatagagcaagaaaacagtattctgcatctgtggcatttatgtagagttgcagttgtgtactgctgaaaatgcaggcttttgtaacagtgtgatctttactgatgcactcatgacaagtacccaatgtattttagctattttagtagtatttgttcaataaatacgcaagctgtaaggtaa

SEQ ID NO: 380525 - DNA, 2831 bp, Homo sapiens
  misc_feature (449)..(449): n is a, c, g, or t
cgctttgtctccccggggcgccgcgcggtgcagtggggacggcgcggcgagcggggcgcccggggcgcgggtgcggggtgtcggggcgcgcgcgcctgttggccgctcgccgacggggcccagagccgccgattcctgccgagtgtagagaggagagagagtgaacagggagcggggcttttgtctgttggtctccctggactgaagagagggagaatagaagcccaagactaagattctcaaaatggtttattacccagaactctttgtctgggtcagtcaagaaccatttccaaacaaggacatggagggaaggcttcctaaggtaagatccttagatgccatattgttaacactattttcaatatagaaacaattgttttaaaatatcagagctttttcatttgaatacccattataggctgctataacaatccattaatctgatnctatgatgaccttggaaataatgtacttttaaaaaatatcctaaagtcctatgacttaaagttcacattatcttccttcataaatgaaaaattttcatttaaaacatggaatcagtttatcaaagtacagtttacaggttttaagtctgttccatttctggttagacaaactcaaatacaatgatcaaactaaaagatttcttaaaagtatgatgactattaattgtctgctaatgaagtctgaaggtctgataagattatccatgaagcaaaagggaggaacaaaaaaactgttacatttctttcttctaatttttgagcctaaaaaccattttttataaacgtggtttcattgttctgacatcttaggtgtggcagttctctgcctcaagaaaatttgtaaaatttatattttagattttagcataatttctgaaacaaacaataacaactacttaccagtttttactgtagatactggactttgcctcttagggtgaatacttgtttgacttcaagcggggagagtatactttttaaccaatgacttgctgattttgcagttaagaaagaaaaacagaatccactgaaaataaaatttctatttgaaagtttcataagtgtaattgactaacgggaagacttcctgtcccaaaggaagtgaaccgcaagaagaacgatgagacaaacgctgcctccctgactccactgggcagcagtgaactccgctccccaagaatcagttacctccactttttttaatcgtaacacctccatttgtattacatatggtgtatgggtattgatgaggtcatggtatcatatatgggatttttttctgtgtaaatcatcaagtataagaagaaactatgggactctgagccttgctttagagaatttacagtggacaaataggtgtcatcaaaccagtttttaatcattctgactcaagtgaaaacgctcagaatttcacactgtgaatccacgtttacaacccttacaggtgggccttcaggcctggttcgctacaacaatgtcttccacaactcaaactcccaccgcgctcacacaaccggtccactcctgccttttcactcacacagctcccgactgcttcttgcagaggctgagagtcccccccccccaccttttttttcatttagatgtaacaaacctagtagtttatgttcatcaattgtctgtatatctctatattttatccatgtactcttttgatgtatagaagtagtttgaaactcattgtttccttgtggtaagtgaccgagatgctgccacaggacctgagacactgatgaatggtgctattttggactttcaacatgctccttggcgaggtagctctgatggagttattttttatttccatgttctaagaaggtgttggtactctgtttccctgaatgttgttctctagactggattgacttgttttccttgtgtcttcagtgtggctttcttcctcagtgttgtaggttgagcgaatgctaccagagtgtgagagaccattgtctcgttggctggcgctcacggacatgcagtcacggtagcgggagcaatcacaaaactgtaatttacttaccaaatctcttcctttccgtagcctcgcctgcctgacttagagaaagaaaagcaataattttacaggcattttgaggtgtctctttgggttctttctgtttgaaaggatatttgtcgaaaaaaagagcaaaaccgttttaaataaactccccctggaaaaaaacccaaaacactggcatctgagtaggaatatgaaaatgacaccttttccaaatattaaattggaaaacaaggtctacaaaatcatgatacttttttaaaaggcagagcattcttttttcggcaattttgataagcaaggtgtagatttacatttttgtccttgctcccaacgaaatggataaacaaaaataaattaccatctactcatggaatgttgttgtgttagccagtctgaaagcccaccttaatttttatataactgtctttagctcttcttttgacagggcaggccttgttctgaactgtttcgcttctgactgttaaacaccgatgacgcatgcactgcacttcttcgttttcttcttgctcccccattggcctgagtttcttgtgcattactcctctccctccttcgttagaataggtatatcagctgtgtaaatagagcaagaaaacagtattctgcatctgtggcatttatgtagagttgcagttgtgtactgctgaaaatgcaggcttttgtaacagtgtgatctttactgatgcactcatgacaagtacccaatgtattttagctattttagtagtatttgttcaataaatacgcaagctgtaaggtaa

SEQ ID NO: 380526 - DNA, 998 bp, Homo sapiens
tttcctctttctctaagagtctctctctccctttccctctctctccccccaatctgtctttctagcatgttgccctttttcaaccacatttgtgtttcaggtgtagagaggagagagagtgaacagggagcggggcttttgtctgtttattacccagaactctttgtctgggtcagtcaagaaccatttccaaacaaggacatggagggaaggcttcctaagggaagacttcctgtcccaaaggaagtgaaccgcaagaagaacgatgagacaaacgctgcctccctgactccactgggcagcagtgaactccgctccccaagaatcagttacctccactttttttaatcgtaacacctccatttgtattacatatggtgtatgggtattgatgaggtcatggtatcatatatgggatttttttctgtgtaaatcatcaagtataagaagaaactatgggactctgagccttgctttagagaatttacagtggacaaataggtgtcatcaaaccagtttttaatcattctgactcaagtgaaaacgctcagaatttcacactgtgaatccacgtttacaacccttacaggtgggccttcaggcctggttcgctacaacaatgtcttccacaactcaaactcccaccgcgctcacacaaccggtccactcctgccttttcactcacacagctcccgactgcttcttgcagaggctgagagtcccccccccccaccttttttttcatttagatgtaacaaacctagtagtttatgttcatcaattgtctgtatatctctatattttatccatgtactcttttgatgtatagaagtagtttgaaactcattgtttccttgtggtaagtgaccgagatgctgccagggcctgaaacctcgtaaggcgcaatcggactcacattgcctgggagggagcgagggtattaatcagtcaaagggggccggccgagtggcacggtgcgtccggccaggcccaggaga

SEQ ID NO: 380527 - DNA, 277 bp, Homo sapiens
agagagagactcttagagaaagagagagacacacacactcttggagagagagcgcgaggtgtagagaggagagagagtgaacagggagcggggcttttgtctgttggtctccctggactgaagagagggagaatagaagcccaagactaagattctcaaaatggtttattacccagaactctttgtctgggtcagtcaagaaccatttccaaacaaggacatggagggaaggcttcctaagaagcttcctcccaaagaggtaccccaagagaccgat

SEQ ID NO: 380528 - DNA, 1789 bp, Homo sapiens
gagactctgtctcaaaaaaaaaaaaaaagaagtcatggtcatggtaaaaaacctatggctttggaaggctttctcggtaacgtcctaggagacaaacgctgcctccctgactccactgggcagcagtgaactccgctccccaagaatcagttacctccactttttttaatcgtaacacctccatttgtattacatatggtgtatgggtattgatgaggtcatggtatcatatatgggatttttttctgtgtaaatcatcaagtataagaagaaactatgggactctgagccttgctttagagaatttacagtggacaaataggtgtcatcaaaccagtttttaatcattctgactcaagtgaaaacgctcagaatttcacactgtgaatccacgtttacaacccttacaggtgggccttcaggcctggttcgctacaacaatgtcttccacaactcaaactcccaccgcgctcacacaaccggtccactcctgccttttcactcacacagctcccgactgcttcttgcagaggctgagagtcccccccccccaccttttttttcatttagatgtaacaaacctagtagtttatgttcatcaattgtctgtatatctctatattttatccatgtactcttttgatgtatagaagtagtttgaaactcattgtttccttgtggtaagtgaccgagatgctgccacaggacctgagacactgatgaatggtgctattttggactttcaacatgctccttggcgaggtagctctgatggagttattttttatttccatgttctaagaaggtgttggtactctgtttccctgaatgttgttctctagactggattgacttgttttccttgtgtcttcagtgtggctttcttcctcagtgttgtaggttgagcgaatgctaccagagtgtgagagaccattgtctcgttggctggcgctcacggacatgcagtcacggtagcgggagcaatcacaaaactgtaatttacttaccaaatctcttcctttccgtagcctcgcctgcctgacttagagaaagaaaagcaataattttacaggcattttgaggtgtctctttgggttctttctgtttgaaaggatatttgtcgaaaaaaagagcaaaaccgttttaaataaactccccctggaaaaaaacccaaaacactggcatctgagtaggaatatgaaaatgacaccttttccaaatattaaattggaaaacaaggtctacaaaatcatgatacttttttaaaaggcagagcattcttttttcggcaattttgataagcaaggtgtagatttacatttttgtccttgctcccaacgaaatggataaacaaaaataaattaccatctactcatggaatgttgttgtgttagccagtctgaaagcccaccttaatttttatataactgtctttagctcttcttttgacagggcaggccttgttctgaactgtttcgcttctgactgttaaacaccgatgacgcatgcactgcacttcttcgttttcttcttgctcccccattggcctgagtttcttgtgcattactcctctccctccttcgttagaataggtatatcagctgtgtaaatagagcaagaaaacagtattctgcatctgtggcatttatgtagagttgcagttgtgtactgctgaaaatgcaggcttttgtaacagtgtgatctttactgatgcactcatgacaagtacccaatgtattttagctattttagtagtatttgttcaataaatacgcaagctgtaaggtaa

SEQ ID NO: 380529 - DNA, 1746 bp, Homo sapiens
gaggagtggattacatattccaacagttgttattacattggtaaggaaagaagaacttgggaagaaagagtttgctggcctgtgcttcgaagaactctgatctgctttctatagataatgaggaagaaatggtatgtgtggggacttcccagttggctgtaagttgccatttgaactaaacgaaatagatcaggaactgaggacatatctaaattttctagttttatagaaggcttttatccacaagaatcaagatcttccctctctgagcaggaatcctttgtgcattgaagactttagattcctctctgcggtagacgtgcacttataagtatttgatggggtggattcgtggtcggaggtctcgacacagctgggagatgagtgaatttcataattataacttggatctgaagaagagtgatttttcaacacgatggcaaaagcaaagatgtccagtagtcaaaagcaaatgtagagaaaatgcatctccattttttttctgctgcttcatcgctgtagccatgggaatccgtttcattattatggtagcaatatggagtgctgtattcctaaactcattattcaaccaagaagttcaaattcccttgaccgaaagttactgtggcccatgtcctaaaaactggatatgttacaaaaataactgctaccaattttttgatgagagtaaaaactggtatgagagccaggcttcttgtatgtctcaaaatgccagccttctgaaagtatacagcaaagaggaccaggatttacttaaactggtgaagtcatatcattggatgggactagtacacattccaacaaatggatcttggcagtgggaagatggctccattctctcacccaacctactaacaataattgaaatgcagaagggagactgtgcactctatgcctcgagctttaaaggctatatagaaaactgttcaactccaaatacatacatctgcatgcaaaggactgtgtaaagatgatcaaccatctcaataaaagccaggaacagagaagagattacaccagcggtaacactgccaaccgagactaaaggaaacaaacaaaaacaggacaaaatgaccaaagactgtcagatttcttagactccacaggaccaaaccatagaacaatttcactgcaaacatgcatgattctccaagacaaaagaagagagatcctaaaggcaattcagatatccccaaggctgcctctcccaccacaagcccagagtggatgggctgggggaggggtgctgttttaatttctaaaggtaggaccaacacccaggggatcagtgaaggaagagaaggccagcagatcagtgagagtgcaaccccaccctccacaggaaattgcctcatgggcagggccacagcagagagacacagcatgggcagtgccttccctgcctgtgggggtcatgctgccacttttaatgggtcctccacccaacggggtcagggaggtggtgctgccccagtgggccatgattatcttaaaggcattattctccagccttaagatcttaggacgtttcctttgctatgatttgtacttgcttgagtcccatgactgtttctcttcctctctttcttccttttggaatagtaatatccatcctatgtttgtcccactattgtattttggaagcacataacttgtttggtttcacaggttcacagttaagaaggaattttgcctctgaataaatagaatcttgagtctcatgca

SEQ ID NO: 380530 - DNA, 1569 bp, Homo sapiens
gggaaaagtttctgcattttacttttctattcaaaatattttatctcaccacgggaaagagaacaaaaaacaaatgcccagttttattttattcaggaatcctttgtgcattgaagactttagattcctctctgcggtagacgtgcacttataagtatttgatggggtggattcgtggtcggaggtctcgacacagctgggagatgagtgaatttcataattataacttggatctgaagaagagtgatttttcaacacgatggcaaaagcaaagatgtccagtagtcaaaagcaaatgtagagaaaatgcatctccattttttttctgctgcttcatcgctgtagccatgggaatccgtttcattattatggtagcaatatggagtgctgtattcctaaactcattattcaaccaagaagttcaaattcccttgaccgaaagttactgtggcccatgtcctaaaaactggatatgttacaaaaataactgctaccaattttttgatgagagtaaaaactggtatgagagccaggcttcttgtatgtctcaaaatgccagccttctgaaagtatacagcaaagaggaccaggatttacttaaactggtgaagtcatatcattggatgggactagtacacattccaacaaatggatcttggcagtgggaagatggctccattctctcacccaacctactaacaataattgaaatgcagaagggagactgtgcactctatgcctcgagctttaaaggctatatagaaaactgttcaactccaaatacatacatctgcatgcaaaggactgtgtaaagatgatcaaccatctcaataaaagccaggaacagagaagagattacaccagcggtaacactgccaaccgagactaaaggaaacaaacaaaaacaggacaaaatgaccaaagactgtcagatttcttagactccacaggaccaaaccatagaacaatttcactgcaaacatgcatgattctccaagacaaaagaagagagatcctaaaggcaattcagatatccccaaggctgcctctcccaccacaagcccagagtggatgggctgggggaggggtgctgttttaatttctaaaggtaggaccaacacccaggggatcagtgaaggaagagaaggccagcagatcagtgagagtgcaaccccaccctccacaggaaattgcctcatgggcagggccacagcagagagacacagcatgggcagtgccttccctgcctgtgggggtcatgctgccacttttaatgggtcctccacccaacggggtcagggaggtggtgctgccccagtgggccatgattatcttaaaggcattattctccagccttaagatcttaggacgtttcctttgctatgatttgtacttgcttgagtcccatgactgtttctcttcctctctttcttccttttggaatagtaatatccatcctatgtttgtcccactattgtattttggaagcacataacttgtttggtttcacaggttcacagttaagaaggaattttgcctctgaataaatagaatcttgagtctcatgca

SEQ ID NO: 380531 - DNA, 1846 bp, Homo sapiens
cagcctcccagaccagtgctgtgccagggcttgcccaagggccatggttgctatggcctgcaaccactgaaattttcttgggaccaaggccactttagtcagctggtgataaagtgggctgagactaaggttcttcctgcctaagcagtggattcacctctggcccacggtgggtcaaaatgctccccatatgagcactggtttggaatcaagggccatggggtctctgtcttttgctgtgttccaatgtggtggggccaggtctaagttccgacacaaagtcccacactcttatttccatttcccaagcaggcagtttttctctaagcactgcactatctgggtttggaagagaggcgtttaggcaagcatctccattttttttctgctgcttcatcgctgtagccatgggaatccgtttcattattatggtagcaatatggagtgctgtattcctaaactgtaagtgacaacagagaagtagattgcaacattgtcaatttaacaatgctaatgtattatttttgttagtattcataaacacagacacataaactagaaatattaaatgtatctttgtcacatttttgctattagtccagaaatttgtaaactatatttgcttatactataagttactaacaatacacacttttaatacttatggttattttaatagcattattcaaccaagaagttcaaattcccttgaccgaaagttactgtggcccatgtcctaaaaactggatatgttacaaaaataactgctaccaattttttgatgagagtaaaaactggtatgagagccaggcttcttgtatgtctcaaaatgccagccttctgaaagtatacagcaaagaggaccaggatttacttaaactggtgaagtcatatcattggatgggactagtacacattccaacaaatggatcttggcagtgggaagatggctccattctctcacccaacctactaacaataattgaaatgcagaagggagactgtgcactctatgcctcgagctttaaaggctatatagaaaactgttcaactccaaatacatacatctgcatgcaaaggactgtgtaaagatgatcaaccatctcaataaaagccaggaacagagaagagattacaccagcggtaacactgccaaccgagactaaaggaaacaaacaaaaacaggacaaaatgaccaaagactgtcagatttcttagactccacaggaccaaaccatagaacaatttcactgcaaacatgcatgattctccaagacaaaagaagagagatcctaaaggcaattcagatatccccaaggctgcctctcccaccacaagcccagagtggatgggctgggggaggggtgctgttttaatttctaaaggtaggaccaacacccaggggatcagtgaaggaagagaaggccagcagatcagtgagagtgcaaccccaccctccacaggaaattgcctcatgggcagggccacagcagagagacacagcatgggcagtgccttccctgcctgtgggggtcatgctgccacttttaatgggtcctccacccaacggggtcagggaggtggtgctgccccagtgggccatgattatcttaaaggcattattctccagccttaagatcttaggacgtttcctttgctatgatttgtacttgcttgagtcccatgactgtttctcttcctctctttcttccttttggaatagtaatatccatcctatgtttgtcccactattgtattttggaagcacataacttgtttggtttcacaggttcacagttaagaaggaattttgcctctgaataaatagaatcttgagtctcatgca

SEQ ID NO: 380532 - DNA, 1513 bp, Homo sapiens
tctacctcctaggttcaagcaattctcctgcctcagcttccaagtagctgggactgcaggcgtgagccaccacacccggctaatttttgtatttttagtagaggcagggtttcaccatgttggccaggctggtatcaaacttctaacctcaagtgagtcacctgccttggcctcccaaagtgctaggattacaggcatgagacaccacacccagcctggcttctctctatgaatatgtagagatatgcctttggttatgactgtaataatttaataatctgaaattttagagttggagtgaaaaaggcatttaatttgtctagacaaaatctgctataatggttcagatgtgtagaattaataatatattctccttttccagaaagttactgtggcccatgtcctaaaaactggatatgttacaaaaataactgctaccaattttttgatgagagtaaaaactggtatgagagccaggcttcttgtatgtctcaaaatgccagccttctgaaagtatacagcaaagaggaccaggatttacttaaactggtgaagtcatatcattggatgggactagtacacattccaacaaatggatcttggcagtgggaagatggctccattctctcacccaacctactaacaataattgaaatgcagaagggagactgtgcactctatgcctcgagctttaaaggctatatagaaaactgttcaactccaaatacatacatctgcatgcaaaggactgtgtaaagatgatcaaccatctcaataaaagccaggaacagagaagagattacaccagcggtaacactgccaaccgagactaaaggaaacaaacaaaaacaggacaaaatgaccaaagactgtcagatttcttagactccacaggaccaaaccatagaacaatttcactgcaaacatgcatgattctccaagacaaaagaagagagatcctaaaggcaattcagatatccccaaggctgcctctcccaccacaagcccagagtggatgggctgggggaggggtgctgttttaatttctaaaggtaggaccaacacccaggggatcagtgaaggaagagaaggccagcagatcagtgagagtgcaaccccaccctccacaggaaattgcctcatgggcagggccacagcagagagacacagcatgggcagtgccttccctgcctgtgggggtcatgctgccacttttaatgggtcctccacccaacggggtcagggaggtggtgctgccccagtgggccatgattatcttaaaggcattattctccagccttaagatcttaggacgtttcctttgctatgatttgtacttgcttgagtcccatgactgtttctcttcctctctttcttccttttggaatagtaatatccatcctatgtttgtcccactattgtattttggaagcacataacttgtttggtttcacaggttcacagttaagaaggaattttgcctctgaataaatagaatcttgagtctcatgca

SEQ ID NO: 380533 - DNA, 1558 bp, Homo sapiens
gaggagtggattacatattccaacagttgttattacattggtaaggaaagaagaacttgggaagaaagagtttgctggcctgtgcttcgaagaactctgatctgctttctatagataatgaggaagaaatggtatgtgtggggacttcccagttggctgtaagttgccatttgaactaaacgaaatagatcaggaactgaggacatatctaaattttctagttttatagaaggcttttatccacaagaatcaagatcttccctctctgagcaggaatcctttgtgcattgaagactttagattcctctctgcggtagacgtgcacttataagtatttgatggggtggattcgtggtcggaggtctcgacacagctgggagatgagtgaatttcataattataacttggatctgaagaagagtgatttttcaacacgatggcaaaagcaaagatgtccagtagtcaaaagcaaatgtagagaaaatgcatctccattttttttctgctgcttcatcgctgtagccatgggaatccgtttcattattatggtagcaatatggagtgctgtattcctaaactgatttacttaaactggtgaagtcatatcattggatgggactagtacacattccaacaaatggatcttggcagtgggaagatggctccattctctcacccaacctactaacaataattgaaatgcagaagggagactgtgcactctatgcctcgagctttaaaggctatatagaaaactgttcaactccaaatacatacatctgcatgcaaaggactgtgtaaagatgatcaaccatctcaataaaagccaggaacagagaagagattacaccagcggtaacactgccaaccgagactaaaggaaacaaacaaaaacaggacaaaatgaccaaagactgtcagatttcttagactccacaggaccaaaccatagaacaatttcactgcaaacatgcatgattctccaagacaaaagaagagagatcctaaaggcaattcagatatccccaaggctgcctctcccaccacaagcccagagtggatgggctgggggaggggtgctgttttaatttctaaaggtaggaccaacacccaggggatcagtgaaggaagagaaggccagcagatcagtgagagtgcaaccccaccctccacaggaaattgcctcatgggcagggccacagcagagagacacagcatgggcagtgccttccctgcctgtgggggtcatgctgccacttttaatgggtcctccacccaacggggtcagggaggtggtgctgccccagtgggccatgattatcttaaaggcattattctccagccttaagatcttaggacgtttcctttgctatgatttgtacttgcttgagtcccatgactgtttctcttcctctctttcttccttttggaatagtaatatccatcctatgtttgtcccactattgtattttggaagcacataacttgtttggtttcacaggttcacagttaagaaggaattttgcctctgaataaatagaatcttgagtctcatgca

SEQ ID NO: 380534 - DNA, 1531 bp, Homo sapiens
  misc_feature (29)..(29): n is a, c, g, or t
aacttaggctaggtacgaggccgggtgtnaagaatcagatcttccctctctgagcagtgaatcctttgtgcattgaagactttagattcctctctgcggtagacgtgcacttataagtatttgatggggtggattcgtggtcggaggtctcgacacagctgggagatgagtgaatttcataattataacttggatctgaagaagagtgatttttcaacacgatggcaaaagcaaagatgtccagtagtcaaaagcaaatgtagagaaaatgcatctccattttttttctgctgcttcatcgctgtagccatgggaatccgtttcattattatggtagcaatatggagtgctgtattcctaaactcattattcaaccaagaagttcaaattcccttgaccgaaagttactgtggcccatgtcctaaaaactggatatgttacaaaaataactgctaccaattttttgatgagagtaaaaactggtatgagagccaggcttcttgtatgtctcaaaatgccagccttctgaaagtatacagcaaagaggaccaggatttacttaaactggtgaagtcatatcattggatgggactagtacacattccaacaaatggatcttggcagtgggaagatggctccattctctcacccaacctactaacaataattgaaatgcagaagggagactgtgcactctatgcctcgagctttaaaggctatatagaaaactgttcaactccaaatacatacatctgcatgcaaaggactgtgtaaagatgatcaaccatctcaataaaagccaggaacagagaagagattacaccagcggtaacactgccaaccgagactaaaggaaacaaacaaaaacaggacaaaatgaccaaagactgtcagatttcttagactccacaggaccaaaccatagaacaatttcactgcaaacatgcatgattctccaagacaaaagaagagagatcctaaaggcaattcagatatccccaaggctgcctctcccaccacaagcccagagtggatgggctgggggaggggtgctgttttaatttctaaaggtaggaccaacacccaggggatcagtgaaggaagagaaggccagcagatcagtgagagtgcaaccccaccctccacaggaaattgcctcatgggcagggccacagcagagagacacagcatgggcagtgccttccctgcctgtgggggtcatgctgccacttttaatgggtcctccacccaacggggtcagggaggtggtgctgccccagtgggccatgattatcttaaaggcattattctccagccttaagatcttaggacgtttcctttgctatgatttgtacttgcttgagtcccatgactgtttctcttcctctctttcttccttttggaatagtaatatccatcctatgtttgtcccactattgtattttggaagcacataacttgtttggtttcacaggttcacagttaagaaggaattttgcctctgaataaatagaatcttgagtctcatgca

SEQ ID NO: 380535 - DNA, 374 bp, Homo sapiens
ctgcagtaatgacctctggagggcacatgcaaaggccactgctccttcattctaacctcacagaaagcttgcagaagagcaatagggtcccctgcacagatggagggcctaagaagcattagactagctcggggcccaactctgggacccccaaatccaccagtttcccctgcagttccatctgcagccagccattctgctaggtgtaattccatggctgacacatctccatcctataacagtttcccattctctgtgctctggttgggattcttttaagcagcactttccttgtgaactgtataatgaaatgttctatgtctcaatggacatctgtgtgtgcatgtgcatatgtgtacatatgcatacaaaaa

SEQ ID NO: 380536 - DNA, 535 bp, Homo sapiens
cattttatatgctgttttgatattgccagtggttattatttatgtctttggaggaagaacaggaaattagaagtaaaatataccatgctttagataagttgctgaatattgtggatttctttaatggtttgacctttctcttcaggctctgtttgagcgcctgtacaaatgcccatctatgttcaatttcagcaaaggcaagttccctatacagtaagaataactcctggaatggttaatgatgcaagtttttcaaaactctcttctttgtaatatactcatgtcacatagtaaaggaagtagttgagcttatataaggctaagataacactttattatagtacagtattagatatttttagtaaaagcagatttacttttgccatagttgatttcctgctaaattttatacacatgcacacacactcaaattcacattagtaatttaaaaaatggaatgaattaactttgaccatgttttatattttacccttttgtaattatcagtgagtcttaaccatctctttttaaaaat

SEQ ID NO: 380537 - DNA, 874 bp, Homo sapiens
ctttaaaagaactggcagcttttactttatatccttggaaccctgaacaaccatgtaagacgtccaactgcactgatggagagaccgtgtgggaagatcctgagatcctgggatggagaaaagcctagctgagcctaaccttctagcaattcccatcaaaaagccaggcatgtaagcacacccttttggaccctccaaattgttccagacaccagctgaataacacccagtgatcctggtggaggctacagagagcagaaaatcacccagctcagcactgtctgggcatcctgattccacaaaattgtgagcttataattaaaatgttattttaaccacttaatctggggtaatttgttatggcaacaatagggtagccagaggaagtagcaattatatgtcagttaacaaggggtaaagggcattgaggatttgtaagaaaaaaatacaagaatggtaggttctctgtgagttattcaggatcctaagtggatacaaatcatttcccctgggtagtaacttcagcgaggatactgtttggaccgaaaagtatgcatgtaataaagatttatatctgcaaaatgatgaaacactggacacttccattttctattgtactttctcctataagaaagtcaataacatacagattgctgctgttgttactcctaataataatagtgaccaagttctgaatgccttttgtgggccagcactccactaaaagtacttcacatacactatctcactagtttttaccaagcgttagtttctgctatgtcaaatgaagatggtaatacataccttgcagagctcttgccaaagttttcttagctaagacatttcaaagtgagaatttgaacccaaaagtgtc

SEQ ID NO: 380538 - DNA, 443 bp, Homo sapiens
ctcggtaagcatcagctgtcattgccctccctgcctagaaaggtaattctggagggcaccagccctgcaaagtggagatctgcctgtctggccttgtccctttcttatctccctttgccatctctctcctgaaaggctcaccctaggctgtgtgggccaagatgaggtgatggcaggctcatctgagagaggagctttttcttcagagctcagcccacactgtgtgggctgtgtttttatacaacttgctgtaggcctgcatcaggtatgaaatttacatcatttgacttgcccatgtgggaatcttccccattcctcttggctccttagaatgggtacaggtgttcagtgcctcctcctcccaatgctcttcagcagatgaggaaccgaggtccaaagatgaaaacaaggctgatgactcacctgttagacacagttggcac

SEQ ID NO: 380539 - DNA, 371 bp, Homo sapiens
tgaaaacctgaatttcagggaaaatctgcccagtcatttcaagttcaaggagtattgtccccaggtcttcaggaacctccgtgatcgatttggcattgatgaccaagattacttggtgtcccttacccgaaacccccccagcgaaagtgaaggcagtgatggtcgcttccttatctcctacgatcggactctggtcatcaaagaagtatccagtgaggaaagcacctccatgacccaaacatctcccactaggctgacctgtctgacaccgcactggggatcgaatttccacatgagtattggatggggacaaaccaaatccaaacatagcatctcccgtagttctaaagggaagagtcagcgttagatcc

SEQ ID NO: 380540 - DNA, 3099 bp, Homo sapiens
ataagattgagtaatctcttcccttacctcaattccatctccacccatctctacatctgggcacagcaacccagagatggccaaaagcattcaagcctgggggaagatgtttgactattgctgctcttcaccagaacctcacacctctcctgggactggaacccttcagtggggcgtcacttccgatcaatgagctcagccaggtgcctcccccggtgatgctgctgccagatgactttaaggccagctccaagatcaaggtcaacaatcaccttttccacagggaaaatctgcccagtcatttcaagttcaaggagtattgtccccaggtcttcaggaacctccgtgatcgatttggcattgatgaccaagattacttggtgtcccttacccgaaacccccccagcgaaagtgaaggcagtgatggtcgcttccttatctcctacgatcggactctggtcatcaaagaagtatccagtgaggacattgctgacatgcatagcaacctctccaactatcaccagtacattgtgaagtgccatggcaacacgcttctgccccagttcctggggatgtaccgagtcagtgtggacaacgaagacagctacatgcttgtgatgcgcaatatgtttagccaccgtcttcctgtgcacaggaagtatgacctcaagggttccctagtgtcccgggaagccagcgataaggaaaaggttaaagaattgcccacccttaaggatatggactttctcaacaagaaccagaaagtatatattggtgaagaggagaagaaaatatttctggagaagctgaagagagatgtggagtttctagtgcagctgaagatcatggactacagccttctgctaggcatccacgacatcattcggggctctgaaccagaggaggaagcgcccgtgcgggaggatgagtcagaggtggatggggactgcagcctgactggacctcctgctctggtgggctcctatggcacctccccagagggtatcggaggctacatccattcccatcggcccctgggcccaggagagtttgagtccttcattgatgtctatgccatccggagtgctgaaggagccccccagaaggaggtctacttcatgggcctcattgatatccttacacagtatgatgccaagaagaaagcagctcatgcagccaaaactgtcaagcatggggctggggcagagatctctactgtccatccggagcagtatgctaagcgattcctggattttattaccaacatctttgcctaagagactgcctggttctctctgatgttcaaggtggtggggttctgagacacttgggggaattgtggggatattctagccaccagttctcttcttcctttgctaaattcaggctgcaggctccttccatccagataactccatcctgtcgagtaggctctttctgaccctcagaaatacattgtcctttttcctctttgcccatttttcttccctctcttcctccccatgagaagtctgcttgtagtattagaatgttattgttgactctctcccaagtgccttgatctttgtaatatctcctgttgtttctatgatataggagctaggggaagggggttgtttgccttcttcaggacctgactggacagatggacctggctcaagcaactactctggatgcactttgctgtgtgggatgaactaaaagtgtctgaattttgctgataactttataaaactcactatggcatgcttccctcctggtgggccctaggatggatgacactcaagatactacagatgtgggtgcaggcatgcacacacacgatggaatatggccattcctacacaggtggggtagagagtgggtcagcagcctggcacctcacagaggtgggacctaagaggactcatgattatgcagagaattggattgggtctctgtcatagattgagtaatctcttcccttacctcaattccatctccacccatctctacatctgggcacagcaacccagagatggccaaaagcattcaagcctgggggaagatgtttgactattgctgctcttcaccagaacctcacacctctcctgggactggaacccttcagtgggtgtgtggccagttttggaggctggaatgatgggccagggtgtaggattcattctccatgtaaagtttcctttcatcctgcctagccatccccaaggtttatttccagaagaaaggaatatctctacttggatcaattctggtcatttcaagaggatggaggcctcaagtgtgggaacttcccctactccctggatgtgtgtacctagcacacttccttctcccacccctttttccagttggatttgtttttctgttctcttctgtcctgtcttatactgcaactgtgtctcctaggggacagatggccttctttgtcatcttcactctccacccccagagaggagtcagagccataactcaatcactcagcccctccaaagatagttgatgtgtgataatctcataatgttgagaaccctgatgagatacattgtcttcctctccctacaatgcctctggggccaaggcacccattcttcttgctatcctccatcccccttgaggcttccactttttttttttttagacataaagctgggcatcagcaactggcctgtggtgatgcaaagctgctttgctctgtatctggctggactgatctgtctcacaagaagccatgaggccatagggagaagctccctctccccttcatcttctgctccaaaggtggtagcaagaggagtacccagttaggggttggagcccccatataacatcttcctgtcagaagactgatggatctttttcattccaaccatctccctttcccccgatgaatgcaataaaactctgtgacaccagcaaccattgctctttagaaatgggttttctgatcatatggctgatgtgttatgggcagtatggatgtcttcatttgttgcttctgtttttcatcttttttgttttattaataaaaatttatgtatttgctcctgttactataataatacagggaataaattattcaatccaaatttctgtaca

SEQ ID NO: 380541 - DNA, 3164 bp, Homo sapiens
cgccctgttcgcgcgtccgctgtccggcctccggtcacgtgacagcagcgcaggtgagcgccgcttccggggtcgggcgcctggatagctgccggctccggcttccacttggtcggttgcgcgggagactatggcgtcctcctcggtcccaccagccacggtatcggcggcgacagcaggccccggcccaggtttcggcttcgcctccaagaccaagaagaagcatttcgtgcagcagaaggtgaaggtgttccgggcggccgacccgctggtgggtgtgttcctgtggggcgtagcccactcgatcaatgagctcagccaggtgcctcccccggtgatgctgctgccagatgactttaaggccagctccaagatcaaggtcaacaatcaccttttccacagggaaaatctgcccagtcatttcaagttcaaggagtattgtccccaggtcttcaggaacctccgtgatcgatttggcattgatgaccaagattacttggtgtcccttacccgaaacccccccagcgaaagtgaaggcagtgatggtcgcttccttatctcctacgatcggactctggtcatcaaagaagtatccagtgaggacattgctgacatgcatagcaacctctccaactatcaccagtacattgtgaagtgccatggcaacacgcttctgccccagttcctggggatgtaccgagtcagtgtggacaacgaagacagctacatgcttgtgatgcgcaatatgtttagccaccgtcttcctgtgcacaggaagtatgacctcaagggttccctagtgtcccgggaagccagcgataaggaaaaggttaaagaattgcccacccttaaggatatggactttctcaacaagaaccagaaagtatatattggtgaagaggagaagaaaatatttctggagaagctgaagagagatgtggagtttctagtgcagctgaagatcatggactacagccttctgctaggcatccacgacatcattcggggctctgaaccagaggaggaagcgcccgtgcgggaggatgagtcagaggtggatggggactgcagcctgactggacctcctgctctggtgggctcctatggcacctccccagagggtatcggaggctacatccattcccatcggcccctgggcccaggagagtttgagtccttcattgatgtctatgccatccggagtgctgaaggagccccccagaaggaggtctacttcatgggcctcattgatatccttacacagtatgatgccaagaagaaagcagctcatgcagccaaaactgtcaagcatggggctggggcagagatctctactgtccatccggagcagtatgctaagcgattcctggattttattaccaacatctttgcctaagagactgcctggttctctctgatgttcaaggtggtggggttctgagacacttgggggaattgtggggatattctagccaccagttctcttcttcctttgctaaattcaggctgcaggctccttccatccagataactccatcctgtcgagtaggctctttctgaccctcagaaatacattgtcctttttcctctttgcccatttttcttccctctcttcctccccatgagaagtctgcttgtagtattagaatgttattgttgactctctcccaagtgccttgatctttgtaatatctcctgttgtttctatgatataggagctaggggaagggggttgtttgccttcttcaggacctgactggacagatggacctggctcaagcaactactctggatgcactttgctgtgtgggatgaactaaaagtgtctgaattttgctgataactttataaaactcactatggcatgcttccctcctggtgggccctaggatggatgacactcaagatactacagatgtgggtgcaggcatgcacacacacgatggaatatggccattcctacacaggtggggtagagagtgggtcagcagcctggcacctcacagaggtgggacctaagaggactcatgattatgcagagaattggattgggtctctgtcatagattgagtaatctcttcccttacctcaattccatctccacccatctctacatctgggcacagcaacccagagatggccactcacacctctcctgggactggaacccttcagtgggtgtgtggccagttttggaggctggaatgatgggccagggtgtaggattcattctccatgtaaagtttcctttcatcctgcctagccatccccaaggtttatttccagaagaaaggaatatctctacttggatcaattctggtcatttcaagaggatggaggcctcaagtgtgggaacttcccctactccctggatgtgtgtacctagcacacttccttctcccacccctttttccagttggatttgtttttctgttctcttctgtcctgtcttatactgcaactgtgtctcctaggggacagatggccttctttgtcatcttcactctccacccccagagaggagtcagagccataactcaatcactcagcccctccaaagatagttgatgtgtgataatctcataatgttgagaaccctgatgagatacattgtcttcctctccctacaatgcctctggggccaaggcacccattcttcttgctatcctccatcccccttgaggcttccactttttttttttttagacataaagctgggcatcagcaactggcctgtggtgatgcaaagctgctttgctctgtatctggctggactgatctgtctcacaagaagccatgaggccatagggagaagctccctctccccttcatcttctgctccaaaggtggtagcaagaggagtacccagttaggggttggagcccccatataacatcttcctgtcagaagactgatggatctttttcattccaaccatctccctttcccccgatgaatgcaataaaactctgtgacaccagcaaccattgctctttagaaatgggttttctgatcatatggctgatgtgttatgggcagtatggatgtcttcatttgttgcttctgtttttcatcttttttgttttattaataaaaatttatgtatttgctcctgttactataataatacagggaataaattattcaatccaaatttctgtaca

SEQ ID NO: 380542 - DNA, 1287 bp, Homo sapiens
tagaggcatccccatggtcggtgaagaggaaaggaactgatgttccaagtgggtcagcagcctggcacctcacagaggtgggacctaagaggactcatgattatgcagagaattggattgggtctctgtcatagattgagtaatctcttcccttacctcaattccatctccacccatctctacatctgggcacagcaacccagagatggccaaaagcattcaagcctgggggaagatgtttgactattgctgctcttcaccagaacctcacacctctcctgggactggaacccttcagtgggtgtgtggccagttttggaggctggaatgatgggccagggtgtaggattcattctccatgtaaagtttcctttcatcctgcctagccatccccaaggtttatttccagaagaaaggaatatctctacttggatcaattctggtcatttcaagaggatggaggcctcaagtgtgggaacttcccctactccctggatgtgtgtacctagcacacttccttctcccacccctttttccagttggatttgtttttctgttctcttctgtcctgtcttatactgcaactgtgtctcctaggggacagatggccttctttgtcatcttcactctccacccccagagaggagtcagagccataactcaatcactcagcccctccaaagatagttgatgtgtgataatctcataatgttgagaaccctgatgagatacattgtcttcctctccctacaatgcctctggggccaaggcacccattcttcttgctatcctccatcccccttgaggcttccactttttttttttttagacataaagctgggcatcagcaactggcctgtggtgatgcaaagctgctttgctctgtatctggctggactgatctgtctcacaagaagccatgaggccatagggagaagctccctctccccttcatcttctgctccaaaggtggtagcaagaggagtacccagttaggggttggagcccccatataacatcttcctgtcagaagactgatggatctttttcattccaaccatctccctttcccccgatgaatgcaataaaactctgtgacaccagcaaccattgctctttagaaatgggttttctgatcatatggctgatgtgttatgggcagtatggatgtcttcatttgttgcttctgtttttcatcttttttgttttattaataaaaatttatgtatttgctcctgttactataataatacagggaataaattattcaatccaaatttctgtaca

SEQ ID NO: 380543 - DNA, 953 bp, Homo sapiens
ataagattgagtaatctcttcccttacctcaattccatctccacccatctctacatctgggcacagcaacccagagatggccaaaagcattcaagcctgggggaagatgtttgactattgctgctcttcaccagaacctcacacctctcctgggactggaacccttcagtggggcgtcacttccgatcaatgagctcagccaggtgcctcccccggtgatgctgctgccagatgactttaaggccagctccaagatcaaggtcaacaatcaccttttccacagggaaaatctgcccagtcatttcaagttcaaggagtattgtccccaggtcttcaggaacctccgtgatcgatttggcattgatgaccaagattacttggtgtcccttacccgaaacccccccagcgaaagtgaaggcagtgatggtcgcttccttatctcctacgatcggactctggtcatcaaagaagtatccagtgaggacattgctgacatgcatagcaacctctccaactatcaccaggtcaggcctctctctagccccattctttccctctcctccctactcacatatagctcagctattgtcagtaatagatgccaactggggagaaaactcattggaagagagaatccataatcatatccagccctaaatgggatgagggaagctattctgtctgataagatttacaggctgggggcagtggctcacacctcggcctccccaagtgctgggattacaggcgtgagctagcatgcctggccagggattaaaatattcaaacatgttgtgtgtacccagatatgctgttaatttaggaaaaacagtacaatttctatgaagtggttgtgactattttctgtagtcaatacagttgggatatctgatctatttctctgtctactttggaaatgattgcataataaataaaattttactgttttttta

SEQ ID NO: 380544 - DNA, 127 bp, Homo sapiens
tttcctggaggacagagaccagagtgctgggggagagcctgattagcttttcagaacaaaactgactgcttcctggagaaagggaattggaactaaacctactctgaattgttggtctctctcccag

SEQ ID NO: 380545 - DNA, 3218 bp, Homo sapiens
cgccctgttcgcgcgtccgctgtccggcctccggtcacgtgacagcagcgcaggtgagcgccgcttccggggtcgggcgcctggatagctgccggctccggcttccacttggtcggttgcgcgggagactatggcgtcctcctcggtcccaccagccacggtatcggcggcgacagcaggccccggcccaggtttcggcttcgcctccaagaccaagaagaagcatttcgtgcagcagaaggtgaaggtgttccgggcggccgacccgctggtgggtgtgttcctgtggggcgtagcccactcgatcaatgagctcagccaggtgcctcccccggtgatgctgctgccagatgactttaaggccagctccaagatcaaggtcaacaatcaccttttccacagggaaaatctgcccagtcatttcaagttcaaggagtattgtccccaggtcttcaggaacctccgtgatcgatttggcattgatgaccaagattacttggtgtcccttacccgaaacccccccagcgaaagtgaaggcagtgatggtcgcttccttatctcctacgatcggactctggtcatcaaagaagtatccagtgaggacattgctgacatgcatagcaacctctccaactatcaccagtacattgtgaagtgccatggcaacacgcttctgccccagttcctggggatgtaccgagtcagtgtggacaacgaagacagctacatgcttgtgatgcgcaatatgtttagccaccgtcttcctgtgcacaggaagtatgacctcaagggttccctagtgtcccgggaagccagcgataaggaaaaggttaaagaattgcccacccttaaggatatggactttctcaacaagaaccagaaagtatatattggtgaagaggagaagaaaatatttctggagaagctgaagagagatgtggagtttctagtgcagctgaagatcatggactacagccttctgctaggcatccacgacatcattcggggctctgaaccagaggaggaagcgcccgtgcgggaggatgagtcagaggtggatggggactgcagcctgactggacctcctgctctggtgggctcctatggcacctccccagagggtatcggaggctacatccattcccatcggcccctgggcccaggagagtttgagtccttcattgatgtctatgccatccggagtgctgaaggagccccccagaaggaggtctacttcatgggcctcattgatatccttacacagtatgatgccaagaagaaagcagctcatgcagccaaaactgtcaagcatggggctggggcagagatctctactgtccatccggagcagtatgctaagcgattcctggattttattaccaacatctttgcctaagagactgcctggttctctctgatgttcaaggtggtggggttctgagacacttgggggaattgtggggatattctagccaccagttctcttcttcctttgctaaattcaggctgcaggctccttccatccagataactccatcctgtcgagtaggctctttctgaccctcagaaatacattgtcctttttcctctttgcccatttttcttccctctcttcctccccatgagaagtctgcttgtagtattagaatgttattgttgactctctcccaagtgccttgatctttgtaatatctcctgttgtttctatgatataggagctaggggaagggggttgtttgccttcttcaggacctgactggacagatggacctggctcaagcaactactctggatgcactttgctgtgtgggatgaactaaaagtgtctgaattttgctgataactttataaaactcactatggcatgcttccctcctggtgggccctaggatggatgacactcaagatactacagatgtgggtgcaggcatgcacacacacgatggaatatggccattcctacacaggtggggtagagagtgggtcagcagcctggcacctcacagaggtgggacctaagaggactcatgattatgcagagaattggattgggtctctgtcatagattgagtaatctcttcccttacctcaattccatctccacccatctctacatctgggcacagcaacccagagatggccaaaagcattcaagcctgggggaagatgtttgactattgctgctcttcaccagaacctcacacctctcctgggactggaacccttcagtgggtgtgtggccagttttggaggctggaatgatgggccagggtgtaggattcattctccatgtaaagtttcctttcatcctgcctagccatccccaaggtttatttccagaagaaaggaatatctctacttggatcaattctggtcatttcaagaggatggaggcctcaagtgtgggaacttcccctactccctggatgtgtgtacctagcacacttccttctcccacccctttttccagttggatttgtttttctgttctcttctgtcctgtcttatactgcaactgtgtctcctaggggacagatggccttctttgtcatcttcactctccacccccagagaggagtcagagccataactcaatcactcagcccctccaaagatagttgatgtgtgataatctcataatgttgagaaccctgatgagatacattgtcttcctctccctacaatgcctctggggccaaggcacccattcttcttgctatcctccatcccccttgaggcttccactttttttttttttagacataaagctgggcatcagcaactggcctgtggtgatgcaaagctgctttgctctgtatctggctggactgatctgtctcacaagaagccatgaggccatagggagaagctccctctccccttcatcttctgctccaaaggtggtagcaagaggagtacccagttaggggttggagcccccatataacatcttcctgtcagaagactgatggatctttttcattccaaccatctccctttcccccgatgaatgcaataaaactctgtgacaccagcaaccattgctctttagaaatgggttttctgatcatatggctgatgtgttatgggcagtatggatgtcttcatttgttgcttctgtttttcatcttttttgttttattaataaaaatttatgtatttgctcctgttactataataatacagggaataaattattcaatccaaatttctgtaca

SEQ ID NO: 380546 - DNA, 2656 bp, Homo sapiens
agcggagtactgatcggttgctctagcagatagcttacctctatatatgccccctagacgctacggtctcgtcgcgattactgatcttaggagctcctccccttccctttattcttcaggtcctctgcctatatgggggtttagtatgagacatgaaaaacccctggagctgacccgtggaaggggtggctggaataagctaaaaggatgatcttagatactaggacatataggcactaaaggcagtggtatgccctgcaacctcaatttttatacttcctttccccagaagggccccagaaattcaaaggtacaggtacaggggtgatacctagcagtgaagagtgagagagaggtgtctgatttgtcagtgggtctcagtttctagtgcagctgaagatcatggactacagccttctgctaggcatccacgacatcattcggggctctgaaccagaggaggaagcgcccgtgcgggaggatgagtcagaggtggatggggactgcagcctgactggacctcctgctctggtgggctcctatggcacctccccagagggtatcggaggctacatccattcccatcggcccctgggcccaggagagtttgagtccttcattgatgtctatgccatccggagtgctgaaggagccccccagaaggaggtctacttcatgggcctcattgatatccttacacagtatgatgccaagaagaaagcagctcatgcagccaaaactgtcaagcatggggctggggcagagatctctactgtccatccggagcagtatgctaagcgattcctggattttattaccaacatctttgcctaagagactgcctggttctctctgatgttcaaggtggtggggttctgagacacttgggggaattgtggggatattctagccaccagttctcttcttcctttgctaaattcaggctgcaggctccttccatccagataactccatcctgtcgagtaggctctttctgaccctcagaaatacattgtcctttttcctctttgcccatttttcttccctctcttcctccccatgagaagtctgcttgtagtattagaatgttattgttgactctctcccaagtgccttgatctttgtaatatctcctgttgtttctatgatataggagctaggggaagggggttgtttgccttcttcaggacctgactggacagatggacctggctcaagcaactactctggatgcactttgctgtgtgggatgaactaaaagtgtctgaattttgctgataactttataaaactcactatggcatgcttccctcctggtgggccctaggatggatgacactcaagatactacagatgtgggtgcaggcatgcacacacacgatggaatatggccattcctacacaggtggggtagagagtgggtcagcagcctggcacctcacagaggtgggacctaagaggactcatgattatgcagagaattggattgggtctctgtcatagattgagtaatctcttcccttacctcaattccatctccacccatctctacatctgggcacagcaacccagagatggccaaaagcattcaagcctgggggaagatgtttgactattgctgctcttcaccagaacctcacacctctcctgggactggaacccttcagtgggtgtgtggccagttttggaggctggaatgatgggccagggtgtaggattcattctccatgtaaagtttcctttcatcctgcctagccatccccaaggtttatttccagaagaaaggaatatctctacttggatcaattctggtcatttcaagaggatggaggcctcaagtgtgggaacttcccctactccctggatgtgtgtacctagcacacttccttctcccacccctttttccagttggatttgtttttctgttctcttctgtcctgtcttatactgcaactgtgtctcctaggggacagatggccttctttgtcatcttcactctccacccccagagaggagtcagagccataactcaatcactcagcccctccaaagatagttgatgtgtgataatctcataatgttgagaaccctgatgagatacattgtcttcctctccctacaatgcctctggggccaaggcacccattcttcttgctatcctccatcccccttgaggcttccactttttttttttttagacataaagctgggcatcagcaactggcctgtggtgatgcaaagctgctttgctctgtatctggctggactgatctgtctcacaagaagccatgaggccatagggagaagctccctctccccttcatcttctgctccaaaggtggtagcaagaggagtacccagttaggggttggagcccccatataacatcttcctgtcagaagactgatggatctttttcattccaaccatctccctttcccccgatgaatgcaataaaactctgtgacaccagcaaccattgctctttagaaatgggttttctgatcatatggctgatgtgttatgggcagtatggatgtcttcatttgttgcttctgtttttcatcttttttgttttattaataaaaatttatgtatttgctcctgttactataataatacagggaataaattattcaatccaaatttctgtaca

SEQ ID NO: 380547 - DNA, 2423 bp, Homo sapiens
catacttccggactacatacttccgaaggaaaaggttaaagaattgcccacccttaaggatatggactttctcaacaagaaccagaaagtatatattggtgaagaggagaagaaaatatttctggagaagctgaagagagatgtggagtttctagtgcagctgaagatcatggactacagccttctgctaggcatccacgacatcattcggggctctgaaccagaggaggaagcgcccgtgcgggaggatgagtcagaggtggatggggactgcagcctgactggacctcctgctctggtgggctcctatggcacctccccagagggtatcggaggctacatccattcccatcggcccctgggcccaggagagtttgagtccttcattgatgtctatgccatccggagtgctgaaggagccccccagaaggaggtctacttcatgggcctcattgatatccttacacagtatgatgccaagaagaaagcagctcatgcagccaaaactgtcaagcatggggctggggcagagatctctactgtccatccggagcagtatgctaagcgattcctggattttattaccaacatctttgcctaagagactgcctggttctctctgatgttcaaggtggtggggttctgagacacttgggggaattgtggggatattctagccaccagttctcttcttcctttgctaaattcaggctgcaggctccttccatccagataactccatcctgtcgagtaggctctttctgaccctcagaaatacattgtcctttttcctctttgcccatttttcttccctctcttcctccccatgagaagtctgcttgtagtattagaatgttattgttgactctctcccaagtgccttgatctttgtaatatctcctgttgtttctatgatataggagctaggggaagggggttgtttgccttcttcaggacctgactggacagatggacctggctcaagcaactactctggatgcactttgctgtgtgggatgaactaaaagtgtctgaattttgctgataactttataaaactcactatggcatgcttccctcctggtgggccctaggatggatgacactcaagatactacagatgtgggtgcaggcatgcacacacacgatggaatatggccattcctacacaggtggggtagagagtgggtcagcagcctggcacctcacagaggtgggacctaagaggactcatgattatgcagagaattggattgggtctctgtcatagattgagtaatctcttcccttacctcaattccatctccacccatctctacatctgggcacagcaacccagagatggccaaaagcattcaagcctgggggaagatgtttgactattgctgctcttcaccagaacctcacacctctcctgggactggaacccttcagtgggtgtgtggccagttttggaggctggaatgatgggccagggtgtaggattcattctccatgtaaagtttcctttcatcctgcctagccatccccaaggtttatttccagaagaaaggaatatctctacttggatcaattctggtcatttcaagaggatggaggcctcaagtgtgggaacttcccctactccctggatgtgtgtacctagcacacttccttctcccacccctttttccagttggatttgtttttctgttctcttctgtcctgtcttatactgcaactgtgtctcctaggggacagatggccttctttgtcatcttcactctccacccccagagaggagtcagagccataactcaatcactcagcccctccaaagatagttgatgtgtgataatctcataatgttgagaaccctgatgagatacattgtcttcctctccctacaatgcctctggggccaaggcacccattcttcttgctatcctccatcccccttgaggcttccactttttttttttttagacataaagctgggcatcagcaactggcctgtggtgatgcaaagctgctttgctctgtatctggctggactgatctgtctcacaagaagccatgaggccatagggagaagctccctctccccttcatcttctgctccaaaggtggtagcaagaggagtacccagttaggggttggagcccccatataacatcttcctgtcagaagactgatggatctttttcattccaaccatctccctttcccccgatgaatgcaataaaactctgtgacaccagcaaccattgctctttagaaatgggttttctgatcatatggctgatgtgttatgggcagtatggatgtcttcatttgttgcttctgtttttcatcttttttgttttattaataaaaatttatgtatttgctcctgttactataataatacagggaataaattattcaatccaaatttctgtaca

SEQ ID NO: 380548 - DNA, 793 bp, Homo sapiens
  misc_feature (15)..(15): n is a, c, g, or t
  misc_feature (20)..(20): n is a, c, g, or t
tggaagctggcacancaatnctacagcagagagccctaagctgaagaagtgaggcagtgattctgcctccatcctggtttccccaaagccccagggcaccatccttaggggagaaggtctacagttatcattattttaattccattactttcagtctggaaaactaagctagtcagaactgtcatcttgcttcccaatctaagaacctgtggccctggaacacttttcaagaattggttcattttgctttacacagtagatctgttccaacagttctgtgtaaaccaaatgctatttttcaatgcatttggactgctgaccatttaaaagcagcctatgattgcttctttttgtaaagcaagcaacctccctccactttagctgttttgactatttgaattttcacatattgggcttacccagagtggagcacacctccagggcatgtggctgacactgggtcaatgtctgcatctgtgctgtgtgtgtagtgtggttggccagtaggtgagtatccctgtgtgtgtgagtgaagccactccccaggctggtgctctcctcctgtgcccagtgactgcccagtggcagctcagctgcccttcactcccacctgctgccaaagtccctgtgctaatgggattacaaatacaaaaagtggaaaaaaattttcgtaaactttgttttatattaaaagaaaaatccataagtctgtgtgtgttaaacatgaggttctgcctctgtggctgtgtttgaaaaaataaagttttattagaataatccattttcccaagca

SEQ ID NO: 380549 - DNA, 4635 bp, Homo sapiens
  misc_feature (1)..(1): n is a, c, g, or t
nagagctgctccggccgcggccctgggagctggaggaaccgcgactcagcaggcatgactggagagggaagtcccaatggtgctagaatggtgctgcagtggcagaagacggctcacaagtgaggtctggaagaacaacagggaagacatccatcatttgctccaaagtgtgcaagtcaaatcctggggagaatcatgataaccctgatcactgagcagctacagaagcagactctggatgagctgaaatgcacacgcttcagcatcagtctgcctttgcctgatcatgcagacatctccaactgtgggaactctttccagcttgtgtctgaaggtgcttcctggaggggcctgccccactgttcctgtgctgagttccaggacagcctcaacttcagctaccatccctcaggcctgagcctgcacctcagaccacccagtcggggaaactcccccaaggagcagcccttctcccaagtcctaagacctgagcccccagatccagagaagcttcctgtgccccctgcccctccatccaagaggcactgccgctcactctcagtgcccgtggacctgtctcgctggcagccggtgtggcggcccgccccctccaagctgtggactcccataaagcaccggggcagtggtggagggggtgggccgcaggtgcctcaccagagccccccaaagcgggtctccagcctcaggttcctccaagctcccagtgcctcttctcaatgtgccccagctcacagaccctacagccctcctttcttcagcctggccctggcccaagattcctctcgaccctgcgccgcctcccctcaaagtggctcctgggagagtgatgctgagtccttgtcaccttgcccacctcagcgccgcttctccctgtcacccagtctgggcccgcaggcaagccgcttcttgccctctgcccggagctctcccgcatcctccccagagctgccctggcgacctcgaggtctccgcaaccttccccgaagccgctcacagccttgtgatctggatgcccgcaaaactggggtcaagcggcgccacgaggaagacccccggcgtctgcggccttcgttggactttgacaagatgaatcagaaaccatactcaggaggtctttgtctccaagaaacagcccgggaaggcagcagcatctctccaccatggttcatggcctgtagccccccacccctctctgcttcctgcagccccactgggggttcctcccaggtgctgagtgaaagcgaagaggaggaggagggggctgtgcggtggggtcggcaggcgctgagcaagcggacactgtgccagcgggactttggggacctggacttgaatttgattgaggaaaactaaaactgagaggctacttcctggggccacacagactgactctctcatggctactaacaagtgtcgagtccccaaggctgggggccgagcctgggaatgggggtgagtggagggctccgactcagggcagctggaaatcttctcgctccagcaagctcgaccatgccaagagactggccgggacaagataaacggagctggtggcgggagggacagccccagagcagacccttcctatggcggccctgagtgtgagtatccctgccaccaagagagcaatgggcagggaaggaaggggtctgccgaccccagctcggggaatttcactagcccctttgcttcaaagggcacttgtgtcttagaatttggccagggtggggggttgagtcagcctcctcagagaaactgcgtgagagtgtgtgcgtgcatgggagtgtacttgtggaaaggtgtgtttgcgtagccttagggaaggaaggcaattgctccttaacagcagagtatcatgatacccccaggatcttgagttttttacaggatgttgggtttgctcaaggagtcaagaggagggcaccaagttttccttttttctaaatagctctggaaccaggcttgtaatccatagcatcaccgactctgcaaaggatttcattttggggtacagcagggtgttttaagtgctgtgacttcagctaatgatcttttcttcagccccaccccctccccactagctcgatctagtatattggggaatgcaggtggggggtgtcaccatattttttctgagctggcctttttttctcatcagattgtccaggctatattccacctgcctcttttgccctcttgagtagagttgcacacagcacatgggcaactgaagcagggttgaggggctctatctctctctctcctctgctgatgggacccttttcccctcaccctctgcccttctaagtcatagactaggtaggaaggccctatattggtccccagcatctactgaggcagacctgcaacagaagtggcattcagtccccagcagacatgggtgagctcaccccagcactgctgttgggaaggtgactgcaggaaaccaattcttacaagatccaggcccagcctttttgacctgcttgagagggaagaaggggtgtttagcatttaatagtttgcttgtcttccactcctgccaggaagtgtttatttgcctctaattgggcctgagagaccatagggaggttggggctcactgagggattggctgaggatgtataaagcaaaggctgtgagaagcagttgggagtttggttgtcattggattgaatttacttttttgtttctcacccgcaacttgagccaggacagctggtccaagtggccacagtgatgggtttaagtaccttggtagggctggcaccagtggaaacacatactgaagctgccaccacaatagcttgtgaggttttatccagctttggttagaccctgcatgaccaaatttgacctgcccttgtttatggcaagaagggcatttttctcttcaatttccagggtttcctaggacccagttcctcatgtaagggaggaagaccaaggtctttgtgttttcttcctcatggaattgaacctgacattttctggatctcctgcatgtcaggagcatcagtgaggcttcagcctccttcgtctccactccagagaggaggtggctatgtcttcttaagcctctggccctcagaggctcctccctatctcctggctagttaccactaggctaccaggtctctaggggcctgagagaggccctctagagaatccagggaaactgtgagcccaggagttgcccatctatggtttcattcctcccctggctcttctccctcttcaggccataatttccctggtgccaatttcttttcctcctggggcatcctcatcccagggctctctgctgtagattggctgtgccagcttccaacaggttactggcaatgccagtgagtttctgtaggccctaagctgaagaagtgaggcagtgattctgcctccatcctggtttccccaaagccccagggcaccatccttaggggagaaggtctacagttatcattattttaattccattactttcagtctggaaaactaagctagtcagaactgtcatcttgcttcccaatctaagaacctgtggccctggaacacttttcaagaattggttcattttgctttacacagtagatctgttccaacagttctgtgtaaaccaaatgctatttttcaatgcatttggactgctgaccatttaaaagcagcctatgattgcttctttttgtaaagcaagcaacctccctccactttagctgttttgactatttgaattttcacatattgggcttacccagagtggagcacacctccagggcatgtggctgacactgggtcaatgtctgcatctgtgctgtgtgtgtagtgtggttggccagtaggtgagtatccctgtgtgtgtgagtgaagccactccccaggctggtgctctcctcctgtgcccagtgactgcccagtggcagctcagctgcccttcactcccacctgctgccaaagtccctgtgctaatgggattacaaatacaaaaagtggaaaaaaattttcgtaaactttgttttatattaaaagaaaaatccataagtctgtgtgtgttaaacatgaggttctgcctctgtggctgtgtttgaaaaaataaagttttattagaataatccattttcccaagcaaccttgtgtactacagtgtcttcttcccttccccacaaagacaaggaagaagcagggtagaaggccacctaactgttccagccccttcatctaagatgtgggtcaacctttcaaaaaggggcagtatttggaccctaggccctttgccggccatggcaggatgttatactgtggcccaggcttctgctaaggccttggttatttttggcagtctggtttggtctctctttccctggcagttatacttgtctcctcctgcctgctgtcactctcacttccagcaagttgaagtcaagtatgaatgcattccagctccctgagaaatggtttatggtacagtcaggaacttgtctagattggtttgtaggctttgggaagtagggagaaggcagggtgggagacagccagggatctttcttaagttttcacatgttacatcctggagagatagaggtttagtcatcagaattcagattccatagacctagg

SEQ ID NO: 380550 - DNA, 3287 bp, Homo sapiens
  misc_feature (1)..(1): n is a, c, g, or t
nagagctgctccggccgcggccctgggagctggaggaaccgcgtctgggcccgcaggcaagccgcttcttgccctctgcccggagctctcccgcatcctccccagagctgccctggcgacctcgaggtctccgcaaccttccccgaagccgctcacagccttgtgatctggatgcccgcaaaactggggtcaagcggcgccacgaggaagacccccggcgtctgcggccttcgttggactttgacaagatgaatcagaaaccatactcaggaggtctttgtctccaagaaacagcccgggaaggcagcagcatctctccaccatggttcatggcctgtagccccccacccctctctgcttcctgcagccccactgggggttcctcccaggtgctgagtgaaagcgaagaggaggaggagggggctgtgcggtggggtcggcaggcgctgagcaagcggacactgtgccagcgggactttggggacctggacttgaatttgattgaggaaaactaaaactgagaggctacttcctggggccacacagactgactctctcatggctactaacaagtgtcgagtccccaaggctgggggccgagcctgggaatgggggtgagtggagggctccgactcagggcagctggaaatcttctcgctccagcaagctcgaccatgccaagagactggccgggacaagataaacggagctggtggcgggagggacagccccagagcagacccttcctatggcggccctgagtgtgagtatccctgccaccaagagagcaatgggcagggaaggaaggggtctgccgaccccagctcggggaatttcactagcccctttgcttcaaagggcacttgtgtcttagaatttggccagggtggggggttgagtcagcctcctcagagaaactgcgtgagagtgtgtgcgtgcatgggagtgtacttgtggaaaggtgtgtttgcgtagccttagggaaggaaggcaattgctccttaacagcagagtatcatgatacccccaggatcttgagttttttacaggatgttgggtttgctcaaggagtcaagaggagggcaccaagttttccttttttctaaatagctctggaaccaggcttgtaatccatagcatcaccgactctgcaaaggatttcattttggggtacagcagggtgttttaagtgctgtgacttcagctaatgatcttttcttcagccccaccccctccccactagctcgatctagtatattggggaatgcaggtggggggtgtcaccatattttttctgagctggcctttttttctcatcagattgtccaggctatattccacctgcctcttttgccctcttgagtagagttgcacacagcacatgggcaactgaagcagggttgaggggctctatctctctctctcctctgctgatgggacccttttcccctcaccctctgcccttctaagtcatagactaggtaggaaggccctatattggtccccagcatctactgaggcagacctgcaacagaagtggcattcagtccccagcagacatgggtgagctcaccccagcactgctgttgggaaggtgactgcaggaaaccaattcttacaagatccaggcccagcctttttgacctgcttgagagggaagaaggggtgtttagcatttaatagtttgcttgtcttccactcctgccaggaagtgtttatttgcctctaattgggcctgagagaccatagggaggttggggctcactgagggattggctgaggatgtataaagcaaaggctgtgagaagcagttgggagtttggttgtcattggattgaatttacttttttgtttctcacccgcaacttgagccaggacagctggtccaagtggccacagtgatgggtttaagtaccttggtagggctggcaccagtggaaacacatactgaagctgccaccacaatagcttgtgaggttttatccagctttggttagaccctgcatgaccaaatttgacctgcccttgtttatggcaagaagggcatttttctcttcaatttccagggtttcctaggacccagttcctcatgtaagggaggaagaccaaggtctttgtgttttcttcctcatggaattgaacctgacattttctggatctcctgcatgtcaggagcatcagtgaggcttcagcctccttcgtctccactccagagaggaggtggctatgtcttcttaagcctctggccctcagaggctcctccctatctcctggctagttaccactaggctaccaggtctctaggggcctgagagaggccctctagagaatccagggaaactgtgagcccaggagttgcccatctatggtttcattcctcccctggctcttctccctcttcaggccataatttccctggtgccaatttcttttcctcctggggcatcctcatcccagggctctctgctgtagattggctgtgccagcttccaacaggttactggcaatgccagtgagtttctgtaggccctaagctgaagaagtgaggcagtgattctgcctccatcctggtttccccaaagccccagggcaccatccttaggggagaaggtctacagttatcattattttaattccattactttcagtctggaaaactaagctagtcagaactgtcatcttgcttcccaatctaagaacctgtggccctggaacacttttcaagaattggttcattttgctttacacagtagatctgttccaacagttctgtgtaaaccaaatgctatttttcaatgcatttggactgctgaccatttaaaagcagcctatgattgcttctttttgtaaagcaagcaacctccctccactttagctgttttgactatttgaattttcacatattgggcttacccagagtggagcacacctccagggcatgtggctgacactgggtcaatgtctgcatctgtgctgtgtgtgtagtgtggttggccagtaggtgagtatccctgtgtgtgtgagtgaagccactccccaggctggtgctctcctcctgtgcccagtgactgcccagtggcagctcagctgcccttcactcccacctgctgccaaagtccctgtgctaatgggattacaaatacaaaaagtggaaaaaaattttcgtaaactttgttttatattaaaagaaaaatccataagtctgtgtgtgttaaacatgaggttctgcctctgtggctgtgtttgaaaaaataaagttttattagaataatccattttcccaagca

SEQ ID NO: 380551 - DNA, 1883 bp, Homo sapiens
  misc_feature (1)..(1): n is a, c, g, or t
  misc_feature (1681)..(1681): n is a, c, g, or t
  misc_feature (1715)..(1715): n is a, c, g, or t
  misc_feature (1717)..(1717): n is a, c, g, or t
  misc_feature (1879)..(1879): n is a, c, g, or t
nagagctgctccggccgcggccctgggagctggaggaaccgcgactcagcaggcatgactggagagggaagtcccaatggtgctagaatggtgctgcagtggcagaagacggctcacaagtgaggtctggaagaacaacagggaagacatccatcatttgctccaaagtgtgcaagtcaaatcctggggagaatcatgataaccctgatcactgagcagctacagaagcagactctggatgagctgaaatgcacacgcttcagcatcagtctggtaaaagaccagtcttcctgcttctccacgaccccctcccccttttttctgaggctgattgttgctattactttactcttgtcctgtgctgtatgaatcatggtacttaacctggaagagcccactaatggctcaaaacccagcccaaaaggaagggggcagggatttttccaccgatagagaagggacagcaaaacttgggtggagaagggtttgagatgttggaagatgtggattgtttgacttactaactttgggaagacaagaggaagaacacttaatgtccctaacatccctgtagctcatgaatcgcagaggagaactgaagagggcttcctagaaatctgtcagtgtgtcctgaatccaaatcatgatggatattctctctttcttagcctttgcctgatcatgcagacatctccaactgtgggaactctttccagcttgtgtctggtaaggcatcgtgtgtgtttgtgtacgtgtgtgtacccattcctctctccacacatttctatcattggtttccagtgaccagggctagcgagcctacctctagaaccttcttgccagggtcaacttctgagattgacagttgtctttcatgttctagcatgaaagttatctggttggtttgctcttattctagctttgtggggacttgtataatctaattttttgaataggtaatacattcacatggttcaaaatttaaaaaataacaacaaaaaggttatgctgagaaaagtctctcttactctcccgttccctatctacccagcttctaccacctccctaaaagtattagtttcttatacagtatatgtgactagaatttctttatataaaaagaagcaaatgtatatatttatttcctttcttttttaagttctcggatacatgtgcagaacgtgcaggttcgttacataggtgtacatgtgccatggtggttagctgcatctattttatttccacgtttttaacacaaaaggttgcatactatatattattttgtacctttaaaaaaaaaaatgggaccgggcctagtgggtcacacctataatcccagcactttgggaggccaaggtgggcagatcacctgaggtcgggagttcaagaccagcctgaccaacatggagaaaccccatctctactaaaaatataaaattagccaggcgtcgtggcgcatgcctgtaatcccagctactcgggaggctgaggcaggagaatcacttgaacccaggaggtagaggttgcggtgagccaagattgcgccattgcactctagcctgggcaacaagagcaaaactctgtctcaaaaaaaaaaaaaaattgctgggcacagtggctcatgcctgtaatcctagcactttgggaggccgaggtgggcggatcatgaggtcaggagttngagaccagcctggccaacacagtgaaaccctgtntntactaaaaatacaaaaattagcctggcatggtggtacacacctgtaatcccagctactcgggagggcaaggcaggagaatcacttgaacccaggaggtggaggttgtggtgagcccagatcatgccactgcactccagcctgcacaacaaagcaagactccntctc

SEQ ID NO: 380552 - DNA, 4161 bp, Homo sapiens
aacttacggctaggtacgaggctggggtgtgtaatcggccgagggagagagagagagaactcagcaggcatgactggagagggaagtcccaatggtgctagaatggtgctgcagtggcagaagacggctcacaagtgaggtctggaagaacaacagggaagacatccatcatttgctccaaagtgtgcaagtcaaatcctggggagaatcatgataaccctgatcactgagcagctacagaagcagactctggatgagctgaaatgcacacgcttcagcatcagtctgcctttgcctgatcatgcagacatctccaactgtgggaactctttccagcttgtgtctgaaggtgcttcctggaggggcctgccccactgttcctgtgctgagttccaggacagcctcaacttcagctaccatccctcaggcctgagcctgcacctcagaccacccagtcggggaaactcccccaaggagcagcccttctcccaagtcctaagacctgagcccccagatccagagaagcttcctgtgccccctgcccctccatccaagaggcactgccgctcactctcagtgcccgtggacctgtctcgctggcagccggtgtggcggcccgccccctccaagctgtggactcccataaagcaccggggcagtggtggagggggtgggccgcaggtgcctcaccagagccccccaaagcgggtctccagcctcaggttcctccaagctcccagtgcctcttctcaatgtgccccagctcacagaccctacagccctcctttcttcagcctggccctggcccaagattcctctcgaccctgcgccgcctcccctcaaagtggctcctgggagagtgatgctgagtccttgtcaccttgcccacctcagcgccgcttctccctgtcacccagtctgggcccgcaggcaagccgcttcttgccctctgcccggagctctcccgcatcctccccagagctgccctggcgacctcgaggtctccgcaaccttccccgaagccgctcacagccttgtgatctggatgcccgcaaaactggggtcaagcggcgccacgaggaagacccccggcgtctgcggccttcgttggactttgacaagatgaatcagaaaccatactcaggaggtctttgtctccaagaaacagcccgggaaggcagcagcatctctccaccatggttcatggcctgtagccccccacccctctctgcttcctgcagccccactgggggttcctcccaggtgctgagtgaaagcgaagaggaggaggagggggctgtgcggtggggtcggcaggcgctgagcaagcggacactgtgccagcgggactttggggacctggacttgaatttgattgaggaaaactaaaactgagaggctacttcctggggccacacagactgactctctcatggctactaacaagtgtcgagtccccaaggctgggggccgagcctgggaatgggggtgagtggagggctccgactcagggcagctggaaatcttctcgctccagcaagctcgaccatgccaagagactggccgggacaagataaacggagctggtggcgggagggacagccccagagcagacccttcctatggcggccctgagtgtgagtatccctgccaccaagagagcaatgggcagggaaggaaggggtctgccgaccccagctcggggaatttcactagcccctttgcttcaaagggcacttgtgtcttagaatttggccagggtggggggttgagtcagcctcctcagagaaactgcgtgagagtgtgtgcgtgcatgggagtgtacttgtggaaaggtgtgtttgcgtagccttagggaaggaaggcaattgctccttaacagcagagtatcatgatacccccaggatcttgagttttttacaggatgttgggtttgctcaaggagtcaagaggagggcaccaagttttccttttttctaaatagctctggaaccaggcttgtaatccatagcatcaccgactctgcaaaggatttcattttggggtacagcagggtgttttaagtgctgtgacttcagctaatgatcttttcttcagccccaccccctccccactagctcgatctagtatattggggaatgcaggtggggggtgtcaccatattttttctgagctggcctttttttctcatcagattgtccaggctatattccacctgcctcttttgccctcttgagtagagttgcacacagcacatgggcaactgaagcagggttgaggggctctatctctctctctcctctgctgatgggacccttttcccctcaccctctgcccttctaagtcatagactaggtaggaaggccctatattggtccccagcatctactgaggcagacctgcaacagaagtggcattcagtccccagcagacatgggtgagctcaccccagcactgctgttgggaaggtgactgcaggaaaccaattcttacaagatccaggcccagcctttttgacctgcttgagagggaagaaggggtgtttagcatttaatagtttgcttgtcttccactcctgccaggaagtgtttatttgcctctaattgggcctgagagaccatagggaggttggggctcactgagggattggctgaggatgtataaagcaaaggctgtgagaagcagttgggagtttggttgtcattggattgaatttacttttttgtttctcacccgcaacttgagccaggacagctggtccaagtggccacagtgatgggtttaagtaccttggtagggctggcaccagtggaaacacatactgaagctgccaccacaatagcttgtgaggttttatccagctttggttagaccctgcatgaccaaatttgacctgcccttgtttatggcaagaagggcatttttctcttcaatttccagggtttcctaggacccagttcctcatgtaagggaggaagaccaaggtctttgtgttttcttcctcatggaattgaacctgacattttctggatctcctgcatgtcaggagcatcagtgaggcttcagcctccttcgtctccactccagagaggaggtggctatgtcttcttaagcctctggccctcagaggctcctccctatctcctggctagttaccactaggctaccaggtctctaggggcctgagagaggccctctagagaatccagggaaactgtgagcccaggagttgcccatctatggtttcattcctcccctggctcttctccctcttcaggccataatttccctggtgccaatttcttttcctcctggggcatcctcatcccagggctctctgctgtagattggctgtgccagcttccaacaggttactggcaatgccagtgagtttctgtaggccctaagctgaagaagtgaggcagtgattctgcctccatcctggtttccccaaagccccagggcaccatccttaggggagaaggtctacagttatcattattttaattccattactttcagtctggaaaactaagctagtcagaactgtcatcttgcttcccaatctaagaacctgtggccctggaacacttttcaagaattggttcattttgctttacacagtagatctgttccaacagttctgtgtaaaccaaatgctatttttcaatgcatttggactgctgaccatttaaaagcagcctatgattgcttctttttgtaaagcaagcaacctccctccactttagctgttttgactatttgaattttcacatattgggcttacccagagtggagcacacctccagggcatgtggctgacactgggtcaatgtctgcatctgtgctgtgtgtgtagtgtggttggccagtaggtgagtatccctgtgtgtgtgagtgaagccactccccaggctggtgctctcctcctgtgcccagtgactgcccagtggcagctcagctgcccttcactcccacctgctgccaaagtccctgtgctaatgggattacaaatacaaaaagtggaaaaaaattttcgtaaactttgttttatattaaaagaaaaatccataagtctgtgtgtgttaaacatgaggttctgcctctgtggctgtgtttgaaaaaataaagttttattagaataatccattttcccaagca

SEQ ID NO: 380553 - DNA, 1861 bp, Homo sapiens
  misc_feature (8)..(9): n is a, c, g, or t
ctcgtgcnncttggggccacacagactgcctctgcccttctaagtcatagactaggtaggaaggccctatattggtccccagcatctactgaggcagacctgcaacagaagtggcattcagtccccagcagacatgggtgagctcaccccagcactgctgttgggaaggtgactgcaggaaaccaattcttacaagatccaggcccagcctttttgacctgcttgagagggaagaaggggtgtttagcatttaatagtttgcttgtcttccactcctgccaggaagtgtttatttgcctctaattgggcctgagagaccatagggaggttggggctcactgagggattggctgaggatgtataaagcaaaggctgtgagaagcagttgggagtttggttgtcattggattgaatttacttttttgtttctcacccgcaacttgagccaggacagctggtccaagtggccacagtgatgggtttaagtaccttggtagggctggcaccagtggaaacacatactgaagctgccaccacaatagcttgtgaggttttatccagctttggttagaccctgcatgaccaaatttgacctgcccttgtttatggcaagaagggcatttttctcttcaatttccagggtttcctaggacccagttcctcatgtaagggaggaagaccaaggtctttgtgttttcttcctcatggaattgaacctgacattttctggatctcctgcatgtcaggagcatcagtgaggcttcagcctccttcgtctccactccagagaggaggtggctatgtcttcttaagcctctggccctcagaggctcctccctatctcctggctagttaccactaggctaccaggtctctaggggcctgagagaggccctctagagaatccagggaaactgtgagcccaggagttgcccatctatggtttcattcctcccctggctcttctccctcttcaggccataatttccctggtgccaatttcttttcctcctggggcatcctcatcccagggctctctgctgtagattggctgtgccagcttccaacaggttactggcaatgccagtgagtttctgtaggccctaagctgaagaagtgaggcagtgattctgcctccatcctggtttccccaaagccccagggcaccatccttaggggagaaggtctacagttatcattattttaattccattactttcagtctggaaaactaagctagtcagaactgtcatcttgcttcccaatctaagaacctgtggccctggaacacttttcaagaattggttcattttgctttacacagtagatctgttccaacagttctgtgtaaaccaaatgctatttttcaatgcatttggactgctgaccatttaaaagcagcctatgattgcttctttttgtaaagcaagcaacctccctccactttagctgttttgactatttgaattttcacatattgggcttacccagagtggagcacacctccagggcatgtggctgacactgggtcaatgtctgcatctgtgctgtgtgtgtagtgtggttggccagtaggtgagtatccctgtgtgtgtgagtgaagccactccccaggctggtgctctcctcctgtgcccagtgactgcccagtggcagctcagctgcccttcactcccacctgctgccaaagtccctgtgctaatgggattacaaatacaaaaagtggaaaaaaattttcgtaaactttgttttatattaaaagaaaaatccataagtctgtgtgtgttaaacatgaggttctgcctctgtggctgtgtttgaaaaaataaagttttattagaataatccattttcccaagca

SEQ ID NO: 380554 - DNA, 1934 bp, Homo sapiens
  misc_feature (1)..(1): n is a, c, g, or t
nagagctgctccggccgcggccctgggagctggaggaaccgcgactcagcaggcatgactggagagggaagtcccaatggtgctagaatggtgctgcagtggcagaagacggctcacaagtgaggtctggaagaacaacagggaagacatccatcatttgctccaaagtgtgcaagtcaaatcctggggagaatcatgataaccctgatcactgagcagctacagaagcagactctggatgagctgaaatgcacacgcttcagcatcagtctgcctttgcctgatcatgcagacatctccaactgtgggaactctttccagcttgtgtctgaaggtgcttcctggaggggcctgccccactgttcctgtgctgagttccaggacagcctcaacttcagctaccatccctcaggcctgagcctgcacctcagaccacccagtcggggaaactcccccaaggagcagcccttctcccaagtcctaagacctgagcccccagatccagagaagcttcctgtgccccctgcccctccatccaagaggcactgccgctcactctcagtgcccgtggacctgtctcgctggcagccggtgtggcggcccgccccctccaagctgtggactcccataaagcaccggggcagtggtggagggggtgggccgcaggtgcctcaccagagccccccaaagcgggtctccagcctcaggttcctccaagctcccagtgcctcttctcaatgtgccccagctcacagaccctacagccctcctttcttcagcctggccctggcccaagattcctctcgaccctgcgccgcctcccctcaaagtggctcctgggagagtgatgctgagtccttgtcaccttgcccacctcagcgccgcttctccctgtcacccagtctgggcccgcaggcaagccgcttcttgccctctgcccggagctctcccgcatcctccccagagctgccctggcgacctcgaggtctccgcaaccttccccgaagccgctcacagccttgtgatctggatgcccgcaaaactggggtcaagcggcgccacgaggaagacccccggcgtctgcggccttcgttggactttgacaagatgaatcagaaaccatactcaggaggtctttgtctccaagaaacagcccgggaaggcagcagcatctctccaccatggttcatggcctgtagccccccacccctctctgcttcctgcagccccactgggggttcctcccaggtgctgagtgaaagcgaagaggaggaggagggggctgtgcggtggggtcggcaggcgctgagcaagcggacactgtgccagcgggactttggggacctggacttgaatttgattgaggaaaactaaaactgagaggctacttcctggggccacacagactgactctctcatggctactaacaagtgtcgagtccccaaggctgggggccgagcctgggaatgggggtgagtggagggctccgactcagggcagctggaaatctttccactttagctgttttgactatttgaattttcacatattgggcttacccagagtggagcacacctccagggcatgtggctgacactgggtcaatgtctgcatctgtgctgtgtgtgtagtgtggttggccagtaggtgagtatccctgtgtgtgtgagtgaagccactccccaggctggtgctctcctcctgtgcccagtgactgcccagtggcagctcagctgcccttcactcccacctgctgccaaagtccctgtgctaatgggattacaaatacaaaaagtggaaaaaaattttcgtaaactttgttttatattaaaagaaaaatccataagtctgtgtgtgttaaacatgaggttctgcctctgtggctgtgtttgaaaaaataaagttttattagaataatccattttcccaagca

SEQ ID NO: 380555 - DNA, 2605 bp, Homo sapiens
  misc_feature (1)..(1): n is a, c, g, or t
nagagctgctccggccgcggccctgggagctggaggaaccgcgactcagcaggcatgactggagagggaagtcccaatggtgctagaatggtgctgcagtggcagaagacggctcacaagtgaggtctggaagaacaacagggaagacatccatcatttgctccaaagtgtgcaagtcaaatcctggggagaatcatgataaccctgatcactgagcagctacagaagcagactctggatgagctgaaatgcacacgcttcagcatcagtctgcctttgcctgatcatgcagacatctccaactgtgggaactctttccagcttgtgtctgaaggtgcttcctggaggggcctgccccactgttcctgtgctgagttccaggacagcctcaacttcagctaccatccctcaggcctgagcctgcacctcagaccacccagtcggggaaactcccccaaggagcagcccttctcccaagtcctaagacctgagcccccagatccagagaagcttcctgtgccccctgcccctccatccaagaggcactgccgctcactctcagtgcccgtggacctgtctcgctggcagccggtgtggcggcccgccccctccaagctgtggactcccataaagcaccggggcagtggtggagggggtgggccgcaggtgcctcaccagagccccccaaagcgggtctccagcctcaggttcctccaagctcccagtgcctcttctcaatgtgccccagctcacagaccctacagccctcctttcttcagcctggccctggcccaagattcctctcgaccctgcgccgcctcccctcaaagtggctcctgggagagtgatgctgagtccttgtcaccttgcccacctcagcgccgcttctccctgtcacccagtctgggcccgcaggcaagccgcttcttgccctctgcccggagctctcccgcatcctccccagagctgccctggcgacctcgaggtctccgcaaccttccccgaagccgctcacagccttgtgatctggatgcccgcaaaactggggtcaagcggcgccacgaggaagacccccggcgtctgcggccttcgttggactttgacaagatgaatcagaaaccatactcaggaggtctttgtctccaagaaacagcccgggaaggcagcagcatctctccaccatggttcatggcctgtagccccccacccctctctgcttcctgcagccccactgggggttcctcccaggtgctgagtgaaagcgaagaggaggaggagggggctgtgcggtggggtcggcaggcgctgagcaagcggacactgtgccagcgggactttggggacctggacttgaatttgattgaggaaaactaaaactgagaggctacttcctggggccacacagactgactctctcatggctactaacaagtgtcgagtccccaaggctgggggccgagcctgggaatgggggtgagtggagggctccgactcagggcagctggaaatcttctcgctccagcaagctcgaccatgccaagagactggccgggacaagataaacggagctggtggcgggagggacagccccagagcagacccttcctatggcggccctgagtgtgagtatccctgccaccaagagagcaatgggcagggaaggaaggggtctgccgaccccagctcggggaatttcactagcccctttgcttcaaagggcacttgtgtcttagaatttggccagggtggggggttgagtcagcctcctcagagaaactgcgtgagagtgtgtgcgtgcatgggagtgtacttgtggaaaggtgtgtttgcgtagccttagggaaggaaggcaattgctccttaacagcagagtatcatgatacccccaggatcttgagttttttacaggatgttgggtttgctcaaggagtcaagaggagggcaccaagttttccattactttcagtctggaaaactaagctagtcagaactgtcatcttgcttcccaatctaagaacctgtggccctggaacacttttcaagaattggttcattttgctttacacagtagatctgttccaacagttctgtgtaaaccaaatgctatttttcaatgcatttggactgctgaccatttaaaagcagcctatgattgcttctttttgtaaagcaagcaacctccctccactttagctgttttgactatttgaattttcacatattgggcttacccagagtggagcacacctccagggcatgtggctgacactgggtcaatgtctgcatctgtgctgtgtgtgtagtgtggttggccagtaggtgagtatccctgtgtgtgtgagtgaagccactccccaggctggtgctctcctcctgtgcccagtgactgcccagtggcagctcagctgcccttcactcccacctgctgccaaagtccctgtgctaatgggattacaaatacaaaaagtggaaaaaaattttcgtaaactttgttttatattaaaagaaaaatccataagtctgtgtgtgttaaacatgaggttctgcctctgtggctgtgtttgaaaaaataaagttttattagaataatccattttcccaagca

SEQ ID NO: 380556 - DNA, 4813 bp, Homo sapiens
gtttaaagcctctcctttatccacttttttgcttgtctccctaaaccatctgtgatgctagctgagactcgaatttacataagagccagaaaccatcaacccaacctcttcacacactaacgtctacattcaatctctttaaaaaagacttaaattttggctcatgtgggaggtggtggtagtggtggagacttaataaaaggtggttttgtcttcctgaagtggaaatatagcgccgtcaacatcttttccccatctgcctgtttcctccttccctttctgtttaaggaaagtctaaccaccgcacttctccccacctccccgcacctcccccccggcaaacgcaagcaactgaaccgcctatgatgtcataatcacaatcccattacctcatcctgctgggggggagggggcggagagagaagagagggagtgaacagccctgggctatcctgagctttacaaagtgttctgggtgagggcaaattacagaaccaagtggaaacgtccccgcaaccattataagtcctgggtttttaaggttcaggccgatccggcagctgcaagaggggctcctgggactccgagcaggccctaatccgcgcttggaccacacttcccagcagccttcacgccgcggacgggtcctttgctgggggaagggggattccttcgaagaggtggtcgtggagggcggggcagcagagcagactcagcaggcatgactggagagggaagtcccaatggtgctagaatggtgctgcagtggcagaagacggctcacaagtgaggtctggaagaacaacagggaagacatccatcatttgctccaaagtgtgcaagtcaaatcctggggagaatcatgataaccctgatcactgagcagctacagaagcagactctggatgagctgaaatgcacacgcttcagcatcagtctgcctttgcctgatcatgcagacatctccaactgtgggaactctttccagcttgtgtctgaaggtgcttcctggaggggcctgccccactgttcctgtgctgagttccaggacagcctcaacttcagctaccatccctcaggcctgagcctgcacctcagaccacccagtcggggaaactcccccaaggagcagcccttctcccaagtcctaagacctgagcccccagatccagagaagcttcctgtgccccctgcccctccatccaagaggcactgccgctcactctcagtgcccgtggacctgtctcgctggcagccggtgtggcggcccgccccctccaagctgtggactcccataaagcaccggggcagtggtggagggggtgggccgcaggtgcctcaccagagccccccaaagcgggtctccagcctcaggttcctccaagctcccagtgcctcttctcaatgtgccccagctcacagaccctacagccctcctttcttcagcctggccctggcccaagattcctctcgaccctgcgccgcctcccctcaaagtggctcctgggagagtgatgctgagtccttgtcaccttgcccacctcagcgccgcttctccctgtcacccagtctgggcccgcaggcaagccgcttcttgccctctgcccggagctctcccgcatcctccccagagctgccctggcgacctcgaggtctccgcaaccttccccgaagccgctcacagccttgtgatctggatgcccgcaaaactggggtcaagcggcgccacgaggaagacccccggcgtctgcggccttcgttggactttgacaagatgaatcagaaaccatactcaggaggtctttgtctccaagaaacagcccgggaaggcagcagcatctctccaccatggttcatggcctgtagccccccacccctctctgcttcctgcagccccactgggggttcctcccaggtgctgagtgaaagcgaagaggaggaggagggggctgtgcggtggggtcggcaggcgctgagcaagcggacactgtgccagcgggactttggggacctggacttgaatttgattgaggaaaactaaaactgagaggctacttcctggggccacacagactgactctctcatggctactaacaagtgtcgagtccccaaggctgggggccgagcctgggaatgggggtgagtggagggctccgactcagggcagctggaaatcttctcgctccagcaagctcgaccatgccaagagactggccgggacaagataaacggagctggtggcgggagggacagccccagagcagacccttcctatggcggccctgagtgtgagtatccctgccaccaagagagcaatgggcagggaaggaaggggtctgccgaccccagctcggggaatttcactagcccctttgcttcaaagggcacttgtgtcttagaatttggccagggtggggggttgagtcagcctcctcagagaaactgcgtgagagtgtgtgcgtgcatgggagtgtacttgtggaaaggtgtgtttgcgtagccttagggaaggaaggcaattgctccttaacagcagagtatcatgatacccccaggatcttgagttttttacaggatgttgggtttgctcaaggagtcaagaggagggcaccaagttttccttttttctaaatagctctggaaccaggcttgtaatccatagcatcaccgactctgcaaaggatttcattttggggtacagcagggtgttttaagtgctgtgacttcagctaatgatcttttcttcagccccaccccctccccactagctcgatctagtatattggggaatgcaggtggggggtgtcaccatattttttctgagctggcctttttttctcatcagattgtccaggctatattccacctgcctcttttgccctcttgagtagagttgcacacagcacatgggcaactgaagcagggttgaggggctctatctctctctctcctctgctgatgggacccttttcccctcaccctctgcccttctaagtcatagactaggtaggaaggccctatattggtccccagcatctactgaggcagacctgcaacagaagtggcattcagtccccagcagacatgggtgagctcaccccagcactgctgttgggaaggtgactgcaggaaaccaattcttacaagatccaggcccagcctttttgacctgcttgagagggaagaaggggtgtttagcatttaatagtttgcttgtcttccactcctgccaggaagtgtttatttgcctctaattgggcctgagagaccatagggaggttggggctcactgagggattggctgaggatgtataaagcaaaggctgtgagaagcagttgggagtttggttgtcattggattgaatttacttttttgtttctcacccgcaacttgagccaggacagctggtccaagtggccacagtgatgggtttaagtaccttggtagggctggcaccagtggaaacacatactgaagctgccaccacaatagcttgtgaggttttatccagctttggttagaccctgcatgaccaaatttgacctgcccttgtttatggcaagaagggcatttttctcttcaatttccagggtttcctaggacccagttcctcatgtaagggaggaagaccaaggtctttgtgttttcttcctcatggaattgaacctgacattttctggatctcctgcatgtcaggagcatcagtgaggcttcagcctccttcgtctccactccagagaggaggtggctatgtcttcttaagcctctggccctcagaggctcctccctatctcctggctagttaccactaggctaccaggtctctaggggcctgagagaggccctctagagaatccagggaaactgtgagcccaggagttgcccatctatggtttcattcctcccctggctcttctccctcttcaggccataatttccctggtgccaatttcttttcctcctggggcatcctcatcccagggctctctgctgtagattggctgtgccagcttccaacaggttactggcaatgccagtgagtttctgtaggccctaagctgaagaagtgaggcagtgattctgcctccatcctggtttccccaaagccccagggcaccatccttaggggagaaggtctacagttatcattattttaattccattactttcagtctggaaaactaagctagtcagaactgtcatcttgcttcccaatctaagaacctgtggccctggaacacttttcaagaattggttcattttgctttacacagtagatctgttccaacagttctgtgtaaaccaaatgctatttttcaatgcatttggactgctgaccatttaaaagcagcctatgattgcttctttttgtaaagcaagcaacctccctccactttagctgttttgactatttgaattttcacatattgggcttacccagagtggagcacacctccagggcatgtggctgacactgggtcaatgtctgcatctgtgctgtgtgtgtagtgtggttggccagtaggtgagtatccctgtgtgtgtgagtgaagccactccccaggctggtgctctcctcctgtgcccagtgactgcccagtggcagctcagctgcccttcactcccacctgctgccaaagtccctgtgctaatgggattacaaatacaaaaagtggaaaaaaattttcgtaaactttgttttatattaaaagaaaaatccataagtctgtgtgtgttaaacatgaggttctgcctctgtggctgtgtttgaaaaaataaagttttattagaataatccattttcccaagca

SEQ ID NO: 380557 - DNA, 4165 bp, Homo sapiens
tgacttcttttacctttgagagggagtggcaggcagtagatgaaatgtttttgattccaggtagttggtcacaatggaggcaatagagcatagtggtttaaaaacctagccttcgcatcagacagacctggatttgaatcctcctttggtcttttgagtgctatgtgattttgggaaagttattgaatttctcttatctgtgaaatggggataatgataacgatactacctacctcataaggtttttggaaattttcacataaaatgctccatacattatgtggcaaatggtaagttcttaaaaaatgtaagctatcattaatattattcttattataaatgccttccagaaggtgcttcctggaggggcctgccccactgttcctgtgctgagttccaggacagcctcaacttcagctaccatccctcaggcctgagcctgcacctcagaccacccagtcggggaaactcccccaaggagcagcccttctcccaagtcctaagacctgagcccccagatccagagaagcttcctgtgccccctgcccctccatccaagaggcactgccgctcactctcagtgcccgtggacctgtctcgctggcagccggtgtggcggcccgccccctccaagctgtggactcccataaagcaccggggcagtggtggagggggtgggccgcaggtgcctcaccagagccccccaaagcgggtctccagcctcaggttcctccaagctcccagtgcctcttctcaatgtgccccagctcacagaccctacagccctcctttcttcagcctggccctggcccaagattcctctcgaccctgcgccgcctcccctcaaagtggctcctgggagagtgatgctgagtccttgtcaccttgcccacctcagcgccgcttctccctgtcacccagtctgggcccgcaggcaagccgcttcttgccctctgcccggagctctcccgcatcctccccagagctgccctggcgacctcgaggtctccgcaaccttccccgaagccgctcacagccttgtgatctggatgcccgcaaaactggggtcaagcggcgccacgaggaagacccccggcgtctgcggccttcgttggactttgacaagatgaatcagaaaccatactcaggaggtctttgtctccaagaaacagcccgggaaggcagcagcatctctccaccatggttcatggcctgtagccccccacccctctctgcttcctgcagccccactgggggttcctcccaggtgctgagtgaaagcgaagaggaggaggagggggctgtgcggtggggtcggcaggcgctgagcaagcggacactgtgccagcgggactttggggacctggacttgaatttgattgaggaaaactaaaactgagaggctacttcctggggccacacagactgactctctcatggctactaacaagtgtcgagtccccaaggctgggggccgagcctgggaatgggggtgagtggagggctccgactcagggcagctggaaatcttctcgctccagcaagctcgaccatgccaagagactggccgggacaagataaacggagctggtggcgggagggacagccccagagcagacccttcctatggcggccctgagtgtgagtatccctgccaccaagagagcaatgggcagggaaggaaggggtctgccgaccccagctcggggaatttcactagcccctttgcttcaaagggcacttgtgtcttagaatttggccagggtggggggttgagtcagcctcctcagagaaactgcgtgagagtgtgtgcgtgcatgggagtgtacttgtggaaaggtgtgtttgcgtagccttagggaaggaaggcaattgctccttaacagcagagtatcatgatacccccaggatcttgagttttttacaggatgttgggtttgctcaaggagtcaagaggagggcaccaagttttccttttttctaaatagctctggaaccaggcttgtaatccatagcatcaccgactctgcaaaggatttcattttggggtacagcagggtgttttaagtgctgtgacttcagctaatgatcttttcttcagccccaccccctccccactagctcgatctagtatattggggaatgcaggtggggggtgtcaccatattttttctgagctggcctttttttctcatcagattgtccaggctatattccacctgcctcttttgccctcttgagtagagttgcacacagcacatgggcaactgaagcagggttgaggggctctatctctctctctcctctgctgatgggacccttttcccctcaccctctgcccttctaagtcatagactaggtaggaaggccctatattggtccccagcatctactgaggcagacctgcaacagaagtggcattcagtccccagcagacatgggtgagctcaccccagcactgctgttgggaaggtgactgcaggaaaccaattcttacaagatccaggcccagcctttttgacctgcttgagagggaagaaggggtgtttagcatttaatagtttgcttgtcttccactcctgccaggaagtgtttatttgcctctaattgggcctgagagaccatagggaggttggggctcactgagggattggctgaggatgtataaagcaaaggctgtgagaagcagttgggagtttggttgtcattggattgaatttacttttttgtttctcacccgcaacttgagccaggacagctggtccaagtggccacagtgatgggtttaagtaccttggtagggctggcaccagtggaaacacatactgaagctgccaccacaatagcttgtgaggttttatccagctttggttagaccctgcatgaccaaatttgacctgcccttgtttatggcaagaagggcatttttctcttcaatttccagggtttcctaggacccagttcctcatgtaagggaggaagaccaaggtctttgtgttttcttcctcatggaattgaacctgacattttctggatctcctgcatgtcaggagcatcagtgaggcttcagcctccttcgtctccactccagagaggaggtggctatgtcttcttaagcctctggccctcagaggctcctccctatctcctggctagttaccactaggctaccaggtctctaggggcctgagagaggccctctagagaatccagggaaactgtgagcccaggagttgcccatctatggtttcattcctcccctggctcttctccctcttcaggccataatttccctggtgccaatttcttttcctcctggggcatcctcatcccagggctctctgctgtagattggctgtgccagcttccaacaggttactggcaatgccagtgagtttctgtaggccctaagctgaagaagtgaggcagtgattctgcctccatcctggtttccccaaagccccagggcaccatccttaggggagaaggtctacagttatcattattttaattccattactttcagtctggaaaactaagctagtcagaactgtcatcttgcttcccaatctaagaacctgtggccctggaacacttttcaagaattggttcattttgctttacacagtagatctgttccaacagttctgtgtaaaccaaatgctatttttcaatgcatttggactgctgaccatttaaaagcagcctatgattgcttctttttgtaaagcaagcaacctccctccactttagctgttttgactatttgaattttcacatattgggcttacccagagtggagcacacctccagggcatgtggctgacactgggtcaatgtctgcatctgtgctgtgtgtgtagtgtggttggccagtaggtgagtatccctgtgtgtgtgagtgaagccactccccaggctggtgctctcctcctgtgcccagtgactgcccagtggcagctcagctgcccttcactcccacctgctgccaaagtccctgtgctaatgggattacaaatacaaaaagtggaaaaaaattttcgtaaactttgttttatattaaaagaaaaatccataagtctgtgtgtgttaaacatgaggttctgcctctgtggctgtgtttgaaaaaataaagttttattagaataatccattttcccaagca

SEQ ID NO: 380558 - DNA, 4053 bp, Homo sapiens
gtttaaagcctctcctttatccacttttttgcttgtctccctaaaccatctgtgatgctagctgagactcgaatttacataagagccagaaaccatcaacccaacctcttcacacactaacgtctacattcaatctctttaaaaaagacttaaattttggctcatgtgggaggtggtggtagtggtggagacttaataaaaggtggttttgtcttcctgaagtggaaatatagcgccgtcaacatcttttccccatctgcctgtttcctccttccctttctgtttaaggaaagtctaaccaccgcacttctccccacctccccgcacctcccccccggcaaacgcaagcaactgaaccgcctatgatgtcataatcacaatcccattacctcatcctgctgggggggagggggcggagagagaagagagggagtgaacagccctgggctatcctgagctttacaaagtgttctgggtgagggcaaattacagaaccaagtggaaacgtccccgcaaccattataagtcctgggtttttaaggttcaggccgatccggcagctgcaagaggggctcctgggactccgagcaggccctaatccgcgcttggaccacacttcccagcagccttcacgccgcggacgggtcctttgctgggggaagggggattccttcgaagaggtggtcgtggagggcggggcagcagagcagactcagcaggcatgactggagagggaagtcccaatggtgctagaatggtgctgcagtggcagaagacggctcacaagtgaggtctggaagaacaacagggaagacatccatcatttgctccaaagtgtgcaagtcaaatcctggggagaatcatgataaccctgatcactgagcagctacagaagcagactctggatgagctgaaatgcacacgcttcagcatcagtctgcctttgcctgatcatgcagacatctccaactgtgggaactctttccagcttgtgtctgaaggtgcttcctggaggggcctgccccactgttcctgtgctgagttccaggacagcctcaacttcagctaccatccctcaggcctgagcctgcacctcagaccacccagtcggggaaactcccccaaggagcagcccttctcccaagtcctaagacctgagcccccagatccagagaagcttcctgtgccccctgcccctccatccaagaggcactgccgctcactctcagtgcccgtggacctgtctcgctggcagccggtgtggcggcccgccccctccaagctgtggactcccataaagcaccggggcagtggtggagggggtgggccgcaggtgcctcaccagatccccaaggctgggggccgagcctgggaatgggggtgagtggagggctccgactcagggcagctggaaatcttctcgctccagcaagctcgaccatgccaagagactggccgggacaagataaacggagctggtggcgggagggacagccccagagcagacccttcctatggcggccctgagtgtgagtatccctgccaccaagagagcaatgggcagggaaggaaggggtctgccgaccccagctcggggaatttcactagcccctttgcttcaaagggcacttgtgtcttagaatttggccagggtggggggttgagtcagcctcctcagagaaactgcgtgagagtgtgtgcgtgcatgggagtgtacttgtggaaaggtgtgtttgcgtagccttagggaaggaaggcaattgctccttaacagcagagtatcatgatacccccaggatcttgagttttttacaggatgttgggtttgctcaaggagtcaagaggagggcaccaagttttccttttttctaaatagctctggaaccaggcttgtaatccatagcatcaccgactctgcaaaggatttcattttggggtacagcagggtgttttaagtgctgtgacttcagctaatgatcttttcttcagccccaccccctccccactagctcgatctagtatattggggaatgcaggtggggggtgtcaccatattttttctgagctggcctttttttctcatcagattgtccaggctatattccacctgcctcttttgccctcttgagtagagttgcacacagcacatgggcaactgaagcagggttgaggggctctatctctctctctcctctgctgatgggacccttttcccctcaccctctgcccttctaagtcatagactaggtaggaaggccctatattggtccccagcatctactgaggcagacctgcaacagaagtggcattcagtccccagcagacatgggtgagctcaccccagcactgctgttgggaaggtgactgcaggaaaccaattcttacaagatccaggcccagcctttttgacctgcttgagagggaagaaggggtgtttagcatttaatagtttgcttgtcttccactcctgccaggaagtgtttatttgcctctaattgggcctgagagaccatagggaggttggggctcactgagggattggctgaggatgtataaagcaaaggctgtgagaagcagttgggagtttggttgtcattggattgaatttacttttttgtttctcacccgcaacttgagccaggacagctggtccaagtggccacagtgatgggtttaagtaccttggtagggctggcaccagtggaaacacatactgaagctgccaccacaatagcttgtgaggttttatccagctttggttagaccctgcatgaccaaatttgacctgcccttgtttatggcaagaagggcatttttctcttcaatttccagggtttcctaggacccagttcctcatgtaagggaggaagaccaaggtctttgtgttttcttcctcatggaattgaacctgacattttctggatctcctgcatgtcaggagcatcagtgaggcttcagcctccttcgtctccactccagagaggaggtggctatgtcttcttaagcctctggccctcagaggctcctccctatctcctggctagttaccactaggctaccaggtctctaggggcctgagagaggccctctagagaatccagggaaactgtgagcccaggagttgcccatctatggtttcattcctcccctggctcttctccctcttcaggccataatttccctggtgccaatttcttttcctcctggggcatcctcatcccagggctctctgctgtagattggctgtgccagcttccaacaggttactggcaatgccagtgagtttctgtaggccctaagctgaagaagtgaggcagtgattctgcctccatcctggtttccccaaagccccagggcaccatccttaggggagaaggtctacagttatcattattttaattccattactttcagtctggaaaactaagctagtcagaactgtcatcttgcttcccaatctaagaacctgtggccctggaacacttttcaagaattggttcattttgctttacacagtagatctgttccaacagttctgtgtaaaccaaatgctatttttcaatgcatttggactgctgaccatttaaaagcagcctatgattgcttctttttgtaaagcaagcaacctccctccactttagctgttttgactatttgaattttcacatattgggcttacccagagtggagcacacctccagggcatgtggctgacactgggtcaatgtctgcatctgtgctgtgtgtgtagtgtggttggccagtaggtgagtatccctgtgtgtgtgagtgaagccactccccaggctggtgctctcctcctgtgcccagtgactgcccagtggcagctcagctgcccttcactcccacctgctgccaaagtccctgtgctaatgggattacaaatacaaaaagtggaaaaaaattttcgtaaactttgttttatattaaaagaaaaatccataagtctgtgtgtgttaaacatgaggttctgcctctgtggctgtgtttgaaaaaataaagttttattagaataatccattttcccaagca

SEQ ID NO: 380559 - DNA, 4097 bp, Homo sapiens
  misc_feature (1)..(1): n is a, c, g, or t
nagagctgctccggccgcggccctgggagctggaggaaccgcgactcagcaggcatgactggagagggaagtcccaatggtgctagaatggtgctgcagtggcagaagacggctcacaagtgaggtctggaagaacaacagggaagacatccatcatttgctccaaagtgtgcaagtcaaatcctggggagaatcatgataaccctgatcactgagcagctacagaagcagactctggatgagctgaaatgcacacgcttcagcatcagtctgcctttgcctgatcatgcagacatctccaactgtgggaactctttccagcttgtgtctgaaggtgcttcctggaggggcctgccccactgttcctgtgctgagttccaggacagcctcaacttcagctaccatccctcaggcctgagcctgcacctcagaccacccagtcggggaaactcccccaaggagcagcccttctcccaagtcctaagacctgagcccccagatccagagaagcttcctgtgccccctgcccctccatccaagaggcactgccgctcactctcagtgcccgtggacctgtctcgctggcagccggtgtggcggcccgccccctccaagctgtggactcccataaagcaccggggcagtggtggagggggtgggccgcaggtgcctcaccagagccccccaaagcgggtctccagcctcaggttcctccaagctcccagtgcctcttctcaatgtgccccagctcacagaccctacagccctcctttcttcagcctggccctggcccaagattcctctcgaccctgcgccgcctcccctcaaagtggctcctgggagagtgatgctgagtccttgtcaccttgcccacctcagcgccgcttctccctgtcacccagtctgggcccgcaggcaagccgcttcttgccctctgcccggagctctcccgcatcctccccagagctgccctggcgacctcgaggtctccgcaaccttccccgaagccgctcacagccttgtgatctggatgcccgcaaaactggggtcaagcggcgccacgaggaagacccccggcgtctgcggccttcgttggactttgacaagatgaatcagaaaccatactcaggaggtctttgtctccaagaaacagcccgggaaggcagcagcatctctccaccatggttcatggcctgtagccccccacccctctctgcttcctgcagccccactgggggttcctcccaggtgctgagtgaaagcgaagaggaggaggagggggctgtgcggtggggtcggcaggcgctgagcaagcggacactgtgccagcgggactttggggacctggacttgaatttgattgaggaaaactaaaactgagaggctacttcctggggccacacagactgactctctcatggctactaacaagtgtcgagtccccaaggctgggggccgagcctgggaatgggggtgagtggagggctccgactcagggcagctggaaatcttctcgctccagcaagctcgaccatgccaagagactggccgggacaagataaacggagctggtggcgggagggacagccccagagcagacccttcctatggcggccctgagtgtgagtatccctgccaccaagagagcaatgggcagggaaggaaggggtctgccgaccccagctcggggaatttcactagcccctttgcttcaaagggcacttgtgtcttagaatttggccagggtggggggttgagtcagcctcctcagagaaactgcgtgagagtgtgtgcgtgcatgggagtgtacttgtggaaaggtgtgtttgcgtagccttagggaaggaaggcaattgctccttaacagcagagtatcatgatacccccaggatcttgagttttttacaggatgttgggtttgctcaaggagtcaagaggagggcaccaagttttccttttttctaaatagctctggaaccaggcttgtaatccatagcatcaccgactctgcaaaggatttcattttggggtacagcagggtgttttaagtgctgtgacttcagctaatgatcttttcttcagccccaccccctccccactagctcgatctagtatattggggaatgcaggtggggggtgtcaccatattttttctgagctggcctttttttctcatcagattgtccaggctatattccacctgcctcttttgccctcttgagtagagttgcacacagcacatgggcaactgaagcagggttgaggggctctatctctctctctcctctgctgatgggacccttttcccctcaccctctgcccttctaagtcatagactaggtaggaaggccctatattggtccccagcatctactgaggcagacctgcaacagaagtggcattcagtccccagcagacatgggtgagctcaccccagcactgctgttgggaaggtgactgcaggaaaccaattcttacaagatccaggcccagcctttttgacctgcttgagagggaagaaggggtgtttagcatttaatagtttgcttgtcttccactcctgccaggaagtgtttatttgcctctaattgggcctgagagaccatagggaggttggggctcactgagggattggctgaggatgtataaagcaaaggctgtgagaagcagttgggagtttggttgtcattggattgaatttacttttttgtttctcacccgcaacttgagccaggacagctggtccaagtggccacagtgatgggtttaagtaccttggtagggctggcaccagtggaaacacatactgaagctgccaccacaatagcttgtgaggttttatccagctttggttagaccctgcatgaccaaatttgacctgcccttgtttatggcaagaagggcatttttctcttcaatttccagggtttcctaggacccagttcctcatgtaagggaggaagaccaaggtctttgtgttttcttcctcatggaattgaacctgacattttctggatctcctgcatgtcaggagcatcagtgaggcttcagcctccttcgtctccactccagagaggaggtggctatgtcttcttaagcctctggccctcagaggctcctccctatctcctggctagttaccactaggctaccaggtctctaggggcctgagagaggccctctagagaatccagggaaactgtgagcccaggagttgcccatctatggtttcattcctcccctggctcttctccctcttcaggccataatttccctggtgccaatttcttttcctcctggggcatcctcatcccagggctctctgctgtagattggctgtgccagcttccaacaggttactggcaatgccagtgagtttctgtaggccctaagctgaagaagtgaggcagtgattctgcctccatcctggtttccccaaagccccagggcaccatccttaggggagaaggtctacagttatcattattttaattccattactttcagtctggaaaactaagctagtcagaactgtcatcttgcttcccaatctaagaacctgtggccctggaacacttttcaagaattggttcattttgctttacacagtagatctgttccaacagttctgtgtaaaccaaatgctatttttcaatgcatttggactgctgaccatccactttagctgttttgactatttgaattttcacatattgggcttacccagagtggagcacacctccagggcatgtggctgacactgggtcaatgtctgcatctgtgctgtgtgtgtagtgtggttggccagtaggtgagtatccctgtgtgtgtgagtgaagccactccccaggctggtgctctcctcctgtgcccagtgactgcccagtggcagctcagctgcccttcactcccacctgctgccaaagtccctgtgctaatgggattacaaatacaaaaagtggaaaaaaattttcgtaaactttgttttatattaaaagaaaaatccataagtctgtgtgtgttaaacatgaggttctgcctctgtggctgtgtttgaaaaaataaagttttattagaataatccattttcccaagca

SEQ ID NO: 380560 - DNA, 1785 bp, Homo sapiens
  misc_feature (1)..(1): n is a, c, g, or t
nagagctgctccggccgcggccctgggagctggaggaaccgcgactcagcaggcatgactggagagggaagtcccaatggtgctagaatggtgctgcagtggcagaagacggctcacaagtgaggtctggaagaacaacagggaagacatccatcatttgctccaaagtgtgcaagtcaaatcctggggagaatcatgataaccctgatcactgagcagctacagaagcagactctggatgagctgaaatgcacacgcttcagcatcagtctgcctttgcctgatcatgcagacatctccaactgtgggaactctttccagcttgtgtctgaaggtgcttcctggaggggcctgccccactgttcctgtgctgagttccaggacagcctcaacttcagctaccatccctcaggcctgagcctgcacctcagaccacccagtcggggaaactcccccaaggagcagcccttctcccaagtcctaagacctgagcccccagatccagagaagcttcctgtgccccctgcccctccatccaagaggcactgccgctcactctcagtgcccgtggacctgtctcgctggcagccggtgtggcggcccgccccctccaagctgtggactcccataaagcaccggggcagtggtggagggggtgggccgcaggtgcctcaccagagccccccaaagcgggtctccagcctcaggttcctccaagctcccagtgcctcttctcaatgtgccccagctcacagaccctacagccctcctttcttcagcctggccctggcccaagattcctctcgaccctgcgccgcctcccctcaaagtggctcctgggagagtgatgctgagtccttgtcaccttgcccacctcagcgccgcttctccctgtcacccagtctgggcccgcaggcaagccgcttcttgccctctgcccggagctctcccgcatcctccccagagctgccctggcgacctcgaggtctccgcaaccttccccgaagccgctcacagccttgtgatctggatgcccgcaaaactggggtcaagcggcgccacgaggaagacccccggcgtctgcggccttcgttggactttgacaagatgaatcagaaaccatactcaggaggtctttgtctccaagaaacagcccgggaaggcagcagcatctctccaccatggttcatggcctgtagccccccacccctctctgcttcctgcagccccactgggggttcctcccaggtgctgagtgaaagcgaagaggaggaggagggggctgtgcggtggggtcggcaggcgctgagcaagcggacactgtgccagcgggactttggggacctggacttgaatttgattgaggaaaactaaaactgagaggctacttcctggggccacacagactgactctctcatggctactaacaagtgtcgagtccccaaggctgggggccgagcctgggaatgggggtgagtggagggctccgactcagggcagctggaaatcttctcgctccagcaagctcgaccatgccaagagactggccgggacaagataaacggagctggtggcgggagggacagccccagagcagacccttcctatggcggccctgagtgtgagtatccctgccaccaagagagcaatgggcagggaaggaaggggtctgccgaccccagctcggggaatttcactagcccctttgcttcaaagggcacttgtgtcttagaatttggccagggtgggggtatcatgatactctgctgttaaggagcaattgc

SEQ ID NO: 380561 - DNA, 489 bp, Homo sapiens
tactggttcaggaactgaggctgggaggcgtaagtcactttttatcaagctgcccaggtgatttttctggacagaagtctgaaccagccccctgccttctgcatttccacctgcctgctggattattccacccccagtgacccgcagcgcccttgaaagatgctgcagcccacgccggtctccagaaagccccggcggaatgtacgttgctgcctggaagaggccggctcgccccagagagaggggctacctccttcaggcctcgtccttggtgccctctcttcttctccaatggtttctatttttaaatatttcaactgttactgttaagtaatagtggttcctacttcggcccagctgttaggtgaaacacataaccaaacgtttggaggttgctaagaaggaaattctgaaatgcgttcttatgtaaacttgagcctgagaggcagaggtttcagtgagctatgatcgcaccactgcaacccagcc

SEQ ID NO: 380562 - DNA, 568 bp, Homo sapiens
aaagaaaactacacaccaatatccctgataaatagtggtgcaaaaatcttccacaaaatactagcaaacagaattcaatagcacatgaaacagattatacagcacgaccaaataagatttattctggactgcaaggatggttcagctggtgaaactcagtcagtgtaatacaccacatttacaaaatgaagagcaaaagccacacaatcatttcaatggatgtaggaaacacatttgacaagattcaacaccctttcataataaaacactcaacaaaccagggatagaagtaaactacttcaactattaaaggcgatttatgcaaagtctacagctaacatactcaatggtgaaaaactgaaagcttttcctctaaaatcaggaagaaggccaagatgcccactctggccacttctattcaacatagtattagaatttctagccacagccattagacaagaaaaagaaataaaagtatccagattggaaagaaagaagtgaaactacctctgttggcagttaacatgatcttatatgtagaaaaccataaagatttcacaaaaaaaaa

SEQ ID NO: 380563 - DNA, 1074 bp, Homo sapiens
catgtcctgtgaaaccctgtcaagcaataaataattggtactgttaaatttcataatggaaaaaattggaactcaaagtattaggagtttggcattgattttaaaggacaaagaaagaggctatgaattctcaaagatactaaacctgtaatgggatggacttcttgctctgttgaaaaggcctggtctctggaagatgaacttaaaaccagcttctcaaggtggttcatttaccacacatacttcagtgctcttttctgatttcatgtcccttatcaaggtttatgatttggggaccctcaggatttaagtgatcatggagaagggaccataggtattgctggctcttaacagggcagttaacatagctgaaggatgtgggctttcttatgttctccatgcctaggacttcctccgtcaggcagctggcaggacctgaaggatcacatgcgagaagctggggatgtctgttatgctgatgtgcagaaggatggagtggggatggtcgagtatctcagaaaagaagacatggaatatgccctgcgtaaactggatgacaccaaattccgctctcatgagggtgaaacttcctacatccgagtttatcctgagagaagcaccagctatggctactcacggtctcggtctgggtcaaggggccgtgactctccataccaaagcaggggttccccacactacttctctcctttcaggccctactgagacaggtgatgggaattttttctttattttttaggttaactgagctgctttgtgctcagaatctacattccagattgaggatttagtgtcttaggaaatttttttaattttttttttttaaagaagaaaaaaaactacataatttctaccagggccatattagcagtgaaacattttaaactgcagaaattgtggttttggttcagaaacaagttgtatatttttcacccctgattatgggaaaaaaatcagttctgtctttgtgggttgctctactatggagatcaacagttactgtgactgagtcggcccattctgtttagaaatatattttaaatgtttagtaattga

SEQ ID NO: 380564 - DNA, 1025 bp, Homo sapiens
tgggcaaaatggtcacataatagcaccatcacaagacttgccaggaatctagagcaagaggataacgtctaaagcatctagctcaggtcctcacatctggaaggtattaaatacaggctagctccttccatagatgcccatccaaagatgcatacatgaggtggcaggggattaaactatatgacccctgagatcctttccagttcttagctttgaggggggtcaatggcagtaattcagatatattgtttatcatagttaattgagtatcaacatgtcaaattggcatttattgtgttaccttgggcaaatgatataacttaagtcttaattttcttcattcttgaaatgggatagtaagagtacctacctcataatgttatgaaggtttaatgagatagcctcatgccaggcacagagtacacagtaagtgctcaatacttaactattattgttagatgttggtttgcttattcttctggctctgatttttttcccctttactctttttgtttttgtttgcatttcagggtgaaacttcctacatccgagtttatcctgagagaagcaccagctatggctactcacggtctcggtctgggtcaaggggccgtgactctccataccaaagcaggggttccccacactacttctctcctttcaggccctactgagacaggtgatgggaattttttctttattttttaggttaactgagctgctttgtgctcagaatctacattccagattgaggatttagtgtcttaggaaatttttttaattttttttttttaaagaagaaaaaaaactacataatttctaccagggccatattagcagtgaaacattttaaactgcagaaattgtggttttggttcagaaacaagttgtatatttttcacccctgattatgggaaaaaaatcagttctgtctttgtgggttgctctactatggagatcaacagttactgtgactgagtcggcccattctgtttagaaatatattttaaatgtttagtaattga

SEQ ID NO: 380565 - DNA, 1139 bp, Homo sapiens
gcgttcccacaatgcagtgcggctgagcgcctcggagcccgcggggacgctgcggggggacccgtgctgaggcggcggcggcgacgtgggctgcggcgggcccgcggcgtcgggcggtgcggatgtcgggctgggcggacgagcgcggcggcgagggcgacgggcgcatctacgtggggaaccttccgaccgacgtgcgcgagaaggacttggaggacctgttctacaagtacggccgcatccgcgagatcgagctcaagaaccggcacggcctcgtgcccttcgccttcgtgcgcttcgaggacccccgagatgcagaggatgctatttatggaagaaatggttatgattatggccagtgtcggcttcgtgtggagttccccaggacttatggaggtcggggtgggtggccccgtggtgggaggaatgggcctcctacaagaagatctgatttccgagttcttgtttcaggacttcctccgtcaggcagctggcaggacctgaaggatcacatgcgagaagctggggatgtctgttatgctgatgtgcagaaggatggagtggggatggtcgagtatctcagaaaagaagacatggaatatgccctgcgtaaactggatgacaccaaattccgctctcatgagggtgaaacttcctacatccgagtttatcctgagagaagcaccagctatggctactcacggtctcggtctgggtcaaggggccgtgactctccataccaaagcaggggttccccacactacttctctcctttcaggccctactgagacaggtgatgggaattttttctttattttttaggttaactgagctgctttgtgctcagaatctacattccagattgaggatttagtgtcttaggaaatttttttaattttttttttttaaagaagaaaaaaaactacataatttctaccagggccatattagcagtgaaacattttaaactgcagaaattgtggttttggttcagaaacaagttgtatatttttcacccctgattatgggaaaaaaatcagttctgtctttgtgggttgctctactatggagatcaacagttactgtgactgagtcggcccattctgtttagaaatatattttaaatgtttagtaattga

SEQ ID NO: 380566 - DNA, 1854 bp, Homo sapiens
gcgttcccacaatgcagtgcggctgagcgcctcggagcccgcggggacgctgcggggggacccgtgctgaggcggcggcggcgacgtgggctgcggcgggcccgcggcgtcgggcggtgcggatgtcgggctgggcggacgagcgcggcggcgagggcgacgggcgcatctacgtggggaaccttccgaccgacgtgcgcgagaaggacttggaggacctgttctacaagtacggccgcatccgcgagatcgagctcaagaaccggcacggcctcgtgcccttcgccttcgtgcgcttcgaggacccccgagatgcagaggatgctatttatggaagaaatggttatgattatggccagtgtcggcttcgtgtggagttccccaggacttatggaggtcggggtgggtggccccgtggtgggaggaatgggcctcctacaagaagatctgatttccgagttcttgtttcaggacttcctccgtcaggcagctggcaggacctgaaggatcacatgcgagaagctggggatgtctgttatgctgatgtgcagaaggatggagtggggatggtcgagtatctcagaaaagaagacatggaatatgccctgcgtaaactggatgacaccaaattccgctctcatgagggtgaaacttcctacatccgagtttatcctgagagaagcaccagctatggctactcacggtctcggtctgggtcaaggggccgtgactctccataccaaagcaggggttccccacactacttctctcctttcaggccctactgagacaggtgatgggaattttttctttattttttaggttaactgagctgctttgtgctcagaatctacattccagattgaggatttagtgtcttaggaaatttttttaattttttttttttaaagaagaaaaaaaactacataatttctaccagggccatattagcagtgaaacattttaaactgcagaaattgtggttttggttcagaaacaagttgtatatttttcacccctgattatgggaaaaaaatcagttctgtctttgtgggttgctctactatggagatcaacagttactgtgactgagtcggcccattctgtttagaaatatattttaaatgtttagtaattgaaaaaaaaaaaaaaaaaaaaaaaaaaaaaaaaaaaaaaaaaaaaaaaaaaaaaaaaaaaaaacaaaaaaaaaaagaaaaaaaaaaaacaaaaaaaaaaaaatagcagaagaacaccaacacacaagacacaacaactacaccagggaaacaaaaataagaaagagacaatgataaatacaacgcggggtagcacacgatcgaagacatatctcatcaacataataccgctcgactaaagaaaacaacacacgcttcatatttcgatcgtcggaccgctacaatgagctgtgatctacacacaaacaaaaaatacacaaatacatatgcaaacacaatataacacaccaagcaatcaactaaaataatatctaattattatctttacactatttatatcatttaaaaataatatacaataaataatctataagaaaaataagttatatcctcagctaacaacaagacaaatatgtaatataagacaacaacactcctaactctgcgctatgagagaaacgacgatatagacccagtgcgacttagcatacgatttattaggactgagacgaaggtagacatgtaggagtcgaatattcacgctcgtagacgacgaggtgcgcaggaagcgaccgcaacatgtagtggtgctccggcgggggtgtgggtctgataacgctccattactagagtacagcgatcgggaggggggggaggc

SEQ ID NO: 380567 - DNA, 1729 bp, Homo sapiens
gcgttcccacaatgcagtgcggctgagcgcctcggagcccgcggggacgctgcggggggacccgtgctgaggcggcggcggcgacgtgggctgcggcgggcccgcggcgtcgggcggtgcggatgtcgggctgggcggacgagcgcggcggcgagggcgacgggcgcatctacgtggggaaccttccgaccgacgtgcgcgagaaggacttggaggacctgttctacaagtacggccgcatccgcgagatcgagctcaagaaccggcacggcctcgtgcccttcgccttcgtgcgcttcgaggacccccgagatgcagaggatgctatttatggaagaaatggttatgattatggccagtgtcggcttcgtgtggagttccccaggacttatggaggtcggggtgggtggccccgtggtgggaggaatgggcctcctacaagaagatctgatttccgagttcttgtttcaggacttcctccgtcaggcagctggcaggacctgaaggatcacatgcgagaagctggggatgtctgttatgctgatgtgcagaaggatggagtggggatggtcgagtatctcagaaaagaagacatggaatatgccctgcgtaaactggatgacaccaaattccgctctcatgagggtgaaacttcctacatccgagtttatcctgagagaagcaccagctatggctactcacggtctcggtctgggtcaaggggccgtgactctccataccaaagcaggggttccccacactacttctctcctttcaggccctactgagacaggtgatgggaattttttctttattttttaggttaactgagctgctttgtgctcagaatctacattccagattgaggatttagtgtcttaggaaatttttttaattttttttttttaaagaagaaaaaaaactacataatttctaccagggccatattagcagtgaaacattttaaactgcagaaattgtggttttggttcagaaacaagttgtatatttttcacccctgattatgggaaaaaaatcagttctgtctttgtgggttgctctactatggagatcaacagttactgtgactgagtcggcccattctgtttagaaatatattttaaatgtttagtaattgacatgtgtggttgtccttgattaagttcacagatttcaccaaataggcacactaatttaaaaaatcactgagttgtagtcataacttgtacccagttaggagcaggggtagataactttatttatatggggatagacagttgctctgatgttggtttgagaacgtaaactccaagagcgggttctgggttctcttttaattcaaggccaagcttgtaaattaggctgccttaaagaaaaaaaaaaaaaaaaaaaaaaaaaaaaaaaaaaaaaaagggggggggggtaaaaaatttccccgggggggcccaattatgggaccacaggttttttttgacaagggggcgcccatataagagggggcggaatattaaagacaagggagggcccggggagtaaaaacaacggttcggtagtgggaaacatcgggacttggagatcttttgggagagagatccctacttgttgtggtggggacatattggggcaactctcaaagatatttaaggctcagggaaaaataaaacttagctcttactgggtaacaccggtatatttgcgggaagagtggctacgagatgttagaattacg

SEQ ID NO: 380568 - DNA, 820 bp, Homo sapiens
gcgttcccacaatgcagtgcggctgagcgcctcggagcccgcggggacgctgcggggggacccgtgctgaggcggcggcggcgacgtgggctgcggcgggcccgcggcgtcgggcggtgcggatgtcgggctgggcggacgagcgcggcggcgagggcgacgggcgcatctacgtggggaaccttccgaccgacgtgcgcgagaaggacttggaggacctgttctacaagtacggccgcatccgcgagatcgagctcaagaaccggcacggcctcgtgcccttcgccttcgtgcgcttcgaggacccccgagatgcagaggatgctatttatggaagaaatggttatgattatggccagtgtcggcttcgtgtggagttccccaggacttatggaggtcggggtgggtggccccgtggtgggaggaatgggcctcctacaagaagatctgatttccgagttcttgtttcaggacttcctccgtcaggcagctggcaggacctgaaggatcacatgcgagaagctggggatgtctgttatgctgatgtgcagaaggatggagtggggatggtcgagtatctcagaaaagaagacatggaatatgccctgcgtaaactggatgacaccaaattccgctctcatgaggtgggtccttgccttctgttgaggagcttgtactcaaatcactccacttgaacctgacctagcagaggtagcaagaggccatgccatttggtaacctcacagtaccataagagatctatcttaggtggacaaagccatggaatttgctatgcctaagtccttcagggtcatagctg

SEQ ID NO: 380569 - DNA, 1549 bp, Homo sapiens
gcgttcccacaatgcagtgcggctgagcgcctcggagcccgcggggacgctgcggggggacccgtgctgaggcggcggcggcgacgtgggctgcggcgggcccgcggcgtcgggcggtgcggatgtcgggctgggcggacgagcgcggcggcgagggcgacgggcgcatctacgtggggaaccttccgaccgacgtgcgcgagaaggacttggaggacctgttctacaagtacggccgcatccgcgagatcgagctcaagaaccggcacggcctcgtgcccttcgccttcgtgcgcttcgaggacccccgagatgcagaggatgctatttatggaagaaatggttatgattatggccagtgtcggcttcgtgtggagttccccaggacttatggaggtcggggtgggtggccccgtggtgggaggaatgggcctcctacaagaagatctgatttccgagttcttgtttcaggtatgttcctttcaaacagaatgagatgatacatgtaaaatacttaacacagagtctgtcttccaagaaatgatagctgttattcttcagtgcatgggacacgggggctttcttttcaatagcctgtgtgaagccttgccctggattgccaatgaggaaagtatcctgcaaatgaaattgcgctgggagtgcagccttggaagaacataaccatatttcttgtaaaggagttttctagtggtgagaaggaaagatgatgggaaaacttgagctacaattctaaagatgcttcttttggaatatacttggcatcagacatggtagaaaggcattcaaggagccagatttgaacaacttacccagccttggatcctgaagaagatcagattttgtggtggttttagaattaaatattttttaaaaccccgtaacttaagagtcttagagattttattggaaagtatagactatttctgtctagtgtttataagtgatgaaatgctaaactgggaggtttatctatcttcaaaatattaacacactggaaagacctggggccttctgcatattgcatgggagttttagggccctggtggaatgaaataaatcgaggagcctggcacctttttaagatgtgaatgtcacacaatcacagcatactcccatgtgcttaagagtgatactctcagtatctgcctatcttgtgtccctttgtaattttttaaccccagaactctattccctccttcaggatgtcatacattatctttttttctctccatgctgctctgaaatcctgcttagaaaactattaggaaatggctgcagtcctgagctgtgagcggtaaacacagcctttgagagcaggagcacatttccctttcatgacatcaggtagggttgtatgactcccgactagttttagcatctgagtcttaccttcccccccactgtattgaagaatgttggtgatcttttaagaggtactctgtatagtttgtcattcatacctacaagaaaacaaactttagattttttgttgttgtgttgttaccttcagctactctttggttatttc

SEQ ID NO: 380570 - DNA, 482 bp, Homo sapiens
atgtcgggctgggcggacgagcgcggcggcgagggcgacgggcgcatctacgtggggaaccttccgaccgacgtgcgcgagaaggacttggaggacctgttctacaagtacggccgcatccgcgagatcgagctcaagaaccggcacggcctcgtgcccttcgccttcgtgcgcttcgaggacccccggtgaggcccccgcgcccctgccctctcctcctcggtgcctgaggcccccgccttccctgctgtcccctcccccagggctcccctccccccggcctcccctccccccgcctccgcgcagacccctcacggcgccccctcacgggtggaggatgaggcagcctctcctcgcaggcccgggccgtccttcgcgccgtcgtcacttcctttatttttattattccaatattttacttagaaacccaaaagctgagcctttggagggcccaagcccgcctgcaccggcctcggggggtc

SEQ ID NO: 380571 - DNA, 899 bp, Homo sapiens
cccgctcaagcagtttcttccataaatagcatcctcgtgccttcgccttcgtgcgcttcgaggacccccgagatgcagaggatgctatttatggaagaaatggttatgattatggccagtgtcggcttcgtgtggagttccccaggacttatggaggtcggggtgggtggccccgtggtgggaggaatgggcctcctacaagaagatctgatttccgagttcttgtttcaggacttcctccgtcaggcagctggcaggacctgaaggatcacatgcgagaagctggggatgtctgttatgctgatgtgcagaaggatggagtggggatggtcgagtatctcagaaaagaagacatggaatatgccctgcgtaaactggatgacaccaaattccgctctcatgagggtgaaacttcctacatccgagtttatcctgagagaagcaccagctatggctactcacggtctcggtctgggtcaaggggccgtgactctccataccaaagcaggggttccccacactacttctctcctttcaggccctactgagacaggtgatgggaattttttctttattttttaggttaactgagctgctttgtgctcagaatctacattccagattgaggatttagtgtcttaggaaatttttttaattttttttttttaaagaagaaaaaaaactacataatttctaccagggccatattagcagtgaaacattttaaactgcagaaattgtggttttggttcagaaacaagttgtatatttttcacccctgattatgggaaaaaaatcagttctgtctttgtgggttgctctactatggagatcaacagttactgtgactgagtcggcccattctgtttagaaatatattttaaatgtttagtaattga

SEQ ID NO: 380572 - DNA, 1535 bp, Homo sapiens
gcgttcccacaatgcagtgcggctgagcgcctcggagcccgcggggacgctgcggggggacccgtgctgaggcggcggcggcgacgtgggctgcggcgggcccgcggcgtcgggcggtgcggatgtcgggctgggcggacgagcgcggcggcgagggcgacgggcgcatctacgtggggaaccttccgaccgacgtgcgcgagaaggacttggaggacctgttctacaagtacggccgcatccgcgagatcgagctcaagaaccggcacggcctcgtgcccttcgccttcgtgcgcttcgaggacccccgagatgcagaggatgctatttatggaagaaatggttatgattatggccagtgtcggcttcgtgtggagttccccaggacttatggaggtcggggtgggtggccccgtggtgggaggaatgggcctcctacaagaagatctgatttccgagttcttgtttcaggacttcctccgtcaggcagctggcaggacctgaaggatcacatgcgagaagctggggatgtctgttatgctgatgtgcagaaggatggagtggggatggtcgagtatctcagaaaagaagacatggaatatgccctgcgtaaactggatgacaccaaattccgctctcatgagggtgaaacttcctacatccgagtttatcctgagagaagcaccagctatggctactcacggtctcggtctgggtcaaggggccgtgactctccataccaaagcaggggttccccacactacttctctcctttcaggccctactgagacaggtgatgggaattttttctttattttttaggttaactgagctgctttgtgctcagaatctacattccagattgaggatttagtgtcttaggaaatttttttaattttttttttttaaagaagaaaaaaaactacataatttctaccagggccatattagcagtgaaacattttaaactgcagaaattgtggttttggttcagaaacaagttgtatatttttcacccctgattatgggaaaaaaatcagttctgtctttgtgggttgctctactatggagatcaacagttactgtgactgagtcggcccattctgtttagaaatatattttaaatgtttagtaattgacatgtgtggttgtccttgattaagttcacagatttcaccaaataggcacactaatttaaaaaatcactgagttgtagtcataacttgtacccagttaggagcaggggtagataactttatttatatggggatagacagttgctctgatgttggtttgagaacgtaaactccaagagcgggttctgggttctcttttaattcaaggccaagcttgtaaattaggctgccttaaagaaaaaagcattgcagataaaggaagggaatgggaaaaataaacacacggtggcttttgcctgtgatcctagccctttgggaggccaaggcatgccagaggatcccttgaggccaggagttcacgaccagataggcaacatagcaaaacccccacctctactt

SEQ ID NO: 380573 - DNA, 1092 bp, Homo sapiens
gcgttcccacaatgcagtgcggctgagcgcctcggagcccgcggggacgctgcggggggacccgtgctgaggcggcggcggcgacgtgggctgcggcgggcccgcggcgtcgggcggtgcggatgtcgggctgggcggacgagcgcggcggcgagggcgacgggcgcatctacgtggggaaccttccgaccgacgtgcgcgagaaggacttggaggacctgttctacaagtacggccgcatccgcgagatcgagctcaagaaccggcacggcctcgtgcccttcgccttcgtgcgcttcgaggacccccgagatgcagaggatgctatttatggaagaaatggttatgattatggccagtgtcggcttcgtgtggagttccccaggacttatggaggtcggggtgggtggccccgtggtgggaggaatgggcctcctacaagaagatctgatttccgagttcttgtttcaggacttcctccgtcaggcagctggcaggacctgaaggatcacatgcgagaagctggggatgtctgttatgctgatgtgcagaaggatggagtggggatggtcgagtatctcagaaaagaagacatggggtgaaacttcctacatccgagtttatcctgagagaagcaccagctatggctactcacggtctcggtctgggtcaaggggccgtgactctccataccaaagcaggggttccccacactacttctctcctttcaggccctactgagacaggtgatgggaattttttctttattttttaggttaactgagctgctttgtgctcagaatctacattccagattgaggatttagtgtcttaggaaatttttttaattttttttttttaaagaagaaaaaaaactacataatttctaccagggccatattagcagtgaaacattttaaactgcagaaattgtggttttggttcagaaacaagttgtatatttttcacccctgattatgggaaaaaaatcagttctgtctttgtgggttgctctactatggagatcaacagttactgtgactgagtcggcccattctgtttagaaatatattttaaatgtttagtaattga

SEQ ID NO: 380574 - DNA, 1508 bp, Homo sapiens
gcgttcccacaatgcagtgcggctgagcgcctcggagcccgcggggacgctgcggggggacccgtgctgaggcggcggcggcgacgtgggctgcggcgggcccgcggcgtcgggcggtgcggatgtcgggctgggcggacgagcgcggcggcgagggcgacgggcgcatctacgtggggaaccttccgaccgacgtgcgcgagaaggacttggaggacctgttctacaagtacggccgcatccgcgagatcgagctcaagaaccggcacggcctcgtgcccttcgccttcgtgcgcttcgaggacccccgagatgcagaggatgctatttatggaagaaatggttatgattatggccagtgtcggcttcgtgtggagttccccaggacttatggaggtcggggtgggtggccccgtggtgggaggaatgggcctcctacaagaagatctgatttccgagttcttgtttcaggtatgttcctttcaaacagaatgagatgatacatgtaaaatacttaacacagagtctgtcttccaagaaatgatagctgttattcttcagtgcatgggacacgggggctttcttttcaatagcctgtgtgaagccttgccctggattgccaatgaggaaagtatcctgcaaatgaaattgcgctgggagtgcagccttggaagaacataaccatatttcttgtaaaggagttttctagtggtgagaaggaaagatgatgggaaaacttgagctacaattctaaagatgcttcttttggaatatacttggcatcagacatggtagaaaggcattcaaggagccagatttgaacaacttacccagccttggatcctgaagaagatcagattttgtggtggttttagaattaaatattttttaaaaccccgtaacttaagagtcttagagattttattggaaagtatagactatttctgtctagtgtttataagtgatgaaatgctaaactgggaggtttatctatcttcaaaatattaacacactggaaagacctggggccttctgcatattgcatgggagttttagggccctggtggaatgaaataaatcgaggagcctggcacctttttaagatgtgaatgtcacacaatcacagcatactcccatgtgcttaagagtgatactctcagtatctgcctatcttgtgtccctttgtaattttttaaccccagaactctattccctccttcaggatgtcatacattatctttttttctctccatgctgctctgaaatcctgcttagaaaactattaggaaatggctgcagtcctgagctgtgagcggtaaacacagcctttgagagcaggagcacatttccctttcatgacatcaggtagggttgtatgactcccgactagttttagcatctgagtcttaccttcccccccactgtattgaagaatgttggtgatcttttaagaggtactctgtatagtttgtcattcatacattttaccatgtgcagttttagctgct

SEQ ID NO: 380575 - DNA, 1341 bp, Homo sapiens
acccaacggtaaccatcctgatactaattcttcagattggtttatctggttttgttttacatatattttgtactttatatttttaaaaacactctgtttcctcttgtgtgtctggcttctttcattctgcattacatttttagaccatccatgtcattgcatctagctgtgaatgatccactctcatggctggtttgtgcgtgtgagtgtcagagtccgagttgtgcgggtaagggggcagtgaagaatacccacaatataattatccattctgctgttgatagacatttgggtagctgtttccaatttagagttattacaaacagtactgctctaaacattctgatcgtattctttggtgaacatctgtacacatttttgttaggtatatttatacccacaagaaaaaatgcttgtcattgagtatgcatgcattcagtacagctttaccgccaaccagttttcaaagtggtagttgtactagttgacaaccataccggtagtgtatgagaagtccgatcaccttctgtctctggtgggtagtcagtgatctccattttcatgacagttaatgaagtcgagcacatttccgaatatatgtttacatttgtcgtatctacatatcctcctttgtgaagggcctgttaagtcttttgcctgttttcctgttgggttacctgcctccttcttaatgttttatagttctttattttggagatgagtcacttattgactatgtatattggaagtatcttctactgtatggcttgcctttgatttttttagtcaactccttcgatggattgaagtttttaatcttcatataatctgactgatccttgttttcctttatgtttagctgcattaggtttttggttgctgttttagaaatcattacctgttcccagctcatgaaaatattctcctcttatttcttttaaaaatattatttgttcaacaattttttgatgtcatatttcacagatgtctcttagataccagctatatttcaatatccatttattgagaataatgacaagaagcttgggtaaagcttttaaacagatttgtagtatattcacagcagtgtctagtcatttgaaaagtagttagaagacattgggagatactttctcaatgtagaaaccatgctgtgtactccccacacagatccgcagacaactcaaagtggtggaggctcaaggcttgagagaacctgagtcagcggagaggccatcttagccttgttaatgtcaaaaggtgtacatgtccatttattccatgtttacaaaatacttctgtgtcaggtattgtgctgataagatactggaaacataaaga

SEQ ID NO: 380576 - DNA, 432 bp, Homo sapiens
ggaaccagtggctagccaggccacggcgggctcaagagatctgacatcttaaagttatctgattaatgttcataaaacggagcttccactttgggaagcagttgagtacattcctttgctgtcctgccatagaatacccactgccaaggcaaaggtatgcatccagtacaccacactctccgctgctagcgatcttgagctaaggcttgggctgcaggcgacttctctatagatacacaaagatttaacgttccttaaacaaaaataactgaaaggacttctagagaatatccacttgtcttataaaaggactctcagcccagagagcttctgtgccttgtcgatagtggcagagctgggatcccaatgcttctgccctgctggtttgagtcacattctccatagagcagtttgcccttcccagttctgtgt

SEQ ID NO: 380577 - DNA, 741 bp, Homo sapiens
tgtttgaaaaccaatgctcaaagataccacgttttgttttttgttttttttaaactgccgggaagagaagggtcttagaattagaacatgttctgaaatcatgctttatgcattccagagatgcatggaaatcataagtagaggtggttgatttgatgcttccacggaacttttttgaatatacttctggcaaagaagtaagtctatacaaagaagtaagcaaagataagtctggcaaagaagtaagtctatacaaagaagtaagcaaagataagtctggcaaagaagccagaatcccgaaactgtgctggatcctgtattctgtgttccttctctcaccgtttatgaggatgctgatctcttggagatgacaagctaataatttaaatttatagggcgtggaattcctttgcagaagaaaatgctttccataattactaacctcaaaaaagatgttgtagagtgtatttctttcccagcatagaaagctttgttttgtatcccatgtaatttaatgggagtgtgtgtcatgaaacgggctttgaagtgggaagcaaggtgcttccattttctgttttgtaaaccaaaaataaaatttgaaggccccccacaaccatctgaatggacgaccatctgtatggactctttccccagtcagggcactctaaaatttaacctgaaagactggttcaggccatgaaaaaggggatgggggggttggacatgcgtaattaacatcaa

SEQ ID NO: 380578 - DNA, 420 bp, Homo sapiens
agctttttaaaacatgtcttgtttctttctcatgtggtaaatttatcatgacaactctaggctgtagaaggcgtaatataaaatacaaactagttttggttcttataaaaggctgatttcagttaagactggtcatttttttaaaaagctgaattacactgtagtataaaagcaaacagtcaactaagcaaccaaacaaaacagctctcttctttaataatattcatcattgccaaatgtttatttttgaaattttgttctgtgccaacttgtttcaccatgttaaactgcatacatacccatgaactatttatttacaatacatttgatctcgttaagaccccagttctatttccaaggcatgcagcccaaaaccaaaaagttaaaagatgataacactctgtggttgaattacctatg

SEQ ID NO: 380579 - DNA, 884 bp, Homo sapiens
accggaacgccgcagccggcgctcggtccatccggcccgtgggctgtggggccccgggcggcggcggctacgtagctgccgccggccttggccgcggccgggcgggcggatatgtggcttaaatggcgcaggcgtcggggcctagaggctgaagggctggtcgtcctaaaaactcgtggacgtcgcgcacggttacccggacgcaggcccgcccctctggggaaccgcgagctcctcgcagctgggtggggaccgtcctcgcagtggcggcctccaccctgccttctcgcttagccaaggcttctggaaggctcgcaaagtgtctgttgttggaagaagccgggccctgactggcgcgacggattctcccagccgctcagcagagcgtctgtaggtcggaagtgggggttgtattgggtgggtattgagctcttcggcccttcctcggtactgatagtttttaatttaggttttaaaggtctaaagatgcgcccgttctggccatctcaggtgaaatgttgaaacgccccagaacctataatttttggtttcttagtaaacatacgatccagatcttgtgtaattccatgcccctcctcctcgaaatttggaagtagtacatggtaatagggatgtgtaaagcagcttttagcagcattgcttaaatttatttgaagaaattggcctgtcttgctcttaaactcttgggctgtaggttttccttacatatttctctgttttatgtcgtggttttgacttgcctgggaaggtgcaggcgcttatttatcctaaatgccctgaagtgtttaggctacaggctgtagatcttatactgattttttttcttcagttttcttgcttattaagaataaatattgactcca

SEQ ID NO: 380580 - DNA, 629 bp, Homo sapiens
atccgtcgctcacgaggtcgcgcctcgcacccgccttcctccttttcttttaccctccccttcagaaaaaacggcggttgggctgcgacggccgccaaaggcggactagaagcggaggggtgaaaatcccggcagagaaggaagaagggactgcaggcgggaggaggaggaggataaggaggaagggagcccgcccagccggagccatctccgtcgagaacaaaatggcggcgctggcggagggccaactataaggcggggccgcggccattccccctccacccccacccttgcgccggccgggccggtcagggggaacccgctcgcttcgcccggccgcgggcggggaggggaggggagcggcccggcccactatgcaaagcgccgggcgccgccgccgccaccccgtggcaaaggtcgaggggttaatgctctggaagacggatgaaaaggcactgcccgagaagcggggtgaagacagcgggaagctcatgctcacaggccgctctgtaaccgaaagaagccacatggaagggagaatccacatattggaaaatggtgcccgaacctctgtttcctccctccatggagtgaataactccctccagggaaagcggtttcaggcatga

SEQ ID NO: 380581 - DNA, 3788 bp, Homo sapiens
accggaacgccgcagccggcgctcggtccatccggcccgtgggctgtggggccccgggcggcggcggctacgtagctgccgccggccttggccgcggccgggcgggcggatatgtggcttaaatggcgcaggcgtcggggcctagaggctgaagggctggtcgtcctaaaaactcgtggacgtcgcgcacggttacccggacgcaggcccgcccctctggggaaccgcgagctcctcgcagctgggtggggaccgtcctcgcagtggcggcctccaccctgccttctcgcttagccaaggcttctggaaggctcgcaaagtgtctgttgttggaagaagccgggccctgactggcgcgacggattctcccagccgctcagcagagcgtctgtaggtcggaagtgggggttgtattggaatatgctttttgtctaatgatgttagataaaaagcaaatttggagcagttttcttattcgagttcaaaatggttcataaagcagcgaagacaactcaaaacatcagtaacacatttggcccaggaactgctaacaaacatacagtgcagtggtggcttaagaagttttgcaaggaagagagccttgaagatgaggaacgtgatatgggccatgggaagttgacaacgaccaattgagagcaatcattgaactacatgaaaaattacagaagaactcagcgttgactattctacggtcattagggtcgttcagcattcgaagcaaattggaaaggtgaaaaagcttgataagtgggtgcctcatgagctgagcggaaatcaaaactatcgttttgaagtgtagtcttcttttatgctacgcaacaacaaaccatttctcaatcggattgtgacatgtaatgaaaagtgaattttatacaacaaccagctcagtggttggaccaagaggcagctccaaagcagttcccaaagccaaacttgcaccaaaaaaaaggtcatggtcactgttcggtggtctgctgcccatctgatccactacagttttctgaatcctggtgaaaccattacatctgagaagtatgctcagcaaattggtaagatgcaccgaaaactgcaatacctgctgcctgcattggtcaacagaaagggcccaattcttctccacgacaacacctgactgcgtgtcgcacaaccagtgcttcaaaagttgaaggaattgggctacaaagttttgcctcatccaccatattcacctgacctttcgccaactgactaccacttctgctagcatcttgacaactttttgcagggaaaacacttcagcatggtgcagaaaatgctttccaagagttcgtcaaatcctgaagcacggatttttatgctacaggaataaacaaacatttctcattggcaaaaatgtgttgattgtaatggttcctgttttgattaatagaatatgttttagcgtagttacaatgatttaaaattcgcagtctggaaatttaatttttgcatcaacctaatatttctatggtaaatccttgcaaacatggaaacaatgcatttggcccagtgctttgtggttgtgtactctttttctttgtttttttaatagatggcattggccgggcatggtggctcatgcctgtaatcccagcattttgggagggtgaggtgggtggatcacctgaggtcaggagttcaagaccagcctgactaacatggtaaaaccccatctctactaaaaatacaaaaaaattagctaggcggggtggcgggcatctaattccagctacttcatgaggctgcgacaggagaatcatttgaactcgggaggcagaggttgcagtgagccgagatcacaccattgcactccagcctgggcgatgagcgaaactgtctcaaaaaaaaaaaaagttggggtctcgctgtgttgaccaggctggtctcgaactcctggcctcaagtgatcctcccatcttggcctcccaaagtgttgggattacaggcgtgagccaccacaccctgcctggttgtgtactcttttaaatactaagtttttaatgttaaatgctgcttttagatacactgtaaaaatacacctatcaatgagtttttttattaaaaacattgcaattgtactagactttaaatactaagcaataattcaggcttcaatgttggtttatagttttctcatttctttcatttaatacctctgtaaaatgaagcagttacttccattttcctgaggtgagataagtgccctgcacaatgttataggcccagtaagtgagactggagctctgatctaatccctttgacattaaagtttgtgcagtaaaccagctatgtcagtttgccacatttgtaatagtgttcaataaattttcacttaaaggtttaatattaaagtagtagcaagaattcataaccttaattggctttaacagcttttctttccctgaaaacagatgcatatgtacacatgcacacagattgcttacaatatcagcacgtaaaaggcctttgcacattgaagtcggcactgctttggtgccttttttgttttttggctcggtgttttgactgcaagtctttttggatagaattttatagttagaaagtagctaacacttgggttttataggcacaaaaaacaagtcttatactagctgtactttattttttgagttcttattaatgaggaacatccacttttgcattgacagtgatttcaagattgctttatcagcctttaaaggattcttgactagtcgtgcacatcagaactgccaggtccccagtggttctgaagcagtaagctttgggtgggctctggcatcagcactttcactaagcttcacagataattctgatgcatactccaggcctgaaccactgatcaatttgaaacatgcataacaaagcaaaaaaagttttgtttcaccttttgaaatacagttaactcttttaccatgccagagatcattcagagagacaggtcgttgctccggagtgatacagatctggcagtacccagcccttgtgtgtgtgcgttagctcagcacctgcccacactgcgagcccccgtaggatgtgccttgtccttccctgtttcagcacttaacacactacctggtacagagtatgtagtgggcatctgttgaatgaatgcttttcccagtagcagtgtattcatacaatattaatataattgtcccctggcttacagataaaaatgaaagcatcaagtgcccagtgagtgagacccaggtgttcttcctccacccctagtggtcccctgggcaggtctttttttttttgtaacactcaccagtctgttctgtagtcaatcattgattgacttgtctgtgaacttgcaggaactgtttcatagtttcattagcacagagtaaacatgtttgccatgcaaggttattttgcatctgcatttaagtgataatgttgaatcaatgaaaagtgttgattaagcagtagttgtagatatgctaagtttttcaaattactaatatcaagtggagattgtttttacttttaagggtattgcttttgtgatagcataaataatggttttccttttttgtaatgtaaattaattgctggcaacttttgtattcccatagactggggaagcttaattgcctttacaagtacttatgtacaactttgtatcaaattttctgtaatagtttatgctttagtactatatatgtactaataattttatctgacttctgtttatatcatttgtacaattacatggttgtaaaataaacttttaaacctca

SEQ ID NO: 380582 - DNA, 3743 bp, Homo sapiens
accggaacgccgcagccggcgctcggtccatccggcccgtgggctgtggggccccgggcggcggatatgtggcttaaatggcgcaggcgtcggggcctagaggctgaagggctggtcgtcctaaaaactcgtggacgtcgcgcacggttacccggacgcaggcccgcccctctggggaaccgcgagctcctcgcagctgggtggggaccgtcctcgcagtggcggcctccaccctgccttctcgcttagccaaggcttctggaaggctcgcaaagtgtctgttgttggaagaagccgggccctgactggcgcgacggattctcccagccgctcagcagagcgtctgtaggtcggaagtgggggttgtattggaatatgctttttgtctaatgatgttagataaaaagcaaatttggagcagttttcttattcgagttcaaaatggttcataaagcagcgaagacaactcaaaacatcagtaacacatttggcccaggaactgctaacaaacatacagtgcagtggtggcttaagaagttttgcaaggaagagagccttgaagatgaggaacgtgatatgggccatgggaagttgacaacgaccaattgagagcaatcattgaactacatgaaaaattacagaagaactcagcgttgactattctacggtcattagggtcgttcagcattcgaagcaaattggaaaggtgaaaaagcttgataagtgggtgcctcatgagctgagcggaaatcaaaactatcgttttgaagtgtagtcttcttttatgctacgcaacaacaaaccatttctcaatcggattgtgacatgtaatgaaaagtgaattttatacaacaaccagctcagtggttggaccaagaggcagctccaaagcagttcccaaagccaaacttgcaccaaaaaaaaggtcatggtcactgttcggtggtctgctgcccatctgatccactacagttttctgaatcctggtgaaaccattacatctgagaagtatgctcagcaaattggtaagatgcaccgaaaactgcaatacctgctgcctgcattggtcaacagaaagggcccaattcttctccacgacaacacctgactgcgtgtcgcacaaccagtgcttcaaaagttgaaggaattgggctacaaagttttgcctcatccaccatattcacctgacctttcgccaactgactaccacttctgctagcatcttgacaactttttgcagggaaaacacttcagcatggtgcagaaaatgctttccaagagttcgtcaaatcctgaagcacggatttttatgctacaggaataaacaaacatttctcattggcaaaaatgtgttgattgtaatggttcctgttttgattaatagaatatgttttagcgtagttacaatgatttaaaattcgcagtctggaaatttaatttttgcatcaacctaatatttctatggtaaatccttgcaaacatggaaacaatgcatttggcccagtgctttgtggttgtgtactctttttctttgtttttttaatagatggcattggccgggcatggtggctcatgcctgtaatcccagcattttgggagggtgaggtgggtggatcacctgaggtcaggagttcaagaccagcctgactaacatggtaaaaccccatctctactaaaaatacaaaaaaattagctaggcggggtggcgggcatctaattccagctacttcatgaggctgcgacaggagaatcatttgaactcgggaggcagaggttgcagtgagccgagatcacaccattgcactccagcctgggcgatgagcgaaactgtctcaaaaaaaaaaaaagttggggtctcgctgtgttgaccaggctggtctcgaactcctggcctcaagtgatcctcccatcttggcctcccaaagtgttgggattacaggcgtgagccaccacaccctgcctggttgtgtactcttttaaatactaagtttttaatgttaaatgctgcttttagatacactgtaaaaatacacctatcaatgagtttttttattaaaaacattgcaattgtactagactttaaatactaagcaataattcaggcttcaatgttggtttatagttttctcatttctttcatttaatacctctgtaaaatgaagcagttacttccattttcctgaggtgagataagtgccctgcacaatgttataggcccagtaagtgagactggagctctgatctaatccctttgacattaaagtttgtgcagtaaaccagctatgtcagtttgccacatttgtaatagtgttcaataaattttcacttaaaggtttaatattaaagtagtagcaagaattcataaccttaattggctttaacagcttttctttccctgaaaacagatgcatatgtacacatgcacacagattgcttacaatatcagcacgtaaaaggcctttgcacattgaagtcggcactgctttggtgccttttttgttttttggctcggtgttttgactgcaagtctttttggatagaattttatagttagaaagtagctaacacttgggttttataggcacaaaaaacaagtcttatactagctgtactttattttttgagttcttattaatgaggaacatccacttttgcattgacagtgatttcaagattgctttatcagcctttaaaggattcttgactagtcgtgcacatcagaactgccaggtccccagtggttctgaagcagtaagctttgggtgggctctggcatcagcactttcactaagcttcacagataattctgatgcatactccaggcctgaaccactgatcaatttgaaacatgcataacaaagcaaaaaaagttttgtttcaccttttgaaatacagttaactcttttaccatgccagagatcattcagagagacaggtcgttgctccggagtgatacagatctggcagtacccagcccttgtgtgtgtgcgttagctcagcacctgcccacactgcgagcccccgtaggatgtgccttgtccttccctgtttcagcacttaacacactacctggtacagagtatgtagtgggcatctgttgaatgaatgcttttcccagtagcagtgtattcatacaatattaatataattgtcccctggcttacagataaaaatgaaagcatcaagtgcccagtgagtgagacccaggtgttcttcctccacccctagtggtcccctgggcaggtctttttttttttgtaacactcaccagtctgttctgtagtcaatcattgattgacttgtctgtgaacttgcaggaactgtttcatagtttcattagcacagagtaaacatgtttgccatgcaaggttattttgcatctgcatttaagtgataatgttgaatcaatgaaaagtgttgattaagcagtagttgtagatatgctaagtttttcaaattactaatatcaagtggagattgtttttacttttaagggtattgcttttgtgatagcataaataatggttttccttttttgtaatgtaaattaattgctggcaacttttgtattcccatagactggggaagcttaattgcctttacaagtacttatgtacaactttgtatcaaattttctgtaatagtttatgctttagtactatatatgtactaataattttatctgacttctgtttatatcatttgtacaattacatggttgtaaaataaacttttaaacctca

SEQ ID NO: 380583 - DNA, 3735 bp, Homo sapiens
accggaacgccgcagccggcgctcggtccatccggcccgtgggctgtggggccccgggcggcggcggctacgtagctgccgccggccttggccgcggccgggcgggcggatatgtggcttaaatggcgcaggcgtcggggcctagaggctgaagggctggtcgtcctaaaaactcgtggacgtcgcgcacggttacccggacgcaggcccgcccctctggggaaccgcgagctcctcgcagctgggtggggaccgtcctcgcagtggcggcctccaccctgccttctcgcttagccaaggcttctggaaggctcgcaaagtgtctgttgttggaagaagccgggccctgactggcgcgacggattctcccagccgctcagcagagcgtctgtaggtcggaagtgggggttgtattggaatatgctttttgtctaatgatgttagataaaaagcaaatttggagcagttttcttattcgagttcaaaatggttcataaagcagcgaagacaactcaaaacatcagtaacacatttggcccaggaactgctaacaaacatacagtgcagtggtggcttaagaagttttgcaaggaagagagccttgaagatgaggaacgtgatatgggccatgggaagttgacaacgaccaattgagagcaatcattgaactacatgaaaaattacagaagaactcagcgttgactattctacggtcattagggtcgttcagcattcgaagcaaattggaaaggtgaaaaagcttgataagtgggtgcctcatgagctgagcggaaatcaaaactatcgttttgaagtgtagtcttcttttatgctacgcaacaacaaaccatttctcaatcggattgtgacatgtaatgaaaagtgaattttatacaacaaccagctcagtggttggaccaagaggcagctccaaagcagttcccaaagccaaacttgcaccaaaaaaaaggtcatggtcactgttcggtggtctgctgcccatctgatccactacagttttctgaatcctggtgaaaccattacatctgagaagtatgctcagcaaattggtaagatgcaccgaaaactgcaatacctgctgcctgcattggtcaacagaaagggcccaattcttctccacgacaacacctgactgcgtgtcgcacaaccagtgcttcaaaagttgaaggaattgggctacaaagttttgcctcatccaccatattcacctgacctttcgccaactgactaccacttctgctagcatcttgacaactttttgcagggaaaacacttcagcatggtgcagaaaatgctttccaagagttcgtcaaatcctgaagcacggatttttatgctacaggaataaacaaacatttctcattggcaaaaatgtgttgattgtaatggttcctgttttgattaatagaatatgttttagcgtagttacaatgatttaaaattcgcagtctggaaatttaatttttgcatcaacctaatatttctatggtaaatccttgcaaacatggaaacaatgcatttggcccagtgctttgtggttgtgtactctttttctttgtttttttaatagatggcattggccgggcatggtggctcatgcctgtaatcccagcattttgggagggtgaggtgggtggatcacctgaggtcaggagttcaagaccagcctgactaacatggtaaaaccccatctctactaaaaatacaaaaaaattagctaggcggggtggcgggcatctaattccagctacttcatgaggctgcgacaggagaatcatttgaactcgggaggcagaggttgcagtgagccgagatcacaccattgcactccagcctgggcgatgagcgaaactgtctcaaaaaaaaaaaaagttggggtctcgctgtgttgaccaggctggtctcgaactcctggcctcaagtgatcctcccatcttggcctcccaaagtgttgggattacaggcgtgagccaccacaccctgcctggttgtgtactcttttaaatactaagtttttaatgttaaatgctgcttttagatacactgtaaaaatacacctatcaatgagtttttttattaaaaacattgcaattgtactagactttaaatactaagcaataattcaggcttcaatgttggtttatagttttctcatttctttcatttaatacctctgtaaaatgaagcagttacttccattttcctgaggtgagataagtgccctgcacaatgttataggcccagtaagtgagactggagctctgatctaatccctttgacattaaagtttgtgcagtaaaccagctatgtcagtttgccacatttgtaatagtgttcaataaattttcacttaaaggtttaatattaaagtagtagcaagaattcataaccttaattggctttaacagcttttctttccctgaaaacagatgcatatgtacacatgcacacagattgcttacaatatcagcacgtaaaaggcctttgcacattgaagtcggcactgctttggtgccttttttgttttttggctcggtgttttgactgcaagtctttttggatagaattttatagttagaaagtagctaacacttgggttttataggcacagaacatccacttttgcattgacagtgatttcaagattgctttatcagcctttaaaggattcttgactagtcgtgcacatcagaactgccaggtccccagtggttctgaagcagtaagctttgggtgggctctggcatcagcactttcactaagcttcacagataattctgatgcatactccaggcctgaaccactgatcaatttgaaacatgcataacaaagcaaaaaaagttttgtttcaccttttgaaatacagttaactcttttaccatgccagagatcattcagagagacaggtcgttgctccggagtgatacagatctggcagtacccagcccttgtgtgtgtgcgttagctcagcacctgcccacactgcgagcccccgtaggatgtgccttgtccttccctgtttcagcacttaacacactacctggtacagagtatgtagtgggcatctgttgaatgaatgcttttcccagtagcagtgtattcatacaatattaatataattgtcccctggcttacagataaaaatgaaagcatcaagtgcccagtgagtgagacccaggtgttcttcctccacccctagtggtcccctgggcaggtctttttttttttgtaacactcaccagtctgttctgtagtcaatcattgattgacttgtctgtgaacttgcaggaactgtttcatagtttcattagcacagagtaaacatgtttgccatgcaaggttattttgcatctgcatttaagtgataatgttgaatcaatgaaaagtgttgattaagcagtagttgtagatatgctaagtttttcaaattactaatatcaagtggagattgtttttacttttaagggtattgcttttgtgatagcataaataatggttttccttttttgtaatgtaaattaattgctggcaacttttgtattcccatagactggggaagcttaattgcctttacaagtacttatgtacaactttgtatcaaattttctgtaatagtttatgctttagtactatatatgtactaataattttatctgacttctgtttatatcatttgtacaattacatggttgtaaaataaacttttaaacctca

SEQ ID NO: 380584 - DNA, 3734 bp, Homo sapiens
accggaacgccgcagccggcgctcggtccatccggcccgtgggctgtggggccccgggcggcggcggctacgtagctgccgccggccttggccgcggccgggcgggcggatatgtggcttaaatggcgcaggcgtcggggcctagaggctgaagggctggtcgtcctaaaaactcgtggacgtcgcgcacggttacccggacgcaggcccgcccctctggggaaccgcgagctcctcgcagctgggtggggaccgtcctcgcagtggcggcctccaccctgccttctcgcttagccaaggcttctggaaggctcgcaaagtgtctgttgttggaagaagccgggccctgactggcgcgacggattctcccagccgctcagcagagcgtctgtaggtcggaagtgggggttgtattggaatatgctttttgtctaatgatgttagataaaaagcaaatttggagcagttttcttattcgagttcaaaatggttcataaagcagcgaagacaactcaaaacatcagtaacacatttggcccaggaactgctaacaaacatacagtgcagtggtggcttaagaagttttgcaaggaagagagccttgaagatgaggaacgtgatatgggccatgggaagttgacaacgaccaattgagagcaatcattgaactacatgaaaaattacagaagaactcagcgttgactattctacggtcattagggtcgttcagcattcgaagcaaattggaaaggtgaaaaagcttgataagtgggtgcctcatgagctgagcggaaatcaaaactatcgttttgaagtgtagtcttcttttatgctacgcaacaacaaaccatttctcaatcggattgtgacatgtaatgaaaagtgaattttatacaacaaccagctcagtggttggaccaagaggcagctccaaagcagttcccaaagccaaacttgcaccaaaaaaaaggtcatggtcactgttcggtggtctgctgcccatctgatccactacagttttctgaatcctggtgaaaccattacatctgagaagtatgctcagcaaattggtaagatgcaccgaaaactgcaatacctgctgcctgcattggtcaacagaaagggcccaattcttctccacgacaacacctgactgcgtgtcgcacaaccagtgcttcaaaagttgaaggaattgggctacaaagttttgcctcatccaccatattcacctgacctttcgccaactgactaccacttctgctagcatcttgacaactttttgcagggaaaacacttcagcatggtgcagaaaatgctttccaagagttcgtcaaatcctgaagcacggatttttatgctacaggaataaacaaacatttctcattggcaaaaatgtgttgattgtaatggttcctgttttgattaatagaatatgttttagcgtagttacaatgatttaaaattcgcagtctggaaatttaatttttgcatcaacctaatatttctatggtaaatccttgcaaacatggaaacaatgcatttggcccagtgctttgtggttgtgtactctttttctttgtttttttaatagatggcattggccgggcatggtggctcatgcctgtaatcccagcattttgggagggtgaggtgggtggatcacctgaggtcaggagttcaagaccagcctgactaacatggtaaaaccccatctctactaaaaatacaaaaaaattagctaggcggggtggcgggcatctaattccagctacttcatgaggctgcgacaggagaatcatttgaactcgggaggcagaggttgcagtgagccgagatcacaccattgcactccagcctgggcgatgagcgaaactgtctcaaaaaaaaaaaaagttggggtctcgctgtgttgaccaggctggtctcgaactcctggcctcaagtgatcctcccatcttggcctcccaaagtgttgggattacaggcgtgagccaccacaccctgcctggttgtgtactcttttaaatactaagtttttaatgttaaatgctgcttttagatacactgtaaaaatacacctatcaatgagtttttttattaaaaacattgcaattgtactagactttaaatactaagcaataattcaggcttcaatgttggtttatagttttctcatttctttcatttaatacctctgtaaaatgaagcagttacttccattttcctgaggtgagataagtgccctgcacaatgttataggcccagtaagtgagactggagctctgatctaatccctttgacattaaagtttgtgcagtaaaccagctatgtcagtttgccacatttgtaatagtgttcaataaattttcacttaaaggtttaatattaaagtagtagcaagaattcataaccttaattggctttaacagcttttctttccctgaaaacagatgcatatgtacacatgcacacagattgcttacaatatcagcacgtaaaaggcctttgcacattgaagtcggcactgctttggtgccttttttgttttttggctcggtgttttgactgcaagtctttttggatagaattttatagttagaaagtagctaacacttgggttttataggcacaaaaaacaagtcttatactagctgtactttattttttgagttcttattaatgaggaacatccacttttgcattgacagtgatttcaagattgctttatcagcctttaaaggattcttgactagtcgtgcacatcagaactgccaggtccccagtggttctgaagcagtaagctttgggtgggctctggcatcagcactttcactaagcttcacagataattctgatgcatactccaggcctgaaccactgatcaatttgaaacatgcataacaaagcaaatcattcagagagacaggtcgttgctccggagtgatacagatctggcagtacccagcccttgtgtgtgtgcgttagctcagcacctgcccacactgcgagcccccgtaggatgtgccttgtccttccctgtttcagcacttaacacactacctggtacagagtatgtagtgggcatctgttgaatgaatgcttttcccagtagcagtgtattcatacaatattaatataattgtcccctggcttacagataaaaatgaaagcatcaagtgcccagtgagtgagacccaggtgttcttcctccacccctagtggtcccctgggcaggtctttttttttttgtaacactcaccagtctgttctgtagtcaatcattgattgacttgtctgtgaacttgcaggaactgtttcatagtttcattagcacagagtaaacatgtttgccatgcaaggttattttgcatctgcatttaagtgataatgttgaatcaatgaaaagtgttgattaagcagtagttgtagatatgctaagtttttcaaattactaatatcaagtggagattgtttttacttttaagggtattgcttttgtgatagcataaataatggttttccttttttgtaatgtaaattaattgctggcaacttttgtattcccatagactggggaagcttaattgcctttacaagtacttatgtacaactttgtatcaaattttctgtaatagtttatgctttagtactatatatgtactaataattttatctgacttctgtttatatcatttgtacaattacatggttgtaaaataaacttttaaacctca

SEQ ID NO: 380585 - DNA, 3325 bp, Homo sapiens
accggaacgccgcagccggcgctcggtccatccggcccgtgggctgtggggccccgggcggcggcggctacgtagctgccgccggccttggccgcggccgggcgggcggatatgtggcttaaatggcgcaggcgtcggggcctagaggctgaagggctggtcgtcctaaaaactcgtggacgtcgcgcacggttacccggacgcaggcccgcccctctggggaaccgcgagctcctcgcagctgggtggggaccgtcctcgcagtggcggcctccaccctgccttctcgcttagccaaggcttctggaaggctcgcaaagtgtctgttgttggaagaagccgggccctgactggcgcgacggattctcccagccgctcagcagagcgtctgtaggtcggaagtgggggttgtattggaatatgctttttgtctaatgatgttagataaaaagcaaatttggagcagttttcttattcgagttcaaaatggttcataaagcagcgaagacaactcaaaacatcagtaacacatttggcccaggaactgctaacaaacatacagtgcagtggtggcttaagaagttttgcaaggaagagagccttgaagatgaggaacgtgatatgggccatgggaagttgacaacgaccaattgagagcaatcattgaactacatgaaaaattacagaagaactcagcgttgactattctacggtcattagggtcgttcagcattcgaagcaaattggaaaggtgaaaaagcttgataagtgggtgcctcatgagctgagcggaaatcaaaactatcgttttgaagtgtagtcttcttttatgctacgcaacaacaaaccatttctcaatcggattgtgacatgtaatgaaaagtgaattttatacaacaaccagctcagtggttggaccaagaggcagctccaaagcagttcccaaagccaaacttgcaccaaaaaaaaggtcatggtcactgttcggtggtctgctgcccatctgatccactacagttttctgaatcctggtgaaaccattacatctgagaagtatgctcagcaaattggtaagatgcaccgaaaactgcaatacctgctgcctgcattggtcaacagaaagggcccaattcttctccacgacaacacctgactgcgtgtcgcacaaccagtgcttcaaaagttgaaggaattgggctacaaagttttgcctcatccaccatattcacctgacctttcgccaactgactaccacttctgctagcatcttgacaactttttgcagggaaaacacttcagcatggtgcagaaaatgctttccaagagttcgtcaaatcctgaagcacggatttttatgctacaggaataaacaaacatttctcattggcaaaaatgtgttgattgtaatggttcctgttttgattaatagaatatgttttagcgtagttacaatgatttaaaattcgcagtctggaaatttaatttttgcatcaacctaatatttctatggtaaatccttgcaaacatggaaacaatgcatttggcccagtgctttgtggttgtgtactctttttctttgtttttttaatagatggcattggccgggcatggtggctcatgcctgtaatcccagcattttgggagggtgaggtgggtggatcacctgaggtcaggagttcaagaccagcctgactaacatggtaaaaccccatctctactaaaaatacaaaaaaattagctaggcggggtggcgggcatctaattccagctacttcatgaggctgcgacaggagaatcatttgaactcgggaggcagaggttgcagtgagccgagatcacaccattgcactccagcctgggcgatgagcgaaactgtctcaaaaaaaaaaaaagttggggtctcgctgtgttgaccaggctggtctcgaactcctggcctcaagtgatcctcccatcttggcctcccaaagtgttgggattacaggcgtgagccaccacaccctgcctggttgtgtactcttttaaatactaagtttttaatgttaaatgctgcttttagatacactgtaaaaatacacctatcaatgagtttttttattaaaaacattgcaattgtactagactttaaatactaagcaataattcaggcttcaatgttggtttatagttttctcatttctttcatttaatacctctgtaaaatgaagcagttacttccattttcctgaggtgagataagtgccctgcacaatgttataggcccagtaagtgagactggagctctgatctaatccctttgacattaaagtttgtgcagtaaaccagctatgtcagtttgccacatttgtaatagtgttcaataaattttcataagcttcacagataattctgatgcatactccaggcctgaaccactgatcaatttgaaacatgcataacaaagcaaaaaaagttttgtttcaccttttgaaatacagttaactcttttaccatgccagagatcattcagagagacaggtcgttgctccggagtgatacagatctggcagtacccagcccttgtgtgtgtgcgttagctcagcacctgcccacactgcgagcccccgtaggatgtgccttgtccttccctgtttcagcacttaacacactacctggtacagagtatgtagtgggcatctgttgaatgaatgcttttcccagtagcagtgtattcatacaatattaatataattgtcccctggcttacagataaaaatgaaagcatcaagtgcccagtgagtgagacccaggtgttcttcctccacccctagtggtcccctgggcaggtctttttttttttgtaacactcaccagtctgttctgtagtcaatcattgattgacttgtctgtgaacttgcaggaactgtttcatagtttcattagcacagagtaaacatgtttgccatgcaaggttattttgcatctgcatttaagtgataatgttgaatcaatgaaaagtgttgattaagcagtagttgtagatatgctaagtttttcaaattactaatatcaagtggagattgtttttacttttaagggtattgcttttgtgatagcataaataatggttttccttttttgtaatgtaaattaattgctggcaacttttgtattcccatagactggggaagcttaattgcctttacaagtacttatgtacaactttgtatcaaattttctgtaatagtttatgctttagtactatatatgtactaataattttatctgacttctgtttatatcatttgtacaattacatggttgtaaaataaacttttaaacctca

SEQ ID NO: 380586 - DNA, 3955 bp, Homo sapiens
  misc_feature (3794)..(3794): n is a, c, g, or t
  misc_feature (3797)..(3797): n is a, c, g, or t
  misc_feature (3799)..(3799): n is a, c, g, or t
accggaacgccgcagccggcgctcggtccatccggcccgtgggctgtggggccccgggcggcggcggctacgtagctgccgccggccttggccgcggccgggcgggcggatatgtggcttaaatggcgcaggcgtcggggcctagaggctgaagggctggtcgtcctaaaaactcgtggacgtcgcgcacggttacccggacgcaggcccgcccctctggggaaccgcgagctcctcgcagctgggtggggaccgtcctcgcagtggcggcctccaccctgccttctcgcttagccaaggcttctggaaggctcgcaaagtgtctgttgttggaagaagccgggccctgactggcgcgacggattctcccagccgctcagcagagcgtctgtaggtcggaagtgggggttgtattggaatatgctttttgtctaatgatgttagataaaaagcaaatttggagcagttttcttattcgagttcaaaatggttcataaagcagcgaagacaactcaaaacatcagtaacacatttggcccaggaactgctaacaaacatacagtgcagtggtggcttaagaagttttgcaaggaagagagccttgaagatgaggaacgtgatatgggccatgggaagttgacaacgaccaattgagagcaatcattgaactacatgaaaaattacagaagaactcagcgttgactattctacggtcattagggtcgttcagcattcgaagcaaattggaaaggtgaaaaagcttgataagtgggtgcctcatgagctgagcggaaatcaaaactatcgttttgaagtgtagtcttcttttatgctacgcaacaacaaaccatttctcaatcggattgtgacatgtaatgaaaagtgaattttatacaacaaccagctcagtggttggaccaagaggcagctccaaagcagttcccaaagccaaacttgcaccaaaaaaaaggtcatggtcactgttcggtggtctgctgcccatctgatccactacagttttctgaatcctggtgaaaccattacatctgagaagtatgctcagcaaattggtaagatgcaccgaaaactgcaatacctgctgcctgcattggtcaacagaaagggcccaattcttctccacgacaacacctgactgcgtgtcgcacaaccagtgcttcaaaagttgaaggaattgggctacaaagttttgcctcatccaccatattcacctgacctttcgccaactgactaccacttctgctagcatcttgacaactttttgcagggaaaacacttcagcatggtgcagaaaatgctttccaagagttcgtcaaatcctgaagcacggatttttatgctacaggaataaacaaacatttctcattggcaaaaatgtgttgattgtaatggttcctgttttgattaatagaatatgttttagcgtagttacaatgatttaaaattcgcagtctggaaatttaatttttgcatcaacctaatatttctatggtaaatccttgcaaacatggaaacaatgcatttggcccagtgctttgtggttgtgtactctttttctttgtttttttaatagatggcattggccgggcatggtggctcatgcctgtaatcccagcattttgggagggtgaggtgggtggatcacctgaggtcaggagttcaagaccagcctgactaacatggtaaaaccccatctctactaaaaatacaaaaaaattagctaggcggggtggcgggcatctaattccagctacttcatgaggctgcgacaggagaatcatttgaactcgggaggcagaggttgcagtgagccgagatcacaccattgcactccagcctgggcgatgagcgaaactgtctcaaaaaaaaaaaaagttggggtctcgctgtgttgaccaggctggtctcgaactcctggcctcaagtgatcctcccatcttggcctcccaaagtgttgggattacaggcgtgagccaccacaccctgcctggttgtgtactcttttaaatactaagtttttaatgttaaatgctgcttttagatacactgtaaaaatacacctatcaatgagtttttttattaaaaacattgcaattgtactagactttaaatactaagcaataattcaggcttcaatgttggtttatagttttctcatttctttcatttaatacctctgtaaaatgaagcagttacttccattttcctgaggtgagataagtgccctgcacaatgttataggcccagtaagtgagactggagctctgatctaatccctttgacattaaagtttgtgcagtaaaccagctatgtcagtttgccacatttgtaatagtgttcaataaattttcacttaaaggtttaatattaaagtagtagcaagaattcataaccttaattggctttaacagcttttctttccctgaaaacagatgcatatgtacacatgcacacagattgcttacaatatcagcacgtaaaaggcctttgcacattgaagtcggcactgctttggtgccttttttgttttttggctcggtgttttgactgcaagtctttttggatagaattttatagttagaaagtagctaacacttgggttttataggcacaaaaaacaagtcttatactagctgtactttattttttgagttcttattaatgaggaacatccacttttgcattgacagtgatttcaagattgctttatcagcctttaaaggattcttgactagtcgtgcacatcagaactgccaggtccccagtggttctgaagcagtaagctttgggtgggctctggcatcagcactttcactaagcttcacagataattctgatgcatactccaggcctgaaccactgatcaatttgaaacatgcataacaaagcaaaaaaagttttgtttcaccttttgaaatacagttaactcttttaccatgccagagatcattcagagagacaggtcgttgctccggagtgatacagatctggcagtacccagcccttgtgtgtgtgcgttagctcagcacctgcccacactgcgagcccccgtaggatgtgccttgtccttccctgtttcagcacttaacacactacctggtacagagtatgtagtgggcatctgttgaatgaatgcttttcccagtagcagtgtattcatacaatattaatataattgtcccctggcttacagataaaaatgaaagcatcaagtgcccagtgagtgagacccaggtgttcttcctccacccctagtggtcccctgggcaggtctttttttttttgtaacactcaccagtctgttctgtagtcaatcattgattgacttgtctgtgaacttgcaggaactgtttcatagtttcattagcacagagtaaacatgtttgccatgcaaggttattttgcatctgcatttaagtgataatgttgaatcaatgaaaagtgttgattaagcagtagttgtagatatgctaagtttttcaaattactaatatcaagtggagattgtttttacttttaagggtattgcttttgtgatagcataaataatggttttccttttttgtaatgtaaattaattgctggcaacttttgtattcccatagactggggaagcttaattgcctttacaagtacttatgtacaactttgtatcaaattttctgtaatagtttatgctttagtactatatatgtactaataattttatctgacttctgtttatatcatttgtacaattacatggttgtaaaataaacttttaaacctcaaaaaanaananaacagcaacaaaacaacgttgtgtgggggggccgggccccgggaaaaagttttttgcagacccactggtgggggggcggggccccagtggttagcgcaccggggccaaggtgtcccgggggaaatcgggccaaacaggggtgggtttccccataaa

SEQ ID NO: 380587 - DNA, 1684 bp, Homo sapiens
gcctactactactaaattcgcggccgcgtcgacaataattcaggcttcaatgttggtttatagttttctcatttctttcatttaatacctctgtaaaatgaagcagttacttccattttcctgaggtgagataagtgccctgcacaatgttataggcccagtaagtgagactggagctctgatctaatccctttgacattaaagtttgtgcagtaaaccagctatgtcagtttgccacatttgtaatagtgttcaataaattttcacttaaaggtttaatattaaagtagtagcaagaattcataaccttaattggctttaacagcttttctttccctgaaaacagatgcatatgtacacatgcacacagattgcttacaatatcagcacgtaaaaggcctttgcacattgaagtcggcactgctttggtgccttttttgttttttggctcggtgttttgactgcaagtctttttggatagaattttatagttagaaagtagctaacacttgggttttataggcacaaaaaacaagtcttatactagctgtactttattttttgagttcttattaatgaggaacatccacttttgcattgacagtgatttcaagattgctttatcagcctttaaaggattcttgactagtcgtgcacatcagaactgccaggtccccagtggttctgaagcagtaagctttgggtgggctctggcatcagcactttcactaagcttcacagataattctgatgcatactccaggcctgaaccactgatcaatttgaaacatgcataacaaagcaaaaaaagttttgtttcaccttttgaaatacagttaactcttttaccatgccagagatcattcagagagacaggtcgttgctccggagtgatacagatctggcagtacccagcccttgtgtgtgtgcgttagctcagcacctgcccacactgcgagcccccgtaggatgtgccttgtccttccctgtttcagcacttaacacactacctggtacagagtatgtagtgggcatctgttgaatgaatgcttttcccagtagcagtgtattcatacaatattaatataattgtcccctggcttacagataaaaatgaaagcatcaagtgcccagtgagtgagacccaggtgttcttcctccacccctagtggtcccctgggcaggtctttttttttttgtaacactcaccagtctgttctgtagtcaatcattgattgacttgtctgtgaacttgcaggaactgtttcatagtttcattagcacagagtaaacatgtttgccatgcaaggttattttgcatctgcatttaagtgataatgttgaatcaatgaaaagtgttgattaagcagtagttgtagatatgctaagtttttcaaattactaatatcaagtggagattgtttttacttttaagggtattgcttttgtgatagcataaataatggttttccttttttgtaatgtaaattaattgctggcaacttttgtattcccatagactggggaagcttaattgcctttacaagtacttatgtacaactttgtatcaaattttctgtaatagtttatgctttagtactatatatgtactaataattttatctgacttctgtttatatcatttgtacaattacatggttgtaaaataaacttttaaacctca

SEQ ID NO: 380588 - DNA, 4214 bp, Homo sapiens
accggaacgccgcagccggcgctcggtccatccggcccgtgggctgtggggccccgggcggcggcggctacgtagctgccgccggccttggccgcggccgggcgggcggatatgtggcttaaatggcgcaggcgtcggggcctagaggctgaagggctggtcgtcctaaaaactcgtggacgtcgcgcacggttacccggacgcaggcccgcccctctggggaaccgcgagctcctcgcagctgggtggggaccgtcctcgcagtggcggcctccaccctgccttctcgcttagccaaggcttctggaaggctcgcaaagtgtctgttgttggaagaagccgggccctgactggcgcgacggattctcccagccgctcagcagagcgtctgtaggtcggaagtgggggttgtattggaatatgctttttgtctaatgatgttagataaaaagcaaatttggagcagttttcttattcgagttcaaaatggttcataaagcagcgaagacaactcaaaacatcagtaacacatttggcccaggaactgctaacaaacatacagtgcagtggtggcttaagaagttttgcaaggaagagagccttgaagatgaggaacgtgatatgggccatgggaagttgacaacgaccaattgagagcaatcattgaactacatgaaaaattacagaagaactcagcgttgactattctacggtcattagggtcgttcagcattcgaagcaaattggaaaggtgaaaaagcttgataagtgggtgcctcatgagctgagcggaaatcaaaactatcgttttgaagtgtagtcttcttttatgctacgcaacaacaaaccatttctcaatcggattgtgacatgtaatgaaaagtgaattttatacaacaaccagctcagtggttggaccaagaggcagctccaaagcagttcccaaagccaaacttgcaccaaaaaaaaggtcatggtcactgttcggtggtctgctgcccatctgatccactacagttttctgaatcctggtgaaaccattacatctgagaagtatgctcagcaaattggtaagatgcaccgaaaactgcaatacctgctgcctgcattggtcaacagaaagggcccaattcttctccacgacaacacctgactgcgtgtcgcacaaccagtgcttcaaaagttgaaggaattgggctacaaagttttgcctcatccaccatattcacctgacctttcgccaactgactaccacttctgctagcatcttgacaactttttgcagggaaaacacttcagcatggtgcagaaaatgctttccaagagttcgtcaaatcctgaagcacggatttttatgctacaggaataaacaaacatttctcattggcaaaaatgtgttgattgtaatggttcctgttttgattaatagaatatgttttagcgtagttacaatgatttaaaattcgcagtctggaaatttaatttttgcatcaacctaatatttctatggtaaatccttgcaaacatggaaacaatgcatttggcccagtgctttgtggttgtgtactctttttctttgtttttttaatagatggcattggccgggcatggtggctcatgcctgtaatcccagcattttgggagggtgaggtgggtggatcacctgaggtcaggagttcaagaccagcctgactaacatggtaaaaccccatctctactaaaaatacaaaaaaattagctaggcggggtggcgggcatctaattccagctacttcatgaggctgcgacaggagaatcatttgaactcgggaggcagaggttgcagtgagccgagatcacaccattgcactccagcctgggcgatgagcgaaactgtctcaaaaaaaaaaaaagttggggtctcgctgtgttgaccaggctggtctcgaactcctggcctcaagtgatcctcccatcttggcctcccaaagtgttgggattacaggcgtgagccaccacaccctgcctggttgtgtactcttttaaatactaagtttttaatgttaaatgctgcttttagatacactgtaaaaatacacctatcaatgagtttttttattaaaaacattgcaattgtactagactttaaatactaagcaataattcaggcttcaatgttggtttatagttttctcatttctttcatttaatacctctgtaaaatgaagcagttacttccattttcctgaggtgagataagtgccctgcacaatgttataggcccagtaagtgagactggagctctgatctaatccctttgacattaaagtttgtgcagtaaaccagctatgtcagtttgccacatttgtaatagtgttcaataaattttcacttaaaggtttaatattaaagtagtagcaagaattcataaccttaattggctttaacagcttttctttccctgaaaacagatgcatatgtacacatgcacacagattgcttacaatatcagcacgtaaaaggcctttgcacattgaagtcggcactgctttggtgccttttttgttttttggctcggtgttttgactgcaagtctttttggatagaattttatagttagaaagtagctaacacttgggttttataggcacaaaaaacaagtcttatactagctgtactttattttttgagttcttattaatgaggaacatccacttttgcattgacagtgatttcaagattgctttatcagcctttaaaggattcttgactagtcgtgcacatcagaactgccaggtccccagtggttctgaagcagtaagctttgggtgggctctggcatcagcactttcactaagcttcacagataattctgatgcatactccaggcctgaaccactgatcaatttgaaacatgcataacaaagcaaaaaaagttttgtttcaccttttgaaatacagttaactcttttaccatgccagagatcattcagagagacaggtcgttgctccggagtgatacagatctggcagtacccagcccttgtgtgtgtgcgttagctcagcacctgcccacactgcgagcccccgtaggatgtgccttgtccttccctgtttcagcacttaacacactacctggtacagagtatgtagtgggcatctgttgaatgaatgcttttcccagtagcagtgtattcatacaatattaatataattgtcccctggcttacagataaaaatgaaagcatcaagtgcccagtgagtgagacccaggtgttcttcctccacccctagtggtcccctgggcaggtctttttttttttgtaacactcaccagtctgttctgtagtcaatcattgattgacttgtctgtgaacttgcaggaactgtttcatagtttcattagcacagagtaaacatgtttgccatgcaaggttattttgcatctgcatttaagtgataatgttgaatcaatgaaaagtgttgattaagcagtagttgtagatatgctaagtttttcaaattactaatatcaagtggagattgtttttacttttaagggtattgcttttgtgatagcataaataatggttttccttttttgtaatgtaaattaattgctggcaacttttgtattcccatagactggggaagcttaattgcctttacaagtacttatgtacaactttgtatcaaattttctgtaatagtttatgctttagtactatatatgtactaataattttatctgacttctgtttatatcatttgtacaattacatggttgtaaaataaacttttaaacctcacttttcctcaatatccttctatttttatatatctttctttctttctattcctttctaatctttattatattattttaatctctttcatttttttctactctcttctcttctatctttctaattcacgatttctactctattatattttttctattactccatatttatgtctattatcttattctaattatacttttttctcttttacttttcttattatctctccttctaactttatctctctttctttatttgatcttttcttttattttctatattattcttttttttttttactcttctcttttatttgtcttatttctctcaattattcatatttattctctctcttactttctacatattcttactcttattttttataccttcttcttatttaccttcctatcctttcttgtttctcct

SEQ ID NO: 380589 - DNA, 3730 bp, Homo sapiens
accggaacgccgcagccggcgctcggtccatccggcccgtgggctgtggggccccgggcggcggcggctacgtagctgccgccggccttggccgcggccgggcgggcggatatgtggcttaaatggcgcaggcgtcggggcctagaggctgaagggctggtcgtcctaaaaactcgtggacgtcgcgcacggttacccggacgcaggcccgcccctctggggaaccgcgagctcctcgcagctgggtggggaccgtcctcgcagtggcggcctccaccctgccttctcgcttagccaaggcttctggaaggctcgcaaagtgtctgttgttggaagaagccgggccctgactggcgcgacggattctcccagccgctcagcagagcgtctgtaggtcggaagtgggggttgtattggaatatgctttttgtctaatgatgttagataaaaagcaaatttggagcagttttcttattcgagttcaaaatggttcataaagcagcgaagacaactcaaaacatcagtaacacatttggcccaggaactgctaacaaacatacagtgcagtggtggcttaagaagttttgcaaggaagagagccttgaagatgaggaacgtgatatgggccatgggaagttgacaacgaccaattgagagcaatcattgaactacatgaaaaattacagaagaactcagcgttgactattctacggtcattagggtcgttcagcattcgaagcaaattggaaaggtgaaaaagcttgataagtgggtgcctcatgagctgagcggaaatcaaaactatcgttttgaagtgtagtcttcttttatgctacgcaacaacaaaccatttctcaatcggattgtgacatgtaatgaaaagtgaattttatacaacaaccagctcagtggttggaccaagaggcagctccaaagcagttcccaaagccaaacttgcaccaaaaaaaaggtcatggtcactgttcggtggtctgctgcccatctgatccactacagttttctgaatcctggtgaaaccattacatctgagaagtatgctcagcaaattggtaagatgcaccgaaaactgcaatacctgctgcctgcattggtcaacagaaagggcccaattcttctccacgacaacacctgactgcgtgtcgcacaaccagtgcttcaaaagttgaaggaattgggctacaaagttttgcctcatccaccatattcacctgacctttcgccaactgactaccacttctgctagcatcttgacaactttttgcagggaaaacacttcagcatggtgcagaaaatgctttccaagagttcgtcaaatcctgaagcacggatttttatgctacaggaataaacaaacatttctcattggcaaaaatgtgttgattgtaatggttcctgttttgattaatagaatatgttttagcgtagttacaatgatttaaaattcgcagtctggaaatttaatttttgcatcaacctaatatttctatggtaaatccttgcaaacatggaaacaatgcatttggcccagtgctttgtggttgtgtactctttttctttgtttttttaatagatggcattggccgggcatggtggctcatgcctgtaatcccagcattttgggagggtgaggtgggtggatcacctgaggtcaggagttcaagaccagcctgactaacatggtaaaaccccatctctactaaaaatacaaaaaaattagctaggcggggtggcgggcatctaattccagctacttcatgaggctgcgacaggagaatcatttgaactcgggaggcagaggttgcagtgagccgagatcacaccattgcactccagcctgggcgatgagcgaaactgtctcaaaaaaaaaaaaagttggggtctcgctgtgttgaccaggctggtctcgaactcctggcctcaagtgatcctcccatcttggcctcccaaagtgttgggattacaggcgtgagccaccacaccctgcctggttgtgtactcttttaaatactaagtttttaatgttaaatgctgcttttagatacactgtaaaaatacacctatcaatgagtttttttattaaaaacattgcaattgtactagactttaaatactaagcaataattcaggcttcaatgttggtttatagttttctcatttctttcatttaatacctctgtaaaatgaagcagttacttccattttcctgaggtgagataagtgccctgcacaatgttataggcccagtaagtgagactggagctctgatctaatccctttgacattaaagtttgtgcagtaaaccagctatgtcagtttgccacatttgtaatagtgttcaataaattttcacttaaaggtttaatattaaagtagtagcaagaattcataaccttaattggctttaacagcttttctttccctgaaaacagatgcatatgtacacatgcacacagattgcttacaatatcagcacgtaaaaggcctttgcacattgaagtcggcactgctttggtgccttttttgttttttggctcggtgttttgactgcaagtctttttggatagaattttatagttagaaagtagctaacacttgggttttataggcacaaaaaacaagtcttatactagctgtactttattttttgagttcttattaatgaggaacatccacttttgcattgacagtgatttcaagattgctttatcagcctttaaaggattcttgactagtcgtgcacatcagaactgccaggtccccagtggttctgaagcagtaagctttgggtgggctctggcatcagcactttcactaagcttcacagataattctgatgcatactccaggcctgaaccactgatcaatttgaaacatgcataacaaagcaaaaaaagttttgtttcaccttttgaaatacagttaactcttttaccatgccagagatcattcagagagacaggtcgttgctccggagtgatacagatctggcagtacccagcccttgtgtgtgtgcgttagctcagcacctgcccacactgcgagcccccgtaggatgtgccttgtccttccctgtttcagcacttaacacactacctggtacagagtatgtagtgggcatctgttgaatgaatgcttttcccagtagcagtgtattcatacaatattaatataattgtcccctggcttacagataaaaatgaaagcatcaagtgcccagtgagtgagacccaggtgttcttcctccacccctagtggtcccctgggcaggtctttttttttttgtaacactcaccagtctgttctgtagtcaatcattgattgacttgtctgtgaacttgcaggaactgtttcatagtttcattagcacagagtaaacatgtttgccatgcaaggttattttgcatctgcatttaagtgataatgttgaatcaatgaaaagtgttgattaagcagtagttgtagatatgctaagtttttcaaattactaatatcagggggatgttttactctaggaagttggatagctaaatagggttcctttggagtaataatgtcggagcttggtttcataaggggggataatgcttcagatttttactggtaaattgtaagttgctgcattatttcaaattgggcggtgtactgtgaccacggtgtaattatccaaaaaaggcggatctgggagcctttgtatagaaaaggagaaaat

SEQ ID NO: 380590 - DNA, 3004 bp, Homo sapiens
accggaacgccgcagccggcgctcggtccatccggcccgtgggctgtggggccccgggcggcggcggctacgtagctgccgccggccttggccgcggccgggcgggcggatatgtggcttaaatggcgcaggcgtcggggcctagaggctgaagggctggtcgtcctaaaaactcgtggacgtcgcgcacggttacccggacgcaggcccgcccctctggggaaccgcgagctcctcgcagctgggtggggaccgtcctcgcagtggcggcctccaccctgccttctcgcttagccaaggcttctggaaggctcgcaaagtgtctgttgttggaagaagccgggccctgactggcgcgacggattctcccagccgctcagcagagcgtctgtaggtcggaagtgggggttgtattggaatatgctttttgtctaatgatgttagataaaaagcaaatttggagcagttttcttattcgagttcaaaatggttcataaagcagcgaagacaactcaaaacatcagtaacacatttggcccaggaactgctaacaaacatacagtgcagtggtggcttaagaagttttgcaaggaagagagccttgaagatgaggaacgtgatatgggccatgggaagttgacaacgaccaattgagagcaatcattgaactacatgaaaaattacagaagaactcagcgttgactattctacggtcattagggtcgttcagcattcgaagcaaattggaaaggtgaaaaagcttgataagtgggtgcctcatgagctgagcggaaatcaaaactatcgttttgaagtgtagtcttcttttatgctacgcaacaacaaaccatttctcaatcggattgtgacatgtaatgaaaagtgaattttatacaacaaccagctcagtggttggaccaagaggcagctccaaagcagttcccaaagccaaacttgcaccaaaaaaaaggtcatggtcactgttcggtggtctgctgcccatctgatccactacagttttctgaatcctggtgaaaccattacatctgagaagtatgctcagcaaattggtaagatgcaccgaaaactgcaatacctgctgcctgcattggtcaacagaaagggcccaattcttctccacgacaacacctgactgcgtgtcgcacaaccagtgcttcaaaagttgaaggaattgggctacaaagttttgcctcatccaccatattcacctgacctttcgccaactgactaccacttctgctagcatcttgacaactttttgcagggaaaacacttcagcatggtgcagaaaatgctttccaagagttcgtcaaatcctgaagcacggatttttatgctacaggaataaacaaacatttctcattggcaaaaatgtgttgattgtaatggttcctgttttgattaatagaatatgttttagcgtagttacaatgatttaaaattcgcagtctggaaatttaatttttgcatcaacctaatatttctatggtaaatccttgcaaacatggaaacaatgcatttggcccagtgctttgtggttgtgtactctttttctttgtttttttaatagatggcattggccgggcatggtggctcatgcctgtaatcccagcattttgggagggtgaggtgggtggatcacctgaggtcaggagttcaagaccagcctgactaacatggtaaaaccccatctctactaaaaatacaaaaaaattagctaggcggggtggcgggcatctaattccagctacttcatgaggctgcgacaggagaatcatttgaactcgggaggcagaggttgcagtgagccgagatcacaccattgcactccagcctgggcgatgagcgaaactgtctcaaaaaaaaaaaaagttggggtctcgctgtgttgaccaggctggtctcgaactcctggcctcaagtgatcctcccatcttggcctcccaaagtgttgggattacaggcgtgagccaccacaccctgcctggttgtgtactcttttaaatactaagtttttaatgttaaatgctgcttttagatacactgtaaaaatacacctatcaatgagtttttttattaaaaacattgcaattgtactagactttaaatactaagcaataattcaggcttcaatgttggtttatagttttctcatttctttcatttaatacctctgtaaaatgaagcagttacttccattttcctgaggtgagataagtgccctgcacaatgttataggcccagtaagtgagactggagctctgatctaatccctttgacattaaagtttgtgcagtaaaccagctatgtcagtttgccacatttgtaatagtgttcaataaattttcacttaaaggtttaatattaaagtagtagcaagaattcataaccttaattggctttaacagcttttctttccctgaaaacagatgcatatgtacacatgcacacagattgcttacaatatcagcacgtaaaaggcctttgcacattgaagtcggcactgctttggtgccttttttgttttttggctcggtgttttgactgcaagtctttttggatagaattttatagttagaaagtagctaacacttgggttttataggcacaaaaaacaagtcttatactagctgtactttattttttgagttcttattaatgaggaacatccacttttgcattgacagtgatttcaagattgctttatcagcctttaaaggattcttgactagtcgtgcacatcagaactgccaggtccccagtggttctgaagcagtaagctttgggtgggctctggcatcagcactttcactaagcttcacagataattctgatgcatactccaggcatgccgctgcttgtatggctttgtctgggctctgaccctgctgcgcattcgttccaacatcacagaggaacggcctctcctcctccctgcctggggagcccagtggccagggttttgagtggtggagccagtcgc

SEQ ID NO: 380591 - DNA, 1181 bp, Homo sapiens
  misc_feature (974)..(974): n is a, c, g, or t
  misc_feature (1035)..(1035): n is a, c, g, or t
  misc_feature (1062)..(1062): n is a, c, g, or t
  misc_feature (1075)..(1075): n is a, c, g, or t
  misc_feature (1087)..(1087): n is a, c, g, or t
  misc_feature (1096)..(1096): n is a, c, g, or t
  misc_feature (1107)..(1107): n is a, c, g, or t
  misc_feature (1140)..(1140): n is a, c, g, or t
  misc_feature (1154)..(1154): n is a, c, g, or t
accggaacgccgcagccggcgctcggtccatccggcccgtgggctgtggggccccgggcggcggcggctacgtagctgccgccggccttggccgcggccgggcgggcggatatgtggcttaaatggcgcaggcgtcggggcctagaggctgaagggctggtcgtcctaaaaactcgtggacgtcgcgcacggttacccggacgcaggcccgcccctctggggaaccgcgagctcctcgcagctgggtggggaccgtcctcgcagtggcggcctccaccctgccttctcgcttagccaaggcttctggaaggctcgcaaagtgtctgttgttggaagaagccgggccctgactggcgcgacggattctcccagccgctcagcagagcgtctaatatgctttttgtctaatgatgttagataaaaagcaaatttggagcagttttcttattcgagttcaaaatggttcataaagcagcgaagacaactcaaaacatcagtaacacatttggcccaggaactgctaacaaacatacagtgcagtggtggcttaagaagttttgcaaggaagagagccttgaagatgaggaacgtgatatgggccatgggaagttgacaacgaccaattgagagcaatcattgaactacatgaaaaattacagaagaactcagcgttgactattctacggtcattagggtcgttcagcattcgaagcaaattggaaaggtgaaaaagcttgataagtgggtgcctcatgagctgagcggaaatcaaaactatcgttttgaagtgtagtcttcttttatgctacgcaacaacaaaccatttctcaatcggattgtgacatgtaatgaaaagtgaattttatacaacaaccagctcagtggttggaccaagaggcagctccaaagcagttcccaaagccaaacttgcaccaaaaaaaaaaggtccttggtccactggttcccgtgggtcntgcttgcccccattctggatccccacttacaaggtttttccttggaaatccctggggtggnaaaacccatttaccaattcttggaagnaaaggtcattggncttccaaggccnaaaaatttnggggttaaagnaatggccacccccggaaaaaaaaccttggcccnaattaacccttggnctttggccccttggccaatttgggggt

SEQ ID NO: 380592 - DNA, 3787 bp, Homo sapiens
atccgtcgctcacgaggtcgcgcctcgcacccgccttcctccttttcttttaccctccccttcagaaaaaacggcggttgggctgcgacggccgccaaaggcggactagaagcggaggggtgaaaatcccggcagagaaggaagaagggactgcaggcgggaggaggaggaggataaggaggaagggagcccgcccagccggagccatctccgtcgagaacaaaatggcggcgctggcggagggccaactataaggcggggccgcggccattccccctccacccccacccttgcgccggccgggccggtcagggggaacccgctcgcttcgcccggccgcgggcggggaggggaggggagcggcccggcccactatgcaaagcgccgggcgccgccgccgccaccccgtggcaaagaatatgctttttgtctaatgatgttagataaaaagcaaatttggagcagttttcttattcgagttcaaaatggttcataaagcagcgaagacaactcaaaacatcagtaacacatttggcccaggaactgctaacaaacatacagtgcagtggtggcttaagaagttttgcaaggaagagagccttgaagatgaggaacgtgatatgggccatgggaagttgacaacgaccaattgagagcaatcattgaactacatgaaaaattacagaagaactcagcgttgactattctacggtcattagggtcgttcagcattcgaagcaaattggaaaggtgaaaaagcttgataagtgggtgcctcatgagctgagcggaaatcaaaactatcgttttgaagtgtagtcttcttttatgctacgcaacaacaaaccatttctcaatcggattgtgacatgtaatgaaaagtgaattttatacaacaaccagctcagtggttggaccaagaggcagctccaaagcagttcccaaagccaaacttgcaccaaaaaaaaggtcatggtcactgttcggtggtctgctgcccatctgatccactacagttttctgaatcctggtgaaaccattacatctgagaagtatgctcagcaaattggtaagatgcaccgaaaactgcaatacctgctgcctgcattggtcaacagaaagggcccaattcttctccacgacaacacctgactgcgtgtcgcacaaccagtgcttcaaaagttgaaggaattgggctacaaagttttgcctcatccaccatattcacctgacctttcgccaactgactaccacttctgctagcatcttgacaactttttgcagggaaaacacttcagcatggtgcagaaaatgctttccaagagttcgtcaaatcctgaagcacggatttttatgctacaggaataaacaaacatttctcattggcaaaaatgtgttgattgtaatggttcctgttttgattaatagaatatgttttagcgtagttacaatgatttaaaattcgcagtctggaaatttaatttttgcatcaacctaatatttctatggtaaatccttgcaaacatggaaacaatgcatttggcccagtgctttgtggttgtgtactctttttctttgtttttttaatagatggcattggccgggcatggtggctcatgcctgtaatcccagcattttgggagggtgaggtgggtggatcacctgaggtcaggagttcaagaccagcctgactaacatggtaaaaccccatctctactaaaaatacaaaaaaattagctaggcggggtggcgggcatctaattccagctacttcatgaggctgcgacaggagaatcatttgaactcgggaggcagaggttgcagtgagccgagatcacaccattgcactccagcctgggcgatgagcgaaactgtctcaaaaaaaaaaaaagttggggtctcgctgtgttgaccaggctggtctcgaactcctggcctcaagtgatcctcccatcttggcctcccaaagtgttgggattacaggcgtgagccaccacaccctgcctggttgtgtactcttttaaatactaagtttttaatgttaaatgctgcttttagatacactgtaaaaatacacctatcaatgagtttttttattaaaaacattgcaattgtactagactttaaatactaagcaataattcaggcttcaatgttggtttatagttttctcatttctttcatttaatacctctgtaaaatgaagcagttacttccattttcctgaggtgagataagtgccctgcacaatgttataggcccagtaagtgagactggagctctgatctaatccctttgacattaaagtttgtgcagtaaaccagctatgtcagtttgccacatttgtaatagtgttcaataaattttcacttaaaggtttaatattaaagtagtagcaagaattcataaccttaattggctttaacagcttttctttccctgaaaacagatgcatatgtacacatgcacacagattgcttacaatatcagcacgtaaaaggcctttgcacattgaagtcggcactgctttggtgccttttttgttttttggctcggtgttttgactgcaagtctttttggatagaattttatagttagaaagtagctaacacttgggttttataggcacaaaaaacaagtcttatactagctgtactttattttttgagttcttattaatgaggaacatccacttttgcattgacagtgatttcaagattgctttatcagcctttaaaggattcttgactagtcgtgcacatcagaactgccaggtccccagtggttctgaagcagtaagctttgggtgggctctggcatcagcactttcactaagcttcacagataattctgatgcatactccaggcctgaaccactgatcaatttgaaacatgcataacaaagcaaaaaaagttttgtttcaccttttgaaatacagttaactcttttaccatgccagagatcattcagagagacaggtcgttgctccggagtgatacagatctggcagtacccagcccttgtgtgtgtgcgttagctcagcacctgcccacactgcgagcccccgtaggatgtgccttgtccttccctgtttcagcacttaacacactacctggtacagagtatgtagtgggcatctgttgaatgaatgcttttcccagtagcagtgtattcatacaatattaatataattgtcccctggcttacagataaaaatgaaagcatcaagtgcccagtgagtgagacccaggtgttcttcctccacccctagtggtcccctgggcaggtctttttttttttgtaacactcaccagtctgttctgtagtcaatcattgattgacttgtctgtgaacttgcaggaactgtttcatagtttcattagcacagagtaaacatgtttgccatgcaaggttattttgcatctgcatttaagtgataatgttgaatcaatgaaaagtgttgattaagcagtagttgtagatatgctaagtttttcaaattactaatatcaagtggagattgtttttacttttaagggtattgcttttgtgatagcataaataatggttttccttttttgtaatgtaaattaattgctggcaacttttgtattcccatagactggggaagcttaattgcctttacaagtacttatgtacaactttgtatcaaattttctgtaatagtttatgctttagtactatatatgtactaataattttatctgacttctgtttatatcatttgtacaattacatggttgtaaaataaacttttaaacctca

SEQ ID NO: 380593 - DNA, 3526 bp, Homo sapiens
gccaaagcggcctcgaagcgggtcccgtgtctgcggcgggcggcccccggcgcggagggcagggcgcggggagcccgggctcccggtgtcggcggatggcgggagcccgggggccgcgggctcgcggggcagcgggcgagagacgagacgccgagaatatgctttttgtctaatgatgttagataaaaagcaaatttggagcagttttcttattcgagttcaaaatggttcataaagcagcgaagacaactcaaaacatcagtaacacatttggcccaggaactgctaacaaacatacagtgcagtggtggcttaagaagttttgcaaggaagagagccttgaagatgaggaacgtgatatgggccatgggaagttgacaacgaccaattgagagcaatcattgaactacatgaaaaattacagaagaactcagcgttgactattctacggtcattagggtcgttcagcattcgaagcaaattggaaaggtgaaaaagcttgataagtgggtgcctcatgagctgagcggaaatcaaaactatcgttttgaagtgtagtcttcttttatgctacgcaacaacaaaccatttctcaatcggattgtgacatgtaatgaaaagtgaattttatacaacaaccagctcagtggttggaccaagaggcagctccaaagcagttcccaaagccaaacttgcaccaaaaaaaaggtcatggtcactgttcggtggtctgctgcccatctgatccactacagttttctgaatcctggtgaaaccattacatctgagaagtatgctcagcaaattggtaagatgcaccgaaaactgcaatacctgctgcctgcattggtcaacagaaagggcccaattcttctccacgacaacacctgactgcgtgtcgcacaaccagtgcttcaaaagttgaaggaattgggctacaaagttttgcctcatccaccatattcacctgacctttcgccaactgactaccacttctgctagcatcttgacaactttttgcagggaaaacacttcagcatggtgcagaaaatgctttccaagagttcgtcaaatcctgaagcacggatttttatgctacaggaataaacaaacatttctcattggcaaaaatgtgttgattgtaatggttcctgttttgattaatagaatatgttttagcgtagttacaatgatttaaaattcgcagtctggaaatttaatttttgcatcaacctaatatttctatggtaaatccttgcaaacatggaaacaatgcatttggcccagtgctttgtggttgtgtactctttttctttgtttttttaatagatggcattggccgggcatggtggctcatgcctgtaatcccagcattttgggagggtgaggtgggtggatcacctgaggtcaggagttcaagaccagcctgactaacatggtaaaaccccatctctactaaaaatacaaaaaaattagctaggcggggtggcgggcatctaattccagctacttcatgaggctgcgacaggagaatcatttgaactcgggaggcagaggttgcagtgagccgagatcacaccattgcactccagcctgggcgatgagcgaaactgtctcaaaaaaaaaaaaagttggggtctcgctgtgttgaccaggctggtctcgaactcctggcctcaagtgatcctcccatcttggcctcccaaagtgttgggattacaggcgtgagccaccacaccctgcctggttgtgtactcttttaaatactaagtttttaatgttaaatgctgcttttagatacactgtaaaaatacacctatcaatgagtttttttattaaaaacattgcaattgtactagactttaaatactaagcaataattcaggcttcaatgttggtttatagttttctcatttctttcatttaatacctctgtaaaatgaagcagttacttccattttcctgaggtgagataagtgccctgcacaatgttataggcccagtaagtgagactggagctctgatctaatccctttgacattaaagtttgtgcagtaaaccagctatgtcagtttgccacatttgtaatagtgttcaataaattttcacttaaaggtttaatattaaagtagtagcaagaattcataaccttaattggctttaacagcttttctttccctgaaaacagatgcatatgtacacatgcacacagattgcttacaatatcagcacgtaaaaggcctttgcacattgaagtcggcactgctttggtgccttttttgttttttggctcggtgttttgactgcaagtctttttggatagaattttatagttagaaagtagctaacacttgggttttataggcacaaaaaacaagtcttatactagctgtactttattttttgagttcttattaatgaggaacatccacttttgcattgacagtgatttcaagattgctttatcagcctttaaaggattcttgactagtcgtgcacatcagaactgccaggtccccagtggttctgaagcagtaagctttgggtgggctctggcatcagcactttcactaagcttcacagataattctgatgcatactccaggcctgaaccactgatcaatttgaaacatgcataacaaagcaaaaaaagttttgtttcaccttttgaaatacagttaactcttttaccatgccagagatcattcagagagacaggtcgttgctccggagtgatacagatctggcagtacccagcccttgtgtgtgtgcgttagctcagcacctgcccacactgcgagcccccgtaggatgtgccttgtccttccctgtttcagcacttaacacactacctggtacagagtatgtagtgggcatctgttgaatgaatgcttttcccagtagcagtgtattcatacaatattaatataattgtcccctggcttacagataaaaatgaaagcatcaagtgcccagtgagtgagacccaggtgttcttcctccacccctagtggtcccctgggcaggtctttttttttttgtaacactcaccagtctgttctgtagtcaatcattgattgacttgtctgtgaacttgcaggaactgtttcatagtttcattagcacagagtaaacatgtttgccatgcaaggttattttgcatctgcatttaagtgataatgttgaatcaatgaaaagtgttgattaagcagtagttgtagatatgctaagtttttcaaattactaatatcaagtggagattgtttttacttttaagggtattgcttttgtgatagcataaataatggttttccttttttgtaatgtaaattaattgctggcaacttttgtattcccatagactggggaagcttaattgcctttacaagtacttatgtacaactttgtatcaaattttctgtaatagtttatgctttagtactatatatgtactaataattttatctgacttctgtttatatcatttgtacaattacatggttgtaaaataaacttttaaacctca

SEQ ID NO: 380594 - DNA, 724 bp, Homo sapiens
tgacatggaaggaccaacacaggaatttggctcctttagaatgaagagcccccgtgatctgtgcagtctgcttgggtactagatctaagctatggggcaggagaaaaaggagagaaaagaaagaggaggaggggagaggtagagagaaggatgggaaagatgtcgcctagcaccatcactgtcaagtcggtcctcgtagctgggatgcttccattaggaatgctctgtctggaagagactggtcaggctgggacagggcagggtctgactccgtctacccaggatgaccatgaaccttccaaatgccctacttcccacttgggtagccctgcctgctttacctctgtcagggctgaagggactttcttctgcttcttgaaggtcgaggggttaatgctctggaagacggatgaaaaggcactgcccgagaagcggggtgaagacagcgggaagctcatgctcacaggccgctctgtaaccgaaagaagccacatggaagggaggtgagaggcgtgcctgcggcttgtctttggaacactgattcctgtaaaatccctctaggaatgtgagccatgggggttaagtgggacctgaaagtcaagcactcttcctccctccctcctgcaggaacagacaaaggctatgggggctggggaggggacgcttttccagggcgctggacagcccttcacctccaggcctccaggtagcagggactgggctg

SEQ ID NO: 380595 - DNA, 1244 bp, Homo sapiens
tcagattttagtcattccatcttcggaccctttcagataaccaagagcagagttaaaaggatgggcagcatttctgatttctcataatttggttttgtaaatctaggcagtctacattcagaatggaggagtccagagtataagtcaaataacatttttccttattcaggttttctccctaaaaaacaaaaccatttttaattgcacttccattttgtaatggctcataggattgctgtaaggtctcaattactaggggcttccagggcatttctgagaaataaccctgggtccttgtctagacccttatgccagaccccactccaaagagcggtaagaattccttagtgtcatagcccagacctgctgagctgcgaggcttaagtgtccctgatcaccaaatgtcctgtgcttcagggtagcgaggctccctcccagaaggtagttatacatgagggaaggacgctttacaactgggtatctaaactgatgagaacacatgttaagcatcactttaggactgagcctaggtagagttttattgtctcatttctacttgtcaattctgggaaagtgcctactgataagggagactcttcgatagaatgatgaatagtaattgggggggtcagcctttaaaaaggtcaacagcaatttaagtacttagcaatttaagtacaagaataaaggtatatgtgcagcctgccaattttctctttttcccctaaaatagccgattccacgactcttctttgcgggagaacatacgatccgtaactacccagccacagtgcatggtgctctgctgagtgggctgcgagaagcgggaagaattgcagaccagtttttgggggccatgtatacgctgcctcgccaggccacaccaggtgttcctgcacagcagtccccaagcatgtgagacagatgcattctaagggaagaggcccatgtgcctgtttctgccatgtaaggaaggctcttctagcaatactagatcccactgagaaaatccaccctggcatctgggctcctgatcagctgatggagctcctgatttgacaaaggagcttgcctcctttgaatgacctagagcacagggaggaacttgtccattagtttggaattgtgttcttcgtaaagactgaggcaagcaagtgctgtgaaataacatcatcttagtcccttggtgtgtggggtttgttttttttttttatattttgagaataaaacttcatataaaattg

SEQ ID NO: 380596 - DNA, 3038 bp, Homo sapiens
tgtcccggcgcggcgggagcgcgcttggcgcgtgcgtacgcgacggcggttggcggcgcgcgggcagcgtgaagcgaggcgaggcaaggcttttcggacccacggagcgacagagcgagcggcccctacggccgtcggcggcccggcggcccgagatgttatctgggaagaaggcggcagccgcggcggcggcggctgcagcggcagcaaccgggacggaggctggccctgggacagcaggcggctccgagaacgggtctgaggtggccgcgcagcccgcgggcctgtcgggcccagccgaggtcgggccgggggcggtgggggagcgcacaccccgcaagaaagagcctccgcgggcctcgccccccgggggcctggcggaaccgccggggtccgcagggcctcaggccggccctactgtcgtgcctgggtctgcgacccccatggaaactggaatagcagagactccggaggggcgtcggaccagccggcgcaagcgggcgaaggtagagtacagagagatggatgaaagcttggccaacctctcagaagatgagtattattcagaagaagagagaaatgccaaagcagagaaggaaaagaagcttcccccaccaccccctcaagccccacctgaggaagaaaatgaaagtgagcctgaagaaccatcgggtgtggagggcgcagctttccagagccgacttcctcatgaccggatgacttctcaagaagcagcctgttttccagatattatcagtggaccacaacagacccagaaggtttttcttttcattagaaaccgcacactgcagttgtggttggataatccaaagattcagctgacatttgaggctactctccaacaattagaagcaccttataacagtgatactgtgcttgtccaccgagttcacagttatttagagcgtcatggtcttatcaacttcggcatctataagaggataaaacccctaccaactaaaaagacaggaaaggtaattattataggctctggggtctcaggcttggcagcagctcgacagttacaaagttttggaatggatgtcacacttttggaagccaggatcgtgtgggtggacgagttgccacatttcgcaaaggaaactatgtagctgatcttggagccatggtggtaacaggtcttggagggaatcctatggctgtggtcagcaaacaagtaaatatggaactggccaagatcaagcaaaaatgcccactttatgaagccaacggacaagctgttcctaaagagaaagatgaaatggtagagcaagagtttaaccggttgctagaagctacatcttaccttagtcatcaactagacttcaatgtcctcaataataagcctgtgtcccttggccaggcattggaagttgtcattcagttacaagagaagcatgtcaaagatgagcagattgaacattggaagaagatagtgaaaactcaggaagaattgaaagaacttcttaataagatggtaaatttgaaagagaaaattaaagaactccatcagcaatacaaagaagcatctgaagtaaagccacccagagatattactgccgagttcttagtgaaaagcaaacacagggatctgaccgccctatgcaaggaatatgatgaattagctgaaacacaaggaaagctagaagaaaaacttcaggagttggaagcgaatcccccaagtgatgtatatctctcatcaagagacagacaaatacttgattggcattttgcaaatcttgaatttgctaatgccacacctctctcaactctctcccttaagcactgggatcaggatgatgactttgagttcactggcagccacctgacagtaaggaatggctactcgtgtgtgcctgtggctttagcagaaggcctagacattaaactgaatacagcagtgcgacaggttcgctacacggcttcaggatgtgaagtgatagctgtgaatacccgctccacgagtcaaacctttatttataaatgcgacgcagttctctgtacccttcccctgggtgtgctgaagcagcagccaccagccgttcagtttgtgccacctctccctgagtggaaaacatctgcagtccaaaggatgggatttggcaaccttaacaaggtggtgttgtgttttgatcgggtgttctgggatccaagtgtcaatttgttcgggcatgttggcagtacgactgccagcaggggtgagctcttcctcttctggaacctctataaagctccaatactgttggcactagtggcaggagaagctgctggtatcatggaaaacataagtgacgatgtgattgttggccgatgcctggccattctcaaagggatttttggtagcagtgcagtacctcagcccaaagaaactgtggtgtctcgttggcgtgctgatccctgggctcggggctcttattcctatgttgctgcaggatcatctggaaatgactatgatttaatggctcagccaatcactcctggcccctcgattccaggtgccccacagccgattccacgactcttctttgcgggagaacatacgatccgtaactacccagccacagtgcatggtgctctgctgagtgggctgcgagaagcgggaagaattgcagaccagtttttgggggccatgtatacgctgcctcgccaggccacaccaggtgttcctgcacagcagtccccaagcatgtgagacagatgcattctaagggaagaggcccatgtgcctgtttctgccatgtaaggaaggctcttctagcaatactagatcccactgagaaaatccaccctggcatctgggctcctgatcagctgatggagctcctgatttgacaaaggagcttgcctcctttgaatgacctagagcacagggaggaacttgtccattagtttggaattgtgttcttcgtaaagactgaggcaagcaagtgctgtgaaataacatcatcttagtcccttggtgtgtggggtttgttttttttttttatattttgagaataaaacttcatataaaattg

SEQ ID NO: 380597 - DNA, 1080 bp, Homo sapiens
gctggtacggccggagagtttgggatctggcccaggcattggaagtcgtcattcagttacaagagaagcatgtcaaagatgagcagattgaacattggaagaagatagtgaaaactcaggaagaattgaaagaacttcttaataagatggtaaatttgaaagagaaaattaaagaactccatcagcaatacaaagaagcatctgaagtaaagccacccagagatattactgccgagttcttagtgaaaagcaaacacagggatctgaccgccctatgcaaggaatatgatgaattagctgaaacacaaggaaagctagaagaaaaacttcaggagttggaagcgaatcccccaagtgatgtatatctctcatcaagagacagacaaatacttgattggcattttgcaaatcttgaatttgctaatgccacacctctctcaactctctcccttaagcactgggatcaggatgatgactttgagttcactggcagccacctgacagtaaggaatggctactcgtgtgtgcctgtggctttagcagaaggcctagacattaaactgaatacagcagtgcgacaggttcgctacacggcttcaggatgtgaagtgatagctgtgaatacccgctccacgagtcaaacctttatttataaatgcgacgcagttctctgtacccttcccctgggtgtgctgaagcagcagccaccagccgttcagtttgtgccacctctccctgagtggaaaacatctgcagtccaaaggatgggatttggcaaccttaacaaggtagcttgccctagacactcctgtctacagatctgatgtacaaatagcagtcttcgttgtttacttggtgaggaggtggccttgcatttttgggcatttggctatgctcccaattgtgacatcagggctgaggcgtgtcagttgattctcttcagtgcctaagtctatcatcaagtgtctgttcatatggacttagtcttatggggtcatttcacaaactcaggcctataaaaaggggatcgtaaatgtcatcctaaataataaggattgctgggcttattttgaaagcaga

SEQ ID NO: 380598 - DNA, 946 bp, Homo sapiens
caagcaattctcttgcctcagcctcctgagtagctgggattacaggtgcccaccaccatgcccagctaatttttgtatttttagatggggtttcacctgttggccaggctgatctcgaactcctgacctcaggtgatccacctgcctcgacctcccaaagtgctgggattacaggcatgagccacagcatccagcctgcccatcctttctatagagtctatgctgtgtgtaaaatataagacattttttacaactagtaagcttttatgatataaggtgatttcatatgaagcattcttttttttttttccttcagacaaatgaggcctacatgtaatttgctttacgtagtgagcttggcactgctctagacatcagagataaagaggttaataagacagataagatgctactttttgatttgtaatttcttcatataaggcacagccctggcttaggttctgacacagttactgagatcacctacatcacactgagagaactagtgatatcttttaataatcctgtagtcctttgttcttttgcagtgatgtatatctctcatcaagagacagacaaatacttgattggcattttgcaaatcttgaatttgctaatgccacacctctctcaactctctcccttaagcactgggatcaggtaagtttcccttattgtttattttattgcacatgtctttgggagggattgtaagagaaatagttaattttgtatgtgtgtttttaaacagctttagtaagagacatcatttacatacagtgaaattcacctattttaagtgaacagtttattgatttgccagacttcagtcataagcccccacacaatcagaatatagaacatgcccatcatcctgaaatgttttctcctgcctctttgtagttaatcccccatgctctggctcctggccctggacaaccactga

SEQ ID NO: 380599 - DNA, 6561 bp, Homo sapiens
  misc_feature (6285)..(6285): n is a, c, g, or t
tgtcccggcgcggcgggagcgcgcttggcgcgtgcgtacgcgacggcggttggcggcgcgcgggcagcgtgaagcgaggcgaggcaaggcttttcggacccacggagcgacagagcgagcggcccctacggccgtcggcggcccggcggcccgagatgttatctgggaagaaggcggcagccgcggcggcggcggctgcagcggcagcaaccgggacggaggctggccctgggacagcaggcggctccgagaacgggtctgaggtggccgcgcagcccgcgggcctgtcgggcccagccgaggtcgggccgggggcggtgggggagcgcacaccccgcaagaaagagcctccgcgggcctcgccccccgggggcctggcggaaccgccggggtccgcagggcctcaggccggccctactgtcgtgcctgggtctgcgacccccatggaaactggaatagcagagactccggaggggcgtcggaccagccggcgcaagcgggcgaaggtagagtacagagagatggatgaaagcttggccaacctctcagaagatgagtattattcagaagaagagagaaatgccaaagcagagaaggaaaagaagcttcccccaccaccccctcaagccccacctgaggaagaaaatgaaagtgagcctgaagaaccatcgggtgtggagggcgcagctttccagagccgacttcctcatgaccggatgacttctcaagaagcagcctgttttccagatattatcagtggaccacaacagacccagaaggtttttcttttcattagaaaccgcacactgcagttgtggttggataatccaaagattcagctgacatttgaggctactctccaacaattagaagcaccttataacagtgatactgtgcttgtccaccgagttcacagttatttagagcgtcatggtcttatcaacttcggcatctataagaggataaaacccctaccaactaaaaagacaggaaaggtaattattataggctctggggtctcaggcttggcagcagctcgacagttacaaagttttggaatggatgtcacacttttggaagccaggatcgtgtgggtggacgagttgccacatttcgcaaaggaaactatgtagctgatcttggagccatggtggtaacaggtcttggagggaatcctatggctgtggtcagcaaacaagtaaatatggaactggccaagatcaagcaaaaatgcccactttatgaagccaacggacaagctgttcctaaagagaaagatgaaatggtagagcaagagtttaaccggttgctagaagctacatcttaccttagtcatcaactagacttcaatgtcctcaataataagcctgtgtcccttggccaggcattggaagttgtcattcagttacaagagaagcatgtcaaagatgagcagattgaacattggaagaagatagtgaaaactcaggaagaattgaaagaacttcttaataagatggtaaatttgaaagagaaaattaaagaactccatcagcaatacaaagaagcatctgaagtaaagccacccagagatattactgccgagttcttagtgaaaagcaaacacagggatctgaccgccctatgcaaggaatatgatgaattagctgaaacacaaggaaagctagaagaaaaacttcaggagttggaagcgaatcccccaagtgatgtatatctctcatcaagagacagacaaatacttgattggcattttgcaaatcttgaatttgctaatgccacacctctctcaactctctcccttaagcactgggatcaggatgatgactttgagttcactggcagccacctgacagtaaggaatggctactcgtgtgtgcctgtggctttagcagaaggcctagacattaaactgaatacagcagtgcgacaggttcgctacacggcttcaggatgtgaagtgatagctgtgaatacccgctccacgagtcaaacctttatttataaatgcgacgcagttctctgtacccttcccctgggtgtgctgaagcagcagccaccagccgttcagtttgtgccacctctccctgagtggaaaacatctgcagtccaaaggatgggatttggcaaccttaacaaggtggtgttgtgttttgatcgggtgttctgggatccaagtgtcaatttgttcgggcatgttggcagtacgactgccagcaggggtgagctcttcctcttctggaacctctataaagctccaatactgttggcactagtggcaggagaagctgctggtatcatggaaaacataagtgacgatgtgattgttggccgatgcctggccattctcaaagggatttttggtagcagtgcagtacctcagcccaaagaaactgtggtgtctcgttggcgtgctgatccctgggctcggggctcttattcctatgttgctgcaggatcatctggaaatgactatgatttaatggctcagccaatcactcctggcccctcgattccaggtgccccacagccgattccacgactcttctttgcgggagaacatacgatccgtaactacccagccacagtgcatggtgctctgctgagtgggctgcgagaagcgggaagaattgcagaccagtttttgggggccatgtatacgctgcctcgccaggccacaccaggtgttcctgcacagcagtccccaagcatgtgagacagatgcattctaagggaagaggcccatgtgcctgtttctgccatgtaaggaaggctcttctagcaatactagatcccactgagaaaatccaccctggcatctgggctcctgatcagctgatggagctcctgatttgacaaaggagcttgcctcctttgaatgacctagagcacagggaggaacttgtccattagtttggaattgtgttcttcgtaaagactgaggcaagcaagtgctgtgaaataacatcatcttagtcccttggtgtgtggggtttgttttttttttttatattttgagaataaaacttcatataaaattggccctctcttttgttcctttgagttggagttacatacaagatgggggcattactcctttggaaatgccaagtttatcctatggcaatagtaatacatgttttctccatgtttaaataaggaagaagatgttcatataaaagagaaaaatggtttgatcaggtcagaagataaggtaggggggccggtcctgtagaagcagtggacttcctggtcagtcggactaggcttcctcacttgggtgggggtggagtgtggtggtgtgccaagaacatggttattaggaaactttggatgcactttcaagatagaacacaaaagagctgaaacaaagtctgagcctttgggagaccagtctgcctttattcctgattccctccatgggtatgtgctaaaacttcccaattctactaaaggtggtggtgtacattttgggaagcgcactacataggatcaagggcttaggtaacagctggtttaacagattgccacaaacttagtggctcttaaaaaaacagaaatctattcgaaagttctggatgcttaaagtctaaaatgggtccacagggctgcattcattacagaggctctcagagcagggaggatcagttcatttccttgctcttttcagcttctaggtgtgggaaggctcgtggctccttcctccatcctcagagcacataactccagtttctgcttccatcatcacattgccttctcctgtagtcaaatcttttgtctctctcttaaaaggatactacctgtgattacatttaaggcccacctggatcatctaggatgttctgcctcatcccagcatccttatctgcaaagtcccttttgccatataagatgataaaaacatgttacatgctggttccttcccaggggctcctgactgactgacagatagatgataaacactgttactgcaaatccaagtaatgtcccttaaatgtggttttattctttcttactgtgagttaagggacatcattatatatattggtgatctgactggaagatgaaaacggagaaggcttttcccccccctagtcttagaattcgtggcagtaatggaaagaatctgcacaccaggatcagggcagttaatgtttccagtccttgcagtatcagtaattggttaggtaaaatacccaattttaagtattacacaatgaaataaataaatatactagagctgcgccaacgcatagaagacagatgatacacagggatgacattgacaaaactggcatcacagactcgcacagagtatacggaaacgagggagctttattggttacatattgtactgcagagccaacagagagcattcgcgccagaggatacatgcagacaggcagctccaatgatacacatgcacccaaggagccctgagccactgctttgccctggtttccagcgacaggttctggcctccttggtcccatgcttggagctgctgcacctagactctaaggggcaggggtgagagagaccagagcacctgcctgagcaagtaggtgtggaccaacaggctgcccccaacaaaggggcctataatgcaataacagtttatttgagggctactttcttagccctctcaatctttaaaatacaaaaaaatagactttattctcttaaaaatacattccattcagtatatgttctgagctgggaagcagcaggaaaatagggcccctttcctatgatcctatggttgtgaggctttgaggagaaccctgctccccactcggggtattcaaaaaataatccctaaaagcagctctttccaaagcaatcttgtcagagaaataacaaaacctcataacaaggtagccagggacccagcctctgggtccccattcctttattgggaagtggtagcacttggcactgacccactaaatataaagaactaaaactgccccaggacgacaagtccaagaacactatagtgccccctgcatcccgaacactccactgacgggggttatttatgtgcaagcttgcctacagctgagggtggggtggcatccttggccccactgcagatccctttaacccacactgtgactctttctcattgccacccaaaagcaaaaaacagccacagcttctttatccacctgcagctttctctggtttagtatcagagtggcaaaaaaagcagcagcacgtggaagagatcagctgctggtactaagccagcttcacttcctccaaccaagcagctctattgccaggtcccccaactcactaggaaccctccaacaaccatacacctgccagtaaaatttaagagccaagctgcggaagaaaactgtcataaaagtgggtttgttgaccgggggcagtgggactatttggcttgattaaacaactattcaactaccaggtctcccctctacttggaggcttcctccaggacccctgatgatgaggcctgggtccaaacagtcacacctcagttgcttttcagaaacatgcctcccaactttgggatttgagagccagccttgccagccatttgaagcccagagaaacagcctccagcctttacttgctattacaatgttattttctgcaatgctgaggacacttaaaaataaaatctatctagaaagtgtgcagattaaagaaacaaaatatcctgaaataactgttacaagcaaatcctattgcactcagatttcaagatggcagccccagcaaaagggcatcacagctgtccctcttcaacaggacattttgagtagcagcagatgttggtgctgctgaaatgtggaaagatccagactttggcaccaggagctatagcaccagaatccagggctccaacactcaaagacaagaattattggcgagatctttttaggcatggcttggcgcccttctgtttccatcagcagagaagagccacagacttagtttcctaatacctttagttgaccaccacagaggttgattttctttgaactctcaaggttgccaaccagtgaaggagaatggcagggaggctgcaagtgaaggatggcagccttgagtgagctagtttctggccagtaagccaggagaagcagcagtaagagatcttggaaatagcatcttgagcatcagaggtggggatgtggacaggaaaggcaggccacatgacaatgcctttagattggcaaaactctgggaagcagaagtatgagcaatagattcctgtccctgaaagtaaggtaggtgctccccaagccncctcactgccaaatctgatacagacaaggtcaggatgaacactggttcccatgctgagtgaaggcagagaagacaaattcctctggaggaagtcttgagtcttcctcttgccaggaaattcataggagatgcacaggaacaggagatacacagacttgggtactttccataatacctagactcctagaacgccaggagatactgtgtggcactgggcaaggctgatgccacaaagagcctcagagaccatcccatctaatcccttcacactttgca

SEQ ID NO: 380600 - DNA, 6579 bp, Homo sapiens
  misc_feature (6303)..(6303): n is a, c, g, or t
tgtcccggcgcggcgggagcgcgcttggcgcgtgcgtacgcgacggcggttggcggcgcgcgggcagcgtgaagcgaggcgaggcaaggcttttcggacccacggagcgacagagcgagcggcccctacggccgtcggcggcccggcggcccgagatgttatctgggaagaaggcggcagccgcggcggcggcggctgcagcggcagcaaccgggacggaggctggccctgggacagcaggcggctccgagaacgggtctgaggtggccgcgcagcccgcgggcctgtcgggcccagccgaggtcgggccgggggcggtgggggagcgcacaccccgcaagaaagagcctccgcgggcctcgccccccgggggcctggcggaaccgccggggtccgcagggcctcaggccggccctactgtcgtgcctgggtctgcgacccccatggaaactggaatagcagagactccggaggggcgtcggaccagccggcgcaagcgggcgaaggtagagtacagagagatggatgaaagcttggccaacctctcagaagatgagtattattcagaagaagagagaaatgccaaagcagagaaggaaaagaagcttcccccaccaccccctcaagccccacctgaggaagaaaatgaaagtgagcctgaagaaccatcgggtgtggagggcgcagctttccagagccgacttcctcatgaccggatgacttctcaagaagcagcctgttttccagatattatcagtggaccacaacagacccagaaggtttttcttttcattagaaaccgcacactgcagttgtggttggataatccaaagattcagctgacatttgaggctactctccaacaattagaagcaccttataacagtgatactgtgcttgtccaccgagttcacagttatttagagcgtcatggtcttatcaacttcggcatctataagaggataaaacccctaccaactaaaaagacaggaaaggtaattattataggctctggggtctcaggcttggcagcagctcgacagttacaaagttttggaatggatgtcacacttttggaagccaggatcgtgtgggtggacgagttgccacatttcgcaaaggaaactatgtagctgatcttggagccatggtggtaacaggtcttggagggaatcctatggctgtggtcagcaaacaagtaaatatggaactggccaagatcaagcaaaaatgcccactttatgaagccaacggacaagctgttcctaaagagaaagatgaaatggtagagcaagagtttaaccggttgctagaagctacatcttaccttagtcatcaactagacttcaatgtcctcaataataagcctgtgtcccttggccaggcattggaagttgtcattcagttacaagagaagcatgtcaaagatgagcagattgaacattggaagaagatagtgaaaactcaggaagaattgaaagaacttcttaataagatggtaaatttgaaagagaaaattaaagaactccatcagcaatacaaagaagcatctgaagtaaagccacccagagatattactgccgagttcttagtgaaaagcaaacacagggatctgaccgccctatgcaaggaatatgatgaattagctgaaacacaaggaaagctagaagaaaaacttcaggagttggaagcgaatcccccaagtcctttgttcttttgcagtgatgtatatctctcatcaagagacagacaaatacttgattggcattttgcaaatcttgaatttgctaatgccacacctctctcaactctctcccttaagcactgggatcaggatgatgactttgagttcactggcagccacctgacagtaaggaatggctactcgtgtgtgcctgtggctttagcagaaggcctagacattaaactgaatacagcagtgcgacaggttcgctacacggcttcaggatgtgaagtgatagctgtgaatacccgctccacgagtcaaacctttatttataaatgcgacgcagttctctgtacccttcccctgggtgtgctgaagcagcagccaccagccgttcagtttgtgccacctctccctgagtggaaaacatctgcagtccaaaggatgggatttggcaaccttaacaaggtggtgttgtgttttgatcgggtgttctgggatccaagtgtcaatttgttcgggcatgttggcagtacgactgccagcaggggtgagctcttcctcttctggaacctctataaagctccaatactgttggcactagtggcaggagaagctgctggtatcatggaaaacataagtgacgatgtgattgttggccgatgcctggccattctcaaagggatttttggtagcagtgcagtacctcagcccaaagaaactgtggtgtctcgttggcgtgctgatccctgggctcggggctcttattcctatgttgctgcaggatcatctggaaatgactatgatttaatggctcagccaatcactcctggcccctcgattccaggtgccccacagccgattccacgactcttctttgcgggagaacatacgatccgtaactacccagccacagtgcatggtgctctgctgagtgggctgcgagaagcgggaagaattgcagaccagtttttgggggccatgtatacgctgcctcgccaggccacaccaggtgttcctgcacagcagtccccaagcatgtgagacagatgcattctaagggaagaggcccatgtgcctgtttctgccatgtaaggaaggctcttctagcaatactagatcccactgagaaaatccaccctggcatctgggctcctgatcagctgatggagctcctgatttgacaaaggagcttgcctcctttgaatgacctagagcacagggaggaacttgtccattagtttggaattgtgttcttcgtaaagactgaggcaagcaagtgctgtgaaataacatcatcttagtcccttggtgtgtggggtttgttttttttttttatattttgagaataaaacttcatataaaattggccctctcttttgttcctttgagttggagttacatacaagatgggggcattactcctttggaaatgccaagtttatcctatggcaatagtaatacatgttttctccatgtttaaataaggaagaagatgttcatataaaagagaaaaatggtttgatcaggtcagaagataaggtaggggggccggtcctgtagaagcagtggacttcctggtcagtcggactaggcttcctcacttgggtgggggtggagtgtggtggtgtgccaagaacatggttattaggaaactttggatgcactttcaagatagaacacaaaagagctgaaacaaagtctgagcctttgggagaccagtctgcctttattcctgattccctccatgggtatgtgctaaaacttcccaattctactaaaggtggtggtgtacattttgggaagcgcactacataggatcaagggcttaggtaacagctggtttaacagattgccacaaacttagtggctcttaaaaaaacagaaatctattcgaaagttctggatgcttaaagtctaaaatgggtccacagggctgcattcattacagaggctctcagagcagggaggatcagttcatttccttgctcttttcagcttctaggtgtgggaaggctcgtggctccttcctccatcctcagagcacataactccagtttctgcttccatcatcacattgccttctcctgtagtcaaatcttttgtctctctcttaaaaggatactacctgtgattacatttaaggcccacctggatcatctaggatgttctgcctcatcccagcatccttatctgcaaagtcccttttgccatataagatgataaaaacatgttacatgctggttccttcccaggggctcctgactgactgacagatagatgataaacactgttactgcaaatccaagtaatgtcccttaaatgtggttttattctttcttactgtgagttaagggacatcattatatatattggtgatctgactggaagatgaaaacggagaaggcttttcccccccctagtcttagaattcgtggcagtaatggaaagaatctgcacaccaggatcagggcagttaatgtttccagtccttgcagtatcagtaattggttaggtaaaatacccaattttaagtattacacaatgaaataaataaatatactagagctgcgccaacgcatagaagacagatgatacacagggatgacattgacaaaactggcatcacagactcgcacagagtatacggaaacgagggagctttattggttacatattgtactgcagagccaacagagagcattcgcgccagaggatacatgcagacaggcagctccaatgatacacatgcacccaaggagccctgagccactgctttgccctggtttccagcgacaggttctggcctccttggtcccatgcttggagctgctgcacctagactctaaggggcaggggtgagagagaccagagcacctgcctgagcaagtaggtgtggaccaacaggctgcccccaacaaaggggcctataatgcaataacagtttatttgagggctactttcttagccctctcaatctttaaaatacaaaaaaatagactttattctcttaaaaatacattccattcagtatatgttctgagctgggaagcagcaggaaaatagggcccctttcctatgatcctatggttgtgaggctttgaggagaaccctgctccccactcggggtattcaaaaaataatccctaaaagcagctctttccaaagcaatcttgtcagagaaataacaaaacctcataacaaggtagccagggacccagcctctgggtccccattcctttattgggaagtggtagcacttggcactgacccactaaatataaagaactaaaactgccccaggacgacaagtccaagaacactatagtgccccctgcatcccgaacactccactgacgggggttatttatgtgcaagcttgcctacagctgagggtggggtggcatccttggccccactgcagatccctttaacccacactgtgactctttctcattgccacccaaaagcaaaaaacagccacagcttctttatccacctgcagctttctctggtttagtatcagagtggcaaaaaaagcagcagcacgtggaagagatcagctgctggtactaagccagcttcacttcctccaaccaagcagctctattgccaggtcccccaactcactaggaaccctccaacaaccatacacctgccagtaaaatttaagagccaagctgcggaagaaaactgtcataaaagtgggtttgttgaccgggggcagtgggactatttggcttgattaaacaactattcaactaccaggtctcccctctacttggaggcttcctccaggacccctgatgatgaggcctgggtccaaacagtcacacctcagttgcttttcagaaacatgcctcccaactttgggatttgagagccagccttgccagccatttgaagcccagagaaacagcctccagcctttacttgctattacaatgttattttctgcaatgctgaggacacttaaaaataaaatctatctagaaagtgtgcagattaaagaaacaaaatatcctgaaataactgttacaagcaaatcctattgcactcagatttcaagatggcagccccagcaaaagggcatcacagctgtccctcttcaacaggacattttgagtagcagcagatgttggtgctgctgaaatgtggaaagatccagactttggcaccaggagctatagcaccagaatccagggctccaacactcaaagacaagaattattggcgagatctttttaggcatggcttggcgcccttctgtttccatcagcagagaagagccacagacttagtttcctaatacctttagttgaccaccacagaggttgattttctttgaactctcaaggttgccaaccagtgaaggagaatggcagggaggctgcaagtgaaggatggcagccttgagtgagctagtttctggccagtaagccaggagaagcagcagtaagagatcttggaaatagcatcttgagcatcagaggtggggatgtggacaggaaaggcaggccacatgacaatgcctttagattggcaaaactctgggaagcagaagtatgagcaatagattcctgtccctgaaagtaaggtaggtgctccccaagccncctcactgccaaatctgatacagacaaggtcaggatgaacactggttcccatgctgagtgaaggcagagaagacaaattcctctggaggaagtcttgagtcttcctcttgccaggaaattcataggagatgcacaggaacaggagatacacagacttgggtactttccataatacctagactcctagaacgccaggagatactgtgtggcactgggcaaggctgatgccacaaagagcctcagagaccatcccatctaatcccttcacactttgca

SEQ ID NO: 380601 - DNA, 5538 bp, Homo sapiens
  misc_feature (5262)..(5262): n is a, c, g, or t
ggtgattagaggatcctttcttgcccagactcgaatggatgtcacacttttggaatgcagggatcgtgtgggtggacgagttgccacatttcgcaaaggaaactatgtagctgatcttggagccatggtggtaacaggtcttggagggaatcctatggctgtggtcagcaaacaagtaaatatggaactggccaagatcaagcaaaaatgcccactttatgaagccaacggacaagctgttcctaaagagaaagatgaaatggtagagcaagagtttaaccggttgctagaagctacatcttaccttagtcatcaactagacttcaatgtcctcaataataagcctgtgtcccttggccaggcattggaagttgtcattcagttacaagagaagcatgtcaaagatgagcagattgaacattggaagaagatagtgaaaactcaggaagaattgaaagaacttcttaataagatggtaaatttgaaagagaaaattaaagaactccatcagcaatacaaagaagcatctgaagtaaagccacccagagatattactgccgagttcttagtgaaaagcaaacacagggatctgaccgccctatgcaaggaatatgatgaattagctgaaacacaaggaaagctagaagaaaaacttcaggagttggaagcgaatcccccaagtgatgtatatctctcatcaagagacagacaaatacttgattggcattttgcaaatcttgaatttgctaatgccacacctctctcaactctctcccttaagcactgggatcaggatgatgactttgagttcactggcagccacctgacagtaaggaatggctactcgtgtgtgcctgtggctttagcagaaggcctagacattaaactgaatacagcagtgcgacaggttcgctacacggcttcaggatgtgaagtgatagctgtgaatacccgctccacgagtcaaacctttatttataaatgcgacgcagttctctgtacccttcccctgggtgtgctgaagcagcagccaccagccgttcagtttgtgccacctctccctgagtggaaaacatctgcagtccaaaggatgggatttggcaaccttaacaaggtggtgttgtgttttgatcgggtgttctgggatccaagtgtcaatttgttcgggcatgttggcagtacgactgccagcaggggtgagctcttcctcttctggaacctctataaagctccaatactgttggcactagtggcaggagaagctgctggtatcatggaaaacataagtgacgatgtgattgttggccgatgcctggccattctcaaagggatttttggtagcagtgcagtacctcagcccaaagaaactgtggtgtctcgttggcgtgctgatccctgggctcggggctcttattcctatgttgctgcaggatcatctggaaatgactatgatttaatggctcagccaatcactcctggcccctcgattccaggtgccccacagccgattccacgactcttctttgcgggagaacatacgatccgtaactacccagccacagtgcatggtgctctgctgagtgggctgcgagaagcgggaagaattgcagaccagtttttgggggccatgtatacgctgcctcgccaggccacaccaggtgttcctgcacagcagtccccaagcatgtgagacagatgcattctaagggaagaggcccatgtgcctgtttctgccatgtaaggaaggctcttctagcaatactagatcccactgagaaaatccaccctggcatctgggctcctgatcagctgatggagctcctgatttgacaaaggagcttgcctcctttgaatgacctagagcacagggaggaacttgtccattagtttggaattgtgttcttcgtaaagactgaggcaagcaagtgctgtgaaataacatcatcttagtcccttggtgtgtggggtttgttttttttttttatattttgagaataaaacttcatataaaattggccctctcttttgttcctttgagttggagttacatacaagatgggggcattactcctttggaaatgccaagtttatcctatggcaatagtaatacatgttttctccatgtttaaataaggaagaagatgttcatataaaagagaaaaatggtttgatcaggtcagaagataaggtaggggggccggtcctgtagaagcagtggacttcctggtcagtcggactaggcttcctcacttgggtgggggtggagtgtggtggtgtgccaagaacatggttattaggaaactttggatgcactttcaagatagaacacaaaagagctgaaacaaagtctgagcctttgggagaccagtctgcctttattcctgattccctccatgggtatgtgctaaaacttcccaattctactaaaggtggtggtgtacattttgggaagcgcactacataggatcaagggcttaggtaacagctggtttaacagattgccacaaacttagtggctcttaaaaaaacagaaatctattcgaaagttctggatgcttaaagtctaaaatgggtccacagggctgcattcattacagaggctctcagagcagggaggatcagttcatttccttgctcttttcagcttctaggtgtgggaaggctcgtggctccttcctccatcctcagagcacataactccagtttctgcttccatcatcacattgccttctcctgtagtcaaatcttttgtctctctcttaaaaggatactacctgtgattacatttaaggcccacctggatcatctaggatgttctgcctcatcccagcatccttatctgcaaagtcccttttgccatataagatgataaaaacatgttacatgctggttccttcccaggggctcctgactgactgacagatagatgataaacactgttactgcaaatccaagtaatgtcccttaaatgtggttttattctttcttactgtgagttaagggacatcattatatatattggtgatctgactggaagatgaaaacggagaaggcttttcccccccctagtcttagaattcgtggcagtaatggaaagaatctgcacaccaggatcagggcagttaatgtttccagtccttgcagtatcagtaattggttaggtaaaatacccaattttaagtattacacaatgaaataaataaatatactagagctgcgccaacgcatagaagacagatgatacacagggatgacattgacaaaactggcatcacagactcgcacagagtatacggaaacgagggagctttattggttacatattgtactgcagagccaacagagagcattcgcgccagaggatacatgcagacaggcagctccaatgatacacatgcacccaaggagccctgagccactgctttgccctggtttccagcgacaggttctggcctccttggtcccatgcttggagctgctgcacctagactctaaggggcaggggtgagagagaccagagcacctgcctgagcaagtaggtgtggaccaacaggctgcccccaacaaaggggcctataatgcaataacagtttatttgagggctactttcttagccctctcaatctttaaaatacaaaaaaatagactttattctcttaaaaatacattccattcagtatatgttctgagctgggaagcagcaggaaaatagggcccctttcctatgatcctatggttgtgaggctttgaggagaaccctgctccccactcggggtattcaaaaaataatccctaaaagcagctctttccaaagcaatcttgtcagagaaataacaaaacctcataacaaggtagccagggacccagcctctgggtccccattcctttattgggaagtggtagcacttggcactgacccactaaatataaagaactaaaactgccccaggacgacaagtccaagaacactatagtgccccctgcatcccgaacactccactgacgggggttatttatgtgcaagcttgcctacagctgagggtggggtggcatccttggccccactgcagatccctttaacccacactgtgactctttctcattgccacccaaaagcaaaaaacagccacagcttctttatccacctgcagctttctctggtttagtatcagagtggcaaaaaaagcagcagcacgtggaagagatcagctgctggtactaagccagcttcacttcctccaaccaagcagctctattgccaggtcccccaactcactaggaaccctccaacaaccatacacctgccagtaaaatttaagagccaagctgcggaagaaaactgtcataaaagtgggtttgttgaccgggggcagtgggactatttggcttgattaaacaactattcaactaccaggtctcccctctacttggaggcttcctccaggacccctgatgatgaggcctgggtccaaacagtcacacctcagttgcttttcagaaacatgcctcccaactttgggatttgagagccagccttgccagccatttgaagcccagagaaacagcctccagcctttacttgctattacaatgttattttctgcaatgctgaggacacttaaaaataaaatctatctagaaagtgtgcagattaaagaaacaaaatatcctgaaataactgttacaagcaaatcctattgcactcagatttcaagatggcagccccagcaaaagggcatcacagctgtccctcttcaacaggacattttgagtagcagcagatgttggtgctgctgaaatgtggaaagatccagactttggcaccaggagctatagcaccagaatccagggctccaacactcaaagacaagaattattggcgagatctttttaggcatggcttggcgcccttctgtttccatcagcagagaagagccacagacttagtttcctaatacctttagttgaccaccacagaggttgattttctttgaactctcaaggttgccaaccagtgaaggagaatggcagggaggctgcaagtgaaggatggcagccttgagtgagctagtttctggccagtaagccaggagaagcagcagtaagagatcttggaaatagcatcttgagcatcagaggtggggatgtggacaggaaaggcaggccacatgacaatgcctttagattggcaaaactctgggaagcagaagtatgagcaatagattcctgtccctgaaagtaaggtaggtgctccccaagccncctcactgccaaatctgatacagacaaggtcaggatgaacactggttcccatgctgagtgaaggcagagaagacaaattcctctggaggaagtcttgagtcttcctcttgccaggaaattcataggagatgcacaggaacaggagatacacagacttgggtactttccataatacctagactcctagaacgccaggagatactgtgtggcactgggcaaggctgatgccacaaagagcctcagagaccatcccatctaatcccttcacactttgca

SEQ ID NO: 380602 - DNA, 3528 bp, Homo sapiens
tgtcccggcgcggcgggagcgcgcttggcgcgtgcgtacgcgacggcggttggcggcgcgcgggcagcgtgaagcgaggcgaggcaaggcttttcggacccacggagcgacagagcgagcggcccctacggccgtcggcggcccggcggcccgagatgttatctgggaagaaggcggcagccgcggcggcggcggctgcagcggcagcaaccgggacggaggctggccctgggacagcaggcggctccgagaacgggtctgaggtggccgcgcagcccgcgggcctgtcgggcccagccgaggtcgggccgggggcggtgggggagcgcacaccccgcaagaaagagcctccgcgggcctcgccccccgggggcctggcggaaccgccggggtccgcagggcctcaggccggccctactgtcgtgcctgggtctgcgacccccatggaaactggaatagcagagactccggaggggcgtcggaccagccggcgcaagcgggcgaaggtagagtacagagagatggatgaaagcttggccaacctctcagaagatgagtattattcagaagaagagagaaatgccaaagcagagaaggaaaagaagcttcccccaccaccccctcaagccccacctgaggaagaaaatgaaagtgagcctgaagaaccatcgggtgtggagggcgcagctttccagagccgacttcctcatgaccggatgacttctcaagaagcagcctgttttccagatattatcagtggaccacaacagacccagaaggtttttcttttcattagaaaccgcacactgcagttgtggttggataatccaaagattcagctgacatttgaggctactctccaacaattagaagcaccttataacagtgatactgtgcttgtccaccgagttcacagttatttagagcgtcatggtcttatcaacttcggcatctataagaggataaaacccctaccaactaaaaagacaggaaaggtaattattataggctctggggtctcaggcttggcagcagctcgacagttacaaagttttggaatggatgtcacacttttggaagccaggatcgtgtgggtggacgagttgccacatttcgcaaaggaaactatgtagctgatcttggagccatggtggtaacaggtcttggagggaatcctatggctgtggtcagcaaacaagtaaatatggaactggccaagatcaagcaaaaatgcccactttatgaagccaacggacaagctgttcctaaagagaaagatgaaatggtagagcaagagtttaaccggttgctagaagctacatcttaccttagtcatcaactagacttcaatgtcctcaataataagcctgtgtcccttggccaggcattggaagttgtcattcagttacaagagaagcatgtcaaagatgagcagattgaacattggaagaagatagtgaaaactcaggaagaattgaaagaacttcttaataagatggtaaatttgaaagagaaaattaaagaactccatcagcaatacaaagaagcatctgaagtaaagccacccagagatattactgccgagttcttagtgaaaagcaaacacagggatctgaccgccctatgcaaggaatatgatgaattagctgaaacacaaggaaagctagaagaaaaacttcaggagttggaagcgaatcccccaagtgatgtatatctctcatcaagagacagacaaatacttgattggcattttgcaaatcttgaatttgctaatgccacacctctctcaactctctcccttaagcactgggatcaggatgatgactttgagttcactggcagccacctgacagtaaggaatggctactcgtgtgtgcctgtggctttagcagaaggcctagacattaaactgaatacagcagtgcgacaggttcgctacacggcttcaggatgtgaagtgatagctgtgaatacccgctccacgagtcaaacctttatttataaatgcgacgcagttctctgtacccttcccctgggtgtgctgaagcagcagccaccagccgttcagtttgtgccacctctccctgagtggaaaacatctgcagtccaaaggatgggatttggcaaccttaacaaggtggtgttgtgttttgatcgggtgttctgggatccaagtgtcaatttgttcgggcatgttggcagtacgactgccagcaggggtgagctcttcctcttctggaacctctataaagctccaatactgttggcactagtggcaggagaagctgctggtatcatggaaaacataagtgacgatgtgattgttggccgatgcctggccattctcaaagggatttttggtagcagtgcagtacctcagcccaaagaaactgtggtgtctcgttggcgtgctgatccctgggctcggggctcttattcctatgttgctgcaggatcatctggaaatgactatgatttaatggctcagccaatcactcctggcccctcgattccaggtgccccacagccgattccacgactcttctttgcgggagaacatacgatccgtaactacccagccacagtgcatggtgctctgctgagtgggctgcgagaagcgggaagaattgcagaccagtttttgggggccatgtatacgctgcctcgccaggccacaccaggtgttcctgcacagcagtccccaagcatgtgagacagatgcattctaagggaagaggcccatgtgcctgtttctgccatgtaaggaaggctcttctagcaatactagatcccactgagaaaatccaccctggcatctgggctcctgatcagctgatggagctcctgatttgacaaaggagcttgcctcctttgaatgacctagagcacagggaggaacttgtccattagtttggaattgtgttcttcgtaaagactgaggcaagcaagtgctgtgaaataacatcatcttagtcccttggtgtgtggggtttgttttttttttttatattttgagaataaaacttcatataaaattgaaaaaaaaaaaaaaaaaaaaaaaaaaaaaaaaaaaaaaaaaaaaaaaaaaaaaaaaaaaaaaaaaaaaaaaaaaaaaaaaaaaaaaaaaaaaaaaaaaaaaaaaaaaaaaaaaaaaaaaaaaaaaaaaaaaaaaaaaaaaaaaaaaaaaaaaattgcccccaaattttgcttttttttgccaaattccccttttgggggggctttaaaaatctaaggggccggttttaataaacttgcgtcgggaaaaaacctggggttccaccaataaaccccttttgaaaaaatctcctttttccgagggggcattaatctggaaaagctcctccatatgtccctttcaaaaagtttgatcccctatatggctaacgaaatatgttccggttaatttttttaaaaatcggtgaaaattttttcaaaaacgcctttttttttatacacaatagtgcccaattctggactctttttttattcatatccccccggttgggg

SEQ ID NO: 380603 - DNA, 5405 bp, Homo sapiens
  misc_feature (5129)..(5129): n is a, c, g, or t
caagcaattctcttgcctcagcctcctgagtagctgggattacaggtgcccaccaccatgcccagctaatttttgtatttttagatggggtttcacctgttggccaggctgatctcgaactcctgacctcaggtgatccacctgcctcgacctcccaaagtgctgggattacaggcatgagccacagcatccagcctgcccatcctttctatagagtctatgctgtgtgtaaaatataagacattttttacaactagtaagcttttatgatataaggtgatttcatatgaagcattcttttttttttttccttcagacaaatgaggcctacatgtaatttgctttacgtagtgagcttggcactgctctagacatcagagataaagaggttaataagacagataagatgctactttttgatttgtaatttcttcatataaggcacagccctggcttaggttctgacacagttactgagatcacctacatcacactgagagaactagtgatatcttttaataatcctgtagtcctttgttcttttgcagtgatgtatatctctcatcaagagacagacaaatacttgattggcattttgcaaatcttgaatttgctaatgccacacctctctcaactctctcccttaagcactgggatcaggatgatgactttgagttcactggcagccacctgacagtaaggaatggctactcgtgtgtgcctgtggctttagcagaaggcctagacattaaactgaatacagcagtgcgacaggttcgctacacggcttcaggatgtgaagtgatagctgtgaatacccgctccacgagtcaaacctttatttataaatgcgacgcagttctctgtacccttcccctgggtgtgctgaagcagcagccaccagccgttcagtttgtgccacctctccctgagtggaaaacatctgcagtccaaaggatgggatttggcaaccttaacaaggtggtgttgtgttttgatcgggtgttctgggatccaagtgtcaatttgttcgggcatgttggcagtacgactgccagcaggggtgagctcttcctcttctggaacctctataaagctccaatactgttggcactagtggcaggagaagctgctggtatcatggaaaacataagtgacgatgtgattgttggccgatgcctggccattctcaaagggatttttggtagcagtgcagtacctcagcccaaagaaactgtggtgtctcgttggcgtgctgatccctgggctcggggctcttattcctatgttgctgcaggatcatctggaaatgactatgatttaatggctcagccaatcactcctggcccctcgattccaggtgccccacagccgattccacgactcttctttgcgggagaacatacgatccgtaactacccagccacagtgcatggtgctctgctgagtgggctgcgagaagcgggaagaattgcagaccagtttttgggggccatgtatacgctgcctcgccaggccacaccaggtgttcctgcacagcagtccccaagcatgtgagacagatgcattctaagggaagaggcccatgtgcctgtttctgccatgtaaggaaggctcttctagcaatactagatcccactgagaaaatccaccctggcatctgggctcctgatcagctgatggagctcctgatttgacaaaggagcttgcctcctttgaatgacctagagcacagggaggaacttgtccattagtttggaattgtgttcttcgtaaagactgaggcaagcaagtgctgtgaaataacatcatcttagtcccttggtgtgtggggtttgttttttttttttatattttgagaataaaacttcatataaaattggccctctcttttgttcctttgagttggagttacatacaagatgggggcattactcctttggaaatgccaagtttatcctatggcaatagtaatacatgttttctccatgtttaaataaggaagaagatgttcatataaaagagaaaaatggtttgatcaggtcagaagataaggtaggggggccggtcctgtagaagcagtggacttcctggtcagtcggactaggcttcctcacttgggtgggggtggagtgtggtggtgtgccaagaacatggttattaggaaactttggatgcactttcaagatagaacacaaaagagctgaaacaaagtctgagcctttgggagaccagtctgcctttattcctgattccctccatgggtatgtgctaaaacttcccaattctactaaaggtggtggtgtacattttgggaagcgcactacataggatcaagggcttaggtaacagctggtttaacagattgccacaaacttagtggctcttaaaaaaacagaaatctattcgaaagttctggatgcttaaagtctaaaatgggtccacagggctgcattcattacagaggctctcagagcagggaggatcagttcatttccttgctcttttcagcttctaggtgtgggaaggctcgtggctccttcctccatcctcagagcacataactccagtttctgcttccatcatcacattgccttctcctgtagtcaaatcttttgtctctctcttaaaaggatactacctgtgattacatttaaggcccacctggatcatctaggatgttctgcctcatcccagcatccttatctgcaaagtcccttttgccatataagatgataaaaacatgttacatgctggttccttcccaggggctcctgactgactgacagatagatgataaacactgttactgcaaatccaagtaatgtcccttaaatgtggttttattctttcttactgtgagttaagggacatcattatatatattggtgatctgactggaagatgaaaacggagaaggcttttcccccccctagtcttagaattcgtggcagtaatggaaagaatctgcacaccaggatcagggcagttaatgtttccagtccttgcagtatcagtaattggttaggtaaaatacccaattttaagtattacacaatgaaataaataaatatactagagctgcgccaacgcatagaagacagatgatacacagggatgacattgacaaaactggcatcacagactcgcacagagtatacggaaacgagggagctttattggttacatattgtactgcagagccaacagagagcattcgcgccagaggatacatgcagacaggcagctccaatgatacacatgcacccaaggagccctgagccactgctttgccctggtttccagcgacaggttctggcctccttggtcccatgcttggagctgctgcacctagactctaaggggcaggggtgagagagaccagagcacctgcctgagcaagtaggtgtggaccaacaggctgcccccaacaaaggggcctataatgcaataacagtttatttgagggctactttcttagccctctcaatctttaaaatacaaaaaaatagactttattctcttaaaaatacattccattcagtatatgttctgagctgggaagcagcaggaaaatagggcccctttcctatgatcctatggttgtgaggctttgaggagaaccctgctccccactcggggtattcaaaaaataatccctaaaagcagctctttccaaagcaatcttgtcagagaaataacaaaacctcataacaaggtagccagggacccagcctctgggtccccattcctttattgggaagtggtagcacttggcactgacccactaaatataaagaactaaaactgccccaggacgacaagtccaagaacactatagtgccccctgcatcccgaacactccactgacgggggttatttatgtgcaagcttgcctacagctgagggtggggtggcatccttggccccactgcagatccctttaacccacactgtgactctttctcattgccacccaaaagcaaaaaacagccacagcttctttatccacctgcagctttctctggtttagtatcagagtggcaaaaaaagcagcagcacgtggaagagatcagctgctggtactaagccagcttcacttcctccaaccaagcagctctattgccaggtcccccaactcactaggaaccctccaacaaccatacacctgccagtaaaatttaagagccaagctgcggaagaaaactgtcataaaagtgggtttgttgaccgggggcagtgggactatttggcttgattaaacaactattcaactaccaggtctcccctctacttggaggcttcctccaggacccctgatgatgaggcctgggtccaaacagtcacacctcagttgcttttcagaaacatgcctcccaactttgggatttgagagccagccttgccagccatttgaagcccagagaaacagcctccagcctttacttgctattacaatgttattttctgcaatgctgaggacacttaaaaataaaatctatctagaaagtgtgcagattaaagaaacaaaatatcctgaaataactgttacaagcaaatcctattgcactcagatttcaagatggcagccccagcaaaagggcatcacagctgtccctcttcaacaggacattttgagtagcagcagatgttggtgctgctgaaatgtggaaagatccagactttggcaccaggagctatagcaccagaatccagggctccaacactcaaagacaagaattattggcgagatctttttaggcatggcttggcgcccttctgtttccatcagcagagaagagccacagacttagtttcctaatacctttagttgaccaccacagaggttgattttctttgaactctcaaggttgccaaccagtgaaggagaatggcagggaggctgcaagtgaaggatggcagccttgagtgagctagtttctggccagtaagccaggagaagcagcagtaagagatcttggaaatagcatcttgagcatcagaggtggggatgtggacaggaaaggcaggccacatgacaatgcctttagattggcaaaactctgggaagcagaagtatgagcaatagattcctgtccctgaaagtaaggtaggtgctccccaagccncctcactgccaaatctgatacagacaaggtcaggatgaacactggttcccatgctgagtgaaggcagagaagacaaattcctctggaggaagtcttgagtcttcctcttgccaggaaattcataggagatgcacaggaacaggagatacacagacttgggtactttccataatacctagactcctagaacgccaggagatactgtgtggcactgggcaaggctgatgccacaaagagcctcagagaccatcccatctaatcccttcacactttgca

SEQ ID NO: 380604 - DNA, 4987 bp, Homo sapiens
  misc_feature (4711)..(4711): n is a, c, g, or t
gacaaaagaaacttccctaatctcactacccgaagatttagggacattttttggtgttttctctttttccttcagtttcctttggtaactgtagctaaatactgagtgatttgttctttagtttgccttaaaatattgactgtttccacaagcttgtgttttcattgttgttgtacagaactaggtgcaaatgacacagattaataaaaggttggaaatatgttcttttctctcctctttaggatgatgactttgagttcactggcagccacctgacagtaaggaatggctactcgtgtgtgcctgtggctttagcagaaggcctagacattaaactgaatacagcagtgcgacaggttcgctacacggcttcaggatgtgaagtgatagctgtgaatacccgctccacgagtcaaacctttatttataaatgcgacgcagttctctgtacccttcccctgggtgtgctgaagcagcagccaccagccgttcagtttgtgccacctctccctgagtggaaaacatctgcagtccaaaggatgggatttggcaaccttaacaaggtggtgttgtgttttgatcgggtgttctgggatccaagtgtcaatttgttcgggcatgttggcagtacgactgccagcaggggtgagctcttcctcttctggaacctctataaagctccaatactgttggcactagtggcaggagaagctgctggtatcatggaaaacataagtgacgatgtgattgttggccgatgcctggccattctcaaagggatttttggtagcagtgcagtacctcagcccaaagaaactgtggtgtctcgttggcgtgctgatccctgggctcggggctcttattcctatgttgctgcaggatcatctggaaatgactatgatttaatggctcagccaatcactcctggcccctcgattccaggtgccccacagccgattccacgactcttctttgcgggagaacatacgatccgtaactacccagccacagtgcatggtgctctgctgagtgggctgcgagaagcgggaagaattgcagaccagtttttgggggccatgtatacgctgcctcgccaggccacaccaggtgttcctgcacagcagtccccaagcatgtgagacagatgcattctaagggaagaggcccatgtgcctgtttctgccatgtaaggaaggctcttctagcaatactagatcccactgagaaaatccaccctggcatctgggctcctgatcagctgatggagctcctgatttgacaaaggagcttgcctcctttgaatgacctagagcacagggaggaacttgtccattagtttggaattgtgttcttcgtaaagactgaggcaagcaagtgctgtgaaataacatcatcttagtcccttggtgtgtggggtttgttttttttttttatattttgagaataaaacttcatataaaattggccctctcttttgttcctttgagttggagttacatacaagatgggggcattactcctttggaaatgccaagtttatcctatggcaatagtaatacatgttttctccatgtttaaataaggaagaagatgttcatataaaagagaaaaatggtttgatcaggtcagaagataaggtaggggggccggtcctgtagaagcagtggacttcctggtcagtcggactaggcttcctcacttgggtgggggtggagtgtggtggtgtgccaagaacatggttattaggaaactttggatgcactttcaagatagaacacaaaagagctgaaacaaagtctgagcctttgggagaccagtctgcctttattcctgattccctccatgggtatgtgctaaaacttcccaattctactaaaggtggtggtgtacattttgggaagcgcactacataggatcaagggcttaggtaacagctggtttaacagattgccacaaacttagtggctcttaaaaaaacagaaatctattcgaaagttctggatgcttaaagtctaaaatgggtccacagggctgcattcattacagaggctctcagagcagggaggatcagttcatttccttgctcttttcagcttctaggtgtgggaaggctcgtggctccttcctccatcctcagagcacataactccagtttctgcttccatcatcacattgccttctcctgtagtcaaatcttttgtctctctcttaaaaggatactacctgtgattacatttaaggcccacctggatcatctaggatgttctgcctcatcccagcatccttatctgcaaagtcccttttgccatataagatgataaaaacatgttacatgctggttccttcccaggggctcctgactgactgacagatagatgataaacactgttactgcaaatccaagtaatgtcccttaaatgtggttttattctttcttactgtgagttaagggacatcattatatatattggtgatctgactggaagatgaaaacggagaaggcttttcccccccctagtcttagaattcgtggcagtaatggaaagaatctgcacaccaggatcagggcagttaatgtttccagtccttgcagtatcagtaattggttaggtaaaatacccaattttaagtattacacaatgaaataaataaatatactagagctgcgccaacgcatagaagacagatgatacacagggatgacattgacaaaactggcatcacagactcgcacagagtatacggaaacgagggagctttattggttacatattgtactgcagagccaacagagagcattcgcgccagaggatacatgcagacaggcagctccaatgatacacatgcacccaaggagccctgagccactgctttgccctggtttccagcgacaggttctggcctccttggtcccatgcttggagctgctgcacctagactctaaggggcaggggtgagagagaccagagcacctgcctgagcaagtaggtgtggaccaacaggctgcccccaacaaaggggcctataatgcaataacagtttatttgagggctactttcttagccctctcaatctttaaaatacaaaaaaatagactttattctcttaaaaatacattccattcagtatatgttctgagctgggaagcagcaggaaaatagggcccctttcctatgatcctatggttgtgaggctttgaggagaaccctgctccccactcggggtattcaaaaaataatccctaaaagcagctctttccaaagcaatcttgtcagagaaataacaaaacctcataacaaggtagccagggacccagcctctgggtccccattcctttattgggaagtggtagcacttggcactgacccactaaatataaagaactaaaactgccccaggacgacaagtccaagaacactatagtgccccctgcatcccgaacactccactgacgggggttatttatgtgcaagcttgcctacagctgagggtggggtggcatccttggccccactgcagatccctttaacccacactgtgactctttctcattgccacccaaaagcaaaaaacagccacagcttctttatccacctgcagctttctctggtttagtatcagagtggcaaaaaaagcagcagcacgtggaagagatcagctgctggtactaagccagcttcacttcctccaaccaagcagctctattgccaggtcccccaactcactaggaaccctccaacaaccatacacctgccagtaaaatttaagagccaagctgcggaagaaaactgtcataaaagtgggtttgttgaccgggggcagtgggactatttggcttgattaaacaactattcaactaccaggtctcccctctacttggaggcttcctccaggacccctgatgatgaggcctgggtccaaacagtcacacctcagttgcttttcagaaacatgcctcccaactttgggatttgagagccagccttgccagccatttgaagcccagagaaacagcctccagcctttacttgctattacaatgttattttctgcaatgctgaggacacttaaaaataaaatctatctagaaagtgtgcagattaaagaaacaaaatatcctgaaataactgttacaagcaaatcctattgcactcagatttcaagatggcagccccagcaaaagggcatcacagctgtccctcttcaacaggacattttgagtagcagcagatgttggtgctgctgaaatgtggaaagatccagactttggcaccaggagctatagcaccagaatccagggctccaacactcaaagacaagaattattggcgagatctttttaggcatggcttggcgcccttctgtttccatcagcagagaagagccacagacttagtttcctaatacctttagttgaccaccacagaggttgattttctttgaactctcaaggttgccaaccagtgaaggagaatggcagggaggctgcaagtgaaggatggcagccttgagtgagctagtttctggccagtaagccaggagaagcagcagtaagagatcttggaaatagcatcttgagcatcagaggtggggatgtggacaggaaaggcaggccacatgacaatgcctttagattggcaaaactctgggaagcagaagtatgagcaatagattcctgtccctgaaagtaaggtaggtgctccccaagccncctcactgccaaatctgatacagacaaggtcaggatgaacactggttcccatgctgagtgaaggcagagaagacaaattcctctggaggaagtcttgagtcttcctcttgccaggaaattcataggagatgcacaggaacaggagatacacagacttgggtactttccataatacctagactcctagaacgccaggagatactgtgtggcactgggcaaggctgatgccacaaagagcctcagagaccatcccatctaatcccttcacactttgca

SEQ ID NO: 380605 - DNA, 2400 bp, Homo sapiens
tgtcccggcgcggcgggagcgcgcttggcgcgtgcgtacgcgacggcggttggcggcgcgcgggcagcgtgaagcgaggcgaggcaaggcttttcggacccacggagcgacagagcgagcggcccctacggccgtcggcggcccggcggcccgagatgttatctgggaagaaggcggcagccgcggcggcggcggctgcagcggcagcaaccgggacggaggctggccctgggacagcaggcggctccgagaacgggtctgaggtggccgcgcagcccgcgggcctgtcgggcccagccgaggtcgggccgggggcggtgggggagcgcacaccccgcaagaaagagcctccgcgggcctcgccccccgggggcctggcggaaccgccggggtccgcagggcctcaggccggccctactgtcgtgcctgggtctgcgacccccatggaaactggaatagcagagactccggaggggcgtcggaccagccggcgcaagcgggcgaaggtagagtacagagagatggatgaaagcttggccaacctctcagaagatgagtattattcagaagaagagagaaatgccaaagcagagaaggaaaagaagcttcccccaccaccccctcaagccccacctgaggaagaaaatgaaagtgagcctgaagaaccatcgggtgtggagggcgcagctttccagagccgacttcctcatgaccggatgacttctcaagaagcagcctgttttccagatattatcagtggaccacaacagacccagaaggtttttcttttcattagaaaccgcacactgcagttgtggttggataatccaaagattcagctgacatttgaggctactctccaacaattagaagcaccttataacagtgatactgtgcttgtccaccgagttcacagttatttagagcgtcatggtcttatcaacttcggcatctataagaggataaaacccctaccaactaaaaagacaggaaaggtaattattataggctctggggtctcaggcttggcagcagctcgacagttacaaagttttggaatggatgtcacacttttggaagccaggatcgtgtgggtggacgagttgccacatttcgcaaaggaaactatgtagctgatcttggagccatggtggtaacaggtcttggagggaatcctatggctgtggtcagcaaacaagtaaatatggaactggccaagatcaagcaaaaatgcccactttatgaagccaacggacaagctgttcctaaagagaaagatgaaatggtagagcaagagtttaaccggttgctagaagctacatcttaccttagtcatcaactagacttcaatgtcctcaataataagcctgtgtcccttggccaggcattggaagttgtcattcagttacaagagaagcatgtcaaagatgagcagattgaacattggaagaagatagtgaaaactcaggaagaattgaaagaacttcttaataagatggtaaatttgaaagagaaaattaaagaactccatcagcaatacaaagaagcatctgaagtaaagccacccagagatattactgccgagttcttagtgaaaagcaaacacagggatctgaccgccctatgcaaggaatatgatgaattagctgaaacacaaggaaagctagaagaaaaacttcaggagttggaagcgaatcccccaagtgatgtatatctctcatcaagagacagacaaatacttgattggcattttgcaaatcttgaatttgctaatgccacacctctctcaactctctcccttaagcactgggatcaggatgatgactttgagttcactggcagccacctgacagtaaggaatggctactcgtgtgtgcctgtggctttagcagaaggcctagacattaaactgaatacagcagtgcgacaggttcgctacacggcttcaggatgtgaagtgatagctgtgaatacccgctccacgagtcaaacctttatttataaatgcgacgcagttctctgtacccttcccctgggtgtgctgaagcagcagccaccagccgttcagtttgtgccacctctccctgagtggaaaacatctgcagtccaaaggatgggatttggcaaccttaacaaggtggtgttgtgttttgatcgggtgttctgggatccaagtgtcaatttgttcgggcatgttggcagtacgactgccagcaggggtgagctcttcctcttctggaacctctataaagctccaatactgttggcactagtggcaggagaagctgctggtatcatggaaaacataagtgacacttggatcccagaacacccgatcaaaacacaacaccaccttgtaaggttgccaaatcccatcctttggactgcagatgtttggta

SEQ ID NO: 380606 - DNA, 4767 bp, Homo sapiens
  misc_feature (4491)..(4491): n is a, c, g, or t
tcagattttagtcattccatcttcggaccctttcagataaccaagagcagagttaaaaggatgggcagcatttctgatttctcataatttggttttgtaaatctaggcagtctacattcagaatggaggagtccagagtataagtcaaataacatttttccttattcaggttttctccctaaaaaacaaaaccatttttaattgcacttccattttgtaatggctcataggattgctgtaaggtctcaattactaggggcttccagggcatttctgagaaataaccctgggtccttgtctagacccttatgccagaccccactccaaagagcggtaagaattccttagtgtcatagcccagacctgctgagctgcgaggcttaagtgtccctgatcaccaaatgtcctgtgcttcagggtagcgaggctccctcccagaaggtagttatacatgagggaaggacgctttacaactgggtatctaaactgatgagaacacatgttaagcatcactttaggactgagcctaggtagagttttattgtctcatttctacttgtcaattctgggaaagtgcctactgataagggagactcttcgatagaatgatgaatagtaattgggggggtcagcctttaaaaaggtcaacagcaatttaagtacttagcaatttaagtacaagaataaaggtatatgtgcagcctgccaattttctctttttcccctaaaatagccgattccacgactcttctttgcgggagaacatacgatccgtaactacccagccacagtgcatggtgctctgctgagtgggctgcgagaagcgggaagaattgcagaccagtttttgggggccatgtatacgctgcctcgccaggccacaccaggtgttcctgcacagcagtccccaagcatgtgagacagatgcattctaagggaagaggcccatgtgcctgtttctgccatgtaaggaaggctcttctagcaatactagatcccactgagaaaatccaccctggcatctgggctcctgatcagctgatggagctcctgatttgacaaaggagcttgcctcctttgaatgacctagagcacagggaggaacttgtccattagtttggaattgtgttcttcgtaaagactgaggcaagcaagtgctgtgaaataacatcatcttagtcccttggtgtgtggggtttgttttttttttttatattttgagaataaaacttcatataaaattggccctctcttttgttcctttgagttggagttacatacaagatgggggcattactcctttggaaatgccaagtttatcctatggcaatagtaatacatgttttctccatgtttaaataaggaagaagatgttcatataaaagagaaaaatggtttgatcaggtcagaagataaggtaggggggccggtcctgtagaagcagtggacttcctggtcagtcggactaggcttcctcacttgggtgggggtggagtgtggtggtgtgccaagaacatggttattaggaaactttggatgcactttcaagatagaacacaaaagagctgaaacaaagtctgagcctttgggagaccagtctgcctttattcctgattccctccatgggtatgtgctaaaacttcccaattctactaaaggtggtggtgtacattttgggaagcgcactacataggatcaagggcttaggtaacagctggtttaacagattgccacaaacttagtggctcttaaaaaaacagaaatctattcgaaagttctggatgcttaaagtctaaaatgggtccacagggctgcattcattacagaggctctcagagcagggaggatcagttcatttccttgctcttttcagcttctaggtgtgggaaggctcgtggctccttcctccatcctcagagcacataactccagtttctgcttccatcatcacattgccttctcctgtagtcaaatcttttgtctctctcttaaaaggatactacctgtgattacatttaaggcccacctggatcatctaggatgttctgcctcatcccagcatccttatctgcaaagtcccttttgccatataagatgataaaaacatgttacatgctggttccttcccaggggctcctgactgactgacagatagatgataaacactgttactgcaaatccaagtaatgtcccttaaatgtggttttattctttcttactgtgagttaagggacatcattatatatattggtgatctgactggaagatgaaaacggagaaggcttttcccccccctagtcttagaattcgtggcagtaatggaaagaatctgcacaccaggatcagggcagttaatgtttccagtccttgcagtatcagtaattggttaggtaaaatacccaattttaagtattacacaatgaaataaataaatatactagagctgcgccaacgcatagaagacagatgatacacagggatgacattgacaaaactggcatcacagactcgcacagagtatacggaaacgagggagctttattggttacatattgtactgcagagccaacagagagcattcgcgccagaggatacatgcagacaggcagctccaatgatacacatgcacccaaggagccctgagccactgctttgccctggtttccagcgacaggttctggcctccttggtcccatgcttggagctgctgcacctagactctaaggggcaggggtgagagagaccagagcacctgcctgagcaagtaggtgtggaccaacaggctgcccccaacaaaggggcctataatgcaataacagtttatttgagggctactttcttagccctctcaatctttaaaatacaaaaaaatagactttattctcttaaaaatacattccattcagtatatgttctgagctgggaagcagcaggaaaatagggcccctttcctatgatcctatggttgtgaggctttgaggagaaccctgctccccactcggggtattcaaaaaataatccctaaaagcagctctttccaaagcaatcttgtcagagaaataacaaaacctcataacaaggtagccagggacccagcctctgggtccccattcctttattgggaagtggtagcacttggcactgacccactaaatataaagaactaaaactgccccaggacgacaagtccaagaacactatagtgccccctgcatcccgaacactccactgacgggggttatttatgtgcaagcttgcctacagctgagggtggggtggcatccttggccccactgcagatccctttaacccacactgtgactctttctcattgccacccaaaagcaaaaaacagccacagcttctttatccacctgcagctttctctggtttagtatcagagtggcaaaaaaagcagcagcacgtggaagagatcagctgctggtactaagccagcttcacttcctccaaccaagcagctctattgccaggtcccccaactcactaggaaccctccaacaaccatacacctgccagtaaaatttaagagccaagctgcggaagaaaactgtcataaaagtgggtttgttgaccgggggcagtgggactatttggcttgattaaacaactattcaactaccaggtctcccctctacttggaggcttcctccaggacccctgatgatgaggcctgggtccaaacagtcacacctcagttgcttttcagaaacatgcctcccaactttgggatttgagagccagccttgccagccatttgaagcccagagaaacagcctccagcctttacttgctattacaatgttattttctgcaatgctgaggacacttaaaaataaaatctatctagaaagtgtgcagattaaagaaacaaaatatcctgaaataactgttacaagcaaatcctattgcactcagatttcaagatggcagccccagcaaaagggcatcacagctgtccctcttcaacaggacattttgagtagcagcagatgttggtgctgctgaaatgtggaaagatccagactttggcaccaggagctatagcaccagaatccagggctccaacactcaaagacaagaattattggcgagatctttttaggcatggcttggcgcccttctgtttccatcagcagagaagagccacagacttagtttcctaatacctttagttgaccaccacagaggttgattttctttgaactctcaaggttgccaaccagtgaaggagaatggcagggaggctgcaagtgaaggatggcagccttgagtgagctagtttctggccagtaagccaggagaagcagcagtaagagatcttggaaatagcatcttgagcatcagaggtggggatgtggacaggaaaggcaggccacatgacaatgcctttagattggcaaaactctgggaagcagaagtatgagcaatagattcctgtccctgaaagtaaggtaggtgctccccaagccncctcactgccaaatctgatacagacaaggtcaggatgaacactggttcccatgctgagtgaaggcagagaagacaaattcctctggaggaagtcttgagtcttcctcttgccaggaaattcataggagatgcacaggaacaggagatacacagacttgggtactttccataatacctagactcctagaacgccaggagatactgtgtggcactgggcaaggctgatgccacaaagagcctcagagaccatcccatctaatcccttcacactttgca

SEQ ID NO: 380607 - DNA, 2191 bp, Homo sapiens
tgtcccggcgcggcgggagcgcgcttggcgcgtgcgtacgcgacggcggttggcggcgcgcgggcagcgtgaagcgaggcgaggcaaggcttttcggacccacggagcgacagagcgagcggcccctacggccgtcggcggcccggcggcccgagatgttatctgggaagaaggcggcagccgcggcggcggcggctgcagcggcagcaaccgggacggaggctggccctgggacagcaggcggctccgagaacgggtctgaggtggccgcgcagcccgcgggcctgtcgggcccagccgaggtcgggccgggggcggtgggggagcgcacaccccgcaagaaagagcctccgcgggcctcgccccccgggggcctggcggaaccgccggggtccgcagggcctcaggccggccctactgtcgtgcctgggtctgcgacccccatggaaactggaatagcagagactccggaggggcgtcggaccagccggcgcaagcgggcgaaggtagagtacagagagatggatgaaagcttggccaacctctcagaagatgagtattattcagaagaagagagaaatgccaaagcagagaaggaaaagaagcttcccccaccaccccctcaagccccacctgaggaagaaaatgaaagtgagcctgaagaaccatcgggtgtggagggcgcagctttccagagccgacttcctcatgaccggatgacttctcaagaagcagcctgttttccagatattatcagtggaccacaacagacccagaaggtttttcttttcattagaaaccgcacactgcagttgtggttggataatccaaagattcagctgacatttgaggctactctccaacaattagaagcaccttataacagtgatactgtgcttgtccaccgagttcacagttatttagagcgtcatggtcttatcaacttcggcatctataagaggataaaacccctaccaactaaaaagacaggaaaggtaattattataggctctggggtctcaggcttggcagcagctcgacagttacaaagttttggaatggatgtcacacttttggaagccaggatcgtgtgggtggacgagttgccacatttcgcaaaggaaactatgtagctgatcttggagccatggtggtaacaggtcttggagggaatcctatggctgtggtcagcaaacaagtaaatatggaactggccaagatcaagcaaaaatgcccactttatgaagccaacggacaagctgttcctaaagagaaagatgaaatggtagagcaagagtttaaccggttgctagaagctacatcttaccttagtcatcaactagacttcaatgtcctcaataataagcctgtgtcccttggccaggcattggaagttgtcattcagttacaagagaagcatgtcaaagatgagcagattgaacattggaagaagatagtgaaaactcaggaagaattgaaagaacttcttaataagatggtaaatttgaaagagaaaattaaagaactccatcagcaatacaaagaagcatctgaagtaaagccacccagagatattactgccgagttcttagtgaaaagcaaacacagggatctgaccgccctatgcaaggaatatgatgaattagctgaaacacaaggaaagctagaagaaaaacttcaggagttggaagcgaatcccccaagtgatgtatatctctcatcaagagacagacaaatacttgattggcattttgcaaatcttgaatttgctaatgccacacctctctcaactctctcccttaagcactgggatcaggatgatgactttgagttcactggcagccacctgacagtaaggaatggctactcgtgtgtgcctgtggctttagcagaaggcctagacattaaactgaatacagcagtgcgacaggttcgctacacggcttcaggatgtgaagtgatagctgtgaatacccgctccacgagtcaaacctttatttataaatgcgacgcagttctctgtacccttcccctgggtgtgctgaagcagcagccaccagccgttcagtttgtgccacctctccctgagtggaaaacatctgcagtccaaaggatgggatttggcaaccttaacaagggtgtggtttgacggtgcttggaccaggcattgtcgctgtgcagacatgcacag

SEQ ID NO: 380608 - DNA, 4149 bp, Homo sapiens
  misc_feature (3873)..(3873): n is a, c, g, or t
atgtgtggtgttctagaggatcccatcgtgcaggtagaggcttactagaagtgtgaaaacgtaggctggattaaggcgacaggatttctaggatagtcagtagaattagaatggtgaagatgataagtgtagagggaaggttaagggttgatattgctagggtggcgcttccaattatggtgctctgctgagtgggctgcgagaagcgggaagaattgcagaccagtttttgggggccatgtatacgctgcctcgccaggccacaccaggtgttcctgcacagcagtccccaagcatgtgagacagatgcattctaagggaagaggcccatgtgcctgtttctgccatgtaaggaaggctcttctagcaatactagatcccactgagaaaatccaccctggcatctgggctcctgatcagctgatggagctcctgatttgacaaaggagcttgcctcctttgaatgacctagagcacagggaggaacttgtccattagtttggaattgtgttcttcgtaaagactgaggcaagcaagtgctgtgaaataacatcatcttagtcccttggtgtgtggggtttgttttttttttttatattttgagaataaaacttcatataaaattggccctctcttttgttcctttgagttggagttacatacaagatgggggcattactcctttggaaatgccaagtttatcctatggcaatagtaatacatgttttctccatgtttaaataaggaagaagatgttcatataaaagagaaaaatggtttgatcaggtcagaagataaggtaggggggccggtcctgtagaagcagtggacttcctggtcagtcggactaggcttcctcacttgggtgggggtggagtgtggtggtgtgccaagaacatggttattaggaaactttggatgcactttcaagatagaacacaaaagagctgaaacaaagtctgagcctttgggagaccagtctgcctttattcctgattccctccatgggtatgtgctaaaacttcccaattctactaaaggtggtggtgtacattttgggaagcgcactacataggatcaagggcttaggtaacagctggtttaacagattgccacaaacttagtggctcttaaaaaaacagaaatctattcgaaagttctggatgcttaaagtctaaaatgggtccacagggctgcattcattacagaggctctcagagcagggaggatcagttcatttccttgctcttttcagcttctaggtgtgggaaggctcgtggctccttcctccatcctcagagcacataactccagtttctgcttccatcatcacattgccttctcctgtagtcaaatcttttgtctctctcttaaaaggatactacctgtgattacatttaaggcccacctggatcatctaggatgttctgcctcatcccagcatccttatctgcaaagtcccttttgccatataagatgataaaaacatgttacatgctggttccttcccaggggctcctgactgactgacagatagatgataaacactgttactgcaaatccaagtaatgtcccttaaatgtggttttattctttcttactgtgagttaagggacatcattatatatattggtgatctgactggaagatgaaaacggagaaggcttttcccccccctagtcttagaattcgtggcagtaatggaaagaatctgcacaccaggatcagggcagttaatgtttccagtccttgcagtatcagtaattggttaggtaaaatacccaattttaagtattacacaatgaaataaataaatatactagagctgcgccaacgcatagaagacagatgatacacagggatgacattgacaaaactggcatcacagactcgcacagagtatacggaaacgagggagctttattggttacatattgtactgcagagccaacagagagcattcgcgccagaggatacatgcagacaggcagctccaatgatacacatgcacccaaggagccctgagccactgctttgccctggtttccagcgacaggttctggcctccttggtcccatgcttggagctgctgcacctagactctaaggggcaggggtgagagagaccagagcacctgcctgagcaagtaggtgtggaccaacaggctgcccccaacaaaggggcctataatgcaataacagtttatttgagggctactttcttagccctctcaatctttaaaatacaaaaaaatagactttattctcttaaaaatacattccattcagtatatgttctgagctgggaagcagcaggaaaatagggcccctttcctatgatcctatggttgtgaggctttgaggagaaccctgctccccactcggggtattcaaaaaataatccctaaaagcagctctttccaaagcaatcttgtcagagaaataacaaaacctcataacaaggtagccagggacccagcctctgggtccccattcctttattgggaagtggtagcacttggcactgacccactaaatataaagaactaaaactgccccaggacgacaagtccaagaacactatagtgccccctgcatcccgaacactccactgacgggggttatttatgtgcaagcttgcctacagctgagggtggggtggcatccttggccccactgcagatccctttaacccacactgtgactctttctcattgccacccaaaagcaaaaaacagccacagcttctttatccacctgcagctttctctggtttagtatcagagtggcaaaaaaagcagcagcacgtggaagagatcagctgctggtactaagccagcttcacttcctccaaccaagcagctctattgccaggtcccccaactcactaggaaccctccaacaaccatacacctgccagtaaaatttaagagccaagctgcggaagaaaactgtcataaaagtgggtttgttgaccgggggcagtgggactatttggcttgattaaacaactattcaactaccaggtctcccctctacttggaggcttcctccaggacccctgatgatgaggcctgggtccaaacagtcacacctcagttgcttttcagaaacatgcctcccaactttgggatttgagagccagccttgccagccatttgaagcccagagaaacagcctccagcctttacttgctattacaatgttattttctgcaatgctgaggacacttaaaaataaaatctatctagaaagtgtgcagattaaagaaacaaaatatcctgaaataactgttacaagcaaatcctattgcactcagatttcaagatggcagccccagcaaaagggcatcacagctgtccctcttcaacaggacattttgagtagcagcagatgttggtgctgctgaaatgtggaaagatccagactttggcaccaggagctatagcaccagaatccagggctccaacactcaaagacaagaattattggcgagatctttttaggcatggcttggcgcccttctgtttccatcagcagagaagagccacagacttagtttcctaatacctttagttgaccaccacagaggttgattttctttgaactctcaaggttgccaaccagtgaaggagaatggcagggaggctgcaagtgaaggatggcagccttgagtgagctagtttctggccagtaagccaggagaagcagcagtaagagatcttggaaatagcatcttgagcatcagaggtggggatgtggacaggaaaggcaggccacatgacaatgcctttagattggcaaaactctgggaagcagaagtatgagcaatagattcctgtccctgaaagtaaggtaggtgctccccaagccncctcactgccaaatctgatacagacaaggtcaggatgaacactggttcccatgctgagtgaaggcagagaagacaaattcctctggaggaagtcttgagtcttcctcttgccaggaaattcataggagatgcacaggaacaggagatacacagacttgggtactttccataatacctagactcctagaacgccaggagatactgtgtggcactgggcaaggctgatgccacaaagagcctcagagaccatcccatctaatcccttcacactttgca

SEQ ID NO: 380609 - DNA, 1235 bp, Homo sapiens
tgtcccggcgcggcgggagcgcgcttggcgcgtgcgtacgcgacggcggttggcggcgcgcgggcagcgtgaagcgaggcgaggcaaggcttttcggacccacggagcgacagagcgagcggcccctacggccgtcggcggcccggcggcccgagatgttatctgggaagaaggcggcagccgcggcggcggcggctgcagcggcagcaaccgggacggaggctggccctgggacagcaggcggctccgagaacgggtctgaggtggccgcgcagcccgcgggcctgtcgggcccagccgaggtcgggccgggggcggtgggggagcgcacaccccgcaagaaagagcctccgcgggcctcgccccccgggggcctggcggaaccgccggggtccgcagggcctcaggccggccctactgtcgtgcctgggtctgcgacccccatggaaactggaatagcagagactccggaggggcgtcggaccagccggcgcaagcgggcgaaggtagagtacagagagatggatgaaagcttggccaacctctcagaagatgagtattattcagaagaagagagaaatgccaaagcagagaaggaaaagaagcttcccccaccaccccctcaagccccacctgaggaagaaaatgaaagtgagcctgaagaaccatcgggtgtggagggcgcagctttccagagccgacttcctcatgaccggatgacttctcaagaagcagcctgttttccagatattatcagtggaccacaacagacccagaaggtttttcttttcattagaaaccgcacactgcagttgtggttggataatccaaagattcagctgacatttgaggctactctccaacaattagaagcaccttataacagtgatactgtgcttgtccaccgagttcacagttatttagagcgtcatggtcttatcaacttcggcatctataagaggataaaacccctaccaagtaaggacctcctacctggctgataaattttacatttttaagttacggtttcaggactgtattttatatctatgatgacgttaggattttattttgattcataagactatatttaaaaatatttccaagtttatcttcttaaagtcaagttaaatataataaataaataataaaaaatatagtctcttaataaatgtgcatttcccttaatttctagtttgatagctacttagtaaaagatactggatttccaattt

SEQ ID NO: 380610 - DNA, 734 bp, Homo sapiens
gagagcctttctccgtaagatctgatatttggataaagatgtaatagatggaaattatctttcttgagagggtagaagttgctgttgctttacacttccataattttggaaactagcggggtattatactttatttccactgggtttttgacagtgaatgctggtgaaatgttttcacttgcgtccagcctccacataaatctgttctgttcgtgtattcaagaatgcccccaactgtaacttgtctccaaaaacaaaaatctctcagctctatctaaccccagcctaaaattgagccacacttcctgtacatgatctgaagaggaaatatgatccagaccttatactttgtggtacaaagaaactaggtggatatctgacccttcagggtaactcaggttcacttaatttttatcaggaatatgatgaattagctgaaacacaaggaaagctagaagaaaaacttcaggagttggaagcgaatcccccaaggtaaggaaaacaaacacaaaagttcagagggagagcttttactgttctttcagcttgatttggaaggaaaattctaaatcataatgagcttttatttatgttcagtgagtggtttaaattgttaaataaatgaatgtgtgactacttttgaggtttctaaatcccctgctcctgtattttaatgtgtcctagatacctaaacagattgtttctaaagagagagcctttctccgtaagatctg

SEQ ID NO: 380611 - DNA, 347 bp, Homo sapiens
agagacagggtcttgctgtgtttcccaggctggtcttgaactcctggcctcaagtgatcctatcacttcagtctcccaaagccactaagattgtgtgcatcagccaccgtgcccagccttagaattacttttttaaaggagtcacatgacttgaagcttaatggttttaaggacttcatgatggagaaatggaagagttagaagaatattgtttaaactgctgaaaataaaaccgtgtttttaatccacttattctgtaggtgatactgtgcttgtccaccgagttcacagttatttagagcgtcatggtcttatcaacttcggcatctataagaggataaaacccc

SEQ ID NO: 380612 - DNA, 356 bp, Homo sapiens
ttcagagcaccaggaataaggtggggcctgataaggaagtttttgaggaaagtctgtaggaaaaccctagaattatcctttctgtttccccagctccaatactgttggcactagtggcaggagaagctgctggtatcatggaaaacataagtgacgatgtgattgttggccgatgcctggccattctcaaagggatttttggtagcagtgcagtacctcaggtaagtaggtaggtggggcaaggagggatctagggttcagactcaaccagggtttaatgtatttgcagcatgttcttggtcaggacagtttaagctagaattgaggtctgtgcttttacatgaataattaatgtt

SEQ ID NO: 380613 - DNA, 6621 bp, Homo sapiens
  misc_feature (6345)..(6345): n is a, c, g, or t
tgtcccggcgcggcgggagcgcgcttggcgcgtgcgtacgcgacggcggttggcggcgcgcgggcagcgtgaagcgaggcgaggcaaggcttttcggacccacggagcgacagagcgagcggcccctacggccgtcggcggcccggcggcccgagatgttatctgggaagaaggcggcagccgcggcggcggcggctgcagcggcagcaaccgggacggaggctggccctgggacagcaggcggctccgagaacgggtctgaggtggccgcgcagcccgcgggcctgtcgggcccagccgaggtcgggccgggggcggtgggggagcgcacaccccgcaagaaagagcctccgcgggcctcgccccccgggggcctggcggaaccgccggggtccgcagggcctcaggccggccctactgtcgtgcctgggtctgcgacccccatggaaactggaatagcagagactccggaggggcgtcggaccagccggcgcaagcgggcgaaggtagagtacagagagatggatgaaagcttggccaacctctcagaagatgagtattattcagaagaagagagaaatgccaaagcagagaaggaaaagaagcttcccccaccaccccctcaagccccacctgaggaagaaaatgaaagtgagcctgaagaaccatcggggcaagcaggaggacttcaagacgacagttctggagggtatggagacggccaagcatcaggtgtggagggcgcagctttccagagccgacttcctcatgaccggatgacttctcaagaagcagcctgttttccagatattatcagtggaccacaacagacccagaaggtttttcttttcattagaaaccgcacactgcagttgtggttggataatccaaagattcagctgacatttgaggctactctccaacaattagaagcaccttataacagtgatactgtgcttgtccaccgagttcacagttatttagagcgtcatggtcttatcaacttcggcatctataagaggataaaacccctaccaactaaaaagacaggaaaggtaattattataggctctggggtctcaggcttggcagcagctcgacagttacaaagttttggaatggatgtcacacttttggaagccaggatcgtgtgggtggacgagttgccacatttcgcaaaggaaactatgtagctgatcttggagccatggtggtaacaggtcttggagggaatcctatggctgtggtcagcaaacaagtaaatatggaactggccaagatcaagcaaaaatgcccactttatgaagccaacggacaagctgttcctaaagagaaagatgaaatggtagagcaagagtttaaccggttgctagaagctacatcttaccttagtcatcaactagacttcaatgtcctcaataataagcctgtgtcccttggccaggcattggaagttgtcattcagttacaagagaagcatgtcaaagatgagcagattgaacattggaagaagatagtgaaaactcaggaagaattgaaagaacttcttaataagatggtaaatttgaaagagaaaattaaagaactccatcagcaatacaaagaagcatctgaagtaaagccacccagagatattactgccgagttcttagtgaaaagcaaacacagggatctgaccgccctatgcaaggaatatgatgaattagctgaaacacaaggaaagctagaagaaaaacttcaggagttggaagcgaatcccccaagtgatgtatatctctcatcaagagacagacaaatacttgattggcattttgcaaatcttgaatttgctaatgccacacctctctcaactctctcccttaagcactgggatcaggatgatgactttgagttcactggcagccacctgacagtaaggaatggctactcgtgtgtgcctgtggctttagcagaaggcctagacattaaactgaatacagcagtgcgacaggttcgctacacggcttcaggatgtgaagtgatagctgtgaatacccgctccacgagtcaaacctttatttataaatgcgacgcagttctctgtacccttcccctgggtgtgctgaagcagcagccaccagccgttcagtttgtgccacctctccctgagtggaaaacatctgcagtccaaaggatgggatttggcaaccttaacaaggtggtgttgtgttttgatcgggtgttctgggatccaagtgtcaatttgttcgggcatgttggcagtacgactgccagcaggggtgagctcttcctcttctggaacctctataaagctccaatactgttggcactagtggcaggagaagctgctggtatcatggaaaacataagtgacgatgtgattgttggccgatgcctggccattctcaaagggatttttggtagcagtgcagtacctcagcccaaagaaactgtggtgtctcgttggcgtgctgatccctgggctcggggctcttattcctatgttgctgcaggatcatctggaaatgactatgatttaatggctcagccaatcactcctggcccctcgattccaggtgccccacagccgattccacgactcttctttgcgggagaacatacgatccgtaactacccagccacagtgcatggtgctctgctgagtgggctgcgagaagcgggaagaattgcagaccagtttttgggggccatgtatacgctgcctcgccaggccacaccaggtgttcctgcacagcagtccccaagcatgtgagacagatgcattctaagggaagaggcccatgtgcctgtttctgccatgtaaggaaggctcttctagcaatactagatcccactgagaaaatccaccctggcatctgggctcctgatcagctgatggagctcctgatttgacaaaggagcttgcctcctttgaatgacctagagcacagggaggaacttgtccattagtttggaattgtgttcttcgtaaagactgaggcaagcaagtgctgtgaaataacatcatcttagtcccttggtgtgtggggtttgttttttttttttatattttgagaataaaacttcatataaaattggccctctcttttgttcctttgagttggagttacatacaagatgggggcattactcctttggaaatgccaagtttatcctatggcaatagtaatacatgttttctccatgtttaaataaggaagaagatgttcatataaaagagaaaaatggtttgatcaggtcagaagataaggtaggggggccggtcctgtagaagcagtggacttcctggtcagtcggactaggcttcctcacttgggtgggggtggagtgtggtggtgtgccaagaacatggttattaggaaactttggatgcactttcaagatagaacacaaaagagctgaaacaaagtctgagcctttgggagaccagtctgcctttattcctgattccctccatgggtatgtgctaaaacttcccaattctactaaaggtggtggtgtacattttgggaagcgcactacataggatcaagggcttaggtaacagctggtttaacagattgccacaaacttagtggctcttaaaaaaacagaaatctattcgaaagttctggatgcttaaagtctaaaatgggtccacagggctgcattcattacagaggctctcagagcagggaggatcagttcatttccttgctcttttcagcttctaggtgtgggaaggctcgtggctccttcctccatcctcagagcacataactccagtttctgcttccatcatcacattgccttctcctgtagtcaaatcttttgtctctctcttaaaaggatactacctgtgattacatttaaggcccacctggatcatctaggatgttctgcctcatcccagcatccttatctgcaaagtcccttttgccatataagatgataaaaacatgttacatgctggttccttcccaggggctcctgactgactgacagatagatgataaacactgttactgcaaatccaagtaatgtcccttaaatgtggttttattctttcttactgtgagttaagggacatcattatatatattggtgatctgactggaagatgaaaacggagaaggcttttcccccccctagtcttagaattcgtggcagtaatggaaagaatctgcacaccaggatcagggcagttaatgtttccagtccttgcagtatcagtaattggttaggtaaaatacccaattttaagtattacacaatgaaataaataaatatactagagctgcgccaacgcatagaagacagatgatacacagggatgacattgacaaaactggcatcacagactcgcacagagtatacggaaacgagggagctttattggttacatattgtactgcagagccaacagagagcattcgcgccagaggatacatgcagacaggcagctccaatgatacacatgcacccaaggagccctgagccactgctttgccctggtttccagcgacaggttctggcctccttggtcccatgcttggagctgctgcacctagactctaaggggcaggggtgagagagaccagagcacctgcctgagcaagtaggtgtggaccaacaggctgcccccaacaaaggggcctataatgcaataacagtttatttgagggctactttcttagccctctcaatctttaaaatacaaaaaaatagactttattctcttaaaaatacattccattcagtatatgttctgagctgggaagcagcaggaaaatagggcccctttcctatgatcctatggttgtgaggctttgaggagaaccctgctccccactcggggtattcaaaaaataatccctaaaagcagctctttccaaagcaatcttgtcagagaaataacaaaacctcataacaaggtagccagggacccagcctctgggtccccattcctttattgggaagtggtagcacttggcactgacccactaaatataaagaactaaaactgccccaggacgacaagtccaagaacactatagtgccccctgcatcccgaacactccactgacgggggttatttatgtgcaagcttgcctacagctgagggtggggtggcatccttggccccactgcagatccctttaacccacactgtgactctttctcattgccacccaaaagcaaaaaacagccacagcttctttatccacctgcagctttctctggtttagtatcagagtggcaaaaaaagcagcagcacgtggaagagatcagctgctggtactaagccagcttcacttcctccaaccaagcagctctattgccaggtcccccaactcactaggaaccctccaacaaccatacacctgccagtaaaatttaagagccaagctgcggaagaaaactgtcataaaagtgggtttgttgaccgggggcagtgggactatttggcttgattaaacaactattcaactaccaggtctcccctctacttggaggcttcctccaggacccctgatgatgaggcctgggtccaaacagtcacacctcagttgcttttcagaaacatgcctcccaactttgggatttgagagccagccttgccagccatttgaagcccagagaaacagcctccagcctttacttgctattacaatgttattttctgcaatgctgaggacacttaaaaataaaatctatctagaaagtgtgcagattaaagaaacaaaatatcctgaaataactgttacaagcaaatcctattgcactcagatttcaagatggcagccccagcaaaagggcatcacagctgtccctcttcaacaggacattttgagtagcagcagatgttggtgctgctgaaatgtggaaagatccagactttggcaccaggagctatagcaccagaatccagggctccaacactcaaagacaagaattattggcgagatctttttaggcatggcttggcgcccttctgtttccatcagcagagaagagccacagacttagtttcctaatacctttagttgaccaccacagaggttgattttctttgaactctcaaggttgccaaccagtgaaggagaatggcagggaggctgcaagtgaaggatggcagccttgagtgagctagtttctggccagtaagccaggagaagcagcagtaagagatcttggaaatagcatcttgagcatcagaggtggggatgtggacaggaaaggcaggccacatgacaatgcctttagattggcaaaactctgggaagcagaagtatgagcaatagattcctgtccctgaaagtaaggtaggtgctccccaagccncctcactgccaaatctgatacagacaaggtcaggatgaacactggttcccatgctgagtgaaggcagagaagacaaattcctctggaggaagtcttgagtcttcctcttgccaggaaattcataggagatgcacaggaacaggagatacacagacttgggtactttccataatacctagactcctagaacgccaggagatactgtgtggcactgggcaaggctgatgccacaaagagcctcagagaccatcccatctaatcccttcacactttgca

SEQ ID NO: 380614 - DNA, 5935 bp, Homo sapiens
  misc_feature (5659)..(5659): n is a, c, g, or t
tcactatattgcctaagctggtctcaaactcctgagctcaagtgatccacccacctcggcctcccaaagtgctgggattataggtgtgagccactgcagccagctaaaagatgattttaaagatggtcagataacatatgtctatttgtatgtaatacaatttatgtcatttaaatgcagctgcagttgtggttggataatccaaagattcagctgacatttgaggctactctccaacaattagaagcaccttataacagtgatactgtgcttgtccaccgagttcacagttatttagagcgtcatggtcttatcaacttcggcatctataagaggataaaacccctaccaactaaaaagacaggaaaggtaattattataggctctggggtctcaggcttggcagcagctcgacagttacaaagttttggaatggatgtcacacttttggaagccaggatcgtgtgggtggacgagttgccacatttcgcaaaggaaactatgtagctgatcttggagccatggtggtaacaggtcttggagggaatcctatggctgtggtcagcaaacaagtaaatatggaactggccaagatcaagcaaaaatgcccactttatgaagccaacggacaagctgttcctaaagagaaagatgaaatggtagagcaagagtttaaccggttgctagaagctacatcttaccttagtcatcaactagacttcaatgtcctcaataataagcctgtgtcccttggccaggcattggaagttgtcattcagttacaagagaagcatgtcaaagatgagcagattgaacattggaagaagatagtgaaaactcaggaagaattgaaagaacttcttaataagatggtaaatttgaaagagaaaattaaagaactccatcagcaatacaaagaagcatctgaagtaaagccacccagagatattactgccgagttcttagtgaaaagcaaacacagggatctgaccgccctatgcaaggaatatgatgaattagctgaaacacaaggaaagctagaagaaaaacttcaggagttggaagcgaatcccccaagtgatgtatatctctcatcaagagacagacaaatacttgattggcattttgcaaatcttgaatttgctaatgccacacctctctcaactctctcccttaagcactgggatcaggatgatgactttgagttcactggcagccacctgacagtaaggaatggctactcgtgtgtgcctgtggctttagcagaaggcctagacattaaactgaatacagcagtgcgacaggttcgctacacggcttcaggatgtgaagtgatagctgtgaatacccgctccacgagtcaaacctttatttataaatgcgacgcagttctctgtacccttcccctgggtgtgctgaagcagcagccaccagccgttcagtttgtgccacctctccctgagtggaaaacatctgcagtccaaaggatgggatttggcaaccttaacaaggtggtgttgtgttttgatcgggtgttctgggatccaagtgtcaatttgttcgggcatgttggcagtacgactgccagcaggggtgagctcttcctcttctggaacctctataaagctccaatactgttggcactagtggcaggagaagctgctggtatcatggaaaacataagtgacgatgtgattgttggccgatgcctggccattctcaaagggatttttggtagcagtgcagtacctcagcccaaagaaactgtggtgtctcgttggcgtgctgatccctgggctcggggctcttattcctatgttgctgcaggatcatctggaaatgactatgatttaatggctcagccaatcactcctggcccctcgattccaggtgccccacagccgattccacgactcttctttgcgggagaacatacgatccgtaactacccagccacagtgcatggtgctctgctgagtgggctgcgagaagcgggaagaattgcagaccagtttttgggggccatgtatacgctgcctcgccaggccacaccaggtgttcctgcacagcagtccccaagcatgtgagacagatgcattctaagggaagaggcccatgtgcctgtttctgccatgtaaggaaggctcttctagcaatactagatcccactgagaaaatccaccctggcatctgggctcctgatcagctgatggagctcctgatttgacaaaggagcttgcctcctttgaatgacctagagcacagggaggaacttgtccattagtttggaattgtgttcttcgtaaagactgaggcaagcaagtgctgtgaaataacatcatcttagtcccttggtgtgtggggtttgttttttttttttatattttgagaataaaacttcatataaaattggccctctcttttgttcctttgagttggagttacatacaagatgggggcattactcctttggaaatgccaagtttatcctatggcaatagtaatacatgttttctccatgtttaaataaggaagaagatgttcatataaaagagaaaaatggtttgatcaggtcagaagataaggtaggggggccggtcctgtagaagcagtggacttcctggtcagtcggactaggcttcctcacttgggtgggggtggagtgtggtggtgtgccaagaacatggttattaggaaactttggatgcactttcaagatagaacacaaaagagctgaaacaaagtctgagcctttgggagaccagtctgcctttattcctgattccctccatgggtatgtgctaaaacttcccaattctactaaaggtggtggtgtacattttgggaagcgcactacataggatcaagggcttaggtaacagctggtttaacagattgccacaaacttagtggctcttaaaaaaacagaaatctattcgaaagttctggatgcttaaagtctaaaatgggtccacagggctgcattcattacagaggctctcagagcagggaggatcagttcatttccttgctcttttcagcttctaggtgtgggaaggctcgtggctccttcctccatcctcagagcacataactccagtttctgcttccatcatcacattgccttctcctgtagtcaaatcttttgtctctctcttaaaaggatactacctgtgattacatttaaggcccacctggatcatctaggatgttctgcctcatcccagcatccttatctgcaaagtcccttttgccatataagatgataaaaacatgttacatgctggttccttcccaggggctcctgactgactgacagatagatgataaacactgttactgcaaatccaagtaatgtcccttaaatgtggttttattctttcttactgtgagttaagggacatcattatatatattggtgatctgactggaagatgaaaacggagaaggcttttcccccccctagtcttagaattcgtggcagtaatggaaagaatctgcacaccaggatcagggcagttaatgtttccagtccttgcagtatcagtaattggttaggtaaaatacccaattttaagtattacacaatgaaataaataaatatactagagctgcgccaacgcatagaagacagatgatacacagggatgacattgacaaaactggcatcacagactcgcacagagtatacggaaacgagggagctttattggttacatattgtactgcagagccaacagagagcattcgcgccagaggatacatgcagacaggcagctccaatgatacacatgcacccaaggagccctgagccactgctttgccctggtttccagcgacaggttctggcctccttggtcccatgcttggagctgctgcacctagactctaaggggcaggggtgagagagaccagagcacctgcctgagcaagtaggtgtggaccaacaggctgcccccaacaaaggggcctataatgcaataacagtttatttgagggctactttcttagccctctcaatctttaaaatacaaaaaaatagactttattctcttaaaaatacattccattcagtatatgttctgagctgggaagcagcaggaaaatagggcccctttcctatgatcctatggttgtgaggctttgaggagaaccctgctccccactcggggtattcaaaaaataatccctaaaagcagctctttccaaagcaatcttgtcagagaaataacaaaacctcataacaaggtagccagggacccagcctctgggtccccattcctttattgggaagtggtagcacttggcactgacccactaaatataaagaactaaaactgccccaggacgacaagtccaagaacactatagtgccccctgcatcccgaacactccactgacgggggttatttatgtgcaagcttgcctacagctgagggtggggtggcatccttggccccactgcagatccctttaacccacactgtgactctttctcattgccacccaaaagcaaaaaacagccacagcttctttatccacctgcagctttctctggtttagtatcagagtggcaaaaaaagcagcagcacgtggaagagatcagctgctggtactaagccagcttcacttcctccaaccaagcagctctattgccaggtcccccaactcactaggaaccctccaacaaccatacacctgccagtaaaatttaagagccaagctgcggaagaaaactgtcataaaagtgggtttgttgaccgggggcagtgggactatttggcttgattaaacaactattcaactaccaggtctcccctctacttggaggcttcctccaggacccctgatgatgaggcctgggtccaaacagtcacacctcagttgcttttcagaaacatgcctcccaactttgggatttgagagccagccttgccagccatttgaagcccagagaaacagcctccagcctttacttgctattacaatgttattttctgcaatgctgaggacacttaaaaataaaatctatctagaaagtgtgcagattaaagaaacaaaatatcctgaaataactgttacaagcaaatcctattgcactcagatttcaagatggcagccccagcaaaagggcatcacagctgtccctcttcaacaggacattttgagtagcagcagatgttggtgctgctgaaatgtggaaagatccagactttggcaccaggagctatagcaccagaatccagggctccaacactcaaagacaagaattattggcgagatctttttaggcatggcttggcgcccttctgtttccatcagcagagaagagccacagacttagtttcctaatacctttagttgaccaccacagaggttgattttctttgaactctcaaggttgccaaccagtgaaggagaatggcagggaggctgcaagtgaaggatggcagccttgagtgagctagtttctggccagtaagccaggagaagcagcagtaagagatcttggaaatagcatcttgagcatcagaggtggggatgtggacaggaaaggcaggccacatgacaatgcctttagattggcaaaactctgggaagcagaagtatgagcaatagattcctgtccctgaaagtaaggtaggtgctccccaagccncctcactgccaaatctgatacagacaaggtcaggatgaacactggttcccatgctgagtgaaggcagagaagacaaattcctctggaggaagtcttgagtcttcctcttgccaggaaattcataggagatgcacaggaacaggagatacacagacttgggtactttccataatacctagactcctagaacgccaggagatactgtgtggcactgggcaaggctgatgccacaaagagcctcagagaccatcccatctaatcccttcacactttgca

SEQ ID NO: 380615 - DNA, 5349 bp, Homo sapiens
  misc_feature (5073)..(5073): n is a, c, g, or t
gagagcctttctccgtaagatctgatatttggataaagatgtaatagatggaaattatctttcttgagagggtagaagttgctgttgctttacacttccataattttggaaactagcggggtattatactttatttccactgggtttttgacagtgaatgctggtgaaatgttttcacttgcgtccagcctccacataaatctgttctgttcgtgtattcaagaatgcccccaactgtaacttgtctccaaaaacaaaaatctctcagctctatctaaccccagcctaaaattgagccacacttcctgtacatgatctgaagaggaaatatgatccagaccttatactttgtggtacaaagaaactaggtggatatctgacccttcagggtaactcaggttcacttaatttttatcaggaatatgatgaattagctgaaacacaaggaaagctagaagaaaaacttcaggagttggaagcgaatcccccaagtgatgtatatctctcatcaagagacagacaaatacttgattggcattttgcaaatcttgaatttgctaatgccacacctctctcaactctctcccttaagcactgggatcaggatgatgactttgagttcactggcagccacctgacagtaaggaatggctactcgtgtgtgcctgtggctttagcagaaggcctagacattaaactgaatacagcagtgcgacaggttcgctacacggcttcaggatgtgaagtgatagctgtgaatacccgctccacgagtcaaacctttatttataaatgcgacgcagttctctgtacccttcccctgggtgtgctgaagcagcagccaccagccgttcagtttgtgccacctctccctgagtggaaaacatctgcagtccaaaggatgggatttggcaaccttaacaaggtggtgttgtgttttgatcgggtgttctgggatccaagtgtcaatttgttcgggcatgttggcagtacgactgccagcaggggtgagctcttcctcttctggaacctctataaagctccaatactgttggcactagtggcaggagaagctgctggtatcatggaaaacataagtgacgatgtgattgttggccgatgcctggccattctcaaagggatttttggtagcagtgcagtacctcagcccaaagaaactgtggtgtctcgttggcgtgctgatccctgggctcggggctcttattcctatgttgctgcaggatcatctggaaatgactatgatttaatggctcagccaatcactcctggcccctcgattccaggtgccccacagccgattccacgactcttctttgcgggagaacatacgatccgtaactacccagccacagtgcatggtgctctgctgagtgggctgcgagaagcgggaagaattgcagaccagtttttgggggccatgtatacgctgcctcgccaggccacaccaggtgttcctgcacagcagtccccaagcatgtgagacagatgcattctaagggaagaggcccatgtgcctgtttctgccatgtaaggaaggctcttctagcaatactagatcccactgagaaaatccaccctggcatctgggctcctgatcagctgatggagctcctgatttgacaaaggagcttgcctcctttgaatgacctagagcacagggaggaacttgtccattagtttggaattgtgttcttcgtaaagactgaggcaagcaagtgctgtgaaataacatcatcttagtcccttggtgtgtggggtttgttttttttttttatattttgagaataaaacttcatataaaattggccctctcttttgttcctttgagttggagttacatacaagatgggggcattactcctttggaaatgccaagtttatcctatggcaatagtaatacatgttttctccatgtttaaataaggaagaagatgttcatataaaagagaaaaatggtttgatcaggtcagaagataaggtaggggggccggtcctgtagaagcagtggacttcctggtcagtcggactaggcttcctcacttgggtgggggtggagtgtggtggtgtgccaagaacatggttattaggaaactttggatgcactttcaagatagaacacaaaagagctgaaacaaagtctgagcctttgggagaccagtctgcctttattcctgattccctccatgggtatgtgctaaaacttcccaattctactaaaggtggtggtgtacattttgggaagcgcactacataggatcaagggcttaggtaacagctggtttaacagattgccacaaacttagtggctcttaaaaaaacagaaatctattcgaaagttctggatgcttaaagtctaaaatgggtccacagggctgcattcattacagaggctctcagagcagggaggatcagttcatttccttgctcttttcagcttctaggtgtgggaaggctcgtggctccttcctccatcctcagagcacataactccagtttctgcttccatcatcacattgccttctcctgtagtcaaatcttttgtctctctcttaaaaggatactacctgtgattacatttaaggcccacctggatcatctaggatgttctgcctcatcccagcatccttatctgcaaagtcccttttgccatataagatgataaaaacatgttacatgctggttccttcccaggggctcctgactgactgacagatagatgataaacactgttactgcaaatccaagtaatgtcccttaaatgtggttttattctttcttactgtgagttaagggacatcattatatatattggtgatctgactggaagatgaaaacggagaaggcttttcccccccctagtcttagaattcgtggcagtaatggaaagaatctgcacaccaggatcagggcagttaatgtttccagtccttgcagtatcagtaattggttaggtaaaatacccaattttaagtattacacaatgaaataaataaatatactagagctgcgccaacgcatagaagacagatgatacacagggatgacattgacaaaactggcatcacagactcgcacagagtatacggaaacgagggagctttattggttacatattgtactgcagagccaacagagagcattcgcgccagaggatacatgcagacaggcagctccaatgatacacatgcacccaaggagccctgagccactgctttgccctggtttccagcgacaggttctggcctccttggtcccatgcttggagctgctgcacctagactctaaggggcaggggtgagagagaccagagcacctgcctgagcaagtaggtgtggaccaacaggctgcccccaacaaaggggcctataatgcaataacagtttatttgagggctactttcttagccctctcaatctttaaaatacaaaaaaatagactttattctcttaaaaatacattccattcagtatatgttctgagctgggaagcagcaggaaaatagggcccctttcctatgatcctatggttgtgaggctttgaggagaaccctgctccccactcggggtattcaaaaaataatccctaaaagcagctctttccaaagcaatcttgtcagagaaataacaaaacctcataacaaggtagccagggacccagcctctgggtccccattcctttattgggaagtggtagcacttggcactgacccactaaatataaagaactaaaactgccccaggacgacaagtccaagaacactatagtgccccctgcatcccgaacactccactgacgggggttatttatgtgcaagcttgcctacagctgagggtggggtggcatccttggccccactgcagatccctttaacccacactgtgactctttctcattgccacccaaaagcaaaaaacagccacagcttctttatccacctgcagctttctctggtttagtatcagagtggcaaaaaaagcagcagcacgtggaagagatcagctgctggtactaagccagcttcacttcctccaaccaagcagctctattgccaggtcccccaactcactaggaaccctccaacaaccatacacctgccagtaaaatttaagagccaagctgcggaagaaaactgtcataaaagtgggtttgttgaccgggggcagtgggactatttggcttgattaaacaactattcaactaccaggtctcccctctacttggaggcttcctccaggacccctgatgatgaggcctgggtccaaacagtcacacctcagttgcttttcagaaacatgcctcccaactttgggatttgagagccagccttgccagccatttgaagcccagagaaacagcctccagcctttacttgctattacaatgttattttctgcaatgctgaggacacttaaaaataaaatctatctagaaagtgtgcagattaaagaaacaaaatatcctgaaataactgttacaagcaaatcctattgcactcagatttcaagatggcagccccagcaaaagggcatcacagctgtccctcttcaacaggacattttgagtagcagcagatgttggtgctgctgaaatgtggaaagatccagactttggcaccaggagctatagcaccagaatccagggctccaacactcaaagacaagaattattggcgagatctttttaggcatggcttggcgcccttctgtttccatcagcagagaagagccacagacttagtttcctaatacctttagttgaccaccacagaggttgattttctttgaactctcaaggttgccaaccagtgaaggagaatggcagggaggctgcaagtgaaggatggcagccttgagtgagctagtttctggccagtaagccaggagaagcagcagtaagagatcttggaaatagcatcttgagcatcagaggtggggatgtggacaggaaaggcaggccacatgacaatgcctttagattggcaaaactctgggaagcagaagtatgagcaatagattcctgtccctgaaagtaaggtaggtgctccccaagccncctcactgccaaatctgatacagacaaggtcaggatgaacactggttcccatgctgagtgaaggcagagaagacaaattcctctggaggaagtcttgagtcttcctcttgccaggaaattcataggagatgcacaggaacaggagatacacagacttgggtactttccataatacctagactcctagaacgccaggagatactgtgtggcactgggcaaggctgatgccacaaagagcctcagagaccatcccatctaatcccttcacactttgca

SEQ ID NO: 380616 - DNA, 4376 bp, Homo sapiens
  misc_feature (4100)..(4100): n is a, c, g, or t
cggtataggctgaaggcgaactcagccaggttgggggtgatcttcctcttctggaacctctataaagctccaatactgttggcactagtggcaggagaagctgctggtatcatggaaaacataagtgacgatgtgattgttggccgatgcctggccattctcaaagggatttttggtagcagtgcagtacctcagcccaaagaaactgtggtgtctcgttggcgtgctgatccctgggctcggggctcttattcctatgttgctgcaggatcatctggaaatgactatgatttaatggctcagccaatcactcctggcccctcgattccaggtgccccacagccgattccacgactcttctttgcgggagaacatacgatccgtaactacccagccacagtgcatggtgctctgctgagtgggctgcgagaagcgggaagaattgcagaccagtttttgggggccatgtatacgctgcctcgccaggccacaccaggtgttcctgcacagcagtccccaagcatgtgagacagatgcattctaagggaagaggcccatgtgcctgtttctgccatgtaaggaaggctcttctagcaatactagatcccactgagaaaatccaccctggcatctgggctcctgatcagctgatggagctcctgatttgacaaaggagcttgcctcctttgaatgacctagagcacagggaggaacttgtccattagtttggaattgtgttcttcgtaaagactgaggcaagcaagtgctgtgaaataacatcatcttagtcccttggtgtgtggggtttgttttttttttttatattttgagaataaaacttcatataaaattggccctctcttttgttcctttgagttggagttacatacaagatgggggcattactcctttggaaatgccaagtttatcctatggcaatagtaatacatgttttctccatgtttaaataaggaagaagatgttcatataaaagagaaaaatggtttgatcaggtcagaagataaggtaggggggccggtcctgtagaagcagtggacttcctggtcagtcggactaggcttcctcacttgggtgggggtggagtgtggtggtgtgccaagaacatggttattaggaaactttggatgcactttcaagatagaacacaaaagagctgaaacaaagtctgagcctttgggagaccagtctgcctttattcctgattccctccatgggtatgtgctaaaacttcccaattctactaaaggtggtggtgtacattttgggaagcgcactacataggatcaagggcttaggtaacagctggtttaacagattgccacaaacttagtggctcttaaaaaaacagaaatctattcgaaagttctggatgcttaaagtctaaaatgggtccacagggctgcattcattacagaggctctcagagcagggaggatcagttcatttccttgctcttttcagcttctaggtgtgggaaggctcgtggctccttcctccatcctcagagcacataactccagtttctgcttccatcatcacattgccttctcctgtagtcaaatcttttgtctctctcttaaaaggatactacctgtgattacatttaaggcccacctggatcatctaggatgttctgcctcatcccagcatccttatctgcaaagtcccttttgccatataagatgataaaaacatgttacatgctggttccttcccaggggctcctgactgactgacagatagatgataaacactgttactgcaaatccaagtaatgtcccttaaatgtggttttattctttcttactgtgagttaagggacatcattatatatattggtgatctgactggaagatgaaaacggagaaggcttttcccccccctagtcttagaattcgtggcagtaatggaaagaatctgcacaccaggatcagggcagttaatgtttccagtccttgcagtatcagtaattggttaggtaaaatacccaattttaagtattacacaatgaaataaataaatatactagagctgcgccaacgcatagaagacagatgatacacagggatgacattgacaaaactggcatcacagactcgcacagagtatacggaaacgagggagctttattggttacatattgtactgcagagccaacagagagcattcgcgccagaggatacatgcagacaggcagctccaatgatacacatgcacccaaggagccctgagccactgctttgccctggtttccagcgacaggttctggcctccttggtcccatgcttggagctgctgcacctagactctaaggggcaggggtgagagagaccagagcacctgcctgagcaagtaggtgtggaccaacaggctgcccccaacaaaggggcctataatgcaataacagtttatttgagggctactttcttagccctctcaatctttaaaatacaaaaaaatagactttattctcttaaaaatacattccattcagtatatgttctgagctgggaagcagcaggaaaatagggcccctttcctatgatcctatggttgtgaggctttgaggagaaccctgctccccactcggggtattcaaaaaataatccctaaaagcagctctttccaaagcaatcttgtcagagaaataacaaaacctcataacaaggtagccagggacccagcctctgggtccccattcctttattgggaagtggtagcacttggcactgacccactaaatataaagaactaaaactgccccaggacgacaagtccaagaacactatagtgccccctgcatcccgaacactccactgacgggggttatttatgtgcaagcttgcctacagctgagggtggggtggcatccttggccccactgcagatccctttaacccacactgtgactctttctcattgccacccaaaagcaaaaaacagccacagcttctttatccacctgcagctttctctggtttagtatcagagtggcaaaaaaagcagcagcacgtggaagagatcagctgctggtactaagccagcttcacttcctccaaccaagcagctctattgccaggtcccccaactcactaggaaccctccaacaaccatacacctgccagtaaaatttaagagccaagctgcggaagaaaactgtcataaaagtgggtttgttgaccgggggcagtgggactatttggcttgattaaacaactattcaactaccaggtctcccctctacttggaggcttcctccaggacccctgatgatgaggcctgggtccaaacagtcacacctcagttgcttttcagaaacatgcctcccaactttgggatttgagagccagccttgccagccatttgaagcccagagaaacagcctccagcctttacttgctattacaatgttattttctgcaatgctgaggacacttaaaaataaaatctatctagaaagtgtgcagattaaagaaacaaaatatcctgaaataactgttacaagcaaatcctattgcactcagatttcaagatggcagccccagcaaaagggcatcacagctgtccctcttcaacaggacattttgagtagcagcagatgttggtgctgctgaaatgtggaaagatccagactttggcaccaggagctatagcaccagaatccagggctccaacactcaaagacaagaattattggcgagatctttttaggcatggcttggcgcccttctgtttccatcagcagagaagagccacagacttagtttcctaatacctttagttgaccaccacagaggttgattttctttgaactctcaaggttgccaaccagtgaaggagaatggcagggaggctgcaagtgaaggatggcagccttgagtgagctagtttctggccagtaagccaggagaagcagcagtaagagatcttggaaatagcatcttgagcatcagaggtggggatgtggacaggaaaggcaggccacatgacaatgcctttagattggcaaaactctgggaagcagaagtatgagcaatagattcctgtccctgaaagtaaggtaggtgctccccaagccncctcactgccaaatctgatacagacaaggtcaggatgaacactggttcccatgctgagtgaaggcagagaagacaaattcctctggaggaagtcttgagtcttcctcttgccaggaaattcataggagatgcacaggaacaggagatacacagacttgggtactttccataatacctagactcctagaacgccaggagatactgtgtggcactgggcaaggctgatgccacaaagagcctcagagaccatcccatctaatcccttcacactttgca

SEQ ID NO: 380617 - DNA, 2429 bp, Homo sapiens
tgtcccggcgcggcgggagcgcgcttggcgcgtgcgtacgcgacggcggttggcggcgcgcgggcagcgtgaagcgaggcgaggcaaggcttttcggacccacggagcgacagagcgagcggcccctacggccgtcggcggcccggcggcccgagatgttatctgggaagaaggcggcagccgcggcggcggcggctgcagcggcagcaaccgggacggaggctggccctgggacagcaggcggctccgagaacgggtctgaggtggccgcgcagcccgcgggcctgtcgggcccagccgaggtcgggccgggggcggtgggggagcgcacaccccgcaagaaagagcctccgcgggcctcgccccccgggggcctggcggaaccgccggggtccgcagggcctcaggccggccctactgtcgtgcctgggtctgcgacccccatggaaactggaatagcagagactccggaggggcgtcggaccagccggcgcaagcgggcgaaggtagagtacagagagatggatgaaagcttggccaacctctcagaagatgagtattattcagaagaagagagaaatgccaaagcagagaaggaaaagaagcttcccccaccaccccctcaagccccacctgaggaagaaaatgaaagtgagcctgaagaaccatcgggtgtggagggcgcagctttccagagccgacttcctcatgaccggatgacttctcaagaagcagcctgttttccagatattatcagtggaccacaacagacccagaaggtttttcttttcattagaaaccgcacactgcagttgtggttggataatccaaagattcagctgacatttgaggctactctccaacaattagaagcaccttataacagtgatactgtgcttgtccaccgagttcacagttatttagagcgtcatggtcttatcaacttcggcatctataagaggataaaacccctaccaactaaaaagacaggaaaggtaattattataggctctggggtctcaggcttggcagcagctcgacagttacaaagttttggaatggatgtcacacttttggaagccaggatcgtgtgggtggacgagttgccacatttcgcaaaggaaactatgtagctgatcttggagccatggtggtaacaggtcttggagggaatcctatggctgtggtcagcaaacaagtaaatatggaactggccaagatcaagcaaaaatgcccactttatgaagccaacggacaagctgttcctaaagagaaagatgaaatggtagagcaagagtttaaccggttgctagaagctacatcttaccttagtcatcaactagacttcaatgtcctcaataataagcctgtgtcccttggccaggcattggaagttgtcattcagttacaagagaagcatgtcaaagatgagcagattgaacattggaagaagatagtgaaaactcaggaagaattgaaagaacttcttaataagatggtaaatttgaaagagaaaattaaagaactccatcagcaatacaaagaagcatctgaagtaaagccacccagagatattactgccgagttcttagtgaaaagcaaacacagggatctgaccgccctatgcaaggaatatgatgaattagctgaaacacaaggaaagctagaagaaaaacttcaggagttggaagcgaatcccccaagtgatgtatatctctcatcaagagacagacaaatacttgattggcattttgcaaatcttgaatttgctaatgccacacctctctcaactctctcccttaagcactgggatcaggatgatgactttgagttcactggcagccacctgacagtaaggaatggctactcgtgtgtgcctgtggctttagcagaaggcctagacattaaactgaatacagcagtgcgacaggttcgctacacggcttcaggatgtgaagtgatagctgtgaatacccgctccacgagtcaaacctttatttataaatgcgacgcagttctctgtacccttcccctgggtgtgctgaagcagcagccaccagccgttcagtttgtgccacctctccctgagtggaaaacatctgcagtccaaaggatgggatttggcaaccttaacaaggtagcttgccctagacactcctgtctacagatctgatgtacaaatagcagtcttcgttgtttacttggtgaggaggtggccttgcatttttgggcatttggctatgctcccaattgtgacatcagggctgaggcgtgtcagttgattctcttcagtgcctaagtctatcatcaagtgtctgttcatatggacttagtcttatggggtcatttcacaaactcaggcctataaaaaggggatcgtaaatgtcatcctaaataataaggattgctgggcttattttgaaagcaga

SEQ ID NO: 380618 - DNA, 1987 bp, Homo sapiens
tgtcccggcgcggcgggagcgcgcttggcgcgtgcgtacgcgacggcggttggcggcgcgcgggcagcgtgaagcgaggcgaggcaaggcttttcggacccacggagcgacagagcgagcggcccctacggccgtcggcggcccggcggcccgagatgttatctgggaagaaggcggcagccgcggcggcggcggctgcagcggcagcaaccgggacggaggctggccctgggacagcaggcggctccgagaacgggtctgaggtggccgcgcagcccgcgggcctgtcgggcccagccgaggtcgggccgggggcggtgggggagcgcacaccccgcaagaaagagcctccgcgggcctcgccccccgggggcctggcggaaccgccggggtccgcagggcctcaggccggccctactgtcgtgcctgggtctgcgacccccatggaaactggaatagcagagactccggaggggcgtcggaccagccggcgcaagcgggcgaaggtagagtacagagagatggatgaaagcttggccaacctctcagaagatgagtattattcagaagaagagagaaatgccaaagcagagaaggaaaagaagcttcccccaccaccccctcaagccccacctgaggaagaaaatgaaagtgagcctgaagaaccatcgggtgtggagggcgcagctttccagagccgacttcctcatgaccggatgacttctcaagaagcagcctgttttccagatattatcagtggaccacaacagacccagaaggtttttcttttcattagaaaccgcacactgcagttgtggttggataatccaaagattcagctgacatttgaggctactctccaacaattagaagcaccttataacagtgatactgtgcttgtccaccgagttcacagttatttagagcgtcatggtcttatcaacttcggcatctataagaggataaaacccctaccaactaaaaagacaggaaaggtaattattataggctctggggtctcaggcttggcagcagctcgacagttacaaagttttggaatggatgtcacacttttggaagccaggatcgtgtgggtggacgagttgccacatttcgcaaaggaaactatgtagctgatcttggagccatggtggtaacaggtcttggagggaatcctatggctgtggtcagcaaacaagtaaatatggaactggccaagatcaagcaaaaatgcccactttatgaagccaacggacaagctgttcctaaagagaaagatgaaatggtagagcaagagtttaaccggttgctagaagctacatcttaccttagtcatcaactagacttcaatgtcctcaataataagcctgtgtcccttggccaggcattggaagttgtcattcagttacaagagaagcatgtcaaagatgagcagattgaacattggaagaagatagtgaaaactcaggaagaattgaaagaacttcttaataagatggtaaatttgaaagagaaaattaaagaactccatcagcaatacaaagaagcatctgaagtaaagccacccagagatattactgccgagttcttagtgaaaagcaaacacagggatctgaccgccctatgcaaggaatatgatgaattagctgaaacacaaggaaagctagaagaaaaacttcaggagttggaagcgaatcccccaagtgatgtatatctctcatcaagagacagacaaatacttgattggcattttgcaaatcttgaatttgctaatgccacacctctctcaactctctcccttaagcactgggatcaggatgatgactttgagttcactggcagccacctgacagtaaggaatggctactcgtgtgtgcctgtggctttagcagaaggcctagacattaaactgaatacagcgggtattcacagctatcacttcacatcctgaccccgtgtagcgaacctgtcgcactgctggtcgacc

SEQ ID NO: 380619 - DNA, 2102 bp, Homo sapiens
tgtcccggcgcggcgggagcgcgcttggcgcgtgcgtacgcgacggcggttggcggcgcgcgggcagcgtgaagcgaggcgaggcaaggcttttcggacccacggagcgacagagcgagcggcccctacggccgtcggcggcccggcggcccgagatgttatctgggaagaaggcggcagccgcggcggcggcggctgcagcggcagcaaccgggacggaggctggccctgggacagcaggcggctccgagaacgggtctgaggtggccgcgcagcccgcgggcctgtcgggcccagccgaggtcgggccgggggcggtgggggagcgcacaccccgcaagaaagagcctccgcgggcctcgccccccgggggcctggcggaaccgccggggtccgcagggcctcaggccggccctactgtcgtgcctgggtctgcgacccccatggaaactggaatagcagagactccggaggggcgtcggaccagccggcgcaagcgggcgaaggtagagtacagagagatggatgaaagcttggccaacctctcagaagatgagtattattcagaagaagagagaaatgccaaagcagagaaggaaaagaagcttcccccaccaccccctcaagccccacctgaggaagaaaatgaaagtgagcctgaagaaccatcgggtgtggagggcgcagctttccagagccgacttcctcatgaccggatgacttctcaagaagcagcctgttttccagatattatcagtggaccacaacagacccagaaggtttttcttttcattagaaaccgcacactgcagttgtggttggataatccaaagattcagctgacatttgaggctactctccaacaattagaagcaccttataacagtgatactgtgcttgtccaccgagttcacagttatttagagcgtcatggtcttatcaacttcggcatctataagaggataaaacccctaccaactaaaaagacaggaaaggtaattattataggctctggggtctcaggcttggcagcagctcgacagttacaaagttttggaatggatgtcacacttttggaagccaggatcgtgtgggtggacgagttgccacatttcgcaaaggaaactatgtagctgatcttggagccatggtggtaacaggtcttggagggaatcctatggctgtggtcagcaaacaagtaaatatggaactggccaagatcaagcaaaaatgcccactttatgaagccaacggacaagctgttcctaaagagaaagatgaaatggtagagcaagagtttaaccggttgctagaagctacatcttaccttagtcatcaactagacttcaatgtcctcaataataagcctgtgtcccttggccaggcattggaagttgtcattcagttacaagagaagcatgtcaaagatgagcagattgaacattggaagaagatagtgaaaactcaggaagaattgaaagaacttcttaataagatggtaaatttgaaagagaaaattaaagaactccatcagcaatacaaagaagcatctgaagtaaagccacccagagatattactgccgagttcttagtgaaaagcaaacacagggatctgaccgccctatgcaaggaatatgatgaattagctgaaacacaaggaaagctagaagaaaaacttcaggagttggaagcgaatcccccaagtgatgtatatctctcatcaagagacagacaaatacttgattggcattttgcaaatcttgaatttgctaatgccacacctctctcaactctctcccttaagcactgggatcaggtaagtttcccttattgtttattttattgcacatgtctttgggagggattgtaagagaaatagttaattttgtatgtgtgtttttaaacagctttagtaagagacatcatttacatacagtgaaattcacctattttaagtgaacagtttattgatttgccagacttcagtcataagcccccacacaatcagaatatagaacatgcccatcatcctgaaatgttttctcctgcctctttgtagttaatcccccatgctctggctcctggccctggacaaccactga

SEQ ID NO: 380620 - DNA, 2190 bp, Homo sapiens
tgtcccggcgcggcgggagcgcgcttggcgcgtgcgtacgcgacggcggttggcggcgcgcgggcagcgtgaagcgaggcgaggcaaggcttttcggacccacggagcgacagagcgagcggcccctacggccgtcggcggcccggcggcccgagatgttatctgggaagaaggcggcagccgcggcggcggcggctgcagcggcagcaaccgggacggaggctggccctgggacagcaggcggctccgagaacgggtctgaggtggccgcgcagcccgcgggcctgtcgggcccagccgaggtcgggccgggggcggtgggggagcgcacaccccgcaagaaagagcctccgcgggcctcgccccccgggggcctggcggaaccgccggggtccgcagggcctcaggccggccctactgtcgtgcctgggtctgcgacccccatggaaactggaatagcagagactccggaggggcgtcggaccagccggcgcaagcgggcgaaggtagagtacagagagatggatgaaagcttggccaacctctcagaagatgagtattattcagaagaagagagaaatgccaaagcagagaaggaaaagaagcttcccccaccaccccctcaagccccacctgaggaagaaaatgaaagtgagcctgaagaaccatcgggtgtggagggcgcagctttccagagccgacttcctcatgaccggatgacttctcaagaagcagcctgttttccagatattatcagtggaccacaacagacccagaaggtttttcttttcattagaaaccgcacactgcagttgtggttggataatccaaagattcagctgacatttgaggctactctccaacaattagaagcaccttataacagtgatactgtgcttgtccaccgagttcacagttatttagagcgtcatggtcttatcaacttcggcatctataagaggataaaacccctaccaactaaaaagacaggaaaggtaattattataggctctggggtctcaggcttggcagcagctcgacagttacaaagttttggaatggatgtcacacttttggaagccaggatcgtgtgggtggacgagttgccacatttcgcaaaggaaactatgtagctgatcttggagccatggtggtaacaggtcttggagggaatcctatggctgtggtcagcaaacaagtaaatatggaactggccaagatcaagcaaaaatgcccactttatgaagccaacggacaagctgttcctaaagagaaagatgaaatggtagagcaagagtttaaccggttgctagaagctacatcttaccttagtcatcaactagacttcaatgtcctcaataataagcctgtgtcccttggccaggcattggaagttgtcattcagttacaagagaagcatgtcaaagatgagcagattgaacattggaagaagatagtgaaaactcaggaagaattgaaagaacttcttaataagatggtaaatttgaaagagaaaattaaagaactccatcagcaatacaaagaagcatctgaagtaaagccacccagagatattactgccgagttcttagtgaaaagcaaacacagggatctgaccgccctatgcaaggaatatgatgaattagctgaaacacaaggaaagctagaagaaaaacttcaggagttggaagcgaatcccccaagtgatgtatatctctcatcaagagacagacaaatacttgattggcattttgcaaatcttgtcataggttcgcaggggccacttgaaggacaaggaaggttggttgaaggtagttgtgtccctgccccttcttcatccatcaactgcccttccccaggctgcctataattcatccattagagaaggaaaaatcaatatttaccaacataaattaaaacccaggcagggaacaggcagagtataggcagggcctgggagcagagagtggctccgtgggcagccaggtggtagcccatgcacattgggacccggggatgctcaggtgacagaatggagcaggtgggccttctggtccagcggcctctgagaccccaccagagcaagcctgtctcctctcctgcagcgtcctccgtagagagcacggagaccccctcatcgaggagctcatcccggcgacgcttggacctgagggcggggccagttagggc

SEQ ID NO: 380621 - DNA, 798 bp, Homo sapiens
tgtcccggcgcggcgggagcgcgcttggcgcgtgcgtacgcgacggcggttggcggcgcgcgggcagcgtgaagcgaggcgaggcaaggcttttcggacccacggagcgacagagcgagcggcccctacggccgtcggcggcccggcggcccgagatgttatctgggaagaaggcggcagccgcggcggcggcggctgcagcggcagcaaccgggacggaggctggccctgggacagcaggcggctccgagaacgggtctgaggtggccgcgcagcccgcgggcctgtcgggcccagccgaggtcgggccgggggcggtgggggagcgcacaccccgcaagaaagagcctccgcgggcctcgccccccgggggcctggcggaaccgccggggtccgcagggcctcaggccggccctactgtcgtgcctgggtctgcgacccccatggaaactggaatagcagagactccggaggggcgtcggaccagccggcgcaagcgggcgaaggtagagtacagagagatggatgaaagcttggccaacctctcagaagatgagtattattcagaagaagagagaaatgccaaagcagagaaggaaaagacaattcctctccccctgaacctcaggcccaccttgggctcatgcctggctcctctctttctctcattccacatcccatccacaagcacagccttgttagtccatcaaatgagaccccaaatgtaatgctctcaccacctgggtccaaaccactaggcttacctggactattgcagcagcctccaagctgcccttc

SEQ ID NO: 380622 - DNA, 454 bp, Homo sapiens
ggcttcaaagagcaactggataaagattttcaataatagcaatgcagagatgacctgggtttcaagataggaggcctttggagccttcagagaattgtcatagaaatgatcagtaactaattgctcagttgccacctcaagttgttgtttccatcttatgcgggagagattcgggggaaatggcaccctgccattttttgtgtgtggtcctgaatcatcctgttggtaaaactcctgaggtcgtctgagctggagttctgattgcttctgtttctctcatagttgcttccccgtctattctgtcagcgtctgtatggggagaggcagtggggagggcgatctcgtccccttgaagtcaatgaccacctgcttttaaggttctcgtatcttttgctctgaaaaaggtgtgggggaggaaaactttcattttccagcgaaagtagaaagggagaga

SEQ ID NO: 380623 - DNA, 523 bp, Homo sapiens
ccctatacactttcttttcaatacatgactgaatggttcaatggttcattttgatatccttgactgtctttcctggctagtcattttcattccatagcttagcacctcatattatatcaatcatttcatagccacttgtgaacacaggtaagaatgatttgcctttccacagcctttgggctgtctcatggagctgaagaaaaatacatgcattcaggggcactaaggaaaaggtccatagcaaaaattcagatctttagtggagatccctgaaggactagaagagtaagggcttaccagaaatattctggtctcataagaactgatgctcaactttgaaggggcttagctgtacagtattaaagttatctgttctgtaccaactgccaaaaaaataaactgtcttgtaggaagaaaacattatctacatcctcaaagtactttggtactttgtaaaccatgtccaatattttattttaaaaatcacctagcatgcaaagaaatatgaccaatgaatgaaaat

SEQ ID NO: 380624 - DNA, 627 bp, Homo sapiens
gagaactgaatgggtgtattctttgatacctagttaaccagttggtgcttaacaggagaatttttcattggagaattgctaccaggtaacattttggtgagtgaaaaggaggccctttggtacaggtatttgactagagacattgcttctacaatttcttagtcattgtgaaaaatcacatatttaaatgggattatttaaatttttaaatactgtatagtatttgtaggcaggtatagtttttatctttatttggtgttttatatgcagttatttaagttctgaaaatgaccatataatttgaagacaacttatttgacggaatgtttgaaatgaagtttgttgaggggcttttgtttgatttagcgaatgggatacagtgttgaatgatgtcctaagtggtaacagccattttcccttaaaggaaaacttgctgtgagctcttagaaagcatgtattctactgtttcaaaggtttcttggttttaacactcaaaaaataaggtgaggccaggtgaggtggcttacgcctgtaatcccaaaactttgggaggctgaggcaggagaatcacttgaggccaggagttcaagaccagcttgggcaacataatgagaccctgtctctacc

SEQ ID NO: 380625 - DNA, 253 bp, Homo sapiens
gccctcaagcttgggcgagattccatttcaaaaaaaaaaaaaagaaagaaaagaacacacatctgtatcaaagaaaatagaaatggccaccaagcatataaaagaaaaatcagggccgagcacattggctcacgcctgtaatcccaacactttgagaggccaaggcaggcaaatcacaagggcaggagttcaagaccagcctggccaacatggtgaaatccctctctactaaaaacagaaaaaattagctggg

SEQ ID NO: 380626 - DNA, 363 bp, Homo sapiens
tttattgttcattgactgttccctctgttagattttaagctccataaggggagagatctttgtggtcccccattatcctaagtacctaggacagtgtggtagtttcccaacatgctggtaaacaggtgctgctgcagctcatcctacagctatttcactttctgcattgcttttgaaattgaccacgtgctctgaatgtcatgtgcagtcctacaaagcttaatggcccatcttgttttagaaaataacagcttatttgttatccacatccttcatctgaggcatcctgccttggccttaaccattgcctggtatgtctccagaactctttattttcttcccaggggcctgggacaggtagtt

SEQ ID NO: 380627 - DNA, 506 bp, Homo sapiens
attcaaagtaactgaagtcagtaggtactttaatttgggtgagccaaacaggcttccagcccagggttgggaactggttttatcagccaagaattgtgttaacccagcctggttcctgtctgattgaattagcataatgctatctcctcgaaccaattctcccaaatttctgtacttccttttacagatcagagtaataacttgggcactagtaggagaggcagcaagtgacttttccttcatgtctgttgcacatgaatgttgcttataagcttccagatgcttatagctttttataatgggacagtccaataatatgcagatgtactgaaaatagtatgatgaggtcccatgtatccctcatccatttcaacaattacgaactcatggccaatcttgttacatgtacactctacctacccccatatccaacccttgacaaccaagacgtagaatttcacttggaaatatttcagtatgtatcttcaaaagataaggactcttaa

SEQ ID NO: 380628 - DNA, 347 bp, Homo sapiens
ttttgtatttttagtagaggcagggtttcgctatgttgcccaggctggtctcaaactcttgacctcaagtgacccacctgcctcggcctcccaaagtgctagcattacaggcgtgagccactgcacctagccttaccacccattttttatatatgttgtgtgttctagtgctttggttcattcctaacttggaggaagatcttaagtaaggttagagtaaggatatagatgatgaacttattcaatgcaggagaatcgcttgaacccaggaggcggaggttgccgtgagctgagattgcaccattgcactccagcctgggcaacaagagtgaaactctgtctcaaac

SEQ ID NO: 380629 - DNA, 3387 bp, Homo sapiens
ttattgcatgactaatcgttgacattcttaagatgaactggatgctgcaacagctgccctcttgggtttaggtgttgttccttcacggaatccatgcctgaatctgcggtatacaatttttaggtgcctcattcgaccagttccggtggtatttcgtcttttagccttggcactccagttatactttctcttgcgcttggcagggtagccacatttgccacaggtcgacttctgaaggtggtaggccttagagccacagcggcggcacaacgtgtgcgtcttattgcgacgctttccaaacgatgacgttcccttcgtctgcaccttcggggccaagatggcgacgggaacgggcaaacacaagctgctaagcactggccccacagagccatggtccatccgagagaagctatgtttagcatcttctgtcatgagaagtggcgatcaaaattgggtatcagttagcagagcaatcaagccctttgcagaacctggccgccctccagactggttctctcaaaaacattgtgcttcccagtactcggagcttttagagaccactgagacaccaaaacggaaacgaggtgaaaagggagaagtggtggaaactgttgaagatgttattgttcggaaattgactgctgagcgagttgaagaactaaagaaagtgataaaggaaacccaggagagatatagacggctaaagagagatgcagaactaattcaagctggacacatggacagcagactggatgagctttgcaatgacattgcaacgaaaaagaaattggaagaagaggaggctgaagtaaagaggaaggctacagatgctgcataccaggctcgtcaagcagtaaaaacacccccccggaggttacccactgtgatggttcgctctcctatagattctgcctccccaggaggtgattatccacttggggacttgactccaaccactatggaagaggctacctctggggtaacccccgggactttgccgagtaccccagtcacctcgtttcctgggattcctgacacccttcctccaggctctgcacccttagaagcccccatgaccccagtaacagatgattcaccccagaaaaagatgcttggacagaaagcaactccacccccctcccctctgctgtcagagctcttgaagaagggcagcctcctgcctactagccccagactggtcaatgagagtgaaatggctgtggcttctggccacctgaacagtacaggtgtcctcctggaggtaggcggggtccttcccatgatacatggtggggagatacagcaaacacccaatactgttgcagcctcccctgctgcatcagagtctgtgtcccaagctaccattgtcatgatgcctgcgctgccagcaccatcctctgctccggctgtctccactactgaaagtgtagctccagtgagtcaacccgacaactgtgttcccatggaggctgtgggggatccacatactgtgactgtttccatggacagcagtgaaatatccatgatcatcaattctatcaaagaagagtgttttcgatcaggggtagcagaggctcctgttggatcaaaggctcccagcatagatgggaaggaagaattagatctggctgagaagatggatattgctgtgtcttacacaggtgaagagctggattttgagactgttggagacatcattgccatcattgaggacaaggtagatgatcatcctgaagtgctggatgtggcagcagtggaagcagcactgtcattttgtgaagaaaatgatgatcctcagtccctgcctggcccctgggagcatcctatccagcaggagcgggacaagccagtacctctccctgcaccagaaatgacggtcaagcaagagagactggactttgaggaaacggaaaacaagggaatacatgaactggtggacatcagggagcccagtgcagagatcaaggtggaacctgcagaaccagagccagtcatttcaggagccgaaatagtagctggagttgttccagccacaagtatggagccaccagaactcaggagtcaggacttagatgaggaactgggaagtactgcagctggagagattgttgaagcagatgttgccattgggaaaggcgatgagactccacttacaaatgtgaagacagaggcatcccctgaaagcatgttgtctccatcacatggctcaaatcccattgaagatcctttagaggcagagactcagcacaagtttgaaatgtcagactcattgaaagaagaatcagggactatttttggaagccagataaaggatgccccaggtgaggatgaggaggaagatggtgtcagtgaagcggccagcctagaggagcctaaggaagaggatcaaggagaaggctacttgtcagaaatggataatgaacctcctgtgagcgagagtgatgatggcttcagcatacacaatgctacactgcagtcacacacactggcagactccatccccagcagccctgcttcttcacagttctctgtctgtagtgaggatcaggaagctattcaggcacagaaaatttggaagaaagccatcatgcttgtatggagagctgcagctaatcataggtatgccaatgtcttcctgcagcctgttacagatgacatagcacctggctaccacagcattgtgcagaggcctatggatttgtcaactattaagaaaaacatagaaaatggactgatccgaagcacagctgaatttcagcgtgacattatgctgatgtttcagaatgctgtaatgtacaatagctcagaccatgatgtctatcacatggcagtggagatgcagcgagatgtcttggaacagatccagcaattcttggccacgcagttgattatgcaaacatccgagtctgggatcagtgctaaaagtcttcgagggagagattctacccgcaaacaggatgcttcagagaaggacagtgtcccaatgggctctcctgccttccttctctctctctttgatggaggaaccaggggacgccgctgtgccattgaagcagatatgaagatgaaaaagtgaagcctcagagttaccctctttgagccgaacctaaaataaaagtaaacaagatagagcttgggcttgcgggcccagttccagaggtggaagttacagaagaggaggtacctgggccacacgacatgagctggaaaatctctcttagagagttggagtagcacaattgcctgttttagggcagaaaccatgggctatgttaatgtcctaatgtgtagctagcagatcgtagctagtttgtattgtcttgtcaattgtacagactttttaaaaaaaacaaccaccagtgaaatgtgtgtgtatacaataaactg

SEQ ID NO: 380630 - DNA, 3285 bp, Homo sapiens
ttattgcatgactaatcgttgacattcttaagatgaactggatgctgcaacagctgccctcttgggtttaggtgttgttccttcacggaatccatgcctgaatctgcggtatacaatttttaggtgcctcattcgaccagttccggtggtatttcgtcttttagccttggcactccagttatactttctcttgcgcttggcagggtagccacatttgccacaggtcgacttctgaaggtggtaggccttagagccacagcggcggcacaacgtgtgcgtcttattgcgacgctttccaaacgatgacgttcccttcgtctgcaccttcggggccaagatggcgacgggaacgggcaaacacaagctgctaagcactggccccacagagccatggtccatccgagagaagctatgtttagcatcttctgtcatgagaagtggcgatcaaaattgggtatcagttagcagagcaatcaagccctttgcagaacctggccgccctccagactggttctctcaaaaacattgtgcttcccagtactcggagcttttagagaccactgagacaccaaaacggaaacgaggtgaaaagggagaagtggtggaaactgttgaagatgttattgttcggaaattgactgctgagcgagttgaagaactaaagaaagtgataaaggaaacccaggagagatatagacggctaaagagagatgcagaactaattcaagctggacacatggacagcagactggatgagctttgcaatgacattgcaacgaaaaagaaattggaagaagaggaggctgaagtaaagaggaaggctacagatgctgcataccaggctcgtcaagcagtaaaaacacccccccggaggttacccactgtgatggttcgctctcctatagattctgcctccccaggaggtgattatccacttggggacttgactccaaccactatggaagaggctacctctggggtcaatgagagtgaaatggctgtggcttctggccacctgaacagtacaggtgtcctcctggaggtaggcggggtccttcccatgatacatggtggggagatacagcaaacacccaatactgttgcagcctcccctgctgcatcaggtgctcccactctttcccggcttttagaagctggtcctacacagttcaccacacctcttgcttccttcactactgttgccagtgagcctccagttaaacttgtgccaccccctgtagagtctgtgtcccaagctaccattgtcatgatgcctgcgctgccagcaccatcctctgctccggctgtctccactactgaaagtgtagctccagtgagtcaacccgacaactgtgttcccatggaggctgtgggggatccacatactgtgactgtttccatggacagcagtgaaatatccatgatcatcaattctatcaaagaagagtgttttcgatcaggggtagcagaggctcctgttggatcaaaggctcccagcatagatgggaaggaagaattagatctggctgagaagatggatattgctgtgtcttacacaggtgaagagctggattttgagactgttggagacatcattgccatcattgaggacaaggtagatgatcatcctgaagtgctggatgtggcagcagtggaagcagcactgtcattttgtgaagaaaatgatgatcctcagtccctgcctggcccctgggagcatcctatccagcaggagcgggacaagccagtacctctccctgcaccagaaatgacggtcaagcaagagagactggactttgaggaaacggaaaacaagggaatacatgaactggtggacatcagggagcccagtgcagagatcaaggtggaacctgcagaaccagagccagtcatttcaggagccgaaatagtagctggagttgttccagccacaagtatggagccaccagaactcaggagtcaggacttagatgaggaactgggaagtactgcagctggagagattgttgaagcagatgttgccattgggaaaggcgatgagactccacttacaaatgtgaagacagaggcatcccctgaaagcatgttgtctccatcacatggctcaaatcccattgaagatcctttagaggcagagactcagcacaagtttgaaatgtcagactcattgaaagaagaatcagggactatttttggaagccagataaaggatgccccaggtgaggatgaggaggaagatggtgtcagtgaagcggccagcctagaggagcctaaggaagaggatcaaggagaaggctacttgtcagaaatggataatgaacctcctgtgagcgagagtgatgatggcttcagcatacacaatgctacactgcagtcacacacactggcagactccatccccagcagccctgcttcttcacagttctctgtctgtagtgaggatcaggaagctattcaggcacagaaaatttggaagaaagccatcatgcttgtatggagagctgcagctaatcataggtatgccaatgtcttcctgcagcctgttacagatgacatagcacctggctaccacagcattgtgcagaggcctatggatttgtcaactattaagaaaaacatagaaaatggactgatccgaagcacagctgaatttcagcgtgacattatgctgatgtttcagaatgctgtaatgtacaatagctcagaccatgatgtctatcacatggcagtggagatgcagcgagatgtcttggaacagatccagcaattcttggccacgcagttgattatgcaaacatccgagtctgggatcagtgctaaaagtcttcgagggagagattctacccgcaaacaggatgcttcagagaaggacagtgtcccaatgggctctcctgccttccttctctctctctttgatggaggaaccaggggacgccgctgtgccattgaagcagatatgaagatgaaaaagtgaagcctcagagttaccctctttgagccgaacctaaaataaaagtaaacaagatagagcttgggcttgcgggcccagttccagaggtggaagttacagaagaggaggtacctgggccacacgacatgagctggaaaatctctcttagagagttggagtagcacaattgcctgttttagggcagaaaccatgggctatgttaatgtcctaatgtgtagctagcagatcgtagctagtttgtattgtcttgtcaattgtacagactttttaaaaaaaacaaccaccagtgaaatgtgtgtgtatacaataaactg

SEQ ID NO: 380631 - DNA, 3342 bp, Homo sapiens
ttattgcatgactaatcgttgacattcttaagatgaactggatgctgcaacagctgccctcttgggtttaggtgttgttccttcacggaatccatgcctgaatctgcggtatacaatttttaggtgcctcattcgaccagttccggtggtatttcgtcttttagccttggcactccagttatactttctcttgcgcttggcagggtagccacatttgccacaggtcgacttctgaaggtggtaggccttagagccacagcggcggcacaacgtgtgcgtcttattgcgacgctttccaaacgatgacgttcccttcgtctgcaccttcggggccaagatggcgacgggaacgggcaaacacaagctgctaagcactggccccacagagccatggtccatccgagagaagctatgtttagcatcttctgtcatgagaagtggcgatcaaaattgggtatcagttagcagagcaatcaagccctttgcagaacctggccgccctccagactggttctctcaaaaacattgtgcttcccagtactcggagcttttagagaccactgagacaccaaaacggaaacgaggtgaaaagggagaagtggtggaaactgttgaagatgttattgttcggaaattgactgctgagcgagttgaagaactaaagaaagtgataaaggaaacccaggagagatatagacggctaaagagagatgcagaactaattcaagctggacacatggacagcagactggatgagctttgcaatgacattgcaacgaaaaagaaattggaagaagaggaggctgaagtaaagaggaaggctacagatgctgcataccaggctcgtcaagcagtaaaaacacccccccggaggttacccactgtgatggttcgctctcctatagattctgcctccccaggaggtgattatccacttggggacttgactccaaccactatggaagaggctacctctggggtaacccccgggactttgccgagtaccccagtcacctcgtttcctgggattcctgacacccttcctccaggctctgcacccttagaagcccccatgaccccagtaacagatgattcaccccagaaaaagatgcttggacagaaagcaactccacccccctcccctctgctgtcagagctcttgaagaagggcagcctcctgcctactagccccagactggtcaatgagagtgaaatggctgtggcttctggccacctgaacagtacaggtgtcctcctggaggtaggcggggtccttcccatgatacatggtggggagatacagcaaacacccaatactgttgcagcctcccctgctgcatcagagtctgtgtcccaagctaccattgtcatgatgcctgcgctgccagcaccatcctctgctccggctgtctccactactgaaagtgtagctccagtgagtcaacccgacaactgtgttcccatggaggctgtgggggatccacatactgtgactgtttccatggacagcagtgaaatatccatgatcatcaattctatcaaagaagagtgttttcgatcaggggtagcagaggctcctgttggatcaaaggctcccagcatagatgggaaggaagaattagatctggctgagaagatggatattgctgtgtcttacacaggtgaagagctggattttgagactgttggagacatcattgccatcattgaggacaaggtagatgatcatcctgaagtgctggatgtggcagcagtggaagcagcactgtcattttgtgaagaaaatgatgatcctcagtccctgcctggcccctgggagcatcctatccagcaggagcgggacaagccagtacctctccctgcaccagaaatgacggtcaagcaagagagactggactttgaggaaacggaaaacaagggaatacatgaactggtggacatcagggagcccagtgcagagatcaaggtggaacctgcagaaccagagccagtcatttcaggagccgaaatagtagctggagttgttccagccacaagtatggagccaccagaactcaggagtcaggacttagatgaggaactgggaagtactgcagctggagagattgttgaagcagatgttgccattgggaaaggcgatgagactccacttacaaatgtgaagacagaggcatcccctgaaagcatgttgtctccatcacatggctcaaatcccattgaagatcctttagaggcagagactcagcacaagtttgaaatgtcagactcattgaaagaagaatcagggactatttttggaagccagataaaggatgccccaggtgaggatgaggaggaagatggtgtcagtgaagcggccagcctagaggagcctaaggaagaggatcaaggagaaggctacttgtcagaaatggataatgaacctcctgtgagcgagagtgatgatggcttcagcatacacaatgctacactgcagtcacacacactggcagactccatccccagcagccctgcttcttcacagttctctgtctgtagtgaggatcaggaagctattcaggcacagaaaatttggaagaaagccatcatgcttgtatggagagctgcagctaatcataggtatgccaatgtcttcctgcagcctgttacagatgacatagcacctggctaccacagcattgtgcagaggcctatggatttgtcaactattaagaaaaacatagaaaatggactgatccgaagcacagctgaatttcagcgtgacattatgctgatgtttcagaatgctgtaatgtacaatagctcagaccatgatgtctatcacatggcagtggagatgcagcgagatgtcttggaacagatccagcaattcttggccacgcagttgattatgcaaacatccgagtctgggatcagtgctaaaagtcttcgagggagagattctacccgcaaacaggatgcttcagagaaggatggaggaaccaggggacgccgctgtgccattgaagcagatatgaagatgaaaaagtgaagcctcagagttaccctctttgagccgaacctaaaataaaagtaaacaagatagagcttgggcttgcgggcccagttccagaggtggaagttacagaagaggaggtacctgggccacacgacatgagctggaaaatctctcttagagagttggagtagcacaattgcctgttttagggcagaaaccatgggctatgttaatgtcctaatgtgtagctagcagatcgtagctagtttgtattgtcttgtcaattgtacagactttttaaaaaaaacaaccaccagtgaaatgtgtgtgtatacaataaactg

SEQ ID NO: 380632 - DNA, 3693 bp, Homo sapiens
ttattgcatgactaatcgttgacattcttaagatgaactggatgctgcaacagctgccctcttgggtttaggtgttgttccttcacggaatccatgcctgaatctgcggtatacaatttttaggtgcctcattcgaccagttccggtggtatttcgtcttttagccttggcactccagttatactttctcttgcgcttggcagggtagccacatttgccacaggtcgacttctgaaggtggtaggccttagagccacagcggcggcacaacgtgtgcgtcttattgcgacgctttccaaacgatgacgttcccttcgtctgcaccttcggggccaagatggcgacgggaacgggcaaacacaagctgctaagcactggccccacagagccatggtccatccgagagaagctatgtttagcatcttctgtcatgagaagtggcgatcaaaattgggtatcagttagcagagcaatcaagccctttgcagaacctggccgccctccagactggttctctcaaaaacattgtgcttcccagtactcggagcttttagagaccactgagacaccaaaacggaaacgaggtgaaaagggagaagtggtggaaactgttgaagatgttattgttcggaaattgactgctgagcgagttgaagaactaaagaaagtgataaaggaaacccaggagagatatagacggctaaagagagatgcagaactaattcaagctggacacatggacagcagactggatgagctttgcaatgacattgcaacgaaaaagaaattggaagaagaggaggctgaagtaaagaggaaggctacagatgctgcataccaggctcgtcaagcagtaaaaacacccccccggaggttacccactgtgatggttcgctctcctatagattctgcctccccaggaggtgattatccacttggggacttgactccaaccactatggaagaggctacctctggggtaacccccgggactttgccgagtaccccagtcacctcgtttcctgggattcctgacacccttcctccaggctctgcacccttagaagcccccatgaccccagtaacagatgattcaccccagaaaaagatgcttggacagaaagcaactccacccccctcccctctgctgtcagagctcttgaagaagggcagcctcctgcctactagccccagactggtcaatgagagtgaaatggctgtggcttctggccacctgaacagtacaggtgtcctcctggaggtaggcggggtccttcccatgatacatggtggggagatacagcaaacacccaatactgttgcagcctcccctgctgcatcaggtgctcccactctttcccggcttttagaagctggtcctacacagttcaccacacctcttgcttccttcactactgttgccagtgagcctccagttaaacttgtgccaccccctgtagagtctgtgtcccaagctaccattgtcatgatgcctgcgctgccagcaccatcctctgctccggctgtctccactactgaaagtgtagctccagtgagtcaacccgacaactgtgttcccatggaggctgtgggggatccacatactgtgactgtttccatggacagcagtgaaatatccatgatcatcaattctatcaaagaagagtgttttcgatcaggggtagcagaggctcctgttggatcaaaggctcccagcatagatgggaaggaagaattagatctggctgagaagatggatattgctgtgtcttacacaggtgaagagctggattttgagactgttggagacatcattgccatcattgaggacaaggtagatgatcatcctgaagtgctggatgtggcagcagtggaagcagcactgtcattttgtgaagaaaatgatgatcctcagtccctgcctggcccctgggagcatcctatccagcaggagcgggacaagccagtacctctccctgcaccagaaatgacggtcaagcaagagagactggactttgaggaaacggaaaacaagggaatacatgaactggtggacatcagggagcccagtgcagagatcaaggtggaacctgcagaaccagagccagtcatttcaggagccgaaatagtagctggagttgttccagccacaagtatggagccaccagaactcaggagtcaggacttagatgaggaactgggaagtactgcagctggagagattgttgaagcagatgttgccattgggaaaggcgatgagactccacttacaaatgtgaagacagaggcatcccctgaaagcatgttgtctccatcacatggctcaaatcccattgaagatcctttagaggcagagactcagcacaagtttgaaatgtcagactcattgaaagaagaatcagggactatttttggaagccagataaaggatgccccaggtgaggatgaggaggaagatggtgtcagtgaagcggccagcctagaggagcctaaggaagaggatcaaggagaaggctacttgtcagaaatggataatgaacctcctgtgagcgagagtgatgatggcttcagcatacacaatgctacactgcagtcacacacactggcagactccatccccagcagccctgcttcttcacagttctctgtctgtagtgaggatcaggaagctattcaggcacagaaaatttggaagaaagccatcatgcttgtatggagagctgcagctaatcataggtgagtgggctttaccagtcagtaggttcattttctcctactcttcattgttggtgactggaaaaaagtctgagtaggcttctgtggaactgctggtattagttcttactacctttagttacttagagtaagttccctccctgcacttctggagaatgtcagtaattgcaccttattccttttggacaggtatgccaatgtcttcctgcagcctgttacagatgacatagcacctggctaccacagcattgtgcagaggcctatggatttgtcaactattaagaaaaacatagaaaatggactgatccgaagcacagctgaatttcagcgtgacattatgctgatgtttcagaatgctgtaatgtacaatagctcagaccatgatgtctatcacatggcagtggagatgcagcgagatgtcttggaacagatccagcaattcttggccacgcagttgattatgcaaacatccgagtctgggatcagtgctaaaagtcttcgagggagagattctacccgcaaacaggatgcttcagagaaggacagtgtcccaatgggctctcctgccttccttctctctctctttgatggaggaaccaggggacgccgctgtgccattgaagcagatatgaagatgaaaaagtgaagcctcagagttaccctctttgagccgaacctaaaataaaagtaaacaagatagagcttgggcttgcgggcccagttccagaggtggaagttacagaagaggaggtacctgggccacacgacatgagctggaaaatctctcttagagagttggagtagcacaattgcctgttttagggcagaaaccatgggctatgttaatgtcctaatgtgtagctagcagatcgtagctagtttgtattgtcttgtcaattgtacagactttttaaaaaaaacaaccaccagtgaaatgtgtgtgtatacaataaactg

SEQ ID NO: 380633 - DNA, 2529 bp, Homo sapiens
ttttgtatttttagtagaggcagggtttcgctatgttgcccaggctggtctcaaactcttgacctcaagtgacccacctgcctcggcctcccaaagtgctagcattacaggcgtgagccactgcacctagccttaccacccattttttatatatgttgtgtgttctagtgctttggttcattcctaacttggaggaagatcttaagtaaggttagagtaaggatatagatgatgaacttattcaatgcaggagttgctctcatcctttgagaccataagaattttcttagttgagtcttcaagtagctattgcttcttatttatgtgctttcttcttacttcattttgtgtacctctttatatgttaggtgctcccactctttcccggcttttagaagctggtcctacacagttcaccacacctcttgcttccttcactactgttgccagtgagcctccagttaaacttgtgccaccccctgtagagtctgtgtcccaagctaccattgtcatgatgcctgcgctgccagcaccatcctctgctccggctgtctccactactgaaagtgtagctccagtgagtcaacccgacaactgtgttcccatggaggctgtgggggatccacatactgtgactgtttccatggacagcagtgaaatatccatgatcatcaattctatcaaagaagagtgttttcgatcaggggtagcagaggctcctgttggatcaaaggctcccagcatagatgggaaggaagaattagatctggctgagaagatggatattgctgtgtcttacacaggtgaagagctggattttgagactgttggagacatcattgccatcattgaggacaaggtagatgatcatcctgaagtgctggatgtggcagcagtggaagcagcactgtcattttgtgaagaaaatgatgatcctcagtccctgcctggcccctgggagcatcctatccagcaggagcgggacaagccagtacctctccctgcaccagaaatgacggtcaagcaagagagactggactttgaggaaacggaaaacaagggaatacatgaactggtggacatcagggagcccagtgcagagatcaaggtggaacctgcagaaccagagccagtcatttcaggagccgaaatagtagctggagttgttccagccacaagtatggagccaccagaactcaggagtcaggacttagatgaggaactgggaagtactgcagctggagagattgttgaagcagatgttgccattgggaaaggcgatgagactccacttacaaatgtgaagacagaggcatcccctgaaagcatgttgtctccatcacatggctcaaatcccattgaagatcctttagaggcagagactcagcacaagtttgaaatgtcagactcattgaaagaagaatcagggactatttttggaagccagataaaggatgccccaggtgaggatgaggaggaagatggtgtcagtgaagcggccagcctagaggagcctaaggaagaggatcaaggagaaggctacttgtcagaaatggataatgaacctcctgtgagcgagagtgatgatggcttcagcatacacaatgctacactgcagtcacacacactggcagactccatccccagcagccctgcttcttcacagttctctgtctgtagtgaggatcaggaagctattcaggcacagaaaatttggaagaaagccatcatgcttgtatggagagctgcagctaatcataggtatgccaatgtcttcctgcagcctgttacagatgacatagcacctggctaccacagcattgtgcagaggcctatggatttgtcaactattaagaaaaacatagaaaatggactgatccgaagcacagctgaatttcagcgtgacattatgctgatgtttcagaatgctgtaatgtacaatagctcagaccatgatgtctatcacatggcagtggagatgcagcgagatgtcttggaacagatccagcaattcttggccacgcagttgattatgcaaacatccgagtctgggatcagtgctaaaagtcttcgagggagagattctacccgcaaacaggatgcttcagagaaggacagtgtcccaatgggctctcctgccttccttctctctctctttgatggaggaaccaggggacgccgctgtgccattgaagcagatatgaagatgaaaaagtgaagcctcagagttaccctctttgagccgaacctaaaataaaagtaaacaagatagagcttgggcttgcgggcccagttccagaggtggaagttacagaagaggaggtacctgggccacacgacatgagctggaaaatctctcttagagagttggagtagcacaattgcctgttttagggcagaaaccatgggctatgttaatgtcctaatgtgtagctagcagatcgtagctagtttgtattgtcttgtcaattgtacagactttttaaaaaaaacaaccaccagtgaaatgtgtgtgtatacaataaactg

SEQ ID NO: 380634 - DNA, 2260 bp, Homo sapiens
  misc_feature (16)..(16): n is a, c, g, or t
  misc_feature (30)..(30): n is a, c, g, or t
  misc_feature (45)..(45): n is a, c, g, or t
  misc_feature (63)..(63): n is a, c, g, or t
  misc_feature (79)..(79): n is a, c, g, or t
  misc_feature (99)..(99): n is a, c, g, or t
atttactcctagaaantgcccctgggctanccctaaaaaggtgtnaaggcatgggagttgtanaatttcactgtagtcnccaacttgggcttccatttngtgctcccactctttcccggcttttagaagctggtcctacacagttcaccacacctcttgcttccttcactactgttgccagtgagcctccagttaaacttgtgccaccccctgtagagtctgtgtcccaagctaccattgtcatgatgcctgcgctgccagcaccatcctctgctccggctgtctccactactgaaagtgtagctccagtgagtcaacccgacaactgtgttcccatggaggctgtgggggatccacatactgtgactgtttccatggacagcagtgaaatatccatgatcatcaattctatcaaagaagagtgttttcgatcaggggtagcagaggctcctgttggatcaaaggctcccagcatagatgggaaggaagaattagatctggctgagaagatggatattgctgtgtcttacacaggtgaagagctggattttgagactgttggagacatcattgccatcattgaggacaaggtagatgatcatcctgaagtgctggatgtggcagcagtggaagcagcactgtcattttgtgaagaaaatgatgatcctcagtccctgcctggcccctgggagcatcctatccagcaggagcgggacaagccagtacctctccctgcaccagaaatgacggtcaagcaagagagactggactttgaggaaacggaaaacaagggaatacatgaactggtggacatcagggagcccagtgcagagatcaaggtggaacctgcagaaccagagccagtcatttcaggagccgaaatagtagctggagttgttccagccacaagtatggagccaccagaactcaggagtcaggacttagatgaggaactgggaagtactgcagctggagagattgttgaagcagatgttgccattgggaaaggcgatgagactccacttacaaatgtgaagacagaggcatcccctgaaagcatgttgtctccatcacatggctcaaatcccattgaagatcctttagaggcagagactcagcacaagtttgaaatgtcagactcattgaaagaagaatcagggactatttttggaagccagataaaggatgccccaggtgaggatgaggaggaagatggtgtcagtgaagcggccagcctagaggagcctaaggaagaggatcaaggagaaggctacttgtcagaaatggataatgaacctcctgtgagcgagagtgatgatggcttcagcatacacaatgctacactgcagtcacacacactggcagactccatccccagcagccctgcttcttcacagttctctgtctgtagtgaggatcaggaagctattcaggcacagaaaatttggaagaaagccatcatgcttgtatggagagctgcagctaatcataggtatgccaatgtcttcctgcagcctgttacagatgacatagcacctggctaccacagcattgtgcagaggcctatggatttgtcaactattaagaaaaacatagaaaatggactgatccgaagcacagctgaatttcagcgtgacattatgctgatgtttcagaatgctgtaatgtacaatagctcagaccatgatgtctatcacatggcagtggagatgcagcgagatgtcttggaacagatccagcaattcttggccacgcagttgattatgcaaacatccgagtctgggatcagtgctaaaagtcttcgagggagagattctacccgcaaacaggatgcttcagagaaggacagtgtcccaatgggctctcctgccttccttctctctctctttgatggaggaaccaggggacgccgctgtgccattgaagcagatatgaagatgaaaaagtgaagcctcagagttaccctctttgagccgaacctaaaataaaagtaaacaagatagagcttgggcttgcgggcccagttccagaggtggaagttacagaagaggaggtacctgggccacacgacatgagctggaaaatctctcttagagagttggagtagcacaattgcctgttttagggcagaaaccatgggctatgttaatgtcctaatgtgtagctagcagatcgtagctagtttgtattgtcttgtcaattgtacagactttttaaaaaaaacaaccaccagtgaaatgtgtgtgtatacaataaactg

SEQ ID NO: 380635 - DNA, 4372 bp, Homo sapiens
ttattgcatgactaatcgttgacattcttaagatgaactggatgctgcaacagctgccctcttgggtttaggtgttgttccttcacggaatccatgcctgaatctgcggtatacaatttttaggtgcctcattcgaccagttccggtggtatttcgtcttttagccttggcactccagttatactttctcttgcgcttggcagggtagccacatttgccacaggtcgacttctgaaggtggtaggccttagagccacagcggcggcacaacgtgtgcgtcttattgcgacgctttccaaacgatgacgttcccttcgtctgcaccttcggggccaagatggcgacgggaacgggcaaacacaagctgctaagcactggccccacagagccatggtccatccgagagaagctatgtttagcatcttctgtcatgagaagtggcgatcaaaattgggtatcagttagcagagcaatcaagccctttgcagaacctggccgccctccagactggttctctcaaaaacattgtgcttcccagtactcggagcttttagagaccactgagacaccaaaacggaaacgaggtgaaaagggagaagtggtggaaactgttgaagatgttattgttcggaaattgactgctgagcgagttgaagaactaaagaaagtgataaaggaaacccaggagagatatagacggctaaagagagatgcagaactaattcaagctggacacatggacagcagactggatgagctttgcaatgacattgcaacgaaaaagaaattggaagaagaggaggctgaagtaaagaggaaggctacagatgctgcataccaggctcgtcaagcagtaaaaacacccccccggaggttacccactgtgatggttcgctctcctatagattctgcctccccaggaggtgattatccacttggggacttgactccaaccactatggaagaggctacctctggggtcaatgagagtgaaatggctgtggcttctggccacctgaacagtacaggtgtcctcctggaggtaggcggggtccttcccatgatacatggtggggagatacagcaaacacccaatactgttgcagcctcccctgctgcatcaggtgctcccactctttcccggcttttagaagctggtcctacacagttcaccacacctcttgcttccttcactactgttgccagtgagcctccagttaaacttgtgccaccccctgtagagtctgtgtcccaagctaccattgtcatgatgcctgcgctgccagcaccatcctctgctccggctgtctccactactgaaagtgtagctccagtgagtcaacccgacaactgtgttcccatggaggctgtgggggatccacatactgtgactgtttccatggacagcagtgaaatatccatgatcatcaattctatcaaagaagagtgttttcgatcaggggtagcagaggctcctgttggatcaaaggctcccagcatagatgggaaggaagaattagatctggctgagaagatggatattgctgtgtcttacacaggtgaagagctggattttgagactgttggagacatcattgccatcattgaggacaaggtagatgatcatcctgaagtgctggatgtggcagcagtggaagcagcactgtcattttgtgaagaaaatgatgatcctcagtccctgcctggcccctgggagcatcctatccagcaggagcgggacaagccagtacctctccctgcaccagaaatgacggtcaagcaagagagactggactttgaggaaacggaaaacaagggaatacatgaactggtggacatcagggagcccagtgcagagatcaaggtggaacctgcagaaccagagccagtcatttcaggagccgaaatagtagctggagttgttccagccacaagtatggagccaccagaactcaggagtcaggacttagatgaggaactgggaagtactgcagctggagagattgttgaagcagatgttgccattgggaaaggcgatgagactccacttacaaatgtgaagacagaggcatcccctgaaagcatgttgtctccatcacatggctcaaatcccattgaagatcctttagaggcagagactcagcacaagtttgaaatgtcagactcattgaaagaagaatcagggactatttttggaagccagataaaggatgccccaggtgaggatgaggaggaagatggtgtcagtgaagcggccagcctagaggagcctaaggaagaggatcaaggagaaggctacttgtcagaaatggataatgaacctcctgtgagcgagagtgatgatggcttcagcatacacaatgctacactgcagtcacacacactggcagactccatccccagcagccctgcttcttcacagttctctgtctgtagtgaggatcaggaagctattcaggcacagaaaatttggaagaaagccatcatgcttgtatggagagctgcagctaatcataggtatgccaatgtcttcctgcagcctgttacagatgacatagcacctggctaccacagcattgtgcagaggcctatggatttgtcaactattaagaaaaacatagaaaatggactgatccgaagcacagctgaatttcagcgtgacattatgctgatgtttcagaatgctgtaatgtacaatagctcagaccatgatgtctatcacatggcagtggagatgcagcgagatgtcttggaacagatccagcaattcttggccacgcagttgattatgcaaacatccgagtctgggatcagtgctaaaagtcttcgagggagagattctacccgcaaacaggatgcttcagagaaggacagtgtcccaatgggctctcctgccttccttctctctctctttatgggacacgagtgggtttggctggattctgaacaagatcatcccaatgactctgagttgagcaatgactgcaggtccctcttcagctcatgggactccagtctggatcttgatgtgggcaactggagggaaactgaggatccagaggctgaggaactagaggaaagcagcccggagagagaacctagtgaactgcttgttggggatggaggcagtgaggaatctcaggaagcggcaaggaaagccagccaccagaacctcctccactttctctctgaggtagcttatttaatggagcccttgtgcatcagcagcaacgaatcaagtgaaggctgctgccctccatctggtaccagacaagaaggaagggaaattaaagctagcgaaggagaaagggagctctgcagagagactgaagagctttcagctaaaggagaccccttagtagctgaaaagccactgggagaaaatggaaagccagaggtggcttcagctccctcagttatttgtacagttcagggactactcacagagagtgaagagggggaggctcagcaagaatccaaaggggaggaccagggtgaagtatatgtgtcagagatggaagaccagcccccttcaggcgagtgtgatgatgcctttaacattaaggagactcccttggtggatacacttttcagccatgctacctcctcaaagctgactgatctaagccaggatgaccctgttcaggatcatttgctatttaagaagactctcctgccagtctggaagatgattgccagtcacaggttcagcagtccatttctgaagcctgtgtcagaaaggcaggccccagggtacaaggatgtggtgaaaagacccatggacttaactagcctgaagagaaatctctctaagggtcggattcgcaccatggcccaattcctgcgagacctgatgctgatgttccaaaatgctgtaatgtacaatgactctgatcatcatgtataccatatggctgtggagatgcggcgagaagtcctggagcagattcaggtactgaatatctggttagacaaaagaaaaggctcaagtagtctggaaggagaaccagctaacccagtggatgatggaaaacctgttttctaacctggagctgctatcctgactttttctagagtttgaatctctcccggaactctgacctagagaggatcctggtacttctttgccatgtcctcattttcttttccaacaagaataataccttaactcacaaccaacgagtcaaagatgcatgtggacataatataaagaaaaaaaggggaagctgaggtttggatttatgccataaatgttgcccacatctttgttccatcggcttgatttaaagacaattccattagatcttttctaagccttttactctataaataaatgtatttacacaataaaaatattgctttttaatgacta

SEQ ID NO: 380636 - DNA, 3681 bp, Homo sapiens
ttattgcatgactaatcgttgacattcttaagatgaactggatgctgcaacagctgccctcttgggtttaggtgttgttccttcacggaatccatgcctgaatctgcggtatacaatttttaggtgcctcattcgaccagttccggtggtatttcgtcttttagccttggcactccagttatactttctcttgcgcttggcagggtagccacatttgccacaggtcgacttctgaaggtggtaggccttagagccacagcggcggcacaacgtgtgcgtcttattgcgacgctttccaaacgatgacgttcccttcgtctgcaccttcggggccaagatggcgacgggaacgggcaaacacaagctgctaagcactggccccacagagccatggtccatccgagagaagctatgtttagcatcttctgtcatgagaagtggcgatcaaaattgggtatcagttagcagagcaatcaagccctttgcagaacctggccgccctccagactggttctctcaaaaacattgtgcttcccagtactcggagcttttagagaccactgagacaccaaaacggaaacgaggtgaaaagggagaagtggtggaaactgttgaagatgttattgttcggaaattgactgctgagcgagttgaagaactaaagaaagtgataaaggaaacccaggagagatatagacggctaaagagagatgcagaactaattcaagctggacacatggacagcagactggatgagctttgcaatgacattgcaacgaaaaagaaattggaagaagaggaggctgaagtaaagaggaaggctacagatgctgcataccaggctcgtcaagcagtaaaaacacccccccggaggttacccactgtgatggttcgctctcctatagattctgcctccccaggaggtgattatccacttggggacttgactccaaccactatggaagaggctacctctggggtaacccccgggactttgccgagtaccccagtcacctcgtttcctgggattcctgacacccttcctccaggctctgcacccttagaagcccccatgaccccagtaacagatgattcaccccagaaaaagatgcttggacagaaagcaactccacccccctcccctctgctgtcagagctcttgaagaagggcagcctcctgcctactagccccagactggtcaatgagagtgaaatggctgtggcttctggccacctgaacagtacaggtgtcctcctggaggtaggcggggtccttcccatgatacatggtggggagatacagcaaacacccaatactgttgcagcctcccctgctgcatcaggtgctcccactctttcccggcttttagaagctggtcctacacagttcaccacacctcttgcttccttcactactgttgccagtgagcctccagttaaacttgtgccaccccctgtagagtctgtgtcccaagctaccattgtcatgatgcctgcgctgccagcaccatcctctgctccggctgtctccactactgaaagtgtagctccagtgagtcaacccgacaactgtgttcccatggaggctgtgggggatccacatactgtgactgtttccatggacagcagtgaaatatccatgatcatcaattctatcaaagaagagtgttttcgatcaggggtagcagaggctcctgttggatcaaaggctcccagcatagatgggaaggaagaattagatctggctgagaagatggatattgctgtgtcttacacaggtgaagagctggattttgagactgttggagacatcattgccatcattgaggacaaggtagatgatcatcctgaagtgctggatgtggcagcagtggaagcagcactgtcattttgtgaagaaaatgatgatcctcagtccctgcctggcccctgggagcatcctatccagcaggagcgggacaagccagtacctctccctgcaccagaaatgacggtcaagcaagagagactggactttgaggaaacggaaaacaagggaatacatgaactggtggacatcagggagcccagtgcagagatcaaggtggaacctgcagaaccagagccagtcatttcaggagccgaaatagtagctggagttgttccagccacaagtatggagccaccagaactcaggagtcaggacttagatgaggaactgggaagtactgcagctggagagattgttgaagcagatgttgccattgggaaaggcgatgagactccacttacaaatgtgaagacagaggcatcccctgaaagcatgttgtctccatcacatggctcaaatcccattgaagatcctttagaggcagagactcagcacaagtttgaaatgtcagactcattgaaagaagaatcagggactatttttggaagccagataaaggatgccccaggtgaggatgaggaggaagatggtgtcagtgaagcggccagcctagaggagcctaaggaagaggatcaaggagaaggctacttgtcagaaatggataatgaacctcctgtgagcgagagtgatgatggcttcagcatacacaatgctacactgcagtcacacacactggcagactccatccccagcagccctgcttcttcacagttctctgtctgtagtgaggatcaggaagctattcaggcacagaaaatttggaagaaagccatcatgcttgtatggagagctgcagctaatcataggtatgccaatgtcttcctgcagcctgttacagatgacatagcacctggctaccacagcattgtgcagaggcctatggatttgtcaactattaagaaaaacatagaaaatggactgatccgaagcacagctgaatttcagcgtgacattatgctgatgtttcagaatgctgtaatgtacaatagctcagaccatgatgtctatcacatggcagtggagatgcagcgagatgtcttggaacagatccagcaattcttggccacgcagttgattatgcaaacatccgagtctgggatcagtgctaaaagtcttcgagggagagattctacccgcaaacaggatgcttcagagaaggacagtgtcccaatgggctctcctgccttccttctctctctctttacagcaaaatattgcacaagaggaaggagctgggctgcagggagagagcagcagatggaaagaagccttctaattgtcctgatctcatggaaaaccactgtcaggaggtgctagggaactagtgccagggtcagtctgcaggaaaggcctttcttatagggaccaacagttggacaggatggaggaaccaggggacgccgctgtgccattgaagcagatatgaagatgaaaaagtgaagcctcagagttaccctctttgagccgaacctaaaataaaagtaaacaagatagagcttgggcttgcgggcccagttccagaggtggaagttacagaagaggaggtacctgggccacacgacatgagctggaaaatctctcttagagagttggagtagcacaattgcctgttttagggcagaaaccatgggctatgttaatgtcctaatgtgtagctagcagatcgtagctagtttgtattgtcttgtcaattgtacagactttttaaaaaaaacaaccaccagtgaaatgtgtgtgtatacaataaactg

SEQ ID NO: 380637 - DNA, 3757 bp, Homo sapiens
ttattgcatgactaatcgttgacattcttaagatgaactggatgctgcaacagctgccctcttgggtttaggtgttgttccttcacggaatccatgcctgaatctgcggtatacaatttttaggtgcctcattcgaccagttccggtggtatttcgtcttttagccttggcactccagttatactttctcttgcgcttggcagggtagccacatttgccacaggtcgacttctgaaggtggtaggccttagagccacagcggcggcacaacgtgtgcgtcttattgcgacgctttccaaacgatgacgttcccttcgtctgcaccttcggggccaagatggcgacgggaacgggcaaacacaagctgctaagcactggccccacagagccatggtccatccgagagaagctatgtttagcatcttctgtcatgagaagtggcgatcaaaattgggtatcagttagcagagcaatcaagccctttgcagaacctggccgccctccagactggttctctcaaaaacattgtgcttcccagtactcggagcttttagagaccactgagacaccaaaacggaaacgaggtgaaaagggagaagtggtggaaactgttgaagatgttattgttcggaaattgactgctgagcgagttgaagaactaaagaaagtgataaaggaaacccaggagagatatagacggctaaagagagatgcagaactaattcaagctggacacatggacagcagactggatgagctttgcaatgacattgcaacgaaaaagaaattggaagaagaggaggctgaagtaaagaggaaggctacagatgctgcataccaggctcgtcaagcagtaaaaacacccccccggaggttacccactgtgatggttcgctctcctatagattctgcctccccaggaggtgattatccacttggggacttgactccaaccactatggaagaggctacctctggggtaacccccgggactttgccgagtaccccagtcacctcgtttcctgggattcctgacacccttcctccaggctctgcacccttagaagcccccatgaccccagtaacagatgattcaccccagaaaaagatgcttggacagaaagcaactccacccccctcccctctgctgtcagagctcttgaagaagggcagcctcctgcctactagccccagactggtcaatgagagtgaaatggctgtggcttctggccacctgaacagtacaggtgtcctcctggaggtaggcggggtccttcccatgatacatggtggggagatacagcaaacacccaatactgttgcagcctcccctgctgcatcaggtgctcccactctttcccggcttttagaagctggtcctacacagttcaccacacctcttgcttccttcactactgttgccagtgagcctccagttaaacttgtgccaccccctgtagagtctgtgtcccaagctaccattgtcatgatgcctgcgctgccagcaccatcctctgctccggctgtctccactactgaaagtgtagctccagtgagtcaacccgacaactgtgttcccatggaggctgtgggggatccacatactgtgactgtttccatggacagcagtgaaatatccatgatcatcaattctatcaaagaagagtgttttcgatcaggggtagcagaggctcctgttggatcaaaggctcccagcatagatgggaaggaagaattagatctggctgagaagatggatattgctgtgtcttacacaggtgaagagctggattttgagactgttggagacatcattgccatcattgaggacaaggtagatgatcatcctgaagtgctggatgtggcagcagtggaagcagcactgtcattttgtgaagaaaatgatgatcctcagtccctgcctggcccctgggagcatcctatccagcaggagcgggacaagccagtacctctccctgcaccagaaatgacggtcaagcaagagagactggactttgaggaaacggaaaacaagggaatacatgaactggtggacatcagggagcccagtgcagagatcaaggtggaacctgcagaaccagagccagtcatttcaggagccgaaatagtagctggagttgttccagccacaagtatggagccaccagaactcaggagtcaggacttagatgaggaactgggaagtactgcagctggagagattgttgaagcagatgttgccattgggaaaggcgatgagactccacttacaaatgtgaagacagaggcatcccctgaaagcatgttgtctccatcacatggctcaaatcccattgaagatcctttagaggcagagactcagcacaagtttgaaatgtcagactcattgaaagaagaatcagggactatttttggaagccagataaaggatgccccaggtgaggatgaggaggaagatggtgtcagtgaagcggccagcctagaggagcctaaggaagaggatcaaggagaaggctacttgtcagaaatggataatgaacctcctgtgagcgagagtgatgatggcttcagcatacacaatgctacactgcagtcacacacactggcagactccatccccagcagccctgcttcttcacagttctctgtctgtagtgaggatcaggaagctattcaggcacagaaaatttggaagaaagccatcatgcttgtatggagagctgcagctaatcataggtatgccaatgtcttcctgcagcctgttacagatgacatagcacctggctaccacagcattgtgcagaggcctatggatttgtcaactattaagaaaaacatagaaaatggactgatccgaagcacagctgaatttcagcgtgacattatgctgatgtttcagaatgctgtaatgtacaatagctcagaccatgatgtctatcacatggcagtggagatgcagcgagatgtcttggaacagatccagcaattcttggccacgcagttgattatgcaaacatccgagtctgggatcagtgctaaaagtcttcgagggagagattctacccgcaaacaggatgcttcagagaaggacagtgtcccaatgggctctcctgccttccttctctctctcttttgactctggatcccccaagcaaagcatttggctggctattgcaaggctggttaatgggatcttttatctattgaagacagcaaaatattgcacaagaggaaggagctgggctgcagggagagagcagcagatggaaagaagccttctaattgtcctgatctcatggaaaaccactgtcaggaggtgctagggaactagtgccagggtcagtctgcaggaaaggcctttcttatagggaccaacagttggacaggatggaggaaccaggggacgccgctgtgccattgaagcagatatgaagatgaaaaagtgaagcctcagagttaccctctttgagccgaacctaaaataaaagtaaacaagatagagcttgggcttgcgggcccagttccagaggtggaagttacagaagaggaggtacctgggccacacgacatgagctggaaaatctctcttagagagttggagtagcacaattgcctgttttagggcagaaaccatgggctatgttaatgtcctaatgtgtagctagcagatcgtagctagtttgtattgtcttgtcaattgtacagactttttaaaaaaaacaaccaccagtgaaatgtgtgtgtatacaataaactg

SEQ ID NO: 380638 - DNA, 4260 bp, Homo sapiens
ttattgcatgactaatcgttgacattcttaagatgaactggatgctgcaacagctgccctcttgggtttaggtgttgttccttcacggaatccatgcctgaatctgcggtatacaatttttaggtgcctcattcgaccagttccggtggtatttcgtcttttagccttggcactccagttatactttctcttgcgcttggcagggtagccacatttgccacaggtcgacttctgaaggtggtaggccttagagccacagcggcggcacaacgtgtgcgtcttattgcgacgctttccaaacgatgacgttcccttcgtctgcaccttcggggccaagatggcgacgggaacgggcaaacacaagctgctaagcactggccccacagagccatggtccatccgagagaagctatgtttagcatcttctgtcatgagaagtggcgatcaaaattgggtatcagttagcagagcaatcaagccctttgcagaacctggccgccctccagactggttctctcaaaaacattgtgcttcccagtactcggagcttttagagaccactgagacaccaaaacggaaacgaggtgaaaagggagaagtggtggaaactgttgaagatgttattgttcggaaattgactgctgagcgagttgaagaactaaagaaagtgataaaggaaacccaggagagatatagacggctaaagagagatgcagaactaattcaagctggacacatggacagcagactggatgagctttgcaatgacattgcaacgaaaaagaaattggaagaagaggaggctgaagtaaagaggaaggctacagatgctgcataccaggctcgtcaagcagtaaaaacacccccccggaggttacccactgtgatggttcgctctcctatagattctgcctccccaggaggtgattatccacttggggacttgactccaaccactatggaagaggctacctctggggtaacccccgggactttgccgagtaccccagtcacctcgtttcctgggattcctgacacccttcctccaggctctgcacccttagaagcccccatgaccccagtaacagatgattcaccccagaaaaagatgcttggacagaaagcaactccacccccctcccctctgctgtcagagctcttgaagaagggcagcctcctgcctactagccccagactggtcaatgagagtgaaatggctgtggcttctggccacctgaacagtacaggtgtcctcctggaggtaggcggggtccttcccatgatacatggtggggagatacagcaaacacccaatactgttgcagcctcccctgctgcatcaggtgctcccactctttcccggcttttagaagctggtcctacacagttcaccacacctcttgcttccttcactactgttgccagtgagcctccagttaaacttgtgccaccccctgtagagtctgtgtcccaagctaccattgtcatgatgcctgcgctgccagcaccatcctctgctccggctgtctccactactgaaagtgtagctccagtgagtcaacccgacaactgtgttcccatggaggctgtgggggatccacatactgtgactgtttccatggacagcagtgaaatatccatgatcatcaattctatcaaagaagagtgttttcgatcaggggtagcagaggctcctgttggatcaaaggctcccagcatagatgggaaggaagaattagatctggctgagaagatggatattgctgtgtcttacacaggtgaagagctggattttgagactgttggagacatcattgccatcattgaggacaaggtagatgatcatcctgaagtgctggatgtggcagcagtggaagcagcactgtcattttgtgaagaaaatgatgatcctcagtccctgcctggcccctgggagcatcctatccagcaggagcgggacaagccagtacctctccctgcaccagaaatgacggtcaagcaagagagactggactttgaggaaacggaaaacaagggaatacatgaactggtggacatcagggagcccagtgcagagatcaaggtggaacctgcagaaccagagccagtcatttcaggagccgaaatagtagctggagttgttccagccacaagtatggagccaccagaactcaggagtcaggacttagatgaggaactgggaagtactgcagctggagagattgttgaagcagatgttgccattgggaaaggcgatgagactccacttacaaatgtgaagacagaggcatcccctgaaagcatgttgtctccatcacatggctcaaatcccattgaagatcctttagaggcagagactcagcacaagtttgaaatgtcagactcattgaaagaagaatcagggactatttttggaagccagataaaggatgccccaggtgaggatgaggaggaagatggtgtcagtgaagcggccagcctagaggagcctaaggaagaggatcaaggagaaggctacttgtcagaaatggataatgaacctcctgtgagcgagagtgatgatggcttcagcatacacaatgctacactgcagtcacacacactggcagactccatccccagcagccctgcttcttcacagttctctgtctgtagtgaggatcaggaagctattcaggcacagaaaatttggaagaaagccatcatgcttgtatggagagctgcagctaatcataggtatgccaatgtcttcctgcagcctgttacagatgacatagcacctggctaccacagcattgtgcagaggcctatggatttgtcaactattaagaaaaacatagaaaatggactgatccgaagcacagctgaatttcagcgtgacattatgctgatgtttcagaatgctgtaatgtacaatagctcagaccatgatgtctatcacatggcagtggagatgcagcgagatgtcttggaacagatccagcaattcttggccacgcagttgattatgcaaacatccgagtctgggatcagtgctaaaagtcttcgagggagagattctacccgcaaacaggatgcttcagagaaggacagtgtcccaatgggctctcctgccttccttctctctctctttatgggacacgagtgggtttggctggattctgaacaagatcatcccaatgactctgagttgagcaatgactgcaggtccctcttcagctcatgggactccagtctggatcttgatgtgggcaactggagggaaactgaggatccagaggctgaggaactagaggaaagcagcccggagagagaacctagtgaactgcttgttggggatggaggcagtgaggaatctcaggaagcggcaaggaaagccagccaccagaacctcctccactttctctctgaggtagcttatttaatggagcccttgtgcatcagcagcaacgaatcaagtgaaggctgctgccctccatctggtaccagacaagaaggaagggaaattaaagctagcgaaggagaaagggagctctgcagagagactgaagagctttcagctaaaggagaccccttagtagctgaaaagccactgggagaaaatggaaagccagaggtggcttcagctccctcagttatttgtacagttcagggactactcacagagagtgaagagggggaggctcagcaagaatccaaaggggaggaccagggtgaagtatatgtgtcagagatggaagaccagcccccttcaggcgagtgtgatgatgcctttaacattaaggagactcccttggtggatacacttttcagccatgctacctcctcaaagctgactgatctaagccaggatgaccctgttcaggatcatttgctatttaagaagactctcctgccagtctggaagatgattgccagtcacaggttcagcagtccatttctgaagcctgtgtcagaaaggcaggccccagggtacaaggatgtggtgaaaagacccatggacttaactagcctgaagagaaatctctctaagggtcggattcgcaccatggcccaattcctgcgagacctgatgctgatgttccaaaatgctgtaatgtacaatgactctgatcatcatgtataccatatggctgtggagatgcggcgagaagtcctggagcagattcaggtactgtatgcagatacctgtagcctctggaatcttgatttcagaacgcctatgagaataaaggtgatttcgaggtgaaaaaattctca

SEQ ID NO: 380639 - DNA, 3301 bp, Homo sapiens
ttattgcatgactaatcgttgacattcttaagatgaactggatgctgcaacagctgccctcttgggtttaggtgttgttccttcacggaatccatgcctgaatctgcggtatacaatttttaggtgcctcattcgaccagttccggtggtatttcgtcttttagccttggcactccagttatactttctcttgcgcttggcagggtagccacatttgccacaggtcgacttctgaaggtggtaggccttagagccacagcggcggcacaacgtgtgcgtcttattgcgacgctttccaaacgatgacgttcccttcgtctgcaccttcggggccaagatggcgacgggaacgggcaaacacaagctgctaagcactggccccacagagccatggtccatccgagagaagctatgtttagcatcttctgtcatgagaagtggcgatcaaaattgggtatcagttagcagagcaatcaagccctttgcagaacctggccgccctccagactggttctctcaaaaacattgtgcttcccagtactcggagcttttagagaccactgagacaccaaaacggaaacgaggtgaaaagggagaagtggtggaaactgttgaagatgttattgttcggaaattgactgctgagcgagttgaagaactaaagaaagtgataaaggaaacccaggagagatatagacggctaaagagagatgcagaactaattcaagctggacacatggacagcagactggatgagctttgcaatgacattgcaacgaaaaagaaattggaagaagaggaggctgaagtaaagaggaaggctacagatgctgcataccaggctcgtcaagcagtaaaaacacccccccggaggttacccactgtgatggttcgctctcctatagattctgcctccccaggaggtgattatccacttggggacttgactccaaccactatggaagaggctacctctggggtaacccccgggactttgccgagtaccccagtcacctcgtttcctgggattcctgacacccttcctccaggctctgcacccttagaagcccccatgaccccagtaacagatgattcaccccagaaaaagatgcttggacagaaagcaactccacccccctcccctctgctgtcagagctcttgaagaagggcagcctcctgcctactagccccagactggtcaatgagagtgaaatggctgtggcttctggccacctgaacagtacaggtgtcctcctggaggtaggcggggtccttcccatgatacatggtggggagatacagcaaacacccaatactgttgcagcctcccctgctgcatcaggtgctcccactctttcccggcttttagaagctggtcctacacagttcaccacacctcttgcttccttcactactgttgccagtgagcctccagttaaacttgtgccaccccctgtagagtctgtgtcccaagctaccattgtcatgatgcctgcgctgccagcaccatcctctgctccggctgtctccactactgaaagtgtagctccagtgagtcaacccgacaactgtgttcccatggaggctgtgggggatccacatactgtgactgtttccatggacagcagtgaaatatccatgatcatcaattctatcaaagaagagtgttttcgatcaggggtagcagaggctcctgttggatcaaaggctcccagcatagatgggaaggaagaattagatctggctgagaagatggatattgctgtgtcttacacaggtgaagagctggattttgagactgttggagacatcattgccatcattgaggacaaggtagatgatcatcctgaagtgctggatgtggcagcagtggaagcagcactgtcattttgtgaagaaaatgatgatcctcagtccctgcctggcccctgggagcatcctatccagcaggagcgggacaagccagtacctctccctgcaccagaaatgacggtcaagcaagagagactggactttgaggaaacggaaaacaagggaatacatgaactggtggacatcagggagcccagtgcagagatcaaggtggaacctgcagaaccagagccagtcatttcaggagccgaaatagtagctggagttgttccagccacaagtatggagccaccagaactcaggagtcaggacttagatgaggaactgggaagtactgcagctggagagattgttgaagcagatgttgccattgggaaaggcgatgagactccacttacaaatgtgaagacagaggcatcccctgaaagcatgttgtctccatcacatggctcaaatcccattgaagatcctttagaggcagagactcagcacaagtttgaaatgtcagactcattgaaagaagaatcagggactatttttggaagccagataaaggatgccccaggtgaggatgaggaggaagatggtgtcagtgaagcggccagcctagaggagcctaaggaagaggatcaaggagaaggctacttgtcagaaatggataatgaacctcctgtgagcgagagtgatgatggcttcagcatacacaatgctacactgcagtcacacacactggcagactccatccccagcagccctgcttcttcacagttctctgtctgtagtgaggatcaggaagctattcaggcacagaaaatttggaagaaagccatcatgcttgtatggagagctgcagctaatcataggtatgccaatgtcttcctgcagcctgttacagatgacatagcacctggctaccacagcattgtgcagaggcctatggatttgtcaactattaagaaaaacatagaaaatggactgatccgaagcacagctgaatttcagcgtgacattatgctgatgtttcagaatgctgtaatgtacaatagctcagaccatgatgtctatcacatggcagtggagatgcagcgagatgtcttggaacagatccagcaattcttggccacgcagttgattatgcaaacatccgagtctgggatcagtgctaaaagtcttcgagggagagattctacccgcaaacaggatgcttcagagaaggacagtgtcccaatgggctctcctgccttccttctctctctctttaacaaaacaaataaatatccaagactgcaagattacttcatcttccacaggtttgcatgtacaggcatacctcggagatagtgtgcacttggttccagaccattgcaataaagtgaatactgcaataaaatgagtcacaccaattttttcggtttcccagtgcaaagt

SEQ ID NO: 380640 - DNA, 2468 bp, Homo sapiens
  misc_feature (2450)..(2450): n is a, c, g, or t
  misc_feature (2456)..(2457): n is a, c, g, or t
ttattgcatgactaatcgttgacattcttaagatgaactggatgctgcaacagctgccctcttgggtttaggtgttgttccttcacggaatccatgcctgaatctgcggtatacaatttttaggtgcctcattcgaccagttccggtggtatttcgtcttttagccttggcactccagttatactttctcttgcgcttggcagggtagccacatttgccacaggtcgacttctgaaggtggtaggccttagagccacagcggcggcacaacgtgtgcgtcttattgcgacgctttccaaacgatgacgttcccttcgtctgcaccttcggggccaagatggcgacgggaacgggcaaacacaagctgctaagcactggccccacagagccatggtccatccgagagaagctatgtttagcatcttctgtcatgagaagtggcgatcaaaattgggtatcagttagcagagcaatcaagccctttgcagaacctggccgccctccagactggttctctcaaaaacattgtgcttcccagtactcggagcttttagagaccactgagacaccaaaacggaaacgaggtgaaaagggagaagtggtggaaactgttgaagatgttattgttcggaaattgactgctgagcgagttgaagaactaaagaaagtgataaaggaaacccaggagagatatagacggctaaagagagatgcagaactaattcaagctggacacatggacagcagactggatgagctttgcaatgacattgcaacgaaaaagaaattggaagaagaggaggctgaagtaaagaggaaggctacagatgctgcataccaggctcgtcaagcagtaaaaacacccccccggaggttacccactgtgatggttcgctctcctatagattctgcctccccaggaggtgattatccacttggggacttgactccaaccactatggaagaggctacctctggggtaacccccgggactttgccgagtaccccagtcacctcgtttcctgggattcctgacacccttcctccaggctctgcacccttagaagcccccatgaccccagtaacagatgattcaccccagaaaaagatgcttggacagaaagcaactccacccccctcccctctgctgtcagagctcttgaagaagggcagcctcctgcctactagccccagactggtcaatgagagtgaaatggctgtggcttctggccacctgaacagtacaggtgtcctcctggaggtaggcggggtccttcccatgatacatggtggggagatacagcaaacacccaatactgttgcagcctcccctgctgcatcaggtgctcccactctttcccggcttttagaagctggtcctacacagttcaccacacctcttgcttccttcactactgttgccagtgagcctccagttaaacttgtgccaccccctgtagagtctgtgtcccaagctaccattgtcatgatgcctgcgctgccagcaccatcctctgctccggctgtctccactactgaaagtgtagctccagtgagtcaacccgacaactgtgttcccatggaggctgtgggggatccacatactgtgactgtttccatggacagcagtgaaatatccatgatcatcaattctatcaaagaagagtgttttcgatcaggggtagcagaggctcctgttggatcaaaggctcccagcatagatgggaaggaagaattagatctggctgagaagatggatattgctgtgtcttacacaggtgaagagctggattttgagactgttggagacatcattgccatcattgaggacaaggtagatgatcatcctgaagtgctggatgtggcagcagtggaagcagcactgtcattttgtgaagaaaatgatgatcctcagtccctgcctggcccctgggagcatcctatccagcaggagcgggacaagccagtacctctccctgcaccagaaatgacggtcaagcaagagagactggactttgaggaaacggaaaacaagggaatacatgaactggtggacatcagggagcccagtgcagagatcaaggtggaacctgcagaaccagagccagtcatttcaggagccgaaatagtagctggagttgttccagccacaagtatggagccaccagaactcaggagtcaggacttagatgaggaactgggaagtactgcagctggagagattgttgaagcagatgttgccattgggaaaggcgatgagactccacttacaaatgtgaagacagaggcatcccctgaaagcatgttgtctccatcacatggctcaaatcccattgaagatcctttagaggcagagactcagcacaagtttgaaatgtcagactcattgaaagaagaatcagggactatttttggaagccagataaaggagcccggtccgaagagacccncagggnncctctagagtc

SEQ ID NO: 380641 - DNA, 868 bp, Homo sapiens
attgtttcttgggttaagtgcatgttttgggataaggggttagcatttaagtcctggcagctgggagttaaggtatatatgagaaagtctatatgataatgtattcatagatctaggtgcgtcctctttccatccccactgctacttacccctgttcttttttttttaggcctatggatttgtcaactattaagaaaaacatagaaaatggactgatccgaagcacagctgaatttcagcgtgacattatgctgatgtttcagaatgctgtaatgtacaatagctcagaccatgatgtctatcacatggcagtggagatgcagcgagatgtcttggaacagatccagcaattcttggccacgcagttgattatgcaaacatccgagtctgggatcagtgctaaaagtcttcgagggagagattctacccgcaaacaggatgcttcagagaaggacagtgtcccaatgggctctcctgccttccttctctctctctttgatggaggaaccaggggacgccgctgtgccattgaagcagatatgaagatgaaaaagtgaagcctcagagttaccctctttgagccgaacctaaaataaaagtaaacaagatagagcttgggcttgcgggcccagttccagaggtggaagttacagaagaggaggtacctgggccacacgacatgagctggaaaatctctcttagagagttggagtagcacaattgcctgttttagggcagaaaccatgggctatgttaatgtcctaatgtgtagctagcagatcgtagctagtttgtattgtcttgtcaattgtacagactttttaaaaaaaacaaccaccagtgaaatgtgtgtgtatacaataaactg

SEQ ID NO: 380642 - DNA, 2157 bp, Homo sapiens
ttattgcatgactaatcgttgacattcttaagatgaactggatgctgcaacagctgccctcttgggtttaggtgttgttccttcacggaatccatgcctgaatctgcggtatacaatttttaggtgcctcattcgaccagttccggtggtatttcgtcttttagccttggcactccagttatactttctcttgcgcttggcagggtagccacatttgccacaggtcgacttctgaaggtggtaggccttagagccacagcggcggcacaacgtgtgcgtcttattgcgacgctttccaaacgatgacgttcccttcgtctgcaccttcggggccaagatggcgacgggaacgggcaaacacaagctgctaagcactggccccacagagccatggtccatccgagagaagctatgtttagcatcttctgtcatgagaagtggcgatcaaaattgggtatcagttagcagagcaatcaagccctttgcagaacctggccgccctccagactggttctctcaaaaacattgtgcttcccagtactcggagcttttagagaccactgagacaccaaaacggaaacgaggtgaaaagggagaagtggtggaaactgttgaagatgttattgttcggaaattgactgctgagcgagttgaagaactaaagaaagtgataaaggaaacccaggagagatatagacggctaaagagagatgcagaactaattcaagctggacacatggacagcagactggatgagctttgcaatgacattgcaacgaaaaagaaattggaagaagaggaggctgaagtaaagaggaaggctacagatgctgcataccaggctcgtcaagcagtaaaaacacccccccggaggttacccactgtgatggttcgctctcctatagattctgcctccccaggaggtgattatccacttggggacttgactccaaccactatggaagaggctacctctggggtaacccccgggactttgccgagtaccccagtcacctcgtttcctgggattcctgacacccttcctccaggctctgcacccttagaagcccccatgaccccagtaacagatgattcaccccagaaaaagatgcttggacagaaagcaactccacccccctcccctctgctgtcagagctcttgaagaagggcagcctcctgcctactagccccagactggtcaatgagagtgaaatggctgtggcttctggccacctgaacagtacaggtgtcctcctggaggtaggcggggtccttcccatgatacatggtggggagatacagcaaacacccaatactgttgcagcctcccctgctgcatcaggtaagttaccacttttcctttatcaacctcaaaggtgttgaacttgacattgactgacctcagtttcactgttactaagcagttgtcagtgctagatttaaagcccaactttttctaacttttttttggagctactttacctggtaaacaatgtagtctccatattataaagccatctatcttcaagatagtgatagccctgattgaccacagcatggatattgagagtaatattgaactgctttcttagggcttgcaaaatcaaggtgctagagatacctaagattatagaatagtggaataagatttggaaccagagaattgggcttgaatctcaggcctgccacacattggttttgtgaccttggataggtaacttagcttttgagcctcagtttccttttttattgtaacatatatacttcacaaggatgtgatgagaatttaatgaggtagaaagtataaagcagggaaataaaaaaagctccatagaataccgtacaaaccttattggtatttgaatggtgttgaacttgggtggtttacaatatgctgaacttcagcagaagcgacagatttattcataccagtttttcgtttcttggtgattaattttcctctgaggaaaaattaccaccctttgttgttgttgttgttgttgtttttgagacagagccttgctctgtcgcccaagctggagtgtggtggcacaatcttggctcactgcaatctccacctcctgcgttcaagcagttctcctgcctcagcctcctgaatagctgggattacagcacccaccaccacgcctagctaa

SEQ ID NO: 380643 - DNA, 1036 bp, Homo sapiens
cccagcaaaggtttcagtaattcatcttgcctacaggctgtaccacagacagaacattataatctccgttctttcttattggcctacaacagtgactctggatcccccaagcaaagcatttggctggctattgcaaggctggttaatgggatcttttatctattgaagacagcaaaatattgcacaagaggaaggagctgggctgcagggagagagcagcagatggaaagaagccttctaattgtcctgatctcatggaagcctttcttatagggaccaacagttggacaggtatgttagtcaagaacctcactacccattgcccattctgactctcctacctttcttttactctcctgctcctttgcacatgatttgggcctgggtgggatgactaatagttattctgtgggaccctaggtgaattccaaggacctctgtagtgggcatgagcaagatattccatcctacatttcctctcacaaactaccaggtgttctttagccactctgtgggaagacagaaatatgcccctcatccctctggatttttctgctgattctcttccctctcccccaagaaaccaaatccccaacttttctgttgcaccgtctcttgtctcctgaccaactcatgctccctttctttctctgcctgtcatctaggatggaggaaccaggggacgccgctgtgccattgaagcagatatgaagatgaaaaagtgaagcctcagagttaccctctttgagccgaacctaaaataaaagtaaacaagatagagcttgggcttgcgggcccagttccagaggtggaagttacagaagaggaggtacctgggccacacgacatgagctggaaaatctctcttagagagttggagtagcacaattgcctgttttagggcagaaaccatgggctatgttaatgtcctaatgtgtagctagcagatcgtagctagtttgtattgtcttgtcaattgtacagactttttaaaaaaaacaaccaccagtgaaatgtgtgtgtatacaataaactg

SEQ ID NO: 380644 - DNA, 151 bp, Homo sapiens
tgcttggacagaaagcaactccacccccctcccctctgctgtcagagctcttgaagaagggcagcctcctgcctactagccccagactggtatggagacttctgtgggtgtttgagagctgtggtgatttagtacttggaagggagtgcct

SEQ ID NO: 380645 - DNA, 486 bp, Homo sapiens
cactttgggaggctaaggcaggaggatcgctggaacccaggagtttgagaccagcctgggcaacacagtgagaccctatctctacaaaaaaattaaaaaattagctgggcatggtggtatgcacctatagtcccagctacttgggaggctgaggtgagaggattgagtctgggaggttgagggtgcaatgaacatgatcatgccactgcactccagcctgggggacagagtgagaccctgtctcaaaaagaaaagagaattataatttttattttttaacttgtgcctagtggaattgctgtatctctgtttcagctctgtctgtagtgaggatcaggaagctattcaggcacagaaaatttggaagaaagccatcatgcttgtatggagagctgcagctaatcataggtgagtgggctttaccagtcagtaggttcattttctcctactcttcattgttggtgactggaaaaaagtctgagtagg

SEQ ID NO: 380646 - DNA, 387 bp, Homo sapiens
tatagacggctaaagagagatgcagaactaattcaagctggacacatggacagcagactggatgagctttgcaatgacattgcaacgtgggttatattatattgttcttctgtgcttctttctttttaccctcttttcccctcaagtaatctggcttatttcctccaattgccgtccctttagacttgagacagattctggaaggggaaagctgcaaagtggtttggtggctgggaggggggagtgagtcctagaaggtaatataatgggacatttcagtatgaaaacataacttagttctaacttaagagtggctatagtttgcctgggtgaagaactgggagttaggcagtataccccaattcactgttttgctggttagaattc

SEQ ID NO: 380647 - DNA, 3173 bp, Homo sapiens
ggcacgagggcgacgggaacgggcaaacacaagctgctaagcactggccccacagagccatggtccatccgagagaagctatgtttagcatcttctgtcatgagaagtggcgatcaaaattgggtatcagttagcagagcaatcaagccctttgcagaacctggccgccctccagactggttctctcaaaaacattgtgcttcccagtactcggagcttttagagaccactgagacaccaaaacggaaacgaggtgaaaagggagaagtggtggaaactgttgaagatgttattgttcggaaattgactgctgagcgagttgaagaactaaagaaagtgataaaggaaacccaggagagatatagacggctaaagagagatgcagaactaattcaagctggacacatggacagcagactggatgagctttgcaatgacattgcaacgaaaaagaaattggaagaagaggaggctgaagtaaagaggaaggctacagatgctgcataccaggctcgtcaagcagtaaaaacacccccccggaggttacccactgtgatggttcgctctcctatagattctgcctccccaggaggtgattatccacttggggacttgactccaaccactatggaagaggctacctctggggtaacccccgggactttgccgagtaccccagtcacctcgtttcctgggattcctgacacccttcctccaggctctgcacccttagaagcccccatgaccccagtaacagatgattcaccccagaaaaagatgcttggacagaaagcaactccacccccctcccctctgctgtcagagctcttgaagaagggcagcctcctgcctactagccccagactggtcaatgagagtgaaatggctgtggcttctggccacctgaacagtacaggtgtcctcctggaggtaggcggggtccttcccatgatacatggtggggagatacagcaaacacccaatactgttgcagcctcccctgctgcatcaggtgctcccactctttcccggcttttagaagctggtcctacacagttcaccacacctcttgcttccttcactactgttgccagtgagcctccagttaaacttgtgccaccccctgtagagtctgtgtcccaagctaccattgtcatgatgcctgcgctgccagcaccatcctctgctccggctgtctccactactgaaagtgtagctccagtgagtcaacccgacaactgtgttcccatggaggctgtgggggatccacatactgtgactgtttccatggacagcagtgaaatatccatgatcatcaattctatcaaagaagagtgttttcgatcaggggtagcagaggctcctgttggatcaaaggctcccagcatagatgggaaggaagaattagatctggctgagaagatggatattgctgtgtcttacacaggtgaagagctggattttgagactgttggagacatcattgccatcattgaggacaaggtagatgatcatcctgaagtgctggatgtggcagcagtggaagcagcactgtcattttgtgaagaaaatgatgatcctcagtccctgcctggcccctgggagcatcctatccagcaggagcgggacaagccagtacctctccctgcaccagaaatgacggtcaagcaagagagactggactttgaggaaacggaaaacaagggaatacatgaactggtggacatcagggagcccagtgcagagatcaaggtggaacctgcagaaccagagccagtcatttcaggagccgaaatagtagctggagttgttccagccacaagtatggagccaccagaactcaggagtcaggacttagatgaggaactgggaagtactgcagctggagagattgttgaagcagatgttgccattgggaaaggcgatgagactccacttacaaatgtgaagacagaggcatcccctgaaagcatgttgtctccatcacatggctcaaatcccattgaagatcctttagaggcagagactcagcacaagtttgaaatgtcagactcattgaaagaagaatcagggactatttttggaagccagataaaggatgccccaggtgaggatgaggaggaagatggtgtcagtgaagcggccagcctagaggagcctaaggaagaggatcaaggagaaggctacttgtcagaaatggataatgaacctcctgtgagcgagagtgatgatggcttcagcatacacaatgctacactgcagtcacacacactggcagactccatccccagcagccctgcttcttcacagttctctgtctgtagtgaggatcaggaagctattcaggcacagaaaatttggaagaaagccatcatgcttgtatggagagctgcagctaatcataggtatgccaatgtcttcctgcagcctgttacagatgacatagcacctggctaccacagcattgtgcagaggcctatggatttgtcaactattaagaaaaacatagaaaatggactgatccgaagcacagctgaatttcagcgtgacattatgctgatgtttcagaatgctgtaatgtacaatagctcagaccatgatgtctatcacatggcagtggagatgcagcgagatgtcttggaacagatccagcaattcttggccacgcagttgattatgcaaacatccgagtctgggatcagtgctaaaagtcttcgagggagagattctacccgcaaacaggatgcttcagagaaggacagtgtcccaatgggctctcctgccttccttctctctctctttgatggaggaaccaggggacgccgctgtgccattgaagcagatatgaagatgaaaaagtgaagcctcagagttaccctctttgagccgaacctaaaataaaagtaaacaagatagagcttgggcttgcgggcccagttccagaggtggaagttacagaagaggaggtacctgggccacacgacatgagctggaaaatctctcttagagagttggagtagcacaattgcctgttttagggcagaaaccatgggctatgttaatgtcctaatgtgtagctagcagatcgtagctagtttgtattgtcttgtcaattgtacagactttttaaaaaaaacaaccaccagtgaaatgtgtgtgtatacaataaactg

SEQ ID NO: 380648 - DNA, 3504 bp, Homo sapiens
ttattgcatgactaatcgttgacattcttaagatgaactggatgctgcaacagctgccctcttgggtttaggtgttgttccttcacggaatccatgcctgaatctgcggtatacaatttttaggtgcctcattcgaccagttccggtggtatttcgtcttttagccttggcactccagttatactttctcttgcgcttggcagggtagccacatttgccacaggtcgacttctgaaggtggtaggccttagagccacagcggcggcacaacgtgtgcgtcttattgcgacgctttccaaacgatgacgttcccttcgtctgcaccttcggggccaagatggcgacgggaacgggcaaacacaagctgctaagcactggccccacagagccatggtccatccgagagaagctatgtttagcatcttctgtcatgagaagtggcgatcaaaattgggtatcagttagcagagcaatcaagccctttgcagaacctggccgccctccagactggttctctcaaaaacattgtgcttcccagtactcggagcttttagagaccactgagacaccaaaacggaaacgaggtgaaaagggagaagtggtggaaactgttgaagatgttattgttcggaaattgactgctgagcgagttgaagaactaaagaaagtgataaaggaaacccaggagagatatagacggctaaagagagatgcagaactaattcaagctggacacatggacagcagactggatgagctttgcaatgacattgcaacgaaaaagaaattggaagaagaggaggctgaagtaaagaggaaggctacagatgctgcataccaggctcgtcaagcagtaaaaacacccccccggaggttacccactgtgatggttcgctctcctatagattctgcctccccaggaggtgattatccacttggggacttgactccaaccactatggaagaggctacctctggggtaacccccgggactttgccgagtaccccagtcacctcgtttcctgggattcctgacacccttcctccaggctctgcacccttagaagcccccatgaccccagtaacagatgattcaccccagaaaaagatgcttggacagaaagcaactccacccccctcccctctgctgtcagagctcttgaagaagggcagcctcctgcctactagccccagactggtcaatgagagtgaaatggctgtggcttctggccacctgaacagtacaggtgtcctcctggaggtaggcggggtccttcccatgatacatggtggggagatacagcaaacacccaatactgttgcagcctcccctgctgcatcaggtgctcccactctttcccggcttttagaagctggtcctacacagttcaccacacctcttgcttccttcactactgttgccagtgagcctccagttaaacttgtgccaccccctgtagagtctgtgtcccaagctaccattgtcatgatgcctgcgctgccagcaccatcctctgctccggctgtctccactactgaaagtgtagctccagtgagtcaacccgacaactgtgttcccatggaggctgtgggggatccacatactgtgactgtttccatggacagcagtgaaatatccatgatcatcaattctatcaaagaagagtgttttcgatcaggggtagcagaggctcctgttggatcaaaggctcccagcatagatgggaaggaagaattagatctggctgagaagatggatattgctgtgtcttacacaggtgaagagctggattttgagactgttggagacatcattgccatcattgaggacaaggtagatgatcatcctgaagtgctggatgtggcagcagtggaagcagcactgtcattttgtgaagaaaatgatgatcctcagtccctgcctggcccctgggagcatcctatccagcaggagcgggacaagccagtacctctccctgcaccagaaatgacggtcaagcaagagagactggactttgaggaaacggaaaacaagggaatacatgaactggtggacatcagggagcccagtgcagagatcaaggtggaacctgcagaaccagagccagtcatttcaggagccgaaatagtagctggagttgttccagccacaagtatggagccaccagaactcaggagtcaggacttagatgaggaactgggaagtactgcagctggagagattgttgaagcagatgttgccattgggaaaggcgatgagactccacttacaaatgtgaagacagaggcatcccctgaaagcatgttgtctccatcacatggctcaaatcccattgaagatcctttagaggcagagactcagcacaagtttgaaatgtcagactcattgaaagaagaatcagggactatttttggaagccagataaaggatgccccaggtgaggatgaggaggaagatggtgtcagtgaagcggccagcctagaggagcctaaggaagaggatcaaggagaaggctacttgtcagaaatggataatgaacctcctgtgagcgagagtgatgatggcttcagcatacacaatgctacactgcagtcacacacactggcagactccatccccagcagccctgcttcttcacagttctctgtctgtagtgaggatcaggaagctattcaggcacagaaaatttggaagaaagccatcatgcttgtatggagagctgcagctaatcataggtatgccaatgtcttcctgcagcctgttacagatgacatagcacctggctaccacagcattgtgcagaggcctatggatttgtcaactattaagaaaaacatagaaaatggactgatccgaagcacagctgaatttcagcgtgacattatgctgatgtttcagaatgctgtaatgtacaatagctcagaccatgatgtctatcacatggcagtggagatgcagcgagatgtcttggaacagatccagcaattcttggccacgcagttgattatgcaaacatccgagtctgggatcagtgctaaaagtcttcgagggagagattctacccgcaaacaggatgcttcagagaaggacagtgtcccaatgggctctcctgccttccttctctctctctttgatggaggaaccaggggacgccgctgtgccattgaagcagatatgaagatgaaaaagtgaagcctcagagttaccctctttgagccgaacctaaaataaaagtaaacaagatagagcttgggcttgcgggcccagttccagaggtggaagttacagaagaggaggtacctgggccacacgacatgagctggaaaatctctcttagagagttggagtagcacaattgcctgttttagggcagaaaccatgggctatgttaatgtcctaatgtgtagctagcagatcgtagctagtttgtattgtcttgtcaattgtacagactttttaaaaaaaacaaccaccagtgaaatgtgtgtgtatacaataaactg

SEQ ID NO: 380649 - DNA, 3206 bp, Homo sapiens
  misc_feature (14)..(14): n is a, c, g, or t
  misc_feature (78)..(78): n is a, c, g, or t
  misc_feature (133)..(133): n is a, c, g, or t
  misc_feature (136)..(136): n is a, c, g, or t
  misc_feature (164)..(164): n is a, c, g, or t
  misc_feature (169)..(169): n is a, c, g, or t
  misc_feature (177)..(177): n is a, c, g, or t
  misc_feature (182)..(182): n is a, c, g, or t
  misc_feature (190)..(190): n is a, c, g, or t
  misc_feature (216)..(216): n is a, c, g, or t
  misc_feature (227)..(227): n is a, c, g, or t
  misc_feature (231)..(231): n is a, c, g, or t
  misc_feature (246)..(246): n is a, c, g, or t
agggtggttcggtngggaattgcgggatggaggggaacggggaaagacaaggtggtaagacgtggggcggagagcagnggtcatccgagagagggtttgttttgatcttttgtattgagaaggtggggagatnaantttgggtttagttggaggaggagattanaggcnctttgcangaacntgggggcnctccaggaatatggttttttcaaaanatcatttgtgntttncaggttctcggaggnttttatgaggaccactgagagagaccaaaacggaaacgaggtgaaaagggagaagtggtggaaactgttgaagatgttattgttcggaaattgactgctgagcgagttgaagaactaaagaaagtgataaaggaaacccaggagagatatagacggctaaagagagatgcagaactaattcaagctggacacatggacagcagactggatgagctttgcaatgacattgcaacgaaaaagaaattggaagaagaggaggctgaagtaaagaggaaggctacagatgctgcataccaggctcgtcaagcagtaaaaacacccccccggaggttacccactgtgatggttcgctctcctatagattctgcctccccaggaggtgattatccacttggggacttgactccaaccactatggaagaggctacctctggggtaacccccgggactttgccgagtaccccagtcacctcgtttcctgggattcctgacacccttcctccaggctctgcacccttagaagcccccatgaccccagtaacagatgattcaccccagaaaaagatgcttggacagaaagcaactccacccccctcccctctgctgtcagagctcttgaagaagggcagcctcctgcctactagccccagactggtcaatgagagtgaaatggctgtggcttctggccacctgaacagtacaggtgtcctcctggaggtaggcggggtccttcccatgatacatggtggggagatacagcaaacacccaatactgttgcagcctcccctgctgcatcaggtgctcccactctttcccggcttttagaagctggtcctacacagttcaccacacctcttgcttccttcactactgttgccagtgagcctccagttaaacttgtgccaccccctgtagagtctgtgtcccaagctaccattgtcatgatgcctgcgctgccagcaccatcctctgctccggctgtctccactactgaaagtgtagctccagtgagtcaacccgacaactgtgttcccatggaggctgtgggggatccacatactgtgactgtttccatggacagcagtgaaatatccatgatcatcaattctatcaaagaagagtgttttcgatcaggggtagcagaggctcctgttggatcaaaggctcccagcatagatgggaaggaagaattagatctggctgagaagatggatattgctgtgtcttacacaggtgaagagctggattttgagactgttggagacatcattgccatcattgaggacaaggtagatgatcatcctgaagtgctggatgtggcagcagtggaagcagcactgtcattttgtgaagaaaatgatgatcctcagtccctgcctggcccctgggagcatcctatccagcaggagcgggacaagccagtacctctccctgcaccagaaatgacggtcaagcaagagagactggactttgaggaaacggaaaacaagggaatacatgaactggtggacatcagggagcccagtgcagagatcaaggtggaacctgcagaaccagagccagtcatttcaggagccgaaatagtagctggagttgttccagccacaagtatggagccaccagaactcaggagtcaggacttagatgaggaactgggaagtactgcagctggagagattgttgaagcagatgttgccattgggaaaggcgatgagactccacttacaaatgtgaagacagaggcatcccctgaaagcatgttgtctccatcacatggctcaaatcccattgaagatcctttagaggcagagactcagcacaagtttgaaatgtcagactcattgaaagaagaatcagggactatttttggaagccagataaaggatgccccaggtgaggatgaggaggaagatggtgtcagtgaagcggccagcctagaggagcctaaggaagaggatcaaggagaaggctacttgtcagaaatggataatgaacctcctgtgagcgagagtgatgatggcttcagcatacacaatgctacactgcagtcacacacactggcagactccatccccagcagccctgcttcttcacagttctctgtctgtagtgaggatcaggaagctattcaggcacagaaaatttggaagaaagccatcatgcttgtatggagagctgcagctaatcataggtatgccaatgtcttcctgcagcctgttacagatgacatagcacctggctaccacagcattgtgcagaggcctatggatttgtcaactattaagaaaaacatagaaaatggactgatccgaagcacagctgaatttcagcgtgacattatgctgatgtttcagaatgctgtaatgtacaatagctcagaccatgatgtctatcacatggcagtggagatgcagcgagatgtcttggaacagatccagcaattcttggccacgcagttgattatgcaaacatccgagtctgggatcagtgctaaaagtcttcgagggagagattctacccgcaaacaggatgcttcagagaaggacagtgtcccaatgggctctcctgccttccttctctctctctttgatggaggaaccaggggacgccgctgtgccattgaagcagatatgaagatgaaaaagtgaagcctcagagttaccctctttgagccgaacctaaaataaaagtaaacaagatagagcttgggcttgcgggcccagttccagaggtggaagttacagaagaggaggtacctgggccacacgacatgagctggaaaatctctcttagagagttggagtagcacaattgcctgttttagggcagaaaccatgggctatgttaatgtcctaatgtgtagctagcagatcgtagctagtttgtattgtcttgtcaattgtacagactttttaaaaaaaacaaccaccagtgaaatgtgtgtgtatacaataaactg

SEQ ID NO: 380650 - DNA, 2363 bp, Homo sapiens
agtgagtccctagaggatcttattatctgttcgatggcagatgggttactggacttagatttccctgtatcactgtaggtcataactccaagcttttcactcattccaaatttggtaaccatccgcttgctattttagtggcattatcaaaatcactggaagcacctgttgcaatatggtcggttccaaatataagctcctcgtgctcccactctttcccggcttttagaagctggtcctacacagttcaccacacctcttgcttccttcactactgttgccagtgagcctccagttaaacttgtgccaccccctgtagagtctgtgtcccaagctaccattgtcatgatgcctgcgctgccagcaccatcctctgctccggctgtctccactactgaaagtgtagctccagtgagtcaacccgacaactgtgttcccatggaggctgtgggggatccacatactgtgactgtttccatggacagcagtgaaatatccatgatcatcaattctatcaaagaagagtgttttcgatcaggggtagcagaggctcctgttggatcaaaggctcccagcatagatgggaaggaagaattagatctggctgagaagatggatattgctgtgtcttacacaggtgaagagctggattttgagactgttggagacatcattgccatcattgaggacaaggtagatgatcatcctgaagtgctggatgtggcagcagtggaagcagcactgtcattttgtgaagaaaatgatgatcctcagtccctgcctggcccctgggagcatcctatccagcaggagcgggacaagccagtacctctccctgcaccagaaatgacggtcaagcaagagagactggactttgaggaaacggaaaacaagggaatacatgaactggtggacatcagggagcccagtgcagagatcaaggtggaacctgcagaaccagagccagtcatttcaggagccgaaatagtagctggagttgttccagccacaagtatggagccaccagaactcaggagtcaggacttagatgaggaactgggaagtactgcagctggagagattgttgaagcagatgttgccattgggaaaggcgatgagactccacttacaaatgtgaagacagaggcatcccctgaaagcatgttgtctccatcacatggctcaaatcccattgaagatcctttagaggcagagactcagcacaagtttgaaatgtcagactcattgaaagaagaatcagggactatttttggaagccagataaaggatgccccaggtgaggatgaggaggaagatggtgtcagtgaagcggccagcctagaggagcctaaggaagaggatcaaggagaaggctacttgtcagaaatggataatgaacctcctgtgagcgagagtgatgatggcttcagcatacacaatgctacactgcagtcacacacactggcagactccatccccagcagccctgcttcttcacagttctctgtctgtagtgaggatcaggaagctattcaggcacagaaaatttggaagaaagccatcatgcttgtatggagagctgcagctaatcataggtatgccaatgtcttcctgcagcctgttacagatgacatagcacctggctaccacagcattgtgcagaggcctatggatttgtcaactattaagaaaaacatagaaaatggactgatccgaagcacagctgaatttcagcgtgacattatgctgatgtttcagaatgctgtaatgtacaatagctcagaccatgatgtctatcacatggcagtggagatgcagcgagatgtcttggaacagatccagcaattcttggccacgcagttgattatgcaaacatccgagtctgggatcagtgctaaaagtcttcgagggagagattctacccgcaaacaggatgcttcagagaaggacagtgtcccaatgggctctcctgccttccttctctctctctttgatggaggaaccaggggacgccgctgtgccattgaagcagatatgaagatgaaaaagtgaagcctcagagttaccctctttgagccgaacctaaaataaaagtaaacaagatagagcttgggcttgcgggcccagttccagaggtggaagttacagaagaggaggtacctgggccacacgacatgagctggaaaatctctcttagagagttggagtagcacaattgcctgttttagggcagaaaccatgggctatgttaatgtcctaatgtgtagctagcagatcgtagctagtttgtattgtcttgtcaattgtacagactttttaaaaaaaacaaccaccagtgaaatgtgtgtgtatacaataaactg

SEQ ID NO: 380651 - DNA, 4131 bp, Homo sapiens
ttattgcatgactaatcgttgacattcttaagatgaactggatgctgcaacagctgccctcttgggtttaggtgttgttccttcacggaatccatgcctgaatctgcggtatacaatttttaggtgcctcattcgaccagttccggtggtatttcgtcttttagccttggcactccagttatactttctcttgcgcttggcagggtagccacatttgccacaggtcgacttctgaaggtggtaggccttagagccacagcggcggcacaacgtgtgcgtcttattgcgacgctttccaaacgatgacgttcccttcgtctgcaccttcggggccaagatggcgacgggaacgggcaaacacaagctgctaagcactggccccacagagccatggtccatccgagagaagctatgtttagcatcttctgtcatgagaagtggcgatcaaaattgggtatcagttagcagagcaatcaagccctttgcagaacctggccgccctccagactggttctctcaaaaacattgtgcttcccagtactcggagcttttagagaccactgagacaccaaaacggaaacgaggtgaaaagggagaagtggtggaaactgttgaagatgttattgttcggaaattgactgctgagcgagttgaagaactaaagaaagtgataaaggaaacccaggagagatatagacggctaaagagagatgcagaactaattcaagctggacacatggacagcagactggatgagctttgcaatgacattgcaacgaaaaagaaattggaagaagaggaggctgaagtaaagaggaaggctacagatgctgcataccaggctcgtcaagcagtaaaaacacccccccggaggttacccactgtgatggttcgctctcctatagattctgcctccccaggaggtgattatccacttggggacttgactccaaccactatggaagaggctacctctggggtaacccccgggactttgccgagtaccccagtcacctcgtttcctgggattcctgacacccttcctccaggctctgcacccttagaagcccccatgaccccagtaacagatgattcaccccagaaaaagatgcttggacagaaagcaactccacccccctcccctctgctgtcagagctcttgaagaagggcagcctcctgcctactagccccagactggtcaatgagagtgaaatggctgtggcttctggccacctgaacagtacaggtgtcctcctggaggtaggcggggtccttcccatgatacatggtggggagatacagcaaacacccaatactgttgcagcctcccctgctgcatcaggtgctcccactctttcccggcttttagaagctggtcctacacagttcaccacacctcttgcttccttcactactgttgccagtgagcctccagttaaacttgtgccaccccctgtagagtctgtgtcccaagctaccattgtcatgatgcctgcgctgccagcaccatcctctgctccggctgtctccactactgaaagtgtagctccagtgagtcaacccgacaactgtgttcccatggaggctgtgggggatccacatactgtgactgtttccatggacagcagtgaaatatccatgatcatcaattctatcaaagaagagtgttttcgatcaggggtagcagaggctcctgttggatcaaaggctcccagcatagatgggaaggaagaattagatctggctgagaagatggatattgctgtgtcttacacaggtgaagagctggattttgagactgttggagacatcattgccatcattgaggacaaggtagatgatcatcctgaagtgctggatgtggcagcagtggaagcagcactgtcattttgtgaagaaaatgatgatcctcagtccctgcctggcccctgggagcatcctatccagcaggagcgggacaagccagtacctctccctgcaccagaaatgacggtcaagcaagagagactggactttgaggaaacggaaaacaagggaatacatgaactggtggacatcagggagcccagtgcagagatcaaggtggaacctgcagaaccagagccagtcatttcaggagccgaaatagtagctggagttgttccagccacaagtatggagccaccagaactcaggagtcaggacttagatgaggaactgggaagtactgcagctggagagattgttgaagcagatgttgccattgggaaaggcgatgagactccacttacaaatgtgaagacagaggcatcccctgaaagcatgttgtctccatcacatggctcaaatcccattgaagatcctttagaggcagagactcagcacaagtttgaaatgtcagactcattgaaagaagaatcagggactatttttggaagccagataaaggatgccccaggtgaggatgaggaggaagatggtgtcagtgaagcggccagcctagaggagcctaaggaagaggatcaaggagaaggctacttgtcagaaatggataatgaacctcctgtgagcgagagtgatgatggcttcagcatacacaatgctacactgcagtcacacacactggcagactccatccccagcagccctgcttcttcacagttctctgtctgtagtgaggatcaggaagctattcaggcacagaaaatttggaagaaagccatcatgcttgtatggagagctgcagctaatcataggtatgccaatgtcttcctgcagcctgttacagatgacatagcacctggctaccacagcattgtgcagaggcctatggatttgtcaactattaagaaaaacatagaaaatggactgatccgaagcacagctgaatttcagcgtgacattatgctgatgtttcagaatgctgtaatgtacaatagctcagaccatgatgtctatcacatggcagtggagatgcagcgagatgtcttggaacagatccagcaattcttggccacgcagttgattatgcaaacatccgagtctgggatcagtgctaaaagtcttcgagggagagattctacccgcaaacaggatgcttcagagaaggacagtgtcccaatgggctctcctgccttccttctctctctcttttgactctggatcccccaagcaaagcatttggctggctattgcaaggctggttaatgggatcttttatctattgaagacagcaaaatattgcacaagaggaaggagctgggctgcagggagagagcagcagatggaaagaagccttctaattgtcctgatctcatggaaaaccactgtcaggaggtgctagggaactagtgccagggtcagtctgcaggaaaggcctttcttatagggaccaacagttggacaggtatgttagtcaagaacctcactacccattgcccattctgactctcctacctttcttttactctcctgctcctttgcacatgatttgggcctgggtgggatgactaatagttattctgtgggaccctaggtgaattccaaggacctctgtagtgggcatgagcaagatattccatcctacatttcctctcacaaactaccaggtgttctttagccactctgtgggaagacagaaatatgcccctcatccctctggatttttctgctgattctcttccctctcccccaagaaaccaaatccccaacttttctgttgcaccgtctcttgtctcctgaccaactcatgctccctttctttctctgcctgtcatctaggatggaggaaccaggggacgccgctgtgccattgaagcagatatgaagatgaaaaagtgaagcctcagagttaccctctttgagccgaacctaaaataaaagtaaacaagatagagcttgggcttgcgggcccagttccagaggtggaagttacagaagaggaggtacctgggccacacgacatgagctggaaaatctctcttagagagttggagtagcacaattgcctgttttagggcagaaaccatgggctatgttaatgtcctaatgtgtagctagcagatcgtagctagtttgtattgtcttgtcaattgtacagactttttaaaaaaaacaaccaccagtgaaatgtgtgtgtatacaataaactg

SEQ ID NO: 380652 - DNA, 1078 bp, Homo sapiens
gtcagactcattgaaagagatctatatgccccagtgtgaggatgatagatgtgtcagcctaacctaaggaagaggatcaaggagaaggctacttgtcagaaatggataatgaacctcctgtgagcgagagtgatgatggcttcagcatacacaatgctacactgcagtcacacacactggcagactccatccccagcagccctgcttcttcacagttctctgtctgtagtgaggatcaggaagctattcaggcacagaaaatttggaagaaagccatcatgcttgtatggagagctgcagctaatcataggtatgccaatgtcttcctgcagcctgttacagatgacatagcacctggctaccacagcattgtgcagaggcctatggatttgtcaactattaagaaaaacatagaaaatggactgatccgaagcacagctgaatttcagcgtgacattatgctgatgtttcagaatgctgtaatgtacaatagctcagaccatgatgtctatcacatggcagtggagatgcagcgagatgtcttggaacagatccagcaattcttggccacgcagttgattatgcaaacatccgagtctgggatcagtgctaaaagtcttcgagggagagattctacccgcaaacaggatgcttcagagaaggacagtgtcccaatgggctctcctgccttccttctctctctctttgatggaggaaccaggggacgccgctgtgccattgaagcagatatgaagatgaaaaagtgaagcctcagagttaccctctttgagccgaacctaaaataaaagtaaacaagatagagcttgggcttgcgggcccagttccagaggtggaagttacagaagaggaggtacctgggccacacgacatgagctggaaaatctctcttagagagttggagtagcacaattgcctgttttagggcagaaaccatgggctatgttaatgtcctaatgtgtagctagcagatcgtagctagtttgtattgtcttgtcaattgtacagactttttaaaaaaaacaaccaccagtgaaatgtgtgtgtatacaataaactg

SEQ ID NO: 380653 - DNA, 2270 bp, Homo sapiens
ttattgcatgactaatcgttgacattcttaagatgaactggatgctgcaacagctgccctcttgggtttaggtgttgttccttcacggaatccatgcctgaatctgcggtatacaatttttaggtgcctcattcgaccagttccggtggtatttcgtcttttagccttggcactccagttatactttctcttgcgcttggcagggtagccacatttgccacaggtcgacttctgaaggtggtaggccttagagccacagcggcggcacaacgtgtgcgtcttattgcgacgctttccaaacgatgacgttcccttcgtctgcaccttcggggccaagatggcgacgggaacgggcaaacacaagctgctaagcactggccccacagagccatggtccatccgagagaagctatgtttagcatcttctgtcatgagaagtggcgatcaaaattgggtatcagttagcagagcaatcaagccctttgcagaacctggccgccctccagactggttctctcaaaaacattgtgcttcccagtactcggagcttttagagaccactgagacaccaaaacggaaacgaggtgaaaagggagaagtggtggaaactgttgaagatgttattgttcggaaattgactgctgagcgagttgaagaactaaagaaagtgataaaggaaacccaggagagatatagacggctaaagagagatgcagaactaattcaagctggacacatggacagcagactggatgagctttgcaatgacattgcaacgaaaaagaaattggaagaagaggaggctgaagtaaagaggaaggctacagatgctgcataccaggctcgtcaagcagtaaaaacacccccccggaggttacccactgtgatggttcgctctcctatagattctgcctccccaggaggtgattatccacttggggacttgactccaaccactatggaagaggctacctctggggtaacccccgggactttgccgagtaccccagtcacctcgtttcctgggattcctgacacccttcctccaggctctgcacccttagaagcccccatgaccccagtaacagatgattcaccccagaaaaagatgcttggacagaaagcaactccacccccctcccctctgctgtcagagctcttgaagaagggcagcctcctgcctactagccccagactggtcaatgagagtgaaatggctgtggcttctggccacctgaacagtacaggtgtcctcctggaggtaggcggggtccttcccatgatacatggtggggagatacagcaaacacccaatactgttgcagcctcccctgctgcatcaggtgctcccactctttcccggcttttagaagctggtcctacacagttcaccacacctcttgcttccttcactactgttgccagtgagcctccagttaaacttgtgccaccccctgtagagtctgtgtcccaagctaccattgtcatgatgcctgcgctgccagcaccatcctctgctccggctgtctccactactgaaagtgtagctccagtgagtcaacccgacaactgtgttcccatggaggctgtgggggatccacatactgtgactgtttccatggacagcagtgaaatatccatgatcatcaattctatcaaagaagagtgttttcgatcaggggtagcagaggctcctgttggatcaaaggctcccagcatagatgggaaggaagaattagatctggctgagaagatggatattgctgtgtcttacacaggtgaagagctggattttgagactgttggagacatcattgccatcattgaggacaaggtagatgatcatccaatccagtctctaacctagatgcagatcatttatttaaaagtaccaaacataacccagagtttgtggaatatgggcaacatatatatagccttctgtatttaacgatcttctgcttcttaaccgtaccagttttctatttataactcttatctatccatgatgttttaaagtctccaccttgctgttatttaccaaacgacagtgcattcagcagcccagtgccgtgagccctgacagatgccgtatttctgagtgcttccatgtgaatgctgccctcctgtagcatgtgtccaagtggacatagccactaaccaactagttacctttggactgcaacaaaaaatgtgaaaatgaagatttatttcttttaatttacttaaaaagaaacctctgtgctagcaataaagcatttatattgtgt

SEQ ID NO: 380654 - DNA, 1938 bp, Homo sapiens
ttattgcatgactaatcgttgacattcttaagatgaactggatgctgcaacagctgccctcttgggtttaggtgttgttccttcacggaatccatgcctgaatctgcggtatacaatttttaggtgcctcattcgaccagttccggtggtatttcgtcttttagccttggcactccagttatactttctcttgcgcttggcagggtagccacatttgccacaggtcgacttctgaaggtggtaggccttagagccacagcggcggcacaacgtgtgcgtcttattgcgacgctttccaaacgatgacgttcccttcgtctgcaccttcggggccaagatggcgacgggaacgggcaaacacaagctgctaagcactggccccacagagccatggtccatccgagagaagctatgtttagcatcttctgtcatgagaagtggcgatcaaaattgggtatcagttagcagagcaatcaagccctttgcagaacctggccgccctccagactggttctctcaaaaacattgtgcttcccagtactcggagcttttagagaccactgagacaccaaaacggaaacgaggtgaaaagggagaagtggtggaaactgttgaagatgttattgttcggaaattgactgctgagcgagttgaagaactaaagaaagtgataaaggaaacccaggagagatatagacggctaaagagagatgcagaactaattcaagctggacacatggacagcagactggatgagctttgcaatgacattgcaacgaaaaagaaattggaagaagaggaggctgaagtaaagaggaaggctacagatgctgcataccaggctcgtcaagcagtaaaaacacccccccggaggttacccactgtgatggttcgctctcctatagattctgcctccccaggaggtgattatccacttggggacttgactccaaccactatggaagaggctacctctggggtcaatgagagtgaaatggctgtggcttctggccacctgaacagtacaggtgtcctcctggaggtaggcggggtccttcccatgatacatggtggggagatacagcaaacacccaatactgttgcagcctcccctgctgcatcaggtaagttaccacttttcctttatcaacctcaaaggtgttgaacttgacattgactgacctcagtttcactgttactaagcagttgtcagtgctagatttaaagcccaactttttctaacttttttttggagctactttacctggtaaacaatgtagtctccatattataaagccatctatcttcaagatagtgatagccctgattgaccacagcatggatattgagagtaatattgaactgctttcttagggcttgcaaaatcaaggtgctagagatacctaagattatagaatagtggaataagatttggaaccagagaattgggcttgaatctcaggcctgccacacattggttttgtgaccttggataggtaacttagcttttgagcctcagtttccttttttattgtaacatatatacttcacaaggatgtgatgagaatttaatgaggtagaaagtataaagcagggaaataaaaaaagctccatagaataccgtacaaaccttattggtatttgaatggtgttgaacttgggtggtttacaatatgctgaacttcagcagaagcgacagatttattcataccagtttttcgtttcttggtgattaattttcctctgaggaaaaattaccaccctttgttgttgttgttgttgttgtttttgagacagagccttgctctgtcgcccaagctggagtgtggtggcacaatcttggctcactgcaatctccacctcctgcgttcaagcagttctcctgcctcagcctcctgaatagctgggattacagcacccaccaccacgcctagctaa

SEQ ID NO: 380655 - DNA, 369 bp, Homo sapiens
ggaggcagtggaatcttattctgagccaccggggtggggtttaaaaatgttaatgggcatagaatcacccagagaggtagggcagtgagtttaaatgcagattcccaggtctttccctcagagaaattaatccagtaggtctggttgggggcccaggaatctgcatcttattgagctccttgcatagttttgtgggtggtggcctaggactagactttgagaaacactgtaaagggaccatgaaggggctgggacatgctccaatctgattatgatttgggactttccatagttcaaaattcccttgatattgctacagactgtgggcttccgaagttttacccagcactgcttttttctactaatgaa

SEQ ID NO: 380656 - DNA, 159 bp, Homo sapiens
ggaacagatttgaggacatcctccagcacgatcagtctgggagatatgcggaaagaataatcatcttacagacaccatgtacctatcacctggtataagaaagaaatccttagcaataaagacggaaccacgtatgtcctcctcccctcaccctcagag

SEQ ID NO: 380657 - DNA, 636 bp, Homo sapiens
tcaaaaatctttggcatattaagacagcaaaactaaacctgatatttgctctcagccattctgctttaccctgggaacacaaagctttacttctaattttttaagaaagtgtggttttctttttgtaagtatctctttcaggccaaggtgggaagatcacctgaggtcaggagtttgagaccagcctggccaacatggtgaaaccccatctctactaaaaatacaaaaattagctgggcgtggtggtgcacatctgtaatctcagctactcgggaggctgaggcaggagaatgccttgaacctgggaggcagaggttgcagtgagccaagattgctccactgcactccagcctggacaagagtggaactccatctcaaaaaaaaaaagtatctctctcatcaacaggggtttacctatatatctcagggtattctaatagcctaattaaaatatttttcttaagaatatgtgattttaaaacttaattcagtgttcccttaatttaaccacattatttttatttacttttggtaaggattatgtcttttcataaatttaagtgatcgttaagataggctcctttaagttacacaaattcagccagacttatcagaaaatgagtaaggaagagtgaa

SEQ ID NO: 380658 - DNA, 353 bp, Homo sapiens
atttagaacaagatattatactcttaattcatcatccggttaacttttcttctgaaagtaagataaaaacatttctcattctttttgggccattagtacatgaaatagtatattcattacataagtactggagcttttaagctatcaatggaatcttgtttagtcagctaaagcacatgtattacctttttgtatgggtacaaagtgattcaaagcaagatatcttttaatcctctgaggaaaacagttgtatatttttctctggcctgctttccatgttaacatttcttatttcattctgttttcctgtggacttggctctgaccattaagtgatgattaaaaaaaaaaaat

SEQ ID NO: 380659 - DNA, 7866 bp, Homo sapiens
ccactgagcagccaaccgcagcctctggccacaaggagagcggagcacaggagcaggaagccgcctaccaccatgagcagcacgctgtcacccacagactttgacagcttggaaatccagggccagtacagtgacatcaacaaccgctgggaccttcctgactcggactgggacaatgacagcagctcggcccgcctctttgagaggtctcgcattaaggctctggcagatgaacgagaagctgtgcagaagaaaaccttcaccaagtgggtaaactcgcacctggcccgggtcacgtgccgggtgggggacctgtacagcgacctccgggacggacgcaacctgctgaggctcctcgaggtgctctcgggagagatactgccaaagcctacaaagggccgcatgcggatccactgcctggagaacgtggacaaggcactgcagttcctcaaggagcagaaagtgcacttggaaaacatgggctcccatgacattgtggacggaaaccaccgactgacccttgggctggtctggaccatcatccttcgattccagatccaagacatcagtgtggagacagaagacaacaaggagaagaagtcagccaaggatgccctgcttctgtggtgccagatgaagactgcaggttatcccaacgtcaatgtacacaacttcaccaccagctggagagatggactagctttcaacgccatcgtgcataaacaccggccagacctgctggattttgagtctctgaagaagtgtaatgcacactataatctgcagaatgcattcaatctggctgaaaaggaactgggacttaccaagctgctggatcccgaagacgtgaatgtggaccagccagatgagaagtcaatcattacctatgtggctacttactaccattacttctccaagatgaaggccctggccgtggaaggcaagagaattggcaaggtgctggaccatgccatggaggcagagcgcctggtggagaaatacgagtccctggcctcggagctgctgcagtggatcgagcaaacgatcgtgaccctcaatgaccggcagttggccaactcccttagcggggtccagaaccagctgcagtccttcaactcctaccgcaccgtggagaagccgcccaagtttaccgagaaagggaacttggaagtgctgctcttcaccatccagagcaagcttcgggccaacaaccagaaggtctacacgccccgcgagggccggctcatctcggacatcaacaaggcttgggagcggctggagaaggcggagcacgagcgtgagctggccctgcgcaccgagctcatccgccaggagaagctggagcagctggccgcccgcttcgaccgcaaggctgccatgcgggagacctggctcagcgagaaccagcgcctcgtgtcccaggacaactttgggctggagctggcagctgtcgaggcagcagtacggaagcacgaagccattgagacggacatcgtggcctacagcggccgggtgcaggcagtggacgccgtggctgcagagctggccgccgagcgctaccacgacatcaagcgcatcgccgctcggcagcacaacgtggcacggctctgggacttcttgcggcagatggtggccgcccggcgggagcggctcctcctcaacctggagctgcagaaggtgttccaggacctgctctacctcatggactggatggaagagatgaagggccggctgcagtctcaggacctgggcaggcacctagcaggagtggaggacctgctgcagctgcacgagctggtggaggcagacatcgccgtgcaggccgagagggtgcgggccgtcagcgcctctgccctgcgcttctgcaacccagggaaagagtatagaccttgcgacccgcagctggtgtcggagcgggtggccaagctagagcagagctatgaggcactgtgcgagttggcagcggcgcggcgggcccggctggaggaatcacggcggctctggcgtttcctctgggaggtgggtgaagctgaggcctgggtgcgggagcagcagcacctcctggcctcagccgacacgggccgagacctgaccggtgccctccgcctgctcaacaagcacacagccctgcggggcgagatgagcggccggctggggcccctgaagctcaccctggagcagggccagcagttggtggccgagggtcaccctggggcaagccaggcctctgcccgtgcagctgaactccaagcccagtgggagcggctagaggccctggccgaggagcgtgcccagcggctggcccaagccgccagcctctaccagttccaggccgatgcaaacgacatggaggcctggttggttgacgcactgcgcctggtgtccagccccgagctggggcacgacgagttctccacgcaggctctagccaggcagcatcgggccctggaggaggagattcgaagccaccggccaaccctggacgccttgagggaacaggcagcagccctgccccccacactgagccgcacgcccgaggtgcagggccgggtgcccaccctggagcggcactacgaggagctgcaggcccgggcaggcgagcgagcgcgggccttggaggcagccctggcgctctacaccatgctcagcgaggccggggcctgtggactctgggtggaggagaaggagcagtggctcaacgggctggccctgcctgaacgcctggaggacctggaggtcgtgcagcagaggttcgagaccctggagcctgaaatgaacacccttgcagcacaaatcaccgcggtgaatgacattgccgagcagttactgaaggccaaccccccaggcaaagaccgcattgtcaacacccaggagcagctcaaccacaggtggcagcagtttcggcgtctggcagacggcaagaaggcagctctcacctcagccctgagcatccagaactaccacttagagtgcacggagacccaggcctggatgagagagaagaccaaagtcatcgagtccacccagggcctaggcaacgatctggctggggtgctggccctgcagcgcaagctggccggcacggagcgggacctggaggccatcgccgcccgggtgggcgaactgactcgagaggcaaatgccctggctgccggccatcccgctcaggcagtggccatcaacgcccggctgagagaggtgcagaccggctgggaggacctcagggccaccatgcggcgtcgagaagagtcgctgggggaggcgcggcggctgcaggacttcttgcgcagcttggatgacttccaggcctggctaggccgcactcagactgctgtggcctctgaagaagggccggccaccctgcctgaggcagaggccctcctggcccaacatgcagccctgcggggagaggtggagcgggcccagagcgagtatagccggctgcgagccctgggcgaggaggtgacccgggaccaggctgacccccagtgcctcttcctacgacagcgactggaggccctgggaactggctgggaggagctgggccgaatgtgggagagccggcaaggtcgcctggcccaggcccacggcttccagggattcctgcgggatgctcgtcaggctgagggcgtgctcagcagccaggaatatgttctgtctcacacggagatgccagggacactccaggctgctgatgctgccattaaaaaactggaggacttcatgagcaccatggacgccaatggggaacggatccacgggctcctggaggctggccgccagctggtatctgaaggcaacatccacgccgacaagattcgggaaaaggcagactccattgagaggaggcacaagaagaatcaagacgcagcgcagcaatttctgggccgtcttcgggacaaccgggagcagcagcatttcctgcaagattgtcacgagctgaagctctggatcgacgagaagatgctgacagcccaggacgtgtcctatgacgaggcccgcaacctgcatactaagtggcagaagcaccaggcattcatggccgagctggctgccaacaaagactggctggacaaggtggacaaggaagggcgagagctcacccttgagaagccagagctgaaagccctggtgtcggagaagctgagagacctgcacaggcgctgggacgagctggagaccaccacccaagccaaggcccgcagcctctttgatgccaaccgagctgagctgtttgcccagagctgctgtgccctggagagctggctggagagcctgcaggcccagctgcactcggatgactacggcaaggacctcaccagcgtcaacatcctgctcaagaagcagcagatgctggaatgggagatggctgtgagagagaaggaggtggaggcaatccaggcccaggccaaagcactggcccaggaggaccagggtgcaggggaggtggagagaacctcgagggccgtggaggagaagttcagggccttgtgccagcccatgcgggaacgctgccggcgcctgcaggcttctcgcgagcagcaccagttccaccgcgatgtggaagatgagattttgtgggtgacagagcggctgcccatggccagctccatggagcatggcaaggacctgcccagcgtccagcttctcatgaagaaaaaccagaccctgcagaaagagattcagggccatgagccccggatcgcggacctgagggagcggcagcgtgctctaggtgcagcagcagcaggtccagagctggctgagctgcaggaaatgtggaaacgcctgggccacgagctggaacttcgagggaagcgactggaggatgccctgcgagcccagcagttctaccgcgatgccgccgaggcggaggcctggatgggcgagcaggaattacacatgatgggccaggagaaggccaaggatgagctgagtgcccaggcagaggtgaagaagcaccaggtgctggagcaagccctggccgactacgcgcagaccatccaccagctggcggccagcagccaggacatgattgaccacgagcacccagagagcactcggatatccatccgccaagcccaggtggacaagctgtatgccggcctgaaggagctggctggagagcggcgggagcgcctgcaggagcacctccggctgtgccagctccgccgcgagctggatgacctggaacagtggatccaggagcgcgaggtggtggcggcctcccacgagctgggccaggactacgagcatgtgactatgctccgagacaaattccgagagttctcccgggacacaagcaccatcggtcaggagcgcgtagatagcgccaatgcgctggccaatgggctcattgctgggggccatgctgcacgggccaccgtggccgagtggaaggacagtctcaacgaggcctgggctgacctgcttgagctgctggacacacggggtcaggtgctggccgcggcgtacgagctgcagcgcttcctgcacggggcacgccaagccctggcgcgggtgcagcacaagcagcagcagcttccggacgggactggccgcgacctcaacgctgccgaggccctgcagcgccgacactgtgcctacgagcatgacattcaggccctcagcccccaggtccagcaggtgcaggacgacggccaccggctccagaaggcctacgctggagacaaggctgaggagatcggccgccacatgcaggccgtggccgaggcctgggcccagcttcagggaagctctgccgcccgccggcagctgctgctggacaccacagacaagttccgcttcttcaaggctgtccgggaactgatgctctggatggatgaggtcaacctgcagatggatgcccaggagcgtccccgggatgtgtcctccgcggatctagtcatcaagaaccagcaaggcatcaaggcagagatagaggcccgggcagaccgcttctcctcctgcatcgacatggggaaggagctgctggccaggagccactatgcggccgaggagatctcagagaagctgtctcagctgcaggcacggcgccaggagacagctgagaagtggcaggagaagatggactggcttcagctggttttggaggtgcttgtgtttggaagagatgcagggatggcagaggcctggctctgcagccaggagccactggtgcgcagcgctgagctgggttgcacggtcgacgaagttgagagcctcatcaagcggcacgaggccttccagaagtcagcagtggcctgggaggagcgattctgtgcgctggagaagcttactgcgctagaggagcgggagaaggagcgaaagagaaagagggaggaggaggagcggcggaaacagccgcctgctcccgaacccacagccagtgtgcctccaggggacctggtgggcggccagacagcttctgacaccacctgggacggaacccagccacggccaccaccatccacacaagcacccagtgttaatggagtctgcacagatggagagccctcacagcccctgctgggacaacagagacttgagcacagcagcttccccgaagggccgggacctggctcaggggacgaagccaatgggccccggggagagaggcagacccggactcggggcccggccccatctgcaatgccccagagcaggtctaccgagtcagcccatgctgccaccctgccgcctcgaggcccagagccatctgcccaggagcagatggaggggatgctgtgccgcaagcaggagatggaggccttcgggaagaaggctgccaacaggtcctggcagaacgtgtactgtgtcctgcggcgtgggagcctcggcttttacaaggatgccaaggcagccagcgcgggagtgccataccacggagaagtgcctgtcagcctggccagggcccagggcagcgtcgcctttgattaccgaaagcgcaaacatgtcttcaagctgggcttacaggatggaaaagaatatttattccaggccaaggatgaggcagagatgagctcgtggctacgggtggtgaatgcagccattgccacagcgtcttctgcctctggagagcctgaagagccggtggtgcccagcaccacccggggcatgacccgggccatgaccatgcccccagtgtcacccgtcggggctgaggggcctgttgtgctccgcagcaaagacggcagagaacgagagcgagaaaaacgcttcagcttctttaagaagaacaagtagttgggggcaaggtcccaggccaactccctccctccgttcaggaaactgccagggacagtcgacagggaccgccctcttgtcaggacaactgcctgctgctagggtctgttgccaaggtcaacccatcaccaggaactgtcactggggacgagtccatgttcccaagggcagcccttctcttctgctgtttaattccagactggtggtgggacccaggtaaccccctctcccacccccgccgacttctcccctttccccagcctcgtgcctctgtccctcaccacggtgtggacagtgccgcaccctcaacataggccatgtggggagtggctgcccctgcctcagggtcattctcctgccatgcgagggcactcgccttctgccttctggttcctcacccctcagaccagccaggaacctctcagagctgaagcaggccctgggggcagaagtgccagatgacagtcagaggcgcaggagccctccctccccacccccaccctgtaactccagctgccactccatctccagctgctctcaatggcttccaggtgtgttgttcggggacagccaccgccttgagtctggccaaggaggtgattaaacagctcagcttctctc

SEQ ID NO: 380660 - DNA, 817 bp, Homo sapiens
atttttttggaaattcagtgtaacaatctttggcttttaactgaataatttaatccatttggtatttaatgtagctggtgatatgtttagatttaaatctacccatctttgtgctacttgtcctactggttctttcttttcttcacttcttcaggattaatttttattaatcatttgttatcttctgtcggttgagaagttaaaagtctggtttctacatttttagaagataacttagaaattaaaacttgggccgggcgcggtggctcacgcctgtaatcccagcactttgggaggccgaggcgggcggatcacgaggtcaggagatcgagaccatcccggctaaaacggtgaaaccccgtctctactaaaaatacaaaaattagccgggcgtagtggcgggcgcctgtagtcccagctacttgggaggctgaggcaggagcattgcttgaacctgggaagcagaggttacagtgagccgagatcatgccactgcactccagtctaggcaataaagtgagaccctgtctccaaaaaaaaaaaataggattatgtagagaaaaatatatttgcattcttaacatcacctacaagagtggactttaggtccatgctgtccacagcagcagccacccagccatgtgtggctactgagatgtagccaaaccaagtgtgtcatgactctgaaacaccaggtatgaagcatggaagaggacaacaactttaaataccttaatttttatattgattatgtgttgaaataatattttagatatattgggtttcaaaagtatcattaaagtgaatttcaactatt

SEQ ID NO: 380661 - DNA, 10965 bp, Homo sapiens
  misc_feature (10452)..(10452): n is a, c, g, or t
  misc_feature (10559)..(10559): n is a, c, g, or t
gggaacggaggctggatctcggaaacctcgtcggcagtgtcattagaggaagatcgcgtgtctcgggatacggattttggaggaaaagcagaataggacaaggagcaggaagccgcctaccaccatgagcagcacgctgtcacccacagactttgacagcttggaaatccagggccagtacagtgacatcaacaaccgctgggaccttcctgactcggactgggacaatgacagcagctcggcccgcctctttgagaggtctcgcattaaggctctggcagatgaacgagaagctgtgcagaagaaaaccttcaccaagtgggtaaactcgcacctggcccgggtcacgtgccgggtgggggacctgtacagcgacctccgggacggacgcaacctgctgaggctcctcgaggtgctctcgggagagatactgccaaagcctacaaagggccgcatgcggatccactgcctggagaacgtggacaaggcactgcagttcctcaaggagcagaaagtgcacttggaaaacatgggctcccatgacattgtggacggaaaccaccgactgacccttgggctggtctggaccatcatccttcgattccagatccaagacatcagtgtggagacagaagacaacaaggagaagaagtcagccaaggatgccctgcttctgtggtgccagatgaagactgcaggttatcccaacgtcaatgtacacaacttcaccaccagctggagagatggactagctttcaacgccatcgtgcataaacaccggccagacctgctggattttgagtctctgaagaagtgtaatgcacactataatctgcagaatgcattcaatctggctgaaaaggaactgggacttaccaagctgctggatcccgaagacgtgaatgtggaccagccagatgagaagtcaatcattacctatgtggctacttactaccattacttctccaagatgaaggccctggccgtggaaggcaagagaattggcaaggtgctggaccatgccatggaggcagagcgcctggtggagaaatacgagtccctggcctcggagctgctgcagtggatcgagcaaacgatcgtgaccctcaatgaccggcagttggccaactcccttagcggggtccagaaccagctgcagtccttcaactcctaccgcaccgtggagaagccgcccaagtttaccgagaaagggaacttggaagtgctgctcttcaccatccagagcaagcttcgggccaacaaccagaaggtctacacgccccgcgagggccggctcatctcggacatcaacaaggcttgggagcggctggagaaggcggagcacgagcgtgagctggccctgcgcaccgagctcatccgccaggagaagctggagcagctggccgcccgcttcgaccgcaaggctgccatgcgggagacctggctcagcgagaaccagcgcctcgtgtcccaggacaactttgggctggagctggcagctgtcgaggcagcagtacggaagcacgaagccattgagacggacatcgtggcctacagcggccgggtgcaggcagtggacgccgtggctgcagagctggccgccgagcgctaccacgacatcaagcgcatcgccgctcggcagcacaacgtggcacggctctgggacttcttgcggcagatggtggccgcccggcgggagcggctcctcctcaacctggagctgcagaaggtgttccaggacctgctctacctcatggactggatggaagagatgaagggccggctgcagtctcaggacctgggcaggcacctagcaggagtggaggacctgctgcagctgcacgagctggtggaggcagacatcgccgtgcaggccgagagggtgcgggccgtcagcgcctctgccctgcgcttctgcaacccagggaaagagtatagaccttgcgacccgcagctggtgtcggagcgggtggccaagctagagcagagctatgaggcactgtgcgagttggcagcggcgcggcgggcccggctggaggaatcacggcggctctggcgtttcctctgggaggtgggtgaagctgaggcctgggtgcgggagcagcagcacctcctggcctcagccgacacgggccgagacctgaccggtgccctccgcctgctcaacaagcacacagccctgcggggcgagatgagcggccggctggggcccctgaagctcaccctggagcagggccagcagttggtggccgagggtcaccctggggcaagccaggcctctgcccgtgcagctgaactccaagcccagtgggagcggctagaggccctggccgaggagcgtgcccagcggctggcccaagccgccagcctctaccagttccaggccgatgcaaacgacatggaggcctggttggttgacgcactgcgcctggtgtccagccccgagctggggcacgacgagttctccacgcaggctctagccaggcagcatcgggccctggaggaggagattcgaagccaccggccaaccctggacgccttgagggaacaggcagcagccctgccccccacactgagccgcacgcccgaggtgcagggccgggtgcccaccctggagcggcactacgaggagctgcaggcccgggcaggcgagcgagcgcgggccttggaggcagccctggcgctctacaccatgctcagcgaggccggggcctgtggactctgggtggaggagaaggagcagtggctcaacgggctggccctgcctgaacgcctggaggacctggaggtcgtgcagcagaggttcgagaccctggagcctgaaatgaacacccttgcagcacaaatcaccgcggtgaatgacattgccgagcagttactgaaggccaaccccccaggcaaagaccgcattgtcaacacccaggagcagctcaaccacaggtggcagcagtttcggcgtctggcagacggcaagaaggcagctctcacctcagccctgagcatccagaactaccacttagagtgcacggagacccaggcctggatgagagagaagaccaaagtcatcgagtccacccagggcctaggcaacgatctggctggggtgctggccctgcagcgcaagctggccggcacggagcgggacctggaggccatcgccgcccgggtgggcgaactgactcgagaggcaaatgccctggctgccggccatcccgctcaggcagtggccatcaacgcccggctgagagaggtgcagaccggctgggaggacctcagggccaccatgcggcgtcgagaagagtcgctgggggaggcgcggcggctgcaggacttcttgcgcagcttggatgacttccaggcctggctaggccgcactcagactgctgtggcctctgaagaagggccggccaccctgcctgaggcagaggccctcctggcccaacatgcagccctgcggggagaggtggagcgggcccagagcgagtatagccggctgcgagccctgggcgaggaggtgacccgggaccaggctgacccccagtgcctcttcctacgacagcgactggaggccctgggaactggctgggaggagctgggccgaatgtgggagagccggcaaggtcgcctggcccaggcccacggcttccagggattcctgcgggatgctcgtcaggctgagggcgtgctcagcagccaggaatatgttctgtctcacacggagatgccagggacactccaggctgctgatgctgccattaaaaaactggaggacttcatgagcaccatggacgccaatggggaacggatccacgggctcctggaggctggccgccagctggtatctgaaggcaacatccacgccgacaagattcgggaaaaggcagactccattgagaggaggcacaagaagaatcaagacgcagcgcagcaatttctgggccgtcttcgggacaaccgggagcagcagcatttcctgcaagattgtcacgagctgaagctctggatcgacgagaagatgctgacagcccaggacgtgtcctatgacgaggcccgcaacctgcatactaagtggcagaagcaccaggcattcatggccgagctggctgccaacaaagactggctggacaaggtggacaaggaagggcgagagctcacccttgagaagccagagctgaaagccctggtgtcggagaagctgagagacctgcacaggcgctgggacgagctggagaccaccacccaagccaaggcccgcagcctctttgatgccaaccgagctgagctgtttgcccagagctgctgtgccctggagagctggctggagagcctgcaggcccagctgcactcggatgactacggcaaggacctcaccagcgtcaacatcctgctcaagaagcagcagatgctggaatgggagatggctgtgagagagaaggaggtggaggcaatccaggcccaggccaaagcactggcccaggaggaccagggtgcaggggaggtggagagaacctcgagggccgtggaggagaagttcagggccttgtgccagcccatgcgggaacgctgccggcgcctgcaggcttctcgcgagcagcaccagttccaccgcgatgtggaagatgagattttgtgggtgacagagcggctgcccatggccagctccatggagcatggcaaggacctgcccagcgtccagcttctcatgaagaaaaaccagaccctgcagaaagagattcagggccatgagccccggatcgcggacctgagggagcggcagcgtgctctaggtgcagcagcagcaggtccagagctggctgagctgcaggaaatgtggaaacgcctgggccacgagctggaacttcgagggaagcgactggaggatgccctgcgagcccagcagttctaccgcgatgccgccgaggcggaggcctggatgggcgagcaggaattacacatgatgggccaggagaaggccaaggatgagctgagtgcccaggcagaggtgaagaagcaccaggtgctggagcaagccctggccgactacgcgcagaccatccaccagctggcggccagcagccaggacatgattgaccacgagcacccagagagcactcggatatccatccgccaagcccaggtggacaagctgtatgccggcctgaaggagctggctggagagcggcgggagcgcctgcaggagcacctccggctgtgccagctccgccgcgagctggatgacctggaacagtggatccaggagcgcgaggtggtggcggcctcccacgagctgggccaggactacgagcatgtgactatgctccgagacaaattccgagagttctcccgggacacaagcaccatcggtcaggagcgcgtagatagcgccaatgcgctggccaatgggctcattgctgggggccatgctgcacgggccaccgtggccgagtggaaggacagtctcaacgaggcctgggctgacctgcttgagctgctggacacacggggtcaggtgctggccgcggcgtacgagctgcagcgcttcctgcacggggcacgccaagccctggcgcgggtgcagcacaagcagcagcagcttccggacgggactggccgcgacctcaacgctgccgaggccctgcagcgccgacactgtgcctacgagcatgacattcaggccctcagcccccaggtccagcaggtgcaggacgacggccaccggctccagaaggcctacgctggagacaaggctgaggagatcggccgccacatgcaggccgtggccgaggcctgggcccagcttcagggaagctctgccgcccgccggcagctgctgctggacaccacagacaagttccgcttcttcaaggctgtccgggaactgatgctctggatggatgaggtcaacctgcagatggatgcccaggagcgtccccgggatgtgtcctccgcggatctagtcatcaagaaccagcaaggcatcaaggcagagatagaggcccgggcagaccgcttctcctcctgcatcgacatggggaaggagctgctggccaggagccactatgcggccgaggagatctcagagaagctgtctcagctgcaggcacggcgccaggagacagctgagaagtggcaggagaagatggactggcttcagctggttttggaggtgcttgtgtttggaagagatgcagggatggcagaggcctggctctgcagccaggagccactggtgcgcagcgctgagctgggttgcacggtcgacgaagttgagagcctcatcaagcggcacgaggccttccagaagtcagcagtggcctgggaggagcgattctgtgcgctggagaagcttactgcgctagaggagcgggagaaggagcgaaagagaaagagggaggaggaggagcggcggaaacagccgcctgctcccgaacccacagccagtgtgcctccaggggacctggtgggcggccagacagcttctgacaccacctgggacggaacccagccacggccaccaccatccacacaagcacccagtgttaatggagtctgcacagatggagagccctcacagcccctgctgggacaacagagacttgagcacagcagcttccccgaagggccgggacctggctcaggggacgaagccaatgggccccggggagagaggcagacccggactcggggcccggccccatctgcaatgccccagagcaggtctaccgagtcagcccatgctgccaccctgccgcctcgaggcccagagccatctgcccaggagcagatggaggggatgctgtgccgcaagcaggagatggaggccttcgggaagaaggctgccaacaggtcctggcagaacgtgtactgtgtcctgcggcgtgggagcctcggcttttacaaggatgccaaggcagccagcgcgggagtgccataccacggagaagtgcctgtcagcctggccagggcccagggcagcgtcgcctttgattaccgaaagcgcaaacatgtcttcaagctgggcttacaggatggaaaagaatatttattccaggccaaggatgaggtgagctgtccttcgtgttcctctctgtccgtgccattccagaagcttccagctgcagactccccttctttccctgtcctccctctttttcctggtcttgtcctttgtggtaagactggatgtgtgcgacggccgcaccaggccgcactccctgtctaagccggccacattctcctaatagcatgaaacagtcagctcactttctgcctcctcctcttacacttccctgctgtccactgcggccaactcagcacagtgtccttgaagctgattgagggtctttccatccacaggcagagatgagctcgtggctacgggtggtgaatgcagccattgccacagcgtcttctgcctctggagagcctgaagagccggtggtgcccagcaccacccggggcatgacccgggccatgaccatgcccccagtgtcacccgtcggggctgaggggcctgttgtgctccgcagcaaagacggcagagaacgagagcgagaaaaacgcttcagcttctttaagaagaacaagtagttgggggcaaggtcccaggccaactccctccctccgttcaggaaactgccagggacagtcgacagggaccgccctcttgtcaggacaactgcctgctgctagggtctgttgccaaggtcaacccatcaccaggaactgtcactggggacgagtccatgttcccaagggcagcccttctcttctgctgtttaattccagactggtggtgggacccaggtaaccccctctcccacccccgccgacttctcccctttccccagcctcgtgcctctgtccctcaccacggtgtggacagtgccgcaccctcaacataggccatgtggggagtggctgcccctgcctcagggtcattctcctgccatgcgagggcactcgccttctgccttctggttcctcacccctcagaccagccaggaacctctcagagctgaagcaggccctgggggcagaagtgccagatgacagtcagaggcgcaggagccctccctccccacccccaccctgtaactccagctgccactccatctccagctgctctcaatggcttccaggtgtgttgttcggggacagccaccgccttgagtctggccaaggaggtgattaaacagctcagcttctctcaccgcctctgggtgtctttgctttcctgaccacagcctctctgcccaagcctgtgtcctctccttccgttctggtctccttcatctcacgtttccccagcctccaagctcttgaagagccgtgtcacactgagagcttccctgacctggtctcatttccctctgacagtgacctccagtgtgctgggttgaccaatgccaagcctctttttaaaccaaagtagttcaccatgggttgggatgatgtcaacaagcagtattcatgttaaaaagcaatgagggactccttccctggtgcacaattttcttcacttgtgatctctaaactgttttcaaattggaagactgggaagcattgctacagccccagccagtctcagccactgctcagcccagtggtggaaagctgagcacacagcgggtgcttactgcccccacttgccgtctgctctccagtagatcaagggacctcagacagggatctgagaagtggcaggttccaataaactgatcaacagaatgaagtcactctgggaagccatgaggtgactttacagcccaagcatgtaaatatacacacagaggataatatatattcttttttttttttttttttgagacagagtctcgctctgtcagccaagctggactgcagtggcgcaatcacagcccattgcaacctccacctcctgggttcaagcaatcctcccacctcagcctcccgagtagcctgaaccacaggcacatgccatcatacccgactaagtctgtttgttttttgtagagacggggtctcactatgttgcccaggtcggtctcgaattcctgggcccaagtgattctctcaccttggcctcaaactgttgggattacaggcgtgagccaccatgcccagctgagactaccttctggatctgatgaagtattagaaaggagcgggtggcttctcctttgtctctggtttggcaatcggagctttcagggcacagtgtttgtctccagatgttgatggaagtgggcactccttggtggcctccaacaggaaaagcgtgttctttcattgtttcctatacacacagacaaccgtttttccaggaaggcagccccatctttagtcattgactgcgggcctatcatcagtcatgacgaagaccgagtgaggtgtgtgcaggcccagaactagcacatcacagccccagagtgggctccaaaccggtagaccagagagcctgcaggataatttcccccttaagatgggtagatttactgttccacagccaacaggtggatacgcgtaactagaacaatctgtcatgggactaagtggaagaatccatcagcactacacagcatcttttcttcaaatacaactgtaaaatctccactgaagagacagtcataccttgggggtgctcagggaatctaggtatttgcactccaagctggcaagcctgggggcactgaagggaaacaataattggaaatgtcagaaggaaatgtatatggagaaattaatagagaaatgattattttaacatgacacgtaagtgtaaataggacagccaattgaagcagtcctgcagtaggggcaggcattgtcaacggagaggtgagactgaagaccccgagcagcatctgcatatgcggcagcaggacttcagggcatgattccttaagaacaggacatagaagaggggaagcatagtgtcaggaattaagtcagaaaacaccttcagctgtgagtggaagaaagaaaaaattccaggaaagacaacaggatggaatggggcggtgagggctatgagacaagttagacacaaaaatacaataaatgcaggcagcacaaatcaatggagagagatggcagataaaaatggattacttgggccgggcgcggtggctcacgcctgtaatcccagcactttgggaggccgaggcgggcggatcacgaggtcaggagatcgagaccatcccggctaaaacggtgaaaccccgtctctactaaaaatacaaaaattagccgggcgtagtggcgggcgcctgtagtcccagctacttgggaggctgaggcaggagaatggcgtgaacccgggaggcggagcttgcagtgagccgagatgccgccactgcgctccagcctgggtgacagagcgagactccatctcaaaaaaaaaaaaaaaaaaaaaatggattacttggccaggcatggtggttcacgcttataatcccagcactttgggangccgaggtgagtgggtcacttgagctcaggagttcaagaccagcctgggcaacatggtgaaccccatctctacaaaaattagccaggtgtagtggcatgtgcctgtngtctcagctacttgggaggctgaggcaggagcattgcttgaacctgggaagcagaggttacagtgagccgagatcatgccactgcactccagtctaggcaataaagtgagaccctgtctccaaaaaaaaaaaataggattatgtagagaaaaatatatttgcattcttaacatcacctacaagagtggactttaggtccatgctgtccacagcagcagccacccagccatgtgtggctactgagatgtagccaaaccaagtgtgtcatgactctgaaacaccaggtatgaagcatggaagaggacaacaactttaaataccttaatttttatattgattatgtgttgaaataatattttagatatattgggtttcaaaagtatcattaaagtgaatttcaactatt

SEQ ID NO: 380662 - DNA, 4224 bp, Homo sapiens
  misc_feature (3711)..(3711): n is a, c, g, or t
  misc_feature (3818)..(3818): n is a, c, g, or t
accttctacacgctgaatgcagcattttttgacagctagaggagcgggagaaggagcgaaagagaaagagggaggaggaggagcggcggaaacagccgcctgctcccgaacccacagccagtgtgccccctgctgggacaacagagacttgagcacagcagcttccccgaagggccgggacctggctcaggggacgaagccaatgggccccggggagagaggcagacccggactcggggcccggccccatctgcaatgccccagagcaggtctaccgagtcagcccatgctgccaccctgccgcctcgaggcccagagccatctgcccaggagcagatggaggggatgctgtgccgcaagcaggagatggaggccttcgggaagaaggctgccaacaggtcctggcagaacgtgtactgtgtcctgcggcgtgggagcctcggcttttacaaggatgccaaggcagccagcgcgggagtgccataccacggagaagtgcctgtcagcctggccagggcccagggcagcgtcgcctttgattaccgaaagcgcaaacatgtcttcaagctgggcttacaggatggaaaagaatatttattccaggccaaggatgaggcagagatgagctcgtggctacgggtggtgaatgcagccattgccacagcgtcttctgcctctggagagcctgaagagccggtggtgcccagcaccacccggggcatgacccgggccatgaccatgcccccagtgtcacccgtcggggctgaggggcctgttgtgctccgcagcaaagacggcagagaacgagagcgagaaaaacgcttcagcttctttaagaagaacaagtagttgggggcaaggtcccaggccaactccctccctccgttcaggaaactgccagggacagtcgacagggaccgccctcttgtcaggacaactgcctgctgctagggtctgttgccaaggtcaacccatcaccaggaactgtcactggggacgagtccatgttcccaagggcagcccttctcttctgctgtttaattccagactggtggtgggacccaggtaaccccctctcccacccccgccgacttctcccctttccccagcctcgtgcctctgtccctcaccacggtgtggacagtgccgcaccctcaacataggccatgtggggagtggctgcccctgcctcagggtcattctcctgccatgcgagggcactcgccttctgccttctggttcctcacccctcagaccagccaggaacctctcagagctgaagcaggccctgggggcagaagtgccagatgacagtcagaggcgcaggagccctccctccccacccccaccctgtaactccagctgccactccatctccagctgctctcaatggcttccaggtgtgttgttcggggacagccaccgccttgagtctggccaaggaggtgattaaacagctcagcttctctcaccgcctctgggtgtctttgctttcctgaccacagcctctctgcccaagcctgtgtcctctccttccgttctggtctccttcatctcacgtttccccagcctccaagctcttgaagagccgtgtcacactgagagcttccctgacctggtctcatttccctctgacagtgacctccagtgtgctgggttgaccaatgccaagcctctttttaaaccaaagtagttcaccatgggttgggatgatgtcaacaagcagtattcatgttaaaaagcaatgagggactccttccctggtgcacaattttcttcacttgtgatctctaaactgttttcaaattggaagactgggaagcattgctacagccccagccagtctcagccactgctcagcccagtggtggaaagctgagcacacagcgggtgcttactgcccccacttgccgtctgctctccagtagatcaagggacctcagacagggatctgagaagtggcaggttccaataaactgatcaacagaatgaagtcactctgggaagccatgaggtgactttacagcccaagcatgtaaatatacacacagaggataatatatattcttttttttttttttttttgagacagagtctcgctctgtcagccaagctggactgcagtggcgcaatcacagcccattgcaacctccacctcctgggttcaagcaatcctcccacctcagcctcccgagtagcctgaaccacaggcacatgccatcatacccgactaagtctgtttgttttttgtagagacggggtctcactatgttgcccaggtcggtctcgaattcctgggcccaagtgattctctcaccttggcctcaaactgttgggattacaggcgtgagccaccatgcccagctgagactaccttctggatctgatgaagtattagaaaggagcgggtggcttctcctttgtctctggtttggcaatcggagctttcagggcacagtgtttgtctccagatgttgatggaagtgggcactccttggtggcctccaacaggaaaagcgtgttctttcattgtttcctatacacacagacaaccgtttttccaggaaggcagccccatctttagtcattgactgcgggcctatcatcagtcatgacgaagaccgagtgaggtgtgtgcaggcccagaactagcacatcacagccccagagtgggctccaaaccggtagaccagagagcctgcaggataatttcccccttaagatgggtagatttactgttccacagccaacaggtggatacgcgtaactagaacaatctgtcatgggactaagtggaagaatccatcagcactacacagcatcttttcttcaaatacaactgtaaaatctccactgaagagacagtcataccttgggggtgctcagggaatctaggtatttgcactccaagctggcaagcctgggggcactgaagggaaacaataattggaaatgtcagaaggaaatgtatatggagaaattaatagagaaatgattattttaacatgacacgtaagtgtaaataggacagccaattgaagcagtcctgcagtaggggcaggcattgtcaacggagaggtgagactgaagaccccgagcagcatctgcatatgcggcagcaggacttcagggcatgattccttaagaacaggacatagaagaggggaagcatagtgtcaggaattaagtcagaaaacaccttcagctgtgagtggaagaaagaaaaaattccaggaaagacaacaggatggaatggggcggtgagggctatgagacaagttagacacaaaaatacaataaatgcaggcagcacaaatcaatggagagagatggcagataaaaatggattacttgggccgggcgcggtggctcacgcctgtaatcccagcactttgggaggccgaggcgggcggatcacgaggtcaggagatcgagaccatcccggctaaaacggtgaaaccccgtctctactaaaaatacaaaaattagccgggcgtagtggcgggcgcctgtagtcccagctacttgggaggctgaggcaggagaatggcgtgaacccgggaggcggagcttgcagtgagccgagatgccgccactgcgctccagcctgggtgacagagcgagactccatctcaaaaaaaaaaaaaaaaaaaaaatggattacttggccaggcatggtggttcacgcttataatcccagcactttgggangccgaggtgagtgggtcacttgagctcaggagttcaagaccagcctgggcaacatggtgaaccccatctctacaaaaattagccaggtgtagtggcatgtgcctgtngtctcagctacttgggaggctgaggcaggagcattgcttgaacctgggaagcagaggttacagtgagccgagatcatgccactgcactccagtctaggcaataaagtgagaccctgtctccaaaaaaaaaaaataggattatgtagagaaaaatatatttgcattcttaacatcacctacaagagtggactttaggtccatgctgtccacagcagcagccacccagccatgtgtggctactgagatgtagccaaaccaagtgtgtcatgactctgaaacaccaggtatgaagcatggaagaggacaacaactttaaataccttaatttttatattgattatgtgttgaaataatattttagatatattgggtttcaaaagtatcattaaagtgaatttcaactatt

SEQ ID NO: 380663 - DNA, 7225 bp, Homo sapiens
gggaacggaggctggatctcggaaacctcgtcggcagtgtcattagaggaagatcgcgtgtctcgggatacggattttggaggaaaagcagaataggacaaggagcaggaagccgcctaccaccatgagcagcacgctgtcacccacagactttgacagcttggaaatccagggccagtacagtgacatcaacaaccgctgggaccttcctgactcggactgggacaatgacagcagctcggcccgcctctttgagaggtctcgcattaaggctctggcagatgaacgagaagctgtgcagaagaaaaccttcaccaagtgggtaaactcgcacctggcccgggtcacgtgccgggtgggggacctgtacagcgacctccgggacggacgcaacctgctgaggctcctcgaggtgctctcgggagagatactgccaaagcctacaaagggccgcatgcggatccactgcctggagaacgtggacaaggcactgcagttcctcaaggagcagaaagtgcacttggaaaacatgggctcccatgacattgtggacggaaaccaccgactgacccttgggctggtctggaccatcatccttcgattccagatccaagacatcagtgtggagacagaagacaacaaggagaagaagtcagccaaggatgccctgcttctgtggtgccagatgaagactgcaggttatcccaacgtcaatgtacacaacttcaccaccagctggagagatggactagctttcaacgccatcgtgcataaacaccggccagacctgctggattttgagtctctgaagaagtgtaatgcacactataatctgcagaatgcattcaatctggctgaaaaggaactgggacttaccaagctgctggatcccgaagacgtgaatgtggaccagccagatgagaagtcaatcattacctatgtggctacttactaccattacttctccaagatgaaggccctggccgtggaaggcaagagaattggcaaggtgctggaccatgccatggaggcagagcgcctggtggagaaatacgagtccctggcctcggagctgctgcagtggatcgagcaaacgatcgtgaccctcaatgaccggcagttggccaactcccttagcggggtccagaaccagctgcagtccttcaactcctaccgcaccgtggagaagccgcccaagtttaccgagaaagggaacttggaagtgctgctcttcaccatccagagcaagcttcgggccaacaaccagaaggtctacacgccccgcgagggccggctcatctcggacatcaacaaggcttgggagcggctggagaaggcggagcacgagcgtgagctggccctgcgcaccgagctcatccgccaggagaagctggagcagctggccgcccgcttcgaccgcaaggctgccatgcgggagacctggctcagcgagaaccagcgcctcgtgtcccaggacaactttgggctggagctggcagctgtcgaggcagcagtacggaagcacgaagccattgagacggacatcgtggcctacagcggccgggtgcaggcagtggacgccgtggctgcagagctggccgccgagcgctaccacgacatcaagcgcatcgccgctcggcagcacaacgtggcacggctctgggacttcttgcggcagatggtggccgcccggcgggagcggctcctcctcaacctggagctgcagaaggtgttccaggacctgctctacctcatggactggatggaagagatgaagggccggctgcagtctcaggacctgggcaggcacctagcaggagtggaggacctgctgcagctgcacgagctggtggaggcagacatcgccgtgcaggccgagagggtgcgggccgtcagcgcctctgccctgcgcttctgcaacccagggaaagagtatagaccttgcgacccgcagctggtgtcggagcgggtggccaagctagagcagagctatgaggcactgtgcgagttggcagcggcgcggcgggcccggctggaggaatcacggcggctctggcgtttcctctgggaggtgggtgaagctgaggcctgggtgcgggagcagcagcacctcctggcctcagccgacacgggccgagacctgaccggtgccctccgcctgctcaacaagcacacagccctgcggggcgagatgagcggccggctggggcccctgaagctcaccctggagcagggccagcagttggtggccgagggtcaccctggggcaagccaggcctctgcccgtgcagctgaactccaagcccagtgggagcggctagaggccctggccgaggagcgtgcccagcggctggcccaagccgccagcctctaccagttccaggccgatgcaaacgacatggaggcctggttggttgacgcactgcgcctggtgtccagccccgagctggggcacgacgagttctccacgcaggctctagccaggcagcatcgggccctggaggaggagattcgaagccaccggccaaccctggacgccttgagggaacaggcagcagccctgccccccacactgagccgcacgcccgaggtgcagggccgggtgcccaccctggagcggcactacgaggagctgcaggcccgggcaggcgagcgagcgcgggccttggaggcagccctggcgctctacaccatgctcagcgaggccggggcctgtggactctgggtggaggagaaggagcagtggctcaacgggctggccctgcctgaacgcctggaggacctggaggtcgtgcagcagaggttcgagaccctggagcctgaaatgaacacccttgcagcacaaatcaccgcggtgaatgacattgccgagcagttactgaaggccaaccccccaggcaaagaccgcattgtcaacacccaggagcagctcaaccacaggtggcagcagtttcggcgtctggcagacggcaagaaggcagctctcacctcagccctgagcatccagaactaccacttagagtgcacggagacccaggcctggatgagagagaagaccaaagtcatcgagtccacccagggcctaggcaacgatctggctggggtgctggccctgcagcgcaagctggccggcacggagcgggacctggaggccatcgccgcccgggtgggcgaactgactcgagaggcaaatgccctggctgccggccatcccgctcaggcagtggccatcaacgcccggctgagagaggtgcagaccggctgggaggacctcagggccaccatgcggcgtcgagaagagtcgctgggggaggcgcggcggctgcaggacttcttgcgcagcttggatgacttccaggcctggctaggccgcactcagactgctgtggcctctgaagaagggccggccaccctgcctgaggcagaggccctcctggcccaacatgcagccctgcggggagaggtggagcgggcccagagcgagtatagccggctgcgagccctgggcgaggaggtgacccgggaccaggctgacccccagtgcctcttcctacgacagcgactggaggccctgggaactggctgggaggagctgggccgaatgtgggagagccggcaaggtcgcctggcccaggcccacggcttccagggattcctgcgggatgctcgtcaggctgagggcgtgctcagcagccaggaatatgttctgtctcacacggagatgccagggacactccaggctgctgatgctgccattaaaaaactggaggacttcatgagcaccatggacgccaatggggaacggatccacgggctcctggaggctggccgccagctggtatctgaaggcaacatccacgccgacaagattcgggaaaaggcagactccattgagaggaggcacaagaagaatcaagacgcagcgcagcaatttctgggccgtcttcgggacaaccgggagcagcagcatttcctgcaagattgtcacgagctgaagctctggatcgacgagaagatgctgacagcccaggacgtgtcctatgacgaggcccgcaacctgcatactaagtggcagaagcaccaggcattcatggccgagctggctgccaacaaagactggctggacaaggtggacaaggaagggcgagagctcacccttgagaagccagagctgaaagccctggtgtcggagaagctgagagacctgcacaggcgctgggacgagctggagaccaccacccaagccaaggcccgcagcctctttgatgccaaccgagctgagctgtttgcccagagctgctgtgccctggagagctggctggagagcctgcaggcccagctgcactcggatgactacggcaaggacctcaccagcgtcaacatcctgctcaagaagcagcagatgctggaatgggagatggctgtgagagagaaggaggtggaggcaatccaggcccaggccaaagcactggcccaggaggaccagggtgcaggggaggtggagagaacctcgagggccgtggaggagaagttcagggccttgtgccagcccatgcgggaacgctgccggcgcctgcaggcttctcgcgagcagcaccagttccaccgcgatgtggaagatgagattttgtgggtgacagagcggctgcccatggccagctccatggagcatggcaaggacctgcccagcgtccagcttctcatgaagaaaaaccagaccctgcagaaagagattcagggccatgagccccggatcgcggacctgagggagcggcagcgtgctctaggtgcagcagcagcaggtccagagctggctgagctgcaggaaatgtggaaacgcctgggccacgagctggaacttcgagggaagcgactggaggatgccctgcgagcccagcagttctaccgcgatgccgccgaggcggaggcctggatgggcgagcaggaattacacatgatgggccaggagaaggccaaggatgagctgagtgcccaggcagaggtgaagaagcaccaggtgctggagcaagccctggccgactacgcgcagaccatccaccagctggcggccagcagccaggacatgattgaccacgagcacccagagagcactcggatatccatccgccaagcccaggtggacaagctgtatgccggcctgaaggagctggctggagagcggcgggagcgcctgcaggagcacctccggctgtgccagctccgccgcgagctggatgacctggaacagtggatccaggagcgcgaggtggtggcggcctcccacgagctgggccaggactacgagcatgtgactatgctccgagacaaattccgagagttctcccgggacacaagcaccatcggtcaggagcgcgtagatagcgccaatgcgctggccaatgggctcattgctgggggccatgctgcacgggccaccgtggccgagtggaaggacagtctcaacgaggcctgggctgacctgcttgagctgctggacacacggggtcaggtgctggccgcggcgtacgagctgcagcgcttcctgcacggggcacgccaagccctggcgcgggtgcagcacaagcagcagcagcttccggacgggactggccgcgacctcaacgctgccgaggccctgcagcgccgacactgtgcctacgagcatgacattcaggccctcagcccccaggtccagcaggtgcaggacgacggccaccggctccagaaggcctacgctggagacaaggctgaggagatcggccgccacatgcaggccgtggccgaggcctgggcccagcttcagggaagctctgccgcccgccggcagctgctgctggacaccacagacaagttccgcttcttcaaggctgtccgggaactgatgctctggatggatgaggtcaacctgcagatggatgcccaggagcgtccccgggatgtgtcctccgcggatctagtcatcaagaaccagcaaggcatcaaggcagagatagaggcccgggcagaccgcttctcctcctgcatcgacatggggaaggagctgctggccaggagccactatgcggccgaggagatctcagagaagctgtctcagctgcaggcacggcgccaggagacagctgagaagtggcaggagaagatggactggcttcagctggttttggaggtgcttgtgtttggaagagatgcagggatggcagaggcctggctctgcagccaggagccactggtgcgcagcgctgagctgggttgcacggtcgacgaagttgagagcctcatcaagcggcacgaggccttccagaagtcagcagtggcctgggaggagcgattctgtgcgctggagaagcttactgcgctagaggagcgggagaaggagcgaaagagaaagagggaggaggaggagcggcggaaacagccgcctgctcccgaacccacagccagtgtgcctccaggggacctggtgggcggccagacagcttctgacaccacctgggacggaacccagccacggccaccaccatccacacaagcacccagtgttaatggagtctgcacagatggagagccctcacagcccctgctgggacaacagagacttgagcacagcagcttccccgaagggccgggacctggctcaggggacgaagccaatgggccccggggagagaggcagacccggactcggggcccggccccatctgcaatgccccagagcaggtctaccgagtcagcccatgctgccaccctgccgcctcgaggcccagagccatctgcccaggagcagatggaggggatgctgtgccgcaagcaggagatggaggccttcgggaagaaggctgccaacaggtcctggcagaacgtgtactgtgtcctgcggcgtgggagcctcggcttttacaaggatgccaaggcagccagcgcgggagtgccataccacggagaagtgcctgtcagcctggccagggcccagggcagcgtcgcctttgattaccgaaagcgcaaacatgtcttcaagctggggtaggaacagggaacagtgctctcgggatgggaggagagttgggagtgacacaggtgagccatgagtcaggtccagagggaggggagttcctgtaaggagcctgagtggagtaaccaggccagccacttggggatagtgtagatgagggaggcggagattctggttgtctccacaccaagagggagcaggagaaccaagacccag

SEQ ID NO: 380664 - DNA, 5102 bp, Homo sapiens
gggaacggaggctggatctcggaaacctcgtcggcagtgtcattagaggaagatcgcgtgtctcgggatacggattttggaggaaaagcagaataggacaaggagcaggaagccgcctaccaccatgagcagcacgctgtcacccacagactttgacagcttggaaatccagggccagtacagtgacatcaacaaccgctgggaccttcctgactcggactgggacaatgacagcagctcggcccgcctctttgagaggtctcgcattaaggctctggcagatgaacgagaagctgtgcagaagaaaaccttcaccaagtgggtaaactcgcacctggcccgggtcacgtgccgggtgggggacctgtacagcgacctccgggacggacgcaacctgctgaggctcctcgaggtgctctcgggagagatactgccaaagcctacaaagggccgcatgcggatccactgcctggagaacgtggacaaggcactgcagttcctcaaggagcagaaagtgcacttggaaaacatgggctcccatgacattgtggacggaaaccaccgactgacccttgggctggtctggaccatcatccttcgattccagatccaagacatcagtgtggagacagaagacaacaaggagaagaagtcagccaaggatgccctgcttctgtggtgccagatgaagactgcaggttatcccaacgtcaatgtacacaacttcaccaccagctggagagatggactagctttcaacgccatcgtgcataaacaccggccagacctgctggattttgagtctctgaagaagtgtaatgcacactataatctgcagaatgcattcaatctggctgaaaaggaactgggacttaccaagctgctggatcccgaagacgtgaatgtggaccagccagatgagaagtcaatcattacctatgtggctacttactaccattacttctccaagatgaaggccctggccgtggaaggcaagagaattggcaaggtgctggaccatgccatggaggcagagcgcctggtggagaaatacgagtccctggcctcggagctgctgcagtggatcgagcaaacgatcgtgaccctcaatgaccggcagttggccaactcccttagcggggtccagaaccagctgcagtccttcaactcctaccgcaccgtggagaagccgcccaagtttaccgagaaagggaacttggaagtgctgctcttcaccatccagagcaagcttcgggccaacaaccagaaggtctacacgccccgcgagggccggctcatctcggacatcaacaaggcttgggagcggctggagaaggcggagcacgagcgtgagctggccctgcgcaccgagctcatccgccaggagaagctggagcagctggccgcccgcttcgaccgcaaggctgccatgcgggagacctggctcagcgagaaccagcgcctcgtgtcccaggacaactttgggctggagctggcagctgtcgaggcagcagtacggaagcacgaagccattgagacggacatcgtggcctacagcggccgggtgcaggcagtggacgccgtggctgcagagctggccgccgagcgctaccacgacatcaagcgcatcgccgctcggcagcacaacgtggcacggctctgggacttcttgcggcagatggtggccgcccggcgggagcggctcctcctcaacctggagctgcagaaggtgttccaggacctgctctacctcatggactggatggaagagatgaagggccggctgcagtctcaggacctgggcaggcacctagcaggagtggaggacctgctgcagctgcacgagctggtggaggcagacatcgccgtgcaggccgagagggtgcgggccgtcagcgcctctgccctgcgcttctgcaacccagggaaagagtatagaccttgcgacccgcagctggtgtcggagcgggtggccaagctagagcagagctatgaggcactgtgcgagttggcagcggcgcggcgggcccggctggaggaatcacggcggctctggcgtttcctctgggaggtgggtgaagctgaggcctgggtgcgggagcagcagcacctcctggcctcagccgacacgggccgagacctgaccggtgccctccgcctgctcaacaagcacacagccctgcggggcgagatgagcggccggctggggcccctgaagctcaccctggagcagggccagcagttggtggccgagggtcaccctggggcaagccaggcctctgcccgtgcagctgaactccaagcccagtgggagcggctagaggccctggccgaggagcgtgcccagcggctggcccaagccgccagcctctaccagttccaggccgatgcaaacgacatggaggcctggttggttgacgcactgcgcctggtgtccagccccgagctggggcacgacgagttctccacgcaggctctagccaggcagcatcgggccctggaggaggagattcgaagccaccggccaaccctggacgccttgagggaacaggcagcagccctgccccccacactgagccgcacgcccgaggtgcagggccgggtgcccaccctggagcggcactacgaggagctgcaggcccgggcaggcgagcgagcgcgggccttggaggcagccctggcgctctacaccatgctcagcgaggccggggcctgtggactctgggtggaggagaaggagcagtggctcaacgggctggccctgcctgaacgcctggaggacctggaggtcgtgcagcagaggttcgagaccctggagcctgaaatgaacacccttgcagcacaaatcaccgcggtgaatgacattgccgagcagttactgaaggccaaccccccaggcaaagaccgcattgtcaacacccaggagcagctcaaccacaggtggcagcagtttcggcgtctggcagacggcaagaaggcagctctcacctcagccctgagcatccagaactaccacttagagtgcacggagacccaggcctggatgagagagaagaccaaagtcatcgagtccacccagggcctaggcaacgatctggctggggtgctggccctgcagcgcaagctggccggcacggagcgggacctggaggccatcgccgcccgggtgggcgaactgactcgagaggcaaatgccctggctgccggccatcccgctcaggcagtggccatcaacgcccggctgagagaggtgcagaccggctgggaggacctcagggccaccatgcggcgtcgagaagagtcgctgggggaggcgcggcggctgcaggacttcttgcgcagcttggatgacttccaggcctggctaggccgcactcagactgctgtggcctctgaagaagggccggccaccctgcctgaggcagaggccctcctggcccaacatgcagccctgcggggagaggtggagcgggcccagagcgagtatagccggctgcgagccctgggcgaggaggtgacccgggaccaggctgacccccagtgcctcttcctacgacagcgactggaggccctgggaactggctgggaggagctgggccgaatgtgggagagccggcaaggtcgcctggcccaggcccacggcttccagggattcctgcgggatgctcgtcaggctgagggcgtgctcagcagccaggaatatgttctgtctcacacggagatgccagggacactccaggctgctgatgctgccattaaaaaactggaggacttcatgagcaccatggacgccaatggggaacggatccacgggctcctggaggctggccgccagctggtatctgaaggcaacatccacgccgacaagattcgggaaaaggcagactccattgagaggaggcacaagaagaatcaagacgcagcgcagcaatttctgggccgtcttcgggacaaccgggagcagcagcatttcctgcaagattgtcacgagctgaagctctggatcgacgagaagatgctgacagcccaggacgtgtcctatgacgaggcccgcaacctgcatactaagtggcagaagcaccaggcattcatggccgagctggctgccaacaaagactggctggacaaggtggacaaggaagggcgagagctcacccttgagaagccagagctgaaagccctggtgtcggagaagctgagagacctgcacaggcgctgggacgagctggagaccaccacccaagccaaggcccgcagcctctttgatgccaaccgagctgagctgtttgcccagagctgctgtgccctggagagctggctggagagcctgcaggcccagctgcactcggatgactacggcaaggacctcaccagcgtcaacatcctgctcaagaagcagcagatgctggaatgggagatggctgtgagagagaaggaggtggaggcaatccaggcccaggccaaagcactggcccaggaggaccagggtgcaggggaggtggagagaacctcgagggccgtggaggagaagttcagggccttgtgccagcccatgcgggaacgctgccggcgcctgcaggcttctcgcgagcagcaccagttccaccgcgatgtggaagatgagattttgtgggtgacagagcggctgcccatggccagctccatggagcatggcaaggacctgcccagcgtccagcttctcatgaagaaaaaccagaccctgcagaaagagattcagggccatgagccccggatcgcggacctgagggagcggcagcgtgctctaggtgcagcagcagcaggtccagagctggctgagctgcaggaaatgtggaaacgcctgggccacgagctggaacttcgagggaagcgactggaggatgccctgcgagcccagcagttctaccgcgatgccgccgaggcggaggcctggatgggcgagcaggaattacacatgatgggccaggagaaggccaaggatgagctcttattgcccaggctggagtagctcttattgcccaggctggagtagctcttattgcccaggctggagtagctcttattgcccaggctggagtagctcttattgcccaggctggagt

SEQ ID NO: 380665 - DNA, 303 bp, Homo sapiens
gcgggtgtgggtgcaggtttgttataagttatattgtgtgatgctgaagtttggggtgtaattgaacccatcacccatgtagtgagcacagtacccaatagggattttttcaacccctgcccttggattcttgtgcatataaagttcgagatccactgatccagcccatgaggggatgctctccctgggtgagctgcagtgatgagcagccacagtgggctggatagagactggttggtgtctctgctgggcatgaaggcggaaatgcagagctaacatgtccttcctcctggcggtttgcag

SEQ ID NO: 380666 - DNA, 446 bp, Homo sapiens
tcacgtgccgggtgggggacctgtacagcgacctccgggacggacgcaacctgctgaggctcctcgaggtgctctcgggagagatactggtgagctgtggtcatgaagggaagtgggggggccttagaaaagtgtccaaggggaccagctggaagaacagccctcagagagagtgacggcacagggcgggaagcagtggctccctctgctcagaggatgggttcatttcaagtgcctttgccacttagattacataggagcattgcttcatggagacaggaacagtggccccattgaaaacatttcttttcccacctactctgggtgcaattaattcccttgggaatcttaatctgcccaagcctcatctgtaagctcagctttggctccagccctggggctgtgcctgtctgtgttcctgaggtaggtcatggggaaggtgtgca

SEQ ID NO: 380667 - DNA, 10672 bp, Homo sapiens
  misc_feature (10159)..(10159): n is a, c, g, or t
  misc_feature (10266)..(10266): n is a, c, g, or t
gggaacggaggctggatctcggaaacctcgtcggcagtgtcattagaggaagatcgcgtgtctcgggatacggattttggaggaaaagcagaataggacaaggagcaggaagccgcctaccaccatgagcagcacgctgtcacccacagactttgacagcttggaaatccagggccagtacagtgacatcaacaaccgctgggaccttcctgactcggactgggacaatgacagcagctcggcccgcctctttgagaggtctcgcattaaggctctggcagatgaacgagaagctgtgcagaagaaaaccttcaccaagtgggtaaactcgcacctggcccgggtcacgtgccgggtgggggacctgtacagcgacctccgggacggacgcaacctgctgaggctcctcgaggtgctctcgggagagatactgccaaagcctacaaagggccgcatgcggatccactgcctggagaacgtggacaaggcactgcagttcctcaaggagcagaaagtgcacttggaaaacatgggctcccatgacattgtggacggaaaccaccgactgacccttgggctggtctggaccatcatccttcgattccagatccaagacatcagtgtggagacagaagacaacaaggagaagaagtcagccaaggatgccctgcttctgtggtgccagatgaagactgcaggttatcccaacgtcaatgtacacaacttcaccaccagctggagagatggactagctttcaacgccatcgtgcataaacaccggccagacctgctggattttgagtctctgaagaagtgtaatgcacactataatctgcagaatgcattcaatctggctgaaaaggaactgggacttaccaagctgctggatcccgaagacgtgaatgtggaccagccagatgagaagtcaatcattacctatgtggctacttactaccattacttctccaagatgaaggccctggccgtggaaggcaagagaattggcaaggtgctggaccatgccatggaggcagagcgcctggtggagaaatacgagtccctggcctcggagctgctgcagtggatcgagcaaacgatcgtgaccctcaatgaccggcagttggccaactcccttagcggggtccagaaccagctgcagtccttcaactcctaccgcaccgtggagaagccgcccaagtttaccgagaaagggaacttggaagtgctgctcttcaccatccagagcaagcttcgggccaacaaccagaaggtctacacgccccgcgagggccggctcatctcggacatcaacaaggcttgggagcggctggagaaggcggagcacgagcgtgagctggccctgcgcaccgagctcatccgccaggagaagctggagcagctggccgcccgcttcgaccgcaaggctgccatgcgggagacctggctcagcgagaaccagcgcctcgtgtcccaggacaactttgggctggagctggcagctgtcgaggcagcagtacggaagcacgaagccattgagacggacatcgtggcctacagcggccgggtgcaggcagtggacgccgtggctgcagagctggccgccgagcgctaccacgacatcaagcgcatcgccgctcggcagcacaacgtggcacggctctgggacttcttgcggcagatggtggccgcccggcgggagcggctcctcctcaacctggagctgcagaaggtgttccaggacctgctctacctcatggactggatggaagagatgaagggccggctgcagtctcaggacctgggcaggcacctagcaggagtggaggacctgctgcagctgcacgagctggtggaggcagacatcgccgtgcaggccgagagggtgcgggccgtcagcgcctctgccctgcgcttctgcaacccagggaaagagtatagaccttgcgacccgcagctggtgtcggagcgggtggccaagctagagcagagctatgaggcactgtgcgagttggcagcggcgcggcgggcccggctggaggaatcacggcggctctggcgtttcctctgggaggtgggtgaagctgaggcctgggtgcgggagcagcagcacctcctggcctcagccgacacgggccgagacctgaccggtgccctccgcctgctcaacaagcacacagccctgcggggcgagatgagcggccggctggggcccctgaagctcaccctggagcagggccagcagttggtggccgagggtcaccctggggcaagccaggcctctgcccgtgcagctgaactccaagcccagtgggagcggctagaggccctggccgaggagcgtgcccagcggctggcccaagccgccagcctctaccagttccaggccgatgcaaacgacatggaggcctggttggttgacgcactgcgcctggtgtccagccccgagctggggcacgacgagttctccacgcaggctctagccaggcagcatcgggccctggaggaggagattcgaagccaccggccaaccctggacgccttgagggaacaggcagcagccctgccccccacactgagccgcacgcccgaggtgcagggccgggtgcccaccctggagcggcactacgaggagctgcaggcccgggcaggcgagcgagcgcgggccttggaggcagccctggcgctctacaccatgctcagcgaggccggggcctgtggactctgggtggaggagaaggagcagtggctcaacgggctggccctgcctgaacgcctggaggacctggaggtcgtgcagcagaggttcgagaccctggagcctgaaatgaacacccttgcagcacaaatcaccgcggtgaatgacattgccgagcagttactgaaggccaaccccccaggcaaagaccgcattgtcaacacccaggagcagctcaaccacaggtggcagcagtttcggcgtctggcagacggcaagaaggcagctctcacctcagccctgagcatccagaactaccacttagagtgcacggagacccaggcctggatgagagagaagaccaaagtcatcgagtccacccagggcctaggcaacgatctggctggggtgctggccctgcagcgcaagctggccggcacggagcgggacctggaggccatcgccgcccgggtgggcgaactgactcgagaggcaaatgccctggctgccggccatcccgctcaggcagtggccatcaacgcccggctgagagaggtgcagaccggctgggaggacctcagggccaccatgcggcgtcgagaagagtcgctgggggaggcgcggcggctgcaggacttcttgcgcagcttggatgacttccaggcctggctaggccgcactcagactgctgtggcctctgaagaagggccggccaccctgcctgaggcagaggccctcctggcccaacatgcagccctgcggggagaggtggagcgggcccagagcgagtatagccggctgcgagccctgggcgaggaggtgacccgggaccaggctgacccccagtgcctcttcctacgacagcgactggaggccctgggaactggctgggaggagctgggccgaatgtgggagagccggcaaggtcgcctggcccaggcccacggcttccagggattcctgcgggatgctcgtcaggctgagggcgtgctcagcagccaggaatatgttctgtctcacacggagatgccagggacactccaggctgctgatgctgccattaaaaaactggaggacttcatgagcaccatggacgccaatggggaacggatccacgggctcctggaggctggccgccagctggtatctgaaggcaacatccacgccgacaagattcgggaaaaggcagactccattgagaggaggcacaagaagaatcaagacgcagcgcagcaatttctgggccgtcttcgggacaaccgggagcagcagcatttcctgcaagattgtcacgagctgaagctctggatcgacgagaagatgctgacagcccaggacgtgtcctatgacgaggcccgcaacctgcatactaagtggcagaagcaccaggcattcatggccgagctggctgccaacaaagactggctggacaaggtggacaaggaagggcgagagctcacccttgagaagccagagctgaaagccctggtgtcggagaagctgagagacctgcacaggcgctgggacgagctggagaccaccacccaagccaaggcccgcagcctctttgatgccaaccgagctgagctgtttgcccagagctgctgtgccctggagagctggctggagagcctgcaggcccagctgcactcggatgactacggcaaggacctcaccagcgtcaacatcctgctcaagaagcagcagatgctggaatgggagatggctgtgagagagaaggaggtggaggcaatccaggcccaggccaaagcactggcccaggaggaccagggtgcaggggaggtggagagaacctcgagggccgtggaggagaagttcagggccttgtgccagcccatgcgggaacgctgccggcgcctgcaggcttctcgcgagcagcaccagttccaccgcgatgtggaagatgagattttgtgggtgacagagcggctgcccatggccagctccatggagcatggcaaggacctgcccagcgtccagcttctcatgaagaaaaaccagaccctgcagaaagagattcagggccatgagccccggatcgcggacctgagggagcggcagcgtgctctaggtgcagcagcagcaggtccagagctggctgagctgcaggaaatgtggaaacgcctgggccacgagctggaacttcgagggaagcgactggaggatgccctgcgagcccagcagttctaccgcgatgccgccgaggcggaggcctggatgggcgagcaggaattacacatgatgggccaggagaaggccaaggatgagctgagtgcccaggcagaggtgaagaagcaccaggtgctggagcaagccctggccgactacgcgcagaccatccaccagctggcggccagcagccaggacatgattgaccacgagcacccagagagcactcggatatccatccgccaagcccaggtggacaagctgtatgccggcctgaaggagctggctggagagcggcgggagcgcctgcaggagcacctccggctgtgccagctccgccgcgagctggatgacctggaacagtggatccaggagcgcgaggtggtggcggcctcccacgagctgggccaggactacgagcatgtgactatgctccgagacaaattccgagagttctcccgggacacaagcaccatcggtcaggagcgcgtagatagcgccaatgcgctggccaatgggctcattgctgggggccatgctgcacgggccaccgtggccgagtggaaggacagtctcaacgaggcctgggctgacctgcttgagctgctggacacacggggtcaggtgctggccgcggcgtacgagctgcagcgcttcctgcacggggcacgccaagccctggcgcgggtgcagcacaagcagcagcagcttccggacgggactggccgcgacctcaacgctgccgaggccctgcagcgccgacactgtgcctacgagcatgacattcaggccctcagcccccaggtccagcaggtgcaggacgacggccaccggctccagaaggcctacgctggagacaaggctgaggagatcggccgccacatgcaggccgtggccgaggcctgggcccagcttcagggaagctctgccgcccgccggcagctgctgctggacaccacagacaagttccgcttcttcaaggctgtccgggaactgatgctctggatggatgaggtcaacctgcagatggatgcccaggagcgtccccgggatgtgtcctccgcggatctagtcatcaagaaccagcaaggcatcaaggcagagatagaggcccgggcagaccgcttctcctcctgcatcgacatggggaaggagctgctggccaggagccactatgcggccgaggagatctcagagaagctgtctcagctgcaggcacggcgccaggagacagctgagaagtggcaggagaagatggactggcttcagctggttttggaggtgcttgtgtttggaagagatgcagggatggcagaggcctggctctgcagccaggagccactggtgcgcagcgctgagctgggttgcacggtcgacgaagttgagagcctcatcaagcggcacgaggccttccagaagtcagcagtggcctgggaggagcgattctgtgcgctggagaagcttactgcgctagaggagcgggagaaggagcgaaagagaaagagggaggaggaggagcggcggaaacagccgcctgctcccgaacccacagccagtgtgcctccaggggacctggtgggcggccagacagcttctgacaccacctgggacggaacccagccacggccaccaccatccacacaagcacccagtgttaatggagtctgcacagatggagagccctcacagcccctgctgggacaacagagacttgagcacagcagcttccccgaagggccgggacctggctcaggggacgaagccaatgggccccggggagagaggcagacccggactcggggcccggccccatctgcaatgccccagagcaggtctaccgagtcagcccatgctgccaccctgccgcctcgaggcccagagccatctgcccaggagcagatggaggggatgctgtgccgcaagcaggagatggaggccttcgggaagaaggctgccaacaggtcctggcagaacgtgtactgtgtcctgcggcgtgggagcctcggcttttacaaggatgccaaggcagccagcgcgggagtgccataccacggagaagtgcctgtcagcctggccagggcccagggcagcgtcgcctttgattaccgaaagcgcaaacatgtcttcaagctgggcttacaggatggaaaagaatatttattccaggccaaggatgaggcagagatgagctcgtggctacgggtggtgaatgcagccattgccacagcgtcttctgcctctggagagcctgaagagccggtggtgcccagcaccacccggggcatgacccgggccatgaccatgcccccagtgtcacccgtcggggctgaggggcctgttgtgctccgcagcaaagacggcagagaacgagagcgagaaaaacgcttcagcttctttaagaagaacaagtagttgggggcaaggtcccaggccaactccctccctccgttcaggaaactgccagggacagtcgacagggaccgccctcttgtcaggacaactgcctgctgctagggtctgttgccaaggtcaacccatcaccaggaactgtcactggggacgagtccatgttcccaagggcagcccttctcttctgctgtttaattccagactggtggtgggacccaggtaaccccctctcccacccccgccgacttctcccctttccccagcctcgtgcctctgtccctcaccacggtgtggacagtgccgcaccctcaacataggccatgtggggagtggctgcccctgcctcagggtcattctcctgccatgcgagggcactcgccttctgccttctggttcctcacccctcagaccagccaggaacctctcagagctgaagcaggccctgggggcagaagtgccagatgacagtcagaggcgcaggagccctccctccccacccccaccctgtaactccagctgccactccatctccagctgctctcaatggcttccaggtgtgttgttcggggacagccaccgccttgagtctggccaaggaggtgattaaacagctcagcttctctcaccgcctctgggtgtctttgctttcctgaccacagcctctctgcccaagcctgtgtcctctccttccgttctggtctccttcatctcacgtttccccagcctccaagctcttgaagagccgtgtcacactgagagcttccctgacctggtctcatttccctctgacagtgacctccagtgtgctgggttgaccaatgccaagcctctttttaaaccaaagtagttcaccatgggttgggatgatgtcaacaagcagtattcatgttaaaaagcaatgagggactccttccctggtgcacaattttcttcacttgtgatctctaaactgttttcaaattggaagactgggaagcattgctacagccccagccagtctcagccactgctcagcccagtggtggaaagctgagcacacagcgggtgcttactgcccccacttgccgtctgctctccagtagatcaagggacctcagacagggatctgagaagtggcaggttccaataaactgatcaacagaatgaagtcactctgggaagccatgaggtgactttacagcccaagcatgtaaatatacacacagaggataatatatattcttttttttttttttttttgagacagagtctcgctctgtcagccaagctggactgcagtggcgcaatcacagcccattgcaacctccacctcctgggttcaagcaatcctcccacctcagcctcccgagtagcctgaaccacaggcacatgccatcatacccgactaagtctgtttgttttttgtagagacggggtctcactatgttgcccaggtcggtctcgaattcctgggcccaagtgattctctcaccttggcctcaaactgttgggattacaggcgtgagccaccatgcccagctgagactaccttctggatctgatgaagtattagaaaggagcgggtggcttctcctttgtctctggtttggcaatcggagctttcagggcacagtgtttgtctccagatgttgatggaagtgggcactccttggtggcctccaacaggaaaagcgtgttctttcattgtttcctatacacacagacaaccgtttttccaggaaggcagccccatctttagtcattgactgcgggcctatcatcagtcatgacgaagaccgagtgaggtgtgtgcaggcccagaactagcacatcacagccccagagtgggctccaaaccggtagaccagagagcctgcaggataatttcccccttaagatgggtagatttactgttccacagccaacaggtggatacgcgtaactagaacaatctgtcatgggactaagtggaagaatccatcagcactacacagcatcttttcttcaaatacaactgtaaaatctccactgaagagacagtcataccttgggggtgctcagggaatctaggtatttgcactccaagctggcaagcctgggggcactgaagggaaacaataattggaaatgtcagaaggaaatgtatatggagaaattaatagagaaatgattattttaacatgacacgtaagtgtaaataggacagccaattgaagcagtcctgcagtaggggcaggcattgtcaacggagaggtgagactgaagaccccgagcagcatctgcatatgcggcagcaggacttcagggcatgattccttaagaacaggacatagaagaggggaagcatagtgtcaggaattaagtcagaaaacaccttcagctgtgagtggaagaaagaaaaaattccaggaaagacaacaggatggaatggggcggtgagggctatgagacaagttagacacaaaaatacaataaatgcaggcagcacaaatcaatggagagagatggcagataaaaatggattacttgggccgggcgcggtggctcacgcctgtaatcccagcactttgggaggccgaggcgggcggatcacgaggtcaggagatcgagaccatcccggctaaaacggtgaaaccccgtctctactaaaaatacaaaaattagccgggcgtagtggcgggcgcctgtagtcccagctacttgggaggctgaggcaggagaatggcgtgaacccgggaggcggagcttgcagtgagccgagatgccgccactgcgctccagcctgggtgacagagcgagactccatctcaaaaaaaaaaaaaaaaaaaaaatggattacttggccaggcatggtggttcacgcttataatcccagcactttgggangccgaggtgagtgggtcacttgagctcaggagttcaagaccagcctgggcaacatggtgaaccccatctctacaaaaattagccaggtgtagtggcatgtgcctgtngtctcagctacttgggaggctgaggcaggagcattgcttgaacctgggaagcagaggttacagtgagccgagatcatgccactgcactccagtctaggcaataaagtgagaccctgtctccaaaaaaaaaaaataggattatgtagagaaaaatatatttgcattcttaacatcacctacaagagtggactttaggtccatgctgtccacagcagcagccacccagccatgtgtggctactgagatgtagccaaaccaagtgtgtcatgactctgaaacaccaggtatgaagcatggaagaggacaacaactttaaataccttaatttttatattgattatgtgttgaaataatattttagatatattgggtttcaaaagtatcattaaagtgaatttcaactatt

SEQ ID NO: 380668 - DNA, 8211 bp, Homo sapiens
gggaacggaggctggatctcggaaacctcgtcggcagtgtcattagaggaagatcgcgtgtctcgggatacggattttggaggaaaagcagaataggacaaggagcaggaagccgcctaccaccatgagcagcacgctgtcacccacagactttgacagcttggaaatccagggccagtacagtgacatcaacaaccgctgggaccttcctgactcggactgggacaatgacagcagctcggcccgcctctttgagaggtctcgcattaaggctctggcagatgaacgagaagctgtgcagaagaaaaccttcaccaagtgggtaaactcgcacctggcccgggtcacgtgccgggtgggggacctgtacagcgacctccgggacggacgcaacctgctgaggctcctcgaggtgctctcgggagagatactgccaaagcctacaaagggccgcatgcggatccactgcctggagaacgtggacaaggcactgcagttcctcaaggagcagaaagtgcacttggaaaacatgggctcccatgacattgtggacggaaaccaccgactgacccttgggctggtctggaccatcatccttcgattccagatccaagacatcagtgtggagacagaagacaacaaggagaagaagtcagccaaggatgccctgcttctgtggtgccagatgaagactgcaggttatcccaacgtcaatgtacacaacttcaccaccagctggagagatggactagctttcaacgccatcgtgcataaacaccggccagacctgctggattttgagtctctgaagaagtgtaatgcacactataatctgcagaatgcattcaatctggctgaaaaggaactgggacttaccaagctgctggatcccgaagacgtgaatgtggaccagccagatgagaagtcaatcattacctatgtggctacttactaccattacttctccaagatgaaggccctggccgtggaaggcaagagaattggcaaggtgctggaccatgccatggaggcagagcgcctggtggagaaatacgagtccctggcctcggagctgctgcagtggatcgagcaaacgatcgtgaccctcaatgaccggcagttggccaactcccttagcggggtccagaaccagctgcagtccttcaactcctaccgcaccgtggagaagccgcccaagtttaccgagaaagggaacttggaagtgctgctcttcaccatccagagcaagcttcgggccaacaaccagaaggtctacacgccccgcgagggccggctcatctcggacatcaacaaggcttgggagcggctggagaaggcggagcacgagcgtgagctggccctgcgcaccgagctcatccgccaggagaagctggagcagctggccgcccgcttcgaccgcaaggctgccatgcgggagacctggctcagcgagaaccagcgcctcgtgtcccaggacaactttgggctggagctggcagctgtcgaggcagcagtacggaagcacgaagccattgagacggacatcgtggcctacagcggccgggtgcaggcagtggacgccgtggctgcagagctggccgccgagcgctaccacgacatcaagcgcatcgccgctcggcagcacaacgtggcacggctctgggacttcttgcggcagatggtggccgcccggcgggagcggctcctcctcaacctggagctgcagaaggtgttccaggacctgctctacctcatggactggatggaagagatgaagggccggctgcagtctcaggacctgggcaggcacctagcaggagtggaggacctgctgcagctgcacgagctggtggaggcagacatcgccgtgcaggccgagagggtgcgggccgtcagcgcctctgccctgcgcttctgcaacccagggaaagagtatagaccttgcgacccgcagctggtgtcggagcgggtggccaagctagagcagagctatgaggcactgtgcgagttggcagcggcgcggcgggcccggctggaggaatcacggcggctctggcgtttcctctgggaggtgggtgaagctgaggcctgggtgcgggagcagcagcacctcctggcctcagccgacacgggccgagacctgaccggtgccctccgcctgctcaacaagcacacagccctgcggggcgagatgagcggccggctggggcccctgaagctcaccctggagcagggccagcagttggtggccgagggtcaccctggggcaagccaggcctctgcccgtgcagctgaactccaagcccagtgggagcggctagaggccctggccgaggagcgtgcccagcggctggcccaagccgccagcctctaccagttccaggccgatgcaaacgacatggaggcctggttggttgacgcactgcgcctggtgtccagccccgagctggggcacgacgagttctccacgcaggctctagccaggcagcatcgggccctggaggaggagattcgaagccaccggccaaccctggacgccttgagggaacaggcagcagccctgccccccacactgagccgcacgcccgaggtgcagggccgggtgcccaccctggagcggcactacgaggagctgcaggcccgggcaggcgagcgagcgcgggccttggaggcagccctggcgctctacaccatgctcagcgaggccggggcctgtggactctgggtggaggagaaggagcagtggctcaacgggctggccctgcctgaacgcctggaggacctggaggtcgtgcagcagaggttcgagaccctggagcctgaaatgaacacccttgcagcacaaatcaccgcggtgaatgacattgccgagcagttactgaaggccaaccccccaggcaaagaccgcattgtcaacacccaggagcagctcaaccacaggtggcagcagtttcggcgtctggcagacggcaagaaggcagctctcacctcagccctgagcatccagaactaccacttagagtgcacggagacccaggcctggatgagagagaagaccaaagtcatcgagtccacccagggcctaggcaacgatctggctggggtgctggccctgcagcgcaagctggccggcacggagcgggacctggaggccatcgccgcccgggtgggcgaactgactcgagaggcaaatgccctggctgccggccatcccgctcaggcagtggccatcaacgcccggctgagagaggtgcagaccggctgggaggacctcagggccaccatgcggcgtcgagaagagtcgctgggggaggcgcggcggctgcaggacttcttgcgcagcttggatgacttccaggcctggctaggccgcactcagactgctgtggcctctgaagaagggccggccaccctgcctgaggcagaggccctcctggcccaacatgcagccctgcggggagaggtggagcgggcccagagcgagtatagccggctgcgagccctgggcgaggaggtgacccgggaccaggctgacccccagtgcctcttcctacgacagcgactggaggccctgggaactggctgggaggagctgggccgaatgtgggagagccggcaaggtcgcctggcccaggcccacggcttccagggattcctgcgggatgctcgtcaggctgagggcgtgctcagcagccaggaatatgttctgtctcacacggagatgccagggacactccaggctgctgatgctgccattaaaaaactggaggacttcatgagcaccatggacgccaatggggaacggatccacgggctcctggaggctggccgccagctggtatctgaaggcaacatccacgccgacaagattcgggaaaaggcagactccattgagaggaggcacaagaagaatcaagacgcagcgcagcaatttctgggccgtcttcgggacaaccgggagcagcagcatttcctgcaagattgtcacgagctgaagctctggatcgacgagaagatgctgacagcccaggacgtgtcctatgacgaggcccgcaacctgcatactaagtggcagaagcaccaggcattcatggccgagctggctgccaacaaagactggctggacaaggtggacaaggaagggcgagagctcacccttgagaagccagagctgaaagccctggtgtcggagaagctgagagacctgcacaggcgctgggacgagctggagaccaccacccaagccaaggcccgcagcctctttgatgccaaccgagctgagctgtttgcccagagctgctgtgccctggagagctggctggagagcctgcaggcccagctgcactcggatgactacggcaaggacctcaccagcgtcaacatcctgctcaagaagcagcagatgctggaatgggagatggctgtgagagagaaggaggtggaggcaatccaggcccaggccaaagcactggcccaggaggaccagggtgcaggggaggtggagagaacctcgagggccgtggaggagaagttcagggccttgtgccagcccatgcgggaacgctgccggcgcctgcaggcttctcgcgagcagcaccagttccaccgcgatgtggaagatgagattttgtgggtgacagagcggctgcccatggccagctccatggagcatggcaaggacctgcccagcgtccagcttctcatgaagaaaaaccagaccctgcagaaagagattcagggccatgagccccggatcgcggacctgagggagcggcagcgtgctctaggtgcagcagcagcaggtccagagctggctgagctgcaggaaatgtggaaacgcctgggccacgagctggaacttcgagggaagcgactggaggatgccctgcgagcccagcagttctaccgcgatgccgccgaggcggaggcctggatgggcgagcaggaattacacatgatgggccaggagaaggccaaggatgagctgagtgcccaggcagaggtgaagaagcaccaggtgctggagcaagccctggccgactacgcgcagaccatccaccagctggcggccagcagccaggacatgattgaccacgagcacccagagagcactcggatatccatccgccaagcccaggtggacaagctgtatgccggcctgaaggagctggctggagagcggcgggagcgcctgcaggagcacctccggctgtgccagctccgccgcgagctggatgacctggaacagtggatccaggagcgcgaggtggtggcggcctcccacgagctgggccaggactacgagcatgtgactatgctccgagacaaattccgagagttctcccgggacacaagcaccatcggtcaggagcgcgtagatagcgccaatgcgctggccaatgggctcattgctgggggccatgctgcacgggccaccgtggccgagtggaaggacagtctcaacgaggcctgggctgacctgcttgagctgctggacacacggggtcaggtgctggccgcggcgtacgagctgcagcgcttcctgcacggggcacgccaagccctggcgcgggtgcagcacaagcagcagcagcttccggacgggactggccgcgacctcaacgctgccgaggccctgcagcgccgacactgtgcctacgagcatgacattcaggccctcagcccccaggtccagcaggtgcaggacgacggccaccggctccagaaggcctacgctggagacaaggctgaggagatcggccgccacatgcaggccgtggccgaggcctgggcccagcttcagggaagctctgccgcccgccggcagctgctgctggacaccacagacaagttccgcttcttcaaggctgtccgggaactgatgctctggatggatgaggtcaacctgcagatggatgcccaggagcgtccccgggatgtgtcctccgcggatctagtcatcaagaaccagcaaggcatcaaggcagagatagaggcccgggcagaccgcttctcctcctgcatcgacatggggaaggagctgctggccaggagccactatgcggccgaggagatctcagagaagctgtctcagctgcaggcacggcgccaggagacagctgagaagtggcaggagaagatggactggcttcagctggttttggaggtgcttgtgtttggaagagatgcagggatggcagaggcctggctctgcagccaggagccactggtgcgcagcgctgagctgggttgcacggtcgacgaagttgagagcctcatcaagcggcacgaggccttccagaagtcagcagtggcctgggaggagcgattctgtgcgctggagaagcttactgcgctagaggagcgggagaaggagcgaaagagaaagagggaggaggaggagcggcggaaacagccgcctgctcccgaacccacagccagtgtgcctccaggggacctggtgggcggccagacagcttctgacaccacctgggacggaacccagccacggccaccaccatccacacaagcacccagtgttaatggagtctgcacagatggagagccctcacagcccctgctgggacaacagagacttgagcacagcagcttccccgaagggccgggacctggctcaggggacgaagccaatgggccccggggagagaggcagacccggactcggggcccggccccatctgcaatgccccagagcaggtctaccgagtcagcccatgctgccaccctgccgcctcgaggcccagagccatctgcccaggagcagatggaggggatgctgtgccgcaagcaggagatggaggccttcgggaagaaggctgccaacaggtcctggcagaacgtgtactgtgtcctgcggcgtgggagcctcggcttttacaaggatgccaaggcagccagcgcgggagtgccataccacggagaagtgcctgtcagcctggccagggcccagggcagcgtcgcctttgattaccgaaagcgcaaacatgtcttcaagctgggcttacaggatggaaaagaatatttattccaggccaaggatgaggtgagctgtccttcgtgttcctctctgtccgtgccattccagaagcttccagctgcagactccccttctttccctgtcctccctctttttcctggtcttgtcctttgtggtaagactggatgtgtgcgacggccgcaccaggccgcactccctgtctaagccggccacattctcctaatagcatgaaacagtcagctcactttctgcctcctcctcttacacttccctgctgtccactgcggccaactcagcacagtgtccttgaagctgattgagggtctttccatccacaggcagagatgagctcgtggctacgggtggtgaatgcagccattgccacagcgtcttctgcctctggagagcctgaagagccggtggtgcccagcaccacccggggcatgacccgggccatgaccatgcccccagtgtcacccgtcggggctgaggggcctgttgtgctccgcagcaaagacggcagagaacgagagcgagaaaaacgcttcagcttctttaagaagaacaagtagttgggggcaaggtcccaggccaactccctccctccgttcaggaaactgccagggacagtcgacagggaccgccctcttgtcaggacaactgcctgctgctagggtctgttgccaaggtcaacccatcaccaggaactgtcactggggacgagtccatgttcccaagggcagcccttctcttctgctgtttaattccagactggtggtgggacccaggtaaccccctctcccacccccgccgacttctcccctttccccagcctcgtgcctctgtccctcaccacggtgtggacagtgccgcaccctcaacataggccatgtggggagtggctgcccctgcctcagggtcattctcctgccatgcgagggcactcgccttctgccttctggttcctcacccctcagaccagccaggaacctctcagagctgaagcaggccctgggggcagaagtgccagatgacagtcagaggcgcaggagccctccctccccacccccaccctgtaactccagctgccactccatctccagctgctctcaatggcttccaggtgtgttgttcggggacagccaccgccttgagtctggccaaggaggtgattaaacagctcagcttctctc

SEQ ID NO: 380669 - DNA, 3392 bp, Homo sapiens
  misc_feature (2879)..(2879): n is a, c, g, or t
  misc_feature (2986)..(2986): n is a, c, g, or t
cacgaggcagcaaagacggcagagaacgagagcgagccaactccctccctccgttcaggaaactgccagggacagtcgacagggaccgccctcttgtcaggacaactgcctgctgctagggtctgttgccaaggtcaacccatcaccaggaactgtcactggggacgagtccatgttcccaagggcagcccttctcttctgctgtttaattccagactggtggtgggacccaggtaaccccctctcccacccccgccgacttctcccctttccccagcctcgtgcctctgtccctcaccacggtgtggacagtgccgcaccctcaacataggccatgtggggagtggctgcccctgcctcagggtcattctcctgccatgcgagggcactcgccttctgccttctggttcctcacccctcagaccagccaggaacctctcagagctgaagcaggccctgggggcagaagtgccagatgacagtcagaggcgcaggagccctccctccccacccccaccctgtaactccagctgccactccatctccagctgctctcaatggcttccaggtgtgttgttcggggacagccaccgccttgagtctggccaaggaggtgattaaacagctcagcttctctcaccgcctctgggtgtctttgctttcctgaccacagcctctctgcccaagcctgtgtcctctccttccgttctggtctccttcatctcacgtttccccagcctccaagctcttgaagagccgtgtcacactgagagcttccctgacctggtctcatttccctctgacagtgacctccagtgtgctgggttgaccaatgccaagcctctttttaaaccaaagtagttcaccatgggttgggatgatgtcaacaagcagtattcatgttaaaaagcaatgagggactccttccctggtgcacaattttcttcacttgtgatctctaaactgttttcaaattggaagactgggaagcattgctacagccccagccagtctcagccactgctcagcccagtggtggaaagctgagcacacagcgggtgcttactgcccccacttgccgtctgctctccagtagatcaagggacctcagacagggatctgagaagtggcaggttccaataaactgatcaacagaatgaagtcactctgggaagccatgaggtgactttacagcccaagcatgtaaatatacacacagaggataatatatattcttttttttttttttttttgagacagagtctcgctctgtcagccaagctggactgcagtggcgcaatcacagcccattgcaacctccacctcctgggttcaagcaatcctcccacctcagcctcccgagtagcctgaaccacaggcacatgccatcatacccgactaagtctgtttgttttttgtagagacggggtctcactatgttgcccaggtcggtctcgaattcctgggcccaagtgattctctcaccttggcctcaaactgttgggattacaggcgtgagccaccatgcccagctgagactaccttctggatctgatgaagtattagaaaggagcgggtggcttctcctttgtctctggtttggcaatcggagctttcagggcacagtgtttgtctccagatgttgatggaagtgggcactccttggtggcctccaacaggaaaagcgtgttctttcattgtttcctatacacacagacaaccgtttttccaggaaggcagccccatctttagtcattgactgcgggcctatcatcagtcatgacgaagaccgagtgaggtgtgtgcaggcccagaactagcacatcacagccccagagtgggctccaaaccggtagaccagagagcctgcaggataatttcccccttaagatgggtagatttactgttccacagccaacaggtggatacgcgtaactagaacaatctgtcatgggactaagtggaagaatccatcagcactacacagcatcttttcttcaaatacaactgtaaaatctccactgaagagacagtcataccttgggggtgctcagggaatctaggtatttgcactccaagctggcaagcctgggggcactgaagggaaacaataattggaaatgtcagaaggaaatgtatatggagaaattaatagagaaatgattattttaacatgacacgtaagtgtaaataggacagccaattgaagcagtcctgcagtaggggcaggcattgtcaacggagaggtgagactgaagaccccgagcagcatctgcatatgcggcagcaggacttcagggcatgattccttaagaacaggacatagaagaggggaagcatagtgtcaggaattaagtcagaaaacaccttcagctgtgagtggaagaaagaaaaaattccaggaaagacaacaggatggaatggggcggtgagggctatgagacaagttagacacaaaaatacaataaatgcaggcagcacaaatcaatggagagagatggcagataaaaatggattacttgggccgggcgcggtggctcacgcctgtaatcccagcactttgggaggccgaggcgggcggatcacgaggtcaggagatcgagaccatcccggctaaaacggtgaaaccccgtctctactaaaaatacaaaaattagccgggcgtagtggcgggcgcctgtagtcccagctacttgggaggctgaggcaggagaatggcgtgaacccgggaggcggagcttgcagtgagccgagatgccgccactgcgctccagcctgggtgacagagcgagactccatctcaaaaaaaaaaaaaaaaaaaaaatggattacttggccaggcatggtggttcacgcttataatcccagcactttgggangccgaggtgagtgggtcacttgagctcaggagttcaagaccagcctgggcaacatggtgaaccccatctctacaaaaattagccaggtgtagtggcatgtgcctgtngtctcagctacttgggaggctgaggcaggagcattgcttgaacctgggaagcagaggttacagtgagccgagatcatgccactgcactccagtctaggcaataaagtgagaccctgtctccaaaaaaaaaaaataggattatgtagagaaaaatatatttgcattcttaacatcacctacaagagtggactttaggtccatgctgtccacagcagcagccacccagccatgtgtggctactgagatgtagccaaaccaagtgtgtcatgactctgaaacaccaggtatgaagcatggaagaggacaacaactttaaataccttaatttttatattgattatgtgttgaaataatattttagatatattgggtttcaaaagtatcattaaagtgaatttcaactatt

SEQ ID NO: 380670 - DNA, 4545 bp, Homo sapiens
gccaaggttctggggatatttataacttgaagagggtgggagtccctaataagctgctatattctttttccatcacttccctctccaaggctacagcgagctgggagctcttccccacgcagaatgcctgctttccccagtgctcgacttccattgtctaattccctcatcctggctggggaaagggagagctgcgagtcctcccgttccgaggaactccagctgaatgcagcttagttgctggtggtttcttggccagcctctgtggtctcagggatctgcctatgagcctgtggtttctgagctgcctgcgagtctgaggcctcgggaatctgagtctttaggatcagcctacgatatctgggcttcgcctgcaagtctacgaattcgagatctacctgcgggtctgagacctccgggacctgcccgtgctctctagaatcttcctgaacgccaggtctgagagaacgctgcggctctggaacccgttcgcggtctctcaggttttggagacgacgatctagtggatcttttgcgggacaggagcgctgtctgctagctgcttttcctgctctctctccctggaggcgaacccttgtgctcgagatggcagccaccctgctcatggctgggtcccaggcacctgtgacgtttgaagatatggccatgtatctcacccgggaagaatggagacctctggacgctgcacagagggacctttaccgggatgttatgcaggagaattatggaaatgttgtctcactagattttgagatcaggagtgagaacgaggtaaatcccaagcaagagattagtgaagatgtacaatttgggactacatctgaaagacctgctgagaatgctgaggaaaatcctgaaagtgaagagggctttgaaagcggagataggtcagaaagacaatggggagatttaacagcagaagagtgggtaagctatcctctccaaccagtcactgatctacttgtccacaaagaagtccacacaggcatccgctatcatatatgttctcattgtggaaaggccttcagtcagatctcagaccttaatcgacatcagaagacccacactggagacagaccctataaatgttatgaatgtggaaaaggcttcagtcgcagctcacaccttattcagcatcaaagaacacatactggggagaggccttatgactgtaacgagtgtgggaaaagttttggaagaagttctcacctgattcagcatcagacaatccacactggagagaagcctcacaaatgtaatgagtgtggaaaaagtttctgccgtctctctcacctaatccaacaccaaaggacccacagtggtgagaaaccctatgagtgtgaggagtgtgggaaaagcttcagccggagctctcacctagctcagcaccagaggacccacacgggtgagaaaccttatgaatgtaacgaatgtggccgaggcttcagtgagagatctgatctcatcaaacactatcgagtccacacaggggagaggccctacaagtgtgatgagtgtgggaagaacttcagtcagaactccgaccttgtgcgtcatcgcagagcccacacgggagagaagccataccactgtaacgaatgtggggaaaatttcagccgcatctcacacttggttcagcaccagagaactcacactggagagaagccatatgaatgcaatgcttgtgggaaaagcttcagccggagctctcatctcatcacacaccagaaaattcacactggagagaagccttatgagtgtaatgagtgttggcgaagctttggtgaaaggtcagatctaattaaacatcagagaacccacacaggggagaagccctacgagtgtgtgcagtgtgggaaaggtttcacccagagctccaacctcatcacacatcaaagagttcacacgggagagaaaccttatgaatgtaccgaatgtgagaagagtttcagcaggagctcagctcttattaaacataagagagttcatacggactaagctgtaattatgatggctgagaaatgattcatttgaagatacaattttatttgatatcaatgaacgccctcaagactgagctgcttttatcatactctcctagttgtgggccacgatttaaaccatcagagatgacaagccatttgaaattctgaccctcagctttgggaatgttatctcctccaaaatggtgatttttattcactcaatgggttacttcattaaaagcagccccacaagtaactggaaatctgaagaccaggggacaaatgctggtgaatgcctaggcctggaaatggagtaaatctttcaatgttattttctcccatccttggcccaaggaactatgctaagtgaaacgtgggactgtaatagggtggtaatggctgctttggaaaaaggcaactagagactctgcctaaattgccacacctattcacacaccatagtagttgggcacacacatcttcccttccaaagggctttttccttgagttgctcatgcatttgtatcttttccatcttcctgagggcaagattttgcacgatgaaggcaatgattgtaacttttctccttctcattgtttctaattagctcctttaaagcttgcatctttgtgaaggctaactgaagatacggttggaaaggaaaaatgagacacaggtttggggaccaaggacccatcaatgatggtgactttagcagaagatgcccacagttattactgccattaatcagatttatgaattttctttggggatcactatagggaatattgtatagaaaatatcttcaagaaaagataggaccatcagtgacagttaagtgtaaggagcaagtggaattgagtccttcagggaaggaaccacagagtcccttcccaaggaatgtaggtcgtttctgtgttctttcccttctaatctttaagatcaactcttcctatcctgctaactctaagatttgataagggccacatcccagtgtttatcttagcttgcatcagggcatgtgtatgtacagtaatgtgtattcctgtggtttttctaatagaaactgaatttacagagacttagcatgttcttgggtgatgtgagtcatgtgacagaagtacagacataactccaatgtgagaaatgtccttttttcattatggaaaataatttaaacactagtgctttagtgtgcactctcctgtaaggtctgtctttgtacagagctaagcacttgtttgtatgtgtttgtcaattgtggaagataatgaccagacaaataggtcgattgtcctattctcagaatgaattatcttctatggtaatgaagaactctttggcttagtcagaaggaattaacgaacctcggtaggaatgtatttccatcctcccaccctacagatataagaggttaaaataacagttcgcccaatttaagcccagtagtgtcagttttcctaatctcagtccaggtaggaattaagaaatatctcaagtgttgatgctatccaagcatgttggggtggaagggaattggtgcccagaaaatgggactggagtgaggaatatcttttcttttgagagtacccccagtttatttctactgtgctttattgctactgttctttattgtgaatgttgtaacattttaaaaatgttttgccatagctttttaggacttggtgttaaaggagccagtggtctctctgggtgggtactataatgagttattgtgacccacagctgtgtgggaccacatcacttgttaataacacaacctttaaagtaacccatcttccaggggggttccttcatgttgccactcctttttaaggacaaactcaggcaaggagcatgtttttttgttatttacaaaatctagcagactgtgggtatccatattttaattgtcgggtgacacatgttcttggtaactaaactcaaatatgtcttttctcatatatgttgctgatggttttaataaatgtcaaagttctcctgttgcttctgtgagccactatgggtatcagcttgggagtggccatagatgaccgcatttccatgacctaactgtatttcacccccttttccttccctactgttcttgccccaccccaaccagttcctgctgctgcttttggcttcttggaggtgaagggcttaaaacaaggcttctaagcacccagctatctccatacatgaacaatctagctgggaaacttaaaggacaagggccacaccagctgtctcctctttctgccaattgttgcccgtttgctgtgttgaactttgtatagaactcatgcatcagactcccttcactaatgctttttgcatgccttctgctcccaagtccctggctgcctctgcacatcccgtgaacactttgtgcctgttttctatggttgtggagaattaatgaacaaatcaatatgtagaacagttttccttatggtattggtcacagttatcctagtgtttgtattattctaacaatattctataattaaaaatataatttttaaagtcagcaaa

SEQ ID NO: 380671 - DNA, 454 bp, Homo sapiens
ctactactaaattcccgaccgcgtcaccccccagtttatttctactgtgctttattgctactgttctttattgtgaatgttgtaacattttaaaaatgttttgccatagctttttaggacttggtgttaaaggagccagtggtctctctgggtgggtactataatgagttattgtgacccacagctgtgtgggaccacatcacttgttaataacacaacctttaaagtaacccatcttccaggggggttccttcatgttgccactcctttttaaggacaaactcaggcaaggagcatgtttttttgttatttacaaaatctagcagactgtgggtatccatattttaattgtcgggtgacacatgttcttggtaactaaactcaaatatgtcttttctcatatatgttgctgatggttttaataaatgtcaaagttctcctgttgcttctgtga

SEQ ID NO: 380672 - DNA, 949 bp, Homo sapiens
gccaaggttctggggatatttataacttgaagagggtgggagtccctaataagctgctatattctttttccatcacttccctctccaaggctacagcgagctgggagctcttccccacgcagaatgcctgctttccccagtgctcgacttccattgtctaattccctcatcctggctggggaaagggagagctgcgagtcctcccgttccgaggaactccagctgaatgcagcttagttgctggtggtttcttggccagcctctgtggtctcagggatctgcctatgagcctgtggtttctgagctgcctgcgagtctgaggcctcgggaatctgagtctttaggatcagcctacgatatctgggcttcgcctgcaagtctacgaattcgagatctacctgcgggtctgagacctccgggacctgcccgtgctctctagaatcttcctgaacgccaggtctgagagaacgctgcggctctggaacccgttcgcggtctctcaggttttggagacgacgatctagtggatcttttgcgggacaggaggtaagtctgttcgtcccccactcgggttttcggcttcctaccttcaaccggacagggactgctaacatcctgaaggcccgcccggatcagggcctcagacgcccagggtcccttcggtgcgggaggccgctgggagcccctgtagcagacaagccctctgggacgctaaggagggcccgccccccccgcaggggcctggctatctcctccttacacgccctacaccgccacccgcttctgagtcccccagggttttcgcctccccgccgctggacgccactcagcccgccgctcgaggggcgcccccttgagaaggacgcagtcgcacgcccctacagggttaaagcgccgaagccaagacaccgccaggctctactgccgaccgcactcccgagtcgccccg

SEQ ID NO: 380673 - DNA, 450 bp, Homo sapiens
atggcagagcggaggcgttccctgggctgagctgagcacctcctccctgagacagcagcggtctaacccccggcgcgggagggacccagccagggggctgtcctagtagattccggcattgcctccaccccgctgtggcggagacgcagagggcgggtcgcgctcgagggtcagggaggagagtgacccggccctggtccagggccctccctgcccgccttggggccagaactccagccctggggagtgggcagggcctgttttccgtgcctcacgccctgcttttcgcctccttcagcgctgtctgctagctgcttttcctgctctctctccctggaggcgaacccttgtgctcgagatggcagccaccctgctcatggctgggtcccaggtaagccggaggtggcttctcagaccttgtctctgcttacccacctcgtccggcgtttc

SEQ ID NO: 380674 - DNA, 4023 bp, Homo sapiens
gccaaggttctggggatatttataacttgaagagggtgggagtccctaataagctgctatattctttttccatcacttccctctccaaggctacagcgagctgggagctcttccccacgcagaatgcctgctttccccagtgctcgacttccattgtctaattccctcatcctggctggggaaagggagagctgcgagtcctcccgttccgaggaactccagctgaatgcagcttagttgctggtggtttcttggccagcctctgtggtctcagggatctgcctatgagcctgtggtttctgagctgcctgcgagtctgaggcctcgggaatctgagtctttaggatcagcctacgatatctgggcttcgcctgcaagtctacgaattcgagatctacctgcgggtctgagacctccgggacctgcccgtgctctctagaatcttcctgaacgccaggtctgagagaacgctgcggctctggaacccgttcgcggtctctcaggttttggagacgacgatctagtggatcttttgcgggacaggagcgctgtctgctagctgcttttcctgctctctctccctggaggcgaacccttgtgctcgagatggcagccaccctgctcatggctgggtcccaggcacctgtgacgtttgaagatatggccatgtatctcacccgggaagaatggagacctctggacgctgcacagagggacctttaccgggatgttatgcaggagaattatggaaatgttgtctcactagattttgagatcaggagtgagaacgaggtaaatcccaagcaagagattagtgaagatgtacaatttgggactacatctgaaagacctgctgagaatgctgaggaaaatcctgaaagtgaagagggctttgaaagcggagataggtcagaaagacaatggggagatttaacagcagaagagtgggtaagctatcctctccaaccagtcactgatctacttgtccacaaagaagtccacacaggcatccgctatcatatatgttctcattgtggaaaggccttcagtcagatctcagaccttaatcgacatcagaagacccacactggagacagaccctataaatgttatgaatgtggaaaaggcttcagtcgcagctcacaccttattcagcatcaaagaacacatactggggagaggccttatgactgtaacgagtgtgggaaaagttttggaagaagttctcacctgattcagcatcagacaatccacactggagagaagcctcacaaatgtaatgagtgtggaaaaagtttctgccgtctctctcacctaatccaacaccaaaggacccacagtggtgagaaaccctatgagtgtgaggagtgtgggaaaagcttcagccggagctctcacctagctcagcaccagaggacccacacgggtgagaaaccttatgaatgtaacgaatgtggccgaggcttcagtgagagatctgatctcatcaaacactatcgagtccacacaggggagaggccctacaagtgtgatgagtgtgggaagaacttcagtcagaactccgaccttgtgcgtcatcgcagagcccacacgggagagaagccataccactgtaacgaatgtggggaaaatttcagccgcatctcacacttggttcagcaccagagaactcacactggagagaagccatatgaatgcaatgcttgtgggaaaagcttcagccggagctctcatctcatcacacaccagaaaattcacactggagagaagccttatgagtgtaatgagtgttggcgaagctttggtgaaaggtcagatctaattaaacatcagagaacccacacaggggagaagccctacgagtgtgtgcagtgtgggaaaggtttcacccagagctccaacctcatcacacatcaaagagttcacacgggagagaaaccttatgaatgtaccgaatgtgagaagagtttcagcaggagctcagctcttattaaacataagagagttcatacggactaagctgtaattatgatggctgagaaatgattcatttgaagatacaattttatttgatatcaatgaacgccctcaagactgagctgcttttatcatactctcctagttgtgggccacgatttaaaccatcagagatgacaagccatttgaaattctgaccctcagctttgggaatgttatctcctccaaaatggtgatttttattcactcaatgggttacttcattaaaagcagccccacaagtaactggaaatctgaagaccaggggacaaatgctggtgaatgcctaggcctggaaatggagtaaatctttcaatgttattttctcccatccttggcccaaggaactatgctaagtgaaacgtgggactgtaatagggtggtaatggctgctttggaaaaaggcaactagagactctgcctaaattgccacacctattcacacaccatagtagttgggcacacacatcttcccttccaaagggctttttccttgagttgctcatgcatttgtatcttttccatcttcctgagggcaagattttgcacgatgaaggcaatgattgtaacttttctccttctcattgtttctaattagctcctttaaagcttgcatctttgtgaaggctaactgaagatacggttggaaaggaaaaatgagacacaggtttggggaccaaggacccatcaatgatggtgactttagcagaagatgcccacagttattactgccattaatcagatttatgaattttctttggggatcactatagggaatattgtatagaaaatatcttcaagaaaagataggaccatcagtgacagttaagtgtaaggagcaagtggaattgagtccttcagggaaggaaccacagagtcccttcccaaggaatgtaggtcgtttctgtgttctttcccttctaatctttaagatcaactcttcctatcctgctaactctaagatttgataagggccacatcccagtgtttatcttagcttgcatcagggcatgtgtatgtacagtaatgtgtattcctgtggtttttctaatagaaactgaatttacagagacttagcatgttcttgggtgatgtgagtcatgtgacagaagtacagacataactccaatgtgagaaatgtccttttttcattatggaaaataatttaaacactagtgctttagtgtgcactctcctgtaaggtctgtctttgtacagagctaagcacttgtttgtatgtgtttgtcaattgtggaagataatgaccagacaaataggtcgattgtcctattctcagaatgaattatcttctatggtaatgaagaactctttggcttagtcagaaggaattaacgaacctcggtaggaatgtatttccatcctcccaccctacagatataagaggttaaaataacagttcgcccaatttaagcccagtagtgtcagttttcctaatctcagtccaggtaggaattaagaaatatctcaagtgttgatgctatccaagcatgttggggtggaagggaattggtgcccagaaaatgggactggagtgaggaatatcttttcttttgagagtacccccagtttatttctactgtgctttattgctactgttctttattgtgaatgttgtaacattttaaaaatgttttgccatagctttttaggacttggtgttaaaggagccagtggtctctctgggtgggtactataatgagttattgtgacccacagctgtgtgggaccacatcacttgttaataacacaacctttaaagtaacccatcttccaggggggttccttcatgttgccactcctttttaaggacaaactcaggcaaggagcatgtttttttgttatttacaaaatctagcagactgtgggtatccatattttaattgtcgggtgacacatgttcttggtaactaaactcaaatatgtcttttctcatatatgttgctgatggttttaataaatgtcaaagttctcctgttgcttctgtga

SEQ ID NO: 380675 - DNA, 1183 bp, Homo sapiens
gccaaggttctggggatatttataacttgaagagggtgggagtccctaataagctgctatattctttttccatcacttccctctccaaggctacagcgagctgggagctcttccccacgcagaatgcctgctttccccagtgctcgacttccattgtctaattccctcatcctggctggggaaagggagagctgcgagtcctcccgttccgaggaactccagctgaatgcagcttagttgctggtggtttcttggccagcctctgtggtctcagggatctgcctatgagcctgtggtttctgagctgcctgcgagtctgaggcctcgggaatctgagtctttaggatcagcctacgatatctgggcttcgcctgcaagtctacgaattcgagatctacctgcgggtctgagacctccgggacctgcccgtgctctctagaatcttcctgaacgccaggtctgagagaacgctgcggctctggaacccgttcgcggtctctcaggttttggagacgacgatctagtggatcttttgcgggacaggagcgctgtctgctagctgcttttcctgctctctctccctggaggcgaacccttgtgctcgagatggcagccaccctgctcatggctgggtcccaggcacctgtgacgtttgaagatatggccatgtatctcacccgggaagaatggagacctctggacgctgcacagagggacctttaccgggatgttatgcaggagaattatggaaatgttgtctcactagattttgagatcaggagtgagaacgaggtaaatcccaagcaagagattagtgaagatgtacaatttgggactacatctgaaagacctgctgagaatgctgaggaaaatcctgaaagtgaagagggctttgaaagcggagataggtcagaaagacaatggggagatttaacagcagaagagtgggtaagctatcctctccaaccagtcactgatctacttgtccacaaagaagtccacacaggcatccgctatcatatatgttctcattgtggaaaggccttcagtcagatctcagaccttaatcgacatcagaagacccacactggagacagaccctataaatgttatgaatgtggaaaaggcttcagtcgcagctcacaccttattcagcattcctcgcaacaggggtaccgagctc

SEQ ID NO: 380676 - DNA, 514 bp, Homo sapiens
tctaatcatgtttctaatttcaagaagtcctaaatacagaatagtagggaagtatcgtgtgatttcaggcacctgtgacgtttgaagatatggccatgtatctcacccgggaagaatggagacctctggacgctgcacagagggacctttaccgggatgttatgcaggagaattatggaaatgttgtctcactaggtaagtaaggattctacctttctttgcctccacgtttttgagatcgtgtcaaaatgacttagttctttcaacacagcctagtggtttgattttttaaagcacttaattggatgttggcttgacttgagtcctcaggcagatctttgaatatgggaacatccaggtcatattgtctaaaaagaaaaaaactgcttctgcacgtcttagacgttcagatttcttgtgccctgagtcattttccaatctccagcctgtttgtacagatcactgaccaaacaggtctggcataatagtgcttgccagaatataaatgccccgt

SEQ ID NO: 380677 - DNA, 4297 bp, Homo sapiens
atggcagagcggaggcgttccctgggctgagctgagcacctcctccctgagacagcagcggtctaacccccggcgcgggagggacccagccagggggctgtcctagtagattccggcattgcctccaccccgctgtggcggagacgcagagggcgggtcgcgctcgagggtcagggaggagagtgacccggccctggtccagggccctccctgcccgccttggggccagaactccagccctggggagtgggcagggcctgttttccgtgcctcacgccctgcttttcgcctccttcagcgctgtctgctagctgcttttcctgctctctctccctggaggcgaacccttgtgctcgagatggcagccaccctgctcatggctgggtcccaggcacctgtgacgtttgaagatatggccatgtatctcacccgggaagaatggagacctctggacgctgcacagagggacctttaccgggatgttatgcaggagaattatggaaatgttgtctcactagattttgagatcaggagtgagaacgaggtaaatcccaagcaagagattagtgaagatgtacaatttgggactacatctgaaagacctgctgagaatgctgaggaaaatcctgaaagtgaagagggctttgaaagcggagataggtcagaaagacaatggggagatttaacagcagaagagtgggtaagctatcctctccaaccagtcactgatctacttgtccacaaagaagtccacacaggcatccgctatcatatatgttctcattgtggaaaggccttcagtcagatctcagaccttaatcgacatcagaagacccacactggagacagaccctataaatgttatgaatgtggaaaaggcttcagtcgcagctcacaccttattcagcatcaaagaacacatactggggagaggccttatgactgtaacgagtgtgggaaaagttttggaagaagttctcacctgattcagcatcagacaatccacactggagagaagcctcacaaatgtaatgagtgtggaaaaagtttctgccgtctctctcacctaatccaacaccaaaggacccacagtggtgagaaaccctatgagtgtgaggagtgtgggaaaagcttcagccggagctctcacctagctcagcaccagaggacccacacgggtgagaaaccttatgaatgtaacgaatgtggccgaggcttcagtgagagatctgatctcatcaaacactatcgagtccacacaggggagaggccctacaagtgtgatgagtgtgggaagaacttcagtcagaactccgaccttgtgcgtcatcgcagagcccacacgggagagaagccataccactgtaacgaatgtggggaaaatttcagccgcatctcacacttggttcagcaccagagaactcacactggagagaagccatatgaatgcaatgcttgtgggaaaagcttcagccggagctctcatctcatcacacaccagaaaattcacactggagagaagccttatgagtgtaatgagtgttggcgaagctttggtgaaaggtcagatctaattaaacatcagagaacccacacaggggagaagccctacgagtgtgtgcagtgtgggaaaggtttcacccagagctccaacctcatcacacatcaaagagttcacacgggagagaaaccttatgaatgtaccgaatgtgagaagagtttcagcaggagctcagctcttattaaacataagagagttcatacggactaagctgtaattatgatggctgagaaatgattcatttgaagatacaattttatttgatatcaatgaacgccctcaagactgagctgcttttatcatactctcctagttgtgggccacgatttaaaccatcagagatgacaagccatttgaaattctgaccctcagctttgggaatgttatctcctccaaaatggtgatttttattcactcaatgggttacttcattaaaagcagccccacaagtaactggaaatctgaagaccaggggacaaatgctggtgaatgcctaggcctggaaatggagtaaatctttcaatgttattttctcccatccttggcccaaggaactatgctaagtgaaacgtgggactgtaatagggtggtaatggctgctttggaaaaaggcaactagagactctgcctaaattgccacacctattcacacaccatagtagttgggcacacacatcttcccttccaaagggctttttccttgagttgctcatgcatttgtatcttttccatcttcctgagggcaagattttgcacgatgaaggcaatgattgtaacttttctccttctcattgtttctaattagctcctttaaagcttgcatctttgtgaaggctaactgaagatacggttggaaaggaaaaatgagacacaggtttggggaccaaggacccatcaatgatggtgactttagcagaagatgcccacagttattactgccattaatcagatttatgaattttctttggggatcactatagggaatattgtatagaaaatatcttcaagaaaagataggaccatcagtgacagttaagtgtaaggagcaagtggaattgagtccttcagggaaggaaccacagagtcccttcccaaggaatgtaggtcgtttctgtgttctttcccttctaatctttaagatcaactcttcctatcctgctaactctaagatttgataagggccacatcccagtgtttatcttagcttgcatcagggcatgtgtatgtacagtaatgtgtattcctgtggtttttctaatagaaactgaatttacagagacttagcatgttcttgggtgatgtgagtcatgtgacagaagtacagacataactccaatgtgagaaatgtccttttttcattatggaaaataatttaaacactagtgctttagtgtgcactctcctgtaaggtctgtctttgtacagagctaagcacttgtttgtatgtgtttgtcaattgtggaagataatgaccagacaaataggtcgattgtcctattctcagaatgaattatcttctatggtaatgaagaactctttggcttagtcagaaggaattaacgaacctcggtaggaatgtatttccatcctcccaccctacagatataagaggttaaaataacagttcgcccaatttaagcccagtagtgtcagttttcctaatctcagtccaggtaggaattaagaaatatctcaagtgttgatgctatccaagcatgttggggtggaagggaattggtgcccagaaaatgggactggagtgaggaatatcttttcttttgagagtacccccagtttatttctactgtgctttattgctactgttctttattgtgaatgttgtaacattttaaaaatgttttgccatagctttttaggacttggtgttaaaggagccagtggtctctctgggtgggtactataatgagttattgtgacccacagctgtgtgggaccacatcacttgttaataacacaacctttaaagtaacccatcttccaggggggttccttcatgttgccactcctttttaaggacaaactcaggcaaggagcatgtttttttgttatttacaaaatctagcagactgtgggtatccatattttaattgtcgggtgacacatgttcttggtaactaaactcaaatatgtcttttctcatatatgttgctgatggttttaataaatgtcaaagttctcctgttgcttctgtgagccactatgggtatcagcttgggagtggccatagatgaccgcatttccatgacctaactgtatttcacccccttttccttccctactgttcttgccccaccccaaccagttcctgctgctgcttttggcttcttggaggtgaagggcttaaaacaaggcttctaagcacccagctatctccatacatgaacaatctagctgggaaacttaaaggacaagggccacaccagctgtctcctctttctgccaattgttgcccgtttgctgtgttgaactttgtatagaactcatgcatcagactcccttcactaatgctttttgcatgccttctgctcccaagtccctggctgcctctgcacatcccgtgaacactttgtgcctgttttctatggttgtggagaattaatgaacaaatcaatatgtagaacagttttccttatggtattggtcacagttatcctagtgtttgtattattctaacaatattctataattaaaaatataatttttaaagtcagcaaa

SEQ ID NO: 380678 - DNA, 1291 bp, Homo sapiens
gcagttcccaggttctgaaagtcccacgcaccccgcgggactcatatttttcccagacgcggaggttggggtcatggcgccccgaagcctcctcctgctgctctcaggggccctggccctgaccgatacttgggcgggctcccactccttgaggtatttcagcaccgctgtgtcgcggcccggccgcggggagccccgctacatcgccgtggagtacgtagacgacacgcaattcctgcggttcgacagcgacgccgcgattccgaggatggagccgcgggagccgtgggtggagcaagaggggccgcagtattgggagtggaccacagggtacgccaaggccaacgcacagactgaccgagtggccctgaggaacctgctccgccgctacaaccagagcgaggctgggtctcacaccctccagggaatgaatggctgcgacatggggcccgacggacgcctcctccgcgggtatcaccagcacgcgtacgacggcaaggattacatctccctgaacgaggacctgcgctcctggaccgcggcggacaccgtggctcagatcacccagcgcttctatgaggcagaggaatatgcagaggagttcaggacctacctggagggcgagtgcctggagttgctccgcagatacttggagaatgggaaggagacgctacagcgcgcagatcctccaaaggcacacgttgcccaccaccccatctctgaccatgaggccaccctgaggtgctgggccctgggcttctaccctgcggagatcacgctgacctggcagcgggatggggaggaacagacccaggacacagagcttgtggagaccaggcctgcaggggatggaaccttccagaagtgggccgctgtggtggtgccttctggagaggaacagagatacacatgccatgtgcagcacgaggggctgccccagcccctcatcctgagatgggagcagtctccccagcccaccatccccatcgtgggcatcgttgctggccttgttgtccttggagctgtggtcactggagctgtggtcgctgctgtgatgtggaggaagaagagctcagatagaaacagagggagctactctcaggctgcagtcactgacagtgcccagggctctggggtgtctctcacagctaataaagtgtgagacagcttccttgtgtgggactgagaagcaagatatcaatgtagcagaattgcacttgtgcctcacgaacatacataaattttaaaaataaagaataaaaatatatctttttatagaaaaaaaaaaaaa

SEQ ID NO: 380679 - DNA, 1374 bp, Homo sapiens
gcagttcccaggttctgaaagtcccacgcaccccgcgggactcatatttttcccagacgcggaggttggggtcatggcgccccgaagcctcctcctgctgctctcaggggccctggccctgaccgatacttgggcgggtgagtgcggggtccagagagaaacggcctctgtggggaggagtgaggggcccgcccggtgggggcgcaggactcagggagccgcgctccggaggagggtctggcgggtctcagcccctcctcgcccccaggctcccactccttgaggtatttcagcaccgctgtgtcgcggcccggccgcggggagccccgctacatcgccgtggagtacgtagacgacacgcaattcctgcggttcgacagcgacgccgcgattccgaggatggagccgcgggagccgtgggtggagcaagaggggccgcagtattgggagtggaccacagggtacgccaaggccaacgcacagactgaccgagtggccctgaggaacctgctccgccgctacaaccagagcgaggctgggtctcacaccctccagggaatgaatggctgcgacatggggcccgacggacgcctcctccgcgggtatcaccagcacgcgtacgacggcaaggattacatctccctgaacgaggacctgcgctcctggaccgcggcggacaccgtggctcagatcacccagcgcttctatgaggcagaggaatatgcagaggagttcaggacctacctggagggcgagtgcctggagttgctccgcagatacttggagaatgggaaggagacgctacagcgcgcagatcctccaaaggcacacgttgcccaccaccccatctctgaccatgaggccaccctgaggtgctgggccctgggcttctaccctgcggagatcacgctgacctggcagcgggatggggaggaacagacccaggacacagagcttgtggagaccaggcctgcaggggatggaaccttccagaagtgggccgctgtggtggtgccttctggagaggaacagagatacacatgccatgtgcagcacgaggggctgccccagcccctcatcctgagatgggagcagtctccccagcccaccatccccatcgtgggcatcgttgctggccttgttgtccttggagctgtggtcactggagctgtggtcgctgctgtgatgtggaggaagaagagctcagatagaaacagagggagctactctcaggctgcagtgtgagacagcttccttgtgtgggactgagaagcaagatatcaatgtagcagaattgcacttgtgcctcacgaacatacataaattttaaaaataaagaataaaaatatatctttttatagaaaaaaaaaaaaa

SEQ ID NO: 380680 - DNA, 1602 bp, Homo sapiens
gcagttcccaggttctgaaagtcccacgcaccccgcgggactcatatttttcccagacgcggaggttggggtcatggcgccccgaagcctcctcctgctgctctcaggggccctggccctgaccgatacttgggcgggctcccactccttgaggtatttcagcaccgctgtgtcgcggcccggccgcggggagccccgctacatcgccgtggagtacgtagacgacacgcaattcctgcggttcgacagcgacgccgcgattccgaggatggagccgcgggagccgtgggtggagcaagaggggccgcagtattgggagtggaccacagggtacgccaaggccaacgcacagactgaccgagtggccctgaggaacctgctccgccgctacaaccagagcgaggctgggtctcacaccctccagggaatgaatggctgcgacatggggcccgacggacgcctcctccgcgggtatcaccagcacgcgtacgacggcaaggattacatctccctgaacgaggacctgcgctcctggaccgcggcggacaccgtggctcagatcacccagcgcttctatgaggcagaggaatatgcagaggagttcaggacctacctggagggcgagtgcctggagttgctccgcagatacttggagaatgggaaggagacgctacagcgcgcagatcctccaaaggcacacgttgcccaccaccccatctctgaccatgaggccaccctgaggtgctgggccctgggcttctaccctgcggagatcacgctgacctggcagcgggatggggaggaacagacccaggacacagagcttgtggagaccaggcctgcaggggatggaaccttccagaagtgggccgctgtggtggtgccttctggagaggaacagagatacacatgccatgtgcagcacgaggggctgccccagcccctcatcctgagatgggagcagtctccccagcccaccatccccatcgtgggcatcgttgctggccttgttgtccttggagctgtggtcactggagctgtggtcgctgctgtgatgtggaggaagaagagctcagatagaaacagagggagctactctcaggctgcaggtaagatgaaggaggctgatccctgagattgttgggatattgtggtcaggagcctatgagggagctcacccaccccacagttcctctagccacatctgtgggctctgaccaggtcctgtttttgttctaccccaatcactgacagtgcccagggctctggggtgtctctcacagctaataaaggtgacactccagggcaggggccctgatgtgagtggggtgttgggggggaacagaggggactcagctgtgctattgggtttctttgacttggatgtcttgagcatgaaatgggctatttagagtgttacctctcactgtgactgatacgaatttgttcatgaatattttctctatagtgtgagacagcttccttgtgtgggactgagaagcaagatatcaatgtagcagaattgcacttgtgcctcacgaacatacataaattttaaaaataaagaataaaaatatatctttttatagaaaaaaaaaaaaa

SEQ ID NO: 380681 - DNA, 2482 bp, Homo sapiens
gcagttcccaggttctgaaagtcccacgcaccccgcgggactcatatttttcccagacgcggaggttggggtcatggcgccccgaagcctcctcctgctgctctcaggggccctggccctgaccgatacttgggcgggctcccactccttgaggtatttcagcaccgctgtgtcgcggcccggccgcggggagccccgctacatcgccgtggagtacgtagacgacacgcaattcctgcggttcgacagcgacgccgcgattccgaggatggagccgcgggagccgtgggtggagcaagaggggccgcagtattgggagtggaccacagggtacgccaaggccaacgcacagactgaccgagtggccctgaggaacctgctccgccgctacaaccagagcgaggctgggtctcacaccctccagggaatgaatggctgcgacatggggcccgacggacgcctcctccgcgggtatcaccagcacgcgtacgacggcaaggattacatctccctgaacgaggacctgcgctcctggaccgcggcggacaccgtggctcagatcacccagcgcttctatgaggcagaggaatatgcagaggagttcaggacctacctggagggcgagtgcctggagttgctccgcagatacttggagaatgggaaggagacgctacagcgcgcagatcctccaaaggcacacgttgcccaccaccccatctctgaccatgaggccaccctgaggtgctgggccctgggcttctaccctgcggagatcacgctgacctggcagcgggatggggaggaacagacccaggacacagagcttgtggagaccaggcctgcaggggatggaaccttccagaagtgggccgctgtggtggtgccttctggagaggaacagagatacacatgccatgtgcagcacgaggggctgccccagcccctcatcctgagatgggagcagtctccccagcccaccatccccatcgtgggcatcgttgctggccttgttgtccttggagctgtggtcactggagctgtggtcgctgctgtgatgtggaggaagaagagctcaggcccagctcctgagtgtctctacctctcaaacaagtattctcatccaggagcaattttcccaccagaggacattagctatgtctggaaaaatgttttgttgccatgactggagtgaggaggaggtgctaccagcatcttgtggggaatgaccagggatgctgaacatcctgcagtgcacaagtcagcccaatcacccacataacagataattatccagccccaataccaagattgccaagggtaaggaggcctgccaggactttctctcccttgagtacaagcttccttgaactgagggacaccctgaaggaaaagtgtggtcccaccccagtcatctctcccttccctggagctccatctgtatgcctgtagtgcttaggcctgtaacctggggtccaggaacccaccttcccatgagactgcatgcagaagtgatgatatgtgcacacatgacttcattacagggcattggatattgatattcatcaggtcagctggggcccaagacactactcttctgccaacaggccgcaatcctctgcattagagagagggtaaagattgagggaggccctaacttcaaaccttctatcactgctagtgaagtgccaaaaagaagtgcaaggtcatctgcccttgtaggaaccacacaggaaggcagagtgtccaccaatgtcaaattccatcaaagaaataatattttgacaaaaaatgcaagtcacctttctaagtcccagacagcagctcaaaataaaaagcattaaacccctcaaatcttagaccaggtgaaattattgaagctgcagtaaggtcttgtgggacctgcagttagagagaagggacaactcaatttgggactgcagcagaaacccctacatcatggggttcctggaagggaccctctcccttcagcgacgcattgtgaggccatttctaggtaaaaaggtagaatttccttggattcctgaggtttattttacacttactgcttattctttgactttatagaagccaacttcagtttgaacatcttgcaattaattttttttggctctaagtggagaatttgaacttgtttctgaagaaaaccaggggctccttatgtgagcaagcaaccctccctgtggcccccttatgcaataaacataagccattgtgagccagcaaaatttaaagcaaggaaagcagtaaaccctccatttcagcatgtttcagcctgtctagtgatgttctagtcttgcctcactcttaacattttaaaatttataattttatttgattttgatttaataagaattcatatgtattcatttcttttgggtttgtcaccaaaagcctcctccaatcacctgtggagtaaagacaagtaaataaatgcatggtgttcccatttaaaaaaactcac

SEQ ID NO: 380682 - DNA, 1273 bp, Homo sapiens
gcagttcccaggttctgaaagtcccacgcaccccgcgggactcatatttttcccagacgcggaggttggggtcatggcgccccgaagcctcctcctgctgctctcaggggccctggccctgaccgatacttgggcgggctcccactccttgaggtatttcagcaccgctgtgtcgcggcccggccgcggggagccccgctacatcgccgtggagtacgtagacgacacgcaattcctgcggttcgacagcgacgccgcgattccgaggatggagccgcgggagccgtgggtggagcaagaggggccgcagtattgggagtggaccacagggtacgccaaggccaacgcacagactgaccgagtggccctgaggaacctgctccgccgctacaaccagagcgaggctgggtctcacaccctccagggaatgaatggctgcgacatggggcccgacggacgcctcctccgcgggtatcaccagcacgcgtacgacggcaaggattacatctccctgaacgaggacctgcgctcctggaccgcggcggacaccgtggctcagatcacccagcgcttctatgaggcagaggaatatgcagaggagttcaggacctacctggagggcgagtgcctggagttgctccgcagatacttggagaatgggaaggagacgctacagcgcgcagatcctccaaaggcacacgttgcccaccaccccatctctgaccatgaggccaccctgaggtgctgggccctgggcttctaccctgcggagatcacgctgacctggcagcgggatggggaggaacagacccaggacacagagcttgtggagaccaggcctgcaggggatggaaccttccagaagtgggccgctgtggtggtgccttctggagaggaacagagatacacatgccatgtgcagcacgaggggctgccccagcccctcatcctgagatgggagcagtctccccagcccaccatccccatcgtgggcatcgttgctggccttgttgtccttggagctgtggtcactggagctgtggtcgctgctgtgatgtggaggaagaagagctcagatagaaacagagggagctactctcaggctgcaggtaagatgaaggaggctgatccctgagattgttgggatattgtggtcaggagcctatgagggagctcacccaccccacagtctcagccacttggggccgacaggccgtttgtcacccaacggcccggcgggggcccaccgaaggggagacacggggccctgggt

SEQ ID NO: 380683 - DNA, 1400 bp, Homo sapiens
gcagttcccaggttctgaaagtcccacgcaccccgcgggactcatatttttcccagacgcggaggttggggtcatggcgccccgaagcctcctcctgctgctctcaggggccctggccctgaccgatacttgggcgggctcccactccttgaggtatttcagcaccgctgtgtcgcggcccggccgcggggagccccgctacatcgccgtggagtacgtagacgacacgcaattcctgcggttcgacagcgacgccgcgattccgaggatggagccgcgggagccgtgggtggagcaagaggggccgcagtattgggagtggaccacagggtacgccaaggccaacgcacagactgaccgagtggccctgaggaacctgctccgccgctacaaccagagcgaggctgggtctcacaccctccagggaatgaatggctgcgacatggggcccgacggacgcctcctccgcgggtatcaccagcacgcgtacgacggcaaggattacatctccctgaacgaggacctgcgctcctggaccgcggcggacaccgtggctcagatcacccagcgcttctatgaggcagaggaatatgcagaggagttcaggacctacctggagggcgagtgcctggagttgctccgcagatacttggagaatgggaaggagacgctacagcgcgcagatcctccaaaggcacacgttgcccaccaccccatctctgaccatgaggccaccctgaggtgctgggccctgggcttctaccctgcggagatcacgctgacctggcagcgggatggggaggaacagacccaggacacagagcttgtggagaccaggcctgcaggggatggaaccttccagaagtgggccgctgtggtggtgccttctggagaggaacagagatacacatgccatgtgcagcacgaggggctgccccagcccctcatcctgagatgggagcagtctccccagcccaccatccccatcgtgggcatcgttgctggccttgttgtccttggagctgtggtcactggagctgtggtcgctgctgtgatgtggaggaagaagagctcaggtaggaaggggtgaggagtggagtctgagttttcttgtcccactgggggttgcaagccccaagtagaagtgtgcctgaattttctgactcttctcagatcctccaaaggcacacgttgcccaccaccccatctctgaccatgaggccaccctgaggtgctgggccctgggcttctaccctgcggagatcacgctgacctgacagcgggatggggaggaacagacccaggacacagagcttgtggagaccaggcctgcaggggatggaaccttccagaagtggccgctgtggtgtgccttctggagaggagcagagatacacgtg

SEQ ID NO: 380684 - DNA, 1522 bp, Homo sapiens
gcagttcccaggttctgaaagtcccacgcaccccgcgggactcatatttttcccagacgcggaggttggggtcatggcgccccgaagcctcctcctgctgctctcaggggccctggccctgaccgatacttgggcgggctcccactccttgaggtatttcagcaccgctgtgtcgcggcccggccgcggggagccccgctacatcgccgtggagtacgtagacgacacgcaattcctgcggttcgacagcgacgccgcgattccgaggatggagccgcgggagccgtgggtggagcaagaggggccgcagtattgggagtggaccacagggtacgccaaggccaacgcacagactgaccgagtggccctgaggaacctgctccgccgctacaaccagagcgaggctgggtctcacaccctccagggaatgaatggctgcgacatggggcccgacggacgcctcctccgcgggtatcaccagcacgcgtacgacggcaaggattacatctccctgaacgaggacctgcgctcctggaccgcggcggacaccgtggctcagatcacccagcgcttctatgaggcagaggaatatgcagaggagttcaggacctacctggagggcgagtgcctggagttgctccgcagatacttggagaatgggaaggagacgctacagcgcgcagatcctccaaaggcacacgttgcccaccaccccatctctgaccatgaggccaccctgaggtgctgggccctgggcttctaccctgcggagatcacgctgacctggcagcgggatggggaggaacagacccaggacacagagcttgtggagaccaggcctgcaggggatggaaccttccagaagtgggccgctgtggtggtgccttctggagaggaacagagatacacatgccatgtgcagcacgaggggctgccccagcccctcatcctgagatgggagcagtctccccagcccaccatccccatcgtgggcatcgttgctggccttgttgtccttggagctgtggtcactggagctgtggtcgctgctgtgatgtggaggaagaagagctcagatagaaacagagggagctactctcaggctgcagcctactcagtggtcagcggaaacttgatgataacatggtggtcaagcttatttctcctgggggtgctcttccaaggatatttgggctgcctccggagtcacagtgtcttgggccgccggaaggtgggtgacatgtggatcttgttttttttgtggctgtggacatctttcaacactgccttcttggccttgcaaagccttcgctttggcttcggctttaggaggggcaggagcttccttcttcgttcttggcaccatcttatgaaaagggtccagattaagatttttgactgagtcattctaaagtaagttgcaagacccatgatactagaccactaaatacttcatcacacacctcctaagaataagaaccaacattatcacaccaaagaaaataaataattccataatatt

SEQ ID NO: 380685 - DNA, 1243 bp, Homo sapiens
gcagttcccaggttctgaaagtcccacgcaccccgcgggactcatatttttcccagacgcggaggttggggtcatggcgccccgaagcctcctcctgctgctctcaggggccctggccctgaccgatacttgggcgggctcccactccttgaggtatttcagcaccgctgtgtcgcggcccggccgcggggagccccgctacatcgccgtggagtacgtagacgacacgcaattcctgcggttcgacagcgacgccgcgattccgaggatggagccgcgggagccgtgggtggagcaagaggggccgcagtattgggagtggaccacagggtacgccaaggccaacgcacagactgaccgagtggccctgaggaacctgctccgccgctacaaccagagcgaggctgggtctcacaccctccagggaatgaatggctgcgacatggggcccgacggacgcctcctccgcgggtatcaccagcacgcgtacgacggcaaggattacatctccctgaacgaggacctgcgctcctggaccgcggcggacaccgtggctcagatcacccagcgcttctatgaggcagaggaatatgcagaggagttcaggacctacctggagggcgagtgcctggagttgctccgcagatacttggagaatgggaaggagacgctacagcgcgcagatcctccaaaggcacacgttgcccaccaccccatctctgaccatgaggccaccctgaggtgctgggccctgggcttctaccctgcggagatcacgctgacctggcagcgggatggggaggaacagacccaggacacagagcttgtggagaccaggcctgcaggggatggaaccttccagaagtgggccgctgtggtggtgccttctggagaggaacagagatacacatgccatgtgcagcacgaggggctgccccagcccctcatcctgagatgggagcagtctccccagcccaccatccccatcgtgggcatcgttgctggccttgttgtccttggagctgtggtcactggagctgtggtcgctgctgtgatgtggaggaagaagagctcagatagaaacagagggagctactctcaggctgcagtgtgagacagcttccttgtgtgggactgagaagcaagatatcaatgtagcagaattgcacttgtgcctcacgaacatacataaattttaaaaataaagaataaaaatatatctttttatagaaaaaaaaaaaaa

SEQ ID NO: 380686 - DNA, 2049 bp, Homo sapiens
gcagttcccaggttctgaaagtcccacgcaccccgcgggactcatatttttcccagacgcggaggttggggtcatggcgccccgaagcctcctcctgctgctctcaggggccctggccctgaccgatacttgggcgggctcccactccttgaggtatttcagcaccgctgtgtcgcggcccggccgcggggagccccgctacatcgccgtggagtacgtagacgacacgcaattcctgcggttcgacagcgacgccgcgattccgaggatggagccgcgggagccgtgggtggagcaagaggggccgcagtattgggagtggaccacagggtacgccaaggccaacgcacagactgaccgagtggccctgaggaacctgctccgccgctacaaccagagcgaggctgggtctcacaccctccagggaatgaatggctgcgacatggggcccgacggacgcctcctccgcgggtatcaccagcacgcgtacgacggcaaggattacatctccctgaacgaggacctgcgctcctggaccgcggcggacaccgtggctcagatcacccagcgcttctatgaggcagaggaatatgcagaggagttcaggacctacctggagggcgagtgcctggagttgctccgcagatacttggagaatgggaaggagacgctacagcgcgcagatcctccaaaggcacacgttgcccaccaccccatctctgaccatgaggccaccctgaggtgctgggccctgggcttctaccctgcggagatcacgctgacctggcagcgggatggggaggaacagacccaggacacagagcttgtggagaccaggcctgcaggggatggaaccttccagaagtgggccgctgtggtggtgccttctggagaggaacagagatacacatgccatgtgcagcacgaggggctgccccagcccctcatcctgagatgggagcagtctccccagcccaccatccccatcgtgggcatcgttgctggccttgttgtccttggagctgtggtcactggagctgtggtcgctgctgtgatgtggaggaagaagagctcaggtaggaaggggtgaggagtggagtctgagttttcttgtcccactgggggttgcaagccccaagtagaagtgtgccctgcctcattactgggaagcaccatccacactcatgggtctacccagcctgggccctgtgtgccagcacctactcatttgtaaggctcctgtgaaaatgaaggacagattcttcacttcgatgattatggtggtgatgggacctgatcccagcagtcacaaatcacaggggaaggtccctgctgatgacagacctcaggagggcagttggtccaggacccacatctgctttcttcatatttcttgatcctgccctggatctacagttacacttttctggaaacttctctgggatcaaagactaggggtttgctctaggaccttatggccctgcctcctttctggcctctcacaggacattttcttcccatagatagaaacagagggagctactctcaggctgcaggtaagatgaaggaggctgatccctgagattgttgggatattgtggtcaggagcctatgagggagctcacccaccccacagttcctctagccacatctgtgggctctgaccaggtcctgtttttgttctaccccaatcactgacagtgcccagggctctggggtgtctctcacagctaataaaggtgacactccagggcaggggccctgatgtgagtggggtgttgggggggaacagaggggactcagctgtgctattgggtttctttgacttggatgtcttgagcatgaaatgggctatttagagtgttacctctcactgtgactgatacgaatttgttcatgaatattttctctatagtgtgagacagcttccttgtgtgggactgagaagcaagatatcaatgtagcagaattgcacttgtgcctcacgaacatacataaattttaaaaataaagaataaaaatatatctttttatagaaaaaaaaaaaaa

SEQ ID NO: 380687 - DNA, 2811 bp, Homo sapiens
gcagttcccaggttctgaaagtcccacgcaccccgcgggactcatatttttcccagacgcggaggttggggtcatggcgccccgaagcctcctcctgctgctctcaggggccctggccctgaccgatacttgggcgggctcccactccttgaggtatttcagcaccgctgtgtcgcggcccggccgcggggagccccgctacatcgccgtggagtacgtagacgacacgcaattcctgcggttcgacagcgacgccgcgattccgaggatggagccgcgggagccgtgggtggagcaagaggggccgcagtattgggagtggaccacagggtacgccaaggccaacgcacagactgaccgagtggccctgaggaacctgctccgccgctacaaccagagcgaggctgggtctcacaccctccagggaatgaatggctgcgacatggggcccgacggacgcctcctccgcgggtatcaccagcacgcgtacgacggcaaggattacatctccctgaacgaggacctgcgctcctggaccgcggcggacaccgtggctcagatcacccagcgcttctatgaggcagaggaatatgcagaggagttcaggacctacctggagggcgagtgcctggagttgctccgcagatacttggagaatgggaaggagacgctacagcgcgcagatcctccaaaggcacacgttgcccaccaccccatctctgaccatgaggccaccctgaggtgctgggccctgggcttctaccctgcggagatcacgctgacctggcagcgggatggggaggaacagacccaggacacagagcttgtggagaccaggcctgcaggggatggaaccttccagaagtgggccgctgtggtggtgccttctggagaggaacagagatacacatgccatgtgcagcacgaggggctgccccagcccctcatcctgagatgggagcagtctccccagcccaccatccccatcgtgggcatcgttgctggccttgttgtccttggagctgtggtcactggagctgtggtcgctgctgtgatgtggaggaagaagagctcaggtaggaaggggtgaggagtggagtctgagttttcttgtcccactgggggttgcaagccccaagtagaagtgtgccctgcctcattactgggaagcaccatccacactcatgggtctacccagcctgggccctgtgtgccagcacctactcatttgtaaggctcctgtgaaaatgaaggacagattcttcacttcgatgattatggtggtgatgggacctgatcccagcagtcacaaatcacaggggaaggtccctgctgatgacagacctcaggagggcagttggtccaggacccacatctgctttcttcatatttcttgatcctgccctggatctacagttacacttttctggaaacttctctgggatcaaagactaggggtttgctctaggaccttatggccctgcctcctttctggcctctcacaggacattttcttcccatagatagaaacagagggagctactctcaggctgcagcctactcagtggtcagcggaaacttgatgataacatggtggtcaagcttatttctcctgggggtgctcttccaaggatatttgggctgcctccggagtcacagtgtcttgggccgccggaaggtgggtgacatgtggatcttgttttttttgtggctgtggacatctttcaacactgccttcttggccttgcaaagccttcgctttggcttcggctttaggaggggcaggagcttccttcttcgttcttggcaccatcttcccatgagactgcatgcagaagtgatgatatgtgcacacatgacttcattacagggcattggatattgatattcatcaggtcagctggggcccaagacactactcttctgccaacaggccgcaatcctctgcattagagagagggtaaagattgagggaggccctaacttcaaaccttctatcactgctagtgaagtgccaaaaagaagtgcaaggtcatctgcccttgtaggaaccacacaggaaggcagagtgtccaccaatgtcaaattccatcaaagaaataatattttgacaaaaaatgcaagtcacctttctaagtcccagacagcagctcaaaataaaaagcattaaacccctcaaatcttagaccaggtgaaattattgaagctgcagtaaggtcttgtgggacctgcagttagagagaagggacaactcaatttgggactgcagcagaaacccctacatcatggggttcctggaagggaccctctcccttcagcgacgcattgtgaggccatttctaggtaaaaaggtagaatttccttggattcctgaggtttattttacacttactgcttattctttgactttatagaagccaacttcagtttgaacatcttgcaattaattttttttggctctaagtggagaatttgaacttgtttctgaagaaaaccaggggctccttatgtgagcaagcaaccctccctgtggcccccttatgcaataaacataagccattgtgagccagcaaaatttaaagcaaggaaagcagtaaaccctccatttcagcatgtttcagcctgtctagtgatgttctagtcttgcctcactcttaacattttaaaatttataattttatttgattttgatttaataagaattcatatgtattcatttcttttgggtttgtcaccaaaagcctcctccaatcacctgtggagtaaagacaagtaaataaatgcatggtgttcccatttaaaaaaactcac

SEQ ID NO: 380688 - DNA, 1489 bp, Homo sapiens
gcagttcccaggttctgaaagtcccacgcaccccgcgggactcatatttttcccagacgcggaggttggggtcatggcgccccgaagcctcctcctgctgctctcaggggccctggccctgaccgatacttgggcgggctcccactccttgaggtatttcagcaccgctgtgtcgcggcccggccgcggggagccccgctacatcgccgtggagtacgtagacgacacgcaattcctgcggttcgacagcgacgccgcgattccgaggatggagccgcgggagccgtgggtggagcaagaggggccgcagtattgggagtggaccacagggtacgccaaggccaacgcacagactgaccgagtggccctgaggaacctgctccgccgctacaaccagagcgaggctgggtctcacaccctccagggaatgaatggctgcgacatggggcccgacggacgcctcctccgcgggtatcaccagcacgcgtacgacggcaaggattacatctccctgaacgaggacctgcgctcctggaccgcggcggacaccgtggctcagatcacccagcgcttctatgaggcagaggaatatgcagaggagttcaggacctacctggagggcgagtgcctggagttgctccgcagatacttggagaatgggaaggagacgctacagcgcgcagatcctccaaaggcacacgttgcccaccaccccatctctgaccatgaggccaccctgaggtgctgggccctgggcttctaccctgcggagatcacgctgacctggcagcgggatggggaggaacagacccaggacacagagcttgtggagaccaggcctgcaggggatggaaccttccagaagtgggccgctgtggtggtgccttctggagaggaacagagatacacatgccatgtgcagcacgaggggctgccccagcccctcatcctgagatgggagcagtctccccagcccaccatccccatcgtgggcatcgttgctggccttgttgtccttggagctgtggtcactggagctgtggtcgctgctgtgatgtggaggaagaagagctcagcctactcagtggtcagcggaaacttgatgataacatggtggtcaagcttatttctcctgggggtgctcttccaaggatatttgggctgcctccggagtcacagtgtcttgggccgccggaaggtgggtgacatgtggatcttgttttttttgtggctgtggacatctttcaacactgccttcttggccttgcaaagccttcgctttggcttcggctttaggaggggcaggagcttccttcttcgttcttggcaccatcttatgaaaagggtccagattaagatttttgactgagtcattctaaagtaagttgcaagacccatgatactagaccactaaatacttcatcacacacctcctaagaataagaaccaacattatcacaccaaagaaaataaataattccataatatt

SEQ ID NO: 380689 - DNA, 796 bp, Homo sapiens
gcagttcccaggttctgaaagtcccacgcaccccgcgggactcatatttttcccagacgcggaggttggggtcatggcgccccgaagcctcctcctgctgctctcaggggccctggccctgaccgatacttgggcgggctcccactccttgaggtatttcagcaccgctgtgtcgcggcccggccgcggggagccccgctacatcgccgtggagtacgtagacgacacgcaattcctgcggttcgacagcgacgccgcgattccgaggatggagccgcgggagccgtgggtggagcaagaggggccgcagtattgggagtggaccacagggtacgccaaggccaacgcacagactgaccgagtggccctgaggaacctgctccgccgctacaaccagagcgaggctgggtctcacaccctccagggaatgaatggctgcgacatggggcccgacggacgcctcctccgcgggtatcaccagcacgcgtacgacggcaaggattacatctccctgaacgaggacctgcgctcctggaccgcggcggacaccgtggctcagatcacccagcgcttctatgaggcagaggaatatgcagaggagttcaggacctacctggagggcgagtgcctggagttgctccgcagatacttggagaatgggaaggagacgctacagcgcgcagatcccccagggcacagcgctcgaggtgtgctgttaggctaagagggtgcagggctagacacgaagcttaaactattcatcttattaaaaataaaacccttataaaactcctca

SEQ ID NO: 380690 - DNA, 371 bp, Homo sapiens
ccaagcagagggaaccccttcagaaaggggagccagggtcagtacctttgggccaccatgacctccagccctgctgctccccagttggttccacggcaagatcacacgggagcaggctgagcggcttctgtacccgccggagacaggcctgttcctggtgcgggagagcaccaactaccccggagactacacgctgtgcgtgagctgcgacggcaaggtggagcactaccgcatcatgtaccatgccagcaagctcagcatcgacgaggaggtgtactttgagaacctcatgcagctggtggagcactacacctcagacgcagatggactctgtcgccctccatgacctttggtttaatgaggcgtcgacc

SEQ ID NO: 380691 - DNA, 2764 bp, Homo sapiens
  misc_feature (2744)..(2744): n is a, c, g, or t
  misc_feature (2746)..(2746): n is a, c, g, or t
cgcgcttcctctcgccaggcctgcgagcttcctcccagcggaccctgggcgagccgaggttggccgccgccgccgccgagcccgctgccgccctcccgctcctgccccacccgcgccttgcccgggggcttctgccggggtggggtccgagccgggcgaccgcccggctgcgccgccgtcggggccgtaacccggcccgccgtccctcccgccccagccagcctctggccgccggagcccgcggggcgtggagcgcgaggagccccgcggccccgatcgagcgtccggggcggcccccggcagccagcgcgacgttccaaaatcgaacctcagtggcggcgctcggaagcggaactctgccggggccgcgccggctacattgtttcctccccccgactccctcccgcccccttcccccgcctttcttccctccgcgacccgggccgtgcgtccgtccccctgcctctgcctggcggtccctcctcccctctccttgcacccatacctctttgtaccgcaccccctggggacccctgcgcccctcccctcccccctgaccgcatggaccgtcccgcaggccgctgatgccgcccgcggcgaggtggcccggaccgcagtgccccaagagagctctaatggtaccaagtgacaggttggctttactgtgactcggggacgccagagctcctgagaagatgtcagcaatacaggccgcctggccatccggtacagaatgtattgccaagtacaacttccacggcactgccgagcaggacctgcccttctgcaaaggagacgtgctcaccattgtggccgtcaccaaggaccccaactggtacaaagccaaaaacaaggtgggccgtgagggcatcatcccagccaactacgtccagaagcgggagggcgtgaaggcgggtaccaaactcagcctcatgccttggttccacggcaagatcacacgggagcaggctgagcggcttctgtacccgccggagacaggcctgttcctggtgcgggagagcaccaactaccccggagactacacgctgtgcgtgagctgcgacggcaaggtggagcactaccgcatcatgtaccatgccagcaagctcagcatcgacgaggaggtgtactttgagaacctcatgcagctggtggagcactacacctcagacgcagatggactctgtacgcgcctcattaaaccaaaggtcatggagggcacagtggcggcccaggatgagttctaccgcagcggctgggccctgaacatgaaggagctgaagctgctgcagaccatcgggaagggggagttcggagacgtgatgctgggcgattaccgagggaacaaagtcgccgtcaagtgcattaagaacgacgccactgcccaggccttcctggctgaagcctcagtcatgacgcaactgcggcatagcaacctggtgcagctcctgggcgtgatcgtggaggagaagggcgggctctacatcgtcactgagtacatggccaaggggagccttgtggactacctgcggtctaggggtcggtcagtgctgggcggagactgtctcctcaagttctcgctagatgtctgcgaggccatggaatacctggagggcaacaatttcgtgcatcgagacctggctgcccgcaatgtgctggtgtctgaggacaacgtggccaaggtcagcgactttggtctcaccaaggaggcgtccagcacccaggacacgggcaagctgccagtcaagtggacagcccctgaggccctgagagagaagaaattctccactaagtctgacgtgtggagtttcggaatccttctctgggaaatctactcctttgggcgagtgccttatccaagaattcccctgaaggacgtcgtccctcgggtggagaagggctacaagatggatgcccccgacggctgcccgcccgcagtctatgaagtcatgaagaactgctggcacctggacgccgccatgcggccctccttcctacagctccgagagcagcttgagcacatcaaaacccacgagctgcacctgtgacggctggcctccgcctgggtcatgggcctgtggggactgaacctggaagatcatggacctggtgcccctgctcactgggcccgagcctgaactgagccccagcgggctggcgggcctttttcctgcgtcccagcctgcacccctccggccccgtctctcttggacccacctgtggggcctggggagcccactgaggggccagggaggaaggaggccacggagcgggaggcagcgccccaccacgtcgggcttccctggcctcccgccactcgccttcttagagttttattcctttccttttttgagattttttttccgtgtgtttattttttattatttttcaagataaggagaaagaaagtacccagcaaatgggcattttacaagaagtacgaatcttatttttcctgtcctgcccgtgagggtgggggggaccgggcccctctctagggacccctcgccccagcctcattccccattctgtgtcccatgtcccgtgtctcctcggtcgccccgtgtttgcgcttgaccatgttgcactgtttgcatgcgcccgaggcagacgtctgtcaggggcttggatttcgtgtgccgctgccacccgcccacccgccttgtgagatggaattgtaataaaccacgccatgaggacaccgccgcccgcctcggcgcttcctccaccgaaaaaaaaaaaananaaaaaaaaaaaaaaaaaa

SEQ ID NO: 380692 - DNA, 2857 bp, Homo sapiens
  misc_feature (2837)..(2837): n is a, c, g, or t
  misc_feature (2839)..(2839): n is a, c, g, or t
cgcgcttcctctcgccaggcctgcgagcttcctcccagcggaccctgggcgagccgaggttggccgccgccgccgccgagcccgctgccgccctcccgctcctgccccacccgcgccttgcccgggggcttctgccggggtggggtccgagccgggcgaccgcccggctgcgccgccgtcggggccgtaacccggcccgccgtccctcccgccccagccagcctctggccgccggagcccgcggggcgtggagcgcgaggagccccgcggccccgatcgagcgtccggggcggcccccggcagccagcgcgacgttccaaaatcgaacctcagtggcggcgctcggaagcggaactctgccggggccgcgccggctacattgtttcctccccccgactccctcccgcccccttcccccgcctttcttccctccgcgacccgggccgtgcgtccgtccccctgcctctgcctggcggtccctcctcccctctccttgcacccatacctctttgtaccgcaccccctggggacccctgcgcccctcccctcccccctgaccgcatggaccgtcccgcaggccgctgatgccgcccgcggcgaggtggcccggaccgcagtgccccaagagagtgagctgtgaaggtgtgatccagggtcccagggcctttgaagaaaggagtctggcttctggctggcacgtgtgcagggatgtgcttttcattgctctaatggtaccaagtgacaggttggctttactgtgactcggggacgccagagctcctgagaagatgtcagcaatacaggccgcctggccatccggtacagaatgtattgccaagtacaacttccacggcactgccgagcaggacctgcccttctgcaaaggagacgtgctcaccattgtggccgtcaccaaggaccccaactggtacaaagccaaaaacaaggtgggccgtgagggcatcatcccagccaactacgtccagaagcgggagggcgtgaaggcgggtaccaaactcagcctcatgccttggttccacggcaagatcacacgggagcaggctgagcggcttctgtacccgccggagacaggcctgttcctggtgcgggagagcaccaactaccccggagactacacgctgtgcgtgagctgcgacggcaaggtggagcactaccgcatcatgtaccatgccagcaagctcagcatcgacgaggaggtgtactttgagaacctcatgcagctggtggagcactacacctcagacgcagatggactctgtacgcgcctcattaaaccaaaggtcatggagggcacagtggcggcccaggatgagttctaccgcagcggctgggccctgaacatgaaggagctgaagctgctgcagaccatcgggaagggggagttcggagacgtgatgctgggcgattaccgagggaacaaagtcgccgtcaagtgcattaagaacgacgccactgcccaggccttcctggctgaagcctcagtcatgacgcaactgcggcatagcaacctggtgcagctcctgggcgtgatcgtggaggagaagggcgggctctacatcgtcactgagtacatggccaaggggagccttgtggactacctgcggtctaggggtcggtcagtgctgggcggagactgtctcctcaagttctcgctagatgtctgcgaggccatggaatacctggagggcaacaatttcgtgcatcgagacctggctgcccgcaatgtgctggtgtctgaggacaacgtggccaaggtcagcgactttggtctcaccaaggaggcgtccagcacccaggacacgggcaagctgccagtcaagtggacagcccctgaggccctgagagagaagaaattctccactaagtctgacgtgtggagtttcggaatccttctctgggaaatctactcctttgggcgagtgccttatccaagaattcccctgaaggacgtcgtccctcgggtggagaagggctacaagatggatgcccccgacggctgcccgcccgcagtctatgaagtcatgaagaactgctggcacctggacgccgccatgcggccctccttcctacagctccgagagcagcttgagcacatcaaaacccacgagctgcacctgtgacggctggcctccgcctgggtcatgggcctgtggggactgaacctggaagatcatggacctggtgcccctgctcactgggcccgagcctgaactgagccccagcgggctggcgggcctttttcctgcgtcccagcctgcacccctccggccccgtctctcttggacccacctgtggggcctggggagcccactgaggggccagggaggaaggaggccacggagcgggaggcagcgccccaccacgtcgggcttccctggcctcccgccactcgccttcttagagttttattcctttccttttttgagattttttttccgtgtgtttattttttattatttttcaagataaggagaaagaaagtacccagcaaatgggcattttacaagaagtacgaatcttatttttcctgtcctgcccgtgagggtgggggggaccgggcccctctctagggacccctcgccccagcctcattccccattctgtgtcccatgtcccgtgtctcctcggtcgccccgtgtttgcgcttgaccatgttgcactgtttgcatgcgcccgaggcagacgtctgtcaggggcttggatttcgtgtgccgctgccacccgcccacccgccttgtgagatggaattgtaataaaccacgccatgaggacaccgccgcccgcctcggcgcttcctccaccgaaaaaaaaaaaananaaaaaaaaaaaaaaaaaa

SEQ ID NO: 380693 - DNA, 2839 bp, Homo sapiens
  misc_feature (2819)..(2819): n is a, c, g, or t
  misc_feature (2821)..(2821): n is a, c, g, or t
cgcgcttcctctcgccaggcctgcgagcttcctcccagcggaccctgggcgagccgaggttggccgccgccgccgccgagcccgctgccgccctcccgctcctgccccacccgcgccttgcccgggggcttctgccggggtggggtccgagccgggcgaccgcccggctgcgccgccgtcggggccgtaacccggcccgccgtccctcccgccccagccagcctctggccgccggagcccgcggggcgtggagcgcgaggagccccgcggccccgatcgagcgtccggggcggcccccggcagccagcgcgacgttccaaaatcgaacctcagtggcggcgctcggaagcggaactctgccggggccgcgccggctacattgtttcctccccccgactccctcccgcccccttcccccgcctttcttccctccgcgacccgggccgtgcgtccgtccccctgcctctgcctggcggtccctcctcccctctccttgcacccatacctctttgtaccgcaccccctggggacccctgcgcccctcccctcccccctgaccgcatggaccgtcccgcaggccgctgatgccgcccgcggcgaggtggcccggaccgcagtgccccaagagagctctaatggtaccaagtgacaggttggctttactgtgactcggggacgccagagctcctgagaagatgtcagcaatacaggccgcctggccatccggtacagaatgtattgccaagtacaacttccacggcactgccgagcaggacctgcccttctgcaaaggagacgtgctcaccattgtggccgtcaccaaggaccccaactggtacaaagccaaaaacaaggtgggccgtgagggcatcatcccagccaactacgtccagaagcgggagggcgtgaaggcgggtaccaaactcagcctcatgccttggttccacggcaagatcacacgggagcaggctgagcggcttctgtacccgccggagacaggcctgttcctggtgcgggagagcaccaactaccccggagactacacgctgtgcgtgagctgcgacggcaaggtggagcactaccgcatcatgtaccatgccagcaagctcagcatcgacgaggaggtgtactttgagaacctcatgcagctggtggagcactacacctcagacgcagatggactctgtacgcgcctcattaaaccaaaggtcatggagggcacagtggcggcccaggatgagttctaccgcagcggctgggccctgaacatgaaggagctgaagctgctgcagaccatcgggaagggggagttcggaggtgagctgggccgggcccctgggggggttctgagggactccgaacttgggaacaagaccacctctctgcccccagacgtgatgctgggcgattaccgagggaacaaagtcgccgtcaagtgcattaagaacgacgccactgcccaggccttcctggctgaagcctcagtcatgacgcaactgcggcatagcaacctggtgcagctcctgggcgtgatcgtggaggagaagggcgggctctacatcgtcactgagtacatggccaaggggagccttgtggactacctgcggtctaggggtcggtcagtgctgggcggagactgtctcctcaagttctcgctagatgtctgcgaggccatggaatacctggagggcaacaatttcgtgcatcgagacctggctgcccgcaatgtgctggtgtctgaggacaacgtggccaaggtcagcgactttggtctcaccaaggaggcgtccagcacccaggacacgggcaagctgccagtcaagtggacagcccctgaggccctgagagagaagaaattctccactaagtctgacgtgtggagtttcggaatccttctctgggaaatctactcctttgggcgagtgccttatccaagaattcccctgaaggacgtcgtccctcgggtggagaagggctacaagatggatgcccccgacggctgcccgcccgcagtctatgaagtcatgaagaactgctggcacctggacgccgccatgcggccctccttcctacagctccgagagcagcttgagcacatcaaaacccacgagctgcacctgtgacggctggcctccgcctgggtcatgggcctgtggggactgaacctggaagatcatggacctggtgcccctgctcactgggcccgagcctgaactgagccccagcgggctggcgggcctttttcctgcgtcccagcctgcacccctccggccccgtctctcttggacccacctgtggggcctggggagcccactgaggggccagggaggaaggaggccacggagcgggaggcagcgccccaccacgtcgggcttccctggcctcccgccactcgccttcttagagttttattcctttccttttttgagattttttttccgtgtgtttattttttattatttttcaagataaggagaaagaaagtacccagcaaatgggcattttacaagaagtacgaatcttatttttcctgtcctgcccgtgagggtgggggggaccgggcccctctctagggacccctcgccccagcctcattccccattctgtgtcccatgtcccgtgtctcctcggtcgccccgtgtttgcgcttgaccatgttgcactgtttgcatgcgcccgaggcagacgtctgtcaggggcttggatttcgtgtgccgctgccacccgcccacccgccttgtgagatggaattgtaataaaccacgccatgaggacaccgccgcccgcctcggcgcttcctccaccgaaaaaaaaaaaananaaaaaaaaaaaaaaaaaa

SEQ ID NO: 380694 - DNA, 1400 bp, Homo sapiens
  misc_feature (1380)..(1380): n is a, c, g, or t
  misc_feature (1382)..(1382): n is a, c, g, or t
tggaggcacaagctatcgtgctaggtacgaggctgggtgttatcagtcatgacgcaactgcggcatagcaacctggtgcagctcctgggcgtgatcgtggaggagaagggcgggctctacatcgtcactgagtacatggccaaggggagccttgtggactacctgcggtctaggggtcggtcagtgctgggcggagactgtctcctcaagttctcgctagatgtctgcgaggccatggaatacctggagggcaacaatttcgtgcatcgagacctggctgcccgcaatgtgctggtgtctgaggacaacgtggccaaggtcagcgactttggtctcaccaaggaggcgtccagcacccaggacacgggcaagctgccagtcaagtggacagcccctgaggccctgagagagaagaaattctccactaagtctgacgtgtggagtttcggaatccttctctgggaaatctactcctttgggcgagtgccttatccaagaattcccctgaaggacgtcgtccctcgggtggagaagggctacaagatggatgcccccgacggctgcccgcccgcagtctatgaagtcatgaagaactgctggcacctggacgccgccatgcggccctccttcctacagctccgagagcagcttgagcacatcaaaacccacgagctgcacctgtgacggctggcctccgcctgggtcatgggcctgtggggactgaacctggaagatcatggacctggtgcccctgctcactgggcccgagcctgaactgagccccagcgggctggcgggcctttttcctgcgtcccagcctgcacccctccggccccgtctctcttggacccacctgtggggcctggggagcccactgaggggccagggaggaaggaggccacggagcgggaggcagcgccccaccacgtcgggcttccctggcctcccgccactcgccttcttagagttttattcctttccttttttgagattttttttccgtgtgtttattttttattatttttcaagataaggagaaagaaagtacccagcaaatgggcattttacaagaagtacgaatcttatttttcctgtcctgcccgtgagggtgggggggaccgggcccctctctagggacccctcgccccagcctcattccccattctgtgtcccatgtcccgtgtctcctcggtcgccccgtgtttgcgcttgaccatgttgcactgtttgcatgcgcccgaggcagacgtctgtcaggggcttggatttcgtgtgccgctgccacccgcccacccgccttgtgagatggaattgtaataaaccacgccatgaggacaccgccgcccgcctcggcgcttcctccaccgaaaaaaaaaaaananaaaaaaaaaaaaaaaaaa

SEQ ID NO: 380695 - DNA, 1210 bp, Homo sapiens
  misc_feature (1190)..(1190): n is a, c, g, or t
  misc_feature (1192)..(1192): n is a, c, g, or t
aagctatagcaggtctagttatgaccaggaatatgcgtagtgagcaggatacgtgtatgggcaacaatttcgtgcatcgagacctggctgcccgcaatgtgctggtgtctgaggacaacgtggccaaggtcagcgactttggtctcaccaaggaggcgtccagcacccaggacacgggcaagctgccagtcaagtggacagcccctgaggccctgagagagaagaaattctccactaagtctgacgtgtggagtttcggaatccttctctgggaaatctactcctttgggcgagtgccttatccaagaattcccctgaaggacgtcgtccctcgggtggagaagggctacaagatggatgcccccgacggctgcccgcccgcagtctatgaagtcatgaagaactgctggcacctggacgccgccatgcggccctccttcctacagctccgagagcagcttgagcacatcaaaacccacgagctgcacctgtgacggctggcctccgcctgggtcatgggcctgtggggactgaacctggaagatcatggacctggtgcccctgctcactgggcccgagcctgaactgagccccagcgggctggcgggcctttttcctgcgtcccagcctgcacccctccggccccgtctctcttggacccacctgtggggcctggggagcccactgaggggccagggaggaaggaggccacggagcgggaggcagcgccccaccacgtcgggcttccctggcctcccgccactcgccttcttagagttttattcctttccttttttgagattttttttccgtgtgtttattttttattatttttcaagataaggagaaagaaagtacccagcaaatgggcattttacaagaagtacgaatcttatttttcctgtcctgcccgtgagggtgggggggaccgggcccctctctagggacccctcgccccagcctcattccccattctgtgtcccatgtcccgtgtctcctcggtcgccccgtgtttgcgcttgaccatgttgcactgtttgcatgcgcccgaggcagacgtctgtcaggggcttggatttcgtgtgccgctgccacccgcccacccgccttgtgagatggaattgtaataaaccacgccatgaggacaccgccgcccgcctcggcgcttcctccaccgaaaaaaaaaaaananaaaaaaaaaaaaaaaaaa

SEQ ID NO: 380696 - DNA, 423 bp, Homo sapiens
tgagctgtgaaggtgtgatccagggtcccagggcctttgaagaaaggagtctggcttctggctggcacgtgtgcagggatgtgcttttcattggtgagcttggtgccctccaccctctcagaagcagctgctcttctctctgcattgggtcaggggcaaggaaaaagcagaaaatgttcccattcaccaccgcaggggggccagaccccaaaaggctgagccacacagagtggccctcggcaagggttggaaatttcggggacagaatgcagcttcctccaaacaagtataggtaggggttgagacccaggatccacagtgtgacatggctgccccccaaagggggcagacccacctgggtgcggttctgggctccatcttttgaaggattttaaaaccttgacaggtcatcttcaaagagcc

SEQ ID NO: 380697 - DNA, 2734 bp, Homo sapiens
  misc_feature (2714)..(2714): n is a, c, g, or t
  misc_feature (2716)..(2716): n is a, c, g, or t
cgcgcttcctctcgccaggcctgcgagcttcctcccagcggaccctgggcgagccgaggttggccgccgccgccgccgagcccgctgccgccctcccgctcctgccccacccgcgccttgcccgggggcttctgccggggtggggtccgagccgggcgaccgcccggctgcgccgccgtcggggccgtaacccggcccgccgtccctcccgccccagccagcctctggccgccggagcccgcggggcgtggagcgcgaggagccccgcggccccgatcgagcgtccggggcggcccccggcagccagcgcgacgttccaaaatcgaacctcagtggcggcgctcggaagcggaactctgccggggccgcgccggctacattgtttcctccccccgactccctcccgcccccttcccccgcctttcttccctccgcgacccgggccgtgcgtccgtccccctgcctctgcctggcggtccctcctcccctctccttgcacccatacctctttgtaccgcaccccctggggacccctgcgcccctcccctcccccctgaccgcatggaccgtcccgcaggccgctgatgccgcccgcggcgaggtggcccggaccgcagtgccccaagagagctctaatggtaccaagtgacaggttggctttactgtgactcggggacgccagagctcctgagaagatgtcagcaatacaggccgcctggccatccggtacagaatgtattgccaagtacaacttccacggcactgccgagcaggacctgcccttctgcaaaggagacgtgctcaccattgtggccgtcaccaaggaccccaactggtacaaagccaaaaacaaggtgggccgtgagggcatcatcccagccaactacgtccagaagcgggagggcgtgaaggcgggtaccaaactcagcctcatgccttggttccacggcaagatcacacgggagcaggctgagcggcttctgtacccgccggagacaggcctgttcctggtgcgggagagcaccaactaccccggagactacacgctgtgcgtgagctgcgacggcaaggtggagcactaccgcatcatgtaccatgccagcaagctcagcatcgacgaggaggtgtactttgagaacctcatgcagctggtggagcactacacctcagacgcagatggactctgtacgcgcctcattaaaccaaaggtcatggagggcacagtggcggcccaggatgagttctaccgcagcggctgggccctgaacatgaaggagctgaagctgctgcagaccatcgggaagggggagttcggagacgtgatgctgggcgattaccgagggaacaaagtcgccgtcaagtgcattaagaacgacgccactgcccaggccttcctggctgaagcctcagtcatgacgcaactgcggcatagcaacctggtgcagctcctgggcgtgatcgtggaggagaagggcgggctctacatcgtcactgagtacatggccaaggggagccttgtggactacctgcggtctaggggtcggtcagtgctgggcggagactgtctcctcaagttctcgctagatgtctgcgaggccatggaatacctggagggcaacaatttcgtgcatcgagacctggctgcccgcaatgtgctggtgtctgaggacaacgtggccaaggtcagcgactttggtctcaccaaggaggcgtccagcacccaggacacgggcaagctgccagtcaagtggacagcccctgaggccctgagagagaagaaattctccactaagtctgacgtgtggagtttcggaatccttctctgggaaatctactcctttgggcgagtgccttatccaagaattcccctgaaggacgtcgtccctcgggtggagaagggctacaagatggatgcccccgacggctgcccgcccgcagtctatgaagtcatgaagaactgctggcacctggacgccgccatgcggccctccttcctacagctccgagagcagcttgagcacatcaaaacccacgagctgcacctgtgacggctggcctccgcctgggtcatgggcctgtggggactgaacctggaagatcatggacctggtgcccctgctcactgggcccgagcctgaactgagccccagcgggctggcgggcctttttcctgcgtcccagcctgcacccctccggccccgtctctcttggacccacctgtggggcctggggagcccactgaggggccagggaggaaggaggccacggagcgggaggcagcgccccaccacgtcgggcttccctggcctcccgccactcgccttcttagagttttattcctttccttttttgagattttttttccgtgtgtttattttttattatttttcaagataaggagaaagaaagtacccagcaaatgggcattttacaagaagtacgaatcttatttttcctgtcctgcccgtgagggtgggggggaccgggcccctctctagggacccctcgccccagcctcattccccattctgtgtcccatgtcccgtgtctcctcggtcgccccgtgtttgcgcttgaccatgttgcactgtttgcatgcgcccgaggcagacgtctgtcaggggcttggatttcgtgtgccgctgccacccgcccacccgccttgtgagatggaattgtaataaaccacgccatgaggacacaaaaaaaaaaananaaaaaaaaaaaaaaaaaa

SEQ ID NO: 380698 - DNA, 2716 bp, Homo sapiens
  misc_feature (2696)..(2696): n is a, c, g, or t
  misc_feature (2698)..(2698): n is a, c, g, or t
cgcgcttcctctcgccaggcctgcgagcttcctcccagcggaccctgggcgagccgaggttggccgccgccgccgccgagcccgctgccgccctcccgctcctgccccacccgcgccttgcccgggggcttctgccggggtggggtccgagccgggcgaccgcccggctgcgccgccgtcggggccgtaacccggcccgccgtccctcccgccccagccagcctctggccgccggagcccgcggggcgtggagcgcgaggagccccgcggccccgatcgagcgtccggggcggcccccggcagccagcgcgacgttccaaaatcgaacctcagtggcggcgctcggaagcggaactctgccggggccgcgccggctacattgtttcctccccccgactccctcccgcccccttcccccgcctttcttccctccgcgacccgggccgtgcgtccgtccccctgcctctgcctggcggtccctcctcccctctccttgcacccatacctctttgtaccgcaccccctggggacccctgcgcccctcccctcccccctgaccgcatggaccgtcccgcaggccgctgatgccgcccgcggcgaggtggcccggaccgcagtgccccaagagagctctaatggtaccaagtgacaggttggctttactgtgactcggggacgccagagctcctgagaagatgtcagcaatacaggccgcctggccatccggtacagaatgtattgccaagtacaacttccacggcactgccgagcaggacctgcccttctgcaaaggagacgtgctcaccattgtggccgtcaccaaggaccccaactggtacaaagccaaaaacaaggtgggccgtgagggcatcatcccagccaactacgtccagaagcgggagggcgtgaaggcgggtaccaaactcagcctcatgccttggttccacggcaagatcacacgggagcaggctgagcggcttctgtacccgccggagacaggcctgttcctggtgcgggagagcaccaactaccccggagactacacgctgtgcgtgagctgcgacggcaaggtggagcactaccgcatcatgtaccatgccagcaagctcagcatcgacgaggaggtgtactttgagaacctcatgcagctggtggagcactacacctcagacgcagatggactctgtacgcgcctcattaaaccaaaggtcatggagggcacagtggcggcccaggatgagttctaccgcagcggctgggccctgaacatgaaggagctgaagctgctgcagaccatcgggaagggggagttcggagacgtgatgctgggcgattaccgagggaacaaagtcgccgtcaagtgcattaagaacgacgccactgcccaggccttcctggctgaagcctcagtcatgacgcaactgcggcatagcaacctggtgcagctcctgggcgtgatcgtggaggagaagggcgggctctacatcgtcactgagtacatggccaaggggacatgtggctggcctacccccagagatgtctgcgaggccatggaatacctggagggcaacaatttcgtgcatcgagacctggctgcccgcaatgtgctggtgtctgaggacaacgtggccaaggtcagcgactttggtctcaccaaggaggcgtccagcacccaggacacgggcaagctgccagtcaagtggacagcccctgaggccctgagagagaagaaattctccactaagtctgacgtgtggagtttcggaatccttctctgggaaatctactcctttgggcgagtgccttatccaagaattcccctgaaggacgtcgtccctcgggtggagaagggctacaagatggatgcccccgacggctgcccgcccgcagtctatgaagtcatgaagaactgctggcacctggacgccgccatgcggccctccttcctacagctccgagagcagcttgagcacatcaaaacccacgagctgcacctgtgacggctggcctccgcctgggtcatgggcctgtggggactgaacctggaagatcatggacctggtgcccctgctcactgggcccgagcctgaactgagccccagcgggctggcgggcctttttcctgcgtcccagcctgcacccctccggccccgtctctcttggacccacctgtggggcctggggagcccactgaggggccagggaggaaggaggccacggagcgggaggcagcgccccaccacgtcgggcttccctggcctcccgccactcgccttcttagagttttattcctttccttttttgagattttttttccgtgtgtttattttttattatttttcaagataaggagaaagaaagtacccagcaaatgggcattttacaagaagtacgaatcttatttttcctgtcctgcccgtgagggtgggggggaccgggcccctctctagggacccctcgccccagcctcattccccattctgtgtcccatgtcccgtgtctcctcggtcgccccgtgtttgcgcttgaccatgttgcactgtttgcatgcgcccgaggcagacgtctgtcaggggcttggatttcgtgtgccgctgccacccgcccacccgccttgtgagatggaattgtaataaaccacgccatgaggacaccgccgcccgcctcggcgcttcctccaccgaaaaaaaaaaaananaaaaaaaaaaaaaaaaaa

SEQ ID NO: 380699 - DNA, 434 bp, Homo sapiens
gcgtgctgtgtgagagggctgcagggcacgtctgacctcggcctggtctgtccttcctgcccccaggggagccttgtggactacctgcggtctaggggtcggtcagtgctgggcggagactgtctcctcaagttctcgctgtgagtgaagcagcctcttggatgggtagggtttgaggggtacctgccctgctatgggagccccagtctgaggggacatgtggctggcctacccccagagatgtctgcgaggccatggaatacctggagggcaacaatttcgtgcatcgagacctggctgcccgcaatgtgctggtgtctgaggacaacgtggccaaggtcagcgactttggtctcaccaaggaggcgtccagcacccaggacacgggcaagctgccagtcaagtggacagcccctgaggccctgagagagaag

SEQ ID NO: 380700 - DNA, 876 bp, Homo sapiens
ttagctaaaagtgtcagaggctgagtgtttcaggtgctgtcagattatttcagggctttattgctatattgctggtattggcacttccaattttttaaggtagtagtgacttatctagagatacctaacctccaccgttccttttagaaatttgtgtatttgttgtgcagatgacaagcaaccagccatatcttttcgtttgtttcctgcgttccctttaaccatgagtccctaggtgcccaaggcctacaggcagaacttcgctagggtactgtcatggtggacatgagtggtcctgcccatcaggcaccactggaaaggtggctctggtgcccaagctgctcctgtttccctcctgcagggtattcccagacaggcaactatgaactagctgtggccctctcccgctgggtgttcaaggaggagggtgtcctccgtgtggggcctgtgtcccatcatcgggtgggcgagacagccccacccaatgcctacactgtcactgacctagtggtaagagatgtttggggtgggagggcccaaagggtttgccaagctgactgagctcagctcagaagcacttattgaacacttctttgctggcctaaagggcataaataaagatgaataagttaatccctacacctaagcatgccaggtgagatgcagagcctggcgtgaaaactgatgtcctaataggagcacttcttttgaagaggtgtgtgtatttgctatggggggcagcagtgggaggggcttcactgattaactctgcccaggaagttggacttaataagagaaataggtcattaggatgaatttgttaggcaagagaaagcgaatatggaagcatgaatacttgaaagtgcctggcacatg

SEQ ID NO: 380701 - DNA, 2130 bp, Homo sapiens
accagggcacttccggcggcgctctccgcgccttatcgccaaagctgcggctctggacgcccagccgcggcgtatcccgatcacttccgggtagtgctccacgggcacgagccgcgattgggctaccgtagatggggtacttccggtgtgcaggtgctgggtccttcggcaggaggaggaagatggagcccagcaccgcggcccgggcttgggccctcttttggttgctgctgcccttgcttggcgcggtttgcgccagcggaccccgcaccttagtgctgctggacaacctcaacgtgcgggagactcattcgcttttcttccggagcctgaaggaccggggctttgagctcacattcaagaccgctgatgaccccagcctgtctctcataaagtatggggaattcctctatgacaatctcatcattttctccccttcggtagaagattttggaggcaacatcaacgtggagaccatcagtgcctttattgacggtggaggcagtgtgctggtagctgccagctccgacattggtgaccctcttcgagagctgggcagtgagtgcgggattgagtttgacgaggagaaaacggctgtcattgaccatcacaactatgacatctcagaccttggccagcatacgctcatcgtggctgacactgagaacctgctgaaggccccaaccatcgttgggaaatcatctctaaatcccatcctctttcgaggtgttgggatggtggccgatcctgataaccctttggtgctggacatcctgacgggctcttccacctcttactccttcttcccggacaagcctatcacccagtatccacatgcggtggggaagaacaccctcctcattgctgggctccaggccaggaacaatgcccgcgtcatcttcagcggctccctcgacttcttcagcgactccttcttcaactcagcagtgcagaaggcggcgcccggctcccagaggtattcccagacaggcaactatgaactagctgtggccctctcccgctgggtgttcaaggaggagggtgtcctccgtgtggggcctgtgtcccatcatcgggtgggcgagacagccccacccaatgcctacactgtcactgacctagtggagtatagcatcgtgatccagcagctctcaaatggcaaatgggtcccctttgatggcgatgacattcagctggagtttgtccgcattgatccttttgtgaggaccttcctgaagaagaaaggtggcaaatacagtgttcagttcaagttgcccgacgtgtatggtgtattccagtttaaagtggattacaaccggctaggctacacacacctgtactcttccactcaggtatccgtgcggccactccagcacacgcagtatgagcgcttcatcccctcggcctacccctactacgccagcgccttctccatgatgctggggctcttcatcttcagcatcgtcttcttgcacatgaaggagaaggagaagtccgactgaggggctagagccctctccgcacagcgtggagacggggcagggaggggggttattaggattggtggttttgttttgctttgtttaaagccgtgggaaaatggcacaactttacctctgtgggagatgcaacactgagagccaaggggtgggagttgggataatttttatataaaagaagtttttccactttgaattgctaaaagtggcatttttcctatgtgcagtcactcctctcatttctaaaatagggacgtggccaggcacggtggctcatgcctgtaatcccagcactttgggaggccgaggcaggcggctcacgaggtcaggagatcgagactatcctggctaacacggtaaaaccctgtctctactaaaagtacaaaaaattagctgggcgtggtggtgggcacctgtagtcccagctactcgggaggctgaggcaggagaaaggcatgaatccaagaggcagagcttgcagtgagctgagatcacgccattgcactccagcctgggcaacagtgttaagactctgtctcaaatataaataaataaataaataaataaataaataaataaataaaaataaagcgagatgttgccctcaaaacacataaaccaaaacgggcgg

SEQ ID NO: 380702 - DNA, 1889 bp, Homo sapiens
accagggcacttccggcggcgctctccgcgccttatcgccaaagctgcggctctggacgcccagccgcggcgtatcccgatcacttccgggtagtgctccacgggcacgagccgcgattgggctaccgtagatggggtacttccggtgtgcaggtgctgggtccttcggcaggaggaggaagatggagcccagcaccgcggcccgggcttgggccctcttttggttgctgctgcccttgcttggcgcggtttgcgccagcggaccccgcaccttagtgctgctggacaacctcaacgtgcgggagactcattcgcttttcttccggagcctgaaggaccggggctttgagctcacattcaagaccgctgatgaccccagcctgtctctcataaagtatggggaattcctctatgacaatctcatcattttctccccttcggtagaagattttggaggcaacatcaacgtggagaccatcagtgcctttattgacggtggaggcagtgtgctggtagctgccagctccgacattggtgaccctcttcgagagctgggcagtgagtgcgggattgagtttgacgaggagaaaacggctgtcattgaccatcacaactatgacatctcagaccttggccagcatacgctcatcgtggctgacactgagaacctgctgaaggccccaaccatcgttgggaaatcatctctaaatcccatcctctttcgaggtgttgggatggtggccgatcctgataaccctttggtgctggacatcctgacgggctcttccacctcttactccttcttcccggacaagcctatcacccagtatccacatgcggtggggaagaacaccctcctcattgctgggctccaggccaggaacaatgcccgcgtcatcttcagcggctccctcgacttcttcagcgactccttcttcaactcagcagtgcagaaggcggcgcccggctcccagaggtattcccagacaggcaactatgaactagctgtggccctctcccgctgggtgttcaaggaggagggtgtcctccgtgtggggcctgtgtcccatcatcgggtgggcgagacagccccacccaatgcctacactgtcactgacctagtggagtatagcatcgtgatccagcagctctcaaatggcaaatgggtcccctttgatggcgatgacattcagctggagtttgtccgcattgatccttttgtgaggaccttcctgaagaagaaaggtggcaaatacagtgttcagttcaagttgcccgacgtgtatggtgtattccagtttaaagtggattacaaccggctaggctacacacacctgtactcttccactcaggtatccgtgcggccactccagcacacgcagtatgagcgcttcatcccctcggcctacccctactacgccagcgccttctccatgatgctggggctcttcatcttcagcatcgtcttcttgcacatgaaggagaaggagaagtccgactgaggggctagagccctctccgcacagcgtggagacggggcagggaggggggttattaggattggtggttttgttttgctttgtttaaagccgtgggaaaatggcacaactttacctctgtgggagatgcaacactgagagccaaggggtgggagttgggataatttttatataaaagaagtttttccactttgaattgcaaataacacaaaaaaaaaaaaaaaacctcggagggcaatattatgagtggggtgcgggagaacgcagggtctgtgaaagtggaatgggctaaagcttgttcctgaccaagttttttgtccaaggggcgatttgcggggcaccaaaagggggcgataattcgaaagccgggtactgtgaatgagagaaaac

SEQ ID NO: 380703 - DNA, 2210 bp, Homo sapiens
accagggcacttccggcggcgctctccgcgccttatcgccaaagctgcggctctggacgcccagccgcggcgtatcccgatcacttccgggtagtgctccacgggcacgagccgcgattgggctaccgtagatggggtacttccggtgtgcaggtgctgggtccttcggcaggaggaggaagatggagcccagcaccgcggcccgggcttgggccctcttttggttgctgctgcccttgcttggcgcggtttgcgccagcggaccccgcaccttagtgctgctggacaacctcaacgtgcgggagactcattcgcttttcttccggagcctgaaggaccggggctttgagctcacattcaagaccgctgatgaccccagcctgtctctcataaagtatggggaattcctctatgacaatctcatcattttctccccttcggtagaagattttggaggcaacatcaacgtggagaccatcagtgcctttattgacggtggaggcagtgtgctggtagctgccagctccgacattggtgaccctcttcgagagctgggcagtgagtgcgggattgagtttgacgaggagaaaacggctgtcattgaccatcacaactatgacatctcagaccttggccagcatacgctcatcgtggctgacactgagaacctgctgaaggccccaaccatcgttgggaaatcatctctaaatcccatcctctttcgaggtgttgggatggtggccgatcctgataaccctttggtgctggacatcctgacgggctcttccacctcttactccttcttcccggacaagcctatcacccagtatccacatgcggtggggaagaacaccctcctcattgctgggctccaggccaggaacaatgcccgcgtcatcttcagcggctccctcgacttcttcagcgactccttcttcaactcagcagtgcagaaggcggcgcccggctcccagaggtattcccagacaggcaactatgaactagctgtggccctctcccgctgggtgttcaaggaggagggtgtcctccgtgtggggcctgtgtcccatcatcgggtgggcgagacagccccacccaatgcctacactgtcactgacctagtggagtatagcatcgtgatccagcagctctcaaatggcaaatgggtcccctttgatggcgatgacattcagctggagtttgtccgcattgatccttttgtgaggaccttcctgaagaagaaaggtggcaaatacagtgttcagttcaagttgcccgacgtgtatggtgtattccagtttaaagtggattacaaccggctaggctacacacacctgtactcttccactcaggtatccgtgcggccactccagcacacgcagtatgagcgcttcatcccctcggcctacccctactacgccagcgccttctccatgatgctggggctcttcatcttcagcatcgtcttcttgcacatgaaggagaaggagaagtccgactgaggggctagagccctctccgcacagcgtggagacggggcagggaggggggttattaggattggtggttttgttttgctttgtttaaagccgtgggaaaatggcacaactttacctctgtgggagatgcaacactgagagccaaggggtgggagttgggataatttttatataaaagaagtttttccactttgaattgctgagctgagatcacgccattgcactccagcctgggcaacagtgttaagactctgtctcaaatataaataaataaataaataaataaaaataaagcgagatgttgccctcaaacttcacctggccccggtcctggtttgctaatggctgtgggtgggggttactgtgggtgatgactgactggatacaaaatcctaagtaagtggcttcatgaaattttgcctaggactggactgtctttcttttaactgtgaaatgatgatggttctccctaacgtctcctcaaaggatacaagaaagttgttgttgctagtagaccgaggggtgggaattactgaaatggaaaatctagatgacagtgctggggaagagaaaactagaacagctcagttgaagacaacctttactgcatgttgacgctgatttaggcaatagcttcctaaaaatcatgtataaagttagttagttagacatgaaatctcttccccaatgttgatacctgcccacaaaata

SEQ ID NO: 380704 - DNA, 1763 bp, Homo sapiens
  misc_feature (1703)..(1703): n is a, c, g, or t
accagggcacttccggcggcgctctccgcgccttatcgccaaagctgcggctctggacgcccagccgcggcgtatcccgatcacttccgggtagtgctccacgggcacgagccgcgattgggctaccgtagatggggtacttccggtgtgcaggtgctgggtccttcggcaggaggaggaagatggagcccagcaccgcggcccgggcttgggccctcttttggttgctgctgcccttgcttggcgcggtttgcgccagcggaccccgcaccttagtgctgctggacaacctcaacgtgcgggagactcattcgcttttcttccggagcctgaaggaccggggctttgagctcacattcaagaccgctgatgaccccagcctgtctctcataaagtatggggaattcctctatgacaatctcatcattttctccccttcggtagaagattttggaggcaacatcaacgtggagaccatcagtgcctttattgacggtggaggcagtgtgctggtagctgccagctccgacattggtgaccctcttcgagagctgggcagtgagtgcgggattgagtttgacgaggagaaaacggctgtcattgaccatcacaactatgacatctcagaccttggccagcatacgctcatcgtggctgacactgagaacctgctgaaggccccaaccatcgttgggaaatcatctctaaatcccatcctctttcgaggtgttgggatggtggccgatcctgataaccctttggtgctggacatcctgacgggctcttccacctcttactccttcttcccggacaagcctatcacccagtatccacatgcggtggggaagaacaccctcctcattgctgggctccaggccaggaacaatgcccgcgtcatcttcagcggctccctcgacttcttcagcgactccttcttcaactcagcagtgcagaaggcggcgcccggctcccagaggtattcccagacaggcaactatgaactagctgtggccctctcccgctgggtgttcaaggaggagggtgtcctccgtgtggggcctgtgtcccatcatcgggtgggcgagacagccccacccaatgcctacactgtcactgacctagtggagtatagcatcgtgatccagcagctctcaaatggcaaatgggtcccctttgatggcgatgacattcagctggagtttgtccgcattgatccttttgtgaggaccttcctgaagaagaaaggtggcaaatacagtgttcagttcaagttgcccgacgtgtatggtgtattccagtttaaagtggattacaaccggctaggctacacacacctgtactcttccactcaggtatccgtgcggccactccagcacacgcagtatgagcgcttcatcccctcggcctacccctactacgccagcgccttctccatgatgctggggctcttcatcttcagcatcgtcttcttgcacatgaaggagaaggagaagtccgactgaggggctagagccctctccgcacagcgtggagacggggcagggaggggggttattaggattggtggttttgttttgctttgtttaaagccgtgggaaaatggcacaactttacctctgtgggagatgcaacactgagagccaaggggtgggagttgggataatttttatataaaagaagtttttccactttgaattgcaacnaaaaaacataacactataactacacaaaaatattacaagacctacctgcttttttccaac

SEQ ID NO: 380705 - DNA, 2190 bp, Homo sapiens
accagggcacttccggcggcgctctccgcgccttatcgccaaagctgcggctctggacgcccagccgcggcgtatcccgatcacttccgggtagtgctccacgggcacgagccgcgattgggctaccgtagatggggtacttccggtgtgcaggtgctgggtccttcggcaggaggaggaagatggagcccagcaccgcggcccgggcttgggccctcttttggttgctgctgcccttgcttggcgcggtttgcgccagcggaccccgcaccttagtgctgctggacaacctcaacgtgcgggagactcattcgcttttcttccggagcctgaaggaccggggctttgagctcacattcaagaccgctgatgaccccagcctgtctctcataaagtatggggaattcctctatgacaatctcatcattttctccccttcggtagaagattttggaggcaacatcaacgtggagaccatcagtgcctttattgacggtggaggcagtgtgctggtagctgccagctccgacattggtgaccctcttcgagagctgggcagtgagtgcgggattgagtttgacgaggagaaaacggctgtcattgaccatcacaactatgacatctcagaccttggccagcatacgctcatcgtggctgacactgagaacctgctgaaggccccaaccatcgttgggaaatcatctctaaatcccatcctctttcgaggtgttgggatggtggccgatcctgataaccctttggtgctggacatcctgacgggctcttccacctcttactccttcttcccggacaagcctatcacccagtatccacatgcggtggggaagaacaccctcctcattgctgggctccaggccaggaacaatgcccgcgtcatcttcagcggctccctcgacttcttcagcgactccttcttcaactcagcagtgcagaaggcggcgcccggctcccagaggtattcccagacaggcaactatgaactagctgtggccctctcccgctgggtgttcaaggaggagggtgtcctccgtgtggggcctgtgtcccatcatcgggtgggcgagacagccccacccaatgcctacactgtcactgacctagtggagtatagcatcgtgatccagcagctctcaaatggcaaatgggtcccctttgatggcgatgacattcagctggagtttgtccgcattgatccttttgtgaggaccttcctgaagaagaaaggtggcaaatacagtgttcagttcaagttgcccgacgtgtatggtgtattccagtttaaagtggattacaaccggctaggctacacacacctgtactcttccactcaggtatccgtgcggccactccagcacacgcagtatgagcgcttcatcccctcggcctacccctactacgccagcgccttctccatgctccaggccaggaacaatgcccgcgtcatcttcaagcggctccctcgacttcttcagcgactcattcttcaactcagcagtgcagaaggcggcgcccggctcccagaggtattcccagacaggcaactatctagagccctctccgcacagcgtggagacggggcagggaggggggttattaggattggtggttttgttttgctttgtttaaagccgtgggaaaatggcacaactttacctctgtgggagatgcaacactgagagccaaggggtgggagttgggataatttttatataaaagaagtttttccactttgaattgctaaaagtggcatttttcctatgtgcagtcactcctctcatttctaaaatagggacgtggccaggcacggtggctcatgcctgtaatcccagcactttgggaggccgaggcaggcggctcacgaggtcaggagatcgagactatcctggctaacacggtaaaaccctgtctctactaaaagtacaaaaaattagctgggcgtggtggtgggcacctgtagtcccagctactcgggaggctgaggcaggagaaaggcatgaatccaagaggcagagcttgcagtgagctgagatcacgccattgcactccagcctgggcaacagtgttaagactctgtctcaaatataaataaataaataaataaataaataaataaataaataaaaataaagcgagatgttgccctcaaaacacataaaccaaaacgggcgg

SEQ ID NO: 380706 - DNA, 2144 bp, Homo sapiens
accagggcacttccggcggcgctctccgcgccttatcgccaaagctgcggctctggacgcccagccgcggcgtatcccgatcacttccgggtagtgctccacgggcacgagccgcgattgggctaccgtagatggggtacttccggtgtgcaggtgctgggtccttcggcaggaggaggaagatggagcccagcaccgcggcccgggcttgggccctcttttggttgctgctgcccttgcttggcgcggtttgcgccagcggaccccgcaccttagtgctgctggacaacctcaacgtgcgggagactcattcgcttttcttccggagcctgaaggaccggggctttgagctcacattcaagaccgctgatgaccccagcctgtctctcataaagtatggggaattcctctatgacaatctcatcattttctccccttcggtagaagattttggaggcaacatcaacgtggagaccatcagtgcctttattgacggtggaggcagtgtgctggtagctgccagctccgacattggtgaccctcttcgagagctgggcagtgagtgcgggattgagtttgacgaggagaaaacggctgtcattgaccatcacaactatgacatctcagaccttggccagcatacgctcatcgtggctgacactgagaacctgctgaaggccccaaccatcgttgggaaatcatctctaaatcccatcctctttcgaggtgttgggatggtggccgatcctgataaccctttggtgctggacatcctgacgggctcttccacctcttactccttcttcccggacaagcctatcacccagtatccacatgcggtggggaagaacaccctcctcattgctgggctccaggccaggaacaatgcccgcgtcatcttcagcggctccctcgacttcttcagcgactccttcttcaactcagcagtgcagaaggcggcgcccggctcccagaggtattcccagacaggcaactatgaactagctgtggccctctcccgctgggtgttcaaggaggagggtgtcctccgtgtggggcctgtgtcccatcatcgggtgggcgagacagccccacccaatgcctacactgtcactgacctagtggagtatagcatcgtgatccagcagctctcaaatggcaaatgggtcccctttgatggcgatgacattcagctggagtttgtccgcattgatccttttgtgaggaccttcctgaagaagaaaggtggcaaatacagtgttcagttcaagttgcccgacgtgtatggtgtattccagtttaaagtggattacaaccggctaggctacacacacctgtactcttccactcagtaaaagtggcatttttcctatgtgcagtcactcctctcatttctaaaatagggacgtggccaggcacggtggctcatgcctgtaatcccagcactttgggaggccgaggcaggcggctcacgaggtcaggagatcgagactatcctggctaacacggtaaaaccctgtctctactaaaagtacaaaaaattagctgggcgtggtggtgggcacctgtagtcccagctactcgggaggctgaggcaggagaaaggcatgaatccaagaggcagagcttgcagtgagctgagatcacgccattgcactccagcctgggcaacagtgttaagactctgtctcaaatataaataaataaataaataaataaaaataaagcgagatgttgccctcaaacttcacctggccccggtcctggtttgctaatggctgtgggtgggggttactgtgggtgatgactgactggatacaaaatcctaagtaagtggcttcatgaaattttgcctaggactggactgtctttcttttaactgtgaaatgatgatggttctccctaacgtctcctcaaaggatacaagaaagttgttgttgctagtagaccgaggggtgggaattactgaaatggaaaatctagatgacagtgctggggaagagaaaactagaacagctcagttgaagacaacctttactgcatgttgacgctgatttaggcaatagcttcctaaaaatcatgtataaagttagttagttagacatgaaatctcttccccaatgttgatacctgcccacaaaata

SEQ ID NO: 380707 - DNA, 1840 bp, Homo sapiens
accagggcacttccggcggcgctctccgcgccttatcgccaaagctgcggctctggacgcccagccgcggcgtatcccgatcacttccgggtagtgctccacgggcacgagccgcgattgggctaccgtagatggggtacttccggtgtgcaggtgctgggtccttcggcaggaggaggaagatggagcccagcaccgcggcccgggcttgggccctcttttggttgctgctgcccttgcttggcgcggtttgcgccagcggaccccgcaccttagtgctgctggacaacctcaacgtgcgggagactcattcgcttttcttccggagcctgaaggaccggggctttgagctcacattcaagaccgctgatgaccccagcctgtctctcataaagtatggggaattcctctatgacaatctcatcattttctccccttcggtagaagattttggaggcaacatcaacgtggagaccatcagtgcctttattgacggtggaggcagtgtgctggtagctgccagctccgacattggtgaccctcttcgagagctgggcagtgagtgcgggattgagtttgacgaggagaaaacggctgtcattgaccatcacaactatgacatctcagaccttggccagcatacgctcatcgtggctgacactgagaacctgctgaaggccccaaccatcgttgggaaatcatctctaaatcccatcctctttcgaggtgttgggatggtggccgatcctgataaccctttggtgctggacatcctgacgggctcttccacctcttactccttcttcccggacaagcctatcacccagtatccacatgcggtggggaagaacaccctcctcattgctgggctccaggccaggaacaatgcccgcgtcatcttcagcggctccctcgacttcttcagcgactccttcttcaactcagcagtgcagaaggcggcgcccggctcccagaggtattcccagacaggcaactatgaactagctgtggccctctcccgctgggtgttcaaggaggagggtgtcctccgtgtggggcctgtgtcccatcatcgggtgggcgagacagccccacccaatgcctacactgtcactgacctagtggagtatagcatcgtgatccagcagctctcaaatggcaaatgggtcccctttgatggcgatgacattcagctggagtttgtccgcattgatccttttgtgaggaccttcctgaagaagaaaggtggcaaatacagtgttcagttcaagttgcccgacgtgtatggtgtattccagtttaaagtggattacaaccggctaggctacacacacctgtactcttccactcagtccgtgcggccactccagcacacgcagcatgagccactgtgcccggcaagatctaactcacgcttacttttcattaaaatatttcttgtcgcttttagctatggtcagaatccaataaacagcttacgcattcatttgggtaaagcaaatttcacaggaaactagacaaaattataagagattcctggagacaacacaaggaaacacaatgtttaaaagcaaaatagcctgtgtaatgttaggtaatgtaatgcccaagtgaatcacagatttttcgtcaagcaaactactgtttctacttgtgggcggaacacaacagtcaagttttcacattttgtacatttcacaggaacagacacagaaaagcacaaaggtttttcttttctttattaatgggctactagaaatgagcagtgcaagagtctacctgtactattctaatacagtcacgatactggccccacaatggaggtacacttttttaacac

SEQ ID NO: 380708 - DNA, 1549 bp, Homo sapiens
  misc_feature (8)..(8): n is a, c, g, or t
  misc_feature (17)..(17): n is a, c, g, or t
gaaactangctagtagngcccggtgtgaatcggccgaggccagcaccgcggcccgggcttgggccctcttttggttgctgctgcccttgcttggcgcggtttgcgccagcggaccccgcaccttagtgctgctggacaacctcaacgtgcgggagactcattcgcttttcttccggagcctgaaggaccggggctttgagctcacattcaagaccgctgatgaccccagcctgtctctcataaagtatggggaattcctctatgacaatctcatcattttctccccttcggtagaagattttggaggcaacatcaacgtggagaccatcagtgcctttattgacggtggaggcagtgtgctggtagctgccagctccgacattggtgaccctcttcgagagctgggcagtgagtgcgggattgagtttgacgaggagaaaacggctgtcattgaccatcacaactatgacatctcagaccttggccagcatacgctcatcgtggctgacactgagaacctgctgaaggccccaaccatcgttgggaaatcatctctaaatcccatcctctttcgaggtgttgggatggtggccgatcctgataaccctttggtgctggacatcctgacgggctcttccacctcttactccttcttcccggacaagcctatcacccagtatccacatgcggtggggaagaacaccctcctcattgctgggctccaggccaggaacaatgcccgcgtcatcttcagcggctccctcgacttcttcagcgactccttcttcaactcagcagtgcagaaggcggcgcccggctcccagaggtattcccagacaggcaactatgaactagctgtggccctctcccgctgggtgttcaaggaggagggtgtcctccgtgtggggcctgtgtcccatcatcgggtgggcgagacagccccacccaatgcctacactgtcactgacctagtggagtatagcatcgtgatccagcagctctcaaatggcaaatgggtcccctttgatggcgatgacattcagctggagtttgtccgcattgatccttttgtgaggaccttcctgaagaagaaaggtggcaaatacagtgttcagttcaagttgcccgacgtgtatggtgtattccagtttaaagtggattacaaccggctaggctacacacacctgtactcttccactcaggtatccgtgcggccactccagcacacgcagtatgagcgcttcatcccctcggcctacccctactacgccagcgccttctccatgatgctggggctcttcatcttcagcatcgtcttcttgcacatgaaggagaaggagaagtccgactgaggggctagagccctctccgcacagcgtggagacggggcagggaggggggttattaggattggtggttttgttttgctttgtttaaagccgtgggaaaatggcacaactttacctctgtgggagatgcaacactgagagccaaggggtgggagttgggataatttttatataaaagaagtttttccactttgaattgc

SEQ ID NO: 380709 - DNA, 1512 bp, Homo sapiens
  misc_feature (7)..(7): n is a, c, g, or t
  misc_feature (60)..(60): n is a, c, g, or t
  misc_feature (133)..(133): n is a, c, g, or t
  misc_feature (143)..(143): n is a, c, g, or t
tggaganaagaaaagggcaagggattgggaatattttggttgatgatgaaattgattggngaggtttgagaagggaaaaagaaaattagtgatgttggaaaaaataaaagtgggggagaataattagattttnttaaggagantgaaggaccggggctttgagctcacattcaagaccgctgatgaccccagcctgtctctcataaagtatggggaattcctctatgacaatctcatcattttctccccttcggtagaagattttggaggcaacatcaacgtggagaccatcagtgcctttattgacggtggaggcagtgtgctggtagctgccagctccgacattggtgaccctcttcgagagctgggcagtgagtgcgggattgagtttgacgaggagaaaacggctgtcattgaccatcacaactatgacatctcagaccttggccagcatacgctcatcgtggctgacactgagaacctgctgaaggccccaaccatcgttgggaaatcatctctaaatcccatcctctttcgaggtgttgggatggtggccgatcctgataaccctttggtgctggacatcctgacgggctcttccacctcttactccttcttcccggacaagcctatcacccagtatccacatgcggtggggaagaacaccctcctcattgctgggctccaggccaggaacaatgcccgcgtcatcttcagcggctccctcgacttcttcagcgactccttcttcaactcagcagtgcagaaggcggcgcccggctcccagaggtattcccagacaggcaactatgaactagctgtggccctctcccgctgggtgttcaaggaggagggtgtcctccgtgtggggcctgtgtcccatcatcgggtgggcgagacagccccacccaatgcctacactgtcactgacctagtggagtatagcatcgtgatccagcagctctcaaatggcaaatgggtcccctttgatggcgatgacattcagctggagtttgtccgcattgatccttttgtgaggaccttcctgaagaagaaaggtggcaaatacagtgttcagttcaagttgcccgacgtgtatggtgtattccagtttaaagtggattacaaccggctaggctacacacacctgtactcttccactcaggtatccgtgcggccactccagcacacgcagtatgagcgcttcatcccctcggcctacccctactacgccagcgccttctccatgatgctggggctcttcatcttcagcatcgtcttcttgcacatgaaggagaaggagaagtccgactgaggggctagagccctctccgcacagcgtggagacggggcagggaggggggttattaggattggtggttttgttttgctttgtttaaagccgtgggaaaatggcacaactttacctctgtgggagatgcaacactgagagccaaggggtgggagttgggataatttttatataaaagaagtttttccactttgaattgc

SEQ ID NO: 380710 - DNA, 1303 bp, Homo sapiens
ttaattaattaccaattcccaccccccaccatttttttcccggggtagaagattttggaggcaacatcaacgtggagaccatcagtgcctttattgacggtggaggcagtgtgctggtagctgccagctccgacattggtgaccctcttcgagagctgggcagtgagtgcgggattgagtttgacgaggagaaaacggctgtcattgaccatcacaactatgacatctcagaccttggccagcatacgctcatcgtggctgacactgagaacctgctgaaggccccaaccatcgttgggaaatcatctctaaatcccatcctctttcgaggtgttgggatggtggccgatcctgataaccctttggtgctggacatcctgacgggctcttccacctcttactccttcttcccggacaagcctatcacccagtatccacatgcggtggggaagaacaccctcctcattgctgggctccaggccaggaacaatgcccgcgtcatcttcagcggctccctcgacttcttcagcgactccttcttcaactcagcagtgcagaaggcggcgcccggctcccagaggtattcccagacaggcaactatgaactagctgtggccctctcccgctgggtgttcaaggaggagggtgtcctccgtgtggggcctgtgtcccatcatcgggtgggcgagacagccccacccaatgcctacactgtcactgacctagtggagtatagcatcgtgatccagcagctctcaaatggcaaatgggtcccctttgatggcgatgacattcagctggagtttgtccgcattgatccttttgtgaggaccttcctgaagaagaaaggtggcaaatacagtgttcagttcaagttgcccgacgtgtatggtgtattccagtttaaagtggattacaaccggctaggctacacacacctgtactcttccactcaggtatccgtgcggccactccagcacacgcagtatgagcgcttcatcccctcggcctacccctactacgccagcgccttctccatgatgctggggctcttcatcttcagcatcgtcttcttgcacatgaaggagaaggagaagtccgactgaggggctagagccctctccgcacagcgtggagacggggcagggaggggggttattaggattggtggttttgttttgctttgtttaaagccgtgggaaaatggcacaactttacctctgtgggagatgcaacactgagagccaaggggtgggagttgggataatttttatataaaagaagtttttccactttgaattgc

SEQ ID NO: 380711 - DNA, 1651 bp, Homo sapiens
accagggcacttccggcggcgctctccgcgccttatcgccaaagctgcggctctggacgcccagccgcggcgtatcccgatcacttccgggtagtgctccacgggcacgagccgcgattgggctaccgtagatggggtacttccggtgtgcaggtgctgggtccttcggcaggaggaggaagatggagcccagcaccgcggcccgggcttgggccctcttttggttgctgctgcccttgcttggcgcggtttgcgccagcggaccccgcaccttagtgctgctggacaacctcaacgtgcgggagactcattcgcttttcttccggagcctgaaggaccggggctttgagctcacattcaagaccgctgatgaccccagcctgtctctcataaagtatggggaattcctctatgacaatctcatcattttctccccttcggtagaagattttggaggcaacatcaacgtggagaccatcagtgcctttattgacggtggaggcagtgtgctggtagctgccagctccgacattggtgaccctcttcgagagctgggcagtgagtgcgggattgagtttgacgaggagaaacatacgctcatcgtggctgacactgagaacctgctgaaggccccaaccatcgttgggaaatcatctctaaatcccatcctctttcgaggtgttgggatggtggccgatcctgataaccctttggtgctggacatcctgacgggctcttccacctcttactccttcttcccggacaagcctatcacccagtatccacatgcggtggggaagaacaccctcctcattgctgggctccaggccaggaacaatgcccgcgtcatcttcagcggctccctcgacttcttcagcgactccttcttcaactcagcagtgcagaaggcggcgcccggctcccagaggtattcccagacaggcaactatgaactagctgtggccctctcccgctgggtgttcaaggaggagggtgtcctccgtgtggggcctgtgtcccatcatcgggtgggcgagacagccccacccaatgcctacactgtcactgacctagtggagtatagcatcgtgatccagcagctctcaaatggcaaatgggtcccctttgatggcgatgacattcagctggagtttgtccgcattgatccttttgtgaggaccttcctgaagaagaaaggtggcaaatacagtgttcagttcaagttgcccgacgtgtatggtgtattccagtttaaagtggattacaaccggctaggctacacacacctgtactcttccactcaggtatccgtgcggccactccagcacacgcagtatgagcgcttcatcccctcggcctacccctactacgccagcgccttctccatgatgctggggctcttcatcttcagcatcgtcttcttgcacatgaaggagaaggagaagtccgactgaggggctagagccctctccgcacagcgtggagacggggcagggaggggggttattaggattggtggttttgttttgctttgtttaaagccgtgggaaaatggcacaactttacctctgtgggagatgcaacactgagagccaaggggtgggagttgggataatttttatataaaagaagtttttccactttgaattgc

SEQ ID NO: 380712 - DNA, 1100 bp, Homo sapiens
  misc_feature (8)..(8): n is a, c, g, or t
  misc_feature (17)..(17): n is a, c, g, or t
gaaactangctagtagngcccggtgtgaatcggccgaggcatacgctcatcgtggctgacactgagaacctgctgaaggccccaaccatcgttgggaaatcatctctaaatcccatcctctttcgaggtgttgggatggtggccgatcctgataaccctttggtgctggacatcctgacgggctcttccacctcttactccttcttcccggacaagcctatcacccagtatccacatgcggtggggaagaacaccctcctcattgctgggctccaggccaggaacaatgcccgcgtcatcttcagcggctccctcgacttcttcagcgactccttcttcaactcagcagtgcagaaggcggcgcccggctcccagaggtattcccagacaggcaactatgaactagctgtggccctctcccgctgggtgttcaaggaggagggtgtcctccgtgtggggcctgtgtcccatcatcgggtgggcgagacagccccacccaatgcctacactgtcactgacctagtggagtatagcatcgtgatccagcagctctcaaatggcaaatgggtcccctttgatggcgatgacattcagctggagtttgtccgcattgatccttttgtgaggaccttcctgaagaagaaaggtggcaaatacagtgttcagttcaagttgcccgacgtgtatggtgtattccagtttaaagtggattacaaccggctaggctacacacacctgtactcttccactcaggtatccgtgcggccactccagcacacgcagtatgagcgcttcatcccctcggcctacccctactacgccagcgccttctccatgatgctggggctcttcatcttcagcatcgtcttcttgcacatgaaggagaaggagaagtccgactgaggggctagagccctctccgcacagcgtggagacggggcagggaggggggttattaggattggtggttttgttttgctttgtttaaagccgtgggaaaatggcacaactttacctctgtgggagatgcaacactgagagccaaggggtgggagttgggataatttttatataaaagaagtttttccactttgaattgc

SEQ ID NO: 380713 - DNA, 1622 bp, Homo sapiens
accagggcacttccggcggcgctctccgcgccttatcgccaaagctgcggctctggacgcccagccgcggcgtatcccgatcacttccgggtagtgctccacgggcacgagccgcgattgggctaccgtagatggggtacttccggtgtgcaggtgctgggtccttcggcaggaggaggaagatggagcccagcaccgcggcccgggcttgggccctcttttggttgctgctgcccttgcttggcgcggtttgcgccagcggaccccgcaccttagtgctgctggacaacctcaacgtgcgggagactcattcgcttttcttccggagcctgaaggaccggggctttgagctcacattcaagaccgctgatgaccccagcctgtctctcataaagtatggggaattcctctatgacaatctcatcattttctccccttcggtagaagattttggaggcaacatcaacgtggagaccatcagtgcctttattgacggtggaggcagtgtgctggtagctgccagctccgacattggtgaccctcttcgagagctgggcagtgagtgcgggattgagtttgacgaggagaaaacggctgtcattgaccatcacaactatgacatctcagaccttggccagcatacgctcatcgtggctgacactgagaacctgctgaaggccccaaccatcgttgggaaatcatctctaaatcccatcctctttcgaggtgttgggatggtggccgatcctgataaccctttggtgctggacatcctgacgggctcttccacctcttactccttcttcccggacaagcctatcacccagtatccacatgcggtggggaagaacaccctcctcattgctgggctccaggccaggaacaatgcccgcgtcatcttcagcggctccctcgacttcttcagcgaatgctggggctcttcatcttcagcatcgtcttcttgcacatgaaggagaaggagaagtccgactgaggggctagagccctctccgcacagcgtggagacggggcagggaggggggttattaggattggtggttttgttttgctttgtttaaagccgtgggaaaatggcacaactttacctctgtgggagatgcaacactgagagccaaggggtgggagttgggataatttttatataaaagaagtttttccactttgaattgctaaaagtggcatttttcctatgtgcagtcactcctctcatttctaaaatagggacgtggccaggcacggtggctcatgcctgtaatcccagcactttgggaggccgaggcaggcggctcacgaggtcaggagatcgagactatcctggctaacacggtaaaaccctgtctctactaaaagtacaaaaaattagctgggcgtggtggtgggcacctgtagtcccagctactcgggaggctgaggcaggagaaaggcatgaatccaagaggcagagcttgcagtgagctgagatcacgccattgcactccagcctgggcaacagtgttaagactctgtctcaaatataaataaataaataaataaataaataaataaataaataaaaataaagcgagatgttgccctcaaaacacataaaccaaaacgggcgg

SEQ ID NO: 380714 - DNA, 1191 bp, Homo sapiens
accagggcacttccggcggcgctctccgcgccttatcgccaaagctgcggctctggacgcccagccgcggcgtatcccgatcacttccgggtagtgctccacgggcacgagccgcgattgggctaccgtagatggggtacttccggtgtgcaggtgctgggtccttcggcaggaggaggaagatggagcccagcaccgcggcccgggcttgggccctcttttggttgctgctgcccttgcttggcgcggtttgcgccagcggaccccgcaccttagtgctgctggacaacctcaacgtgcgggagactcattcgcttttcttccggagcctgaaggaccggggctttgagctcacattcaagaccgctgatgaccccagcctgtctctcataaagtatggggaattcctctatgacaatctcatcattttctccccttcggtagaagattttggaggcaacatcaacgtggagaccatcagtgcctttattgacggtggaggcagtgtgctggtagctgccagctccgacattggtgaccctcttcgagagctgggcagtgagtgcgggattgagtttgacgaggagaaaacggctgtcattgaccatcacaactatgacatctcagaccttggccagcatacgctcatcgtggctgacactgagaacctgctgaaggccccaaccatcgttgggaaatcatctctaaatcccatcctctttcgaggtgttgggatggtggccgatcctgataaccctttggtgctggacatcctgacgggctcttccacctcttactccttcttcccggacaagcctatcacccagtatccacatgcggtggggaagaacaccctcctcattgctgggctccaggccaggaacaatgcccgcgtcatcttcagcggctccctcgacttcttcagcgaatgctggggctcttcatcttcagcatcgtcttcttgcacatgaaggagaaggagaagtccgactgaggggctagagccctctccgcacagcgtggagacggggcagggaggggggttattaggattggtggttttgttttgctttgtttaaagccgtgggaaaatggcacaactttacctctgtgggagatgcaacactgagagccaaggggtgggagttgggataatttttatataaaagaagtttttccactttgaattgc

SEQ ID NO: 380715 - DNA, 1451 bp, Homo sapiens
  misc_feature (8)..(8): n is a, c, g, or t
  misc_feature (17)..(17): n is a, c, g, or t
gaaactangctagtagngcccggtgtgaatcggccgaggccagcaccgcggcccgggcttgggccctcttttggttgctgctgcccttgcttggcgcggtttgcgccagcggaccccgcaccttagtgctgctggacaacctcaacgtgcgggagactcattcgcttttcttccggagcctgaaggaccggggctttgagctcacattcaagaccgctgatgaccccagcctgtctctcataaagtatggggaattcctctatgacaatctcatcattttctccccttcggtagaaggtattcccagacaggcaactatgaactagctgtggccctctcccgctgggtgttcaaggaggagggtgtcctccgtgtggggcctgtgtcccatcatcgggtgggcgagacagccccacccaatgcctacactgtcactgacctagtggagtatagcatcgtgatccagcagctctcaaatggcaaatgggtcccctttgatggcgatgacattcagctggagtttgtccgcattgatccttttgtgaggaccttcctgaagaagaaaggtggcaaatacagtgttcagttcaagttgcccgacgtgtatggtgtattccagtttaaagtggattacaaccggctaggctacacacacctgtactcttccactcaggtatccgtgcggccactccagcacacgcagtatgagcgcttcatcccctcggcctacccctactacgccagcgccttctccatgatgctggggctcttcatcttcagcatcgtcttcttgcacatgaaggagaaggagaagtccgactgaggggctagagccctctccgcacagcgtggagacggggcagggaggggggttattaggattggtggttttgttttgctttgtttaaagccgtgggaaaatggcacaactttacctctgtgggagatgcaacactgagagccaaggggtgggagttgggataatttttatataaaagaagtttttccactttgaattgctaaaagtggcatttttcctatgtgcagtcactcctctcatttctaaaatagggacgtggccaggcacggtggctcatgcctgtaatcccagcactttgggaggccgaggcaggcggctcacgaggtcaggagatcgagactatcctggctaacacggtaaaaccctgtctctactaaaagtacaaaaaattagctgggcgtggtggtgggcacctgtagtcccagctactcgggaggctgaggcaggagaaaggcatgaatccaagaggcagagcttgcagtgagctgagatcacgccattgcactccagcctgggcaacagtgttaagactctgtctcaaatataaataaataaataaataaataaataaataaataaataaaaataaagcgagatgttgccctcaaaacacataaaccaaaacgggcgg

SEQ ID NO: 380716 - DNA, 1472 bp, Homo sapiens
  misc_feature (8)..(8): n is a, c, g, or t
  misc_feature (17)..(17): n is a, c, g, or t
gaaactangctagtagngcccggtgtgaatcggccgaggccagcaccgcggcccgggcttgggccctcttttggttgctgctgcccttgcttggcgcggtttgcgccagcggaccccgcaccttagtgctgctggacaacctcaacgtgcgggagactcattcgcttttcttccggagcctgaaggaccggggctttgagctcacattcaagaccgctgatgaccccagcctgtctctcataaagtatggggaattcctctatgacaatctcatcattttctccccttcggtagaagattttggaggcaacatcaacgtggagaccatcagtgcctttattgacggtggaggcagtgtgctggtagctgccagctccgacattggtgaccctcttcgagagctgggcagtgagtgcgggattgagtttgacgaggagaaaacggctgtcattgaccatcacaactatgacatctcagaccttggccagcatacgctcatcgtggctgacactgagaacctgctgaaggccccaaccatcgttgggaaatcatctctaaatcccatcctctttcgaggtgttgggatggtggccgatcctgataaccctttggtgctggacatcctgacgggctcttccacctcttactccttcttcccggacaagcctatcacccagtatccacatgcggtggggaagaacaccctcctcattgctgggctccaggccaggaacaatgcccgcgtcatcttcagcggctccctcgacttcttcagcgaatgctggggctcttcatcttcagcatcgtcttcttgcacatgaaggagaaggagaagtccgactgaggggctagagccctctccgcacagcgtggagacggggcagggaggggggttattaggattggtggttttgttttgctttgtttaaagccgtgggaaaatggcacaactttacctctgtgggagatgcaacactgagagccaaggggtgggagttgggataatttttatataaaagaagtttttccactttgaattgctaaaagtggcatttttcctatgtgcagtcactcctctcatttctaaaatagggacgtggccaggcacggtggctcatgcctgtaatcccagcactttgggaggccgaggcaggcggctcacgaggtcaggagatcgagactatcctggctaacacggtaaaaccctgtctctactaaaagtacaaaaaattagctgggcgtggtggtgggcacctgtagtcccagctactcgggaggctgaggcaggagaaaggcatgaatccaagaggcagagcttgcagtgagctgagatcacgccattgcactccagcctgggcaacagtgttaagactctgtctcaaatataaataaataaataaataaataaataaataaataaataaaaataaagcgagatgttgccctcaaaacacataaaccaaaacgggcgg

SEQ ID NO: 380717 - DNA, 1120 bp, Homo sapiens
ctcctgggcattcctgccatgttcgtcgggtgggaattaagtgcagctctgcctgcaggtggtggaaggcctccagtcatggccagccctggctaacctggccttttatctcaggagtatagcatcgtgatccagcagctctcaaatggcaaatgggtcccctttgatggcgatgacattcagctggagtttgtccgcattgatccttttgtgaggaccttcctgaagaagaaaggtggcaaatacagtgttcagttcaagttgcccgacgtgtatggtgtattccagtttaaagtggattacaaccggctaggctacacacacctgtactcttccactcaggtatccgtgcggccactccagcacacgcagtatgagcgcttcatcccctcggcctacccctactacgccagcgccttctccatgatgctggggctcttcatcttcagcatcgtcttcttgcacatgaaggagaaggagaagtccgactgaggggctagagccctctccgcacagcgtggagacggggcagggaggggggttattaggattggtggttttgttttgctttgtttaaagccgtgggaaaatggcacaactttacctctgtgggagatgcaacactgagagccaaggggtgggagttgggataatttttatataaaagaagtttttccactttgaattgctaaaagtggcatttttcctatgtgcagtcactcctctcatttctaaaatagggacgtggccaggcacggtggctcatgcctgtaatcccagcactttgggaggccgaggcaggcggctcacgaggtcaggagatcgagactatcctggctaacacggtaaaaccctgtctctactaaaagtacaaaaaattagctgggcgtggtggtgggcacctgtagtcccagctactcgggaggctgaggcaggagaaaggcatgaatccaagaggcagagcttgcagtgagctgagatcacgccattgcactccagcctgggcaacagtgttaagactctgtctcaaatataaataaataaataaataaataaataaataaataaataaaaataaagcgagatgttgccctcaaaacacataaaccaaaacgggcgg

SEQ ID NO: 380718 - DNA, 905 bp, Homo sapiens
accagggcacttccggcggcgctctccgcgccttatcgccaaagctgcggctctggacgcccagccgcggcgtatcccgatcacttccgggtagtgctccacgggcacgagccgcgattgggctaccgtagatggggtacttccggtgtgcaggtgctgggtccttcggcaggaggaggaagatggagcccagcaccgcggcccgggcttgggccctcttttggttgctgctgcccttgcttggcgcggtttgcgccagcggaccccgcaccttagtgctgctggacaacctcaacgtgcgggagactcattcgcttttcttccggagcctgaaggaccggggctttgagctcacattcaagaccgctgatgaccccagcctgtctctcataaagtatggggaattcctctatgacaatctcatcattttctccccttcggtagaaggtgaccctcttcgagagctgggcagtgagtgcgggattgagtttgacgaggagaaaacggctgtcattgaccatcacaactatgacatctcagaccttggccagcatacgctcatcgtggctgacactgagaacctgctgaaggccccaaccatcgttgggaaatcatctctaaatcccatcctctttcgaggtgttgggatggtggccgatcctgataaccctttggtgctggacatcctgacgggctcttccacctcttactccttcttcccggacaagcctatcacccagtatccacatgcggtggggaagaacaccctcctcattgctgggctccaggccaggaacaatgcccgcgtcatcttcagcggctccctcgacttcttcagcgactccttcttcaactcagcagtgcagaaggcggcgcccggctcccagagagctgccaggaggctt

SEQ ID NO: 380719 - DNA, 1699 bp, Homo sapiens
accagggcacttccggcggcgctctccgcgccttatcgccaaagctgcggctctggacgcccagccgcggcgtatcccgatcacttccgggtagtgctccacgggcacgagccgcgattgggctaccgtagatggggtacttccggtgtgcaggtgctgggtccttcggcaggaggaggaagatggagcccagcaccgcggcccgggcttgggccctcttttggttgctgctgcccttgcttggcgcggtttgcgccagcggaccccgcaccttagtgctgctggacaacctcaacgtgcgggagactcattcgcttttcttccggagcctgaaggaccggggctttgagctcacattcaagaccgctgatgaccccagcctgtctctcataaagtatggggaattcctctatgacaatctcatcattttctccccttcggtagaagattttggaggcaacatcaacgtggagaccatcagtgcctttattgacggtggaggcagtgtgctggtagctgccagctccgacattggtgaccctcttcgagagctgggcagtgagtgcgggattgagtttgacgaggagaaaacggctgtcattgaccatcacaactatgacatctcagaccttggccagcatacgctcatcgtggctgacactgagaacctgctgaaggccccaaccatcgttgggaaatcatctctaaatcccatcctctttcgaggtgttgggatggtggccgatcctgataaccctttggtgctggacatcctgacgggctcttccacctcttactccttcttcccggacaagcctatcacccagtatccacatgcggtggggaagaacaccctcctcattgctgggctccaggccaggaacaatgcccgcgtcatcttcagcggctccctcgacttcttcagcgactccttcttcaactcagcagtgcagaaggcggcgcccggctcccagaggtattcccagacaggcaactatgaactagctgtggccctctcccgctgggtgttcaaggaggagggtgtcctccgtgtggggcctgtgtcccatcatcgggtgggcgagacagccccacccaatgcctacactgtcactgacctagtggagtatagcatcgtgatccagcagctctcaaatggcaaatgggtcccctttgatggcgatgacattcagctggagtttgtccgcattgatccttttgtgaggaccttcctgaagaagaaaggtggcaaatacagtgttcagttcaagttgcccgacgtgtatggtgtattccagtttaaagtggattacaaccggctaggctacacacacctgtactcttccactcaggtatccgtgcggccactccagcacacgcagtatgagcgcttcatcccctcggcctacccctactacgccagcgccttctccatgatgctggggctcttcatcttcagcatcgtcttcttgcacatgaaggagaaggagaagtccgactgaggggctagagccctctccgcacagcgtggagacggggcagggaggggggttattaggattggtggttttgttttgctttgtttaaagccgtgggaaaatggcacaactttacctctgtgggagatgcaacactgagagccaaggggtgggagttgggataatttttatataaaagaagtttttccactttgaattgc

SEQ ID NO: 380720 - DNA, 2491 bp, Homo sapiens
accagggcacttccggcggcgctctccgcgccttatcgccaaagctgcggctctggacgcccagccgcggcgtatcccgatcacttccgggtagtgctccacgggcacgagccgcgattgggctaccgtagatggggtacttccggtgtgcaggtgctgggtccttcggcaggaggaggaagatggagcccagcaccgcggcccgggcttgggccctcttttggttgctgctgcccttgcttggcgcggtttgcgccagcggaccccgcaccttagtgctgctggacaacctcaacgtgcgggagactcattcgcttttcttccggagcctgaaggaccggggctttgagctcacattcaagaccgctgatgaccccagcctgtctctcataaagtatggggaattcctctatgacaatctcatcattttctccccttcggtagaagattttggaggcaacatcaacgtggagaccatcagtgcctttattgacggtggaggcagtgtgctggtagctgccagctccgacattggtgaccctcttcgagagctgggcagtgagtgcgggattgagtttgacgaggagaaaacggctgtcattgaccatcacaactatgacatctcagaccttggccagcatacgctcatcgtggctgacactgagaacctgctgaaggccccaaccatcgttgggaaatcatctctaaatcccatcctctttcgaggtgttgggatggtggccgatcctgataaccctttggtgctggacatcctgacgggctcttccacctcttactccttcttcccggacaagcctatcacccagtatccacatgcggtggggaagaacaccctcctcattgctgggctccaggccaggaacaatgcccgcgtcatcttcagcggctccctcgacttcttcagcgactccttcttcaactcagcagtgcagaaggcggcgcccggctcccagaggtattcccagacaggcaactatgaactagctgtggccctctcccgctgggtgttcaaggaggagggtgtcctccgtgtggggcctgtgtcccatcatcgggtgggcgagacagccccacccaatgcctacactgtcactgacctagtggagtatagcatcgtgatccagcagctctcaaatggcaaatgggtcccctttgatggcgatgacattcagctggagtttgtccgcattgatccttttgtgaggaccttcctgaagaagaaaggtggcaaatacagtgttcagttcaagttgcccgacgtgtatggtgtattccagtttaaagtggattacaaccggctaggctacacacacctgtactcttccactcaggtatccgtgcggccactccagcacacgcagtatgagcgcttcatcccctcggcctacccctactacgccagcgccttctccatgatgctggggctcttcatcttcagcatcgtcttcttgcacatgaaggagaaggagaagtccgactgaggggctagagccctctccgcacagcgtggagacggggcagggaggggggttattaggattggtggttttgttttgctttgtttaaagccgtgggaaaatggcacaactttacctctgtgggagatgcaacactgagagccaaggggtgggagttgggataatttttatataaaagaagtttttccactttgaattgctaaaagtggcatttttcctatgtgcagtcactcctctcatttctaaaatagggacgtggccaggcacggtggctcatgcctgtaatcccagcactttgggaggccgaggcaggcggctcacgaggtcaggagatcgagactatcctggctaacacggtaaaaccctgtctctactaaaagtacaaaaaattagctgggcgtggtggtgggcacctgtagtcccagctactcgggaggctgaggcaggagaaaggcatgaatccaagaggcagagcttgcagtgagctgagatcacgccattgcactccagcctgggcaacagtgttaagactctgtctcaaatataaataaataaataaataaataaaaataaagcgagatgttgccctcaaacttcacctggccccggtcctggtttgctaatggctgtgggtgggggttactgtgggtgatgactgactggatacaaaatcctaagtaagtggcttcatgaaattttgcctaggactggactgtctttcttttaactgtgaaatgatgatggttctccctaacgtctcctcaaaggatacaagaaagttgttgttgctagtagaccgaggggtgggaattactgaaatggaaaatctagatgacagtgctggggaagagaaaactagaacagctcagttgaagacaacctttactgcatgttgacgctgatttaggcaatagcttcctaaaaatcatgtataaagttagttagttagacatgaaatctcttccccaatgttgatacctgcccacaaaata

SEQ ID NO: 380721 - DNA, 2357 bp, Homo sapiens
accagggcacttccggcggcgctctccgcgccttatcgccaaagctgcggctctggacgcccagccgcggcgtatcccgatcacttccgggtagtgctccacgggcacgagccgcgattgggctaccgtagatggggtacttccggtgtgcaggtgctgggtccttcggcaggaggaggaagatggagcccagcaccgcggcccgggcttgggccctcttttggttgctgctgcccttgcttggcgcggtttgcgccagcggaccccgcaccttagtgctgctggacaacctcaacgtgcgggagactcattcgcttttcttccggagcctgaaggaccggggctttgagctcacattcaagaccgctgatgaccccagcctgtctctcataaagtatggggaattcctctatgacaatctcatcattttctccccttcggtagaagattttggaggcaacatcaacgtggagaccatcagtgcctttattgacggtggaggcagtgtgctggtagctgccagctccgacattggtgaccctcttcgagagctgggcagtgagtgcgggattgagtttgacgaggagaaaacggctgtcattgaccatcacaactatgacatctcagaccttggccagcatacgctcatcgtggctgacactgagaacctgctgaaggccccaaccatcgttgggaaatcatctctaaatcccatcctctttcgaggtgttgggatggtggccgatcctgataaccctttggtgctggacatcctgacgggctcttccacctcttactccttcttcccggacaagcctatcacccagtatccacatgcggtggggaagaacaccctcctcattgctgggctccaggccaggaacaatgcccgcgtcatcttcagcggctccctcgacttcttcagcgactccttcttcaactcagcagtgcagaaggcggcgcccggctcccagaggtattcccagacaggcaactatgaactagctgtggccctctcccgctgggtgttcaaggaggagggtgtcctccgtgtggggcctgtgtcccatcatcgggtgggcgagacagccccacccaatgcctacactgtcactgacctagtggagtatagcatcgtgatccagcagctctcaaatggcaaatgggtcccctttgatggcgatgacattcagctggagtttgtccgcattgatccttttgtgaggaccttcctgaagaagaaaggtggcaaatacagtgttcagttcaagttgcccgacgtgtatggtgtattccagtttaaagtggattacaaccggctaggctacacacacctgtactcttccactcaggtatccgtgcggccactccagcacacgcagtatgagcgcttcatcccctcggcctacccctactacgccagcgccttctccatgatgctggggctcttcatcttcagcatcgtcttcttgcacatgaaggagaaggagaagtccgactgaggggctagagccctctccgcacagcgtggagacggggcagggaggggggttattaggattggtggttttgttttgctttgtttaaagccgtgggaaaatggcacaactttacctctgtgggagatgcaacactgagagccaaggggtgggagttgggataatttttatataaaagaagtttttccactttgaattgctaaaagtggcatttttcctatgtgcagtcactcctctcatttctaaaatagggacgtggccaggcacggtggctcatgcctgtagtcccagctactcgggaggctgaggcaggagaaaggcatgaatccaagaggcagagcttgcagtgagctgagatcacgccattgcactccagcctgggcaacagtgttaagactctgtctcaaatataaataaataaataaataaataaaaataaagcgagatgttgccctcaaacttcacctggccccggtcctggtttgctaatggctgtgggtgggggttactgtgggtgatgactgactggatacaaaatcctaagtaagtggcttcatgaaattttgcctaggactggactgtctttcttttaactgtgaaatgatgatggttctccctaacgtctcctcaaaggatacaagaaagttgttgttgctagtagaccgaggggtgggaattactgaaatggaaaatctagatgacagtgctggggaagagaaaactagaacagctcagttgaagacaacctttactgcatgttgacgctgatttaggcaatagcttcctaaaaatcatgtataaagttagttagttagacatgaaatctcttccccaatgttgatacctgcccacaaaata

SEQ ID NO: 380722 - DNA, 1808 bp, Homo sapiens
accagggcacttccggcggcgctctccgcgccttatcgccaaagctgcggctctggacgcccagccgcggcgtatcccgatcacttccgggtagtgctccacgggcacgagccgcgattgggctaccgtagatggggtacttccggtgtgcaggtgctgggtccttcggcaggaggaggaagatggagcccagcaccgcggcccgggcttgggccctcttttggttgctgctgcccttgcttggcgcggtttgcgccagcggaccccgcaccttagtgctgctggacaacctcaacgtgcgggagactcattcgcttttcttccggagcctgaaggaccggggctttgagctcacattcaagaccgctgatgaccccagcctgtctctcataaagtatggggaattcctctatgacaatctcatcattttctccccttcggtagaagattttggaggcaacatcaacgtggagaccatcagtgcctttattgacggtggaggcagtgtgctggtagctgccagctccgacattggtgaccctcttcgagagctgggcagtgagtgcgggattgagtttgacgaggagaaaacggctgtcattgaccatcacaactatgacatctcagaccttggccagcatacgctcatcgtggctgacactgagaacctgctgaaggccccaaccatcgttgggaaatcatctctaaatcccatcctctttcgaggtgttgggatggtggccgatcctgataaccctttggtgctggacatcctgacgggctcttccacctcttactccttcttcccggacaagcctatcacccagtatccacatgcggtggggaagaacaccctcctcattgctgggctccaggccaggaacaatgcccgcgtcatcttcagcggctccctcgacttcttcagcgactccttcttcaactcagcagtgcagaaggcggcgcccggctcccagaggtattcccagacaggcaactatgaactagctgtggccctctcccgctgggtgttcaaggaggagggtgtcctccgtgtggggcctgtgtcccatcatcgggtgggcgagacagccccacccaatgcctacactgtcactgacctagtggagtatagcatcgtgatccagcagctctcaaatggcaaatgggtcccctttgatggcgatgacattcagctggagtttgtccgcattgatccttttgtgaggaccttcctgaagaagaaaggtggcaaatacagtgttcagttcaagttgcccgacgtgtatggtgtattccagtttaaagtggattacaaccggctaggctacacacacctgtactcttccactcaggtatccgtgcggccactccagcacacgcagtatgagcgcttcatcccctcggcctacccctactacgccagcgccttctccatgatgctggggctcttcatcttcagcatcgtcttcttgcacatgaaggagaaggagaagtccgactgaggggctagagccctctccgcacagcgtggagacggggcagggaggggggttattaggattggtggttttgttttgctttgtttaaagccgtgggaaaatggcacaactttacctctgtgggagatgcaacactgagagccaaggggtgggagttgggataatttttatataaaagaagtttttccactttgaattgcgacgttaggtcaagggtgtagccatgaggtggaagaaatgggtaattttacgcaagaaaattcgatagcctttagaaagtgagggtcaaagtgggacaagggggaataa

SEQ ID NO: 380723 - DNA, 1679 bp, Homo sapiens
  misc_feature (1657)..(1657): n is a, c, g, or t
accagggcacttccggcggcgctctccgcgccttatcgccaaagctgcggctctggacgcccagccgcggcgtatcccgatcacttccgggtagtgctccacgggcacgagccgcgattgggctaccgtagatggggtacttccggtgtgcaggtgctgggtccttcggcaggaggaggaagatggagcccagcaccgcggcccgggcttgggccctcttttggttgctgctgcccttgcttggcgcggtttgcgccagcggaccccgcaccttagtgctgctggacaacctcaacgtgcgggagactcattcgcttttcttccggagcctgaaggaccggggctttgagctcacattcaagaccgctgatgaccccagcctgtctctcataaagtatggggaattcctctatgacaatctcatcattttctccccttcggtagaagattttggaggcaacatcaacgtggagaccatcagtgcctttattgacggtggaggcagtgtgctggtagctgccagctccgacattggtgaccctcttcgagagctgggcagtgagtgcgggattgagtttgacgaggagaaaacggctgtcattgaccatcacaactatgacatctcagaccttggccagcatacgctcatcgtggctgacactgagaacctgctgaaggccccaaccatcgttgggaaatcatctctaaatcccatcctctttcgaggtgttgggatggtggccgatcctgataaccctttggtgctggacatcctgacgggctcttccacctcttactccttcttcccggacaagcctatcacccagtatccacatgcggtggggaagaacaccctcctcattgctgggctccaggccaggaacaatgcccgcgtcatcttcagcggctccctcgacttcttcagcgactccttcttcaactcagcagtgcagaaggcggcgcccggctcccagaggtattcccagacaggcaactatgaactagctgtggccctctcccgctgggtgttcaaggaggagggtgtcctccgtgtggggcctgtgtcccatcatcgggtgggcgagacagccccacccaatgcctacactgtcactgacctagtggagtatagcatcgtgatccagcagctctcaaatggcaaatgggtcccctttgatggcgatgacattcagctggagtttgtccgcattgatccttttgtgaggaccttcctgaagaagaaaggtggcaaatacagtgttcagttcaagttgcccgacgtgtatggtgtattccagtttaaagtggattacaaccggctaggctacacacacctgtactcttccactcaggtatccgtgcggccactccagcacacgcagtatgagcgcttcatcccctcggcctacccctactacgccagcgccttctccatgatgctggggctcttcatcttcagcatcgtcttcttgcacatgaaggagaaggagaagtccgactgaggggctagagccctctccgcacagcgtggagacggggcagggaggggggttattaggattggtggttttgttttgctttgtttaaagccgtgggaaaatggcacaactttacctctgtgggagatgcaacactgagagccaacgccatggagtcncatacacactctcgaggaccga

SEQ ID NO: 380724 - DNA, 1909 bp, Homo sapiens
accagggcacttccggcggcgctctccgcgccttatcgccaaagctgcggctctggacgcccagccgcggcgtatcccgatcacttccgggtagtgctccacgggcacgagccgcgattgggctaccgtagatggggtacttccggtgtgcaggtgctgggtccttcggcaggaggaggaagatggagcccagcaccgcggcccgggcttgggccctcttttggttgctgctgcccttgcttggcgcggtttgcgccagcggaccccgcaccttagtgctgctggacaacctcaacgtgcgggagactcattcgcttttcttccggagcctgaaggaccggggctttgagctcacattcaagaccgctgatgaccccagcctgtctctcataaagtatggggaattcctctatgacaatctcatcattttctccccttcggtagaagattttggaggcaacatcaacgtggagaccatcagtgcctttattgacggtggaggcagtgtgctggtagctgccagctccgacattggtgaccctcttcgagagctgggcagtgagtgcgggattgagtttgacgaggagaaaacggctgtcattgaccatcacaactatgacatctcagaccttggccagcatacgctcatcgtggctgacactgagaacctgctgaaggccccaaccatcgttgggaaatcatctctaaatcccatcctctttcgaggtgttgggatggtggccgatcctgataaccctttggtgctggacatcctgacgggctcttccacctcttactccttcttcccggacaagcctatcacccagtatccacatgcggtggggaagaacaccctcctcattgctgggctccaggccaggaacaatgcccgcgtcatcttcagcggctccctcgacttcttcagcgactccttcttcaactcagcagtgcagaaggcggcgcccggctcccagaggtattcccagacaggcaactatgaactagctgtggccctctcccgctgggtgttcaaggaggagggtgtcctccgtgtggggcctgtgtcccatcatcgggtgggcgagacagccccacccaatgcctacactgtcactgacctagtggagtatagcatcgtgatccagcagctctcaaatggcaaatgggtcccctttgatggcgatgacattcagctggagtttgtccgcattgatccttttgtgaggaccttcctgaagaagaaaggtggcaaatacagtgttcagttcaagttgcccgacgtgtatggtgtattccagtttaaagtggattacaaccggctaggctacacacacctgtactcttccactcaggtatccgtgcggccactccagcacacgcagtatgagcgcttcatcccctcctaatactaactacctgactcctacccctcacaatcatggcaagccaacgccacttatccagtgaaccactatcacgaaaaaaatctacctctctatactaatctccctacaaatctccttaattataacattcacagccacagaactaatcatatttatatcttcttcgaaaccaattatccccactgtggcatcatcacccgatgaggcaaccagccagaacgcctgaacgcaggcacatacttcctattctacaccctagtaggtcccttcccctatcatcgcactaatttacactcaagaaaacctaggtcataaacattctactatcagtctcatggcaagaatatcaaatcctgagccaacaattaatatgactagttacacaatagtgtttatagttaaagatactctttaggactccatttatgaatccctaagccatgttgaagccccatagctgggtaatagtattgcgcggaattttaaaataggcggataggata

SEQ ID NO: 380725 - DNA, 1291 bp, Homo sapiens
accagggcacttccggcggcgctctccgcgccttatcgccaaagctgcggctctggacgcccagccgcggcgtatcccgatcacttccgggtagtgctccacgggcacgagccgcgattgggctaccgtagatggggtacttccggtgtgcaggtgctgggtccttcggcaggaggaggaagatggagcccagcaccgcggcccgggcttgggccctcttttggttgctgctgcccttgcttggcgcggtttgcgccagcggaccccgcaccttagtgctgctggacaacctcaacgtgcgggagactcattcgcttttcttccggagcctgaaggaccggggctttgagctcacattcaagaccgctgatgaccccagcctgtctctcataaagtatggggaattcctctatgacaatctcatcattttctccccttcggtagaagattttggaggcaacatcaacgtggagaccatcagtgcctttattgacggtggaggcagtgtgctggtagctgccagctccgacattggtgaccctcttcgagagctgggcagtgagtgcgggattgagtttgacgaggagaaaacggctgtcattgaccatcacaactatgacatctcagaccttggccagcatacgctcatcgtggctgacactgagaacctgctgaaggccccaaccatcgttgggaaatcatctctaaatcccatcctctttcgaggtgttgggatggtggccgatcctgataaccctttggtgctggacatcctgacgggctcttccacctcttactccttcttcccggacaagcctatcacccagtatccacatgcggtggggaagaacaccctcctcattgctgggctccaggccaggaacaatgcccgcgtcatcttcagcggctccctcgacttcttcagcgactccttcttcaactcagcagtgcagaaggcggcgcccggctcccagaggtattcccagacaggcaactatgaactagctgtggccctctcccgctgggtgttcaaggaggagggtgtcctccgtgtggggcctgtgtcccatcatcgggtgggcgagacagccccacccaatgcctacactgtcactgacctagtggagtatagcatcgtgatccagcagctctcaaatggcaaatgggtcccctttgatggcgatgacattcagctggagtttgtccgcattgatccttttgtgaggaccttcctgaagaagaaaggtggcaaatacagtgttcagtccagaatgccccagggatcctctaa

SEQ ID NO: 380726 - DNA, 1490 bp, Homo sapiens
accagggcacttccggcggcgctctccgcgccttatcgccaaagctgcggctctggacgcccagccgcggcgtatcccgatcacttccgggtagtgctccacgggcacgagccgcgattgggctaccgtagatggggtacttccggtgtgcaggtgctgggtccttcggcaggaggaggaagatggagcccagcaccgcggcccgggcttgggccctcttttggttgctgctgcccttgcttggcgcggtttgcgccagcggaccccgcaccttagtgctgctggacaacctcaacgtgcgggagactcattcgcttttcttccggagcctgaaggaccggggctttgagctcacattcaagaccgctgatgaccccagcctgtctctcataaagtatggggaattcctctatgacaatctcatcattttctccccttcggtagaagattttggaggcaacatcaacgtggagaccatcagtgcctttattgacggtggaggcagtgtgctggtagctgccagctccgacattggtgaccctcttcgagagctgggcagtgagtgcgggattgagtttgacgaggagaaaacggctgtcattgaccatcacaactatgacatctcagaccttggccagcatacgctcatcgtggctgacactgagaacctgctgaaggccccaaccatcgttgggaaatcatctctaaatcccatcctctttcgaggtgttgggatggtggccgatcctgataaccctttggtgctggacatcctgacgggctcttccacctcttactccttcttcccggacaagcctatcacccagtatccacatgcggtggggaagaacaccctcctcattgctgggctccaggccaggaacaatgcccgcgtcatcttcagcggctccctcgacttcttcagcgactccttcttcaactcagcagtgcagaaggcggcgcccggctcccagaggtattcccagacaggcaactatgaactagctgtggccctctcccgctgggtgttcaaggaggagggtgtcctccgtgtggggcctgtgtcccatcatcgggtgggcgagacagccccacccaatgcctacactgtcactgacctagtggtaagagatgtttggggtgggagggcccaaagggtttgccaagctgactgagctcagctcagaagcacttattgaacacttctttgctggcctaaagggcataaataaagatgaataagttaatccctacacctaagcatgccaggtgagatgcagagcctggcgtgaaaactgatgtcctaataggagcacttcttttgaagaggtgtgtgtatttgctatggggggcagcagtgggaggggcttcactgattaactctgcccaggaagttggacttaataagagaaataggtcattaggatgaatttgttaggcaagagaaagcgaatatggaagcatgaatacttgaaagtgcctggcacatg

SEQ ID NO: 380727 - DNA, 1516 bp, Homo sapiens
accagggcacttccggcggcgctctccgcgccttatcgccaaagctgcggctctggacgcccagccgcggcgtatcccgatcacttccgggtagtgctccacgggcacgagccgcgattgggctaccgtagatggggtacttccggtgtgcaggtgctgggtccttcggcaggaggaggaagatggagcccagcaccgcggcccgggcttgggccctcttttggttgctgctgcccttgcttggcgcggtttgcgccagcggaccccgcaccttagtgctgctggacaacctcaacgtgcgggagactcattcgcttttcttccggagcctgaaggaccggggctttgagctcacattcaagaccgctgatgaccccagcctgtctctcataaagtatggggaattcctctatgacaatctcatcattttctccccttcggtagaagattttggaggcaacatcaacgtggagaccatcagtgcctttattgacggtggaggcagtgtgctggtagctgccagctccgacattggtgaccctcttcgagagctgggcagtgagtgcgggattgagtttgacgaggagaaaacggctgtcattgaccatcacaactatgacatctcagaccttggccagcatacgctcatcgtggctgacactgagaacctgctgaaggccccaaccatcgttgggaaatcatctctaaatcccatcctctttcgaggtgttgggatggtggccgatcctgataaccctttggtgctggacatcctgacgggctcttccacctcttactccttcttcccggacaagcctatcacccagtatccacatgcggtggggaagaacaccctcctcattgctgggctccaggccaggaacaatgcccgcgtcatcttcagcggctccctcgacttcttcagcgactccttcttcaactcagcagtgcagaaggcggcgcccggctcccagagcgtgggaaaatggcacaactttacctctgtgggagatgcaacactgagagccaaggggtgggagttgggataatttttatataaaagaagtttttccactttgaattgctaaaagtggcatttttcctatgtgcagtcactcctctcatttctaaaatagggacgtggccaggcacggtggctcatgcctgtaatcccagcactttgggaggccgaggcaggcggctcacgaggtcaggagatcgagactatcctggctaacacggtaaaaccctgtctctactaaaagtacaaaaaattagctgggcgtggtggtgggcacctgtagtcccagctactcgggaggctgaggcaggagaaaggcatgaatccaagaggcagagcttgcagtgagctgagatcacgccattgcactccagcctgggcaacagtgttaagactctgtctcaaatataaataaataaataaataaataaataaataaataaataaaaataaagcgagatgttgccctcaaaacacataaaccaaaacgggcgg

SEQ ID NO: 380728 - DNA, 1395 bp, Homo sapiens
aactggcgcgtggaatgcgagtgcctagtgagaccggggctttgagctcacattcaagaccgctgatgaccccagcctgtctctcataaagtatggggaattcctctatgacaatctcatcattttctccccttcggtagaagattttggaggcaacatcaacgtggagaccatcagtgcctttattgacggtggaggcagtgtgctggtagctgccagctccgacattggtgaccctcttcgagagctgggcagtgagtgcgggattgagtttgacgaggagaaaacggctgtcattgaccatcacaactatgacatctcagaccttggccagcatacgctcatcgtggctgacactgagaacctgctgaaggccccaaccatcgttgggaaatcatctctaaatcccatcctctttcgaggtgttgggatggtggccgatcctgataaccctttggtgctggacatcctgacgggctcttccacctcttactccttcttcccggacaagcctatcacccagtatccacatgcggtggggaagaacaccctcctcattgctgggctccaggccaggaacaatgcccgcgtcatcttcagcggctccctcgacttcttcagcgactccttcttcaactcagcagtgcagaaggcggcgcccggctcccagaggtattcccagacaggcaactatgaactagctgtggccctctcccgctgggtgttcaaggaggagggtgtcctccgtgtggggcctgtgtcccatcatcgggtgggcgagacagccccacccaatgcctacactgtcactgacctagtggagtatagcatcgtgatccagcagctctcaaatggcaaatgggtcccctttgatggcgatgacattcagctggagtttgtccgcattgatccttttgtgaggaccttcctgaagaagaaaggtggcaaatacagtgttcagttcaagttgcccgacgtgtatggtgtattccagtttaaagtggattacaaccggctaggctacacacacctgtactcttccactcaggtatccgtgcggccactccagcacacgcagtatgagcgcttcatcccctcggcctacccctactacgccagcgccttctccatgatgctggggctcttcatcttcagcatcgtcttcttgcacatgaaggagaaggagaagtccgactgaggggctagagccctctccgcacagcgtggagacggggcagggaggggggttattaggattggtggttttgttttgctttgtttaaagccgtgggaaaatggcacaactttacctctgtgggagatgcaacactgagagccaaggggtgggagttgggataatttttatataaaagaagtttttccactttgaattgc

SEQ ID NO: 380729 - DNA, 1975 bp, Homo sapiens
accagggcacttccggcggcgctctccgcgccttatcgccaaagctgcggctctggacgcccagccgcggcgtatcccgatcacttccgggtagtgctccacgggcacgagccgcgattgggctaccgtagatggggtacttccggtgtgcaggtgctgggtccttcggcaggaggaggaagatggagcccagcaccgcggcccgggcttgggccctcttttggttgctgctgcccttgcttggcgcggtttgcgccagcggaccccgcaccttagtgctgctggacaacctcaacgtgcgggagactcattcgcttttcttccggagcctgaaggaccggggctttgagctcacattcaagaccgctgatgaccccagcctgtctctcataaagtatggggaattcctctatgacaatctcatcattttctccccttcggtagaagattttggaggcaacatcaacgtggagaccatcagtgcctttattgacggtggaggcagtgtgctggtagctgccagctccgacattggtgaccctcttcgagagctgggcagtgagtgcgggattgagtttgacgaggagaaaacggctgtcattgaccatcacaactatgacatctcagaccttggccagcatacgctcatcgtggctgacactgagaacctgctgaaggccccaaccatcgttgggaaatcatctctaaatcccatcctctttcgaggtgttgggatggtggccgatcctgataaccctttggtgctggacatcctgacgggctcttccacctcttactccttcttcccggacaagcctatcacccagtatccacatgcggtggggaagaacaccctccctctcccgctgggtgttcaaggaggagggtgtcctccgtgtggggcctgtgtcccatcatcgggtgggcgagacagccccacccaatgcctacactgtcactgacctagtggagtatagcatcgtgatccagcagctctcaaatggcaaatgggtcccctttgatggcgatgacattcagctggagtttgtccgcattgatccttttgtgaggaccttcctgaagaagaaaggtggcaaatacagtgttcagttcaagttgcccgacgtgtatggtgtattccagtttaaagtggattacaaccggctaggctacacacacctgtactcttccactcaggtatccgtgcggccactccagcacacgcagtatgagcgcttcatcccctcggcctacccctactacgccagcgccttctccatgatgctggggctcttcatcttcagcatcgtcttcttgcacatgaaggagaaggagaagtccgactgaggggctagagccctctccgcacagcgtggagacggggcagggaggggggttattaggattggtggttttgttttgctttgtttaaagccgtgggaaaatggcacaactttacctctgtgggagatgcaacactgagagccaaggggtgggagttgggataatttttatataaaagaagtttttccactttgaattgctaaaagtggcatttttcctatgtgcagtcactcctctcatttctaaaatagggacgtggccaggcacggtggctcatgcctgtaatcccagcactttgggaggccgaggcaggcggctcacgaggtcaggagatcgagactatcctggctaacacggtaaaaccctgtctctactaaaagtacaaaaaattagctgggcgtggtggtgggcacctgtagtcccagctactcgggaggctgaggcaggagaaaggcatgaatccaagaggcagagcttgcagtgagctgagatcacgccattgcactccagcctgggcaacagtgttaagactctgtctcaaatataaataaataaataaataaataaataaataaataaataaaaataaagcgagatgttgccctcaaaacacataaaccaaaacgggcgg

SEQ ID NO: 380730 - DNA, 1315 bp, Homo sapiens
tactggtagcctccggttaacagctcccgctgcatccgttctggcttaccacatgctctcgttcactactgcatcagtaccactcttccacgtcaactaaacatcctgctcgtaacatcggcgctcctctcaagacgaccagtaagacatagctcctcgagactgggcgtcggagtgcgacgtcgagtctgagcgagaaacctgacacggctgtcattgaccatcacaactatgacatctcagaccttggccagcatacgctcatcgtggctgacactgagaacctgctgaaggccccaaccatcgttgggaaatcatctctaaatcccatcctctttcgaggtgttgggatggtggccgatcctgataaccctttggtgctggacatcctgacgggctcttccacctcttactccttcttcccggacaagcctatcacccagtatccacatgcggtggggaagaacaccctcctcattgctgggctccaggccaggaacaatgcccgcgtcatcttcagcggctccctcgacttcttcagcgactccttcttcaactcagcagtgcagaaggcggcgcccggctcccagaggtattcccagacaggcaactatgaactagctgtggccctctcccgctgggtgttcaaggaggagggtgtcctccgtgtggggcctgtgtcccatcatcgggtgggcgagacagccccacccaatgcctacactgtcactgacctagtggagtatagcatcgtgatccagcagctctcaaatggcaaatgggtcccctttgatggcgatgacattcagctggagtttgtccgcattgatccttttgtgaggaccttcctgaagaagaaaggtggcaaatacagtgttcagttcaagttgcccgacgtgtatggtgtattccagtttaaagtggattacaaccggctaggctacacacacctgtactcttccactcaggtatccgtgcggccactccagcacacgcagtatgagcgcttcatcccctcggcctacccctactacgccagcgccttctccatgatgctggggctcttcatcttcagcatcgtcttcttgcacatgaaggagaaggagaagtccgactgaggggctagagccctctccgcacagcgtggagacggggcagggaggggggttattaggattggtggttttgttttgctttgtttaaagccgtgggaaaatggcacaactttacctctgtgggagatgcaacactgagagccaaggggtgggagttgggataatttttatataaaagaagtttttccactttgaattgc

SEQ ID NO: 380731 - DNA, 1516 bp, Homo sapiens
ttagctaaaagtgtcagaggctgagtgtttcaggtgctgtcagattatttcagggctttattgctatattgctggtattggcacttccaattttttaaggtagtagtgacttatctagagatacctaacctccaccgttccttttagaaatttgtgtatttgttgtgcagatgacaagcaaccagccatatcttttcgtttgtttcctgcgttccctttaaccatgagtccctaggtgcccaaggcctacaggcagaacttcgctagggtactgtcatggtggacatgagtggtcctgcccatcaggcaccactggaaaggtggctctggtgcccaagctgctcctgtttccctcctgcagggtattcccagacaggcaactatgaactagctgtggccctctcccgctgggtgttcaaggaggagggtgtcctccgtgtggggcctgtgtcccatcatcgggtgggcgagacagccccacccaatgcctacactgtcactgacctagtggagtatagcatcgtgatccagcagctctcaaatggcaaatgggtcccctttgatggcgatgacattcagctggagtttgtccgcattgatccttttgtgaggaccttcctgaagaagaaaggtggcaaatacagtgttcagttcaagttgcccgacgtgtatggtgtattccagtttaaagtggattacaaccggctaggctacacacacctgtactcttccactcaggtatccgtgcggccactccagcacacgcagtatgagcgcttcatcccctcggcctacccctactacgccagcgccttctccatgatgctggggctcttcatcttcagcatcgtcttcttgcacatgaaggagaaggagaagtccgactgaggggctagagccctctccgcacagcgtggagacggggcagggaggggggttattaggattggtggttttgttttgctttgtttaaagccgtgggaaaatggcacaactttacctctgtgggagatgcaacactgagagccaaggggtgggagttgggataatttttatataaaagaagtttttccactttgaattgctaaaagtggcatttttcctatgtgcagtcactcctctcatttctaaaatagggacgtggccaggcacggtggctcatgcctgtaatcccagcactttgggaggccgaggcaggcggctcacgaggtcaggagatcgagactatcctggctaacacggtaaaaccctgtctctactaaaagtacaaaaaattagctgggcgtggtggtgggcacctgtagtcccagctactcgggaggctgaggcaggagaaaggcatgaatccaagaggcagagcttgcagtgagctgagatcacgccattgcactccagcctgggcaacagtgttaagactctgtctcaaatataaataaataaataaataaataaataaataaataaataaaaataaagcgagatgttgccctcaaaacacataaaccaaaacgggcgg

SEQ ID NO: 380732 - DNA, 1335 bp, Homo sapiens
accagggcacttccggcggcgctctccgcgccttatcgccaaagctgcggctctggacgcccagccgcggcgtatcccgatcacttccgggtagtgctccacgggcacgagccgcgattgggctaccgtagatggggtacttccggtgtgcaggtgctgggtccttcggcaggaggaggaagatggagcccagcaccgcggcccgggcttgggccctcttttggttgctgctgcccttgcttggcgcggtttgcgccagcggaccccgcaccttagtgctgctggacaacctcaacgtgcgggagactcattcgcttttcttccggagcctgaaggaccggggctttgagctcacattcaagaccgctgatgaccccagcctgtctctcataaagtatggggaattcctctatgacaatctcatcattttctccccttcggtagaagattttggaggcaacatcaacgtggagaccatcagtgcctttattgacggtggaggcagtgtgctggtagctgccagctccgacattggtgaccctcttcgagagctgggcagtgagtgcgggattgagtttgacgaggagaaaacggctgtcattgaccatcacaactatgacatctcagaccttggccagcatacgctcatcgtggctgacactgagaacctgctgaaggccccaaccatcgttgggaaatcatctctaaatcccatcctctttcgaggtgttgggatggtggccgatcctgataaccctttggtgctggacatcctgacgggctcttccacctcttactccttcttcccggacaagcctatcacccagtatccacatgcggtggggaagaacaccctccctctcccgctgggtgttcaaggaggagggtgtcctccgtgtggggcctgtgtcccatcatcgggtgggcgagacagccccacccaatgcctacactgtcactgacctagtggtaagagatgtttggggtgggagggcccaaagggtttgccaagctgactgagctcagctcagaagcacttattgaacacttctttgctggcctaaagggcataaataaagatgaataagttaatccctacacctaagcatgccaggtgagatgcagagcctggcgtgaaaactgatgtcctaataggagcacttcttttgaagaggtgtgtgtatttgctatggggggcagcagtgggaggggcttcactgattaactctgcccaggaagttggacttaataagagaaataggtcattaggatgaatttgttaggcaagagaaagcgaatatggaagcatgaatacttgaaagtgcctggcacatg

SEQ ID NO: 380733 - DNA, 926 bp, Homo sapiens
accagggcacttccggcggcgctctccgcgccttatcgccaaagctgcggctctggacgcccagccgcggcgtatcccgatcacttccgggtagtgctccacgggcacgagccgcgattgggctaccgtagatggggtacttccggtgtgcaggtgctgggtccttcggcaggaggaggaagatggagcccagcaccgcggcccgggcttgggccctcttttggttgctgctgcccttgcttggcgcggtttgcgccagcggaccccgcaccttagtgctgctggacaacctcaacgtgcgggagactcattcgcttttcttccggagcctgaaggaccggggctttgagctcacattcaagaccgctgatgaccccagcctgtctctcataaagtatggggaattcctctatgacaatctcatcattttctccccttcggtagaagattttggaggcaacatcaacgtggagaccatcagtgcctttattgacggtggaggcagtgtgctggtagctgccagctccgacattggtgaccctcttcgagagctgggcagtgagtgcgggattgagtttgacgaggagaaaacggctgtcattgaccatcacaactatgacatctcagaccttggccagcatacgctcatcgtggctgacactgagaacctgctgaaggccccaaccatcgttgggaaatcatctctaaatcccatcctctttcgaggtgttggctagagccctctccgcacagcgtggagacggggcagggaggggggttattaggattggtggttttgttttgctttgtttaaagccgtgggaaaatggcacaactttacctctgtgggagatgcaacactgagagccaaggggtgggagttgggataatttttatataaaagaagtttttccactttgaattgc

SEQ ID NO: 380734 - DNA, 89 bp, Homo sapiens
attgaactagggaagcagaaaaaaaaaattttccactggttaattattttgataatttggttctaaaaacattaccagtatatatattg

SEQ ID NO: 380735 - DNA, 325 bp, Homo sapiens
actatcttctcaaactgccacaacatcgagaggaaccaaagcagcttttccagtgacaatggccgtgaacaaaacttttatgacttaaaaagaatatagcaggatagcaaatatgaaaattgtaggaggggcaggagagtgactaactcagctaccatgctgcctttctttcctatgcaatttaaaagagttgttacactcacagcaaagagactattacgagccattggatggtattctgtcctaaactgagatgaccaagcaggcttgctggactaagacagtctcagtcagccaccagcacagcaaggccagttactacaag

SEQ ID NO: 380736 - DNA, 3192 bp, Homo sapiens
tgcctctccgctgctggctggaacgctgatctatctagttgctggggagacgcccccagatgcccgggccccactcggacttcagcacacatcccgaaggatggggaaagaaagaggcccccacgagcgggactcgcagtggccaaggaggggtgagaggcggacagggatcagctggcccctgcggcctggttgcacctgcatggtgactagctgccgggctgcgccccggggcgcggcgaggaggcggggtctggcagtgcgttgggtgggggaggagcttctgggtgatgtaaggccgggaatgggagtggcctctcctcgactcgctgctaggaagggggcgggactctcggtgaccagacgccggggagggggcaggcgttcattgataaaacgctgggctcccctgggcgccagcgcagcgtagcaaatccaggcagcgccacgcgcggccggggccgggcggaaccgagaagccgggaccgcgctgcgacgcgccggccgcatggagcctgccgccggtttcctgtctccgcgccccttccagcgtgcggccgccgcgcccgctcccccggccgggcccgggccgcctccgagtgccttgcgcggacctgagctggagatgctggccgggctaccgacgtcagaccccgggcgcctcatcacggacccgcgcagcggccgcacctacctcaaaggccgcttgttgggcaaggggggcttcgcccgctgctacgaggccactgacacagagactggcagcgcctacgctgtcaaagtcatcccgcagagccgcgtcgccaagccgcatcagcgcgagaagatcctaaatgagattgagctgcaccgagacctgcagcaccgccacatcgtgcgtttttcgcaccactttgaggacgctgacaacatctacattttcttggagctctgcagccgaaagtccctggcccacatctggaaggcccggcacaccctgttggagccagaagtgcgctactacctgcggcagatcctttctggcctcaagtacttgcaccagcgcggcatcttgcaccgggacctcaagttgggaaattttttcatcactgagaacatggaactgaaggtgggggattttgggctggcagcccggttggagcctccggagcagaggaagaagaccatctgtggcacccccaactatgtggctccagaagtgctgctgagacagggccacggccctgaggcggatgtatggtcactgggctgtgtcatgtacacgctgctctgcgggagccctccctttgagacggctgacctgaaggagacgtaccgctgcatcaagcaggttcactacacgctgcctgccagcctctcactgcctgcccggcagctcctggccgccatccttcgggcctcaccccgagaccgcccctctattgaccagatcctgcgccatgacttctttaccaagggctacacccccgatcgactccctatcagcagctgcgtgacagtcccagacctgacaccccccaacccagctaggagtctgtttgccaaagttaccaagagcctctttggcagaaagaagaagagtaagaatcatgcccaggagagggatgaggtctccggtttggtgagcggcctcatgcgcacatccgttggccatcaggatgccaggccagaggctccagcagcttctggcccagcccctgtcagcctggtagagacagcacctgaagacagctcaccccgtgggacactggcaagcagtggagatggatttgaagaaggtctgactgtggccacagtagtggagtcagccctttgtgctctgagaaattgtatagccttcatgcccccagcggaacagaacccggcccccctggcccagccagagcctctggtgtgggtcagcaagtgggttgactactccaataagttcggctttgggtatcaactgtccagccgccgtgtggctgtgctcttcaacgatggcacacatatggccctgtcggccaacagaaagactgtgcactacaatcccaccagcacaaagcacttctccttctccgtgggtgctgtgccccgggccctgcagcctcagctgggtatcctgcggtacttcgcctcctacatggagcagcacctcatgaagggtggagatctgcccagtgtggaagaggtagaggtacctgctccgcccttgctgctgcagtgggtcaagacggatcaggctctcctcatgctgtttagtgatggcactgtccaggtgaacttctacggggaccacaccaagctgattctcagtggctgggagcccctccttgtgacttttgtggcccgaaatcgtagtgcttgtacttacctcgcttcccaccttcggcagctgggctgctctccagacctgcggcagcgactccgctatgctctgcgcctgctccgggaccgcagcccagcctaggacccaagccctgaggcctgaggcctgtgcctgtcaggctctggcccttgcctttgtggccttcccccttcctttggtgcctcactgggggctttgggccgaatcccccagggaatcagggaccagctttactggagttgggggcggcttgtcttcgctggctcctaccccatctccaagataagcctgagccttagctcccagctagggggcgttatttatggaccacttttatttattgtcagacacttatttattgggatgtgagccccaggggggcctcctcctaggataataaacaattttgcagaaaaaaaaaacaacaaaacaaaaaaacaaaacagaagcacacaaccaccacacaacacgaggggccccaaccaagagaccaacccacaaccgagcccacaaacagagggacgcgacacaccgcacacgacacaggcaagagcgggcgcacccacaacggaccgcccgccacgggcagaggcagcgagggacgcacagatacacagaggaggaggcgagagaaaagggaggagaggagagaacaacagaggagggcgaacacgacgcccgcggagacaagcgagggcggccacacccaccaagaggagaccggacaacccgggagaaaacaaccgcgacagcgacaggagggcgccagagaggcagacacagagcgcagcgcggcacagagcgccgcgggagccgccggacgaccagtacaacaggaacagcaa

SEQ ID NO: 380737 - DNA, 2875 bp, Homo sapiens
tgcctctccgctgctggctggaacgctgatctatctagttgctggggagacgcccccagatgcccgggccccactcggacttcagcacacatcccgaaggatggggaaagaaagaggcccccacgagcgggactcgcagtggccaaggaggggtgagaggcggacagggatcagctggcccctgcggcctggttgcacctgcatggtgactagctgccgggctgcgccccggggcgcggcgaggaggcggggtctggcagtgcgttgggtgggggaggagcttctgggtgatgtaaggccgggaatgggagtggcctctcctcgactcgctgctaggaagggggcgggactctcggtgaccagacgccggggagggggcaggcgttcattgataaaacgctgggctcccctgggcgccagcgcagcgtagcaaatccaggcagcgccacgcgcggccggggccgggcggaaccgagaagccgggaccgcgctgcgacgcgccggccgcatggagcctgccgccggtttcctgtctccgcgccccttccagcgtgcggccgccgcgcccgctcccccggccgggcccgggccgcctccgagtgccttgcgcggacctgagctggagatgctggccgggctaccgacgtcagaccccgggcgcctcatcacggacccgcgcagcggccgcacctacctcaaaggccgcttgttgggcaaggggggcttcgcccgctgctacgaggccactgacacagagactggcagcgcctacgctgtcaaagtcatcccgcagagccgcgtcgccaagccgcatcagcgcgagaagatcctaaatgagattgagctgcaccgagacctgcagcaccgccacatcgtgcgtttttcgcaccactttgaggacgctgacaacatctacattttcttggagctctgcagccgaaagtccctggcccacatctggaaggcccggcacaccctgttggagccagaagtgcgctactacctgcggcagatcctttctggcctcaagtacttgcaccagcgcggcatcttgcaccgggacctcaagttgggaaattttttcatcactgagaacatggaactgaaggtgggggattttgggctggcagcccggttggagcctccggagcagaggaagaagaccatctgtggcacccccaactatgtggctccagaagtgctgctgagacagggccacggccctgaggcggatgtatggtcactgggctgtgtcatgtacacgctgctctgcgggagccctccctttgagacggctgacctgaaggagacgtaccgctgcatcaagcaggttcactacacgctgcctgccagcctctcactgcctgcccggcagctcctggccgccatccttcgggcctcaccccgagaccgcccctctattgaccagatcctgcgccatgacttctttaccaaggtctgtggctccccagacctctaagtccatctgtgtattcccagggattgaaagggggcaggtgacaggacccctggagcctctcttctctgttcacatggttcccctccctagggctacacccccgatcgactccctatcagcagctgcgtgacagtcccagacctgacaccccccaacccagctaggagtctgtttgccaaagttaccaagagcctctttggcagaaagaagaagagtaagaatcatgcccaggagagggatgaggtctccggtttggtgagcggcctcatgcgcacatccgttggccatcaggatgccaggccagaggctccagcagcttctggcccagcccctgtcagcctggtagagacagcacctgaagacagctcaccccgtgggacactggcaagcagtggagatggatttgaagaaggtctgactgtggccacagtagtggagtcagccctttgtgctctgagaaattgtatagccttcatgcccccagcggaacagaacccggcccccctggcccagccagagcctctggtgtgggtcagcaagtgggttgactactccaataagttcggctttgggtatcaactgtccagccgccgtgtggctgtgctcttcaacgatggcacacatatggccctgtcggccaacagaaagactgtgcactacaatcccaccagcacaaagcacttctccttctccgtgggtgctgtgccccgggccctgcagcctcagctgggtatcctgcggtacttcgcctcctacatggagcagcacctcatgaagggtggagatctgcccagtgtggaagaggtagaggtacctgctccgcccttgctgctgcagtgggtcaagacggatcaggctctcctcatgctgtttagtgatggcactgtccaggtgaacttctacggggaccacaccaagctgattctcagtggctgggagcccctccttgtgacttttgtggcccgaaatcgtagtgcttgtacttacctcgcttcccaccttcggcagctgggctgctctccagacctgcggcagcgactccgctatgctctgcgcctgctccgggaccgcagcccagcctaggacccaagccctgaggcctgaggcctgtgcctgtcaggctctggcccttgcctttgtggccttcccccttcctttggtgcctcactgggggctttgggccgaatcccccagggaatcagggaccagctttactggagttgggggcggcttgtcttcgctggctcctaccccatctccaagataagcctgagccttagctcccagctagggggcgttatttatggaccacttttatttattgtcagacacttatttattgggatgtgagccccaggggggcctcctcctaggataataaacaattttgcagaa

SEQ ID NO: 380738 - DNA, 2631 bp, Homo sapiens
tgcctctccgctgctggctggaacgctgatctatctagttgctggggagacgcccccagatgcccgggccccactcggacttcagcacacatcccgaaggatggggaaagaaagaggcccccacgagcgggactcgcagtggccaaggaggggtgagaggcggacagggatcagctggcccctgcggcctggttgcacctgcatggtgactagctgccgggctgcgccccggggcgcggcgaggaggcggggtctggcagtgcgttgggtgggggaggagcttctgggtgatgtaaggccgggaatgggagtggcctctcctcgactcgctgctaggaagggggcgggactctcggtgaccagacgccggggagggggcaggcgttcattgataaaacgctgggctcccctgggcgccagcgcagcgtagcaaatccaggcagcgccacgcgcggccggggccgggcggaaccgagaagccgggaccgcgctgcgacgcgccggccgcatggagcctgccgccggtttcctgtctccgcgccccttccagcgtgcggccgccgcgcccgctcccccggccgggcccgggccgcctccgagtgccttgcgcggacctgagctggagatgctggccgggctaccgacgtcagaccccgggcgcctcatcacggacccgcgcagcggccgcacctacctcaaaggccgcttgttgggcaaggggggcttcgcccgctgctacgaggccactgacacagagactggcagcgcctacgctgtcaaagtcatcccgcagagccgcgtcgccaagccgcatcagcgcgagaagatcctaaatgagattgagctgcaccgagacctgcagcaccgccacatcgtgcgtttttcgcaccactttgaggacgctgacaacatctacattttcttggagctctgcagccgaaagtccctggcccacatctggaaggcccggcacaccctgttggagccagaagtgcgctactacctgcggcagatcctttctggcctcaagtacttgcaccagcgcggcatcttgcaccgggacctcaagttgggaaattttttcatcactgagaacatggaactgaaggtgggggattttgggctggcagcccggttggagcctccggagcagaggaagaagaccatctgtggcacccccaactatgtggctccagaagtgctgctgagacagggccacggccctgaggcggatgtatggtcactgggctgtgtcatgtacacgctgctctgcgggagccctccctttgagacggctgacctgaaggagacgtaccgctgcatcaagcaggttcactacacgctgcctgccagcctctcactgcctgcccggcagctcctggccgccatccttcgggcctcaccccgagaccgcccctctattgaccagatcctgcgccatgacttctttaccaagggctacacccccgatcgactccctatcagcagctgcgtgacagtcccagacctgacaccccccaacccagctaggagtctgtttgccaaagttaccaagagcctctttggcagaaagaagaagagtaagaatcatgcccaggagagggatgaggtctccggtttggtgagcggcctcatgcgcacatccgttggccatcaggatgccaggccagaggctccagcagcttctggcccagcccctgtcagcctggtagagacagcacctgaagacagctcaccccgtgggacactggcaagcagtggagatggatttgaagaaggtctgactgtggccacagtagtggagtcagccctttgtgctctgagaaattgtatagccttcatgcccccagcggaacagaacccggcccccctggcccagccagagcctctggtgtgggtcagcaagtgggttgactactccaataagttcggctttgggtatcaactgtccagccgccgtgtggctgtgctcttcaacgatggcacacatatggccctgtcggccaacagaaaggtggagatctgcccagtgtggaagaggtagaggtacctgctccgcccttgctgctgcagtgggtcaagacggatcaggctctcctcatgctgtttagtgatggcactgtccaggtgaacttctacggggaccacaccaagctgattctcagtggctgggagcccctccttgtgacttttgtggcccgaaatcgtagtgcttgtacttacctcgcttcccaccttcggcagctgggctgctctccagacctgcggcagcgactccgctatgctctgcgcctgctccgggaccgcagcccagcctaggacccaagccctgaggcctgaggcctgtgcctgtcaggctctggcccttgcctttgtggccttcccccttcctttggtgcctcactgggggctttgggccgaatcccccagggaatcagggaccagctttactggagttgggggcggcttgtcttcgctggctcctaccccatctccaagataagcctgagccttagctcccagctagggggcgttatttatggaccacttttatttattgtcagacacttatttattgggatgtgagccccaggggggcctcctcctaggataataaacaattttgcagaa

SEQ ID NO: 380739 - DNA, 3148 bp, Homo sapiens
tgcctctccgctgctggctggaacgctgatctatctagttgctggggagacgcccccagatgcccgggccccactcggacttcagcacacatcccgaaggatggggaaagaaagaggcccccacgagcgggactcgcagtggccaaggaggggtgagaggcggacagggatcagctggcccctgcggcctggttgcacctgcatggtgactagctgccgggctgcgccccggggcgcggcgaggaggcggggtctggcagtgcgttgggtgggggaggagcttctgggtgatgtaaggccgggaatgggagtggcctctcctcgactcgctgctaggaagggggcgggactctcggtgaccagacgccggggagggggcaggcgttcattgataaaacgctgggctcccctgggcgccagcgcagcgtagcaaatccaggcagcgccacgcgcggccggggccgggcggaaccgagaagccgggaccgcgctgcgacgcgccggccgcatggagcctgccgccggtttcctgtctccgcgccccttccagcgtgcggccgccgcgcccgctcccccggccgggcccgggccgcctccgagtgccttgcgcggacctgagctggagatgctggccgggctaccgacgtcagaccccgggcgcctcatcacggacccgcgcagcggccgcacctacctcaaaggccgcttgttgggcaaggggggcttcgcccgctgctacgaggccactgacacagagactggcagcgcctacgctgtcaaagtcatcccgcagagccgcgtcgccaagccgcatcagcgcgagaagatcctaaatgagattgagctgcaccgagacctgcagcaccgccacatcgtgcgtttttcgcaccactttgaggacgctgacaacatctacattttcttggagctctgcagccgaaagtccctggcccacatctggaaggcccggcacaccctgttggagccagaagtgcgctactacctgcggcagatcctttctggcctcaagtacttgcaccagcgcggcatcttgcaccgggacctcaagttgggaaattttttcatcactgagaacatggaactgaaggtgggggattttgggctggcagcccggttggagcctccggagcagaggaagaagaccatctgtggcacccccaactatgtggctccagaagtgctgctgagacagggccacggccctgaggcggatgtatggtcactgggctgtgtcatgtacacgctgctctgcgggagccctccctttgagacggctgacctgaaggagacgtaccgctgcatcaagcaggttcactacacgctgcctgccagcctctcactgcctgcccggcagctcctggccgccatccttcgggcctcaccccgagaccgcccctctattgaccagatcctgcgccatgacttctttaccaagggctacacccccgatcgactccctatcagcagctgcgtgacagtcccagacctgacaccccccaacccagctaggagtctgtttgccaaagttaccaagagcctctttggcagaaagaagaagagtaagaatcatgcccaggagagggatgaggtctccggtttggtgagcggcctcatgcgcacatccgttggccatcaggatgccaggccagaggtgaggcgctcaggtggacactgttcccctgactcacccccaccctagcagctgagggaagccggggataaaagaggctgctgaagcatccagcctcgtggtggcctaattggctgtgtgtcaccagcctggcggggctgacctggggtgccctgggagccagggcagggccaggccatggactcaagggtttggattttggggcctgtgtcactccctttccctgcccaaccctccaggctccagcagcttctggcccagcccctgtcagcctggtagagacagcacctgaagacagctcaccccgtgggacactggcaagcagtggagatggatttgaagaaggtctgactgtggccacagtagtggagtcagccctttgtgctctgagaaattgtatagccttcatgcccccagcggaacagaacccggcccccctggcccagccagagcctctggtgtgggtcagcaagtgggttgactactccaataagttcggctttgggtatcaactgtccagccgccgtgtggctgtgctcttcaacgatggcacacatatggccctgtcggccaacagaaagtaagtgctgttatggggtgccttgtattcaggccactaatccagcagggccgcaccctcgtgagtgctcctgggctcaggggtctgggtttctcagaggaggggcattggtgcagggctccctctgacctctgcctccccattctaggactgtgcactacaatcccaccagcacaaagcacttctccttctccgtgggtgctgtgccccgggccctgcagcctcagctgggtatcctgcggtacttcgcctcctacatggagcagcacctcatgaagggtggagatctgcccagtgtggaagaggtagaggtacctgctccgcccttgctgctgcagtgggtcaagacggatcaggctctcctcatgctgtttagtgatggcactgtccaggtgaacttctacggggaccacaccaagctgattctcagtggctgggagcccctccttgtgacttttgtggcccgaaatcgtagtgcttgtacttacctcgcttcccaccttcggcagctgggctgctctccagacctgcggcagcgactccgctatgctctgcgcctgctccgggaccgcagcccagcctaggacccaagccctgaggcctgaggcctgtgcctgtcaggctctggcccttgcctttgtggccttcccccttcctttggtgcctcactgggggctttgggccgaatcccccagggaatcagggaccagctttactggagttgggggcggcttgtcttcgctggctcctaccccatctccaagataagcctgagccttagctcccagctagggggcgttatttatggaccacttttatttattgtcagacacttatttattgggatgtgagccccaggggggcctcctcctaggataataaacaattttgcagaa

SEQ ID NO: 380740 - DNA, 747 bp, Homo sapiens
ccatcctgatccctctgattcccccttggtggtggttggggttgctgaaagctagaggataaggcatacactaatggggagggggctgtctcacgctggatcagtgacctgccctgatcctgctcccagggtggagatctgcccagtgtggaagaggtagaggtacctgctccgcccttgctgctgcagtgggtcaagacggatcaggctctcctcatgctgtttagtgatggcactgtccaggtgaacttctacggggaccacaccaagctgattctcagtggctgggagcccctccttgtgacttttgtggcccgaaatcgtagtgcttgtacttacctcgcttcccaccttcggcagctgggctgctctccagacctgcggcagcgactccgctatgctctgcgcctgctccgggaccgcagcccagcctaggacccaagccctgaggcctgaggcctgtgcctgtcaggctctggcccttgcctttgtggccttcccccttcctttggtgcctcactgggggctttgggccgaatcccccagggaatcagggaccagctttactggagttgggggcggcttgtcttcgctggctcctaccccatctccaagataagcctgagccttagctcccagctagggggcgttatttatggaccacttttatttattgtcagacacttatttattgggatgtgagccccaggggggcctcctcctaggataataaacaattttgcagaa

SEQ ID NO: 380741 - DNA, 2761 bp, Homo sapiens
tgcctctccgctgctggctggaacgctgatctatctagttgctggggagacgcccccagatgcccgggccccactcggacttcagcacacatcccgaaggatggggaaagaaagaggcccccacgagcgggactcgcagtggccaaggaggggtgagaggcggacagggatcagctggcccctgcggcctggttgcacctgcatggtgactagctgccgggctgcgccccggggcgcggcgaggaggcggggtctggcagtgcgttgggtgggggaggagcttctgggtgatgtaaggccgggaatgggagtggcctctcctcgactcgctgctaggaagggggcgggactctcggtgaccagacgccggggagggggcaggcgttcattgataaaacgctgggctcccctgggcgccagcgcagcgtagcaaatccaggcagcgccacgcgcggccggggccgggcggaaccgagaagccgggaccgcgctgcgacgcgccggccgcatggagcctgccgccggtttcctgtctccgcgccccttccagcgtgcggccgccgcgcccgctcccccggccgggcccgggccgcctccgagtgccttgcgcggacctgagctggagatgctggccgggctaccgacgtcagaccccgggcgcctcatcacggacccgcgcagcggccgcacctacctcaaaggccgcttgttgggcaaggggggcttcgcccgctgctacgaggccactgacacagagactggcagcgcctacgctgtcaaagtcatcccgcagagccgcgtcgccaagccgcatcagcgcgagaagatcctaaatgagattgagctgcaccgagacctgcagcaccgccacatcgtgcgtttttcgcaccactttgaggacgctgacaacatctacattttcttggagctctgcagccgaaagtccctggcccacatctggaaggcccggcacaccctgttggagccagaagtgcgctactacctgcggcagatcctttctggcctcaagtacttgcaccagcgcggcatcttgcaccgggacctcaagttgggaaattttttcatcactgagaacatggaactgaaggtgggggattttgggctggcagcccggttggagcctccggagcagaggaagaagaccatctgtggcacccccaactatgtggctccagaagtgctgctgagacagggccacggccctgaggcggatgtatggtcactgggctgtgtcatgtacacgctgctctgcgggagccctccctttgagacggctgacctgaaggagacgtaccgctgcatcaagcaggttcactacacgctgcctgccagcctctcactgcctgcccggcagctcctggccgccatccttcgggcctcaccccgagaccgcccctctattgaccagatcctgcgccatgacttctttaccaagggctacacccccgatcgactccctatcagcagctgcgtgacagtcccagacctgacaccccccaacccagctaggagtctgtttgccaaagttaccaagagcctctttggcagaaagaagaagagtaagaatcatgcccaggagagggatgaggtctccggtttggtgagcggcctcatgcgcacatccgttggccatcaggatgccaggccagaggctccagcagcttctggcccagcccctgtcagcctggtagagacagcacctgaagacagctcaccccgtgggacactggcaagcagtggagatggatttgaagaaggtctgactgtggccacagtagtggagtcagccctttgtgctctgagaaattgtatagccttcatgcccccagcggaacagaacccggcccccctggcccagccagagcctctggtgtgggtcagcaagtgggttgactactccaataagttcggctttgggtatcaactgtccagccgccgtgtggctgtgctcttcaacgatggcacacatatggccctgtcggccaacagaaagactgtgcactacaatcccaccagcacaaagcacttctccttctccgtgggtgctgtgccccgggccctgcagcctcagctgggtatcctgcggtacttcgcctcctacatggagcagcacctcatgaagggtggagatctgcccagtgtggaagaggtagaggtacctgctccgcccttgctgctgcagtgggtcaagacggatcaggctctcctcatgctgtttagtgatggcactgtccaggtgaacttctacggggaccacaccaagctgattctcagtggctgggagcccctccttgtgacttttgtggcccgaaatcgtagtgcttgtacttacctcgcttcccaccttcggcagctgggctgctctccagacctgcggcagcgactccgctatgctctgcgcctgctccgggaccgcagcccagcctaggacccaagccctgaggcctgaggcctgtgcctgtcaggctctggcccttgcctttgtggccttcccccttcctttggtgcctcactgggggctttgggccgaatcccccagggaatcagggaccagctttactggagttgggggcggcttgtcttcgctggctcctaccccatctccaagataagcctgagccttagctcccagctagggggcgttatttatggaccacttttatttattgtcagacacttatttattgggatgtgagccccaggggggcctcctcctaggataataaacaattttgcagaa

SEQ ID NO: 380742 - DNA, 2784 bp, Homo sapiens
tgcctctccgctgctggctggaacgctgatctatctagttgctggggagacgcccccagatgcccgggccccactcggacttcagcacacatcccgaaggatggggaaagaaagaggcccccacgagcgggactcgcagtggccaaggaggggtgagaggcggacagggatcagctggcccctgcggcctggttgcacctgcatggtgactagctgccgggctgcgccccggggcgcggcgaggaggcggggtctggcagtgcgttgggtgggggaggagcttctgggtgatgtaaggccgggaatgggagtggcctctcctcgactcgctgctaggaagggggcgggactctcggtgaccagacgccggggagggggcaggcgttcattgataaaacgctgggctcccctgggcgccagcgcagcgtagcaaatccaggcagcgccacgcgcggccggggccgggcggaaccgagaagccgggaccgcgctgcgacgcgccggccgcatggagcctgccgccggtttcctgtctccgcgccccttccagcgtgcggccgccgcgcccgctcccccggccgggcccgggccgcctccgagtgccttgcgcggacctgagctggagatgctggccgggctaccgacgtcagaccccgggcgcctcatcacggacccgcgcagcggccgcacctacctcaaaggccgcttgttgggcaaggggggcttcgcccgctgctacgaggccactgacacagagactggcagcgcctacgctgtcaaagtcatcccgcagagccgcgtcgccaagccgcatcagcgcgagaagatcctaaatgagattgagctgcaccgagacctgcagcaccgccacatcgtgcgtttttcgcaccactttgaggacgctgacaacatctacattttcttggagctctgcagccgaaagtccctggcccacatctggaaggcccggcacaccctgttggagccagaagtgcgctactacctgcggcagatcctttctggcctcaagtacttgcaccagcgcggcatcttgcaccgggacctcaagttgggaaattttttcatcactgagaacatggaactgaaggtgggggattttgggctggcagcccggttggagcctccggagcagaggaagaagaccatctgtggcacccccaactatgtggctccagaagtgctgctgagacagggccacggccctgaggcggatgtatggtcactgggctgtgtcatgtacacgctgctctgcgggagccctccctttgagacggctgacctgaaggagacgtaccgctgcatcaagcaggttcactacacgctgcctgccagcctctcactgcctgcccggcagctcctggccgccatccttcgggcctcaccccgagaccgcccctctattgaccagatcctgcgccatgacttctttaccaagggctacacccccgatcgactccctatcagcagctgcgtgacagtcccagacctgacaccccccaacccagctaggagtctgtttgccaaagttaccaagagcctctttggcagaaagaagaagagtaagaatcatgcccaggagagggatgaggtctccggtttggtgagcggcctcatgcgcacatccgttggccatcaggatgccaggccagaggctccagcagcttctggcccagcccctgtcagcctggtagagacagcacctgaagacagctcaccccgtgggacactggcaagcagtggagatggatttgaagaaggtctgactgtggccacagtagtggagtcagccctttgtgctctgagaaattgtatagccttcatgcccccagcggaacagaacccggcccccctggcccagccagagcctctggtgtgggtcagcaagtgggttgactactccaataagttcggctttgggtatcaactgtccagccgccgtgtggctgtgctcttcaacgatggcacacatatggccctgtcggccaacagaaagactgtgcactacaatcccaccagcacaaagcacttctccttctccgtgggtgctgtgccccgggccctgcagcctcagctgggtatcctgcggtacttcgcctcctacatggagcagcacctcatgaagggtggagatctgcccagtgtggaagaggtagaggtacctgctccaggagttgcgggaaggtctgggaggcccagggtgctggggaggaagctgggcccggagcctaggtcctgaccactgtcatgctctgtgtgcaggtgaacttctacggggaccacaccaagctgattctcagtggctgggagcccctccttgtgacttttgtggcccgaaatcgtagtgcttgtacttacctcgcttcccaccttcggcagctgggctgctctccagacctgcggcagcgactccgctatgctctgcgcctgctccgggaccgcagcccagcctaggacccaagccctgaggcctgaggcctgtgcctgtcaggctctggcccttgcctttgtggccttcccccttcctttggtgcctcactgggggctttgggccgaatcccccagggaatcagggaccagctttactggagttgggggcggcttgtcttcgctggctcctaccccatctccaagataagcctgagccttagctcccagctagggggcgttatttatggaccacttttatttattgtcagacacttatttattgggatgtgagccccaggggggcctcctcctaggataataaacaattttgcagaa

SEQ ID NO: 380743 - DNA, 2909 bp, Homo sapiens
tgcctctccgctgctggctggaacgctgatctatctagttgctggggagacgcccccagatgcccgggccccactcggacttcagcacacatcccgaaggatggggaaagaaagaggcccccacgagcgggactcgcagtggccaaggaggggtgagaggcggacagggatcagctggcccctgcggcctggttgcacctgcatggtgactagctgccgggctgcgccccggggcgcggcgaggaggcggggtctggcagtgcgttgggtgggggaggagcttctgggtgatgtaaggccgggaatgggagtggcctctcctcgactcgctgctaggaagggggcgggactctcggtgaccagacgccggggagggggcaggcgttcattgataaaacgctgggctcccctgggcgccagcgcagcgtagcaaatccaggcagcgccacgcgcggccggggccgggcggaaccgagaagccgggaccgcgctgcgacgcgccggccgcatggagcctgccgccggtttcctgtctccgcgccccttccagcgtgcggccgccgcgcccgctcccccggccgggcccgggccgcctccgagtgccttgcgcggacctgagctggagatgctggccgggctaccgacgtcagaccccgggcgcctcatcacggacccgcgcagcggccgcacctacctcaaaggccgcttgttgggcaaggggggcttcgcccgctgctacgaggccactgacacagagactggcagcgcctacgctgtcaaagtcatcccgcagagccgcgtcgccaagccgcatcagcgcgagaagatcctaaatgagattgagctgcaccgagacctgcagcaccgccacatcgtgcgtttttcgcaccactttgaggacgctgacaacatctacattttcttggagctctgcagccgaaagtccctggcccacatctggaaggcccggcacaccctgttggagccagaagtgcgctactacctgcggcagatcctttctggcctcaagtacttgcaccagcgcggcatcttgcaccgggacctcaagttgggaaattttttcatcactgagaacatggaactgaaggtgggggattttgggctggcagcccggttggagcctccggagcagaggaagaagaccatctgtggcacccccaactatgtggctccagaagtgctgctgagacagggccacggccctgaggcggatgtatggtcactgggctgtgtcatgtacacgctgctctgcgggagccctccctttgagacggctgacctgaaggagacgtaccgctgcatcaagcaggttcactacacgctgcctgccagcctctcactgcctgcccggcagctcctggccgccatccttcgggcctcaccccgagaccgcccctctattgaccagatcctgcgccatgacttctttaccaagggctacacccccgatcgactccctatcagcagctgcgtgacagtcccagacctgacaccccccaacccagctaggagtctgtttgccaaagttaccaagagcctctttggcagaaagaagaagagtaagaatcatgcccaggagagggatgaggtctccggtttggtgagcggcctcatgcgcacatccgttggccatcaggatgccaggccagaggctccagcagcttctggcccagcccctgtcagcctggtagagacagcacctgaagacagctcaccccgtgggacactggcaagcagtggagatggatttgaagaaggtctgactgtggccacagtagtggagtcagccctttgtgctctgagaaattgtatagccttcatgcccccagcggaacagaacccggcccccctggcccagccagagcctctggtgtgggtcagcaagtgggttgactactccaataagttcggctttgggtatcaactgtccagccgccgtgtggctgtgctcttcaacgatggcacacatatggccctgtcggccaacagaaagtaagtgctgttatggggtgccttgtattcaggccactaatccagcagggccgcaccctcgtgagtgctcctgggctcaggggtctgggtttctcagaggaggggcattggtgcagggctccctctgacctctgcctccccattctaggactgtgcactacaatcccaccagcacaaagcacttctccttctccgtgggtgctgtgccccgggccctgcagcctcagctgggtatcctgcggtacttcgcctcctacatggagcagcacctcatgaagggtggagatctgcccagtgtggaagaggtagaggtacctgctccgcccttgctgctgcagtgggtcaagacggatcaggctctcctcatgctgtttagtgatggcactgtccaggtgaacttctacggggaccacaccaagctgattctcagtggctgggagcccctccttgtgacttttgtggcccgaaatcgtagtgcttgtacttacctcgcttcccaccttcggcagctgggctgctctccagacctgcggcagcgactccgctatgctctgcgcctgctccgggaccgcagcccagcctaggacccaagccctgaggcctgaggcctgtgcctgtcaggctctggcccttgcctttgtggccttcccccttcctttggtgcctcactgggggctttgggccgaatcccccagggaatcagggaccagctttactggagttgggggcggcttgtcttcgctggctcctaccccatctccaagataagcctgagccttagctcccagctagggggcgttatttatggaccacttttatttattgtcagacacttatttattgggatgtgagccccaggggggcctcctcctaggataataaacaattttgcagaa

SEQ ID NO: 380744 - DNA, 2625 bp, Homo sapiens
tgcctctccgctgctggctggaacgctgatctatctagttgctggggagacgcccccagatgcccgggccccactcggacttcagcacacatcccgaaggatggggaaagaaagaggcccccacgagcgggactcgcagtggccaaggaggggtgagaggcggacagggatcagctggcccctgcggcctggttgcacctgcatggtgactagctgccgggctgcgccccggggcgcggcgaggaggcggggtctggcagtgcgttgggtgggggaggagcttctgggtgatgtaaggccgggaatgggagtggcctctcctcgactcgctgctaggaagggggcgggactctcggtgaccagacgccggggagggggcaggcgttcattgataaaacgctgggctcccctgggcgccagcgcagcgtagcaaatccaggcagcgccacgcgcggccggggccgggcggaaccgagaagccgggaccgcgctgcgacgcgccggccgcatggagcctgccgccggtttcctgtctccgcgccccttccagcgtgcggccgccgcgcccgctcccccggccgggcccgggccgcctccgagtgccttgcgcggacctgagctggagatgctggccgggctaccgacgtcagaccccgggcgcctcatcacggacccgcgcagcggccgcacctacctcaaaggccgcttgttgggcaaggggggcttcgcccgctgctacgaggccactgacacagagactggcagcgcctacgctgtcaaagtcatcccgcagagccgcgtcgccaagccgcatcagcgcgagaagatcctaaatgagattgagctgcaccgagacctgcagcaccgccacatcgtgcgtttttcgcaccactttgaggacgctgacaacatctacattttcttggagctctgcagccgaaagtccctggcccacatctggaaggcccggcacaccctgttggagccagaagtgcgctactacctgcggcagatcctttctggcctcaagtacttgcaccagcgcggcatcttgcaccgggacctcaagttgggaaattttttcatcactgagaacatggaactgaaggtgggggattttgggctggcagcccggttggagcctccggagcagaggaagaagaccatctgtggcacccccaactatgtggctccagaagtgctgctgagacagggccacggccctgaggcggatgtatggtcactgggctgtgtcatgtacacgctgctctgcgggagccctccctttgagacggctgacctgaaggagacgtaccgctgcatcaagcaggttcactacacgctgcctgccagcctctcactgcctgcccggcagctcctggccgccatccttcgggcctcaccccgagaccgcccctctattgaccagatcctgcgccatgacttctttaccaagggctacacccccgatcgactccctatcagcagctgcgtgacagtcccagacctgacaccccccaacccagctaggagtctgtttgccaaagttaccaagagcctctttggcagaaagaagaagagtaagaatcatgcccaggagagggatgaggtctccggtttggtgagcggcctcatgcgcacatccgttggccatcaggatgccaggccagaggctccagcagcttctggcccagcccctgtcagcctggtagagacagcacctgaagacagctcaccccgtgggacactggcaagcagtggagatggatttgaagaaggtctgactgtggccacagtagtggagtcagccctttgtgctctgagaaattgtatagccttcatgcccccagcggaacagaacccggcccccctggcccagccagagcctctggtgtgggtcagcaagtgggttgactactccaataagttcggctttgggtatcaactgtccagccgccgtgtggctgtgctcttcaacgatggcacacatatggccctgtcggccaacagaaagtaagtgctgttatggggtgccttgtattcaggccactaatccagcagggccgcaccctcgtgagtgctcctgggctcaggggtctgggtttctcagaggaggggcattggtgcagggctccctctgacctctgcctccccattctaggactgtgcactacaatcccaccagcacaaagcacttctccttctccgtgggtgctgtgccccgggccctgcagcctcagctgggtatcctgcggtacttcgcctcctacatggagcagcacctcatgaaggtgtgagggctggggctgtggtacattgaaacctaacccatcctggccgggtgcggtggctcacgcctgtaatcccagcactttgggaggccgaggcgggtggattatgaggtcaggagatcgagaccatcctggctaacaaggtgaaaccccgtctctactaaaaatacaacaaattagccgggcgtggtggcgggcgcctgtagtcccagctactcgggaggctgaggcaggagaatgggcgaacccaggaggcggagcttgcagtgagcagagatggcgcaccattgcactccagcctgggcaacagagcgagactccatctcaaaaaaaa

SEQ ID NO: 380745 - DNA, 1017 bp, Homo sapiens
aaatattcctgtgcttggcaggacacagtggctcatggctatactcccagcactttgggaggctgaggcaggaggatggcttgaggccaggagttcaagaccagcctgggcaacatagcaagaccctgtctttataaaaagtttaaagattagccagccatgatggctcctgcctgtagtctcagctacttgcaactgcttgaaccaaggaatctgaagctacagtgagttataattgtgccagtgcactctagctcactacacacagtgggctatgattgcatcagactgagaccttgtctttaaatatataggaatgaagtaaatacttgttcctatgcttgacccatagggtgctccccataattaagtggggtgcttaatatgcagaggaaatactttgtattacctttccaaaattccataatacatctgactcaatacattttgtgaaaggtggagctacacagagccttgtcgggccctgcctattggttgggctggacctgttaataggcagtgcagggagcagcatgtgtcacagacctgcctgtccagaggcctcactcccacccttctcctgggaagtgccctccctattggctaaggcagcatggaccctacaaggatgagttaagacactaacatgtcacattctgcccattgttgcccctttaaaagcctcaaggcctaattactttgtccctatgagtcatttatttgttaattcatatgccttcttgcgtctcagctaccctccagcaattaatcataagaggcctgaggaaacatgcaaaaacatatgtaatatacaacaatggtcatggtagcactgggataataaagtattgatacattataaacgtctactaaaaagagcatttaagtaaatttaggttcaccaagataatggaatactatgttgtcatttaaaatgatgttttctaagacaagttaatgcttatgctccaattataatctgaaaaataaaagcatttaatggttcccccatcttct

SEQ ID NO: 380746 - DNA, 1111 bp, Homo sapiens
aaatattcctgtgcttggcaggacacagtggctcatggctatactcccagcactttgggaggctgaggcaggaggatggcttgaggccaggagttcaagaccagcctgggcaacatagcaagaccctgtctttataaaaagtttaaagattagccagccatgatggctcctgcctgtagtctcagctacttgcaactgcttgaaccaaggaatctgaagctacagtgagttataattgtgccagtgcactctagctcactacacacagtgggctatgattgcatcagactgagaccttgtctttaaatatataggaatgaagtaaatacttgttcctatgcttgacccatagggtgctccccataattaagtggggtgcttaatatgcagaggaaatactttgtattacctttccaaaattccataatacatctgactcaatacattttgtgaaaggtggagctacacagagccttgtcgggccctgcctattggttgggctggacctgttaataggcagtgcagggagcagcatgtgtcacagacctgcctgtccagaggcctcactcccacccttctcctgggaagtgccctccctattggctaaggcagcatggaccctacaaggatgagttaagacactaacatgtcacattctgcccattgttgcccctttaaaagcctcaaggcctaattactttgtccctatgagtcatttatttgttaattcatatgccttcttgcgtctcagctaccctccagcaattaatcataagaggcctgaggaaacatgcaaaaacatatgtaatatacaacaatggtcatggtagcactgggataataaagtattgatacattataaacgtctactaaaaagagcatttaagtaaatttaggttcaccaagataatggaatactatgttgtcatttaaaatgatgttttctaagacaagttaatgcttatgctccaattataatctgatcagttaaataaagtacccagcctgccttggtagaaaccagagtcacacactgacttccctttctacttggggcttcctagtttttaagtttaatctagctcacacaagtccttacatacttccttaa

SEQ ID NO: 380747 - DNA, 569 bp, Homo sapiens
catgccagcctgggcaacagagcaagaccctgtctcaagggaggaaaaaataaaaaaataaataaaaatttaaaaaaagaacacttgaagttactcagatcaggactcatgcagagaaaagccaacaggagcaacaccccacattaggggaggaagacacctggggattcactgacttcagttgtgtgaattttaccctatgaccttgcttgctttatgagacagcagaggtggccaaggtcaatcctactgctctgtggtgaactctgcttttctctcgttaccataggtaaagggtcatgctcctatgtaagccttcctgttccccagtcatttgtgcacggggtaggccatcatctcctgcctattcaagggaatgactagtcctgtcttctgtatcctcagtcaccaacttctcagttagtgttggaccaagcctatgttcaaaacatgactgagacagacctcaatccatagagatttatttagccaaggtccaaggacacatctaggaaaaaatacgggatcacaggagcatctgcgccttctactttttccaaagagggttt

SEQ ID NO: 380748 - DNA, 667 bp, Homo sapiens
  misc_feature (659)..(667): n is a, c, g, or t
cgagaaaaagaatttggagacaaagtaaacctactttctgttctggaagctgctaagatgatcaaaccacagactttggcctcagagaaaaaatgattgtgtgaaactgcccagctcagggataaccagggacattcacctgtgttcatgggatgtattgtttccactcgtgtccctaaggagtgagaaacccatttatactctactctcagtatggattattaatgtattttaatattctgtttaggcccactaaggcaaaatagccccaaaacaagactgacaaaaatctgaaaaactaatgaggattattaagctaaaacctgggaaataggaggcttaaaattgactgccaggctgggtgcggtggctcacacctgtaatcccagcactttgggaggccaaggtgagcaagtcacttgaggtcgggagttcgagaccagcctgagcaacatggcgaaaccccgtctctactaaaaatacaaaaatcacccgggtgtggtggcaggcacctgtagtctcagcctcccaagtagttgggattacagatgtttggagccactaagccagtttgcaccagctctcaggatcctcacctgggtattaaatctcgtatcacaaaagaatggccccaagtcaataaattcttcattgtttannnnnnnnn

SEQ ID NO: 380749 - DNA, 445 bp, Homo sapiens
ccgcagtgctgggattacaggcatgagcaccatgcctggcctgaattgtacaccattctgagtattgtgatgaaatctcattccgtctcacccaggacacgaatcattcctttacctagcgtatccatgctatatccattcaccatctgttagtcacttggtagccatctgggttatcaggtcaactgttttggtattgttttgcttttttttttgagacagagtcttgctctgtcacccaggctggaatgcagtgacacaatcatggctcactgcaacctccactctccaggttcaagcaactctcctgcctcagcctcctgagtagctgggactacaggcgtgcaccaccacacccggctaatttttgtatttttagtagagacggggtttcatcatgttggccaggccagtctggaactcttgacctcaagcgatctgcccg

SEQ ID NO: 380750 - DNA, 441 bp, Homo sapiens
tacctttgatctctaaggtcaagaagaaagggttgatgtcaaacacagagaacagcatagaagcaattttttttctccctaatccagagcttactctgttagtatgtggtatccatactattttaaattcaatccctgagagaggaaattagtgttgaaaatgttgagaagagataagacttgactgaatggatatatgacaaaaaactatttcatacttgaaaaggagcttacaaaagaggcaaatctggggccagttcctcaagattcagccactgagcccagggctgggcccagatgctaaagacattctctctttttgtaagtatttgatattctttgtggtatcaagcacaactgaatgtggaaataattttcagctgtcatttcttcttgggtgccttgctgtcaaaatcctgaaagacagctatgtctttactt

SEQ ID NO: 380751 - DNA, 256 bp, Homo sapiens
ttttatttcagaattctgttcgctaacccaacagaaccctggcttcccagacctgcctgtagctgcagggaatcatctctctgaccaacactgactcattaggctgcttaccctaaacatgcttagagttcatataccaaactttgcccctttttgcccatgtactttatgatattgaattttctcctataattacattttaatttaaattcacaattatatgcacattataggtccatgtatatagctctgtgtg

SEQ ID NO: 380752 - DNA, 526 bp, Homo sapiens
ggagacagacaggagagatggaggagagacaaggggagggacagacaggagagatggggagagacaggagaggggggagagagatggagagacaggagagatggggagagacaggagagatggaggagagacaaggggagggacagacagatggagagacatggcggggaggaggagagagagacaaggggagaaacggaaggagagaggtgttgatagggtctggctctgtgtccccacccaaacctcatcttgtagctcccataattcccacgtgttgtgggagggagctggtggaggatggttgaatcctggaggtgcgtctttcctgggctgttctcatgatagtacgtgggtttcacaagatctgatggtctaaaaactggagtttccggacacaagctctccctttgcctgccaccatccatgcaagatgtgacttgctcctctttgctttctgccatgattgtgaggcctccccagctacatggaactgtaactccattaaacctctttcttttgtaaa

SEQ ID NO: 380753 - DNA, 368 bp, Homo sapiens
tctcactgcaatctctgcttcccaggttcaagggattctcctgcctcagcctccagagtagctgggactacaggtgcgtgccaccacgccaggctaattttttgtatttttagtagagacgggatttcaccgtgttagccaggatggtcttgatctcctgacctcgtgatccacccgcctcggcctcccagagcgctaggattacaggcatgagccatggcgcccggcccaaaaggggcctttctaaaggcattttataaaaggtgtttgaaacacaaacctgaaaaaaaaaaaaagactttagtttaacaaaggtaacctaatgcttacccagtgctttttccaccgccatatctgcaaacaggtgt

SEQ ID NO: 380754 - DNA, 403 bp, Homo sapiens
gactccatctcaaaaaaaacaaaaacaaaaacaaaaacaaaacaaaacaaacaacttattagataaccatcaactagatttaggaaatcttagaagaagaaaatgaagaaaaaaaatacagaggttatttgaagataaaaaagggtgaaaacttcccaaattttgatgtaataaaaaaaaaaatttctaaccaataatacttgatttaaatttacttccctttaaaaagaagatgaaaataaagaatttccaaaataaaaggtgaagatgttcatcaccactagcacagttctacaaaaaaaggtacatggtgaccaggcaccatggctcatgcctgtaatcttagttttaggaggtcaaggctgtcagaacactagagactaagagtttaagagcattctga

SEQ ID NO: 380755 - DNA, 261 bp, Homo sapiens
tagtgagcccctttagagccagtctgatgtaagaagatcatgagccaacattcacaggctacacaaaggaaagatttattaggcagccagaaatccagacatctagcaggtttggcattattctgctcaccacagtagaaattacccaagacttcgttaatgcttgcttggttgcaaatgtcttactgctgcttatacagtgctccttgggcagtgattttcatttggaagagctattgacaatacgtatttttttttttc

SEQ ID NO: 380756 - DNA, 850 bp, Homo sapiens
atttagcataatgtcctccaggttcatccaagttgtcacatatagcagaaaacctccttagtttcctcaatatataactagaagattttgagaaaaaagtctgacagaaatcagagttatcatttttgtatgcatatctacacctatggattgattaaaaacaacattgacccagattaaagagatttgcttttagctgcaatgttgctactacctatgtgatctgagtaaaatcacattctttatctgtacatgggttttattatctaaaataaaaacaactgccactaaattttattttaatttgaaattattaccatcacataatttcacatcagatgtcactacaagtgtatctgaccttaattgtatcttctgactaaagctgagaaccaaatgagaattgcataagctccttcagaaggagacaatcatatgtgaggtgaatctcaacatgtccacagattaggtaaagatcaaacaattgagtagctttgatttcacttaaaagaatctcagaactggaacaaaacaagagtgccctctctcaccatcctactcaacatagtactggaaatatgagccagagcaatcagccttttgaagtaaaaggcatccaaataggaaaagaagaaatcaaattaactctttttgtagatgatattattctacacttaagaaaccctaaagattctttcaaagcctcctggacctgatagacaactttagtaaagattcaggatgcaaaatcaatgtacaagatcagtagcctttctatataccaataatattcaacccgagagccaagtcaagaatgcaatcccatttacaatagccacaaaaaaaaaaa

SEQ ID NO: 380757 - DNA, 475 bp, Homo sapiens
ttcaatgtaacagaagattacagaagactaaaaagtcttcttactgatttcttcagaggccccacagtatcaaatatctgcctggctggattagaatatgttctgcacttcactgcactgaatgggaagatttactttcgaagatataagttgctgttgaagaaatctggttgcagaacaccacggattgaattggaagagataggaccctcattgaatctggttctgaggaggacacacctggcatccgatgacctttatacattatctatgaaaatgccaaaagctctcaagccaaagaagaagaaaaatatctccaatgatacttttggtacaacttatggaaggattcatatgtagaacgaagataagcaaactacaaaccaggaaaatgaaggggttgaagaagtgacctgcagaaaggataacagaagaccaggagaaaaagtcaaaaagaatttaaaagaaattatgg

SEQ ID NO: 380758 - DNA, 419 bp, Homo sapiens
ctgacctcaggtaatctgtgctctttggcctcccaaagtgctggaattacaggcatgagccaccgggcccggcctactatttcattaggaatagaactgtcatctttcaaatgcctacttgctgttttttttcttttccattgatcacatcttcttgtccattcctcctccttttacatctttctcttgctgatttggagaaatactttctatactaaacatactttttccagttagttatttacctttaatcatatatagcatgtttttctctagggaatctttaaaaattttagttttaaaatttattccatctttttctctttttctttgtggcaactagttttagaatcatgctacagaaaggcttcactacaatcagagtagaatacgtgtttaaatggttacttccagtattc

SEQ ID NO: 380759 - DNA, 271 bp, Homo sapiens
aaacttgttaaagtttgtagaagctgagttgttgatttctgtggtggataaaagccagtgctgtatctggaaactgttttcctgtttttcttagataccccttgaatcggatctgtttaatggaagaggatttttctgttaagctggttataatgccggttaaactttgtgtttaggatgttaaagtcctggaatgaatataattacctgcctatataaaaaaagctgaagtcatttgacgaaaagttaacaagtgcaggcatgtgagcta

SEQ ID NO: 380760 - DNA, 961 bp, Homo sapiens
aaatacatttcatttcatttgtacaatgagaaaaaagatgaaaaggcaaggttgttattgcagttgacattgtcagccctgccttttggctttatgtaatttaaaatagaaagggggaaggaggacaagacagaagctcaactttagaaaccatggacatcacctccctctttgagaggagctgcttgtgaaccaggctccagtcttcctgtggcctctcacagtaaccctgcccctttcttacctcacaggggcaagagggactctaaagagggcgtaagcaatagaggcacctgcagccctccttcctcagcaggaaatcaatgtggagccccagagggacattttatctcagagagagcatgctggccacaggacccagtgcagccctgcttcctgcaccgtgggtctttcctgatagctgcaggcttgagattgcagcctcaggataggacacgttcagatgccttccagactacacacactatgcttagattcgagagtctttcctgaccttaaaatttgtcccttgcttactttcacactgcagaagatttatatatatattcatcattatttttgcagcagtacaagtggaaacttcaaaaaaatcattccctttcatgtcctggtctttttaagtcttgatatgtaaccattttcataaatatccaaacagagattgtcattccccttaaaaacagaaacaaaacacaaaactagtgcttgtgaaaacacacagcgcaaagacaattatcctattgcattaaaaaaaaaatcagtctgcctagagacatttcattggctgcattgtcttaattccctaacgaaactgcatcaaaatgtcagttgtaatttagcctctgatcagctgttaaatattatttaaatatttacaggtcctgtggggtatctcccattacccatgtcgccctcaaattacataagcgatcataaaaaa

SEQ ID NO: 380761 - DNA, 267 bp, Homo sapiens
gcggctggagtcccagtcagcctccgctttcatcccagagcagtcccgggggccttaaaggaatgtaggctgggtgaagttggcccagtgacacctgcgttcagaaacgttctttccgctcccaacgccccctctccaccgccacccgacccccgaatagttttccccgagtgttgtggatagaactgttgatctcttggaaaagttattgtatcctgccatccttccctctggagactccacttaatatatataagtactttcttt

SEQ ID NO: 380762 - DNA, 484 bp, Homo sapiens
aaaaatatggattctactttttaaacatggtctcagtagtatcattacagccccatcaaaatgaaaaacaataatttcctgacaccatcaaatagctcatcaattttactatatttcctcaatcattcaatacgtgttttttatttattttattttattattattttttgagacagagtctctctctgttgcccaggctggagcacagtggcgcgatctcagcctcattgcaacctctgcctcctgggttcaagtgattctcctgtcttagcctcccgagtagctgggattgcgggcacggccaccatgcctggctaattttttgtattaaaggaggctgagacaggggtttctagggttggctaggttggtcttgaactcctgacctcaggtgatccgcccgcctcggccttccaaagtgctggggattacagaccgatttggggatgttgccccgggatgagcctgctattcttgttagtga

SEQ ID NO: 380763 - DNA, 441 bp, Homo sapiens
tggattgatcccaggaggtcgaggatgcagtgagccctgatcacaccactgcatgccagcctggacaacagagtaagaccctatctcaaacaagaaaacaacaacaacaacaacaaaattgtggacacaatatgttcccatttgtgtgggttttttttttaaagaaacacacatgcatatatacacatactaatccctatgtaaatatatgcatacaaaatttacagaaggatatacacaaagctgtggaggttgattcaggaaggatgtaacaaatttactattatatagccttctgtactatagttttgttttcccatatgcatgtacccagttatatattgtccttttaatttaaacatctagtaaaaaataataatttcaatgagaccagaaattactaagcaaaggaaatggcaaggtagttctacttttttggaa

SEQ ID NO: 380764 - DNA, 804 bp, Homo sapiens
gatcgtcccactttggcctcccaaagtgctaggattacgggcgtgagccacagcgcctggcctccttttctttatagtaatttgaatgtggtgattttaatcctccatggttttcttatccttcctcaacaaacagcaaagaggctgctggaaagccacatgacatttgctgtgatttgcacggctgatgggaaaacactacttggttctgaaggacagggttgtcattggatacctttgccctctgacccgagtgagaatctcacctggacaaagacccgagttgtgaaatcacacagagaaagtgtgattccgaacctgctgctgtcctgtgcttcctgaggacaagtgagtgactgactccgtgtgccaggaactgcaggaggttaaaaactttcagaactaccatgcaaataagaaatttcaaaggacttttctctaacacacatttcatagtgaacgtctcagctggattaacataattaacgctgtgttctttctggctcctgaaagaaattgtgattaggaacactttcagggctgatgagtctaaggtatcaactttgtcccttctgcccacttgaagttcaaatggaaatgtttgctttcatagctccagtcatgatgttactgtatttagtagctattaagtttccaattccatagactcctgggagaagttccagttcgcactaaggcttctgttgcatttagcaccactgcctatggtgtgtggagctttcctgaacaagtaatagcagcaaggttcttagcttagtaataattttaagctattctttgatt

SEQ ID NO: 380765 - DNA, 378 bp, Homo sapiens
ggtatgacatgtgtctctaacacccaattgaacttgaagcagtgaggctgtgtttgacaacacaagtagggaggagagttcgtgagcccatgcttgggaagtgtgctatagaggaacaaggagtggaggaggaggaattcagctatctctggacattgaaatagcaaactatccttaggacctttcagagagcagtgggccacataagggaaaccatattcgtaggaacgagctttatctcctcttcaagaagattgtaatgacttcatatagtgtgaagagtagatgataaagccagactgaggggggagagggggaagtctaaacctgaagtcagtcaccattaggtcttttttcttaaggaagattacatttggg

SEQ ID NO: 380766 - DNA, 368 bp, Homo sapiens
agaaatatggctaagtgcagaataaaaaaggctataaaacatggaccttcttaaatgaagttaattcagacgtaacaaaaattcatatattatgttccttgaaacttaaaaaaatgcgactttaaatttaacactctcaattctaatggggatatgagttaattttcaagtatattttagagctcaagtttagttaaccaataacttgctgaattatgcaaaaagctttggctttcaaaatcttattgcttttcccctgtcaagatttaataatttttagtaagggtttgaactttttaaccagatatgccaaatctcccaaatgcatgtataagatgttattatgttaatagcaatgtataatacaa

SEQ ID NO: 380767 - DNA, 408 bp, Homo sapiens
cgaggtcaggagatcaagaccatcctggctaacatggtgaaaccccatctctactgaaaatacaaaaacaaaattagctgggtgtggtagcagacgcctgtagtgccagctactcgggaggctgaggcgggagaatggcgtgaaccgagatcgcgtccctgcactccagcctgggcaacagagcaagactccgtctcaaaaaacaaaaaacaaaaaacacacacaaaaaacaaacaaaaaaaacccacccctgtcatcaagcatgtgatttgagaaaatttcacttcacttctaagaacctgtgtcagtttttcagtcaaatgaagagttgaatcataattttgaagattcttgtaggtctaatagattaaataattatgttaatgtctgttttacataggaataaga

SEQ ID NO: 380768 - DNA, 183 bp, Homo sapiens
atatcacagaagcagtgttcactgttgtataaaaatttccttattcatgataggtgtatctgtatatgttaacactttttaaaatgcttcttttgcagctaggatgtttgaacataagctatctactaatgtatcattgtatatgatcttgtttgatttataagcacagttcttcaaattgtg

SEQ ID NO: 380769 - DNA, 332 bp, Homo sapiens
tcaattatccatctacctatctattgattatctgtctacctatctatatctatcatctcatgttttccttattcattcatccactgacagacacttaggttgtttccatatcttggctatcatgagtaatgctccaatgaacatgggaacatatgtagatatctcgctgaggtgttgatttcaattcctttgtggatatacccagaaggagaattgctggatcttatggtagttctatttttaattttctcagaaagtttcataccattttccataaaggctgtacgaatttacatttccaccaacagtgtagagagagtgtagagagttat

SEQ ID NO: 380770 - DNA, 249 bp, Homo sapiens
tgggagaaaataactcacaagtcgcatatctgataaaagacttctgatcagcaaatataaggaattctcaaaactcaattaaaaaaaggtttttttaacgtgcaaaagattttagcagactcttcaccaaaaaaagatatacagatggcagataagctcacaaaagcatgctgaatatcatttgtcatccaagaaaatgaaaactcaattacatatcccactatacacctatccgaatggttaaaagaa

SEQ ID NO: 380771 - DNA, 2131 bp, Homo sapiens
ccgagagcccatctacaccttcactgcctccttcactaggaaggtcattcccttctttgggctctggggccgagggtccagtttctccctgagctcctgagaaggagcagttacctactctcctctaagtacaggactcatatcaacccaagtaccatgtggacttgatccctggctgaatcacctggatgacttggaatagaaatgactgctttagaagatgggatggggccgggtggtaagggatagaagagaggactctcaatctactgatcaagtcctttccccaatgcccagtggatggccagggtacctggggactcaggctgctgccagttctgctcaccaccatccgtgcttggcacagaagtagctgcatagaaagagcactggatttgaagtcagaagacctgggttcttgaaccagcctgtcaaccagttgtatgactttaaacaaggcatctcacctcttttcatcttgttttcttccaataatgttagagttcatgtaatcacattctctagaaccatttagtttgtgttaactatgaaccaagcagtgtggtggccactggtgacttgaaaatatagagaaaaaaaaaacctgctctatatctgaaagagctcttgggaagacagagaaacataaagaggaaattacagcacagtgtggtgggtgttacgggaagtccaaccccagcattatgggagttcaggggaaggggcatagcccagcctggaaggagagggtgagtgggggatggctttctgaaaagggtggtctaaaggatgcctatggtcaatagggaaaagaggggaagaagcatcttaagaagaggaaacagcagagaactggctggatgacctgtgactctggagcactgggttgtctccattgtcattatgggcagatgtgtgccatccccagccgacgccactcactgcctccttcctcctggtgttgccacttctgggtgagattaaggtgcagggcctgggggcaggaggacataaggtatagccataaatcataacccagggaccacactcaaccctagggaaattgtcttcctgatcagttgattaccatctgaggtcaagaaatgagatagtgggagcaaatgggtcacaaatagctcagctgtgggctcagaaactgctaggtaaaagaattccagaaggaggccagggcataagttggatgacctatgaactttagtctaaagaattgagactaccgtaattgagactactgtagtgacatctgagaaatgggatggaagagtgaccatgttttattttcttgttcttgtcactattgtattttattttgcataatcatgcccttcactgacagtctccttaacatcatctgtttactctgctcagtgtaaactacaatgctctgtcatctccctactgggtctcctgggaggaggggagccatccagggtgcaaactcaaaggcagagggcacagcgtgcttaggcccaagcttagaattcaattgagaagttctgttgttcatccttacctcagcaggtagaaaagaggtggagatcagaagccagggattagagattgaattgctttccctgggagtgtgcagtatctcattaaaatgttgtatattcaaaaaaatacagacacacacaagtgcctatataatgataaaacatatccaaagcacccaaacctgtgattccagaaaagtagatcctatttttgtttatttttattggctttagctgtgtcttttgaaaggactattatcctctaaaatgtatgtgtatgaagatcctggcttgcagctcgggagctttacacaccttgtgtcactttatcttggtaacgagccaagatcatgcaaccagttcatccatgtctgacccaagagctcttaactgctatgctgcactgcctcattcagagatagatgcctgcatgggtcctggcgattattttaatgctggctacacccccacaggtgacttggattcagaaatacaatttatatttcttctttttaaattgttttattttatttttcttttaatagttatatgtcagtgagaacaatttatatgtcttacactgagaaataaaactgctcataagtgaaaatactcaa

SEQ ID NO: 380772 - DNA, 472 bp, Homo sapiens
  misc_feature (297)..(297): n is a, c, g, or t
aaaagccacccatatctggctttcctctttggctgaaaaccgtcagcatttccgtccttgcctttggggtcctacttcattgcctggacaggatggagttcgcccagtcgagagcttcagacaagcagactctgttgccccaatgacccagctcctaccagcccctcaaggatcgagaagatgacccagtacagccaccttcaaggaaacccagttgaggaggaattgaactcaggactcagagtagtcccaggtgttctcctcctattcagttcccagaatcaaagcagcccgggngattattttaatgctggctacacccccacaggtgacttggattcagaaatacaatttatatttcttctttttaaattgttttattttatttttcttttaatagttatatgtcagtgagaacaatttatatgtcttacactgagaaataaaactgctcataagtgaaaatactcaa

SEQ ID NO: 380773 - DNA, 347 bp, Homo sapiens
agaggaacagcagagcatcctcttagcacaattggagagccaggatggggacatcttgaggcaacgggatgaatttgatttgctggttgctggggagatctgccggtttagtgctcttattgaagaactggaggagaagaatgagaggccagcaagggagctcctgacggtgaggcctgaaccggaaccctgccccacctgtgctgtcctgtgactcttgcatctttgtcttgcctaagccatgtctccctgactcacacatctctgtatcccagatgggaggtgggtcagaggaccagaaagtctcaattctagttcatgcttttccaagagttccctggtcactt

SEQ ID NO: 380774 - DNA, 3299 bp, Homo sapiens
aatatttcttctgacagtggacagctgacatatcaccactttccttctactgtgagtgtctctggatgggcagaaaggaatggccagcccctggttatggtcatctaaggtcacctctgaaatgctgtgagcccctcttccttcctctcctctgctatttcccatctctgctgttggcaggagaatagaaccctgggctgccagagatgcaagtgtgtgacgatatgggtgctggtgcatatttagtatgtgcctgtgtccagccatgtgcatgtgtgggtgtgtgagtgtgtgacccagcccttcccccgtggccaagcagagagagtggccttgaggaagccatagcagcaggaccagcatggcctctgctgcctctgtgaccagcctggcagatgaagtcaactgccccatctgtcagggtaccctgagggagccggtcactatcgactgcggccacaacttctgccgggcctgccttacccgctactgtgagataccaggcccagacctggaggagtcccctacttgcccactctgcaaagaacccttccgtcctgggagcttccggcccaactggcagctggctaacgtggtggagaacattgagcgcctccagctggtgtccacactgggtttgggagaggaggatgtctgccaagagcacggagagaagatctacttcttctgtgaggatgatgagatgcagttgtgcgtggtgtgccgggaggctggggagcacgctacccacaccatgcgcttcctggaggatgcagcggctccctatagggaacaaatccataagtgtcttaaatgtctaagaaaagagagagaggagattcaagaaatccagtcaagagaaaataaaaggatgcaagtcctcctgactcaggtgtccaccaagagacaacaggtgatttctgagttcgcacacctgaggaagtttctagaggaacagcagagcatcctcttagcacaattggagagccaggatggggacatcttgaggcaacgggatgaatttgatttgctggttgctggggagatctgccggtttagtgctcttattgaagaactggaggagaagaatgagaggccagcaagggagctcctgacggacatcagaagcactctaataagatgtgaaaccagaaagtgccggaaaccggtggctgtgtcgccagagctgggccagaggattcgggactttccccagcaggccctcccgctgcagagggagatgaagatgtttctggaaaaactatgctttgagttggactatgagccagctcacatttctctagaccctcagacttcccaccccaagctcctcttgtccgaggaccaccagcgagctcagttctcctacaaatggcagaactcaccagacaacccccagcgttttgaccgggccacctgtgttctggcccacactggcatcacaggggggagacacacgtgggtgtggatggccagggtacctggggactcaggctgctgccagttctgctcaccaccatccgtgcttggcacagaagtagctgcatagaaagagcactggatttgaagtcagaagacctgggttcttgaaccagcctgtcaaccagttgtatgactttaaacaaggcatctcacctcttttcatcttgttttcttccaataatgttagagttcatgtaatcacattctctagaaccatttagtttgtgttaactatgaaccaagcagtgtggtggccactggtgacttgaaaatatagagaaaaaaaaaacctgctctatatctgaaagagctcttgggaagacagagaaacataaagaggaaattacagcacagtgtggtgggtgttacgggaagtccaaccccagcattatgggagttcaggggaaggggcatagcccagcctggaaggagagggtgagtgggggatggctttctgaaaagggtggtctaaaggatgcctatggtcaatagggaaaagaggggaagaagcatcttaagaagaggaaacagcagagaactggctggatgacctgtgactctggagcactgggttgtctccattgtcattatgggcagatgtgtgccatccccagccgacgccactcactgcctccttcctcctggtgttgccacttctgggtgagattaaggtgcagggcctgggggcaggaggacataaggtatagccataaatcataacccagggaccacactcaaccctagggaaattgtcttcctgatcagttgattaccatctgaggtcaagaaatgagatagtgggagcaaatgggtcacaaatagctcagctgtgggctcagaaactgctaggtaaaagaattccagaaggaggccagggcataagttggatgacctatgaactttagtctaaagaattgagactaccgtaattgagactactgtagtgacatctgagaaatgggatggaagagtgaccatgttttattttcttgttcttgtcactattgtattttattttgcataatcatgcccttcactgacagtctccttaacatcatctgtttactctgctcagtgtaaactacaatgctctgtcatctccctactgggtctcctgggaggaggggagccatccagggtgcaaactcaaaggcagagggcacagcgtgcttaggcccaagcttagaattcaattgagaagttctgttgttcatccttacctcagcaggtagaaaagaggtggagatcagaagccagggattagagattgaattgctttccctgggagtgtgcagtatctcattaaaatgttgtatattcaaaaaaatacagacacacacaagtgcctatataatgataaaacatatccaaagcacccaaacctgtgattccagaaaagtagatcctatttttgtttatttttattggctttagctgtgtcttttgaaaggactattatcctctaaaatgtatgtgtatgaagatcctggcttgcagctcgggagctttacacaccttgtgtcactttatcttggtaacgagccaagatcatgcaaccagttcatccatgtctgacccaagagctcttaactgctatgctgcactgcctcattcagagatagatgcctgcatgggtcctggcgattattttaatgctggctacacccccacaggtgacttggattcagaaatacaatttatatttcttctttttaaattgttttattttatttttcttttaatagttatatgtcagtgagaacaatttatatgtcttacactgagaaataaaactgctcataagtgaaaatactcaa

SEQ ID NO: 380775 - DNA, 413 bp, Homo sapiens
ctaacgacctcactttaacttacttaccttgttggagaccccgtgtccaattgcagtcatatgatgaggtactggggtcaggacttcaaataggaattttcagggacatagttcatccagaacaggcatatcctgcccattgcagcttcacagattgcagtaagccagaagtcacacctgtaattgcctaaggcttcgcccactgctctgttaggggaagaggctatagaagacaaaggaatgacaccctgtgtgcatgtgtatgtgtgcactatatgtgtgcattgtgtacatgcgtgtgcctgtgcggtgtgtgtgcgcacatacgggaagttaggatggggagccgggttggagacgttgccgaccctcctgttctcatcagaaagcctggactgatgaggaaggattct

SEQ ID NO: 380776 - DNA, 946 bp, Homo sapiens
  misc_feature (1)..(2): n is a, c, g, or t
nnacagcccaccagtgaccatgaaggctgtgctgcttgccctgttgatggcaggcttggccctgcagccaggcactgccctgctgtgctactcctgcaaagcccaggtgagcaacgaggactgcctgcaggcgcagttggcctcctgaccgtcatcagcaaaggctgcagcttgaactgcgtggatgactcacaggactactacgtgggcaagaagaacatcacgtgctgtgacaccgacttgtgcaacgccagcggggcccatgccctgcagccggctgccgccatccttgcgctgctccctgcactcggcctgctgctctggggacccggccagctataggctctggggggccccgctgcagcccacactgggtgtggtgccccaggcctctgtgccactcctcacagacctggcccagtgggagcctgtcctggttcctgaggcacatcctaacgcaagtctgaccatgtatgtctgcacccctgtcccccaccctgaccctcccatggccctctccaggactcccacccggcagatcagctctagtgacacagatccgcctgcagatggcccctccaaccctctctgctgctgtttccatggcccagcattctccacccttaaccctgtgctcaggcacctcttcccccaggaagccttccctgcccaccccatctatgacttgagccaggtctggtccgtggtgtcccccgcacccagcaggggacaggcactcaggagggcccagtaaaggctgagatgaagtggactgagtagaactggaggacaagagtcgacgtgagttcctgggagtctccagagatggggcctggaggcctggaggaaggggccaggcctcacattcgtggggctccctgaatggcagcctgagcacagcgtaggcccttaataaacacctgttggataagccaaaaaaaaaaaa

SEQ ID NO: 380777 - DNA, 848 bp, Homo sapiens
gcctcaccctgcgctgaaggcgttggggctcctgcagttctggggcagccacaggcgcccagggtttcgtgccgatcagcccaggacggtcttcccggtgcagtttctgatgcggggagggcagtgctgccttccggtcaccaggaccagtgctcagcccgcctgcttgacccccttacttagctggggtccaatccatacccaatttagatgattcagacgatgggatttgaaacttttgaactgggtgcgacttaagcactgccctgctgtgctactcctgcaaagcccaggtgagcaacgaggactgcctgcaggtggagaactgcacccagctgggggagcagtgctggaccgcgcgcatccgtgagtggggggacgacagccgccaggcctaggtctctgccactgaactattaatctttctggccatctgtccgcatctatgtgctgttttccttccacctgtccccgacccgtcccgcacctgcacccccaacaatcacccagcatctgtccctccagccatcctcctccatctgccactcctccactcgtctgtccctccccatcctccatcttccactcctccacccgtctgtccctccccatccctgagctcgcttactcactcaccccatttctgacgctcagcgggtggtccatctgcctcggacatctggatagggctgagaccagggccgagaccaggccctcgcactgcttgcaatcctgaggccagcccagggggactctagagcattaggcagggtggggacaggaggaggcctggggcaggtcagcaggtgagcacacagggcagccccatccccggatcccgctgctcc

SEQ ID NO: 380778 - DNA, 949 bp, Homo sapiens
  misc_feature (1)..(2): n is a, c, g, or t
nnacagcccaccagtgaccatgaaggctgtgctgcttgccctgttgatggcaggcttggccctgcagccaggcactgccctgctgtgctactcctgcaaagcccaggtgagcaacgaggactgcctgcaggtggagaactgcacccagctgggggagcagtgctggaccgcgcgcatccgcgcagttggcctcctgaccgtcatcagcaaaggctgcagcttgaactgcgtggatgactcacaggactactacgtgggcaagaagaacatcacgtgctgtgacaccgacttgtgcaacgccagcggggcccatgccctgcagccggctgccgccatccttgcgctgctccctgcactcggcctgctgctctggggacccggccagctataggctctggggggccccgctgcagcccacactgggtgtggtgccccaggcctctgtgccactcctcacagacctggcccagtgggagcctgtcctggttcctgaggcacatcctaacgcaagtctgaccatgtatgtctgcacccctgtcccccaccctgaccctcccatggccctctccaggactcccacccggcagatcagctctagtgacacagatccgcctgcagatggcccctccaaccctctctgctgctgtttccatggcccagcattctccacccttaaccctgtgctcaggcacctcttcccccaggaagccttccctgcccacccagcaggggacaggcactcaggagggcccagtaaaggctgagatgaagtggactgagtagaactggaggacaagagtcgacgtgagttcctgggagtctccagagatggggcctggaggcctggaggaaggggccaggcctcacattcgtggggctccctgaatggcagcctgagcacagcgtaggcccttaataaacacctgttggataagccaaaaaaaaaaaa

SEQ ID NO: 380779 - DNA, 1182 bp, Homo sapiens
gcctcaccctgcgctgaaggcgttggggctcctgcagttctggggcagccacaggcgcccagggtttcgtgccgatcagcccaggacggtcttcccggtgcagtttctgatgcggggagggcagtgctgccttccggtcaccaggaccagtgctcagcccgcctgcttgacccccttacttagctggggtccaatccatacccaatttagatgattcagacgatgggatttgaaacttttgaactgggtgcgacttaagcactgccctgctgtgctactcctgcaaagcccaggtgagcaacgaggactgcctgcaggtggagaactgcacccagctgggggagcagtgctggaccgcgcgcatccgcgcagttggcctcctgaccgtcatcagcaaaggctgcagcttgaactgcgtggatgactcacaggactactacgtgggcaagaagaacatcacgtgctgtgacaccgacttgtgcaacgccagcggggcccatgccctgcagccggctgccgccatccttgcgctgctccctgcactcggcctgctgctctggggacccggccagctataggctctggggggccccgctgcagcccacactgggtgtggtgccccaggcctctgtgccactcctcacagacctggcccagtgggagcctgtcctggttcctgaggcacatcctaacgcaagtctgaccatgtatgtctgcacccctgtcccccaccctgaccctcccatggccctctccaggactcccacccggcagatcagctctagtgacacagatccgcctgcagatggcccctccaaccctctctgctgctgtttccatggcccagcattctccacccttaaccctgtgctcaggcacctcttcccccaggaagccttccctgcccaccccatctatgacttgagccaggtctggtccgtggtgtcccccgcacccagcaggggacaggcactcaggagggcccagtaaaggctgagatgaagtggactgagtagaactggaggacaagagtcgacgtgagttcctgggagtctccagagatggggcctggaggcctggaggaaggggccaggcctcacattcgtggggctccctgaatggcagcctgagcacagcgtaggcccttaataaacacctgttggataagccaaaaaaaaaaaa

SEQ ID NO: 380780 - DNA, 995 bp, Homo sapiens
  misc_feature (1)..(2): n is a, c, g, or t
nnacagcccaccagtgaccatgaaggctgtgctgcttgccctgttgatggcaggcttggccctgcagccaggcactgccctgctgtgctactcctgcaaagcccaggtgagcaacgaggactgcctgcaggtggagaactgcacccagctgggggagcagtgctggaccgcgcgcatccgcgcagttggcctcctgaccgtcatcagcaaaggctgcagcttgaactgcgtggatgactcacaggactactacgtgggcaagaagaacatcacgtgctgtgacaccgacttgtgcaacgccagcggggcccatgccctgcagccggctgccgccatccttgcgctgctccctgcactcggcctgctgctctggggacccggccagctataggctctggggggccccgctgcagcccacactgggtgtggtgccccaggcctctgtgccactcctcacagacctggcccagtgggagcctgtcctggttcctgaggcacatcctaacgcaagtctgaccatgtatgtctgcacccctgtcccccaccctgaccctcccatggccctctccaggactcccacccggcagatcagctctagtgacacagatccgcctgcagatggcccctccaaccctctctgctgctgtttccatggcccagcattctccacccttaaccctgtgctcaggcacctcttcccccaggaagccttccctgcccaccccatctatgacttgagccaggtctggtccgtggtgtcccccgcacccagcaggggacaggcactcaggagggcccagtaaaggctgagatgaagtggactgagtagaactggaggacaagagtcgacgtgagttcctgggagtctccagagatggggcctggaggcctggaggaaggggccaggcctcacattcgtggggctccctgaatggcagcctgagcacagcgtaggcccttaataaacacctgttggataagccaaaaaaaaaaaa

SEQ ID NO: 380781 - DNA, 288 bp, Homo sapiens
gcaacatttcggaggcactgagcagggggccgtgaagatggggaggagacattgagggtgacaagagggcgccgaggacttcctcaggccaccgccatggaggcccacctgcctgggagcccccattcctggggagtgctatggggcagcctctgaggcccctcccactccaccccacaggcactgccctgctgtgctactcctgcaaagcccaggtgagcaacgaggactgcctgcaggtggagaactgcacccagctgggggagcagtgctggaccgcgcgcatcc

SEQ ID NO: 380782 - DNA, 370 bp, Homo sapiens
  misc_feature (294)..(294): n is a, c, g, or t
aaaagcatgatattaaagacactgtgctccatgactcagaagttgaaagagctactttgaatctgcaaatgatacctccatggatgtcgcctaagttcatgaaagatggaagcatagtgacagtaacaataatttaagaaggtttgaaaggaaaatcttggggtccccaaatcactaagctcaagggaaaagtcaagctgggaacttctcagagcaaacttgcctcccgttttattcaaagttactcctggccaggtgcggtggctcacgcctgtaatcccagcactttgggancccagggcaggcagaacacgaggtaaagagatcaagaccatcctggcctatatggtgaagccccatctctactaaa

SEQ ID NO: 380783 - DNA, 328 bp, Homo sapiens
agagttcgtctgtttaaggtgtacctaccattcagcggtttttaagggggcattagattttaaaggaggaaaagtttatgtttttgttagcatatgtcattaaagaaaatgattataatttatctatggtctttattaattattatggaatggctgtatatagataagagacagaagaaaggaaagaaaattacgcataatcatacatcatactacccctaaaacaataataggcaatacttttgtttgtttctttttttatctcaatgcattggggtgtgtctttttctttcattttttttttttagacagaacctcactcacctag

SEQ ID NO: 380784 - DNA, 2041 bp, Homo sapiens
ttttagacagagtctcactttgtcgtccaggctggagtgcagtggcgcgatctcggctcactgcaacctctgcctcctgggttcacgccggttgtcctgcctcagcctcacaagtagctgggactgcaggcgcctgccactacgcccggctaatgttttgtatttttagtagagatggggtttcaccgtgttagccaggatggtctcaatctcctgacctcgtaatctgcccgcctcaacctcctaaagtggtgggattacaggtgtgagccaccgcgcctggcctaaataaaaagtcttgaaatggaagatattcacctaaccctcaacaaaccatgatgtaatgaagcacgaatcacaccattttgtctctttcctaattcaaataggtccctggcattagttcatgccgagactagaaaactgaaccctagtactgttttttaaaacagttttaacagaaaattaaactgtatgtttgaaatcataagtaaaagtttgttgcttgcataagagtagcctcttgattctcatagtggtaattttgtgtcatatcatttagatgttgaaccatttcatttgtgcatgtgtatatgtgcccaaattcatcctctttgtttagaatctgcttacaaataaaactaatagaatctgaatacatttatcatatattcttccagggtttttcttaactgactatagagagtggctgtaagttctggggcaaagcttgattgtattttcagtgatgtatagttacattgtttcatgttaaaatcatcgtgcatggaaagtgaaatgtgcgtatgattttaaattattgtaatatgtactatacccttcccctaaacttctttcattgatgatacacagaattcctctatttttgcttgaaaatagtcctttagattggagtagccttttcttagatccctctatggttccatgagatgaggtgatacctgcaaagcacttttaaagatatttttttaggctaatgtccaagatacagcattgaggaggcagctatgtctaatgagggctctcttgtttgctagagatgagagaaatgtatactaatcattttaatttgtacttaaaatacattttactaatcatattgattttaaatatgacaaattcttctagtagatactaatctttcttgtttatcatattgtcctagagaagcctaggtaaaaatgggttccacctagtctgtttgtataacaccttcccccgtcccctctccatccctgccaattgggctctatgcatattgacaagcaaataagaaaaccttaggtttcttgtatttgaatttccaaaacaataaaaggttttgactcaagatttgcattcaagaagaggcagaaattttgtcttatctttttatcattttgtgaacttgtgtttctctgtatgcttagaaaattttacacacaaggaatgtttgaaaaagtgagaattttagagtgcttgggtggtttttatttggtcagtgctgatgtgttaggtgtttagggaaataatgcttcaggacctttttgacaacacagcttcatgaatgactgggggatatttatgtttgtgctgagaaaagggagggagtgggcaggttggagtggggacctttccattgaaagcagtgcagtcagctgtttcgtagatgcattttttctttatgcttgtaacattgttcttgtgtccataattgactgaaatgtcaagctccaggaatgcaaggcatttatcaggtgaccagaagtagaaccttgttgattatgaaatggaagaataatgtcaaggtagtgggggtaaaatgacaaataagattttactggtgaatttccatgcttagtatgtacattaacctctttttaagttgcatgttaatctggtataacgtattgtgtctggtttatgctttgagtaaaaaggaaaaaaaaagacttgagttacaattgttactctattatgtactattacatataccttttcttttagaaagggttaattataattactattcacacctctg

SEQ ID NO: 380785 - DNA, 508 bp, Homo sapiens
ctagcaggctgctggctgcccacatctgcacttcaggagacagggctgggctgcagatggagggagagctgagatctcgtagggagaagtgaagaccagaatttaggtgaggtgcccagactgagtgtgtggggtggagggaaaggggtctgacaatctaacgactcaattaaggcattagactggatgccttctaggcacctttccagacccaaaaactctgagcccttgaaatgttgggaatgaggctgcccaaagtagagattttaacaatctggattccaatcagcttactgccaccagccagctttggtgtgactttaggcatgtcacaggctttctaagaccaaatgaatgtccagcccttgtgttgccctattttagagttctgtgtaggacttccatatatacaaggctccaacttacctttcaggattaaagggctgggggtgggggaccaagaaagagacattcaggtaagacaacttttaagcaacagataccttcc

SEQ ID NO: 380786 - DNA, 1150 bp, Homo sapiens
tgggtttttgccatgttggccaggcaggtcttgaactcttgacctcaggtgatccgcctgcctcagtgtcccaaagtgttgggattacaggcacgagccaccgcgctcagccaatttttcctcaactctctctttcctggacgggctgcgttggggggaggcgcagggaaagaacacctctttgcttagacattggtgtcgacagtggggatactaagttcatctcctgatcctgctaggcctggaagcaggaaagaaatgtcctggttagagataaaattgttctatccttttagaaaagcctgttaaggaatatgatgcaaagccaccttcgacgaaatctgaaatgataccccacagccttgtccaccccaattattcagtgacagggctccagttgcttaagccatagagaaggcccctttgcagtgggagtcactgaagacagaaagggaagcccaggatgaacccagtcctaagggctgctgggggccaccaaataagactgttttagccctggacacagagggagacacagtcatcccagatccttacaaagaatacattgccaaggaccccgaaggaaatctgcttgtcttaagagaggaagacccacgaccagctctctgggactacctgtcaactcagcaggtgcagccagggagcagccatgcttcttctgccctcccagtaggctgggctatcagttcctgggaggggtcctgtccccatgtaaggggatatgtacattgctgagtacgctgatatctttttcatgggtatgattttttaacaagaaagctaaatggttctcgtgtaacataactgatatagtttggctgtgtccccacccaaatcttatcttgaactgcagctcccataatccccaggtgttgtgggagggacccagtgggaggtaattgaatcatgggggtggttaccgccatgctgttctcgtgatagcgagtgagttctcacgagatctgatggttttataaggggctttccccctccttcgctctgcacttctccttgctgccatgcgaagaaggatgtgtttgcttccccttctgccatgattgtaagtttcctgaggcctccccagccatgttaaactttgagttaattaaacctctttcctttataaatt

SEQ ID NO: 380787 - DNA, 1585 bp, Homo sapiens
gatggggtccgaccccactgagctccccagaaggaaacccagagccttgcatcagatgtcagctgagggcagtgcagaccccagggccaagagtggctctgctcccactcctgctgctccccagcatgctcggctctttatggcaggatgagctagaaaagacatatgaaagcacaatcccacacctctgtagagagaacactggcagtggtgataccagttaggaggccttgggctccaagtaatagcagctccctcccccagggcacaagtagtgaaggatctcctcagtctctgtaagtggaagttcagagctgcatgggctccaggcacagaacagtcaggtctccggttccattgctcttgtgattctcgtggtcccacactcctccatggatgttatcaacagactggggtccctcatggttgcagatggtggccaacagcagctggggcactgtctgccttgtcacagccagcaggggaaaagtaggcctattgttgtcttataagcaagagaacatgttcccagtagcctccagtgacacactccttgaggctttattgaccagaatctcttacatgtctgtttatgaatcagtcactggcaaggaggaggaaattgtttttcaaactttttaaaccatgacctgcagtcaaaaacacctgttacctgcaacatcatggtccagttcccacacacgcatgcgtacactcatgcatatacatgtaattgaaagcaaagtttcacaacatgaatggggtcagcttccagggcacatagcttcatgggaaggggtggcagggccactgtcatgtgcagctgcagggcaccttccacatgggctgtgactgctggagttgtacactggggtcctgacagaaccagggtgggggagggcagagtcccaggagacagccagcagggccccccccagtgttggctctggttgtggtccctccctagcagacacttgctgtggtttctggccagatgctgtcatctgctgggtgatgctgagagctcacccttgctgagtgctcgctgggagccgggcactacttggagctctccacagatgcaaactcactcacttggtcctcaccatggttcacgcacacaacagaagtggccccattttacctataagggaactgaggcacagggaagtagaggaatgtgctcaagagtcccatggctagtggcatttccgtgctcccgccaccaggctctactgtcaacatcatccctatctgcaacccaagaggaatcagaaaaatagagccgttagcagtccactttaagtcaggcacagtggctcacacctgtaatcccagcattttgggaggccaaagtgggaggattgcttgagcccatgagttcaagaccagcctggacaacatagcaaaaccccatctctacaaaaaataaatattagtgggcatggtgacacatgcctgtagtcccagctactcaggaggctgaggcaggaggatcactcgagcccaggaggtcgaggcgacagtgagctataactatgccactgcacatcagcctggacaacagagcaagaccctatctctt

SEQ ID NO: 380788 - DNA, 1531 bp, Homo sapiens
gatggggtccgaccccactgagctccccagaaggaaacccagagccttgcatcagatgtcagctgagggcagtgcagaccccagggccaagagtggctctgctcccactcctgctgctccccagcatgctcggctctttatggcaggatgagctagaaaagacatatgaaagcacaatcccacacctctgtagagagaacactggcagtggtgataccagttaggaggccttgggctccaagtaatagcagctccctcccccagggcacaagtagtgaaggatctcctcagtctctgtaagtggaagttcagagctgcatgggctccaggcacagaacagtcaggtctccggttccattgctcttgtgattctcgtggtcccacactcctccatggatgttatcaacagactggggtccctcatggttgcagatggtggccaacagcagctggggcactgtctgccttgtcacagccagcaggggaaaagtaggcctattgttgtcttataagcaagagaacatgttcccagtagcctccagtgacacactccttgaggctttattgaccagaatctcttacatgtctgtttatgaatcagtcactggcaaggaggaggaaattgtttttcaaactttttaaaccatgacctgcagtcaactcatgcatatacatgtaattgaaagcaaagtttcacaacatgaatggggtcagcttccagggcacatagcttcatgggaaggggtggcagggccactgtcatgtgcagctgcagggcaccttccacatgggctgtgactgctggagttgtacactggggtcctgacagaaccagggtgggggagggcagagtcccaggagacagccagcagggccccccccagtgttggctctggttgtggtccctccctagcagacacttgctgtggtttctggccagatgctgtcatctgctgggtgatgctgagagctcacccttgctgagtgctcgctgggagccgggcactacttggagctctccacagatgcaaactcactcacttggtcctcaccatggttcacgcacacaacagaagtggccccattttacctataagggaactgaggcacagggaagtagaggaatgtgctcaagagtcccatggctagtggcatttccgtgctcccgccaccaggctctactgtcaacatcatccctatctgcaacccaagaggaatcagaaaaatagagccgttagcagtccactttaagtcaggcacagtggctcacacctgtaatcccagcattttgggaggccaaagtgggaggattgcttgagcccatgagttcaagaccagcctggacaacatagcaaaaccccatctctacaaaaaataaatattagtgggcatggtgacacatgcctgtagtcccagctactcaggaggctgaggcaggaggatcactcgagcccaggaggtcgaggcgacagtgagctataactatgccactgcacatcagcctggacaacagagcaagaccctatctctt

SEQ ID NO: 380789 - DNA, 4588 bp, Homo sapiens
  misc_feature (1806)..(1806): n is a, c, g, or t
gaacctggcctaagttgataatctatgtgtctcttcatcaaacagaaggtctaaagttaaaaagggccttccgagctgctcaggcgacccagtgctcggttggcccgggccgcgcttaactgtcccaggtcagttaagcccatgggagcccaggtcatggggcagccagggcctctgcagtgtgaggcgccggtctgcgggcgggcaggcgggaggcttagggtgggtcgcggtcgcggcccccgccgcaggccctggcggcggcatcgtgaacatagacgtggagttccacatccggcacaactacccctggaacaatttgccggccaatgtgaggcagtcattaagtggagatagctcatcatggaggtcttcatctttgtcttcacatcaagtaggctgaggaggaggaaatacaggaagtattggtcctgctgttcagagtggcagaggagaaagaaaatcccagccgtgttggaaattcacagagagaatatgaaaatcaggttgtcctgtacagtatctgcaatcagttacgatacagaaataacttaaacatgtcaagaaagatgaacgcggatactatgaggaactgctaaactacagccgagatcatctcatgctgtacccttaccgtctattggatattatggtgaagggcttcagcataacaccattttcatattacactgggattatggagaatattatgaacagtgggcacaattttactgctgctgactgtctaaggcttcttggcataggaagaaaccagtatattgatcttatgattcagtgtagatcatcaaaaaaattcttcagaaggaaaacagccggtgatcttctaccaataaagccagtggaaattgccatagaggcatggtgggtggtgcaggctggatatatcacagaagatgacatcaagatatgcacttggcctgagaaatgtgctactgataagaccgttgattcaggccctcaactctctggatcactagattacaatgtagtacatagtttgtataaaaaaggatttatttatctggatgtaccaatgtctgatgacagttgtatagcagttgcaccccttgaaggttttgtaatgaatcgagtgcttattttgattattttgaaactctactctataagatatttgtttcagtagatgagcacacaaatgtggcagagcttgcaaatgtccttgagattgacttatccctggttaagaatgctgtttcaatgtattgctgattgggctttgcccataagaagggacaagtaataaatttggatcaacttcattcatcatggaagaatgttccatccataaacagattaaagagtaccttagatccatagaagatgctcttgtcatggggtggaggggaaagtaggaggcctgtacaagaagcttcatcggcaactgacactgatacaaatagtcaagaagatccagctgacacagccagtgtaagaagcctgagtctgtctgcaggacacacgaagcacatcgcattcctgtttgactccactcttactgccttcttaatgatgggaaatctttcaccagttcagagcactggtgaaagagaagcacagagatattttgagcatgcgcttactctgagaaacacaacactgtttctgcgtcataacaaagatctagttgtgcaaactgcacagccagaccaacccaattatggttttcctctggatctcttacgctgtgaaagccttcttggtctggaccctgcaactggcagcagagttctaaacaaaaatacacactgcttgtttccatggctnccctcaccatgaaatccggcctgtcagcagctgcacccctcagcatattggaccagctatcccagaagtcagctctgtctggtttaaacagtacatttacgtttatcatatcactggacaaggaccaccatcccttttattatccaaaggtacaagacctcgaaaactgccagatatatttcagagttacgatcgattgctaataacatcttggggtcatgatcctggagtagttcctacctcaaatgtgctcacgatgttgaatgatgctttaacacattctgcagttttaattcaggagcatggtctgcatgggataggagaaactgtccatgtcccatttccatttgatgaaacagaactacaagaagactcgtgtcaatatgggtgttcataaagcattgcagatactaaggaacagagtggacttacaacatctctgcggatatgtcaccatgttgaatgcttccagccaacttgcaaatagaaaactcagtgatgcttctgatgagagaggaaaacctgatttggcttctggctcagatgttaaatgggagtacagagtcatttgaaatggtcattgaagaagcaactatagattcagcaacaaagcaaacctctggtgccacaacagaagcagattgggttcctctcgagctgtgctttggaattccactgttcagttccgaattaaaccggaaagtatatagaaaaattgctacacatggcctttgcagaaaagagagccttcaaaaacctcttacattccagtagaaaactctctctgcaagtccttaactttgttcactcattccaggaaggtgcttcaacattggatattcacacagagcccagtttttcaagtttgctttcacagtcatcgtttgctgacatgggtgttccacttcctgcaaaaaatttaacatttaaagatagtgtcttatcagaacggagtggatggtcaccttcctcacttattgctaatctccatttgcaataatttggttacaccatttgctgctcacactttctgccttttttctttcttaacgttagctttatagtgtcagccactaaaaagcatcctgctgctgcggagcaattcttgctttactaatattaaaagtttggggaacatattcatgttttctgaagttttgctccttattgcacatcttattgcaacaaagtgctttttagcatccagcactgtatttttttaccttgagacaatctgcatttcttttataaaactaagtatatactttataggctttatgatgactgttatgtttaaaagcagtcactgtgaaaattgcaatgataattttatatgttagtttatcaaacatcaatcttgtttaactttatattttgttacctatactttgggggatcaagggaagagatggaactcttcctctgaaaatgcttcttggtacttaaagtagtaaaactataaaacagtaaacatccagtattgggagatgatatgatagggcattatgaattcctatgggtatctaaattatgtatgtcagttggacattgtagaaggtatgtaaatcatcatggttatgtataacttaaccttgatttataaggtcttaattcagattatgactattcgttgacatctcatgagaagctttagaaaactttctatttttaaacaccatttatatgtggacttctgttgtcactgactttgggctttatattttcacagagtctttatggaaaaagtagaatttattttccactcttgtagctatagctgctgcacattttcaccctgatttatttttttgtttcttacctttgatgttttcaaaccaaggattgtgattttaggttagaattacatattagaagcattaagactatgtctttggatcagaatgctttagtgattaacctactttgaagacatactcttaagcaatctggatcttaaatttatgtgaatacatttttagaaaatgataaagaaaaatggaattacttcaaagtgtttcttgagtcattgattcttttagcatctcaaatgttaattagaataattggaatcactttttagacttttcaagttacctttcttgggaagtttgtgtagtgttaacagtttagtttagctcctcttatagggcaatggtttgctagtttaaaactgtaaccaaatgaactggtcagacaactcatatctaaaacacttaaaatgttagaacgtttgggaatgttataacctaagcgtttttgctgataactttttgttatttatagacatttgtgtatttaacatacttacttctggaaatatatgcctttcctaaaacttaaccacacatccactaccatggcctatgtatagaattgaatattttggaccatgttatctgtggcacagtcagtgctgtgtttgaggtaaatgcagtaacggttagttttctactttgccttataaaaggtagaaaccatgtgtatgttatgtttgtctataaaagaaaaatactaatattaaattatttcttatgactgtgagtcactcacttatttttccaataattgatattgtacattcttagtgccattaggtatgtatgtatgtaacttttacagtttttcagctgaaagttgtattttttttaatcagggctctttaatctcattttaatttcctttgtttgaatgaactgtagttattttctgtattcctatattaaccatctaaaccaactgtaatgacacgtacactaataaagaattgaacatttgtatttgt

SEQ ID NO: 380790 - DNA, 1456 bp, Homo sapiens
cttggccttcagcccctgcctcggccagaggtttcatttttaactgaatatttacgaaagctgaaagcgtgcgaggggggtggggtggaaatagcggctgcttcttttccaaggatttatttaatggggatgtgttcaaggcaagaccgaattcagaaggatatcgacgtcgtgatccagaagtccagagctgaggactgcctgtttgcaggctctgattgtactttctccacaagcttcagcatggcagtatctctcaccacttgttttggtccaagggcagaaatgagcatcctggaaaccaatcagtacttccgctctgaactggaaaagtgcaaacagaacttccaagacctcacagagaaattcctgacatccaaagctactgcctactccctggccaatcacctgcagaaatatagatacatgatcccttaattcaggctcaggctgaagaactgacccacttacgacagaagatacaggaagggagaggtgtctgctaccttttcacccagcatgtgaagaacacagtcaagtcttttgagggccttctcaggaacactgacattgcctactaccagagacagagattctgtgagcaaatggtacaaggaagccagctgacagagatccttgtcagaaaacttgccacagaatcaaccccaatgctcactaacaaactgagaagaaaaaaaaagaattacccccaacaacatctgaggaagcacaacagggacagacttgaaggcacctgggcagtcctctggttttggagtagagaaaatcacaatggtaagaaaaatgaagacaggcaaaagccactggctcccaggatgcacctctaacctctacaggcaaatcatagattccattgtccagctgtataatgaaaacagagttctcagagaagaataccggagactcccccgacttgcctgaatcaaatttccagaggtaagtggtgaaaggccacaatatgaagtcactctcagatgggtctcttctcttgccacactccactgtagaaataaaagaggacggggaggccagagctgctcaaaaccttataacccacaattctcatagttactctcaacttagagagggctgctttctagacacaccccctccaggcccccagactgccaggctccaggaataagtagctctaagaaatacagtatttcagtgtgagccacaccccactattgcaaattggagaggagaaggacaaacttaaaaggtgaaaagatttaacagaacaacagggtgaaaccccatctctaataaaaatacaaaacttagctgggcgtggtggcatgcacctgtagtcccagctactcaggaggctgaggcaggagaatcatttcaacccaggaggcagacgttgcagcgagccaagtttgcgccactgcattctagcctaagtgacagagcatgactccatctcaaa

SEQ ID NO: 380791 - DNA, 5731 bp, Homo sapiens
  misc_feature (2949)..(2949): n is a, c, g, or t
cttggccttcagcccctgcctcggccagaggtttcatttttaactgaatatttacgaaagctgaaagcgtgcgaggggggtggggtggaaatagcggctgcttcttttccaaggatttatttaatggggatgtgttcaaggcaagaccgaattcagaaggatatcgacgtcgtgatccagaagtccagagctgaggactgcctgtttgcagggcccgcctggcaggacgactgagcaagtccttggaaaaccagagatattagagcggtgaatcgcgctggtcacgttggacacctgcgcgttaggagattctggagccagagggagagaccccagaaactccccggtcggcgacccagcccgagacgcctggggtcccaagggaagctgaacgcccggtgggctcccgggatggttcttccggttctttgtgccgccttcacccagtgaaggagcctgtatccaccctgcccagtcgctgttgggctgctgcggagcttccgctgccatcttcggatcctgtgttccgcccggggctccaccagggcagggatggtggtgagggtcgctcgtgggtcccctggcagggagcagggtctggcactcacaagggcgcacgactaggacttgtcgaatgaatcctttgtcgcctttagcttttagtcctttgaagagaggctctgattgtactttctccacaagcttcagcatggcagtatctctcaccacttgttttggtccaagggcagaaatgagcatcctggaaaccaatcagtacttccgctctgaactggaaaagtgcaaacagaacttccaagacctcacagagaaattcctgacatccaaagctactgcctactccctggccaatcacctgcagaaatatagatacatgatcccttaattcaggctcaggctgaagaactgacccacttacgacagaagatacaggaagggagaggtgtctgctaccttttcacccagcatgtgaagaacacagtcaagtcttttgagggccttctcaggaacactgacattgcctactaccagagacagagattctgtgagcaaatggtacaaggaagccagctgacagagatccttgtcagaaaacttgccacagagtcttgctctcttacccaagctggagtgcagtgacatgatcttggctgactgcaatctgtgcctcctgggctcaagcaatcttcccacctcagcctcccaagtagctgggactacagaatcaaccccaatgctcactaacaaactgagaagaaaaaaaaagaattacccccaacaacatctgaggaagcacaacagggacagacttgaaggcacctgggcagtcctctggttttggagtagagaaaatcacaatggtaagaaaaatgaagacaggcaaaagccactggctcccaggatgcacctctaacctctacaggcaaatcatagattccattgtccagctgtataatgaaaacagagttctcagagaagaataccggagactcccccgacttgcctgaatcaaatttccagaggctgaggaggaggaaatacaggaagtattggtcctgctgttcagagtggcagaggagaaagaaaatcccagccgtgttggaaattcacagagagaatatgaaaatcaggttgtcctgtacagtatctgcaatcagttacgatacagaaataacttaaacatgtcaagaaagatgaacgcggatactatgaggaactgctaaactacagccgagatcatctcatgctgtacccttaccgtctattggatattatggtgaagggcttcagcataacaccattttcatattacactgggattatggagaatattatgaacagtgggcacaattttactgctgctgactgtctaaggcttcttggcataggaagaaaccagtatattgatcttatgattcagtgtagatcatcaaaaaaattcttcagaaggaaaacagccggtgatcttctaccaataaagccagtggaaattgccatagaggcatggtgggtggtgcaggctggatatatcacagaagatgacatcaagatatgcacttggcctgagaaatgtgctactgataagaccgttgattcaggccctcaactctctggatcactagattacaatgtagtacatagtttgtataaaaaaggatttatttatctggatgtaccaatgtctgatgacagttgtatagcagttgcaccccttgaaggttttgtaatgaatcgagtgcttattttgattattttgaaactctactctataagatatttgtttcagtagatgagcacacaaatgtggcagagcttgcaaatgtccttgagattgacttatccctggttaagaatgctgtttcaatgtattgctgattgggctttgcccataagaagggacaagtaataaatttggatcaacttcattcatcatggaagaatgttccatccataaacagattaaagagtaccttagatccatagaagatgctcttgtcatggggtggaggggaaagtaggaggcctgtacaagaagcttcatcggcaactgacactgatacaaatagtcaagaagatccagctgacacagccagtgtaagaagcctgagtctgtctgcaggacacacgaagcacatcgcattcctgtttgactccactcttactgccttcttaatgatgggaaatctttcaccagttcagagcactggtgaaagagaagcacagagatattttgagcatgcgcttactctgagaaacacaacactgtttctgcgtcataacaaagatctagttgtgcaaactgcacagccagaccaacccaattatggttttcctctggatctcttacgctgtgaaagccttcttggtctggaccctgcaactggcagcagagttctaaacaaaaatacacactgcttgtttccatggctnccctcaccatgaaatccggcctgtcagcagctgcacccctcagcatattggaccagctatcccagaagtcagctctgtctggtttaaacagtacatttacgtttatcatatcactggacaaggaccaccatcccttttattatccaaaggtacaagacctcgaaaactgccagatatatttcagagttacgatcgattgctaataacatcttggggtcatgatcctggagtagttcctacctcaaatgtgctcacgatgttgaatgatgctttaacacattctgcagttttaattcaggagcatggtctgcatgggataggagaaactgtccatgtcccatttccatttgatgaaacagaactacaagaagactcgtgtcaatatgggtgttcataaagcattgcagatactaaggaacagagtggacttacaacatctctgcggatatgtcaccatgttgaatgcttccagccaacttgcaaatagaaaactcagtgatgcttctgatgagagaggaaaacctgatttggcttctggctcagatgttaaatgggagtacagagtcatttgaaatggtcattgaagaagcaactatagattcagcaacaaagcaaacctctggtgccacaacagaagcagattgggttcctctcgagctgtgctttggaattccactgttcagttccgaattaaaccggaaagtatatagaaaaattgctacacatggcctttgcagaaaagagagccttcaaaaacctcttacattccagtagaaaactctctctgcaagtccttaactttgttcactcattccaggaaggtgcttcaacattggatattcacacagagcccagtttttcaagtttgctttcacagtcatcgtttgctgacatgggtgttccacttcctgcaaaaaatttaacatttaaagatagtgtcttatcagaacggagtggatggtcaccttcctcacttattgctaatctccatttgcaataatttggttacaccatttgctgctcacactttctgccttttttctttcttaacgttagctttatagtgtcagccactaaaaagcatcctgctgctgcggagcaattcttgctttactaatattaaaagtttggggaacatattcatgttttctgaagttttgctccttattgcacatcttattgcaacaaagtgctttttagcatccagcactgtatttttttaccttgagacaatctgcatttcttttataaaactaagtatatactttataggctttatgatgactgttatgtttaaaagcagtcactgtgaaaattgcaatgataattttatatgttagtttatcaaacatcaatcttgtttaactttatattttgttacctatactttgggggatcaagggaagagatggaactcttcctctgaaaatgcttcttggtacttaaagtagtaaaactataaaacagtaaacatccagtattgggagatgatatgatagggcattatgaattcctatgggtatctaaattatgtatgtcagttggacattgtagaaggtatgtaaatcatcatggttatgtataacttaaccttgatttataaggtcttaattcagattatgactattcgttgacatctcatgagaagctttagaaaactttctatttttaaacaccatttatatgtggacttctgttgtcactgactttgggctttatattttcacagagtctttatggaaaaagtagaatttattttccactcttgtagctatagctgctgcacattttcaccctgatttatttttttgtttcttacctttgatgttttcaaaccaaggattgtgattttaggttagaattacatattagaagcattaagactatgtctttggatcagaatgctttagtgattaacctactttgaagacatactcttaagcaatctggatcttaaatttatgtgaatacatttttagaaaatgataaagaaaaatggaattacttcaaagtgtttcttgagtcattgattcttttagcatctcaaatgttaattagaataattggaatcactttttagacttttcaagttacctttcttgggaagtttgtgtagtgttaacagtttagtttagctcctcttatagggcaatggtttgctagtttaaaactgtaaccaaatgaactggtcagacaactcatatctaaaacacttaaaatgttagaacgtttgggaatgttataacctaagcgtttttgctgataactttttgttatttatagacatttgtgtatttaacatacttacttctggaaatatatgcctttcctaaaacttaaccacacatccactaccatggcctatgtatagaattgaatattttggaccatgttatctgtggcacagtcagtgctgtgtttgaggtaaatgcagtaacggttagttttctactttgccttataaaaggtagaaaccatgtgtatgttatgtttgtctataaaagaaaaatactaatattaaattatttcttatgactgtgagtcactcacttatttttccaataattgatattgtacattcttagtgccattaggtatgtatgtatgtaacttttacagtttttcagctgaaagttgtattttttttaatcagggctctttaatctcattttaatttcctttgtttgaatgaactgtagttattttctgtattcctatattaaccatctaaaccaactgtaatgacacgtacactaataaagaattgaacatttgtatttgt

SEQ ID NO: 380792 - DNA, 2031 bp, Homo sapiens
cgttcattgaatatttttactccagattcagatacagatcaagagagaatcatatgaacctataaaggtccgtcctcatgacaaatggagacagccaaactaattttcttggtgaccttatctaaattagttagaaaataacacttcagatttatgactagttacaattaagccctttgatatcttctaattaaacctgtaaagatttatttctgcattattcctttggtactctcttaaaaatgataaaaatgtaaatgaatattaccctcaaaaggagatgtttctatttatcctaaattagactcatacccttcctttcaaatgactgcattttacactcagatttacactgctccaatacaaattctacatcgatcttaaataacttatttataaagtttgcacaaatgttatacataatctattggaatataaataaagcagagccccctatatttcagccttttttgtgtgtccttctttttagcactttgtcccatttcacataactctatattcaaatgttgttttagaaagtattaggaggctaatataatagtcaacatcattcccagtttactctagctagtagagcagggctttcttgcctggatagcttttcttcaaacctttatctgagaaaagatgtgttcttcataatgactctcctaataggattctctttgctctgaaatgttcaatttgtattctccgatcgttttgcagatgccaaaattatgcagctcagaccagcgctgttttccatttattgttcctctgtttcttttctctccaggtgagtacagctacctggggactactcttcgccaggtgtccatagaacccatgccctccctcctggatgtcagacagctcatcacattgtacggaatctggccattaggtaaagactcggcgtgcgcggatgtgccttttccaaagcagcttgcaccgcttgctggtttggacagtgtgttcctgtttgtcatcaaaagtacagtgctccttaacttttcctactgagaattctgagtgggcacagtttcattttgatagtgcacccaccagcacacaaagtactaccagggagagcacttctgcaccctctctgcgtgcctgcttagcagtgctgggctgaaggacatacaggcaatgagctggggagataataggcaaagcaagtacctgcaattacgattaatcaaattagagaacgggctagggctaccacttgccttttacccacaggctcctattactaggtcctaaacagaggcagcctttcaggagtcagtgcaagtgtgtttcatggatctaaaggatcacctttaaggccctgccagttttcaccgacgtctactctcactgctaaatgaggttcaattgtgacttttttcagacagacacactagagctctgtggtgtgcaggcgatgcaggaaagatgggctctccacagcacagatatctgcggctcacgttcgcttttttctttttttttttctttatggctttgatatgtgtatgacctgaatcaccaggggcagggatggcaactccagccaggagtttcagttctgacaacaactctcaaatagaaatcaccttctgggtttttaatttgctttaaaatgagatgggagtagttcaaacccttattgttccactttgacttcagaacttaagacttcagaacttgcctattggcaagaaatagttaattcctcttctaaattgatgtcagaagtagtaaatggaatttggggttaatatacatttatatatatataatatatatgttttatataatatataatagcacataatttatattatatataacaaatatatcatatttgaggggcaacataatttgtggtcaacagaataaatgtataagtgtcaatggaaataaaatagaggagacctcacacttccatgaagcatcatggaaggcagtaagacagaaagcaccagtgagccaggcatagtggctcacgcatgtaatcccagcactttgggaagccag

SEQ ID NO: 380793 - DNA, 735 bp, Homo sapiens
gtgccacctaggaacctgggtctttcctaactcctaattgcctctctcctacttcttagcatcttcatgcagagcatagtgatggttctgtgtagttaaaaggaaaagagaaaaagatggaggaggggagaaagagagaaggagaagaattgcgggatttgagaaagctggctgtggcttgccccaattattttacggatgacaaagcagactcagaaaagtcaggtaacttggctaaaaacctgcctagttactggcagattgagaactacaatctgggtgagtaaagactttttgaaacacgagcattgtgtaaaactagaattgtttctcaagagaaagttcagaattgttctctctgaggacttctaaggacatcaaaggaaaccacctgaaggttcacaatagatatcttctgaggaccatggctaaatttaaccgggacatttcctgactaccctgacgttgaagaaggagggtcagctattattttttctgacaagaccatacaacaggttattgaggatatcatagcaaaccaagaggaagaagaaaaaaacaaaaagaagaagaagaaaaaggaaaaacaacccaagaaagccaaaaaacaaaagaaaggaacaaaggagaaaaataaggaagaagacgaaaaatggaaaatgtcaccaagtctttttcttcctgcaatgaaggaaggatgtaacgcatacaaaggtcagtttaggagaacgtgca

SEQ ID NO: 380794 - DNA, 2298 bp, Homo sapiens
gcggccgcctactactactactactgctcgaattcaagcttctaacgatgtacggggacatgaagaggactacagggaagccctggttaccatcaagaatgacctaaagttgatagaaggcgtggatatcaaggagaaccttcaagaccagatccggcattggttcatcgaatgcagaaatttaaccgggacatttcctgactaccctgacgttgaagaaggagggtcagctattattttttctgacaagaccatacaacaggttattgaggatatcatagcaaaccaagaggaagaagaaaaaaacaaaaagaagaagaagaaaaaggaaaaacaacccaagaaagccaaaaaacaaaagaaaggaacaaaggagaaaaataaggaagaagacgaaaaatggaaaatgtcaccaagtctttttcttcctgcaatgaaggaaggatgtaacgcatacaaagaaatctggatgaaaaaagatgagtcttggaatttctctcaggactatgatccagaactgatcaaagaggagaaacgaaaagaattacagtcagagatcaggatacaggttgatgagttgatgagacaggaacttaaaaacttaaagctagctgtggacagagaaagggagcgcccagtgaaagcaggaaagaaaaaggacaagaaagggaaaaggaaataaaagaaagagaaaaaggcaaaaaagaaaaagtaatgcctttctgaagaaccatgcttgagtctctctgggatggagaggaccccaactcgccaaagaaaagattcaccattgcccgcctgaagaagccctcaggggaaggaacttagcagtgtgcaggtgagctgatgccgcaaacccgctaaccactgcatgtgctgttatgcctttcccaggctggacacctagctgggtgttcatcataactttccacagctttaatccacgccaagtttgtatataactgaaattcactcttgacaccctccacagtctttccaagttggactcttcctctcatcagtactagttgtcaaatttaaaatgtgacagttaaagaatattctagtttgacaattagtaagcaatgagtatatcatcagtacactagctttttattaatccatgtacactgtatagtaggatacaggttgatgagttgatgagacaggaacttaaaaacttaaagctagctgtggacagagaaagggagcgcccagtgaaagcaggaaagaaaaaggacaagaaaggaaagaaaggcaaaaagaaagagaagaaggcaaagaaggataaagatctgacagctgacaggaccatcgagtctctgtataaggaactggtggaagaaggattactgatccaggctctgaaagtcaacctctctgattacattggtgagtacagctacctggggactactcttcgccaggtgtccatagaacccatgccctccctcctggatgtcagacagctcatcacattgtacggaatctggccattaggttctgcagcagtgcatgagaaagctcctttggtgaaatcgctactgttagccgggccgtctggggtagggaagaaaatgctggtccatgccatctgcaccgaaacgggagccaacctcttcaacttgtcctcctctaacattgctgggaaataccctggcaaaaatggcctccaaatgatgctgcatgcagtcttcaaggtggctcgacagctccagccctccgtggtgtggattgaagacacagaaaaaaccttctacaaaaaagttcccaacgcagaaaagatgaatgaacctaaacgcctgaaaaaacaccttccccaaatcctgaaactcctgaaaccagatgaccggattctgattgtggggaccacacggcgtcccttcgatgctgaactccaatctttctgcaaagtttaccagaaaattattttggtgcccagaccagactatgcttccagatacgttctgtggaagcaaatcattgaacgcaatggaggagtcctcaccagtgccttgaatgtcagctgcctggcgaaggtcactgacggcttcacccaaggacatatagtcgaagtggttaaaggcgtgctcacagatcagagaatccggcggcaaattcataaacctctcactgcagttgagtttattacggcgataaccagcatgaatccagtgtacaaagaggaagaagagagctttaagaactggtatgccaaaactcctctgggtaaaaacgtgccttggcgataacaggaggcagcacagaaaaggcaaaggacaaagggaaaaggaaata

SEQ ID NO: 380795 - DNA, 1738 bp, Homo sapiens
tttccgaaacttctattgtatttcagaactggtatgccaaaactcctctgggtaaaaaacgtgccttggcgataacaggaggcagcacagaaaaggcaaaggacaaagggaaaaggaaataaaagaaagagaaaaaggcaaaaaagaaaaagtaatgcctttctgaagaaccatgcttgagtctctctgggatggagaggaccccaactcgccaaagaaaagattcaccattgcccgcctgaagaagccctcaggggaaggaacttagcagtgtgcaggtgagctgatgccgcaaacccgctaaccactgcatgtgctgttatgcctttcccaggctggacacctagctgggtgttcatcataactttccacagctttaatccacgccaagtttgtatataactgaaattcactcttgacaccctccacagtctttccaagttggactcttcctctcatcagtactagttgtcaaatttaaaatgtgacagttaaagaatattctagtttgacaattagtaagcaatgagtatatcatcagtacactagctttttattaatccatgtacactgtatagtaggatacaggttgatgagttgatgagacaggaacttaaaaacttaaagctagctgtggacagagaaagggagcgcccagtgaaagcaggaaagaaaaaggacaagaaaggaaagaaaggcaaaaagaaagagaagaaggcaaagaaggataaagatctgacagctgacaggaccatcgagtctctgtataaggaactggtggaagaaggattactgatccaggctctgaaagtcaacctctctgattacattggtgagtacagctacctggggactactcttcgccaggtgtccatagaacccatgccctccctcctggatgtcagacagctcatcacattgtacggaatctggccattaggttctgcagcagtgcatgagaaagctcctttggtgaaatcgctactgttagccgggccgtctggggtagggaagaaaatgctggtccatgccatctgcaccgaaacgggagccaacctcttcaacttgtcctcctctaacattgctgggaaataccctggcaaaaatggcctccaaatgatgctgcatgcagtcttcaaggtggctcgacagctccagccctccgtggtgtggattgaagacacagaaaaaaccttctacaaaaaagttcccaacgcagaaaagatgaatgaacctaaacgcctgaaaaaacaccttccccaaatcctgaaactcctgaaaccagatgaccggattctgattgtggggaccacacggcgtcccttcgatgctgaactccaatctttctgcaaagtttaccagaaaattattttggtgcccagaccagactatgcttccagatacgttctgtggaagcaaatcattgaacgcaatggaggagtcctcaccagtgccttgaatgtcagctgcctggcgaaggtcactgacggcttcacccaaggacatatagtcgaagtggttaaaggcgtgctcacagatcagagaatccggcggcaaattcataaacctctcactgcagttgagtttattacggcgataaccagcatgaatccagtgtacaaagaggaagaagagagctttaagaactggtatgccaaaactcctctgggtaaaaacgtgccttggcgataacaggaggcagcacagaaaaggcaaaggacaaagggaaaaggaaata

SEQ ID NO: 380796 - DNA, 2259 bp, Homo sapiens
aagtgaggttcgcgagtctctgggtcgcgacgggaaggagtgaaacacctctctgcgcctgcgcgctccgtgcctgcgaagcaaacccggcctcaccttttcctgcccgaagcagaagattctcgcagtcctggtttctccctccagaagaccccccacccaaatcctctgtagctcctggtagtgccctgacccctgctgccaccgtccttcagagagcaacggaagagcttcccggagggcgaggaaaagagggaaagtagccagcaatgtcgaacgcaatgtataataagatgtggcatcagacccaagaagccctcggtgctttactcgataaagagcctcagaagatgattgaaccacaaagaaatcaggttttcatctttcaaacattagccaccttctacgtaaagtatgtgcagatctttagaaacctagagaatgtctacgaccagttcgtccacccccagaaacgaatactgatcaggaaagtcctggacggggtgatgggccgcatcctggagctgaagaacgagatggtggagctggaactcacggagttccattatttcgatgatatcctgcaggatctcaagctggccccccaacaattagatattcccatacccaagtattttttgaaggagaagttggaagtaataaaaggaagagagaaaattcttgctcaaatattagcggacagcggaatagatacatctgacatgaaataccctgtaaagagtatccctttcgatgaggctgttaaattaatccagattgctgagagggcacggcaaggtcgcctaagggctttattcatgaagcaaatctatctgcaagaatatagagcaaagcaatccaagatgcttggcaagaaagtgacagatacctgggctgctgcactccgcattcagaaggtttggcgacgtttccatcaacgtaaggaaactgaaaaactgagagaagaggagatgatcttcctgggtatgaatccacctcctctctttaatgaagtcagtgctacagtaatccaggctgaaaaggtggaccgcctgcggaatgaggtgcagataaagcatgaagaggactacagggaagccctggttaccatcaagaatgacctaaagttgatagaaggcgtggatatcaaggagaaccttcaagaccagatccggcattggttcatcgaatgcagaaatttaaccgggacatttcctgactaccctgacgttgaagaaggagggtcagctattattttttctgacaagaccatacaacaggttattgaggatatcatagcaaaccaagaggaagaagaaaaaaacaaaaagaagaagaagaaaaaggaaaaacaacccaagaaagccaaaaaacaaaagaaaggaacaaaggagaaaaataaggaagaagacgaaaaatggaaaatgtcaccaagtctttttcttcctgcaatgaaggaaggatgtaacgcatacaaagaaatctggatgaaaaaagatgagtcttggaatttctctcaggactatgatccagaactgatcaaagaggagaaacgaaaagaattacagtcagagatcaggatacaggtacagctacgtttatggtgtagtaacagcaaatcatttacttcaaccattgtgcttctttacaaatttccctactaaatgacctaccccataatttaagggatttttaaacttcacaaacaaacacaagacatgcaaagtgacttaaaagtagtatgttttgtattctcctaggttgatgagttgatgagacaggaacttaaaaacttaaagctagctgtggacagagaaagggagcgcccagtgaaagcaggaaagaaaaaggacaaggtgagtggggaaggagcctgcagaggggtgcggtggagcggattcagtcatgaaaagcagcccctgacatgctgtggcatgtccaggagggccgcctgttgccaggacacctcacggggaaacatgcctgcctttggtaaatttaattggtccaccatttaacctttgggcctgtggattcataaataggataaacccaaccatctgagagtaacatctccccagccccggtcagttgcagattcatattacccaagccccactgatagaatgggaactatcaaaagagccaaagcacattccccaaacagcccccaactgttcctgtacatagatctataagggaggccaatggtaatgagcaggtttttgtgagtgagggaatcatagacccacgcgtccg

SEQ ID NO: 380797 - DNA, 3316 bp, Homo sapiens
aagtgaggttcgcgagtctctgggtcgcgacgggaaggagtgaaacacctctctgcgcctgcgcgctccgtgcctgcgaagcaaacccggcctcaccttttcctgcccgaagcagaagattctcgcagtcctggtttctccctccagaagaccccccacccaaatcctctgtagctcctggtagtgccctgacccctgctgccaccgtccttcagagagcaacggaagagcttcccggagggcgaggaaaagagggaaagtagccagcaatgtcgaacgcaatgtataataagatgtggcatcagacccaagaagccctcggtgctttactcgataaagagcctcagaagatgattgaaccacaaagaaatcaggttttcatctttcaaacattagccaccttctacgtaaagtatgtgcagatctttagaaacctagagaatgtctacgaccagttcgtccacccccagaaacgaatactgatcaggaaagtcctggacggggtgatgggccgcatcctggagctgaagaacgagatggtggagctggaactcacggagttccattatttcgatgatatcctgcaggatctcaagctggccccccaacaattagatattcccatacccaagtattttttgaaggagaagttggaagtaataaaaggaagagagaaaattcttgctcaaatattagcggacagcggaatagatacatctgacatgaaataccctgtaaagagtatccctttcgatgaggctgttaaattaatccagattgctgagagggcacggcaaggtcgcctaagggctttattcatgaagcaaatctatctgcaagaatatagagcaaagcaatccaagatgcttggcaagaaagtgacagatacctgggctgctgcactccgcattcagaaggtttggcgacgtttccatcaacgtaaggaaactgaaaaactgagagaagaggagatgatcttcctgggtatgaatccacctcctctctttaatgaagtcagtgctacagtaatccaggctgaaaaggtggaccgcctgcggaatgaggtgcagataaagcatgaagaggactacagggaagccctggttaccatcaagaatgacctaaagttgatagaaggcgtggatatcaaggagaaccttcaagaccagatccggcattggttcatcgaatgcagaaatttaaccgggacatttcctgactaccctgacgttgaagaaggagggtcagctattattttttctgacaagaccatacaacaggttattgaggatatcatagcaaaccaagaggaagaagaaaaaaacaaaaagaagaagaagaaaaaggaaaaacaacccaagaaagccaaaaaacaaaagaaaggaacaaaggagaaaaataaggaagaagacgaaaaatggaaaatgtcaccaagtctttttcttcctgcaatgaaggaaggatgtaacgcatacaaagaaatctggatgaaaaaagatgagtcttggaatttctctcaggactatgatccagaactgatcaaagaggagaaacgaaaagaattacagtcagagatcaggatacaggttgatgagttgatgagacaggaacttaaaaacttaaagctagctgtggacagagaaagggagcgcccagtgaaagcaggaaagaaaaaggacaagaaagggaaaaggaaataaaagaaagagaaaaaggcaaaaaagaaaaagtaatgcctttctgaagaaccatgcttgagtctctctgggatggagaggaccccaactcgccaaagaaaagattcaccattgcccgcctgaagaagccctcaggggaaggaacttagcagtgtgcaggtgagctgatgccgcaaacccgctaaccactgcatgtgctgttatgcctttcccaggctggacacctagctgggtgttcatcataactttccacagctttaatccacgccaagtttgtatataactgaaattcactcttgacaccctccacagtctttccaagttggactcttcctctcatcagtactagttgtcaaatttaaaatgtgacagttaaagaatattctagtttgacaattagtaagcaatgagtatatcatcagtacactagctttttattaatccatgtacactgtatagtaggatacaggttgatgagttgatgagacaggaacttaaaaacttaaagctagctgtggacagagaaagggagcgcccagtgaaagcaggaaagaaaaaggacaagaaaggaaagaaaggcaaaaagaaagagaagaaggcaaagaaggataaagatctgacagctgacaggaccatcgagtctctgtataaggaactggtggaagaaggattactgatccaggctctgaaagtcaacctctctgattacattggtgagtacagctacctggggactactcttcgccaggtgtccatagaacccatgccctccctcctggatgtcagacagctcatcacattgtacggaatctggccattaggttctgcagcagtgcatgagaaagctcctttggtgaaatcgctactgttagccgggccgtctggggtagggaagaaaatgctggtccatgccatctgcaccgaaacgggagccaacctcttcaacttgtcctcctctaacattgctgggaaataccctggcaaaaatggcctccaaatgatgctgcatgcagtcttcaaggtggctcgacagctccagccctccgtggtgtggattgaagacacagaaaaaaccttctacaaaaaagttcccaacgcagaaaagatgaatgaacctaaacgcctgaaaaaacaccttccccaaatcctgaaactcctgaaaccagatgaccggattctgattgtggggaccacacggcgtcccttcgatgctgaactccaatctttctgcaaagtttaccagaaaattattttggtgcccagaccagactatgcttccagatacgttctgtggaagcaaatcattgaacgcaatggaggagtcctcaccagtgccttgaatgtcagctgcctggcgaaggtcactgacggcttcacccaaggacatatagtcgaagtggttaaaggcgtgctcacagatcagagaatccggcggcaaattcataaacctctcactgcagttgagtttattacggcgataaccagcatgaatccagtgtacaaagaggaagaagagagctttaagaactggtatgccaaaactcctctgggtaaaaacgtgccttggcgataacaggaggcagcacagaaaaggcaaaggacaaagggaaaaggaaata

SEQ ID NO: 380798 - DNA, 2247 bp, Homo sapiens
aagtgaggttcgcgagtctctgggtcgcgacgggaaggagtgaaacacctctctgcgcctgcgcgctccgtgcctgcgaagcaaacccggcctcaccttttcctgcccgaagcagaagattctcgcagtcctggtttctccctccagaagaccccccacccaaatcctctgtagctcctggtagtgccctgacccctgctgccaccgtccttcagagagcaacggaagagcttcccggagggcgaggaaaagagggaaagtagccagcaatgtcgaacgcaatgtataataagatgtggcatcagacccaagaagccctcggtgctttactcgataaagagcctcagaagatgattgaaccacaaagaaatcaggttttcatctttcaaacattagccaccttctacgtaaagtatgtgcagatctttagaaacctagagaatgtctacgaccagttcgtccacccccagaaacgaatactgatcaggaaagtcctggacggggtgatgggccgcatcctggagctgaagaacgagatggtggagctggaactcacggagttccattatttcgatgatatcctgcaggatctcaagctggccccccaacaattagatattcccatacccaagtattttttgaaggagaagttggaagtaataaaaggaagagagaaaattcttgctcaaatattagcggacagcggaatagatacatctgacatgaaataccctgtaaagagtatccctttcgatgaggctgttaaattaatccagattgctgagagggcacggcaaggtcgcctaagggctttattcatgaagcaaatctatctgcaagaatatagagcaaagcaatccaagatgcttggcaagaaagtgacagatacctgggctgctgcactccgcattcagaaggtttggcgacgtttccatcaacgtaaggaaactgaaaaactgagagaagaggagatgatcttcctgggtatgaatccacctcctctctttaatgaagtcagtgctacagtaatccaggctgaaaaggtggaccgcctgcggaatgaggtgcagataaagcatgaagaggactacagggaagccctggttaccatcaagaatgacctaaagttgatagaaggcgtggatatcaaggagaaccttcaagaccagatccggcattggttcatcgaatgcagaaatttaaccgggacatttcctgactaccctgacgttgaagaaggagggtcagctattattttttctgacaagaccatacaacaggttattgaggatatcatagcaaaccaagaggaagaagaaaaaaacaaaaagaagaagaagaaaaaggaaaaacaacccaagaaagccaaaaaacaaaagaaaggaacaaaggagaaaaataaggaagaagacgaaaaatggaaaatgtcaccaagtctttttcttcctgcaatgaaggaaggatgtaacgcatacaaagaaatctggatgaaaaaagatgagtcttggaatttctctcaggactatgatccagaactgatcaaagaggagaaacgaaaagaattacagtcagagatcaggatacaggttgatgagttgatgagacaggaacttaaaaacttaaagctagctgtggacagagaaagggagcgcccagtgaaagcaggaaagaaaaaggacaagaaagggaaaaggaaataaaagaaagagaaaaaggcaaaaaagaaaaagtaatgcctttctgaagaaccatgcttgagtctctctgggatggagaggaccccaactcgccaaagaaaagattcaccattgcccgcctgaagaagccctcaggggaaggaacttagcagtgtgcaggtgagctgatgccgcaaacccgctaaccactgcatgtgctgttatgcctttcccaggctggacacctagctgggtgttcatcataactttccacagctttaatccacgccaagtttgtatataactgaaattcactcttgacaccctccacagtctttccaagttggactcttcctctcatcagtactagttgtcaaatttaaaatgtgacagttaaagaatattctagtttgacaattagtaagcaatgagtatatcatcagtacactagctttttattaatccatgtacactgtatagtatcttgcatctattttaataaattaattctttgctctagtaatagattttatataatgaaataaaggtgttgtccttgaactgaaagtaa

SEQ ID NO: 380799 - DNA, 845 bp, Homo sapiens
ttttatgactataacattaccaacagatctataaaagtacagtgtacaacaggaatgaaacttatttaacttaatgaccaacaaatgattgacagcagcttgatctgatgccatgacaactgatacatgaagaaaaaacaagggtttgcattcatgttcacatttgttaatacagtccctcaattatccagaaggcagattgggctatcagtttcctgagggacaaagctggcaaaagatttgctgaggactgttctcaattgctctgggaatttaaaacactttcatacacattgtctagttcagtggttctaaactgggggtgatttttcccgggcagggaatgttgggcgatgtctggagacatttttaattgtcatgattagggtacattactggcatctagtgggtggcagccaggcatgttgctgaacatcccacaatgcacaggacagccccacaacagagaattagccagccccaaatgtgagtagtgccaagcttgagaaactggcctagtttgaagtttacacatacaaagaaagaaaagcgaatctctatcaagtgtgtagcatggggtaggccctgttctaagtgcctcacttgaattaactcatttattaatcacagcaaacctatggggtaagtactattcttactcctgtgtaagcccgcataggtcattaggtggggaggtattatatacccactgaacagattagaaagttgagactcagcttattagtggaagcaccttggctccttctttgttgataataccactgccaactcatttttaggacagcagccctaaggctggtcatactctaaagcaagcttgtcca

SEQ ID NO: 380800 - DNA, 2912 bp, Homo sapiens
  misc_feature (1059)..(1059): n is a, c, g, or t
ggagttagaattgagagacttgaacgtggagatggaggtcaggctgcagtgcgatgggatcatctatggagcatatgaggagaagagaatctggaggaggaggagggggagccagcaggggagcagctgtgggttggaggaagccaggagggagagtgcaatgccgagaaagcaatgaagagcgtttcgaagcatgccagcagaacccaatgctgcaaagaggcctgggaatgggattgctgagggcccttctcacagtgagcccctcaagagcagcgtcaggggattgtggggactgttggcacacagctggctttgctaggttgaagacaatgggaggtgtggaagacttgttgacgcatttaaagaagattggagggaaaggtaggattgagagtgtttcagacagaaaaaggattatatgctgagggtaaagcacaagtacagagggttgcagatagtgcagaagtctttaaaaacaattattttaacccaacttccagggagactgaatttcttctgccagtcagtaacaccatcaacctgggagttgcccctgacccctccagtcttagctcctgctcctgtaacaaaataccacaaactggttagcttatagagaacagatgtttatttcttacagttcaggagtctggaagtccaagatcatggtgccatcatggccgagttctggtgagggccctcttctgggatgcagcggccagcttctcatgttctcacagtgggtggagggtaagcttgctctctggcctcctcttaaaaaggcactaatcccattcatgagggctccaccttcatgacctaattacctcccaaagatgccatctccaaacaccatcattctggggattccatttcaacatgatttgggggatacatcagaccataacacttttctttttctcaaccttcacatccagttggttctcaagccctggcgattttacgcgctagataggtcttaagttcatctctacgcctgccctggttaaggttctcatcatttctcctctggattcatctgcaacacaggctgcngggttggttcccacctcctagagctggaagagtgggctctctgattctttacacccccgcctcaatcctcctgctgcctgaataaccatctccccgtgacctaggatatatcccagccccttagaggcatgcaaagccttccatgtctgaccctgcctcatgtcttggaagccctagactgctgctgtaccctgaaggaggtacctgctcacattggcccctctgtctggaataaccccaccccggttccacccaattcaggaaagcttcccaacccctccctcccaccaccccaaagctaagtgaagtgacccctcttcttgcctctgtaacaccgccatgcacatttcatacagcccttgctgaaacttcatctagttctctgttagacttaacattccctaagggcaggtttggaaccttactcatctttatatggcgtccagatcctctagggacaggagttggatggagagcagactgtaaagcctcatgagggcaggggccctgcctcttcctgagctcaggatacccagagcctagctcagtgcctgccatgaaattgttcactccatcaagccttgttaaatgagttcggggcggggggagcatgatggttttctctctctcagaaagaaagcgctgtatcaaagccctagcaccctctctacacccaccttcagtatttcatattagatgcggcccaagtgatactttctttaccgtcccgtgaagacagcatattggcagccctgcaaaaacaaaacaaaacaaaaccctcagttcatggcatacttgctataaatcagctatgtgtattgtcaaattgtagaactgaaagtatattctgattcggtgtgtgtataaggaaatatacaccagtatatgcattaaaacgtcaagaagagctgggcacagtgtcacatgcctgtaaacccagctattcaggaggctgaggtgggaggatcggttgaggccaggagtttgaggctgcagtgagctatgattgcacagctgcactccagcctgtgctgagacctcatctcttaaaaaataaaaaataaaaagtctaagaggatacacagaaatttttaagtggttacctccacggaatgggattaggggatcagaggtgagggaactcatggtttggctatttctcgttctttctgcactgtttcaaatttttacaagtgtatgttattgtacttttaaaaagattagcttggcaacaagtctagcctgaaatgggtgctattttgactagtctgagtgaaaagtgaggatttaaatgaagtaacccctaaactcagccagtcccatgtttttttaacacttggaatatctaattccatttacactgcattcttcaaatgtaattttcaaagatgccttttgcctcatcccttgcttttaagtattattatagacttttggagactcacgaaacaagcaatccctaaattctcgcccaggaaagtatcttggattaaatggtttttgagaaccttgagagtgtatattctatgaaatggaagaaacaagaactagacagagtcacaaatgctgttgatcacagacaatctctgccatccataaggtaaatgtaatacatctggcgacctgctgagtgtgaacttgcagcaggtgaggaaggaactctgaactctcacaatcttgtttcttcatttcccagagagaaactcggcaaagagaaaaaggacatttccctccaggttatctgaaagaatttcaatgcttacctttaatcatgtgacattgtttatcttggattaaaagaaaagaaaatgtatttattttgtgcatattttcaataaaatatataaaatcga

SEQ ID NO: 380801 - DNA, 2966 bp, Homo sapiens
  misc_feature (1059)..(1059): n is a, c, g, or t
ggagttagaattgagagacttgaacgtggagatggaggtcaggctgcagtgcgatgggatcatctatggagcatatgaggagaagagaatctggaggaggaggagggggagccagcaggggagcagctgtgggttggaggaagccaggagggagagtgcaatgccgagaaagcaatgaagagcgtttcgaagcatgccagcagaacccaatgctgcaaagaggcctgggaatgggattgctgagggcccttctcacagtgagcccctcaagagcagcgtcaggggattgtggggactgttggcacacagctggctttgctaggttgaagacaatgggaggtgtggaagacttgttgacgcatttaaagaagattggagggaaaggtaggattgagagtgtttcagacagaaaaaggattatatgctgagggtaaagcacaagtacagagggttgcagatagtgcagaagtctttaaaaacaattattttaacccaacttccagggagactgaatttcttctgccagtcagtaacaccatcaacctgggagttgcccctgacccctccagtcttagctcctgctcctgtaacaaaataccacaaactggttagcttatagagaacagatgtttatttcttacagttcaggagtctggaagtccaagatcatggtgccatcatggccgagttctggtgagggccctcttctgggatgcagcggccagcttctcatgttctcacagtgggtggagggtaagcttgctctctggcctcctcttaaaaaggcactaatcccattcatgagggctccaccttcatgacctaattacctcccaaagatgccatctccaaacaccatcattctggggattccatttcaacatgatttgggggatacatcagaccataacacttttctttttctcaaccttcacatccagttggttctcaagccctggcgattttacgcgctagataggtcttaagttcatctctacgcctgccctggttaaggttctcatcatttctcctctggattcatctgcaacacaggctgcngggttggttcccacctcctagagctggaagagtgggctctctgattctttacacccccgcctcaatcctcctgctgcctgaataaccatctccccgtgacctaggatatatcccagccccttagaggcatgcaaagccttccatgtctgaccctgcctcatgtcttggaagccctagactgctgctgtaccctgaaggaggtacctgctcacattggcccctctgtctggaataaccccaccccggttccacccaattcaggaaagcttcccaacccctccctcccaccaccccaaagctaagtgaagtgacccctcttcttgcctctgtaacaccgccatgcacatttcatacagcccttgctgaaacttcatctagttctctgttagacttaacattccctaagggcaggtttggaaccttactcatctttatatggcgtctaaaatagtgcttgctttatgataggtgctcagtaaaggttgtcttgaattgagcagatcctctagggacaggagttggatggagagcagactgtaaagcctcatgagggcaggggccctgcctcttcctgagctcaggatacccagagcctagctcagtgcctgccatgaaattgttcactccatcaagccttgttaaatgagttcggggcggggggagcatgatggttttctctctctcagaaagaaagcgctgtatcaaagccctagcaccctctctacacccaccttcagtatttcatattagatgcggcccaagtgatactttctttaccgtcccgtgaagacagcatattggcagccctgcaaaaacaaaacaaaacaaaaccctcagttcatggcatacttgctataaatcagctatgtgtattgtcaaattgtagaactgaaagtatattctgattcggtgtgtgtataaggaaatatacaccagtatatgcattaaaacgtcaagaagagctgggcacagtgtcacatgcctgtaaacccagctattcaggaggctgaggtgggaggatcggttgaggccaggagtttgaggctgcagtgagctatgattgcacagctgcactccagcctgtgctgagacctcatctcttaaaaaataaaaaataaaaagtctaagaggatacacagaaatttttaagtggttacctccacggaatgggattaggggatcagaggtgagggaactcatggtttggctatttctcgttctttctgcactgtttcaaatttttacaagtgtatgttattgtacttttaaaaagattagcttggcaacaagtctagcctgaaatgggtgctattttgactagtctgagtgaaaagtgaggatttaaatgaagtaacccctaaactcagccagtcccatgtttttttaacacttggaatatctaattccatttacactgcattcttcaaatgtaattttcaaagatgccttttgcctcatcccttgcttttaagtattattatagacttttggagactcacgaaacaagcaatccctaaattctcgcccaggaaagtatcttggattaaatggtttttgagaaccttgagagtgtatattctatgaaatggaagaaacaagaactagacagagtcacaaatgctgttgatcacagacaatctctgccatccataaggtaaatgtaatacatctggcgacctgctgagtgtgaacttgcagcaggtgaggaaggaactctgaactctcacaatcttgtttcttcatttcccagagagaaactcggcaaagagaaaaaggacatttccctccaggttatctgaaagaatttcaatgcttacctttaatcatgtgacattgtttatcttggattaaaagaaaagaaaatgtatttattttgtgcatattttcaataaaatatataaaatcga

SEQ ID NO: 380802 - DNA, 3014 bp, Homo sapiens
  misc_feature (1059)..(1059): n is a, c, g, or t
ggagttagaattgagagacttgaacgtggagatggaggtcaggctgcagtgcgatgggatcatctatggagcatatgaggagaagagaatctggaggaggaggagggggagccagcaggggagcagctgtgggttggaggaagccaggagggagagtgcaatgccgagaaagcaatgaagagcgtttcgaagcatgccagcagaacccaatgctgcaaagaggcctgggaatgggattgctgagggcccttctcacagtgagcccctcaagagcagcgtcaggggattgtggggactgttggcacacagctggctttgctaggttgaagacaatgggaggtgtggaagacttgttgacgcatttaaagaagattggagggaaaggtaggattgagagtgtttcagacagaaaaaggattatatgctgagggtaaagcacaagtacagagggttgcagatagtgcagaagtctttaaaaacaattattttaacccaacttccagggagactgaatttcttctgccagtcagtaacaccatcaacctgggagttgcccctgacccctccagtcttagctcctgctcctgtaacaaaataccacaaactggttagcttatagagaacagatgtttatttcttacagttcaggagtctggaagtccaagatcatggtgccatcatggccgagttctggtgagggccctcttctgggatgcagcggccagcttctcatgttctcacagtgggtggagggtaagcttgctctctggcctcctcttaaaaaggcactaatcccattcatgagggctccaccttcatgacctaattacctcccaaagatgccatctccaaacaccatcattctggggattccatttcaacatgatttgggggatacatcagaccataacacttttctttttctcaaccttcacatccagttggttctcaagccctggcgattttacgcgctagataggtcttaagttcatctctacgcctgccctggttaaggttctcatcatttctcctctggattcatctgcaacacaggctgcngggttggttcccacctcctagagctggaagagtgggctctctgattctttacacccccgcctcaatcctcctgctgcctgaataaccatctccccgtgacctaggatatatcccagccccttagaggcatgcaaagccttccatgtctgaccctgcctcatgtcttggaagccctagactgctgctgtaccctgaaggaggtacctgctcacattggcccctctgtctggaataaccccaccccggttccacccaattcaggaaagcttcccaacccctccctcccaccaccccaaagctaagtgaagtgacccctcttcttgcctctgtaacaccgccatgcacatttcatacagcccttgctgaaacttcatctagttctctgttagacttaacattccctaagggcaggtttggaaccttactcatctttatatggcgtctaaaatagtgcttgctttatgataggtgctcagtaaaggttgtcttgaattgagcagatcctctagggacaggagttggatggagagcagactgtaaagcctcatgagggcaggggccctgcctcttcctgagctcaggatacccagagcctagctcagtgcctgccatgaaattgttcactccatcaagccttgttaaatgagttcggggcggggggagcatgatggttttctctctctcagaaagaaagcgctgtatcaaagccctagcaccctctctacacccaccttcagtatttcatattagatgcggcccaagtgatactttctttaccgtcccgtgaagacagcatattggcagccctgcaaaaacaaaacaaaacaaaaccctcagttcatggcatacttgctataaatcagctatgtgtattgtcaaattgtagaactgaaagtatattctgattcggtgtgtgtataaggaaatatacaccagtatatgcattaaaacgtcaagaagagctgggcacagtgtcacatgcctgtaaacccagctattcaggaggctgaggtgggaggatcggttgaggccaggagtttgaggctgcagtgagctatgattgcacagctgcactccagcctgtgctgagacctcatctcttaaaaaataaaaaataaaaagtctaagaggatacacagaaatttttaagtggttacctccacggaatgggattaggggatcagaggtgagggaactcatggtttggctatttctcgttctttctgcactgtttcaaatttttacaagtgtatgttattgtacttttaaaaagattagcttggcaacaagtctagcctgaaatgggtgctattttgactagtctgagtgaaaagtgaggatttaaatgaagtaacccctaaactcagccagtcccatgtttttttaacacttggaatatctaattccatttacactgcattcttcaaatgtaattttcaaagatgccttttgcctcatcccttgcttttaagtattattatagacttttggagactcacgaaacaagcaatccctaaattctcgcccaggaaagtatcttggattaaatggtttttgagaaccttgagagtgtatattctatgaaatggaagaaacaagaactagacagagtcacaaatgctgttgatcacagacaatctctgccatccataaggtaaatgtaatacatctggcgacctgctgagtgtgaacttgcagcaggtgaggaaggaactctgaactctcacaatcttgtttcttcatttcccagagagaaactcggcaaagagaaaaaggacatttccctccaggttatctgaaagaatttcaatgcttacctttaatcatgtgacattgtttatcttggattaaaagaaaagaaaatgtatttattttgtgcatattttcaataaaatatataaaatcgaaaaaaaaaatagtgccaaataccattaattaaaaatattttaacctga

SEQ ID NO: 380803 - DNA, 370 bp, Homo sapiens
gataattttcaggtttctgaggctttgtgtgtgtgtgtgtgtgtgcacgcgcatgtgtgtgcaggtgtgcacacaaaacaagtgtgttttccccttttgcatgtgaaaagaaggtcttaataatccctagtttatagttcctagttcctatttcatttaggtaattggccttatgagaatgtttaatagatgaaatgctttgttctgaattggtatatattttatgtaaaattcctgtaagaatagtttgggatttaaatttgtattttatatattggttatatgattatgaaaattaaattgatgattaaatgcagatataaaaataagttctgagccgttaataaaggtttctaaataaaaccgatca

SEQ ID NO: 380804 - DNA, 613 bp, Homo sapiens
  misc_feature (565)..(565): n is a, c, g, or t
tgttggttctccagaaattccctgattgtaaaatatctgatctcgtgaaaatgaagtcagcacttcccagaagttgagaggcctgaagggggagtaaaaaccgatttcaaatcctgcctggagggaacctgctcaggaggtcctggaaggtggaggcaggctctcatcgcctgtctttattaaataaagccctaaagccctagactgtggtgctcgaaactttttaagggatgcctgactcctcaagaagtctgtaccatttgaatgagctctagttgaaagaaaggtttttataatatattcaaagtggaaatctttcttactttgtttttttgtttgttttttgagacgaggtcttgctctgtcacctggatgaagtgcagtggcacagtcttggctcactgcagccttaaactcccaggctcaagtgattcccctgcctcagcctcctaaatagctgagactataggtgtgcaccactgtgttgcccaggctggtcttgaactcctggattcaagcacccacctaccttgtcctcccaaagtgctgagactacagacgtganccaccagccttgtcctaataaaattaagttgtatcattaaaaaaaaaa

SEQ ID NO: 380805 - DNA, 113 bp, Homo sapiens
  misc_feature (63)..(63): n is a, c, g, or t
aactcctggattcaagcacccacctaccttgtcctcccaaagtgctgagactacagacgtganccaccatgcccagcctctttctttcccatttttgagaagagtggagctaa

SEQ ID NO: 380806 - DNA, 745 bp, Homo sapiens
tgtgtctttaactaggacttctatttggaactgagtccgacagctcaggactggctgctcaaactccacaatttaatgaaaaatctcagatgatgactcagaaaacctctaatgatctgaggaatatattaagggattccagagtcaaaggctgatcatggagggcattgatgagggaagacttcaggtggctggagaccagaagaaaggaacactggaagaatgaaaacggttgtgatgcactgcagtgtgaaaatatgcccttgagccttaaagaaaggggcttaaggccgggcgcggtggctcacgcctgtactcccagcacacagatcacgaggtcaagagatttgagaccatcctggccaacacggtgaaaccccgtctctactaaaaatacaaaaaattatgtgggagtggtggcgcacgcctgtagtcccagctactcgggaggctgaggcaggagaatcgctggaacccaggaggcggaggaggttacagtgagccgagatcgcgccactgtactccagcctggcgacagagcgagactccgtctcaaaaaaaaaaaaaaaagaaaaagaaaagaaaggctactttcatcgctactgcacatcctctaagtaggttaaggaagatttacttagtagagcctcaagatggatttaagttatggataagaattatttataactaggatatcattcagtattataagtgtctgcagttacttaaggatgctagaaacagt

SEQ ID NO: 380807 - DNA, 691 bp, Homo sapiens
tgtgtctttaactaggacttctatttggaactgagtccgacagctcaggactggctgctcaaactccacaatttaatgaaaaatctcagatgatgactcagaaaacctctaatgatctgaggaatatattaagggattccagagtcaaaggctgatcatggagggcattgatgagggaagacttcaggtggctggagaccagaagaaaggaacactggaagaatgaaaacggttgtgatgcactgcagtgtgaaaatatgcccttgagccttaaagaaaggggcttaaggccgggcgcggtggctcacgcctgtactcccagcacacagatcacgaggtcaagagatttgagaccatcctggccaacacggtgaaaccccgtctctactaaaaatacaagaggcaggagaatcgctggaacccaggaggcggaggaggttacagtgagccgagatcgcgccactgtactccagcctggcgacagagcgagactccgtctcaaaaaaaaaaaaaaaagaaaaagaaaagaaaggctactttcatcgctactgcacatcctctaagtaggttaaggaagatttacttagtagagcctcaagatggatttaagttatggataagaattatttataactaggatatcattcagtattataagtgtctgcagttacttaaggatgctagaaacagt

SEQ ID NO: 380808 - DNA, 889 bp, Homo sapiens
taacttactgcgcggccataaaatttaggtctgtcgggaaaattatctagtccagtcaccttattttaaagtgaaaagctatagtctggagaggttaacagttagtggtgagctggagtagagaataactttggccccagaaagagctgtgttccaatcctggctctgtcctttgtgagctgtgtgactacagaccagtgactcaatgtctctagacttgttaatatagaatgagaagaatgatccttagtctcatgggaacatactgattaaagtatgtgtgtaacctacacttctgctcaacattcggcatgccaaaaccatctcattatagtcagctgtccccaaattacaaatggacgatttcaaactttggccgatgagtctgttctttatgatttgaaataatgctgtaagtgatgagtaggtcaccaagatgggcccccaagtccagtgaacagagaccttggaaaactgcagtgtacttctagacttctctgaattccttatacattccaaatgtgcaaaatccccaaggaaatcgcgtttttcagagagctgagcaatcagatctttaggccttccaccctcacaaatgaagttaatatactactaggtcaatgacatcaggaacacaataggtttgcatggtgcttaattctagtatccttttctatctgtttgtttgtttgtttgtttgtttgaaacagagtctcattatagtcagctgtccccaaattacaaatggacgatttcaaactttggccgatgagtctgttctttatgatttgaaataatgctgtaagtgatgagtaggtcaccaagatgggcccccaagtccagtgaacagagaccttggaaaactgcagtgtacttctagacaactccg

SEQ ID NO: 380809 - DNA, 454 bp, Homo sapiens
ccaaaaccatctcattatagtcagctgtccccaaattacaaatggacgatttcaaactttggccgatgagtctgttctttatgatttgaaataatgctgtaagtgatgagtaggtcaccaagatgggcccccaagtccagtgaacagagaccttggaaaactgcagtgtacttctagacttctctgaattccttatacattccaaatgtgcaaaatccccaaggaaatcgcgtttttcagagagctgagcaatcagatctttaggccttccaccctcacaaatgaagttaatatactactaggtcaatgacatcaggaacacaataggtttgcatggtgcttaattctagtatccttttctatctgtttgtttgtttgtttgtttgtttgaaacagagtctcactctgttgtccaggctggagtgcagtggcgcgatctcggctcactgcaacc

SEQ ID NO: 380810 - DNA, 450 bp, Homo sapiens
gatgtctgcattttccagaataaatgactttctctcccttaatttctacttttagaatcttaatgagcattgagttttggagacagtgaccttgttttcaagtgtaggaattaattactttaaaaatgtcactgtttaaaggaatatcagcaccctgttctcactcatgaattatcaccacataaaatctcacaaagattatatgaatctcttccaacaaaatggtttgcctttttatgtgcagaggatggtcctgggacaattgcaacaaaatcatttgggtggggagaggtgattattacaaatacataatccaggtccccactgcagaccaacaaaccggaatctataggatccttagagctgctgctgctgctttatttttttgaggcagttttactctgtcacccaggctggagtgcagtggctcaatcttggttcactgcaacc

SEQ ID NO: 380811 - DNA, 461 bp, Homo sapiens
acatcatgtaggtttgtataagaacactctatgatgtttaaacagcaattaaattacctaatgatgcatttctcaaaatgtatcctctgctgggtgccatgactcatccctgtaatcccagcaatttgagaggccaagatgggtggatcacctgaggtcaggagttcaagaccagcctggccaacatggtgaaaccacgtctctgcctaaaaatataaaaaattagccagacatggtggcgggtgcctgtaattccagctacttgggaggtggaggcaggagaatcgcttgaacctaggaggcagagctttcggtgagctgacatcacgccattgcactccagcctggacaacaagagccaaacttcatttcaaaaaataaataaataaaaatgtaatttttcatcaataagtgttgcatgactgtatgtagatattctcaataaaatcctttaacagata

SEQ ID NO: 380812 - DNA, 357 bp, Homo sapiens
gtttacattgataatagtaattatatatagtgtgattacagcacatagataaataaaatgaattcagcaatgtcataaggaataagaaaagggaatttgaaatgctctaatataaggtacatgcactatacgtgaagtggtatagtgttatttgaaggtgaacttagattagttaaaaatgtatagtgcaaactctagggcaatcataaagatatttttaaaagaagtataactgatgctatagttcagatacttgaacctccaaacctcatgttgaaatttgatccccagtgttggaggtgggatctagtgggaggtatttgggtcataggggtgagtttctcatgaatatattaa

SEQ ID NO: 380813 - DNA, 387 bp, Homo sapiens
aacctctgcctcccgggttcaagtgtttctcctgcctcagcctcccaagtagctgggattacaggtgcacaccaccacgcccagctaatttgtgtatttttagtagacacggggtttcaccatgttagccaggctggtctcgaactcctgacctcaagtgatccgcccgcctccacctcccaaagagctgggatcataggtgtgagccactgcacttggccaatttcctaatttttacagcagaacaagaattaggaaaatgtgtagatgaggaaactgaagcccagagtggcaaagaaacttgcccaacatcacacagagccagagtgagaactctagccttctggctcctaatccagggcttgttccttcagcccacagccttcc

SEQ ID NO: 380814 - DNA, 832 bp, Homo sapiens
gatattcagggttgttttatattgctataaaccatcattatacaacaaaatggtaactgaagttgctgagttactacaatatagactggcagggcaaagtaacaaataattttgaagtttgccaagaatcatttttaaagcccttagcaggcttctgtgccactggtgctgtttgactgtgcattgtctcaatgtggtatagtccctttttgttatcttggtgctttctccctttttcagttgtgttgtttcgtcactcaggaaaagcacctttctacacctgcctgcatttaacataactcgatttttttccctcccttttgcagcagttgcgattcttgcagcatcaaatggctatggcagcagcagcagcacaaacagctcagctacatcatcatcggcatacaggcagccagtcaaaaagtaaaatgaagagaggcacgccaaccactccaaaattttgagtcttgcattactttttgttccttttttaaaaacacaagagcactgaatcaaaagaattgagtttctactttttgttttttttaatgtgtcagtattttacattgctagatgtacaaactttatacagaagcacaaccttatcatttttaaataaaaacagggaaatggtttaacaaactagggttggtttgcctaagtcattgctttttaaaaatggtttcactatacataatatatatggaagtgacctaagaaataatagaaacatctttcagaagaatgtagtttgatatttatttagtataaaacgtttgtgcacagtgttaacaaatacaatttttacaaatctgttttgaaaaaaaaaaaa

SEQ ID NO: 380815 - DNA, 2642 bp, Homo sapiens
agcggagtcggaagtgcggccgccggaactggctgttggtgggggtgcagcactgagccgccgacggggcgggtgggctttgctgccgagcaggcggcgccgtcttggggcctagcggcgaggcgacccgcacagtactgtaagattgatgttaaaggcatggtgttcaccccacttcatcagcgtacataagttatctcttcttttggacccttattttatgccataatgcaacaagctttagaactagctttggatcgtgcagagtatgtcattgaaagtgcccgacagagacctcctaaaaggaaatacctatcaagtggaagaaaatctgtatttcaaaaactttatgacttgtatattgaagaatgtgaaaaagaacctgaagttaagaaattaagaagaaatgtgaacttgttagagaagcttgttatgcaagagactttgtcatgtttagtggtcaatctatacccaggaaatgagggatattctctgatgctcaggggaaaaaacggatcagattccgagaccattcgactgccctatgaagaaggagagttgcttgaatatttggatgcagaagaattacctcctattttggttgatctcctagaaaaatctcaggttaatatttttcattgcggatgtgtcatagcagaaatacgtgactacaggcagtccagtaacatgaaatctcctggttaccaaagtcggcacattctcttacgtccaacaatgcagactttaatttgtgatgtacattcaataacaagtgataaccacaaatggacccaggaagacaaacttttgcttgagagccagctcatcctagctacagctgaaccactctgtcttgatccttctatagcagtcacctgcactgcaaacagactgctctataacaagcaaaagatgaacactcgcccaatgaaacggtgtttcaagaggtattccagatcctctctgaatcggcagcaagatctatctcattgtccacctcctcctcagctgaggttacttgatttcttacaaaaaagaaaggaaagaaaagcaggtcagcattatgacctcaaaatttctaaggcaggaaattgtgtagatatgtggaaacggagtccctgtaatttggccataccttctgaagtagatgtggagaaatatgctaaagtggaaaagtctatcaaatctgatgactcacagccaacagtctggccagcccatgatgtaaaagatgattatgtatttgaatgtgaagctggtactcagtatcagaaaacaaagctgaccatcttgcagtcgcttggagatccactttactatggtaaaatacagccatgtaaagcagatgaagaaagtgacagccagatgtctccatcacactcgtccacagatgatcattcaaattggttcattattggatcaaagaccgatgctgagagggtagtcaatcagtaccaagaattagtccagaatgaagccaaatgtccggtcaagatgtcacacagctccagtggctcagccagtctgagtcaggtttctccagggaaagaaacagatcaaactgaaaccgtgtcagttcagtcttcggtattggggaagggtgtaaaacatcgacccccaccaatcaaacttccctcaagctcaggaaatagttcctcaggtaactattttacaccacaacagacaagcagctttctcaaatctccaactcctcctccttcttctaagccatcaagtattcctcggaaatcatctgtggatctcaatcaagttagcatgctttctccagctgccctatcacctgccagctcatcacaaagaaccacggccacccaggtcatggcaaactctgctggacttaacttcatcaatgtagtgggctctgtttgtggggcccaggctttgatgagtggttcaaaccccatgctgggctgtaacactggtgccataactcctgcaggaataaacctgagcggccttctaccctcaggaggtctgctaccaaatgcactgcccagtgcaatgcaggcagcttctcaagcaggtgttccatttggtttaaaaaatacttcaagtctcaggcccttaaatctactccagcttccaggtggttcacttatttttaacactctgcagcagcagcaacagcagctctcccagtttacaccacaacaacctcagcagcccacaacttgtagtcctcaacagccaggggagcagggttctgagcaaggttcaaccagtcaagaacaggccttatctgctcagcaagctgctgttattaaccttactggagtaggaagttttatgcagtcacaggcagctgcagttgcgattcttgcagcatcaaatggctatggcagcagcagcagcacaaacagctcagctacatcatcatcggcatacaggcagccagtcaaaaagtaaaatgaagagaggcacgccaaccactccaaaattttgagtcttgcattactttttgttccttttttaaaaacacaagagcactgaatcaaaagaattgagtttctactttttgttttttttaatgtgtcagtattttacattgctagatgtacaaactttatacagaagcacaaccttatcatttttaaataaaaacagggaaatggtttaacaaa

SEQ ID NO: 380816 - DNA, 3098 bp, Homo sapiens
agcggagtcggaagtgcggccgccggaactggctgttggtgggggtgcagcactgagccgccgacggggcgggtgggctttgctgccgagcaggcggcgccgtcttggggcctagcggcgaggcgacccgcacaggtgggcggtggcggtaggtgggtggccagcgactggcaacgcggtggcttagacgcgcgagatccggccagggtcagagtactgtaagattgatgttaaaggcatggtgttcaccccacttcatcagcgtacataagttatctcttcttttggacccttattttatgccataatgcaacaagctttagaactagctttggatcgtgcagagtatgtcattgaaagtgcccgacagagacctcctaaaaggaaatacctatcaagtggaagaaaatctgtatttcaaaaactttatgacttgtatattgaagaatgtgaaaaagaacctgaagttaagaaattaagaagaaatgtgaacttgttagagaagcttgttatgcaagagactttgtcatgtttagtggtcaatctatacccaggaaatgagggatattctctgatgctcaggggaaaaaacggatcagattccgagaccattcgactgccctatgaagaaggagagttgcttgaatatttggatgcagaagaattacctcctattttggttgatctcctagaaaaatctcaggttaatatttttcattgcggatgtgtcatagcagaaatacgtgactacaggcagtccagtaacatgaaatctcctggttaccaaagtcggcacattctcttacgtccaacaatgcagactttaatttgtgatgtacattcaataacaagtgataaccacaaatggacccaggaagacaaacttttgcttgagagccagctcatcctagctacagctgaaccactctgtcttgatccttctatagcagtcacctgcactgcaaacagactgctctataacaagcaaaagatgaacactcgcccaatgaaacggtgtttcaagaggtattccagatcctctctgaatcggcagcaagatctatctcattgtccacctcctcctcagctgaggttacttgatttcttacaaaaaagaaaggaaagaaaagcaggtcagcattatgacctcaaaatttctaaggcaggaaattgtgtagatatgtggaaacggagtccctgtaatttggccataccttctgaagtagatgtggagaaatatgctaaagtggaaaagtctatcaaatctgatgactcacagccaacagtctggccagcccatgatgtaaaagatgattatgtatttgaatgtgaagctggtactcagtatcagaaaacaaagctgaccatcttgcagtcgcttggagatccactttactatggtaaaatacagccatgtaaagcagatgaagaaagtgacagccagatgtctccatcacactcgtccacagatgatcattcaaattggttcattattggatcaaagaccgatgctgagagggtagtcaatcagtaccaagaattagtccagaatgaagccaaatgtccggtcaagatgtcacacagctccagtggctcagccagtctgagtcaggtttctccagggaaagaaacagatcaaactgaaaccgtgtcagttcagtcttcggtattggggaagggtgtaaaacatcgacccccaccaatcaaacttccctcaagctcaggaaatagttcctcaggtaactattttacaccacaacagacaagcagctttctcaaatctccaactcctcctccttcttctaagccatcaagtattcctcggaaatcatctgtggatctcaatcaagttagcatgctttctccagctgccctatcacctgccagctcatcacaaagaaccacggccacccaggtcatggcaaactctgctggacttaacttcatcaatgtagtgggctctgtttgtggggcccaggctttgatgagtggttcaaaccccatgctgggctgtaacactggtgccataactcctgcaggaataaacctgagcggccttctaccctcaggaggtctgctaccaaatgcactgcccagtgcaatgcaggcagcttctcaagcaggtgttccatttggtttaaaaaatacttcaagtctcaggcccttaaatctactccagcttccaggtggttcacttatttttaacactctgcagcagcagcaacagcagctctcccagtttacaccacaacaacctcagcagcccacaacttgtagtcctcaacagccaggggagcagggttctgagcaaggttcaaccagtcaagaacaggccttatctgctcagcaagctgctgttattaaccttactggagtaggaagttttatgcagtcacaggcagctgcagttgcgattcttgcagcatcaaatggctatggcagcagcagcagcacaaacagctcagctacatcatcatcggcatacaggcagccagtcaaaaagtaaaatgaagagaggcacgccaaccactccaaaattttgagtcttgcattactttttgttccttttttaaaaacacaagagcactgaatcaaaagaattgagtttctactttttgttttttttaatgtgtcagtattttacattgctagatgtacaaactttatacagaagcacaaccttatcatttttaaataaaaacagggaaatggtttaacaaaaaaaaagacctccccagcccctagcccaggagagagaaagccaggcaggtagccagggggactagcccctgtggagactggggggcttgaaattgtccccgtggtctcttactttcctttccccagcccagggtggacttagaaagcaggggctacaagagggaatccccgaaggtgctggaggtgggagcaggagattgagaaggagagaaagtgggtgagatgctggagaagagaggagaggagagaggcagagagcggtctcaggctggtgggaggggcgcccacctccccacgccctcccctcccctgctgcaggggctctggagagaaacaataaagagattcacacaaaaaaaaaaaaccggaattaagcc

SEQ ID NO: 380817 - DNA, 678 bp, Homo sapiens
tggacaatttgtcattgaacagtttaaaaatatgtacttttaatacaaagataaattgcctaatttttaatatttatgttaattttgatagaactttctttttgccattaatagtcattattctttcctataaaataaatttgtgtttaaaacaggttttctaatctttacctgttttctcctgatattttagggtagtcaatcagtaccaagaattagtccagaatgaagccaaatgtccggtcaagatgtcacacagctccagtggctcagccagtctgagtcaggtttctccagggaaagaaacagatgtgtgtttcattaatgttacttctttgtgcccagttgtttcacaagtaatctgagaaatgttaagaatcatttttggaggctaggcacagtggctcatgcctgtaatcccaacactttgggaggccaaggtgggtggatcacctgaggtcgggagttcgagaccagcctgaccaatagtgtgaaaccccatctctactaaaaacacaaaaattagctgggcatggtggcacacacctgtaatcccagccactcgggaggctgagacaggagaatctcttgaaccccggaggtggaggtttcagtgagccgagatagcgccactgcactccagcctgggcaacagagcaagactccatctcaaaaaaa

SEQ ID NO: 380818 - DNA, 447 bp, Homo sapiens
aaatttattctgaaatgtctatgatttgatacttaagattaatcatactgctaacttttctattatttcattttctatgttgtccttttctaaccctggtagccttcaaactttttgactggcctgctttccccttctcctctctgtagtgttgtctcagcttggctctgccgagaacagacctgagcaaagccttcctcagcagagattccagctctcctctgcctttcaacagcagcagcaacagatacaagtaatccagcaacttcactctgattacatttttaaagatactcagctccaaaagtacctcaaaataacttgctttagttttattttactgtcttttaagactgtacagtaattggtaaataatttagcaaattttaaagtctgacattttagccagtcaacttggagcactgaatatattttgtatatttaagc

SEQ ID NO: 380819 - DNA, 4745 bp, Homo sapiens
  misc_feature (1878)..(1878): n is a, c, g, or t
agcggagtcggaagtgcggccgccggaactggctgttggtgggggtgcagcactgagccgccgacggggcgggtgggctttgctgccgagcaggcggcgccgtcttggggcctagcggcgaggcgacccgcacagtactgtaagattgatgttaaaggcatggtgttcaccccacttcatcagcgtacataagttatctcttcttttggacccttattttatgccataatgcaacaagctttagaactagctttggatcgtgcagagtatgtcattgaaagtgcccgacagagacctcctaaaaggaaatacctatcaagtggaagaaaatctgtatttcaaaaactttatgacttgtatattgaagaatgtgaaaaagaacctgaagttaagaaattaagaagaaatgtgaacttgttagagaagcttgttatgcaagagactttgtcatgtttagtggtcaatctatacccaggaaatgagggatattctctgatgctcaggggaaaaaacggatcagattccgagaccattcgactgccctatgaagaaggagagttgcttgaatatttggatgcagaagaattacctcctattttggttgatctcctagaaaaatctcaggttaatatttttcattgcggatgtgtcatagcagaaatacgtgactacaggcagtccagtaacatgaaatctcctggttaccaaagtcggcacattctcttacgtccaacaatgcagactttaatttgtgatgtacattcaataacaagtgataaccacaaatggacccaggaagacaaacttttgcttgagagccagctcatcctagctacagctgaaccactctgtcttgatccttctatagcagtcacctgcactgcaaacagactgctctataacaagcaaaagatgaacactcgcccaatgaaacggtgtttcaagaggtattccagatcctctctgaatcggcagcaagatctatctcattgtccacctcctcctcagctgaggttacttgatttcttacaaaaaagaaaggaaagaaaagcaggtcagcattatgacctcaaaatttctaaggcaggaaattgtgtagatatgtggaaacggagtccctgtaatttggccataccttctgaagtagatgtggagaaatatgctaaagtggaaaagtctatcaaatctgatgactcacagccaacagtctggccagcccatgatgtaaaagatgattatgtatttgaatgtgaagctggtactcagtatcagaaaacaaagctgaccatcttgcagtcgcttggagatccactttactatggtaaaatacagccatgtaaagcagatgaagaaagtgacagccagatgtctccatcacactcgtccacagatgatcattcaaattggttcattattggatcaaagaccgatgctgagagggtagtcaatcagtaccaagaattagtccagaatgaagccaaatgtccggtcaagatgtcacacagctccagtggctcagccagtctgagtcaggtttctccagggaaagaaacagatcaaactgaaaccgtgtcagttcagtcttcggtattggggaagggtgtaaaacatcgacccccaccaatcaaacttccctcaagctcaggaaatagttcctcaggtaactattttacaccacaacagacaagcagctttctcaaatctccaactcctcctccttcttctaagccatcaagtattcctcggaaatcatctgtggatctcaatcaagttagcatgctttctccagctgccctatcacctgccagctcatcacaaagtgagtcataacttaaattcttcattaaatcttcataagcttttgcattagtgtttctnaagacagcttttttcaacctgtgaagtagtgatatctgaatgtactgtgtacccaaaatgtataagttgctagaagcttcaggcagagctcttgttgattgtatgtattatgtctctattgtaattgtacttgtttttctgtatctgtgtatgcattctgcgtgtacctttcttataggcttacaacctacacatctccttaaaaaaataacctggtagttacatgtggcaataagatttcaaaatattttttattccagtgtaccctaggatcattttgcatatttatgtaaattgtgtggctgatatgaaaaaaatgtcataagagttgttgctgcaggtcctatctttgtgtatatgtaagaagtcaactagttccaaggtggtgatacaataaactgaaaaacaatatttcaaaaacactcctacactcttttataaattgttgtcagttactaaaatgtgatgataatcataaagcattattctgaagatactgaaatgtaatttttactactgaatacttttttttaacatcaagaagagttatacaagaatgctagcattagtttgggagaatttcttcaaattagtaaatatctgaaagtaccaatttggggaaaaaagtcattccagttttttagattttttatagatagctaatatatgctgaaagttttagtacactgcacagtgatagggtggtcttcgcattagatataaacatcttcatctcgatagctcaaaaggtgtaatttttctgccttcttgttttgcacaaagaaaaatatataaattttctgaaagtcttattcacacttcttatgttgtgggtatggattatggtaatctactgcacacagttgttactttaagtaagggttgagtgacagcttctggacattcacatttctttcctttctttctgcaggacatgaaagctaaaaaagaaaacacctcaagagcttttggttttacttttttggtttttgttttttgtttttgttttttaaaaaattgataaactgtgcatacttcattcacaacagattttctatacattctacatttaaacagaagtacacagttactgttaaagatgcagtattatctctcagatatttgctttattactgttttttgtaaatttgtttgtcaggataaacttgatgtgttaggaattaaacatgtatatttaggtgccaaatatgattgttaaccatatgtaacttattaaatatgtttacagtttatctcagacttttacactaaataagcaatatttttaaatgaagtcttgaattagtgaaatcgtaaataacaaattaatttgaattcgttttgaactttttaggccaaaggcagcatgtaggaaactaacttttaaatgggtattgtggtagaatataactgtatatttttactgttactgcaatagcatctttaatgggatttttaggtgatatactgcatccttaattgtaattgagtgtagcaacactcatgtatcatgtgtagaaattaacacttgcagttaactgctaaaaaaaaaaaaactagaacaaattgtcagtgctaagtaagattccattaaccttattttaaaaggactggccatttataacaaactagcaattttaatttttctcaatgagcaggatctggaactcctaagccatctactcctacaccaaccccttcatcgaccccacaccctcctgatgctcagagctcaactcctagtaccccttcagccacccctactccccaagattcaggcttcacccctcagcccactttgttaactcagtttgctcagcagcaaaggtctctgagccaggcaatgcctgtaacaaccattcctctttccaccatggtaacatctataactccaggaaccacggccacccaggtcatggcaaactctgctggacttaacttcatcaatgtagtgggctctgtttgtggggcccaggctttgatgagtggttcaaaccccatgctgggctgtaacactggtgccataactcctgcaggaataaacctgagcggccttctaccctcaggaggtctgctaccaaatgcactgcccagtgcaatgcaggcagcttctcaagcaggtgttccatttggtttaaaaaatacttcaagtctcaggcccttaaatctactccaggcaacagcagctctcccagtttacaccacaacaacctcagcagcccacaacttgtagtcctcaacagccaggggagcagggttctgagcaaggttcaaccagtcaagaacaggccttatctgctcagcaagctgctgttattaaccttactggagtaggaagttttatgcagtcacaggcagctgcagttgcgattcttgcagcatcaaatggctatggcagcagcagcagcacaaacagctcagctacatcatcatcggcatacaggcagccagtcaaaaagtaaaatgaagagaggcacgccaaccactccaaaattttgagtcttgcattactttttgttccttttttaaaaacacaagagcactgaatcaaaagaattgagtttctactttttgttttttttaatgtgtcagtattttacattgctagatgtacaaactttatacagaagcacaaccttatcatttttaaataaaaacagggaaatggtttaacaaactagggttggtttgcctaagtcattgctttttaaaaatggtttcactatacataatatatatggaagtgacctaagaaataatagaaacatctttcagaagaatgtagtttgatatttatttagtataaaacgtttgtgcacagtgttaacaaatacaatttttacaaatctgttttgaaaaaaaaaaaa

SEQ ID NO: 380820 - DNA, 4948 bp, Homo sapiens
  misc_feature (2040)..(2040): n is a, c, g, or t
agcggagtcggaagtgcggccgccggaactggctgttggtgggggtgcagcactgagccgccgacggggcgggtgggctttgctgccgagcaggcggcgccgtcttggggcctagcggcgaggcgacccgcacaggctttggtatcaggatgatgctggcctcataaaatgagttagggaggattccctctttttccattgattggaatagtttcagaaggaatggtaccacctcctccttgtacctctggtagaattcggctgtgaatccatctggtcctggactttttttggttgtactgtaagattgatgttaaaggcatggtgttcaccccacttcatcagcgtacataagttatctcttcttttggacccttattttatgccataatgcaacaagctttagaactagctttggatcgtgcagagtatgtcattgaaagtgcccgacagagacctcctaaaaggaaatacctatcaagtggaagaaaatctgtatttcaaaaactttatgacttgtatattgaagaatgtgaaaaagaacctgaagttaagaaattaagaagaaatgtgaacttgttagagaagcttgttatgcaagagactttgtcatgtttagtggtcaatctatacccaggaaatgagggatattctctgatgctcaggggaaaaaacggatcagattccgagaccattcgactgccctatgaagaaggagagttgcttgaatatttggatgcagaagaattacctcctattttggttgatctcctagaaaaatctcaggttaatatttttcattgcggatgtgtcatagcagaaatacgtgactacaggcagtccagtaacatgaaatctcctggttaccaaagtcggcacattctcttacgtccaacaatgcagactttaatttgtgatgtacattcaataacaagtgataaccacaaatggacccaggaagacaaacttttgcttgagagccagctcatcctagctacagctgaaccactctgtcttgatccttctatagcagtcacctgcactgcaaacagactgctctataacaagcaaaagatgaacactcgcccaatgaaacggtgtttcaagaggtattccagatcctctctgaatcggcagcaagatctatctcattgtccacctcctcctcagctgaggttacttgatttcttacaaaaaagaaaggaaagaaaagcaggtcagcattatgacctcaaaatttctaaggcaggaaattgtgtagatatgtggaaacggagtccctgtaatttggccataccttctgaagtagatgtggagaaatatgctaaagtggaaaagtctatcaaatctgatgactcacagccaacagtctggccagcccatgatgtaaaagatgattatgtatttgaatgtgaagctggtactcagtatcagaaaacaaagctgaccatcttgcagtcgcttggagatccactttactatggtaaaatacagccatgtaaagcagatgaagaaagtgacagccagatgtctccatcacactcgtccacagatgatcattcaaattggttcattattggatcaaagaccgatgctgagagggtagtcaatcagtaccaagaattagtccagaatgaagccaaatgtccggtcaagatgtcacacagctccagtggctcagccagtctgagtcaggtttctccagggaaagaaacagatcaaactgaaaccgtgtcagttcagtcttcggtattggggaagggtgtaaaacatcgacccccaccaatcaaacttccctcaagctcaggaaatagttcctcaggtaactattttacaccacaacagacaagcagctttctcaaatctccaactcctcctccttcttctaagccatcaagtattcctcggaaatcatctgtggatctcaatcaagttagcatgctttctccagctgccctatcacctgccagctcatcacaaagtgagtcataacttaaattcttcattaaatcttcataagcttttgcattagtgtttctnaagacagcttttttcaacctgtgaagtagtgatatctgaatgtactgtgtacccaaaatgtataagttgctagaagcttcaggcagagctcttgttgattgtatgtattatgtctctattgtaattgtacttgtttttctgtatctgtgtatgcattctgcgtgtacctttcttataggcttacaacctacacatctccttaaaaaaataacctggtagttacatgtggcaataagatttcaaaatattttttattccagtgtaccctaggatcattttgcatatttatgtaaattgtgtggctgatatgaaaaaaatgtcataagagttgttgctgcaggtcctatctttgtgtatatgtaagaagtcaactagttccaaggtggtgatacaataaactgaaaaacaatatttcaaaaacactcctacactcttttataaattgttgtcagttactaaaatgtgatgataatcataaagcattattctgaagatactgaaatgtaatttttactactgaatacttttttttaacatcaagaagagttatacaagaatgctagcattagtttgggagaatttcttcaaattagtaaatatctgaaagtaccaatttggggaaaaaagtcattccagttttttagattttttatagatagctaatatatgctgaaagttttagtacactgcacagtgatagggtggtcttcgcattagatataaacatcttcatctcgatagctcaaaaggtgtaatttttctgccttcttgttttgcacaaagaaaaatatataaattttctgaaagtcttattcacacttcttatgttgtgggtatggattatggtaatctactgcacacagttgttactttaagtaagggttgagtgacagcttctggacattcacatttctttcctttctttctgcaggacatgaaagctaaaaaagaaaacacctcaagagcttttggttttacttttttggtttttgttttttgtttttgttttttaaaaaattgataaactgtgcatacttcattcacaacagattttctatacattctacatttaaacagaagtacacagttactgttaaagatgcagtattatctctcagatatttgctttattactgttttttgtaaatttgtttgtcaggataaacttgatgtgttaggaattaaacatgtatatttaggtgccaaatatgattgttaaccatatgtaacttattaaatatgtttacagtttatctcagacttttacactaaataagcaatatttttaaatgaagtcttgaattagtgaaatcgtaaataacaaattaatttgaattcgttttgaactttttaggccaaaggcagcatgtaggaaactaacttttaaatgggtattgtggtagaatataactgtatatttttactgttactgcaatagcatctttaatgggatttttaggtgatatactgcatccttaattgtaattgagtgtagcaacactcatgtatcatgtgtagaaattaacacttgcagttaactgctaaaaaaaaaaaaactagaacaaattgtcagtgctaagtaagattccattaaccttattttaaaaggactggccatttataacaaactagcaattttaatttttctcaatgagcaggatctggaactcctaagccatctactcctacaccaaccccttcatcgaccccacaccctcctgatgctcagagctcaactcctagtaccccttcagccacccctactccccaagattcaggcttcacccctcagcccactttgttaactcagtttgctcagcagcaaaggtctctgagccaggcaatgcctgtaacaaccattcctctttccaccatggtaacatctataactccaggaaccacggccacccaggtcatggcaaactctgctggacttaacttcatcaatgtagtgggctctgtttgtggggcccaggctttgatgagtggttcaaaccccatgctgggctgtaacactggtgccataactcctgcaggaataaacctgagcggccttctaccctcaggaggtctgctaccaaatgcactgcccagtgcaatgcaggcagcttctcaagcaggtgttccatttggtttaaaaaatacttcaagtctcaggcccttaaatctactccagcttccaggtggttcacttatttttaacactctgcagcagcagcaacagcagctctcccagtttacaccacaacaacctcagcagcccacaacttgtagtcctcaacagccaggggagcagggttctgagcaaggttcaaccagtcaagaacaggccttatctgctcagcaagctgctgttattaaccttactggagtaggaagttttatgcagtcacaggcagctgcagttgcgattcttgcagcatcaaatggctatggcagcagcagcagcacaaacagctcagctacatcatcatcggcatacaggcagccagtcaaaaagtaaaatgaagagaggcacgccaaccactccaaaattttgagtcttgcattactttttgttccttttttaaaaacacaagagcactgaatcaaaagaattgagtttctactttttgttttttttaatgtgtcagtattttacattgctagatgtacaaactttatacagaagcacaaccttatcatttttaaataaaaacagggaaatggtttaacaaactagggttggtttgcctaagtcattgctttttaaaaatggtttcactatacataatatatatggaagtgacctaagaaataatagaaacatctttcagaagaatgtagtttgatatttatttagtataaaacgtttgtgcacagtgttaacaaatacaatttttacaaatctgttttgaaaaaaaaaaaa

SEQ ID NO: 380821 - DNA, 4890 bp, Homo sapiens
  misc_feature (1878)..(1878): n is a, c, g, or t
agcggagtcggaagtgcggccgccggaactggctgttggtgggggtgcagcactgagccgccgacggggcgggtgggctttgctgccgagcaggcggcgccgtcttggggcctagcggcgaggcgacccgcacagtactgtaagattgatgttaaaggcatggtgttcaccccacttcatcagcgtacataagttatctcttcttttggacccttattttatgccataatgcaacaagctttagaactagctttggatcgtgcagagtatgtcattgaaagtgcccgacagagacctcctaaaaggaaatacctatcaagtggaagaaaatctgtatttcaaaaactttatgacttgtatattgaagaatgtgaaaaagaacctgaagttaagaaattaagaagaaatgtgaacttgttagagaagcttgttatgcaagagactttgtcatgtttagtggtcaatctatacccaggaaatgagggatattctctgatgctcaggggaaaaaacggatcagattccgagaccattcgactgccctatgaagaaggagagttgcttgaatatttggatgcagaagaattacctcctattttggttgatctcctagaaaaatctcaggttaatatttttcattgcggatgtgtcatagcagaaatacgtgactacaggcagtccagtaacatgaaatctcctggttaccaaagtcggcacattctcttacgtccaacaatgcagactttaatttgtgatgtacattcaataacaagtgataaccacaaatggacccaggaagacaaacttttgcttgagagccagctcatcctagctacagctgaaccactctgtcttgatccttctatagcagtcacctgcactgcaaacagactgctctataacaagcaaaagatgaacactcgcccaatgaaacggtgtttcaagaggtattccagatcctctctgaatcggcagcaagatctatctcattgtccacctcctcctcagctgaggttacttgatttcttacaaaaaagaaaggaaagaaaagcaggtcagcattatgacctcaaaatttctaaggcaggaaattgtgtagatatgtggaaacggagtccctgtaatttggccataccttctgaagtagatgtggagaaatatgctaaagtggaaaagtctatcaaatctgatgactcacagccaacagtctggccagcccatgatgtaaaagatgattatgtatttgaatgtgaagctggtactcagtatcagaaaacaaagctgaccatcttgcagtcgcttggagatccactttactatggtaaaatacagccatgtaaagcagatgaagaaagtgacagccagatgtctccatcacactcgtccacagatgatcattcaaattggttcattattggatcaaagaccgatgctgagagggtagtcaatcagtaccaagaattagtccagaatgaagccaaatgtccggtcaagatgtcacacagctccagtggctcagccagtctgagtcaggtttctccagggaaagaaacagatcaaactgaaaccgtgtcagttcagtcttcggtattggggaagggtgtaaaacatcgacccccaccaatcaaacttccctcaagctcaggaaatagttcctcaggtaactattttacaccacaacagacaagcagctttctcaaatctccaactcctcctccttcttctaagccatcaagtattcctcggaaatcatctgtggatctcaatcaagttagcatgctttctccagctgccctatcacctgccagctcatcacaaagtgagtcataacttaaattcttcattaaatcttcataagcttttgcattagtgtttctnaagacagcttttttcaacctgtgaagtagtgatatctgaatgtactgtgtacccaaaatgtataagttgctagaagcttcaggcagagctcttgttgattgtatgtattatgtctctattgtaattgtacttgtttttctgtatctgtgtatgcattctgcgtgtacctttcttataggcttacaacctacacatctccttaaaaaaataacctggtagttacatgtggcaataagatttcaaaatattttttattccagtgtaccctaggatcattttgcatatttatgtaaattgtgtggctgatatgaaaaaaatgtcataagagttgttgctgcaggtcctatctttgtgtatatgtaagaagtcaactagttccaaggtggtgatacaataaactgaaaaacaatatttcaaaaacactcctacactcttttataaattgttgtcagttactaaaatgtgatgataatcataaagcattattctgaagatactgaaatgtaatttttactactgaatacttttttttaacatcaagaagagttatacaagaatgctagcattagtttgggagaatttcttcaaattagtaaatatctgaaagtaccaatttggggaaaaaagtcattccagttttttagattttttatagatagctaatatatgctgaaagttttagtacactgcacagtgatagggtggtcttcgcattagatataaacatcttcatctcgatagctcaaaaggtgtaatttttctgccttcttgttttgcacaaagaaaaatatataaattttctgaaagtcttattcacacttcttatgttgtgggtatggattatggtaatctactgcacacagttgttactttaagtaagggttgagtgacagcttctggacattcacatttctttcctttctttctgcaggacatgaaagctaaaaaagaaaacacctcaagagcttttggttttacttttttggtttttgttttttgtttttgttttttaaaaaattgataaactgtgcatacttcattcacaacagattttctatacattctacatttaaacagaagtacacagttactgttaaagatgcagtattatctctcagatatttgctttattactgttttttgtaaatttgtttgtcaggataaacttgatgtgttaggaattaaacatgtatatttaggtgccaaatatgattgttaaccatatgtaacttattaaatatgtttacagtttatctcagacttttacactaaataagcaatatttttaaatgaagtcttgaattagtgaaatcgtaaataacaaattaatttgaattcgttttgaactttttaggccaaaggcagcatgtaggaaactaacttttaaatgggtattgtggtagaatataactgtatatttttactgttactgcaatagcatctttaatgggatttttaggtgatatactgcatccttaattgtaattgagtgtagcaacactcatgtatcatgtgtagaaattaacacttgcagttaactgctaaaaaaaaaaaaactagaacaaattgtcagtgctaagtaagattccattaaccttattttaaaaggactggccatttataacaaactagcaattttaatttttctcaatgagcaggatctggaactcctaagccatctactcctacaccaaccccttcatcgaccccacaccctcctgatgctcagagctcaactcctagtaccccttcagccacccctactccccaagattcaggcttcacccctcagcccactttgttaactcagtttgctcagcagcaaaggtctctgagccaggcaatgcctgtaacaaccattcctctttccaccatggtaacatctataactccaggaaccacggccacccaggtcatggcaaactctgctggacttaacttcatcaatgtagtgggctctgtttgtggggcccaggctttgatgagtggttcaaaccccatgctgggctgtaacactggtgccataactcctgcaggaataaacctgagcggccttctaccctcaggaggtctgctaccaaatgcactgcccagtgcaatgcaggcagcttctcaagcaggtgttccatttggtttaaaaaatacttcaagtctcaggcccttaaatctactccagcttccaggtggttcacttatttttaacactctgcagcagcagcaacagcagctctcccagtttacaccacaacaacctcagcagcccacaacttgtagtcctcaacagccaggggagcagggttctgagcaaggttcaaccagtcaagaacaggccttatctgctcagcaagctgctgttattaaccttactggagtaggaagttttatgcagtcacaggcagctgtgttgtctcagcttggctctgccgagaacagacctgagcaaagccttcctcagcagagattccagctctcctctgcctttcaacagcagcagcaacagatacaacagttgcgattcttgcagcatcaaatggctatggcagcagcagcagcacaaacagctcagctacatcatcatcggcatacaggcagccagtcaaaaagtaaaatgaagagaggcacgccaaccactccaaaattttgagtcttgcattactttttgttccttttttaaaaacacaagagcactgaatcaaaagaattgagtttctactttttgttttttttaatgtgtcagtattttacattgctagatgtacaaactttatacagaagcacaaccttatcatttttaaataaaaacagggaaatggtttaacaaactagggttggtttgcctaagtcattgctttttaaaaatggtttcactatacataatatatatggaagtgacctaagaaataatagaaacatctttcagaagaatgtagtttgatatttatttagtataaaacgtttgtgcacagtgttaacaaatacaatttttacaaatctgttttgaaaaaaaaaaaa

SEQ ID NO: 380822 - DNA, 4732 bp, Homo sapiens
  misc_feature (1878)..(1878): n is a, c, g, or t
agcggagtcggaagtgcggccgccggaactggctgttggtgggggtgcagcactgagccgccgacggggcgggtgggctttgctgccgagcaggcggcgccgtcttggggcctagcggcgaggcgacccgcacagtactgtaagattgatgttaaaggcatggtgttcaccccacttcatcagcgtacataagttatctcttcttttggacccttattttatgccataatgcaacaagctttagaactagctttggatcgtgcagagtatgtcattgaaagtgcccgacagagacctcctaaaaggaaatacctatcaagtggaagaaaatctgtatttcaaaaactttatgacttgtatattgaagaatgtgaaaaagaacctgaagttaagaaattaagaagaaatgtgaacttgttagagaagcttgttatgcaagagactttgtcatgtttagtggtcaatctatacccaggaaatgagggatattctctgatgctcaggggaaaaaacggatcagattccgagaccattcgactgccctatgaagaaggagagttgcttgaatatttggatgcagaagaattacctcctattttggttgatctcctagaaaaatctcaggttaatatttttcattgcggatgtgtcatagcagaaatacgtgactacaggcagtccagtaacatgaaatctcctggttaccaaagtcggcacattctcttacgtccaacaatgcagactttaatttgtgatgtacattcaataacaagtgataaccacaaatggacccaggaagacaaacttttgcttgagagccagctcatcctagctacagctgaaccactctgtcttgatccttctatagcagtcacctgcactgcaaacagactgctctataacaagcaaaagatgaacactcgcccaatgaaacggtgtttcaagaggtattccagatcctctctgaatcggcagcaagatctatctcattgtccacctcctcctcagctgaggttacttgatttcttacaaaaaagaaaggaaagaaaagcaggtcagcattatgacctcaaaatttctaaggcaggaaattgtgtagatatgtggaaacggagtccctgtaatttggccataccttctgaagtagatgtggagaaatatgctaaagtggaaaagtctatcaaatctgatgactcacagccaacagtctggccagcccatgatgtaaaagatgattatgtatttgaatgtgaagctggtactcagtatcagaaaacaaagctgaccatcttgcagtcgcttggagatccactttactatggtaaaatacagccatgtaaagcagatgaagaaagtgacagccagatgtctccatcacactcgtccacagatgatcattcaaattggttcattattggatcaaagaccgatgctgagagggtagtcaatcagtaccaagaattagtccagaatgaagccaaatgtccggtcaagatgtcacacagctccagtggctcagccagtctgagtcaggtttctccagggaaagaaacagatcaaactgaaaccgtgtcagttcagtcttcggtattggggaagggtgtaaaacatcgacccccaccaatcaaacttccctcaagctcaggaaatagttcctcaggtaactattttacaccacaacagacaagcagctttctcaaatctccaactcctcctccttcttctaagccatcaagtattcctcggaaatcatctgtggatctcaatcaagttagcatgctttctccagctgccctatcacctgccagctcatcacaaagtgagtcataacttaaattcttcattaaatcttcataagcttttgcattagtgtttctnaagacagcttttttcaacctgtgaagtagtgatatctgaatgtactgtgtaccctatgtctctattgtaattgtacttgtttttctgtatctgtgtatgcattctgcgtgtacctttcttataggcttacaacctacacatctccttaaaaaaataacctggtagttacatgtggcaataagatttcaaaatattttttattccagtgtaccctaggatcattttgcatatttatgtaaattgtgtggctgatatgaaaaaaatgtcataagagttgttgctgcaggtcctatctttgtgtatatgtaagaagtcaactagttccaaggtggtgatacaataaactgaaaaacaatatttcaaaaacactcctacactcttttataaattgttgtcagttactaaaatgtgatgataatcataaagcattattctgaagatactgaaatgtaatttttactactgaatacttttttttaacatcaagaagagttatacaagaatgctagcattagtttgggagaatttcttcaaattagtaaatatctgaaagtaccaatttggggaaaaaagtcattccagttttttagattttttatagatagctaatatatgctgaaagttttagtacactgcacagtgatagggtggtcttcgcattagatataaacatcttcatctcgatagctcaaaaggtgtaatttttctgccttcttgttttgcacaaagaaaaatatataaattttctgaaagtcttattcacacttcttatgttgtgggtatggattatggtaatctactgcacacagttgttactttaagtaagggttgagtgacagcttctggacattcacatttctttcctttctttctgcaggacatgaaagctaaaaaagaaaacacctcaagagcttttggttttacttttttggtttttgttttttgtttttgttttttaaaaaattgataaactgtgcatacttcattcacaacagattttctatacattctacatttaaacagaagtacacagttactgttaaagatgcagtattatctctcagatatttgctttattactgttttttgtaaatttgtttgtcaggataaacttgatgtgttaggaattaaacatgtatatttaggtgccaaatatgattgttaaccatatgtaacttattaaatatgtttacagtttatctcagacttttacactaaataagcaatatttttaaatgaagtcttgaattagtgaaatcgtaaataacaaattaatttgaattcgttttgaactttttaggccaaaggcagcatgtaggaaactaacttttaaatgggtattgtggtagaatataactgtatatttttactgttactgcaatagcatctttaatgggatttttaggtgatatactgcatccttaattgtaattgagtgtagcaacactcatgtatcatgtgtagaaattaacacttgcagttaactgctaaaaaaaaaaaaactagaacaaattgtcagtgctaagtaagattccattaaccttattttaaaaggactggccatttataacaaactagcaattttaatttttctcaatgagcaggatctggaactcctaagccatctactcctacaccaaccccttcatcgaccccacaccctcctgatgctcagagctcaactcctagtaccccttcagccacccctactccccaagattcaggcttcacccctcagcccactttgttaactcagtttgctcagcagcaaaggtctctgagccaggcaatgcctgtaacaaccattcctctttccaccatggtaacatctataactccaggaaccacggccacccaggtcatggcaaactctgctggacttaacttcatcaatgtagtgggctctgtttgtggggcccaggctttgatgagtggttcaaaccccatgctgggctgtaacactggtgccataactcctgcaggaataaacctgagcggccttctaccctcaggaggtctgctaccaaatgcactgcccagtgcaatgcaggcagcttctcaagcaggtgttccatttggtttaaaaaatacttcaagtctcaggcccttaaatctactccagcttccaggtggttcacttatttttaacactctgcagcagcagcaacagcagctctcccagtttacaccacaacaacctcagcagcccacaacttgtagtcctcaacagccaggggagcagggttctgagcaaggttcaaccagtcaagaacaggccttatctgctcagcaagctgctgttattaaccttactggagtaggaagttttatgcagtcacaggcagctgcagttgcgattcttgcagcatcaaatggctatggcagcagcagcagcacaaacagctcagctacatcatcatcggcatacaggcagccagtcaaaaagtaaaatgaagagaggcacgccaaccactccaaaattttgagtcttgcattactttttgttccttttttaaaaacacaagagcactgaatcaaaagaattgagtttctactttttgttttttttaatgtgtcagtattttacattgctagatgtacaaactttatacagaagcacaaccttatcatttttaaataaaaacagggaaatggtttaacaaactagggttggtttgcctaagtcattgctttttaaaaatggtttcactatacataatatatatggaagtgacctaagaaataatagaaacatctttcagaagaatgtagtttgatatttatttagtataaaacgtttgtgcacagtgttaacaaatacaatttttacaaatctgttttgaaaaaaaaaaaa

SEQ ID NO: 380823 - DNA, 4812 bp, Homo sapiens
  misc_feature (1904)..(1904): n is a, c, g, or t
agcggagtcggaagtgcggccgccggaactggctgttggtgggggtgcagcactgagccgccgacggggcgggtgggctttgctgccgagcaggcggcgccgtcttggggcctagcggcgaggcgacccgcacagtactgtaagattgatgttaaaggcatggtgttcaccccacttcatcagcgtacataagttatctcttcttttggacccttattttatgccataatgcaacaagctttagaactagctttggatcgtgcagagtatgtcattgaaagtgcccgacagagacctcctaaaaggaaatacctatcaagtggaagaaaatctgtatttcaaaaactttatgacttgtatattgaagaatgtgaaaaagaacctgaagttaagaaattaagaagaaatgtgaacttgttagagaagcttgttatgcaagagactttgtcatgtttagtggtcaatctatacccaggaaatgagggatattctctgatgctcaggggaaaaaacggatcagattccgagaccattcgactgccctatgaagaaggagagttgcttgaatatttggatgcagaagaattacctcctattttggttgatctcctagaaaaatctcaggttaatatttttcattgcggatgtgtcatagcagaaatacgtgactacaggcagtccagtaacatgaaatctcctggttaccaaagtcggcacattctcttacgtccaacaatgcagactttaatttgtgatgtacattcaataacaagtgataaccacaaatggacccaggaagacaaacttttgcttgagagccagctcatcctagctacagctgaaccactctgtcttgatccttctatagcagtcacctgcactgcaaacagactgctctataacaagcaaaagatgaacactcgcccaatgaaacggtgtttcaagaggtattccagatcctctctgaatcggcagcaagatctatctcattgtccacctcctcctcagctgaggttacttgatttcttacaaaaaagaaaggaaagaaaagcaggtcagcattatgacctcaaaatttctaaggcaggaaattgtgtagatatgtggaaacggagtccctgtaatttggccataccttctgaagtagatgtggagaaatatgctaaagtggaaaagtctatcaaatctgatgactcacagccaacagtctggccagcccatgatgtaaaagatgattatgtatttgaatgtgaagctggtactcagtatcagaaaacaaagctgaccatcttgcagtcgcttggagatccactttactatggtaaaatacagccatgtaaagcagatgaagaaagtgacagccagatgtctccatcacactcgtccacagatgatcattcaaattggttcattattggatcaaagaccgatgctgagagggtagtcaatcagtaccaagaattagtccagaatgaagccaaatgtccggtcaagatgtcacacagctccagtggctcagccagtctgagtcaggtttctccagggaaagaaacagatgtgtgtttcattaatgttacttctttgtgcccagttgtttcacaagtaatctgagaaatgttaagaatcatttttggaggctaggcacagtggctcatgcctgtaatcccaacactttgggaggccaaggtaactattttacaccacaacagacaagcagctttctcaaatctccaactcctcctccttcttctaagccatcaagtattcctcggaaatcatctgtggatctcaatcaagttagcatgctttctccagctgccctatcacctgccagctcatcacaaagtgagtcataacttaaattcttcattaaatcttcataagcttttgcattagtgtttctnaagacagcttttttcaacctgtgaagtagtgatatctgaatgtactgtgtacccaaaatgtataagttgctagaagcttcaggcagagctcttgttgattgtatgtattatgtctctattgtaattgtacttgtttttctgtatctgtgtatgcattctgcgtgtacctttcttataggcttacaacctacacatctccttaaaaaaataacctggtagttacatgtggcaataagatttcaaaatattttttattccagtgtaccctaggatcattttgcatatttatgtaaattgtgtggctgatatgaaaaaaatgtcataagagttgttgctgcaggtcctatctttgtgtatatgtaagaagtcaactagttccaaggtggtgatacaataaactgaaaaacaatatttcaaaaacactcctacactcttttataaattgttgtcagttactaaaatgtgatgataatcataaagcattattctgaagatactgaaatgtaatttttactactgaatacttttttttaacatcaagaagagttatacaagaatgctagcattagtttgggagaatttcttcaaattagtaaatatctgaaagtaccaatttggggaaaaaagtcattccagttttttagattttttatagatagctaatatatgctgaaagttttagtacactgcacagtgatagggtggtcttcgcattagatataaacatcttcatctcgatagctcaaaaggtgtaatttttctgccttcttgttttgcacaaagaaaaatatataaattttctgaaagtcttattcacacttcttatgttgtgggtatggattatggtaatctactgcacacagttgttactttaagtaagggttgagtgacagcttctggacattcacatttctttcctttctttctgcaggacatgaaagctaaaaaagaaaacacctcaagagcttttggttttacttttttggtttttgttttttgtttttgttttttaaaaaattgataaactgtgcatacttcattcacaacagattttctatacattctacatttaaacagaagtacacagttactgttaaagatgcagtattatctctcagatatttgctttattactgttttttgtaaatttgtttgtcaggataaacttgatgtgttaggaattaaacatgtatatttaggtgccaaatatgattgttaaccatatgtaacttattaaatatgtttacagtttatctcagacttttacactaaataagcaatatttttaaatgaagtcttgaattagtgaaatcgtaaataacaaattaatttgaattcgttttgaactttttaggccaaaggcagcatgtaggaaactaacttttaaatgggtattgtggtagaatataactgtatatttttactgttactgcaatagcatctttaatgggatttttaggtgatatactgcatccttaattgtaattgagtgtagcaacactcatgtatcatgtgtagaaattaacacttgcagttaactgctaaaaaaaaaaaaactagaacaaattgtcagtgctaagtaagattccattaaccttattttaaaaggactggccatttataacaaactagcaattttaatttttctcaatgagcaggatctggaactcctaagccatctactcctacaccaaccccttcatcgaccccacaccctcctgatgctcagagctcaactcctagtaccccttcagccacccctactccccaagattcaggcttcacccctcagcccactttgttaactcagtttgctcagcagcaaaggtctctgagccaggcaatgcctgtaacaaccattcctctttccaccatggtaacatctataactccaggaaccacggccacccaggtcatggcaaactctgctggacttaacttcatcaatgtagtgggctctgtttgtggggcccaggctttgatgagtggttcaaaccccatgctgggctgtaacactggtgccataactcctgcaggaataaacctgagcggccttctaccctcaggaggtctgctaccaaatgcactgcccagtgcaatgcaggcagcttctcaagcaggtgttccatttggtttaaaaaatacttcaagtctcaggcccttaaatctactccagcttccaggtggttcacttatttttaacactctgcagcagcagcaacagcagctctcccagtttacaccacaacaacctcagcagcccacaacttgtagtcctcaacagccaggggagcagggttctgagcaaggttcaaccagtcaagaacaggccttatctgctcagcaagctgctgttattaaccttactggagtaggaagttttatgcagtcacaggcagctgcagttgcgattcttgcagcatcaaatggctatggcagcagcagcagcacaaacagctcagctacatcatcatcggcatacaggcagccagtcaaaaagtaaaatgaagagaggcacgccaaccactccaaaattttgagtcttgcattactttttgttccttttttaaaaacacaagagcactgaatcaaaagaattgagtttctactttttgttttttttaatgtgtcagtattttacattgctagatgtacaaactttatacagaagcacaaccttatcatttttaaataaaaacagggaaatggtttaacaaactagggttggtttgcctaagtcattgctttttaaaaatggtttcactatacataatatatatggaagtgacctaagaaataatagaaacatctttcagaagaatgtagtttgatatttatttagtataaaacgtttgtgcacagtgttaacaaatacaatttttacaaatctgttttgaaaaaaaaaaaa

SEQ ID NO: 380824 - DNA, 4668 bp, Homo sapiens
  misc_feature (1760)..(1760): n is a, c, g, or t
agcggagtcggaagtgcggccgccggaactggctgttggtgggggtgcagcactgagccgccgacggggcgggtgggctttgctgccgagcaggcggcgccgtcttggggcctagcggcgaggcgacccgcacagtactgtaagattgatgttaaaggcatggtgttcaccccacttcatcagcgtacataagttatctcttcttttggacccttattttatgccataatgcaacaagctttagaactagctttggatcgtgcagagtatgtcattgaaagtgcccgacagagacctcctaaaaggaaatacctatcaagtggaagaaaatctgtatttcaaaaactttatgacttgtatattgaagaatgtgaaaaagaacctgaagttaagaaattaagaagaaatgtgaacttgttagagaagcttgttatgcaagagactttgtcatgtttagtggtcaatctatacccaggaaatgagggatattctctgatgctcaggggaaaaaacggatcagattccgagaccattcgactgccctatgaagaaggagagttgcttgaatatttggatgcagaagaattacctcctattttggttgatctcctagaaaaatctcaggttaatatttttcattgcggatgtgtcatagcagaaatacgtgactacaggcagtccagtaacatgaaatctcctggttaccaaagtcggcacattctcttacgtccaacaatgcagactttaatttgtgatgtacattcaataacaagtgataaccacaaatggacccaggaagacaaacttttgcttgagagccagctcatcctagctacagctgaaccactctgtcttgatccttctatagcagtcacctgcactgcaaacagactgctctataacaagcaaaagatgaacactcgcccaatgaaacggtgtttcaagaggtattccagatcctctctgaatcggcagcaagatctatctcattgtccacctcctcctcagctgaggttacttgatttcttacaaaaaagaaaggaaagaaaagcaggtcagcattatgacctcaaaatttctaaggcaggaaattgtgtagatatgtggaaacggagtccctgtaatttggccataccttctgaagtagatgtggagaaatatgctaaagtggaaaagtctatcaaatctgatgactcacagccaacagtctggccagcccatgatgtaaaagatgattatgtatttgaatgtgaagctggtactcagtatcagaaaacaaagctgaccatcttgcagtcgcttggagatccactttactatggtaaaatacagccatgtaaagcagatgaagaaagtgacagccagatgtctccatcacactcgtccacagatgatcattcaaattggttcattattggatcaaagaccgatgctgagagcaaactgaaaccgtgtcagttcagtcttcggtattggggaagggtgtaaaacatcgacccccaccaatcaaacttccctcaagctcaggaaatagttcctcaggtaactattttacaccacaacagacaagcagctttctcaaatctccaactcctcctccttcttctaagccatcaagtattcctcggaaatcatctgtggatctcaatcaagttagcatgctttctccagctgccctatcacctgccagctcatcacaaagtgagtcataacttaaattcttcattaaatcttcataagcttttgcattagtgtttctnaagacagcttttttcaacctgtgaagtagtgatatctgaatgtactgtgtacccaaaatgtataagttgctagaagcttcaggcagagctcttgttgattgtatgtattatgtctctattgtaattgtacttgtttttctgtatctgtgtatgcattctgcgtgtacctttcttataggcttacaacctacacatctccttaaaaaaataacctggtagttacatgtggcaataagatttcaaaatattttttattccagtgtaccctaggatcattttgcatatttatgtaaattgtgtggctgatatgaaaaaaatgtcataagagttgttgctgcaggtcctatctttgtgtatatgtaagaagtcaactagttccaaggtggtgatacaataaactgaaaaacaatatttcaaaaacactcctacactcttttataaattgttgtcagttactaaaatgtgatgataatcataaagcattattctgaagatactgaaatgtaatttttactactgaatacttttttttaacatcaagaagagttatacaagaatgctagcattagtttgggagaatttcttcaaattagtaaatatctgaaagtaccaatttggggaaaaaagtcattccagttttttagattttttatagatagctaatatatgctgaaagttttagtacactgcacagtgatagggtggtcttcgcattagatataaacatcttcatctcgatagctcaaaaggtgtaatttttctgccttcttgttttgcacaaagaaaaatatataaattttctgaaagtcttattcacacttcttatgttgtgggtatggattatggtaatctactgcacacagttgttactttaagtaagggttgagtgacagcttctggacattcacatttctttcctttctttctgcaggacatgaaagctaaaaaagaaaacacctcaagagcttttggttttacttttttggtttttgttttttgtttttgttttttaaaaaattgataaactgtgcatacttcattcacaacagattttctatacattctacatttaaacagaagtacacagttactgttaaagatgcagtattatctctcagatatttgctttattactgttttttgtaaatttgtttgtcaggataaacttgatgtgttaggaattaaacatgtatatttaggtgccaaatatgattgttaaccatatgtaacttattaaatatgtttacagtttatctcagacttttacactaaataagcaatatttttaaatgaagtcttgaattagtgaaatcgtaaataacaaattaatttgaattcgttttgaactttttaggccaaaggcagcatgtaggaaactaacttttaaatgggtattgtggtagaatataactgtatatttttactgttactgcaatagcatctttaatgggatttttaggtgatatactgcatccttaattgtaattgagtgtagcaacactcatgtatcatgtgtagaaattaacacttgcagttaactgctaaaaaaaaaaaaactagaacaaattgtcagtgctaagtaagattccattaaccttattttaaaaggactggccatttataacaaactagcaattttaatttttctcaatgagcaggatctggaactcctaagccatctactcctacaccaaccccttcatcgaccccacaccctcctgatgctcagagctcaactcctagtaccccttcagccacccctactccccaagattcaggcttcacccctcagcccactttgttaactcagtttgctcagcagcaaaggtctctgagccaggcaatgcctgtaacaaccattcctctttccaccatggtaacatctataactccaggaaccacggccacccaggtcatggcaaactctgctggacttaacttcatcaatgtagtgggctctgtttgtggggcccaggctttgatgagtggttcaaaccccatgctgggctgtaacactggtgccataactcctgcaggaataaacctgagcggccttctaccctcaggaggtctgctaccaaatgcactgcccagtgcaatgcaggcagcttctcaagcaggtgttccatttggtttaaaaaatacttcaagtctcaggcccttaaatctactccagcttccaggtggttcacttatttttaacactctgcagcagcagcaacagcagctctcccagtttacaccacaacaacctcagcagcccacaacttgtagtcctcaacagccaggggagcagggttctgagcaaggttcaaccagtcaagaacaggccttatctgctcagcaagctgctgttattaaccttactggagtaggaagttttatgcagtcacaggcagctgcagttgcgattcttgcagcatcaaatggctatggcagcagcagcagcacaaacagctcagctacatcatcatcggcatacaggcagccagtcaaaaagtaaaatgaagagaggcacgccaaccactccaaaattttgagtcttgcattactttttgttccttttttaaaaacacaagagcactgaatcaaaagaattgagtttctactttttgttttttttaatgtgtcagtattttacattgctagatgtacaaactttatacagaagcacaaccttatcatttttaaataaaaacagggaaatggtttaacaaactagggttggtttgcctaagtcattgctttttaaaaatggtttcactatacataatatatatggaagtgacctaagaaataatagaaacatctttcagaagaatgtagtttgatatttatttagtataaaacgtttgtgcacagtgttaacaaatacaatttttacaaatctgttttgaaaaaaaaaaaa

SEQ ID NO: 380825 - DNA, 4580 bp, Homo sapiens
  misc_feature (1878)..(1878): n is a, c, g, or t
agcggagtcggaagtgcggccgccggaactggctgttggtgggggtgcagcactgagccgccgacggggcgggtgggctttgctgccgagcaggcggcgccgtcttggggcctagcggcgaggcgacccgcacagtactgtaagattgatgttaaaggcatggtgttcaccccacttcatcagcgtacataagttatctcttcttttggacccttattttatgccataatgcaacaagctttagaactagctttggatcgtgcagagtatgtcattgaaagtgcccgacagagacctcctaaaaggaaatacctatcaagtggaagaaaatctgtatttcaaaaactttatgacttgtatattgaagaatgtgaaaaagaacctgaagttaagaaattaagaagaaatgtgaacttgttagagaagcttgttatgcaagagactttgtcatgtttagtggtcaatctatacccaggaaatgagggatattctctgatgctcaggggaaaaaacggatcagattccgagaccattcgactgccctatgaagaaggagagttgcttgaatatttggatgcagaagaattacctcctattttggttgatctcctagaaaaatctcaggttaatatttttcattgcggatgtgtcatagcagaaatacgtgactacaggcagtccagtaacatgaaatctcctggttaccaaagtcggcacattctcttacgtccaacaatgcagactttaatttgtgatgtacattcaataacaagtgataaccacaaatggacccaggaagacaaacttttgcttgagagccagctcatcctagctacagctgaaccactctgtcttgatccttctatagcagtcacctgcactgcaaacagactgctctataacaagcaaaagatgaacactcgcccaatgaaacggtgtttcaagaggtattccagatcctctctgaatcggcagcaagatctatctcattgtccacctcctcctcagctgaggttacttgatttcttacaaaaaagaaaggaaagaaaagcaggtcagcattatgacctcaaaatttctaaggcaggaaattgtgtagatatgtggaaacggagtccctgtaatttggccataccttctgaagtagatgtggagaaatatgctaaagtggaaaagtctatcaaatctgatgactcacagccaacagtctggccagcccatgatgtaaaagatgattatgtatttgaatgtgaagctggtactcagtatcagaaaacaaagctgaccatcttgcagtcgcttggagatccactttactatggtaaaatacagccatgtaaagcagatgaagaaagtgacagccagatgtctccatcacactcgtccacagatgatcattcaaattggttcattattggatcaaagaccgatgctgagagggtagtcaatcagtaccaagaattagtccagaatgaagccaaatgtccggtcaagatgtcacacagctccagtggctcagccagtctgagtcaggtttctccagggaaagaaacagatcaaactgaaaccgtgtcagttcagtcttcggtattggggaagggtgtaaaacatcgacccccaccaatcaaacttccctcaagctcaggaaatagttcctcaggtaactattttacaccacaacagacaagcagctttctcaaatctccaactcctcctccttcttctaagccatcaagtattcctcggaaatcatctgtggatctcaatcaagttagcatgctttctccagctgccctatcacctgccagctcatcacaaagtgagtcataacttaaattcttcattaaatcttcataagcttttgcattagtgtttctnaagacagcttttttcaacctgtgaagtagtgatatctgaatgtactgtgtacccaaaatgtataagttgctagaagcttcaggcagagctcttgttgattgtatgtattatgtctctattgtaattgtacttgtttttctgtatctgtgtatgcattctgcgtgtacctttcttataggcttacaacctacacatctccttaaaaaaataacctggtagttacatgtggcaataagatttcaaaatattttttattccagtgtaccctaggatcattttgcatatttatgtaaattgtgtggctgatatgaaaaaaatgtcataagagttgttgctgcaggtcctatctttgtgtatatgtaagaagtcaactagttccaaggtggtgatacaataaactgaaaaacaatatttcaaaaacactcctacactcttttataaattgttgtcagttactaaaatgtgatgataatcataaagcattattctgaagatactgaaatgtaatttttactactgaatacttttttttaacatcaagaagagttatacaagaatgctagcattagtttgggagaatttcttcaaattagtaaatatctgaaagtaccaatttggggaaaaaagtcattccagttttttagattttttatagatagctaatatatgctgaaagttttagtacactgcacagtgatagggtggtcttcgcattagatataaacatcttcatctcgatagctcaaaaggtgtaatttttctgccttcttgttttgcacaaagaaaaatatataaattttctgaaagtcttattcacacttcttatgttgtgggtatggattatggtaatctactgcacacagttgttactttaagtaagggttgagtgacagcttctggacattcacatttctttcctttctttctgcaggacatgaaagctaaaaaagaaaacacctcaagagcttttggttttacttttttggtttttgttttttgtttttgttttttaaaaaattgataaactgtgcatacttcattcacaacagattttctatacattctacatttaaacagaagtacacagttactgttaaagatgcagtattatctctcagatatttgctttattactgttttttgtaaatttgtttgtcaggataaacttgatgtgttaggaattaaacatgtatatttaggtgccaaatatgattgttaaccatatgtaacttattaaatatgtttacagtttatctcagacttttacactaaataagcaatatttttaaatgaagtcttgaattagtgaaatcgtaaataacaaattaatttgaattcgttttgaactttttaggccaaaggcagcatgtaggaaactaacttttaaatgggtattgtggtagaatataactgtatatttttactgttactgcaatagcatctttaatgggatttttaggtgatatactgcatccttaattgtaattgagtgtagcaacactcatgtatcatgtgtagaaattaacacttgcagttaactgctaaaaaaaaaaaaactagaacaaattgtcagtgctaagtaagattccattaaccttattttaaaaggactggccatttataacaaactagcaattttaatttttctcaatgagcaggatctggaactcctaagccatctactcctacaccaaccccttcatcgaccccacaccctcctgatgctcagagctcaactcctagtaccccttcagccacccctactccccaagattcaggcttcacccctcagcccactttgttaactcagtttgctcagcagcaaaggtctctgagccaggcaatgcctgtaacaaccattcctctttccaccatggtaacatctataactccaggaaccacggccacccaggtcatggcaaactctgctggacttaacttcatcaatgtagtgggctctgtttgtggggcccaggctttgatgagtggttcaaaccccatgctgggctgtaacactggtgccataactcctgcaggaataaacctgagcggccttctaccctcaggaggtctgctaccaaatgcactgcccagtgcaatgcaggcagcttctcaagcaggtgttccatttggtttaaaaaatacttcaagtctcaggcccttaaatctactccagggttctgagcaaggttcaaccagtcaagaacaggccttatctgctcagcaagctgctgttattaaccttactggagtaggaagttttatgcagtcacaggcagctgtgttgtctcagcttggctctgccgagaacagacctgagcaaagccttcctcagcagagattccagctctcctctgcctttcaacagcagcagcaacagatacaacagttgcgattcttgcagcatcaaatggctatggcagcagcagcagcacaaacagctcagctacatcatcatcggcatacaggcagccagtcaaaaagtaaaatgaagagaggcacgccaaccactccaaaattttgagtcttgcattactttttgttccttttttaaaaacacaagagcactgaatcaaaagaattgagtttctactttttgttttttttaatgtgtcagtattttacattgctagatgtacaaactttatacagaagcacaaccttatcatttttaaataaaaacagggaaatggtttaacaaa

SEQ ID NO: 380826 - DNA, 2791 bp, Homo sapiens
agcggagtcggaagtgcggccgccggaactggctgttggtgggggtgcagcactgagccgccgacggggcgggtgggctttgctgccgagcaggcggcgccgtcttggggcctagcggcgaggcgacccgcacagtactgtaagattgatgttaaaggcatggtgttcaccccacttcatcagcgtacataagttatctcttcttttggacccttattttatgccataatgcaacaagctttagaactagctttggatcgtgcagagtatgtcattgaaagtgcccgacagagacctcctaaaaggaaatacctatcaagtggaagaaaatctgtatttcaaaaactttatgacttgtatattgaagaatgtgaaaaagaacctgaagttaagaaattaagaagaaatgtgaacttgttagagaagcttgttatgcaagagactttgtcatgtttagtggtcaatctatacccaggaaatgagggatattctctgatgctcaggggaaaaaacggatcagattccgagaccattcgactgccctatgaagaaggagagttgcttgaatatttggatgcagaagaattacctcctattttggttgatctcctagaaaaatctcaggttaatatttttcattgcggatgtgtcatagcagaaatacgtgactacaggcagtccagtaacatgaaatctcctggttaccaaagtcggcacattctcttacgtccaacaatgcagactttaatttgtgatgtacattcaataacaagtgataaccacaaatggacccaggaagacaaacttttgcttgagagccagctcatcctagctacagctgaaccactctgtcttgatccttctatagcagtcacctgcactgcaaacagactgctctataacaagcaaaagatgaacactcgcccaatgaaacggtgtttcaagaggtattccagatcctctctgaatcggcagcaagatctatctcattgtccacctcctcctcagctgaggttacttgatttcttacaaaaaagaaaggaaagaaaagcaggtcagcattatgacctcaaaatttctaaggcaggaaattgtgtagatatgtggaaacggagtccctgtaatttggccataccttctgaagtagatgtggagaaatatgctaaagtggaaaagtctatcaaatctgatgactcacagccaacagtctggccagcccatgatgtaaaagatgattatgtatttgaatgtgaagctggtactcagtatcagaaaacaaagctgaccatcttgcagtcgcttggagatccactttactatggtaaaatacagccatgtaaagcagatgaagaaagtgacagccagatgtctccatcacactcgtccacagatgatcattcaaattggttcattattggatcaaagaccgatgctgagagggtagtcaatcagtaccaagaattagtccagaatgaagccaaatgtccggtcaagatgtcacacagctccagtggctcagccagtctgagtcaggtttctccagggaaagaaacagatcaaactgaaaccgtgtcagttcagtcttcggtattggggaagggtgtaaaacatcgacccccaccaatcaaacttccctcaagctcaggaaatagttcctcaggtaactattttacaccacaacagacaagcagctttctcaaatctccaactcctcctccttcttctaagccatcaagtattcctcggaaatcatctgtggatctcaatcaagttagcatgctttctccagctgccctatcacctgccagctcatcacaaagaaccacggccacccaggtcatggcaaactctgctggacttaacttcatcaatgtagtgggctctgtttgtggggcccaggctttgatgagtggttcaaaccccatgctgggctgtaacactggtgccataactcctgcaggaataaacctgagcggccttctaccctcaggaggtctgctaccaaatgcactgcccagtgcaatgcaggcagcttctcaagcaggtgttccatttggtttaaaaaatacttcaagtctcaggcccttaaatctactccaggcaacagcagctctcccagtttacaccacaacaacctcagcagcccacaacttgtagtcctcaacagccaggggagcagggttctgagcaaggttcaaccagtcaagaacaggccttatctgctcagcaagctgctgttattaaccttactggagtaggaagttttatgcagtcacaggcagctgcagttgcgattcttgcagcatcaaatggctatggcagcagcagcagcacaaacagctcagctacatcatcatcggcatacaggcagccagtcaaaaagtaaaatgaagagaggcacgccaaccactccaaaattttgagtcttgcattactttttgttccttttttaaaaacacaagagcactgaatcaaaagaattgagtttctactttttgttttttttaatgtgtcagtattttacattgctagatgtacaaactttatacagaagcacaaccttatcatttttaaataaaaacagggaaatggtttaacaaactagggttggtttgcctaagtcattgctttttaaaaatggtttcactatacataatatatatggaagtgacctaagaaataatagaaacatctttcagaagaatgtagtttgatatttatttagtataaaacgtttgtgcacagtgttaacaaatacaatttttacaaatctgttttgaaaaaaaaaaaa

SEQ ID NO: 380827 - DNA, 4750 bp, Homo sapiens
  misc_feature (1842)..(1842): n is a, c, g, or t
agcggagtcggaagtgcggccgccggaactggctgttggtgggggtgcagcactgagccgccgacggggcgggtgggctttgctgccgagcaggcggcgccgtcttggggcctagcggcgaggcgacccgcacagtactgtaagattgatgttaaaggcatggtgttcaccccacttcatcagcgtacataagttatctcttcttttggacccttattttatgccataatgtatgtcattgaaagtgcccgacagagacctcctaaaaggaaatacctatcaagtggaagaaaatctgtatttcaaaaactttatgacttgtatattgaagaatgtgaaaaagaacctgaagttaagaaattaagaagaaatgtgaacttgttagagaagcttgttatgcaagagactttgtcatgtttagtggtcaatctatacccaggaaatgagggatattctctgatgctcaggggaaaaaacggatcagattccgagaccattcgactgccctatgaagaaggagagttgcttgaatatttggatgcagaagaattacctcctattttggttgatctcctagaaaaatctcaggttaatatttttcattgcggatgtgtcatagcagaaatacgtgactacaggcagtccagtaacatgaaatctcctggttaccaaagtcggcacattctcttacgtccaacaatgcagactttaatttgtgatgtacattcaataacaagtgataaccacaaatggacccaggaagacaaacttttgcttgagagccagctcatcctagctacagctgaaccactctgtcttgatccttctatagcagtcacctgcactgcaaacagactgctctataacaagcaaaagatgaacactcgcccaatgaaacggtgtttcaagaggtattccagatcctctctgaatcggcagcaagatctatctcattgtccacctcctcctcagctgaggttacttgatttcttacaaaaaagaaaggaaagaaaagcaggtcagcattatgacctcaaaatttctaaggcaggaaattgtgtagatatgtggaaacggagtccctgtaatttggccataccttctgaagtagatgtggagaaatatgctaaagtggaaaagtctatcaaatctgatgactcacagccaacagtctggccagcccatgatgtaaaagatgattatgtatttgaatgtgaagctggtactcagtatcagaaaacaaagctgaccatcttgcagtcgcttggagatccactttactatggtaaaatacagccatgtaaagcagatgaagaaagtgacagccagatgtctccatcacactcgtccacagatgatcattcaaattggttcattattggatcaaagaccgatgctgagagggtagtcaatcagtaccaagaattagtccagaatgaagccaaatgtccggtcaagatgtcacacagctccagtggctcagccagtctgagtcaggtttctccagggaaagaaacagatcaaactgaaaccgtgtcagttcagtcttcggtattggggaagggtgtaaaacatcgacccccaccaatcaaacttccctcaagctcaggaaatagttcctcaggtaactattttacaccacaacagacaagcagctttctcaaatctccaactcctcctccttcttctaagccatcaagtattcctcggaaatcatctgtggatctcaatcaagttagcatgctttctccagctgccctatcacctgccagctcatcacaaagtgagtcataacttaaattcttcattaaatcttcataagcttttgcattagtgtttctnaagacagcttttttcaacctgtgaagtagtgatatctgaatgtactgtgtacccaaaatgtataagttgctagaagcttcaggcagagctcttgttgattgtatgtattatgtctctattgtaattgtacttgtttttctgtatctgtgtatgcattctgcgtgtacctttcttataggcttacaacctacacatctccttaaaaaaataacctggtagttacatgtggcaataagatttcaaaatattttttattccagtgtaccctaggatcattttgcatatttatgtaaattgtgtggctgatatgaaaaaaatgtcataagagttgttgctgcaggtcctatctttgtgtatatgtaagaagtcaactagttccaaggtggtgatacaataaactgaaaaacaatatttcaaaaacactcctacactcttttataaattgttgtcagttactaaaatgtgatgataatcataaagcattattctgaagatactgaaatgtaatttttactactgaatacttttttttaacatcaagaagagttatacaagaatgctagcattagtttgggagaatttcttcaaattagtaaatatctgaaagtaccaatttggggaaaaaagtcattccagttttttagattttttatagatagctaatatatgctgaaagttttagtacactgcacagtgatagggtggtcttcgcattagatataaacatcttcatctcgatagctcaaaaggtgtaatttttctgccttcttgttttgcacaaagaaaaatatataaattttctgaaagtcttattcacacttcttatgttgtgggtatggattatggtaatctactgcacacagttgttactttaagtaagggttgagtgacagcttctggacattcacatttctttcctttctttctgcaggacatgaaagctaaaaaagaaaacacctcaagagcttttggttttacttttttggtttttgttttttgtttttgttttttaaaaaattgataaactgtgcatacttcattcacaacagattttctatacattctacatttaaacagaagtacacagttactgttaaagatgcagtattatctctcagatatttgctttattactgttttttgtaaatttgtttgtcaggataaacttgatgtgttaggaattaaacatgtatatttaggtgccaaatatgattgttaaccatatgtaacttattaaatatgtttacagtttatctcagacttttacactaaataagcaatatttttaaatgaagtcttgaattagtgaaatcgtaaataacaaattaatttgaattcgttttgaactttttaggccaaaggcagcatgtaggaaactaacttttaaatgggtattgtggtagaatataactgtatatttttactgttactgcaatagcatctttaatgggatttttaggtgatatactgcatccttaattgtaattgagtgtagcaacactcatgtatcatgtgtagaaattaacacttgcagttaactgctaaaaaaaaaaaaactagaacaaattgtcagtgctaagtaagattccattaaccttattttaaaaggactggccatttataacaaactagcaattttaatttttctcaatgagcaggatctggaactcctaagccatctactcctacaccaaccccttcatcgaccccacaccctcctgatgctcagagctcaactcctagtaccccttcagccacccctactccccaagattcaggcttcacccctcagcccactttgttaactcagtttgctcagcagcaaaggtctctgagccaggcaatgcctgtaacaaccattcctctttccaccatggtaacatctataactccaggaaccacggccacccaggtcatggcaaactctgctggacttaacttcatcaatgtagtgggctctgtttgtggggcccaggctttgatgagtggttcaaaccccatgctgggctgtaacactggtgccataactcctgcaggaataaacctgagcggccttctaccctcaggaggtctgctaccaaatgcactgcccagtgcaatgcaggcagcttctcaagcaggtgttccatttggtttaaaaaatacttcaagtctcaggcccttaaatctactccagcttccaggtggttcacttatttttaacactctgcagcagcagcaacagcagctctcccagtttacaccacaacaacctcagcagcccacaacttgtagtcctcaacagccaggggagcagggttctgagcaaggttcaaccagtcaagaacaggccttatctgctcagcaagctgctgttattaaccttactggagtaggaagttttatgcagtcacaggcagctgcagttgcgattcttgcagcatcaaatggctatggcagcagcagcagcacaaacagctcagctacatcatcatcggcatacaggcagccagtcaaaaagtaaaatgaagagaggcacgccaaccactccaaaattttgagtcttgcattactttttgttccttttttaaaaacacaagagcactgaatcaaaagaattgagtttctactttttgttttttttaatgtgtcagtattttacattgctagatgtacaaactttatacagaagcacaaccttatcatttttaaataaaaacagggaaatggtttaacaaactagggttggtttgcctaagtcattgctttttaaaaatggtttcactatacataatatatatggaagtgacctaagaaataatagaaacatctttcagaagaatgtagtttgatatttatttagtataaaacgtttgtgcacagtgttaacaaatacaatttttacaaatctgttttgaaaaaaaaaaaa

SEQ ID NO: 380828 - DNA, 4164 bp, Homo sapiens
  misc_feature (1256)..(1256): n is a, c, g, or t
agcggagtcggaagtgcggccgccggaactggctgttggtgggggtgcagcactgagccgccgacggggcgggtgggctttgctgccgagcaggcggcgccgtcttggggcctagcggcgaggcgacccgcacagtactgtaagattgatgttaaaggcatggtgttcaccccacttcatcagcgtacataagttatctcttcttttggacccttattttatgccataatgcaacaagctttagaactagctttggatcgtgcagagtatgtcattgaaagtgcccgacagagacctcctaaaaggaaatacctatcaagtggaagaaaatctgtatttcaaaaactttatgacttgtatattgaagaatgtgaaaaagaacctgaagttaagaaattaagaagaaatgtgaacttgttagagaagcttgttatgcaagagactttgtcatgtttagtggtcaatctatacccaggaaatgagggatattctctgatgctcaggggaaaaaacggatcagattccgagaccattcgactgccctatgaagaaggagagttgcttgaatatttggatgcagaagaattacctcctattttggttgatctcctagaaaaatctcaggttaatatttttcattgcggatgtgtcatagcagaaatacgtgactacaggcagtccagtaacatgaaatctcctggttaccaaagtcggcacattctcttacgtccaacaatgcagactttaatttgtgatgtacattcaataacaagtgataaccacaaatggacccaggaagacaaacttttgcttgagagccagctcatcctagctacagctgaaccactctgtcttgatccttctatagcagtcacctgcactgcaaacagactgctctataacaagcaaaagatgaacactcgcccaatgaaacgcaaactgaaaccgtgtcagttcagtcttcggtattggggaagggtgtaaaacatcgacccccaccaatcaaacttccctcaagctcaggaaatagttcctcaggtaactattttacaccacaacagacaagcagctttctcaaatctccaactcctcctccttcttctaagccatcaagtattcctcggaaatcatctgtggatctcaatcaagttagcatgctttctccagctgccctatcacctgccagctcatcacaaagtgagtcataacttaaattcttcattaaatcttcataagcttttgcattagtgtttctnaagacagcttttttcaacctgtgaagtagtgatatctgaatgtactgtgtacccaaaatgtataagttgctagaagcttcaggcagagctcttgttgattgtatgtattatgtctctattgtaattgtacttgtttttctgtatctgtgtatgcattctgcgtgtacctttcttataggcttacaacctacacatctccttaaaaaaataacctggtagttacatgtggcaataagatttcaaaatattttttattccagtgtaccctaggatcattttgcatatttatgtaaattgtgtggctgatatgaaaaaaatgtcataagagttgttgctgcaggtcctatctttgtgtatatgtaagaagtcaactagttccaaggtggtgatacaataaactgaaaaacaatatttcaaaaacactcctacactcttttataaattgttgtcagttactaaaatgtgatgataatcataaagcattattctgaagatactgaaatgtaatttttactactgaatacttttttttaacatcaagaagagttatacaagaatgctagcattagtttgggagaatttcttcaaattagtaaatatctgaaagtaccaatttggggaaaaaagtcattccagttttttagattttttatagatagctaatatatgctgaaagttttagtacactgcacagtgatagggtggtcttcgcattagatataaacatcttcatctcgatagctcaaaaggtgtaatttttctgccttcttgttttgcacaaagaaaaatatataaattttctgaaagtcttattcacacttcttatgttgtgggtatggattatggtaatctactgcacacagttgttactttaagtaagggttgagtgacagcttctggacattcacatttctttcctttctttctgcaggacatgaaagctaaaaaagaaaacacctcaagagcttttggttttacttttttggtttttgttttttgtttttgttttttaaaaaattgataaactgtgcatacttcattcacaacagattttctatacattctacatttaaacagaagtacacagttactgttaaagatgcagtattatctctcagatatttgctttattactgttttttgtaaatttgtttgtcaggataaacttgatgtgttaggaattaaacatgtatatttaggtgccaaatatgattgttaaccatatgtaacttattaaatatgtttacagtttatctcagacttttacactaaataagcaatatttttaaatgaagtcttgaattagtgaaatcgtaaataacaaattaatttgaattcgttttgaactttttaggccaaaggcagcatgtaggaaactaacttttaaatgggtattgtggtagaatataactgtatatttttactgttactgcaatagcatctttaatgggatttttaggtgatatactgcatccttaattgtaattgagtgtagcaacactcatgtatcatgtgtagaaattaacacttgcagttaactgctaaaaaaaaaaaaactagaacaaattgtcagtgctaagtaagattccattaaccttattttaaaaggactggccatttataacaaactagcaattttaatttttctcaatgagcaggatctggaactcctaagccatctactcctacaccaaccccttcatcgaccccacaccctcctgatgctcagagctcaactcctagtaccccttcagccacccctactccccaagattcaggcttcacccctcagcccactttgttaactcagtttgctcagcagcaaaggtctctgagccaggcaatgcctgtaacaaccattcctctttccaccatggtaacatctataactccaggaaccacggccacccaggtcatggcaaactctgctggacttaacttcatcaatgtagtgggctctgtttgtggggcccaggctttgatgagtggttcaaaccccatgctgggctgtaacactggtgccataactcctgcaggaataaacctgagcggccttctaccctcaggaggtctgctaccaaatgcactgcccagtgcaatgcaggcagcttctcaagcaggtgttccatttggtttaaaaaatacttcaagtctcaggcccttaaatctactccagcttccaggtggttcacttatttttaacactctgcagcagcagcaacagcagctctcccagtttacaccacaacaacctcagcagcccacaacttgtagtcctcaacagccaggggagcagggttctgagcaaggttcaaccagtcaagaacaggccttatctgctcagcaagctgctgttattaaccttactggagtaggaagttttatgcagtcacaggcagctgcagttgcgattcttgcagcatcaaatggctatggcagcagcagcagcacaaacagctcagctacatcatcatcggcatacaggcagccagtcaaaaagtaaaatgaagagaggcacgccaaccactccaaaattttgagtcttgcattactttttgttccttttttaaaaacacaagagcactgaatcaaaagaattgagtttctactttttgttttttttaatgtgtcagtattttacattgctagatgtacaaactttatacagaagcacaaccttatcatttttaaataaaaacagggaaatggtttaacaaactagggttggtttgcctaagtcattgctttttaaaaatggtttcactatacataatatatatggaagtgacctaagaaataatagaaacatctttcagaagaatgtagtttgatatttatttagtataaaacgtttgtgcacagtgttaacaaatacaatttttacaaatctgttttgaaaaaaaaaaaa

SEQ ID NO: 380829 - DNA, 4799 bp, Homo sapiens
  misc_feature (1878)..(1878): n is a, c, g, or t
agcggagtcggaagtgcggccgccggaactggctgttggtgggggtgcagcactgagccgccgacggggcgggtgggctttgctgccgagcaggcggcgccgtcttggggcctagcggcgaggcgacccgcacagtactgtaagattgatgttaaaggcatggtgttcaccccacttcatcagcgtacataagttatctcttcttttggacccttattttatgccataatgcaacaagctttagaactagctttggatcgtgcagagtatgtcattgaaagtgcccgacagagacctcctaaaaggaaatacctatcaagtggaagaaaatctgtatttcaaaaactttatgacttgtatattgaagaatgtgaaaaagaacctgaagttaagaaattaagaagaaatgtgaacttgttagagaagcttgttatgcaagagactttgtcatgtttagtggtcaatctatacccaggaaatgagggatattctctgatgctcaggggaaaaaacggatcagattccgagaccattcgactgccctatgaagaaggagagttgcttgaatatttggatgcagaagaattacctcctattttggttgatctcctagaaaaatctcaggttaatatttttcattgcggatgtgtcatagcagaaatacgtgactacaggcagtccagtaacatgaaatctcctggttaccaaagtcggcacattctcttacgtccaacaatgcagactttaatttgtgatgtacattcaataacaagtgataaccacaaatggacccaggaagacaaacttttgcttgagagccagctcatcctagctacagctgaaccactctgtcttgatccttctatagcagtcacctgcactgcaaacagactgctctataacaagcaaaagatgaacactcgcccaatgaaacggtgtttcaagaggtattccagatcctctctgaatcggcagcaagatctatctcattgtccacctcctcctcagctgaggttacttgatttcttacaaaaaagaaaggaaagaaaagcaggtcagcattatgacctcaaaatttctaaggcaggaaattgtgtagatatgtggaaacggagtccctgtaatttggccataccttctgaagtagatgtggagaaatatgctaaagtggaaaagtctatcaaatctgatgactcacagccaacagtctggccagcccatgatgtaaaagatgattatgtatttgaatgtgaagctggtactcagtatcagaaaacaaagctgaccatcttgcagtcgcttggagatccactttactatggtaaaatacagccatgtaaagcagatgaagaaagtgacagccagatgtctccatcacactcgtccacagatgatcattcaaattggttcattattggatcaaagaccgatgctgagagggtagtcaatcagtaccaagaattagtccagaatgaagccaaatgtccggtcaagatgtcacacagctccagtggctcagccagtctgagtcaggtttctccagggaaagaaacagatcaaactgaaaccgtgtcagttcagtcttcggtattggggaagggtgtaaaacatcgacccccaccaatcaaacttccctcaagctcaggaaatagttcctcaggtaactattttacaccacaacagacaagcagctttctcaaatctccaactcctcctccttcttctaagccatcaagtattcctcggaaatcatctgtggatctcaatcaagttagcatgctttctccagctgccctatcacctgccagctcatcacaaagtgagtcataacttaaattcttcattaaatcttcataagcttttgcattagtgtttctnaagacagcttttttcaacctgtgaagtagtgatatctgaatgtactgtgtacccaaaatgtataagttgctagaagcttcaggcagagctcttgttgattgtatgtattatgtctctattgtaattgtacttgtttttctgtatctgtgtatgcattctgcgtgtacctttcttataggcttacaacctacacatctccttaaaaaaataacctggtagttacatgtggcaataagatttcaaaatattttttattccagtgtaccctaggatcattttgcatatttatgtaaattgtgtggctgatatgaaaaaaatgtcataagagttgttgctgcaggtcctatctttgtgtatatgtaagaagtcaactagttccaaggtggtgatacaataaactgaaaaacaatatttcaaaaacactcctacactcttttataaattgttgtcagttactaaaatgtgatgataatcataaagcattattctgaagatactgaaatgtaatttttactactgaatacttttttttaacatcaagaagagttatacaagaatgctagcattagtttgggagaatttcttcaaattagtaaatatctgaaagtaccaatttggggaaaaaagtcattccagttttttagattttttatagatagctaatatatgctgaaagttttagtacactgcacagtgatagggtggtcttcgcattagatataaacatcttcatctcgatagctcaaaaggtgtaatttttctgccttcttgttttgcacaaagaaaaatatataaattttctgaaagtcttattcacacttcttatgttgtgggtatggattatggtaatctactgcacacagttgttactttaagtaagggttgagtgacagcttctggacattcacatttctttcctttctttctgcaggacatgaaagctaaaaaagaaaacacctcaagagcttttggttttacttttttggtttttgttttttgtttttgttttttaaaaaattgataaactgtgcatacttcattcacaacagattttctatacattctacatttaaacagaagtacacagttactgttaaagatgcagtattatctctcagatatttgctttattactgttttttgtaaatttgtttgtcaggataaacttgatgtgttaggaattaaacatgtatatttaggtgccaaatatgattgttaaccatatgtaacttattaaatatgtttacagtttatctcagacttttacactaaataagcaatatttttaaatgaagtcttgaattagtgaaatcgtaaataacaaattaatttgaattcgttttgaactttttaggccaaaggcagcatgtaggaaactaacttttaaatgggtattgtggtagaatataactgtatatttttactgttactgcaatagcatctttaatgggatttttaggtgatatactgcatccttaattgtaattgagtgtagcaacactcatgtatcatgtgtagaaattaacacttgcagttaactgctaaaaaaaaaaaaactagaacaaattgtcagtgctaagtaagattccattaaccttattttaaaaggactggccatttataacaaactagcaattttaatttttctcaatgagcaggatctggaactcctaagccatctactcctacaccaaccccttcatcgaccccacaccctcctgatgctcagagctcaactcctagtaccccttcagccacccctactccccaagattcaggcttcacccctcagcccactttgttaactcagtttgctcagcagcaaaggtctctgagccaggcaatgcctgtaacaaccattcctctttccaccatggtaacatctataactccaggaaccacggccacccaggtcatggcaaactctgctggacttaacttcatcaatgtagtgggctctgtttgtggggcccaggctttgatgagtggttcaaaccccatgctgggctgtaacactggtgccataactcctgcaggaataaacctgagcggccttctaccctcaggaggtctgctaccaaatgcactgcccagtgcaatgcaggcagcttctcaagcaggtgttccatttggtttaaaaaatacttcaagtctcaggcccttaaatctactccagcttccaggtggttcacttatttttaacactctgcagcagcagcaacagcagctctcccagtttacaccacaacaacctcagcagcccacaacttgtagtcctcaacagccaggggagcagggttctgagcaaggttcaaccagtcaagaacaggccttatctgctcagcaagctgctgttattaaccttactggagtaggaagttttatgcagtcacaggcagctggtaggtatcttcataactttatatgctgaatttactaaacatatctaatctatttgggatctcaccgcttaaattattttcttttccttcccttgcaaccagtaaacaggaaaaagtaaagctataatgtgtaaactattaaattgattgatggctgagattttttttcattgatagtggattaagagctttgacttaacataattaccacagttgtgtttccttgttacagtttactggcaaaataattatccactttactaggttaccagagctgttttcagtgtttgccaatagttatcttaattaataacttttttgttttcctgggttaagactgaatttttctagattgcataatcttttgtctcgttctggtaacttgtagttgcataaatgacttaagtcttaatggtcaatagcataacttctgtaagtcacttttatcatttaaaaaaaaagattaaattacttctcaacacttccagcagtaaatggtgaactaaagattactcttaa

SEQ ID NO: 380830 - DNA, 2936 bp, Homo sapiens
agcggagtcggaagtgcggccgccggaactggctgttggtgggggtgcagcactgagccgccgacggggcgggtgggctttgctgccgagcaggcggcgccgtcttggggcctagcggcgaggcgacccgcacagtactgtaagattgatgttaaaggcatggtgttcaccccacttcatcagcgtacataagttatctcttcttttggacccttattttatgccataatgcaacaagctttagaactagctttggatcgtgcagagtatgtcattgaaagtgcccgacagagacctcctaaaaggaaatacctatcaagtggaagaaaatctgtatttcaaaaactttatgacttgtatattgaagaatgtgaaaaagaacctgaagttaagaaattaagaagaaatgtgaacttgttagagaagcttgttatgcaagagactttgtcatgtttagtggtcaatctatacccaggaaatgagggatattctctgatgctcaggggaaaaaacggatcagattccgagaccattcgactgccctatgaagaaggagagttgcttgaatatttggatgcagaagaattacctcctattttggttgatctcctagaaaaatctcaggttaatatttttcattgcggatgtgtcatagcagaaatacgtgactacaggcagtccagtaacatgaaatctcctggttaccaaagtcggcacattctcttacgtccaacaatgcagactttaatttgtgatgtacattcaataacaagtgataaccacaaatggacccaggaagacaaacttttgcttgagagccagctcatcctagctacagctgaaccactctgtcttgatccttctatagcagtcacctgcactgcaaacagactgctctataacaagcaaaagatgaacactcgcccaatgaaacggtgtttcaagaggtattccagatcctctctgaatcggcagcaagatctatctcattgtccacctcctcctcagctgaggttacttgatttcttacaaaaaagaaaggaaagaaaagcaggtcagcattatgacctcaaaatttctaaggcaggaaattgtgtagatatgtggaaacggagtccctgtaatttggccataccttctgaagtagatgtggagaaatatgctaaagtggaaaagtctatcaaatctgatgactcacagccaacagtctggccagcccatgatgtaaaagatgattatgtatttgaatgtgaagctggtactcagtatcagaaaacaaagctgaccatcttgcagtcgcttggagatccactttactatggtaaaatacagccatgtaaagcagatgaagaaagtgacagccagatgtctccatcacactcgtccacagatgatcattcaaattggttcattattggatcaaagaccgatgctgagagggtagtcaatcagtaccaagaattagtccagaatgaagccaaatgtccggtcaagatgtcacacagctccagtggctcagccagtctgagtcaggtttctccagggaaagaaacagatcaaactgaaaccgtgtcagttcagtcttcggtattggggaagggtgtaaaacatcgacccccaccaatcaaacttccctcaagctcaggaaatagttcctcaggtaactattttacaccacaacagacaagcagctttctcaaatctccaactcctcctccttcttctaagccatcaagtattcctcggaaatcatctgtggatctcaatcaagttagcatgctttctccagctgccctatcacctgccagctcatcacaaagaaccacggccacccaggtcatggcaaactctgctggacttaacttcatcaatgtagtgggctctgtttgtggggcccaggctttgatgagtggttcaaaccccatgctgggctgtaacactggtgccataactcctgcaggaataaacctgagcggccttctaccctcaggaggtctgctaccaaatgcactgcccagtgcaatgcaggcagcttctcaagcaggtgttccatttggtttaaaaaatacttcaagtctcaggcccttaaatctactccagcttccaggtggttcacttatttttaacactctgcagcagcagcaacagcagctctcccagtttacaccacaacaacctcagcagcccacaacttgtagtcctcaacagccaggggagcagggttctgagcaaggttcaaccagtcaagaacaggccttatctgctcagcaagctgctgttattaaccttactggagtaggaagttttatgcagtcacaggcagctgtgttgtctcagcttggctctgccgagaacagacctgagcaaagccttcctcagcagagattccagctctcctctgcctttcaacagcagcagcaacagatacaacagttgcgattcttgcagcatcaaatggctatggcagcagcagcagcacaaacagctcagctacatcatcatcggcatacaggcagccagtcaaaaagtaaaatgaagagaggcacgccaaccactccaaaattttgagtcttgcattactttttgttccttttttaaaaacacaagagcactgaatcaaaagaattgagtttctactttttgttttttttaatgtgtcagtattttacattgctagatgtacaaactttatacagaagcacaaccttatcatttttaaataaaaacagggaaatggtttaacaaactagggttggtttgcctaagtcattgctttttaaaaatggtttcactatacataatatatatggaagtgacctaagaaataatagaaacatctttcagaagaatgtagtttgatatttatttagtataaaacgtttgtgcacagtgttaacaaatacaatttttacaaatctgttttgaaaaaaaaaaaa

SEQ ID NO: 380831 - DNA, 2732 bp, Homo sapiens
atttatgtaaattgtgtggctgatatgaaaaatgatcctagggtacactggaataaaaaatattttgaaatcttattgccacatgtaactaccagatcattttgcatatttatgtaaattgtgtggctgatatgaaaaaaatgtcataagagttgttgctgcaggtcctatctttgtgtatatgtaagaagtcaactagttccaaggtggtgatacaataaactgaaaaacaatatttcaaaaacactcctacactcttttataaattgttgtcagttactaaaatgtgatgataatcataaagcattattctgaagatactgaaatgtaatttttactactgaatacttttttttaacatcaagaagagttatacaagaatgctagcattagtttgggagaatttcttcaaattagtaaatatctgaaagtaccaatttggggaaaaaagtcattccagttttttagattttttatagatagctaatatatgctgaaagttttagtacactgcacagtgatagggtggtcttcgcattagatataaacatcttcatctcgatagctcaaaaggtgtaatttttctgccttcttgttttgcacaaagaaaaatatataaattttctgaaagtcttattcacacttcttatgttgtgggtatggattatggtaatctactgcacacagttgttactttaagtaagggttgagtgacagcttctggacattcacatttctttcctttctttctgcaggacatgaaagctaaaaaagaaaacacctcaagagcttttggttttacttttttggtttttgttttttgtttttgttttttaaaaaattgataaactgtgcatacttcattcacaacagattttctatacattctacatttaaacagaagtacacagttactgttaaagatgcagtattatctctcagatatttgctttattactgttttttgtaaatttgtttgtcaggataaacttgatgtgttaggaattaaacatgtatatttaggtgccaaatatgattgttaaccatatgtaacttattaaatatgtttacagtttatctcagacttttacactaaataagcaatatttttaaatgaagtcttgaattagtgaaatcgtaaataacaaattaatttgaattcgttttgaactttttaggccaaaggcagcatgtaggaaactaacttttaaatgggtattgtggtagaatataactgtatatttttactgttactgcaatagcatctttaatgggatttttaggtgatatactgcatccttaattgtaattgagtgtagcaacactcatgtatcatgtgtagaaattaacacttgcagttaactgctaaaaaaaaaaaaactagaacaaattgtcagtgctaagtaagattccattaaccttattttaaaaggactggccatttataacaaactagcaattttaatttttctcaatgagcaggatctggaactcctaagccatctactcctacaccaaccccttcatcgaccccacaccctcctgatgctcagagctcaactcctagtaccccttcagccacccctactccccaagattcaggcttcacccctcagcccactttgttaactcagtttgctcagcagcaaaggtctctgagccaggcaatgcctgtaacaaccattcctctttccaccatggtaacatctataactccaggaaccacggccacccaggtcatggcaaactctgctggacttaacttcatcaatgtagtgggctctgtttgtggggcccaggctttgatgagtggttcaaaccccatgctgggctgtaacactggtgccataactcctgcaggaataaacctgagcggccttctaccctcaggaggtctgctaccaaatgcactgcccagtgcaatgcaggcagcttctcaagcaggtgttccatttggtttaaaaaatacttcaagtctcaggcccttaaatctactccagcttccaggtggttcacttatttttaacactctgcagcagcagcaacagcagctctcccagtttacaccacaacaacctcagcagcccacaacttgtagtcctcaacagccaggggagcagggttctgagcaaggttcaaccagtcaagaacaggccttatctgctcagcaagctgctgttattaaccttactggagtaggaagttttatgcagtcacaggcagctgcagttgcgattcttgcagcatcaaatggctatggcagcagcagcagcacaaacagctcagctacatcatcatcggcatacaggcagccagtcaaaaagtaaaatgaagagaggcacgccaaccactccaaaattttgagtcttgcattactttttgttccttttttaaaaacacaagagcactgaatcaaaagaattgagtttctactttttgttttttttaatgtgtcagtattttacattgctagatgtacaaactttatacagaagcacaaccttatcatttttaaataaaaacagggaaatggtttaacaaactagggttggtttgcctaagtcattgctttttaaaaatggtttcactatacataatatatatggaagtgacctaagaaataatagaaacatctttcagaagaatgtagtttgatatttatttagtataaaacgtttgtgcacagtgttaacaaatacaatttttacaaatctgttttgaaaaaaaaaaaa

SEQ ID NO: 380832 - DNA, 1711 bp, Homo sapiens
taactctttataacatgatttttaaatgtacacaaagataaaaggaaaattacagtgaacacctgtgttctagtcatttggcttcaacagctgttattttcctttaatagataagtatggaagagtggaagcttgctttcatcttactcctctgcctttctccctaaaactctctcttcccaccctattactcagaaatcttttcctcattctttatgtgtactgtaatatatttcatgaatctcatgtgaaattttctctgtaatacatatagtattcaatctgtaaccactaagagcactttgcagagttaaaaatctgggatttatagcagtattaattttatttaataaactatgaagttaaatataaatatcatctggggtttatagcagtattaattttaacaagtaagcttaatgtcattgtcttttagcaaactgaaaccgtgtcagttcagtcttcggtattggggaagggtgtaaaacatcgacccccaccaatcaaacttccctcaagctcaggaaatagttcctcaggtaactattttacaccacaacagacaagcagctttctcaaatctccaactcctcctccttcttctaagccatcaagtattcctcggaaatcatctgtggatctcaatcaagttagcatgctttctccagctgccctatcacctgccagctcatcacaaagaaccacggccacccaggtcatggcaaactctgctggacttaacttcatcaatgtagtgggctctgtttgtggggcccaggctttgatgagtggttcaaaccccatgctgggctgtaacactggtgccataactcctgcaggaataaacctgagcggccttctaccctcaggaggtctgctaccaaatgcactgcccagtgcaatgcaggcagcttctcaagcaggtgttccatttggtttaaaaaatacttcaagtctcaggcccttaaatctactccagcttccaggtggttcacttatttttaacactctgcagcagcagcaacagcagctctcccagtttacaccacaacaacctcagcagcccacaacttgtagtcctcaacagccaggggagcagggttctgagcaaggttcaaccagtcaagaacaggccttatctgctcagcaagctgctgttattaaccttactggagtaggaagttttatgcagtcacaggcagctgcagttgcgattcttgcagcatcaaatggctatggcagcagcagcagcacaaacagctcagctacatcatcatcggcatacaggcagccagtcaaaaagtaaaatgaagagaggcacgccaaccactccaaaattttgagtcttgcattactttttgttccttttttaaaaacacaagagcactgaatcaaaagaattgagtttctactttttgttttttttaatgtgtcagtattttacattgctagatgtacaaactttatacagaagcacaaccttatcatttttaaataaaaacagggaaatggtttaacaaactagggttggtttgcctaagtcattgctttttaaaaatggtttcactatacataatatatatggaagtgacctaagaaataatagaaacatctttcagaagaatgtagtttgatatttatttagtataaaacgtttgtgcacagtgttaacaaatacaatttttacaaatctgttttgaaaaaaaaaaaa

SEQ ID NO: 380833 - DNA, 1614 bp, Homo sapiens
taactctttataacatgatttttaaatgtacacaaagataaaaggaaaattacagtgaacacctgtgttctagtcatttggcttcaacagctgttattttcctttaatagataagtatggaagagtggaagcttgctttcatcttactcctctgcctttctccctaaaactctctcttcccaccctattactcagaaatcttttcctcattctttatgtgtactgtaatatatttcatgaatctcatgtgaaattttctctgtaatacatatagtattcaatctgtaaccactaagagcactttgcagagttaaaaatctgggatttatagcagtattaattttatttaataaactatgaagttaaatataaatatcatctggggtttatagcagtattaattttaacaagtaagcttaatgtcattgtcttttagcaaactgaaaccgtgtcagttcagtcttcggtattggggaagggtgtaaaacatcgacccccaccaatcaaacttccctcaagctcaggaaatagttcctcaggtaactattttacaccacaacagacaagcagctttctcaaatctccaactcctcctccttcttctaagccatcaagtattcctcggaaatcatctgtggatctcaatcaagttagcatgctttctccagctgccctatcacctgccagctcatcacaaagaaccacggccacccaggtcatggcaaactctgctggacttaacttcatcaatgtagtgggctctgtttgtggggcccaggctttgatgagtggttcaaaccccatgctgggctgtaacactggtgccataactcctgcaggaataaacctgagcggccttctaccctcaggaggtctgctaccaaatgcactgcccagtgcaatgcaggcagcttctcaagcaggcaacagcagctctcccagtttacaccacaacaacctcagcagcccacaacttgtagtcctcaacagccaggggagcagggttctgagcaaggttcaaccagtcaagaacaggccttatctgctcagcaagctgctgttattaaccttactggagtaggaagttttatgcagtcacaggcagctgcagttgcgattcttgcagcatcaaatggctatggcagcagcagcagcacaaacagctcagctacatcatcatcggcatacaggcagccagtcaaaaagtaaaatgaagagaggcacgccaaccactccaaaattttgagtcttgcattactttttgttccttttttaaaaacacaagagcactgaatcaaaagaattgagtttctactttttgttttttttaatgtgtcagtattttacattgctagatgtacaaactttatacagaagcacaaccttatcatttttaaataaaaacagggaaatggtttaacaaactagggttggtttgcctaagtcattgctttttaaaaatggtttcactatacataatatatatggaagtgacctaagaaataatagaaacatctttcagaagaatgtagtttgatatttatttagtataaaacgtttgtgcacagtgttaacaaatacaatttttacaaatctgttttgaaaaaaaaaaaa

SEQ ID NO: 380834 - DNA, 1895 bp, Homo sapiens
agcggagtcggaagtgcggccgccggaactggctgttggtgggggtgcagcactgagccgccgacggggcgggtgggctttgctgccgagcaggcggcgccgtcttggggcctagcggcgaggcgacccgcacagtactgtaagattgatgttaaaggcatggtgttcaccccacttcatcagcgtacataagttatctcttcttttggacccttattttatgccataatgcaacaagctttagaactagctttggatcgtgcagagtatgtcattgaaagtgcccgacagagacctcctaaaaggaaatacctatcaagtggaagaaaatctgtatttcaaaaactttatgacttgtatattgaagaatgtgaaaaagaacctgaagttaagaaattaagaagaaatgtgaacttgttagagaagcttgttatgcaagagactttgtcatgtttagtggtcaatctatacccaggaaatgagggatattctctgatgctcaggggaaaaaacggatcagattccgagaccattcgactgccctatgaagaaggagagttgcttgaatatttggatgcagaagaattacctcctattttggttgatctcctagaaaaatctcaggttaatatttttcattgcggatgtgtcatagcagaaatacgtgactacaggcagtccagtaacatgaaatctcctggttaccaaagtcggcacattctcttacgtccaacaatgcagactttaatttgtgatgtacattcaataacaagtgataaccacaaatggacccaggaagacaaacttttgcttgagagccagctcatcctagctacagctgaaccactctgtcttgatccttctatagcagtcacctgcactgcaaacagactgctctataacaagcaaaagatgaacactcgcccaatgaaacggtgtttcaagaggtattccagatcctctctgaatcggcagcaagatctatctcattgtccacctcctcctcagctgaggttacttgatttcttacaaaaaagaaaggaaagaaaagcaggtcagcattatgacctcaaaatttctaaggcaggaaattgtgtagatatgtggaaacggagtccctgtaatttggccataccttctgaagtagatgtggagaaatatgctaaagtggaaaagtctatcaaatctgatgactcacagccaacagtctggccagcccatgatgtaaaagatgattatgtatttgaatgtgaagctggtactcagtatcagaaaacaaagctgaccatcttgcagtcgcttggagatccactttactatggtaaaatacagccatgtaaagcagatgaagaaagtgacagccagatgtctccatcacactcgtccacagatgatcattcaaattggttcattattggatcaaagaccgatgctgagagggtagtcaatcagtaccaagaattagtccagaatgaagccaaatgtccggtcaagatgtcacacagctccagtggctcagccagtctgagtcaggtttctccagggaaagaaacagatcaaactgaaaccgtgtcagttcagtcttcggtattggggaagggtgtaaaacatcgacccccaccaatcaaacttccctcaagctcaggaaatagttcctcagactattttacaccacgacaaacaaacagctttctaatgaaaaggcccaaagataatctgtgaaaaatattctcacaagtgagtcggtagatctcattcaaaattattctaagaggcccaaatttaagaatcttaacaaatcacatttcagatagtatataaaatctaaatatgctttcacattttccagattttgctcaaaaaattaaggacagaaaatcctaatatgaacttga

SEQ ID NO: 380835 - DNA, 751 bp, Homo sapiens
gtacttatatatactaaagtataaattattttcatgtgtaataaactttcaattctgttataaccatgagttttatttaacaggtgttccatttggtttaaaaaatacttcaagtctcaggcccttaaatctactccagggttctgagcaaggttcaaccagtcaagaacaggccttatctgctcagcaagctgctgttattaaccttactggagtaggaagttttatgcagtcacaggcagctgcagttgcgattcttgcagcatcaaatggctatggcagcagcagcagcacaaacagctcagctacatcatcatcggcatacaggcagccagtcaaaaagtaaaatgaagagaggcacgccaaccactccaaaattttgagtcttgcattactttttgttccttttttaaaaacacaagagcactgaatcaaaagaattgagtttctactttttgttttttttaatgtgtcagtattttacattgctagatgtacaaactttatacagaagcacaaccttatcatttttaaataaaaacagggaaatggtttaacaaactagggttggtttgcctaagtcattgctttttaaaaatggtttcactatacataatatatatggaagtgacctaagaaataatagaaacatctttcagaagaatgtagtttgatatttatttagtataaaacgtttgtgcacagtgttaacaaatacaatttttacaaatctgttttgaaaaaaaaaaaa

SEQ ID NO: 380836 - DNA, 1009 bp, Homo sapiens
agcggagtcggaagtgcggccgccggaactggctgttggtgggggtgcagcactgagccgccgacggggcgggtgggctttgctgccgagcaggcggcgccgtcttggggcctagcggcgaggcgacccgcacagtactgtaagattgatgttaaaggcatggtgttcaccccacttcatcagcgtacataagttatctcttcttttggacccttattttatgccataatgcaacaagctttagaactagctttggatcgtgcagagtatgtcattgaaagtgcccgacagagacctcctaaaaggaaatacctatcaagtggaagaaaatctgtatttcaaaaactttatgacttgtatattgaagaatgtgaaaaagaacctgaagttaagaaattaagaagaaatgtgaacttgttagagaagcttgttatgcaagagactttgtcatgtttagtggtcaatctatacccaggaaatgagggatattctctgatgctcaggggaaaaaacggatcagattccgagaccattcgactgccctatgaagaaggagagttgcttgaatatttggatgcagaagaattacctcctattttggttgatctcctagaaaaatctcaggttaatatttttcattgcggatgtgtcatagcagaaatacgtgactacaggcagtccagtaacatgaaatctcctggttaccaaagtcggcacattctcttacgtccaacaatgcagaactttaaatttgtggatggaccatttcaataaccaaggtgattaaccaaccaacatggtactccagtaaggaacaaaaaccttttggtttggaagaagcccagcttcaatcccttaactttacaagcttggacaccaacttcttggctttgggaaaccctttcttaaaagccgggtcaaccttggcacttgtgaaaaaccgggacttgggttctttttacccaaggcttaaaaggtattttaccccttttggccccttggcggtggt

SEQ ID NO: 380837 - DNA, 372 bp, Homo sapiens
tttatggccagtatatttttttgaatggtgctcttaaaaattaatgtctatgaagtgatgatagctgccatatccaaacctcccctatattagcctcacaaacactgaccagagagaccgtgtaagcattcttatttagtttgttgttagtaatcaggtgcccaagactcatattttttctttgttatatatatattgatcatagagtggagtggaggagacaaataaaggaaaatatattagacctgttttagaaaacattagaaatgttaaatgtatattaaatttttttgtggaaataactaatattaccaaatatactatttactttttacagcaacaagctttagaactagctttggatcgtgcaga

SEQ ID NO: 380838 - DNA, 420 bp, Homo sapiens
gttaatgctttactaaatgcatgctgagtgcccatatagtttttaggaaaagaaccgtgctgtgctttattctcataggcagacttaaatatctttgtagcctaagtgctgtgtgtcttcctatcgtcagatacatgttactgtatcatttattcctgatttttactaattcttattgcctgcctacttgtgaaggtatttatttgaggtgctatgcatttttcaggatgtaaaagatgattatgtatttgaatgtgaagctggtactcagtatcagaaaacaaagctgaccatcttgcagtcgcttggagatccactttactatggtaaaatacagccatgtaaagcagatgaagaaagtgacagccagatgtctccatcacagtgagttctgttaaatacaagtaactggaaaaaaaa

SEQ ID NO: 380839 - DNA, 4786 bp, Homo sapiens
  misc_feature (1878)..(1878): n is a, c, g, or t
agcggagtcggaagtgcggccgccggaactggctgttggtgggggtgcagcactgagccgccgacggggcgggtgggctttgctgccgagcaggcggcgccgtcttggggcctagcggcgaggcgacccgcacagtactgtaagattgatgttaaaggcatggtgttcaccccacttcatcagcgtacataagttatctcttcttttggacccttattttatgccataatgcaacaagctttagaactagctttggatcgtgcagagtatgtcattgaaagtgcccgacagagacctcctaaaaggaaatacctatcaagtggaagaaaatctgtatttcaaaaactttatgacttgtatattgaagaatgtgaaaaagaacctgaagttaagaaattaagaagaaatgtgaacttgttagagaagcttgttatgcaagagactttgtcatgtttagtggtcaatctatacccaggaaatgagggatattctctgatgctcaggggaaaaaacggatcagattccgagaccattcgactgccctatgaagaaggagagttgcttgaatatttggatgcagaagaattacctcctattttggttgatctcctagaaaaatctcaggttaatatttttcattgcggatgtgtcatagcagaaatacgtgactacaggcagtccagtaacatgaaatctcctggttaccaaagtcggcacattctcttacgtccaacaatgcagactttaatttgtgatgtacattcaataacaagtgataaccacaaatggacccaggaagacaaacttttgcttgagagccagctcatcctagctacagctgaaccactctgtcttgatccttctatagcagtcacctgcactgcaaacagactgctctataacaagcaaaagatgaacactcgcccaatgaaacggtgtttcaagaggtattccagatcctctctgaatcggcagcaagatctatctcattgtccacctcctcctcagctgaggttacttgatttcttacaaaaaagaaaggaaagaaaagcaggtcagcattatgacctcaaaatttctaaggcaggaaattgtgtagatatgtggaaacggagtccctgtaatttggccataccttctgaagtagatgtggagaaatatgctaaagtggaaaagtctatcaaatctgatgactcacagccaacagtctggccagcccatgatgtaaaagatgattatgtatttgaatgtgaagctggtactcagtatcagaaaacaaagctgaccatcttgcagtcgcttggagatccactttactatggtaaaatacagccatgtaaagcagatgaagaaagtgacagccagatgtctccatcacactcgtccacagatgatcattcaaattggttcattattggatcaaagaccgatgctgagagggtagtcaatcagtaccaagaattagtccagaatgaagccaaatgtccggtcaagatgtcacacagctccagtggctcagccagtctgagtcaggtttctccagggaaagaaacagatcaaactgaaaccgtgtcagttcagtcttcggtattggggaagggtgtaaaacatcgacccccaccaatcaaacttccctcaagctcaggaaatagttcctcaggtaactattttacaccacaacagacaagcagctttctcaaatctccaactcctcctccttcttctaagccatcaagtattcctcggaaatcatctgtggatctcaatcaagttagcatgctttctccagctgccctatcacctgccagctcatcacaaagtgagtcataacttaaattcttcattaaatcttcataagcttttgcattagtgtttctnaagacagcttttttcaacctgtgaagtagtgatatctgaatgtactgtgtacccaaaatgtataagttgctagaagcttcaggcagagctcttgttgattgtatgtattatgtctctattgtaattgtacttgtttttctgtatctgtgtatgcattctgcgtgtacctttcttataggcttacaacctacacatctccttaaaaaaataacctggtagttacatgtggcaataagatttcaaaatattttttattccagtgtaccctaggatcattttgcatatttatgtaaattgtgtggctgatatgaaaaaaatgtcataagagttgttgctgcaggtcctatctttgtgtatatgtaagaagtcaactagttccaaggtggtgatacaataaactgaaaaacaatatttcaaaaacactcctacactcttttataaattgttgtcagttactaaaatgtgatgataatcataaagcattattctgaagatactgaaatgtaatttttactactgaatacttttttttaacatcaagaagagttatacaagaatgctagcattagtttgggagaatttcttcaaattagtaaatatctgaaagtaccaatttggggaaaaaagtcattccagttttttagattttttatagatagctaatatatgctgaaagttttagtacactgcacagtgatagggtggtcttcgcattagatataaacatcttcatctcgatagctcaaaaggtgtaatttttctgccttcttgttttgcacaaagaaaaatatataaattttctgaaagtcttattcacacttcttatgttgtgggtatggattatggtaatctactgcacacagttgttactttaagtaagggttgagtgacagcttctggacattcacatttctttcctttctttctgcaggacatgaaagctaaaaaagaaaacacctcaagagcttttggttttacttttttggtttttgttttttgtttttgttttttaaaaaattgataaactgtgcatacttcattcacaacagattttctatacattctacatttaaacagaagtacacagttactgttaaagatgcagtattatctctcagatatttgctttattactgttttttgtaaatttgtttgtcaggataaacttgatgtgttaggaattaaacatgtatatttaggtgccaaatatgattgttaaccatatgtaacttattaaatatgtttacagtttatctcagacttttacactaaataagcaatatttttaaatgaagtcttgaattagtgaaatcgtaaataacaaattaatttgaattcgttttgaactttttaggccaaaggcagcatgtaggaaactaacttttaaatgggtattgtggtagaatataactgtatatttttactgttactgcaatagcatctttaatgggatttttaggtgatatactgcatccttaattgtaattgagtgtagcaacactcatgtatcatgtgtagaaattaacacttgcagttaactgctaaaaaaaaaaaaactagaacaaattgtcagtgctaagtaagattccattaaccttattttaaaaggactggccatttataacaaactagcaattttaatttttctcaatgagcaggatctggaactcctaagccatctactcctacaccaaccccttcatcgaccccacaccctcctgatgctcagagctcaactcctagtaccccttcagccacccctactccccaagattcaggcttcacccctcagcccactttgttaactcagtttgctcagcagcaaaggtctctgagccaggcaatgcctgtaacaaccattcctctttccaccatggtaacatctataactccaggaaccacggccacccaggtcatggcaaactctgctggacttaacttcatcaatgtagtgggctctgtttgtggggcccaggctttgatgagtggttcaaaccccatgctgggctgtaacactggtgccataactcctgcaggaataaacctgagcggccttctaccctcaggaggtctgctaccaaatgcactgcccagtgcaatgcaggcagcttctcaagcaggtgttccatttggtttaaaaaatacttcaagtctcaggcccttaaatctactccagcttccaggtggttcacttatttttaacactctgcagcagcagcaacagcagctctcccagtttacaccacaacaacctcagcagcccacaacttgtagtcctcaacagccaggggagcagggttctgagcaaggttcaaccagtcaagaacaggccttatctgctcagcaagctgctgttattaaccttactggagtaggaagttttatgcagtcacaggcagctgcagttgcgattcttgcagcatcaaatggctatggcagcagcagcagcacaaacagctcagctacatcatcatcggcatacaggcagccagtcaaaaagtaaaatgaagagaggcacgccaaccactccaaaattttgagtcttgcattactttttgttccttttttaaaaacacaagagcactgaatcaaaagaattgagtttctactttttgttttttttaatgtgtcagtattttacattgctagatgtacaaactttatacagaagcacaaccttatcatttttaaataaaaacagggaaatggtttaacaaactagggttggtttgcctaagtcattgctttttaaaaatggtttcactatacataatatatatggaagtgacctaagaaataatagaaacatctttcagaagaatgtagtttgatatttatttagtataaaacgtttgtgcacagtgttaacaaatacaatttttacaaatctgttttgaaaaaaaaaaaa

SEQ ID NO: 380840 - DNA, 4865 bp, Homo sapiens
  misc_feature (1957)..(1957): n is a, c, g, or t
agcggagtcggaagtgcggccgccggaactggctgttggtgggggtgcagcactgagccgccgacggggcgggtgggctttgctgccgagcaggcggcgccgtcttggggcctagcggcgaggcgacccgcacaggtgggcggtggcggtaggtgggtggccagcgactggcaacgcggtggcttagacgcgcgagatccggccagggtcagagtactgtaagattgatgttaaaggcatggtgttcaccccacttcatcagcgtacataagttatctcttcttttggacccttattttatgccataatgcaacaagctttagaactagctttggatcgtgcagagtatgtcattgaaagtgcccgacagagacctcctaaaaggaaatacctatcaagtggaagaaaatctgtatttcaaaaactttatgacttgtatattgaagaatgtgaaaaagaacctgaagttaagaaattaagaagaaatgtgaacttgttagagaagcttgttatgcaagagactttgtcatgtttagtggtcaatctatacccaggaaatgagggatattctctgatgctcaggggaaaaaacggatcagattccgagaccattcgactgccctatgaagaaggagagttgcttgaatatttggatgcagaagaattacctcctattttggttgatctcctagaaaaatctcaggttaatatttttcattgcggatgtgtcatagcagaaatacgtgactacaggcagtccagtaacatgaaatctcctggttaccaaagtcggcacattctcttacgtccaacaatgcagactttaatttgtgatgtacattcaataacaagtgataaccacaaatggacccaggaagacaaacttttgcttgagagccagctcatcctagctacagctgaaccactctgtcttgatccttctatagcagtcacctgcactgcaaacagactgctctataacaagcaaaagatgaacactcgcccaatgaaacggtgtttcaagaggtattccagatcctctctgaatcggcagcaagatctatctcattgtccacctcctcctcagctgaggttacttgatttcttacaaaaaagaaaggaaagaaaagcaggtcagcattatgacctcaaaatttctaaggcaggaaattgtgtagatatgtggaaacggagtccctgtaatttggccataccttctgaagtagatgtggagaaatatgctaaagtggaaaagtctatcaaatctgatgactcacagccaacagtctggccagcccatgatgtaaaagatgattatgtatttgaatgtgaagctggtactcagtatcagaaaacaaagctgaccatcttgcagtcgcttggagatccactttactatggtaaaatacagccatgtaaagcagatgaagaaagtgacagccagatgtctccatcacactcgtccacagatgatcattcaaattggttcattattggatcaaagaccgatgctgagagggtagtcaatcagtaccaagaattagtccagaatgaagccaaatgtccggtcaagatgtcacacagctccagtggctcagccagtctgagtcaggtttctccagggaaagaaacagatcaaactgaaaccgtgtcagttcagtcttcggtattggggaagggtgtaaaacatcgacccccaccaatcaaacttccctcaagctcaggaaatagttcctcaggtaactattttacaccacaacagacaagcagctttctcaaatctccaactcctcctccttcttctaagccatcaagtattcctcggaaatcatctgtggatctcaatcaagttagcatgctttctccagctgccctatcacctgccagctcatcacaaagtgagtcataacttaaattcttcattaaatcttcataagcttttgcattagtgtttctnaagacagcttttttcaacctgtgaagtagtgatatctgaatgtactgtgtacccaaaatgtataagttgctagaagcttcaggcagagctcttgttgattgtatgtattatgtctctattgtaattgtacttgtttttctgtatctgtgtatgcattctgcgtgtacctttcttataggcttacaacctacacatctccttaaaaaaataacctggtagttacatgtggcaataagatttcaaaatattttttattccagtgtaccctaggatcattttgcatatttatgtaaattgtgtggctgatatgaaaaaaatgtcataagagttgttgctgcaggtcctatctttgtgtatatgtaagaagtcaactagttccaaggtggtgatacaataaactgaaaaacaatatttcaaaaacactcctacactcttttataaattgttgtcagttactaaaatgtgatgataatcataaagcattattctgaagatactgaaatgtaatttttactactgaatacttttttttaacatcaagaagagttatacaagaatgctagcattagtttgggagaatttcttcaaattagtaaatatctgaaagtaccaatttggggaaaaaagtcattccagttttttagattttttatagatagctaatatatgctgaaagttttagtacactgcacagtgatagggtggtcttcgcattagatataaacatcttcatctcgatagctcaaaaggtgtaatttttctgccttcttgttttgcacaaagaaaaatatataaattttctgaaagtcttattcacacttcttatgttgtgggtatggattatggtaatctactgcacacagttgttactttaagtaagggttgagtgacagcttctggacattcacatttctttcctttctttctgcaggacatgaaagctaaaaaagaaaacacctcaagagcttttggttttacttttttggtttttgttttttgtttttgttttttaaaaaattgataaactgtgcatacttcattcacaacagattttctatacattctacatttaaacagaagtacacagttactgttaaagatgcagtattatctctcagatatttgctttattactgttttttgtaaatttgtttgtcaggataaacttgatgtgttaggaattaaacatgtatatttaggtgccaaatatgattgttaaccatatgtaacttattaaatatgtttacagtttatctcagacttttacactaaataagcaatatttttaaatgaagtcttgaattagtgaaatcgtaaataacaaattaatttgaattcgttttgaactttttaggccaaaggcagcatgtaggaaactaacttttaaatgggtattgtggtagaatataactgtatatttttactgttactgcaatagcatctttaatgggatttttaggtgatatactgcatccttaattgtaattgagtgtagcaacactcatgtatcatgtgtagaaattaacacttgcagttaactgctaaaaaaaaaaaaactagaacaaattgtcagtgctaagtaagattccattaaccttattttaaaaggactggccatttataacaaactagcaattttaatttttctcaatgagcaggatctggaactcctaagccatctactcctacaccaaccccttcatcgaccccacaccctcctgatgctcagagctcaactcctagtaccccttcagccacccctactccccaagattcaggcttcacccctcagcccactttgttaactcagtttgctcagcagcaaaggtctctgagccaggcaatgcctgtaacaaccattcctctttccaccatggtaacatctataactccaggaaccacggccacccaggtcatggcaaactctgctggacttaacttcatcaatgtagtgggctctgtttgtggggcccaggctttgatgagtggttcaaaccccatgctgggctgtaacactggtgccataactcctgcaggaataaacctgagcggccttctaccctcaggaggtctgctaccaaatgcactgcccagtgcaatgcaggcagcttctcaagcaggtgttccatttggtttaaaaaatacttcaagtctcaggcccttaaatctactccagcttccaggtggttcacttatttttaacactctgcagcagcagcaacagcagctctcccagtttacaccacaacaacctcagcagcccacaacttgtagtcctcaacagccaggggagcagggttctgagcaaggttcaaccagtcaagaacaggccttatctgctcagcaagctgctgttattaaccttactggagtaggaagttttatgcagtcacaggcagctgcagttgcgattcttgcagcatcaaatggctatggcagcagcagcagcacaaacagctcagctacatcatcatcggcatacaggcagccagtcaaaaagtaaaatgaagagaggcacgccaaccactccaaaattttgagtcttgcattactttttgttccttttttaaaaacacaagagcactgaatcaaaagaattgagtttctactttttgttttttttaatgtgtcagtattttacattgctagatgtacaaactttatacagaagcacaaccttatcatttttaaataaaaacagggaaatggtttaacaaactagggttggtttgcctaagtcattgctttttaaaaatggtttcactatacataatatatatggaagtgacctaagaaataatagaaacatctttcagaagaatgtagtttgatatttatttagtataaaacgtttgtgcacagtgttaacaaatacaatttttacaaatctgttttgaaaaaaaaaaaa

SEQ ID NO: 380841 - DNA, 5090 bp, Homo sapiens
  misc_feature (2182)..(2182): n is a, c, g, or t
gccgcatcccagagcccgctggaggaagacggggtccccagagacccggcaggccggggcggaggttgaggcagctaaactccaggtggacgcctacatcgcctttcgcggtgttgctaagccgaacttttaattttagtttgacttttgggttccagagacgggtatttccggacactggcaagaattttgccttgcgtgtcttcgaaggcggttttcttggtgtccatattgcataaaggcttgtcgctcctctgtggagatgacggttgtacaggctttggtatcaggatgatgctggcctcataaaatgagttagggaggattccctctttttccattgattggaatagtttcagaaggaatggtaccacctcctccttgtacctctggtagaattcggctgtgaatccatctggtcctggactttttttggttgtactgtaagattgatgttaaaggcatggtgttcaccccacttcatcagcgtacataagttatctcttcttttggacccttattttatgccataatgcaacaagctttagaactagctttggatcgtgcagagtatgtcattgaaagtgcccgacagagacctcctaaaaggaaatacctatcaagtggaagaaaatctgtatttcaaaaactttatgacttgtatattgaagaatgtgaaaaagaacctgaagttaagaaattaagaagaaatgtgaacttgttagagaagcttgttatgcaagagactttgtcatgtttagtggtcaatctatacccaggaaatgagggatattctctgatgctcaggggaaaaaacggatcagattccgagaccattcgactgccctatgaagaaggagagttgcttgaatatttggatgcagaagaattacctcctattttggttgatctcctagaaaaatctcaggttaatatttttcattgcggatgtgtcatagcagaaatacgtgactacaggcagtccagtaacatgaaatctcctggttaccaaagtcggcacattctcttacgtccaacaatgcagactttaatttgtgatgtacattcaataacaagtgataaccacaaatggacccaggaagacaaacttttgcttgagagccagctcatcctagctacagctgaaccactctgtcttgatccttctatagcagtcacctgcactgcaaacagactgctctataacaagcaaaagatgaacactcgcccaatgaaacggtgtttcaagaggtattccagatcctctctgaatcggcagcaagatctatctcattgtccacctcctcctcagctgaggttacttgatttcttacaaaaaagaaaggaaagaaaagcaggtcagcattatgacctcaaaatttctaaggcaggaaattgtgtagatatgtggaaacggagtccctgtaatttggccataccttctgaagtagatgtggagaaatatgctaaagtggaaaagtctatcaaatctgatgactcacagccaacagtctggccagcccatgatgtaaaagatgattatgtatttgaatgtgaagctggtactcagtatcagaaaacaaagctgaccatcttgcagtcgcttggagatccactttactatggtaaaatacagccatgtaaagcagatgaagaaagtgacagccagatgtctccatcacactcgtccacagatgatcattcaaattggttcattattggatcaaagaccgatgctgagagggtagtcaatcagtaccaagaattagtccagaatgaagccaaatgtccggtcaagatgtcacacagctccagtggctcagccagtctgagtcaggtttctccagggaaagaaacagatcaaactgaaaccgtgtcagttcagtcttcggtattggggaagggtgtaaaacatcgacccccaccaatcaaacttccctcaagctcaggaaatagttcctcaggtaactattttacaccacaacagacaagcagctttctcaaatctccaactcctcctccttcttctaagccatcaagtattcctcggaaatcatctgtggatctcaatcaagttagcatgctttctccagctgccctatcacctgccagctcatcacaaagtgagtcataacttaaattcttcattaaatcttcataagcttttgcattagtgtttctnaagacagcttttttcaacctgtgaagtagtgatatctgaatgtactgtgtacccaaaatgtataagttgctagaagcttcaggcagagctcttgttgattgtatgtattatgtctctattgtaattgtacttgtttttctgtatctgtgtatgcattctgcgtgtacctttcttataggcttacaacctacacatctccttaaaaaaataacctggtagttacatgtggcaataagatttcaaaatattttttattccagtgtaccctaggatcattttgcatatttatgtaaattgtgtggctgatatgaaaaaaatgtcataagagttgttgctgcaggtcctatctttgtgtatatgtaagaagtcaactagttccaaggtggtgatacaataaactgaaaaacaatatttcaaaaacactcctacactcttttataaattgttgtcagttactaaaatgtgatgataatcataaagcattattctgaagatactgaaatgtaatttttactactgaatacttttttttaacatcaagaagagttatacaagaatgctagcattagtttgggagaatttcttcaaattagtaaatatctgaaagtaccaatttggggaaaaaagtcattccagttttttagattttttatagatagctaatatatgctgaaagttttagtacactgcacagtgatagggtggtcttcgcattagatataaacatcttcatctcgatagctcaaaaggtgtaatttttctgccttcttgttttgcacaaagaaaaatatataaattttctgaaagtcttattcacacttcttatgttgtgggtatggattatggtaatctactgcacacagttgttactttaagtaagggttgagtgacagcttctggacattcacatttctttcctttctttctgcaggacatgaaagctaaaaaagaaaacacctcaagagcttttggttttacttttttggtttttgttttttgtttttgttttttaaaaaattgataaactgtgcatacttcattcacaacagattttctatacattctacatttaaacagaagtacacagttactgttaaagatgcagtattatctctcagatatttgctttattactgttttttgtaaatttgtttgtcaggataaacttgatgtgttaggaattaaacatgtatatttaggtgccaaatatgattgttaaccatatgtaacttattaaatatgtttacagtttatctcagacttttacactaaataagcaatatttttaaatgaagtcttgaattagtgaaatcgtaaataacaaattaatttgaattcgttttgaactttttaggccaaaggcagcatgtaggaaactaacttttaaatgggtattgtggtagaatataactgtatatttttactgttactgcaatagcatctttaatgggatttttaggtgatatactgcatccttaattgtaattgagtgtagcaacactcatgtatcatgtgtagaaattaacacttgcagttaactgctaaaaaaaaaaaaactagaacaaattgtcagtgctaagtaagattccattaaccttattttaaaaggactggccatttataacaaactagcaattttaatttttctcaatgagcaggatctggaactcctaagccatctactcctacaccaaccccttcatcgaccccacaccctcctgatgctcagagctcaactcctagtaccccttcagccacccctactccccaagattcaggcttcacccctcagcccactttgttaactcagtttgctcagcagcaaaggtctctgagccaggcaatgcctgtaacaaccattcctctttccaccatggtaacatctataactccaggaaccacggccacccaggtcatggcaaactctgctggacttaacttcatcaatgtagtgggctctgtttgtggggcccaggctttgatgagtggttcaaaccccatgctgggctgtaacactggtgccataactcctgcaggaataaacctgagcggccttctaccctcaggaggtctgctaccaaatgcactgcccagtgcaatgcaggcagcttctcaagcaggtgttccatttggtttaaaaaatacttcaagtctcaggcccttaaatctactccagcttccaggtggttcacttatttttaacactctgcagcagcagcaacagcagctctcccagtttacaccacaacaacctcagcagcccacaacttgtagtcctcaacagccaggggagcagggttctgagcaaggttcaaccagtcaagaacaggccttatctgctcagcaagctgctgttattaaccttactggagtaggaagttttatgcagtcacaggcagctgcagttgcgattcttgcagcatcaaatggctatggcagcagcagcagcacaaacagctcagctacatcatcatcggcatacaggcagccagtcaaaaagtaaaatgaagagaggcacgccaaccactccaaaattttgagtcttgcattactttttgttccttttttaaaaacacaagagcactgaatcaaaagaattgagtttctactttttgttttttttaatgtgtcagtattttacattgctagatgtacaaactttatacagaagcacaaccttatcatttttaaataaaaacagggaaatggtttaacaaactagggttggtttgcctaagtcattgctttttaaaaatggtttcactatacataatatatatggaagtgacctaagaaataatagaaacatctttcagaagaatgtagtttgatatttatttagtataaaacgtttgtgcacagtgttaacaaatacaatttttacaaatctgttttgaaaaaaaaaaaa

SEQ ID NO: 380842 - DNA, 3796 bp, Homo sapiens
agcggagtcggaagtgcggccgccggaactggctgttggtgggggtgcagcactgagccgccgacggggcgggtgggctttgctgccgagcaggcggcgccgtcttggggcctagcggcgaggcgacccgcacagtactgtaagattgatgttaaaggcatggtgttcaccccacttcatcagcgtacataagttatctcttcttttggacccttattttatgccataatgcaacaagctttagaactagctttggatcgtgcagagtatgtcattgaaagtgcccgacagagacctcctaaaaggaaatacctatcaagtggaagaaaatctgtatttcaaaaactttatgacttgtatattgaagaatgtgaaaaagaacctgaagttaagaaattaagaagaaatgtgaacttgttagagaagcttgttatgcaagagactttgtcatgtttagtggtcaatctatacccaggaaatgagggatattctctgatgctcaggggaaaaaacggatcagattccgagaccattcgactgccctatgaagaaggagagttgcttgaatatttggatgcagaagaattacctcctattttggttgatctcctagaaaaatctcaggttaatatttttcattgcggatgtgtcatagcagaaatacgtgactacaggcagtccagtaacatgaaatctcctggttaccaaagtcggcacattctcttacgtccaacaatgcagactttaatttgtgatgtacattcaataacaagtgataaccacaaatggacccaggaagacaaacttttgcttgagagccagctcatcctagctacagctgaaccactctgtcttgatccttctatagcagtcacctgcactgcaaacagactgctctataacaagcaaaagatgaacactcgcccaatgaaacggtgtttcaagaggtattccagatcctctctgaatcggcagcaagatctatctcattgtccacctcctcctcagctgaggttacttgatttcttacaaaaaagaaaggaaagaaaagcaggtcagcattatgacctcaaaatttctaaggcaggaaattgtgtagatatgtggaaacggagtccctgtaatttggccataccttctgaagtagatgtggagaaatatgctaaagtggaaaagtctatcaaatctgatgactcacagccaacagtctggccagcccatgatgtaaaagatgattatgtatttgaatgtgaagctggtactcagtatcagaaaacaaagctgaccatcttgcagtcgcttggagatccactttactatggtaaaatacagccatgtaaagcagatgaagaaagtgacagccagatgtctccatcacactcgtccacagatgatcattcaaattggttcattattggatcaaagaccgatgctgagagggtagtcaatcagtaccaagaattagtccagaatgaagccaaatgtccggtcaagatgtcacacagctccagtggctcagccagtctgagtcaggtttctccagggaaagaaacagatcaaactgaaaccgtgtcagttcagtcttcggtattggggaagggtgtaaaacatcgacccccaccaatcaaacttccctcaagctcaggaaatagttcctcaggtaactattttacaccacaacagacaagcagctttctcaaatctccaactcctcctccttcttctaagccatcaagtattcctcggaaatcatctgtggatctcaatcaagttagcatgctttctccagctgccctatcacctgccagctcatcacaaagacatgaaagctaaaaaagaaaacacctcaagagcttttggttttacttttttggtttttgttttttgtttttgttttttaaaaaattgataaactgtgcatacttcattcacaacagattttctatacattctacatttaaacagaagtacacagttactgttaaagatgcagtattatctctcagatatttgctttattactgttttttgtaaatttgtttgtcaggataaacttgatgtgttaggaattaaacatgtatatttaggtgccaaatatgattgttaaccatatgtaacttattaaatatgtttacagtttatctcagacttttacactaaataagcaatatttttaaatgaagtcttgaattagtgaaatcgtaaataacaaattaatttgaattcgttttgaactttttaggccaaaggcagcatgtaggaaactaacttttaaatgggtattgtggtagaatataactgtatatttttactgttactgcaatagcatctttaatgggatttttaggtgatatactgcatccttaattgtaattgagtgtagcaacactcatgtatcatgtgtagaaattaacacttgcagttaactgctaaaaaaaaaaaaactagaacaaattgtcagtgctaagtaagattccattaaccttattttaaaaggactggccatttataacaaactagcaattttaatttttctcaatgagcaggatctggaactcctaagccatctactcctacaccaaccccttcatcgaccccacaccctcctgatgctcagagctcaactcctagtaccccttcagccacccctactccccaagattcaggcttcacccctcagcccactttgttaactcagtttgctcagcagcaaaggtctctgagccaggcaatgcctgtaacaaccattcctctttccaccatggtaacatctataactccaggaaccacggccacccaggtcatggcaaactctgctggacttaacttcatcaatgtagtgggctctgtttgtggggcccaggctttgatgagtggttcaaaccccatgctgggctgtaacactggtgccataactcctgcaggaataaacctgagcggccttctaccctcaggaggtctgctaccaaatgcactgcccagtgcaatgcaggcagcttctcaagcaggtgttccatttggtttaaaaaatacttcaagtctcaggcccttaaatctactccagcttccaggtggttcacttatttttaacactctgcagcagcagcaacagcagctctcccagtttacaccacaacaacctcagcagcccacaacttgtagtcctcaacagccaggggagcagggttctgagcaaggttcaaccagtcaagaacaggccttatctgctcagcaagctgctgttattaaccttactggagtaggaagttttatgcagtcacaggcagctgcagttgcgattcttgcagcatcaaatggctatggcagcagcagcagcacaaacagctcagctacatcatcatcggcatacaggcagccagtcaaaaagtaaaatgaagagaggcacgccaaccactccaaaattttgagtcttgcattactttttgttccttttttaaaaacacaagagcactgaatcaaaagaattgagtttctactttttgttttttttaatgtgtcagtattttacattgctagatgtacaaactttatacagaagcacaaccttatcatttttaaataaaaacagggaaatggtttaacaaactagggttggtttgcctaagtcattgctttttaaaaatggtttcactatacataatatatatggaagtgacctaagaaataatagaaacatctttcagaagaatgtagtttgatatttatttagtataaaacgtttgtgcacagtgttaacaaatacaatttttacaaatctgttttgaaaaaaaaaaaa

SEQ ID NO: 380843 - DNA, 4700 bp, Homo sapiens
  misc_feature (1878)..(1878): n is a, c, g, or t
agcggagtcggaagtgcggccgccggaactggctgttggtgggggtgcagcactgagccgccgacggggcgggtgggctttgctgccgagcaggcggcgccgtcttggggcctagcggcgaggcgacccgcacagtactgtaagattgatgttaaaggcatggtgttcaccccacttcatcagcgtacataagttatctcttcttttggacccttattttatgccataatgcaacaagctttagaactagctttggatcgtgcagagtatgtcattgaaagtgcccgacagagacctcctaaaaggaaatacctatcaagtggaagaaaatctgtatttcaaaaactttatgacttgtatattgaagaatgtgaaaaagaacctgaagttaagaaattaagaagaaatgtgaacttgttagagaagcttgttatgcaagagactttgtcatgtttagtggtcaatctatacccaggaaatgagggatattctctgatgctcaggggaaaaaacggatcagattccgagaccattcgactgccctatgaagaaggagagttgcttgaatatttggatgcagaagaattacctcctattttggttgatctcctagaaaaatctcaggttaatatttttcattgcggatgtgtcatagcagaaatacgtgactacaggcagtccagtaacatgaaatctcctggttaccaaagtcggcacattctcttacgtccaacaatgcagactttaatttgtgatgtacattcaataacaagtgataaccacaaatggacccaggaagacaaacttttgcttgagagccagctcatcctagctacagctgaaccactctgtcttgatccttctatagcagtcacctgcactgcaaacagactgctctataacaagcaaaagatgaacactcgcccaatgaaacggtgtttcaagaggtattccagatcctctctgaatcggcagcaagatctatctcattgtccacctcctcctcagctgaggttacttgatttcttacaaaaaagaaaggaaagaaaagcaggtcagcattatgacctcaaaatttctaaggcaggaaattgtgtagatatgtggaaacggagtccctgtaatttggccataccttctgaagtagatgtggagaaatatgctaaagtggaaaagtctatcaaatctgatgactcacagccaacagtctggccagcccatgatgtaaaagatgattatgtatttgaatgtgaagctggtactcagtatcagaaaacaaagctgaccatcttgcagtcgcttggagatccactttactatggtaaaatacagccatgtaaagcagatgaagaaagtgacagccagatgtctccatcacactcgtccacagatgatcattcaaattggttcattattggatcaaagaccgatgctgagagggtagtcaatcagtaccaagaattagtccagaatgaagccaaatgtccggtcaagatgtcacacagctccagtggctcagccagtctgagtcaggtttctccagggaaagaaacagatcaaactgaaaccgtgtcagttcagtcttcggtattggggaagggtgtaaaacatcgacccccaccaatcaaacttccctcaagctcaggaaatagttcctcaggtaactattttacaccacaacagacaagcagctttctcaaatctccaactcctcctccttcttctaagccatcaagtattcctcggaaatcatctgtggatctcaatcaagttagcatgctttctccagctgccctatcacctgccagctcatcacaaagtgagtcataacttaaattcttcattaaatcttcataagcttttgcattagtgtttctnaagacagcttttttcaacctgtgaagtagtgatatctgaatgtactgtgtacccaaaatgtataagttgctagaagcttcaggcagagctcttgttgattgtatgtattatgtctctattgtaattgtacttgtttttctgtatctgtgtatgcattctgcgtgtacctttcttataggcttacaacctacacatctccttaaaaaaataacctggtagttacatgtggcaataagatttcaaaatattttttattccagtgtaccctaggatcattttgcatatttatgtaaattgtgtggctgatatgaaaaaaatgtcataagagttgttgctgcaggtcctatctttgtgtatatgtaagaagtcaactagttccaaggtggtgatacaataaactgaaaaacaatatttcaaaaacactcctacactcttttataaattgttgtcagttactaaaatgtgatgataatcataaagcattattctgaagatactgaaatgtaatttttactactgaatacttttttttaacatcaagaagagttatacaagaatgctagcattagtttgggagaatttcttcaaattagtaaatatctgaaagtaccaatttggggaaaaaagtcattccagttttttagattttttatagatagctaatatatgctgaaagttttagtacactgcacagtgatagggtggtcttcgcattagatataaacatcttcatctcgatagctcaaaaggtgtaatttttctgccttcttgttttgcacaaagaaaaatatataaattttctgaaagtcttattcacacttcttatgttgtgggtatggattatggtaatctactgcacacagttgttactttaagtaagggttgagtgacagcttctggacattcacatttctttcctttctttctgcaggacatgaaagctaaaaaagaaaacacctcaagagcttttggttttacttttttggtttttgttttttgtttttgttttttaaaaaattgataaactgtgcatacttcattcacaacagattttctatacattctacatttaaacagaagtacacagttactgttaaagatgcagtattatctctcagatatttgctttattactgttttttgtaaatttgtttgtcaggataaacttgatgtgttaggaattaaacatgtatatttaggtgccaaatatgattgttaaccatatgtaacttattaaatatgtttacagtttatctcagacttttacactaaataagcaatatttttaaatgaagtcttgaattagtgaaatcgtaaataacaaattaatttgaattcgttttgaactttttaggccaaaggcagcatgtaggaaactaacttttaaatgggtattgtggtagaatataactgtatatttttactgttactgcaatagcatctttaatgggatttttaggtgatatactgcatccttaattgtaattgagtgtagcaacactcatgtatcatgtgtagaaattaacacttgcagttaactgctaaaaaaaaaaaaactagaacaaattgtcagtgctaagtaagattccattaaccttattttaaaaggactggccatttataacaaactagcaattttaatttttctcaatgagcaggatctggaactcctaagccatctactcctacaccaaccccttcatcgaccccacaccctcctgatgctcagagctcaactcctagtaccccttcagccacccctactccccaagattcaggcttcacccctcagcccactttgttaactcagtttgctcagcagcaaaggtctctgagccaggcaatgcctgtaacaaccattcctctttccaccatggtaacatctataactccaggaaccacggccacccaggtcatggcaaactctgctggacttaacttcatcaatgtagtgggctctgtttgtggggcccaggctttgatgagtggttcaaaccccatgctgggctgtaacactggtgccataactcctgcaggaataaacctgagcggccttctaccctcaggaggtctgctaccaaatgcactgcccagtgcaatgcaggcagcttctcaagcaggtgttccatttggtttaaaaaatacttcaagtctcaggcccttaaatctactccagcttccaggtggttcacttatttttaacactctgcagcagcagcaacagcagctctcccagtttacaccacaacaacctcagcagcccacaacttgtagtcctcaacagccaggggagcagggttctgagcaaggttcaaccagtcaagaacaggccttatctgctcagcaagctgctgttattaaccttactggagtaggaagttttatgcagtcacaggcagctgtgttgtctcagcttggctctgccgagaacagacctgagcaaagccttcctcagcagagattccagctctcctctgcctttcaacagcagcagcaacagatacaacagttgcgattcttgcagcatcaaatggctatggcagcagcagcagcacaaacagctcagctacatcatcatcggcatacaggcagccagtcaaaaagtaaaatgaagagaggcacgccaaccactccaaaattttgagtcttgcattactttttgttccttttttaaaaacacaagagcactgaatcaaaagaattgagtttctactttttgttttttttaatgtgtcagtattttacattgctagatgtacaaactttatacagaagcacaaccttatcatttttaaataaaaacagggaaatggtttaacaaa

SEQ ID NO: 380844 - DNA, 4555 bp, Homo sapiens
  misc_feature (1878)..(1878): n is a, c, g, or t
agcggagtcggaagtgcggccgccggaactggctgttggtgggggtgcagcactgagccgccgacggggcgggtgggctttgctgccgagcaggcggcgccgtcttggggcctagcggcgaggcgacccgcacagtactgtaagattgatgttaaaggcatggtgttcaccccacttcatcagcgtacataagttatctcttcttttggacccttattttatgccataatgcaacaagctttagaactagctttggatcgtgcagagtatgtcattgaaagtgcccgacagagacctcctaaaaggaaatacctatcaagtggaagaaaatctgtatttcaaaaactttatgacttgtatattgaagaatgtgaaaaagaacctgaagttaagaaattaagaagaaatgtgaacttgttagagaagcttgttatgcaagagactttgtcatgtttagtggtcaatctatacccaggaaatgagggatattctctgatgctcaggggaaaaaacggatcagattccgagaccattcgactgccctatgaagaaggagagttgcttgaatatttggatgcagaagaattacctcctattttggttgatctcctagaaaaatctcaggttaatatttttcattgcggatgtgtcatagcagaaatacgtgactacaggcagtccagtaacatgaaatctcctggttaccaaagtcggcacattctcttacgtccaacaatgcagactttaatttgtgatgtacattcaataacaagtgataaccacaaatggacccaggaagacaaacttttgcttgagagccagctcatcctagctacagctgaaccactctgtcttgatccttctatagcagtcacctgcactgcaaacagactgctctataacaagcaaaagatgaacactcgcccaatgaaacggtgtttcaagaggtattccagatcctctctgaatcggcagcaagatctatctcattgtccacctcctcctcagctgaggttacttgatttcttacaaaaaagaaaggaaagaaaagcaggtcagcattatgacctcaaaatttctaaggcaggaaattgtgtagatatgtggaaacggagtccctgtaatttggccataccttctgaagtagatgtggagaaatatgctaaagtggaaaagtctatcaaatctgatgactcacagccaacagtctggccagcccatgatgtaaaagatgattatgtatttgaatgtgaagctggtactcagtatcagaaaacaaagctgaccatcttgcagtcgcttggagatccactttactatggtaaaatacagccatgtaaagcagatgaagaaagtgacagccagatgtctccatcacactcgtccacagatgatcattcaaattggttcattattggatcaaagaccgatgctgagagggtagtcaatcagtaccaagaattagtccagaatgaagccaaatgtccggtcaagatgtcacacagctccagtggctcagccagtctgagtcaggtttctccagggaaagaaacagatcaaactgaaaccgtgtcagttcagtcttcggtattggggaagggtgtaaaacatcgacccccaccaatcaaacttccctcaagctcaggaaatagttcctcaggtaactattttacaccacaacagacaagcagctttctcaaatctccaactcctcctccttcttctaagccatcaagtattcctcggaaatcatctgtggatctcaatcaagttagcatgctttctccagctgccctatcacctgccagctcatcacaaagtgagtcataacttaaattcttcattaaatcttcataagcttttgcattagtgtttctnaagacagcttttttcaacctgtgaagtagtgatatctgaatgtactgtgtacccaaaatgtataagttgctagaagcttcaggcagagctcttgttgattgtatgtattatgtctctattgtaattgtacttgtttttctgtatctgtgtatgcattctgcgtgtacctttcttataggcttacaacctacacatctccttaaaaaaataacctggtagttacatgtggcaataagatttcaaaatattttttattccagtgtaccctaggatcattttgcatatttatgtaaattgtgtggctgatatgaaaaaaatgtcataagagttgttgctgcaggtcctatctttgtgtatatgtaagaagtcaactagttccaaggtggtgatacaataaactgaaaaacaatatttcaaaaacactcctacactcttttataaattgttgtcagttactaaaatgtgatgataatcataaagcattattctgaagatactgaaatgtaatttttactactgaatacttttttttaacatcaagaagagttatacaagaatgctagcattagtttgggagaatttcttcaaattagtaaatatctgaaagtaccaatttggggaaaaaagtcattccagttttttagattttttatagatagctaatatatgctgaaagttttagtacactgcacagtgatagggtggtcttcgcattagatataaacatcttcatctcgatagctcaaaaggtgtaatttttctgccttcttgttttgcacaaagaaaaatatataaattttctgaaagtcttattcacacttcttatgttgtgggtatggattatggtaatctactgcacacagttgttactttaagtaagggttgagtgacagcttctggacattcacatttctttcctttctttctgcaggacatgaaagctaaaaaagaaaacacctcaagagcttttggttttacttttttggtttttgttttttgtttttgttttttaaaaaattgataaactgtgcatacttcattcacaacagattttctatacattctacatttaaacagaagtacacagttactgttaaagatgcagtattatctctcagatatttgctttattactgttttttgtaaatttgtttgtcaggataaacttgatgtgttaggaattaaacatgtatatttaggtgccaaatatgattgttaaccatatgtaacttattaaatatgtttacagtttatctcagacttttacactaaataagcaatatttttaaatgaagtcttgaattagtgaaatcgtaaataacaaattaatttgaattcgttttgaactttttaggccaaaggcagcatgtaggaaactaacttttaaatgggtattgtggtagaatataactgtatatttttactgttactgcaatagcatctttaatgggatttttaggtgatatactgcatccttaattgtaattgagtgtagcaacactcatgtatcatgtgtagaaattaacacttgcagttaactgctaaaaaaaaaaaaactagaacaaattgtcagtgctaagtaagattccattaaccttattttaaaaggactggccatttataacaaactagcaattttaatttttctcaatgagcaggatctggaactcctaagccatctactcctacaccaaccccttcatcgaccccacaccctcctgatgctcagagctcaactcctagtaccccttcagccacccctactccccaagattcaggcttcacccctcagcccactttgttaactcagtttgctcagcagcaaaggtctctgagccaggcaatgcctgtaacaaccattcctctttccaccatggtaacatctataactccaggaaccacggccacccaggtcatggcaaactctgctggacttaacttcatcaatgtagtgggctctgtttgtggggcccaggctttgatgagtggttcaaaccccatgctgggctgtaacactggtgccataactcctgcaggaataaacctgagcggccttctaccctcaggaggtctgctaccaaatgcactgcccagtgcaatgcaggcagcttctcaagcaggtgttccatttggtttaaaaaatacttcaagtctcaggcccttaaatctactccaggcaacagcagctctcccagtttacaccacaacaacctcagcagcccacaacttgtagtcctcaacagccaggggagcagggttctgagcaaggttcaaccagtcaagaacaggccttatctgctcagcaagctgctgttattaaccttactggagtaggaagttttatgcagtcacaggcagctgcagttgcgattcttgcagcatcaaatggctatggcagcagcagcagcacaaacagctcagctacatcatcatcggcatacaggcagccagtcaaaaagtaaaatgaagagaggcacgccaaccactccaaaattttgagtcttgcattactttttgttccttttttaaaaacacaagagcactgaatcaaaagaattgagtttctactttttgttttttttaatgtgtcagtattttacattgctagatgtacaaactttatacagaagcacaaccttatcatttttaaataaaaacagggaaatggtttaacaaa

SEQ ID NO: 380845 - DNA, 3069 bp, Homo sapiens
agcggagtcggaagtgcggccgccggaactggctgttggtgggggtgcagcactgagccgccgacggggcgggtgggctttgctgccgagcaggcggcgccgtcttggggcctagcggcgaggcgacccgcacagtactgtaagattgatgttaaaggcatggtgttcaccccacttcatcagcgtacataagttatctcttcttttggacccttattttatgccataatgcaacaagctttagaactagctttggatcgtgcagagtatgtcattgaaagtgcccgacagagacctcctaaaaggaaatacctatcaagtggaagaaaatctgtatttcaaaaactttatgacttgtatattgaagaatgtgaaaaagaacctgaagttaagaaattaagaagaaatgtgaacttgttagagaagcttgttatgcaagagactttgtcatgtttagtggtcaatctatacccaggaaatgagggatattctctgatgctcaggggaaaaaacggatcagattccgagaccattcgactgccctatgaagaaggagagttgcttgaatatttggatgcagaagaattacctcctattttggttgatctcctagaaaaatctcaggttaatatttttcattgcggatgtgtcatagcagaaatacgtgactacaggcagtccagtaacatgaaatctcctggttaccaaagtcggcacattctcttacgtccaacaatgcagactttaatttgtgatgtacattcaataacaagtgataaccacaaatggacccaggaagacaaacttttgcttgagagccagctcatcctagctacagctgaaccactctgtcttgatccttctatagcagtcacctgcactgcaaacagactgctctataacaagcaaaagatgaacactcgcccaatgaaacggtgtttcaagaggtattccagatcctctctgaatcggcagcaagatctatctcattgtccacctcctcctcagctgaggttacttgatttcttacaaaaaagaaaggaaagaaaagcaggtcagcattatgacctcaaaatttctaaggcaggaaattgtgtagatatgtggaaacggagtccctgtaatttggccataccttctgaagtagatgtggagaaatatgctaaagtggaaaagtctatcaaatctgatgactcacagccaacagtctggccagcccatgatgtaaaagatgattatgtatttgaatgtgaagctggtactcagtatcagaaaacaaagctgaccatcttgcagtcgcttggagatccactttactatggtaaaatacagccatgtaaagcagatgaagaaagtgacagccagatgtctccatcacactcgtccacagatgatcattcaaattggttcattattggatcaaagaccgatgctgagagggtagtcaatcagtaccaagaattagtccagaatgaagccaaatgtccggtcaagatgtcacacagctccagtggctcagccagtctgagtcaggtttctccagggaaagaaacagatcaaactgaaaccgtgtcagttcagtcttcggtattggggaagggtgtaaaacatcgacccccaccaatcaaacttccctcaagctcaggaaatagttcctcaggtaactattttacaccacaacagacaagcagctttctcaaatctccaactcctcctccttcttctaagccatcaagtattcctcggaaatcatctgtggatctcaatcaagttagcatgctttctccagctgccctatcacctgccagctcatcacaaagatctggaactcctaagccatctactcctacaccaaccccttcatcgaccccacaccctcctgatgctcagagctcaactcctagtaccccttcagccacccctactccccaagattcaggcttcacccctcagcccactttgttaactcagtttgctcagcagcaaaggtctctgagccaggcaatgcctgtaacaaccattcctctttccaccatggtaacatctataactccaggaaccacggccacccaggtcatggcaaactctgctggacttaacttcatcaatgtagtgggctctgtttgtggggcccaggctttgatgagtggttcaaaccccatgctgggctgtaacactggtgccataactcctgcaggaataaacctgagcggccttctaccctcaggaggtctgctaccaaatgcactgcccagtgcaatgcaggcagcttctcaagcaggtgttccatttggtttaaaaaatacttcaagtctcaggcccttaaatctactccagcttccaggtggttcacttatttttaacactctgcagcagcagcaacagcagctctcccagtttacaccacaacaacctcagcagcccacaacttgtagtcctcaacagccaggggagcagggttctgagcaaggttcaaccagtcaagaacaggccttatctgctcagcaagctgctgttattaaccttactggagtaggaagttttatgcagtcacaggcagctgcagttgcgattcttgcagcatcaaatggctatggcagcagcagcagcacaaacagctcagctacatcatcatcggcatacaggcagccagtcaaaaagtaaaatgaagagaggcacgccaaccactccaaaattttgagtcttgcattactttttgttccttttttaaaaacacaagagcactgaatcaaaagaattgagtttctactttttgttttttttaatgtgtcagtattttacattgctagatgtacaaactttatacagaagcacaaccttatcatttttaaataaaaacagggaaatggtttaacaaactagggttggtttgcctaagtcattgctttttaaaaatggtttcactatacataatatatatggaagtgacctaagaaataatagaaacatctttcagaagaatgtagtttgatatttatttagtataaaacgtttgtgcacagtgttaacaaatacaatttttacaaatctgttttgaaaaaaaaaaaa

SEQ ID NO: 380846 - DNA, 4829 bp, Homo sapiens
  misc_feature (1921)..(1921): n is a, c, g, or t
agcggagtcggaagtgcggccgccggaactggctgttggtgggggtgcagcactgagccgccgacggggcgggtgggctttgctgccgagcaggcggcgccgtcttggggcctagcggcgaggcgacccgcacaggtgggcggtggcggtaggtgggtggccagcgactggcaacgcggtggcttagacgcgcgagatccggccagggtcagagtactgtaagattgatgttaaaggcatggtgttcaccccacttcatcagcgtacataagttatctcttcttttggacccttattttatgccataatgtatgtcattgaaagtgcccgacagagacctcctaaaaggaaatacctatcaagtggaagaaaatctgtatttcaaaaactttatgacttgtatattgaagaatgtgaaaaagaacctgaagttaagaaattaagaagaaatgtgaacttgttagagaagcttgttatgcaagagactttgtcatgtttagtggtcaatctatacccaggaaatgagggatattctctgatgctcaggggaaaaaacggatcagattccgagaccattcgactgccctatgaagaaggagagttgcttgaatatttggatgcagaagaattacctcctattttggttgatctcctagaaaaatctcaggttaatatttttcattgcggatgtgtcatagcagaaatacgtgactacaggcagtccagtaacatgaaatctcctggttaccaaagtcggcacattctcttacgtccaacaatgcagactttaatttgtgatgtacattcaataacaagtgataaccacaaatggacccaggaagacaaacttttgcttgagagccagctcatcctagctacagctgaaccactctgtcttgatccttctatagcagtcacctgcactgcaaacagactgctctataacaagcaaaagatgaacactcgcccaatgaaacggtgtttcaagaggtattccagatcctctctgaatcggcagcaagatctatctcattgtccacctcctcctcagctgaggttacttgatttcttacaaaaaagaaaggaaagaaaagcaggtcagcattatgacctcaaaatttctaaggcaggaaattgtgtagatatgtggaaacggagtccctgtaatttggccataccttctgaagtagatgtggagaaatatgctaaagtggaaaagtctatcaaatctgatgactcacagccaacagtctggccagcccatgatgtaaaagatgattatgtatttgaatgtgaagctggtactcagtatcagaaaacaaagctgaccatcttgcagtcgcttggagatccactttactatggtaaaatacagccatgtaaagcagatgaagaaagtgacagccagatgtctccatcacactcgtccacagatgatcattcaaattggttcattattggatcaaagaccgatgctgagagggtagtcaatcagtaccaagaattagtccagaatgaagccaaatgtccggtcaagatgtcacacagctccagtggctcagccagtctgagtcaggtttctccagggaaagaaacagatcaaactgaaaccgtgtcagttcagtcttcggtattggggaagggtgtaaaacatcgacccccaccaatcaaacttccctcaagctcaggaaatagttcctcaggtaactattttacaccacaacagacaagcagctttctcaaatctccaactcctcctccttcttctaagccatcaagtattcctcggaaatcatctgtggatctcaatcaagttagcatgctttctccagctgccctatcacctgccagctcatcacaaagtgagtcataacttaaattcttcattaaatcttcataagcttttgcattagtgtttctnaagacagcttttttcaacctgtgaagtagtgatatctgaatgtactgtgtacccaaaatgtataagttgctagaagcttcaggcagagctcttgttgattgtatgtattatgtctctattgtaattgtacttgtttttctgtatctgtgtatgcattctgcgtgtacctttcttataggcttacaacctacacatctccttaaaaaaataacctggtagttacatgtggcaataagatttcaaaatattttttattccagtgtaccctaggatcattttgcatatttatgtaaattgtgtggctgatatgaaaaaaatgtcataagagttgttgctgcaggtcctatctttgtgtatatgtaagaagtcaactagttccaaggtggtgatacaataaactgaaaaacaatatttcaaaaacactcctacactcttttataaattgttgtcagttactaaaatgtgatgataatcataaagcattattctgaagatactgaaatgtaatttttactactgaatacttttttttaacatcaagaagagttatacaagaatgctagcattagtttgggagaatttcttcaaattagtaaatatctgaaagtaccaatttggggaaaaaagtcattccagttttttagattttttatagatagctaatatatgctgaaagttttagtacactgcacagtgatagggtggtcttcgcattagatataaacatcttcatctcgatagctcaaaaggtgtaatttttctgccttcttgttttgcacaaagaaaaatatataaattttctgaaagtcttattcacacttcttatgttgtgggtatggattatggtaatctactgcacacagttgttactttaagtaagggttgagtgacagcttctggacattcacatttctttcctttctttctgcaggacatgaaagctaaaaaagaaaacacctcaagagcttttggttttacttttttggtttttgttttttgtttttgttttttaaaaaattgataaactgtgcatacttcattcacaacagattttctatacattctacatttaaacagaagtacacagttactgttaaagatgcagtattatctctcagatatttgctttattactgttttttgtaaatttgtttgtcaggataaacttgatgtgttaggaattaaacatgtatatttaggtgccaaatatgattgttaaccatatgtaacttattaaatatgtttacagtttatctcagacttttacactaaataagcaatatttttaaatgaagtcttgaattagtgaaatcgtaaataacaaattaatttgaattcgttttgaactttttaggccaaaggcagcatgtaggaaactaacttttaaatgggtattgtggtagaatataactgtatatttttactgttactgcaatagcatctttaatgggatttttaggtgatatactgcatccttaattgtaattgagtgtagcaacactcatgtatcatgtgtagaaattaacacttgcagttaactgctaaaaaaaaaaaaactagaacaaattgtcagtgctaagtaagattccattaaccttattttaaaaggactggccatttataacaaactagcaattttaatttttctcaatgagcaggatctggaactcctaagccatctactcctacaccaaccccttcatcgaccccacaccctcctgatgctcagagctcaactcctagtaccccttcagccacccctactccccaagattcaggcttcacccctcagcccactttgttaactcagtttgctcagcagcaaaggtctctgagccaggcaatgcctgtaacaaccattcctctttccaccatggtaacatctataactccaggaaccacggccacccaggtcatggcaaactctgctggacttaacttcatcaatgtagtgggctctgtttgtggggcccaggctttgatgagtggttcaaaccccatgctgggctgtaacactggtgccataactcctgcaggaataaacctgagcggccttctaccctcaggaggtctgctaccaaatgcactgcccagtgcaatgcaggcagcttctcaagcaggtgttccatttggtttaaaaaatacttcaagtctcaggcccttaaatctactccagcttccaggtggttcacttatttttaacactctgcagcagcagcaacagcagctctcccagtttacaccacaacaacctcagcagcccacaacttgtagtcctcaacagccaggggagcagggttctgagcaaggttcaaccagtcaagaacaggccttatctgctcagcaagctgctgttattaaccttactggagtaggaagttttatgcagtcacaggcagctgcagttgcgattcttgcagcatcaaatggctatggcagcagcagcagcacaaacagctcagctacatcatcatcggcatacaggcagccagtcaaaaagtaaaatgaagagaggcacgccaaccactccaaaattttgagtcttgcattactttttgttccttttttaaaaacacaagagcactgaatcaaaagaattgagtttctactttttgttttttttaatgtgtcagtattttacattgctagatgtacaaactttatacagaagcacaaccttatcatttttaaataaaaacagggaaatggtttaacaaactagggttggtttgcctaagtcattgctttttaaaaatggtttcactatacataatatatatggaagtgacctaagaaataatagaaacatctttcagaagaatgtagtttgatatttatttagtataaaacgtttgtgcacagtgttaacaaatacaatttttacaaatctgttttgaaaaaaaaaaaa

SEQ ID NO: 380847 - DNA, 2705 bp, Homo sapiens
agcggagtcggaagtgcggccgccggaactggctgttggtgggggtgcagcactgagccgccgacggggcgggtgggctttgctgccgagcaggcggcgccgtcttggggcctagcggcgaggcgacccgcacagtactgtaagattgatgttaaaggcatggtgttcaccccacttcatcagcgtacataagttatctcttcttttggacccttattttatgccataatgcaacaagctttagaactagctttggatcgtgcagagtatgtcattgaaagtgcccgacagagacctcctaaaaggaaatacctatcaagtggaagaaaatctgtatttcaaaaactttatgacttgtatattgaagaatgtgaaaaagaacctgaagttaagaaattaagaagaaatgtgaacttgttagagaagcttgttatgcaagagactttgtcatgtttagtggtcaatctatacccaggaaatgagggatattctctgatgctcaggggaaaaaacggatcagattccgagaccattcgactgccctatgaagaaggagagttgcttgaatatttggatgcagaagaattacctcctattttggttgatctcctagaaaaatctcaggttaatatttttcattgcggatgtgtcatagcagaaatacgtgactacaggcagtccagtaacatgaaatctcctggttaccaaagtcggcacattctcttacgtccaacaatgcagactttaatttgtgatgtacattcaataacaagtgataaccacaaatggacccaggaagacaaacttttgcttgagagccagctcatcctagctacagctgaaccactctgtcttgatccttctatagcagtcacctgcactgcaaacagactgctctataacaagcaaaagatgaacactcgcccaatgaaacggtgtttcaagaggtattccagatcctctctgaatcggcagcaagatctatctcattgtccacctcctcctcagctgaggttacttgatttcttacaaaaaagaaaggaaagaaaagcaggtcagcattatgacctcaaaatttctaaggcaggaaattgtgtagatatgtggaaacggagtccctgtaatttggccataccttctgaagtagatgtggagaaatatgctaaagtggaaaagtctatcaaatctgatgactcacagccaacagtctggccagcccatgatgtaaaagatgattatgtatttgaatgtgaagctggtactcagtatcagaaaacaaagctgaccatcttgcagtcgcttggagatccactttactatggtaaaatacagccatgtaaagcagatgaagaaagtgacagccagatgtctccatcacactcgtccacagatgatcattcaaattggttcattattggatcaaagaccgatgctgagagggtagtcaatcagtaccaagaattagtccagaatgaagccaaatgtccggtcaagatgtcacacagctccagtggctcagccagtctgagtcaggtttctccagggaaagaaacagatcaaactgaaaccgtgtcagttcagtcttcggtattggggaagggtgtaaaacatcgacccccaccaatcaaacttccctcaagctcaggaaatagttcctcaggtaactattttacaccacaacagacaagcagctttctcaaatctccaactcctcctccttcttctaagccatcaagtattcctcggaaatcatctgtggatctcaatcaagttagcatgctttctccagctgccctatcacctgccagctcatcacaaagaaccacggccacccaggtcatggcaaactctgctggacttaacttcatcaatgtagtgggctctgtttgtggggcccaggctttgatgagtggttcaaaccccatgctgggctgtaacactggtgccataactcctgcaggaataaacctgagcggccttctaccctcaggaggtctgctaccaaatgcactgcccagtgcaatgcaggcagcttctcaagcaggtgttccatttggtttaaaaaatacttcaagtctcaggcccttaaatctactccaggcaacagcagctctcccagtttacaccacaacaacctcagcagcccacaacttgtagtcctcaacagccaggggagcagggttctgagcaaggttcaaccagtcaagaacaggccttatctgctcagcaagctgctgttattaaccttactggagtaggaagttttatgcagtcacaggcagctgtgttgtctcagcttggctctgccgagaacagacctgagcaaagccttcctcagcagagattccagctctcctctgcctttcaacagcagcagcaacagatacaacagttgcgattcttgcagcatcaaatggctatggcagcagcagcagcacaaacagctcagctacatcatcatcggcatacaggcagccagtcaaaaagtaaaatgaagagaggcacgccaaccactccaaaattttgagtcttgcattactttttgttccttttttaaaaacacaagagcactgaatcaaaagaattgagtttctactttttgttttttttaatgtgtcagtattttacattgctagatgtacaaactttatacagaagcacaaccttatcatttttaaataaaaacagggaaatggtttaacaaa

SEQ ID NO: 380848 - DNA, 3420 bp, Homo sapiens
  misc_feature (1878)..(1878): n is a, c, g, or t
agcggagtcggaagtgcggccgccggaactggctgttggtgggggtgcagcactgagccgccgacggggcgggtgggctttgctgccgagcaggcggcgccgtcttggggcctagcggcgaggcgacccgcacagtactgtaagattgatgttaaaggcatggtgttcaccccacttcatcagcgtacataagttatctcttcttttggacccttattttatgccataatgcaacaagctttagaactagctttggatcgtgcagagtatgtcattgaaagtgcccgacagagacctcctaaaaggaaatacctatcaagtggaagaaaatctgtatttcaaaaactttatgacttgtatattgaagaatgtgaaaaagaacctgaagttaagaaattaagaagaaatgtgaacttgttagagaagcttgttatgcaagagactttgtcatgtttagtggtcaatctatacccaggaaatgagggatattctctgatgctcaggggaaaaaacggatcagattccgagaccattcgactgccctatgaagaaggagagttgcttgaatatttggatgcagaagaattacctcctattttggttgatctcctagaaaaatctcaggttaatatttttcattgcggatgtgtcatagcagaaatacgtgactacaggcagtccagtaacatgaaatctcctggttaccaaagtcggcacattctcttacgtccaacaatgcagactttaatttgtgatgtacattcaataacaagtgataaccacaaatggacccaggaagacaaacttttgcttgagagccagctcatcctagctacagctgaaccactctgtcttgatccttctatagcagtcacctgcactgcaaacagactgctctataacaagcaaaagatgaacactcgcccaatgaaacggtgtttcaagaggtattccagatcctctctgaatcggcagcaagatctatctcattgtccacctcctcctcagctgaggttacttgatttcttacaaaaaagaaaggaaagaaaagcaggtcagcattatgacctcaaaatttctaaggcaggaaattgtgtagatatgtggaaacggagtccctgtaatttggccataccttctgaagtagatgtggagaaatatgctaaagtggaaaagtctatcaaatctgatgactcacagccaacagtctggccagcccatgatgtaaaagatgattatgtatttgaatgtgaagctggtactcagtatcagaaaacaaagctgaccatcttgcagtcgcttggagatccactttactatggtaaaatacagccatgtaaagcagatgaagaaagtgacagccagatgtctccatcacactcgtccacagatgatcattcaaattggttcattattggatcaaagaccgatgctgagagggtagtcaatcagtaccaagaattagtccagaatgaagccaaatgtccggtcaagatgtcacacagctccagtggctcagccagtctgagtcaggtttctccagggaaagaaacagatcaaactgaaaccgtgtcagttcagtcttcggtattggggaagggtgtaaaacatcgacccccaccaatcaaacttccctcaagctcaggaaatagttcctcaggtaactattttacaccacaacagacaagcagctttctcaaatctccaactcctcctccttcttctaagccatcaagtattcctcggaaatcatctgtggatctcaatcaagttagcatgctttctccagctgccctatcacctgccagctcatcacaaagtgagtcataacttaaattcttcattaaatcttcataagcttttgcattagtgtttctnaagacagcttttttcaacctgtgaagtagtgatatctgaatgtactgtgtacccaaaatgtataagttgctagaagcttcaggcagagctcttgttgattgtatgtattatgtctctattgtaattgtacttgtttttctgtatctgtgtatgcattctgcgtgtacctttcttataggcttacaacctacacatctccttaaaaaaataacctggtagttacatgtggcaataagatttcaaaatattttttattccagtgtaccctaggatcattttgcatatttatgtaaattgtgtggctgatatgaaaaaaatgtcataagagttgttgctgcaggtcctatctttgtgtatatgtaagaagtcaactagttccaaggtggtgatacaataaactgaaaaacaatatttcaaaaacactcctacactcttttataaattgttgtcagttactaaaatgtgatgataatcataaagcattattctgaagatactgaaatgtaatttttactactgaatacttttttttaacatcaagaagagttatacaagaatgctagcattagtttgggagaatttcttcaaattagtaaatatctgaaagtaccaatttggggaaaaaagtcattccagttttttagattttttatagatagctaatatatgctgaaagttttagtacactgcacagtgatagggtggtcttcgcattagatataaacatcttcatctcgatagctcaaaaggtgtaatttttctgccttcttgttttgcacaaagaaaaatatataaattttctgaaagtcttattcacacttcttatgttgtgggtatggattatggtaatctactgcacacagttgttactttaagtaagggttgagtgacagcttctggacattcacatttctttcctttctttctgcaggacatgaaagctaaaaaagaaaacacctcaagagcttttggttttacttttttggtttttgttttttgtttttgttttttaaaaaattgataaactgtgcatacttcattcacaacagattttctatacattctacatttaaacagaagtacacagttactgttaaagatgcagtattatctctcagatatttgctttattactgttttttgtaaatttgtttgtcaggataaacttgatgtgttaggaattaaacatgtatatttaggtgccaaatatgattgttaaccatatgtaacttattaaatatgtttacagtttatctcagacttttacactaaataagcaatatttttaaatgaagtcttgaattagtgaaatcgtaaataacaaattaatttgaattcgttttgaactttttaggccaaaggcagcatgtaggaaactaacttttaaatgggtattgtggtagaatataactgtatatttttactgttactgcaatagcatctttaatgggatttttaggtgatatactgcatccttaattgtaattgagtgtagcaacactcatgtatcatgtgtagaaattaacacttgcagttaactgc

SEQ ID NO: 380849 - DNA, 3463 bp, Homo sapiens
  misc_feature (555)..(555): n is a, c, g, or t
ggtattgagtggcatgtgaagcagatgaagaaggtgacagccagatgtctccatcacactcgtccacagatgatcattcaaatggttcattatggatcaaagaccgatgctgagagggtagtcaatcagtaccaagaattagtccagaatgaagccaaatgtccggtcaagatgtcacacagctccagtggctcagccagtctgagtcaggtttctccagggaaagaaacagatcaaactgaaaccgtgtcagttcagtcttcggtattggggaagggtgtaaaacatcgacccccaccaatcaaacttccctcaagctcaggaaatagttcctcaggtaactattttacaccacaacagacaagcagctttctcaaatctccaactcctcctccttcttctaagccatcaagtattcctcggaaatcatctgtggatctcaatcaagttagcatgctttctccagctgccctatcacctgccagctcatcacaaagtgagtcataacttaaattcttcattaaatcttcataagcttttgcattagtgtttctnaagacagcttttttcaacctgtgaagtagtgatatctgaatgtactgtgtacccaaaatgtataagttgctagaagcttcaggcagagctcttgttgattgtatgtattatgtctctattgtaattgtacttgtttttctgtatctgtgtatgcattctgcgtgtacctttcttataggcttacaacctacacatctccttaaaaaaataacctggtagttacatgtggcaataagatttcaaaatattttttattccagtgtaccctaggatcattttgcatatttatgtaaattgtgtggctgatatgaaaaaaatgtcataagagttgttgctgcaggtcctatctttgtgtatatgtaagaagtcaactagttccaaggtggtgatacaataaactgaaaaacaatatttcaaaaacactcctacactcttttataaattgttgtcagttactaaaatgtgatgataatcataaagcattattctgaagatactgaaatgtaatttttactactgaatacttttttttaacatcaagaagagttatacaagaatgctagcattagtttgggagaatttcttcaaattagtaaatatctgaaagtaccaatttggggaaaaaagtcattccagttttttagattttttatagatagctaatatatgctgaaagttttagtacactgcacagtgatagggtggtcttcgcattagatataaacatcttcatctcgatagctcaaaaggtgtaatttttctgccttcttgttttgcacaaagaaaaatatataaattttctgaaagtcttattcacacttcttatgttgtgggtatggattatggtaatctactgcacacagttgttactttaagtaagggttgagtgacagcttctggacattcacatttctttcctttctttctgcaggacatgaaagctaaaaaagaaaacacctcaagagcttttggttttacttttttggtttttgttttttgtttttgttttttaaaaaattgataaactgtgcatacttcattcacaacagattttctatacattctacatttaaacagaagtacacagttactgttaaagatgcagtattatctctcagatatttgctttattactgttttttgtaaatttgtttgtcaggataaacttgatgtgttaggaattaaacatgtatatttaggtgccaaatatgattgttaaccatatgtaacttattaaatatgtttacagtttatctcagacttttacactaaataagcaatatttttaaatgaagtcttgaattagtgaaatcgtaaataacaaattaatttgaattcgttttgaactttttaggccaaaggcagcatgtaggaaactaacttttaaatgggtattgtggtagaatataactgtatatttttactgttactgcaatagcatctttaatgggatttttaggtgatatactgcatccttaattgtaattgagtgtagcaacactcatgtatcatgtgtagaaattaacacttgcagttaactgctaaaaaaaaaaaaactagaacaaattgtcagtgctaagtaagattccattaaccttattttaaaaggactggccatttataacaaactagcaattttaatttttctcaatgagcaggatctggaactcctaagccatctactcctacaccaaccccttcatcgaccccacaccctcctgatgctcagagctcaactcctagtaccccttcagccacccctactccccaagattcaggcttcacccctcagcccactttgttaactcagtttgctcagcagcaaaggtctctgagccaggcaatgcctgtaacaaccattcctctttccaccatggtaacatctataactccaggaaccacggccacccaggtcatggcaaactctgctggacttaacttcatcaatgtagtgggctctgtttgtggggcccaggctttgatgagtggttcaaaccccatgctgggctgtaacactggtgccataactcctgcaggaataaacctgagcggccttctaccctcaggaggtctgctaccaaatgcactgcccagtgcaatgcaggcagcttctcaagcaggtgttccatttggtttaaaaaatacttcaagtctcaggcccttaaatctactccagcttccaggtggttcacttatttttaacactctgcagcagcagcaacagcagctctcccagtttacaccacaacaacctcagcagcccacaacttgtagtcctcaacagccaggggagcagggttctgagcaaggttcaaccagtcaagaacaggccttatctgctcagcaagctgctgttattaaccttactggagtaggaagttttatgcagtcacaggcagctgcagttgcgattcttgcagcatcaaatggctatggcagcagcagcagcacaaacagctcagctacatcatcatcggcatacaggcagccagtcaaaaagtaaaatgaagagaggcacgccaaccactccaaaattttgagtcttgcattactttttgttccttttttaaaaacacaagagcactgaatcaaaagaattgagtttctactttttgttttttttaatgtgtcagtattttacattgctagatgtacaaactttatacagaagcacaaccttatcatttttaaataaaaacagggaaatggtttaacaaactagggttggtttgcctaagtcattgctttttaaaaatggtttcactatacataatatatatggaagtgacctaagaaataatagaaacatctttcagaagaatgtagtttgatatttatttagtataaaacgtttgtgcacagtgttaacaaatacaatttttacaaatctgttttgaaaaaaaaaaaa

SEQ ID NO: 380850 - DNA, 2316 bp, Homo sapiens
agcggagtcggaagtgcggccgccggaactggctgttggtgggggtgcagcactgagccgccgacggggcgggtgggctttgctgccgagcaggcggcgccgtcttggggcctagcggcgaggcgacccgcacagtactgtaagattgatgttaaaggcatggtgttcaccccacttcatcagcgtacataagttatctcttcttttggacccttattttatgccataatgcaacaagctttagaactagctttggatcgtgcagagtatgtcattgaaagtgcccgacagagacctcctaaaaggaaatacctatcaagtggaagaaaatctgtatttcaaaaactttatgacttgtatattgaagaatgtgaaaaagaacctgaagttaagaaattaagaagaaatgtgaacttgttagagaagcttgttatgcaagagactttgtcatgtttagtggtcaatctatacccaggaaatgagggatattctctgatgctcaggggaaaaaacggatcagattccgagaccattcgactgccctatgaagaaggagagttgcttgaatatttggatgcagaagaattacctcctattttggttgatctcctagaaaaatctcaggttaatatttttcattgcggatgtgtcatagcagaaatacgtgactacaggcagtccagtaacatgaaatctcctggttaccaaagtcggcacattctcttacgtccaacaatgcagactttaatttgtgatgtacattcaataacaagtgataaccacaaatggacccaggaagacaaacttttgcttgagagccagctcatcctagctacagctgaaccactctgtcttgatccttctatagcagtcacctgcactgcaaacagactgctctataacaagcaaaagatgaacactcgcccaatgaaacggtgtttcaagaggtattccagatcctctctgaatcggcagcaagatctatctcattgtccacctcctcctcagctgaggttacttgatttcttacaaaaaagaaaggaaagaaaagcaggtcagcattatgacctcaaaatttctaaggcaggaaattgtgtagatatgtggaaacggagtccctgtaatttggccataccttctgaagtagatgtggagaaatatgctaaagtggaaaagtctatcaaatctgatgactcacagccaacagtctggccagcccatgatgtaaaagatgattatgtatttgaatgtgaagctggtactcagtatcagaaaacaaagctgaccatcttgcagtcgcttggagatccactttactatggtaaaatacagccatgtaaagcagatgaagaaagtgacagccagatgtctccatcacactcgtccacagatgatcattcaaattggttcattattggatcaaagaccgatgctgagagggtagtcaatcagtaccaagaattagtccagaatgaagccaaatgtccggtcaagatgtcacacagctccagtggctcagccagtctgagtcaggtttctccagggaaagaaacagatcaaactgaaaccgtgtcagttcagtcttcggtattggggaagggtgtaaaacatcgacccccaccaatcaaacttccctcaagctcaggaaatagttcctcaggtaactattttacaccacaacagacaagcagctttctcaaatctccaactcctcctccttcttctaagccatcaagtattcctcggaaatcatctgtggatctcaatcaagttagcatgctttctccagctgccctatcacctgccagctcatcacaaagaaccacggccacccaggtcatggcaaactctgctggacttaacttcatcaatgtagtgggctctgtttgtggggcccaggctttgatgagtggttcaaaccccatgctgggctgtaacactggtgccataactcctgcaggaataaacctgagcggccttctaccctcaggaggtctgctaccaaatgcactgcccagtgcaatgcaggcagcttctcaagcaggtccatttgttctaaacaatacttcaagtctcaggccttaaattctactcaggttcaggtggttccacttattttaacactctgcgcagacggaacagcagtctccccaggtacacgcaaagaaacttaggggccaaatttgggtgctcacacgccaggagacgctttgggcacgtcaccgtcagaaaggctcattgtcacacggtgtttaaccccggggagaggtttgcaccgagcggagggttgtcgacagtgtgggggacacccatcgt

SEQ ID NO: 380851 - DNA, 1778 bp, Homo sapiens
agcggagtcggaagtgcggccgccggaactggctgttggtgggggtgcagcactgagccgccgacggggcgggtgggctttgctgccgagcaggcggcgccgtcttggggcctagcggcgaggcgacccgcacagtactgtaagattgatgttaaaggcatggtgttcaccccacttcatcagcgtacataagttatctcttcttttggacccttattttatgccataatgcaacaagctttagaactagctttggatcgtgcagagtatgtcattgaaagtgcccgacagagacctcctaaaaggaaatacctatcaagtggaagaaaatctgtatttcaaaaactttatgacttgtatattgaagaatgtgaaaaagaacctgaagttaagaaattaagaagaaatgtgaacttgttagagaagcttgttatgcaagagactttgtcatgtttagtggtcaatctatacccaggaaatgagggatattctctgatgctcaggggaaaaaacggatcagattccgagaccattcgactgccctatgaagaaggagagttgcttgaatatttggatgcagaagaattacctcctattttggttgatctcctagaaaaatctcaggttaatatttttcattgcggatgtgtcatagcagaaatacgtgactacaggcagtccagtaacatgaaatctcctggttaccaaagtcggcacattctcttacgtccaacaatgcagactttaatttgtgatgtacattcaataacaagtgataaccacaaatggacccaggaagacaaacttttgcttgagagccagctcatcctagctacagctgaaccactctgtcttgatccttctatagcagtcacctgcactgcaaacagactgctctataacaagcaaaagatgaacactcgcccaatgaaacggtgtttcaagaggtattccagatcctctctgaatcggcagcaagatctatctcattgtccacctcctcctcagctgaggttacttgatttcttacaaaaaagaaaggaaagaaaagcaggtcagcattatgacctcaaaatttctaaggcaggaaattgtgtagatatgtggaaacggagtccctgtaatttggccataccttctgaagtagatgtggagaaatatgctaaagtggaaaagtctatcaaatctgatgactcacagccaacagtctggccagcccatgatgtaaaagatgattatgtatttgaatgtgaagctggtactcagtatcagaaaacaaagctgaccatcttgcagtcgcttggagatccactttactatggtaaaatacagccatgtaaagcagatgaagaaagtgacagccagatgtctccatcacactcgtccacagatgatcattcaaattggttcattattggatcaaagaccgatgctgagagggtagtcaatcagtaccaagaattagtccagaatgaagccaaatgtccggtcaagatgtcacacagctccagtggctcagccagtctgagtcaggtttctccagggaaagaaacagatcaaactgaaaccgtgtcagttcagtcttcggtattggggaagggtgtaaaacatcgacccccaccaatcaaacttccctcaagctcaggaaatagttcctcagcccaagttcctcccgtagccatgtttacgggtctctagcgaacgtttttctctcctgaaacaaccattgtcaacaacaggggtatcctgcccgctttttttcctcaagagtcagctat

SEQ ID NO: 380852 - DNA, 1924 bp, Homo sapiens
agcggagtcggaagtgcggccgccggaactggctgttggtgggggtgcagcactgagccgccgacggggcgggtgggctttgctgccgagcaggcggcgccgtcttggggcctagcggcgaggcgacccgcacagtactgtaagattgatgttaaaggcatggtgttcaccccacttcatcagcgtacataagttatctcttcttttggacccttattttatgccataatgcaacaagctttagaactagctttggatcgtgcagagtatgtcattgaaagtgcccgacagagacctcctaaaaggaaatacctatcaagtggaagaaaatctgtatttcaaaaactttatgacttgtatattgaagaatgtgaaaaagaacctgaagttaagaaattaagaagaaatgtgaacttgttagagaagcttgttatgcaagagactttgtcatgtttagtggtcaatctatacccaggaaatgagggatattctctgatgctcaggggaaaaaacggatcagattccgagaccattcgactgccctatgaagaaggagagttgcttgaatatttggatgcagaagaattacctcctattttggttgatctcctagaaaaatctcaggttaatatttttcattgcggatgtgtcatagcagaaatacgtgactacaggcagtccagtaacatgaaatctcctggttaccaaagtcggcacattctcttacgtccaacaatgcagactttaatttgtgatgtacattcaataacaagtgataaccacaaatggacccaggaagacaaacttttgcttgagagccagctcatcctagctacagctgaaccactctgtcttgatccttctatagcagtcacctgcactgcaaacagactgctctataacaagcaaaagatgaacactcgcccaatgaaacggtgtttcaagaggtattccagatcctctctgaatcggcagcaagatctatctcattgtccacctcctcctcagctgaggttacttgatttcttacaaaaaagaaaggaaagaaaagcaggtcagcattatgacctcaaaatttctaaggcaggaaattgtgtagatatgtggaaacggagtccctgtaatttggccataccttctgaagtagatgtggagaaatatgctaaagtggaaaagtctatcaaatctgatgactcacagccaacagtctggccagcccatgatgtaaaagatgattatgtatttgaatgtgaagctggtactcagtatcagaaaacaaagctgaccatcttgcagtcgcttggagatccactttactatggtaaaatacagccatgtaaagcagatgaagaaagtgacagccagatgtctccatcacactcgtccacagatgatcattcaaattggttcattattggatcaaagaccgatgctgagagggtagtcaatcagtaccaagaattagtccagaatgaagccaaatgtccggtcaagatgtcacacagctccagtggctcagccagtctgagtcaggtttctccagggaaagaaacagatgtgtgtttcattaatgttacttctttgtgcccagttgtttcacaagtaatctgagaaatgttaagaatcatttttggaggctaggcacagtggctcatgcctgtaatcccaacactttgggaggccaaggtgggtggatcacctgaggtcgggagttcgagaccagcctgaccaatagtgtgaaaccccatctctactaaaaacacaaaaattagctgggcatggtggcacacacctgtaatcccagccactcgggaggctgagacaggagaatctcttgaaccccggaggtggaggtttcagtgagccgagatagcgccactgcactccagcctgggcaacagagcaagactccatctcaaaaaaa

SEQ ID NO: 380853 - DNA, 288 bp, Homo sapiens
attaaccttgaagaccatggtcactttagttctataagcaagtgctaagaccaaagaagtactcaattaaaaatctaactgctggggagaaaggatgtttacaaaagtagaaagatccaattttctagaaagcatttctcttttgattttaatttttggtctgttgaggaaacccacctctgaaataccaattatattttggtgtctaaagcaaacatattaatgttcaattaattactgataccaaatatttatgttcagttttctaaggttgctttaaaaaaaaaa

SEQ ID NO: 380854 - DNA, 316 bp, Homo sapiens
gcacgtcttaagatgatggagcaggaaagagtgaagagggaagtgctacacacttctaaacaaccagatcttgtgagaactcactatcatgagaacagcaagggggaagtccacccccatgattcaatcatctcccaccaggcccttccttcaacacatgagatttgagtggggaccgagagccaaactgtttcactagctaaaattttaccagatagatagttgggtttcataggtattcactaaaaaggaagctcccatattgcatagatctcattgttacagttgtacataaattattcttttattcttttgt

SEQ ID NO: 380855 - DNA, 185 bp, Homo sapiens
taacacatccttctactcttggcacaatatctggtacacagtagttcctactggtagcttgtcataatccatgttagttttagagttaggcatatttgaatttctttacttccatatgtggaattcctttcctctccttttcttgtcctcccttgccacaattttcactatcatgaacatttttt

SEQ ID NO: 380856 - DNA, 597 bp, Homo sapiens
aaatttttttgactctaatttacaaacattaaaaactgaatgagctgcagtagaagcaaggatgaggaggaatgcgcactttgatacatcagtggggaaagtgcaaattagaacagctttgtgtgtgtgtttaggaatacatttaaaagctttagaaggcactaacacacaccaaacatacaccactcagtggttgctggagggccaaagttatatagggaatttaactttctccagatttttacaacattttcacaatgatcatattctgagaggaaaatactttcacattttaaaaatcagctacagagggccaggcatggtggctcacgcctgtaatcccagcactttgggaggccgaggcgggtggatcacgaggtcaggagatcgagaccatcctggctaacatagtgaaaccccatctctactgaaagaaacacaaaaaattatccgggtgtggtggcacgtgcctgtagtctcagctactcaggaggctgaggcaggagaatcgcttgaacctgggatgtggaggttgcagtgagccaagatggcaccactgtactccaacctgggtgacagagcgagacttggtctcaa

SEQ ID NO: 380857 - DNA, 630 bp, Homo sapiens
tggtaatactctcaagagaaatggactttgccctctgaattcctagacaggtaagtcaattcctgcttgattagcaatgctatcacgcatgactcccgcactctttgctgaagataagcagtgaacgagagacacaaatcttgcctcgggcccggcacggtggctcatgcctggccaacattagcatgttaatctttatttatttatttatttattttttttaagacagggtctctctctgtctcccaggctggagtgcagtggcacaatctcagctcactgcaacttccacctcccagattcaagcaattctcctgcctcagcttcccaagtagctgggattacaggcacccaccaccacacccagctaatttttgtagttttagtagagacagggtgccaccttgttggtcaggctggtctcaaactcctgacctcaggtgatccatctgcctcggcctcccaaactgctgggattacaggcatgcgccactgcgcccaggcacatgttaatcttcttaaaacgccaccctgattatgacagtccccaaactggaaaacacacagctttacttcctagaagaccaagtccaaactcctcacctgagcatcctaatgcaatctaccctg

SEQ ID NO: 380858 - DNA, 125 bp, Homo sapiens
atctcaatacatacaggcaaaaggacagatattcttatgttaaggtgtaagtataaaatgctaagcttttatccctagaaattcagcaaaaagatacaggacacctttggcagccctgggaacag

SEQ ID NO: 380859 - DNA, 219 bp, Homo sapiens
agataacttcccatactataggcagttggacaaagatgtaaatgccttgtttacaaatgctacccagatctcctaattaggaccacacatgcggagaacccaacagcttttggacttatcggccaatggtcttcttgggaaggtctctcctagtcatgggaattgtctttttattgttcaagcttttgcatagacctggaagaggcatccattgctgtt

SEQ ID NO: 380860 - DNA, 521 bp, Homo sapiens
tggaaatgagaagaaaaagaagcagagccatcaagtttcgaaggaaaactatttccaaactagaattctatatccggtaaaaccttcaattagtgtcagtatagaataaaaagatagcttcagataagcaatgtctaaaaaaaccatacatccccaggtgtcctttcctagaagctactggatgacgtaaaaaataaaaaataaaaaaccaatgtgagacagtaaatcaagaaagaaatgggccaggtgcagtggttcacgcctgtaatcccagcactttggaaggcagaggcacatcaccttaggtcaggagtttgagatcaacctggccaatatggtgaaaccccatctctactaaaaatataaaaattagttgggcgtggtggcaggcacctgtaatcccagctactcaggaggcagaggcaggaaaattgcttgaacttgggaggcggaggttgcagtgagccgagatcacatcactgcactccagcctgggcgacatgagtgaaactctgtctcaa

SEQ ID NO: 380861 - DNA, 3143 bp, Homo sapiens
  misc_feature (438)..(438): n is a, c, g, or t
  misc_feature (441)..(441): n is a, c, g, or t
  misc_feature (443)..(443): n is a, c, g, or t
  misc_feature (446)..(446): n is a, c, g, or t
  misc_feature (449)..(449): n is a, c, g, or t
  misc_feature (452)..(452): n is a, c, g, or t
  misc_feature (454)..(454): n is a, c, g, or t
  misc_feature (472)..(472): n is a, c, g, or t
  misc_feature (479)..(479): n is a, c, g, or t
  misc_feature (483)..(483): n is a, c, g, or t
caaattttgagtacttgccgtgctgtggaaaacaggaggaggagctgaccagagacttataggaggatgaccaagtgccactgaaggcttgctgaagaccccaagcaatcagtttcccttccttaagcagacctcaagtccagtgcctcaagggataaagctagttgtgggaaggaaaggcaaaggggcagactgtcttgtggctgctaatggctgagggagctgccaccccagttggaggtctgcttagggtcatcctctgtccaggctccacacaccctgggacagtttctggagctgtccctccttgcctagaccctggctggctcctattcatcactaactctagtgatgctccttccaagaagtcttccatagtccccagtcctcctttccagtcctggtaggtggcccttgtcctgtgctaccctttccctntcngnatntgnatnanattactgtcatgaacctnccgtgtncctntcccctccccctctcccctccccctcaccgcccccccccccccccccccgcaaccccttaagagcagggactgttgtttaatctctgcatctccaggatgcagcgagggcctgacatgtggagtttctcggggtatgtttggtgaataaatggcacagggagggggctgctgccaccactgccactctatgctctctcagatgtaaacaggttacccagctgggagagaggacatctgctggctggtgtggcgtccagcactgatgtgtctaccttctctgaaggtgggtccaggagacctttgacccaggggatcctcatcacccctcacctgggaaagctgacacctggtggaagcttggtcctgaggcagggagggagggaagtgtggtcctgaagctgccccatcctcaacccatcccctacagatgccagaggggacccctttctcaaggccgcaatcaccccattcgtttatatagaactttatggcacataagtatctttgacatatgtgaattgagtccgcccaacaaccctgcaaaattggtatgaccaccatcccattttgtggatgaggaaattaaaggctcagagaagtaaagaaatttgccctaagccacccggctagtaagtgacagacccacgacttgggcttaggcctgactacaagttcagggcactttgccactatgctgccctttggcccagctcagctgtgctgaggaaggccaaggtggtggtgaagtttcagggtcctgccacatacccatgccttcctcatcttcccgggggataaagggtacaagaggggaggagagagacacagatcacccatgggtcagcagtgtagtgaggacccaggacttcacagccttgtgtggggaagggaaggaggaagaaatgtgggtaagcctcaggccaagctgctgcactgtgaggccacttggactcacacccacagcctgggctcattcctggctggtggccggtatgaggtctcaccctagttccactcctcgtgggggctggcaaaggcacaatcctcggcctgtttgagggtaacccagccacagcaccccaagccagtgcctgctccctccctcccctaggagtgctggggaatccgaggtaaggtcccttgtcctttgtcgtgtgagtgagattctgggctgtgagaggcgcagagtcgcctcatgggcttacctttgagatagaggcctgaggggacagccgggccttaggcagtgtcagaggtgaggcagtggtggtagaccggggaaactcctgtcttcaggactggcattgagctgagcagcagaggtgggggcctttctccagggcttttccctaaccccaaattctcaccccagcagcttcttcctgtgccctgggaaaggggatgtggtctctgtgctgcctaaaagggtgcttaggctgggggtgggtcattcgaaagcctggggctctagggactggggagagtgtgggaaggtgctgagtgaagagcagggaaaggatcaagaagggggcatgggaagggaggggagtgagaaaggtgtcaggcaggagaaaaaaaggggcttgaaggagaagggaggagggggaagtggggagggaaggacgagtcagaagctaaggagcatgatgcaggccttagctcctggccaggctgtgagagatcagcgtgggccagggcaggtgtaggaactgaggatgctgcggctctgctgctcctggggctgtggggtgccatagcaggagggccttctcctaccaggcgccttgtggagcagggctgccactcattgtcagcacctggttgaggggcaggcaggagctggtggaggcctcccactggagggagaggacagaagtaacagggaatcacaggactgcagggggcttgataagggtctcctgtgtatcagacatggaaccagacactttgctgggacatggggttactctgcggccaagttactactactgaagcagaaacacttcttggggtggacagctggtggtggcaggtgaatttggtgaggttttagcttgagctgtgggaagacccagaggtctgcggctgctactgatgacccagactcctgccccctcaggtgactgcaaggagcctgacaagtgctgctggagacacaagcagtgcactgggcacatcatctaccctttcgcctctgactgtgtccgccacagcctgcacctacactctgtcaaccactgcaactgtaattctaggctgaaggactcttcagaggatagcagcagctcccggggcgcgggcccaacctgctcccatgtcatcgagtccccttgctttgagctcacaccggaggaggagcatgtggagcgattccggtatggctggtgcaaaagctacagacctgtctctgtggcagtgatccaccatccactctaccatgagtgtggggcagatgatctaaatgaagaagaggaagaggaggaggaggaaagcaagccccccatcccgacacaggtggggcccgccaccgcctcccctgacctaggcaccagcatggccactggtacccctgactccacagcgcccatcaccatctggcgctctgagagccccacagggaagggtcagggcagcaaggtgatcaagaaggtaaagaaga

SEQ ID NO: 380862 - DNA, 711 bp, Homo sapiens
ctggtgcccacccccagtgcctcgaggtcgaggagagctcctcggccccgcaggacggggaggattctgtacagatgagcataacttatgtaaacaggttacccagctgggagagaggacatctgctggctggtgtggcgtccagcactgatgtgtctaccttctctgaaggtgactgcaaggagcctgacaagtgctgctggagacacaagcagtgcactgggcacatcatctaccctttcgcctctgactgtgtccgccacagcctgcacctacactctgtcaaccactgcaactgtaattctaggctgaaggactcttcagaggatagcagcagctcccggggcgcgggcccaacctgctcccatgtcatcgagtccccttgctttgagctcacaccggaggaggagcatgtggagcgattccggtatggctggtgcaaaagctacagacctgtctctgtggcagtgatccaccatccactctaccatgagtgtggggcagatgatctaaatgaagaagaggaagaggaggaggaggaaagcaagccccccatcccgacacaggtggggcccgccaccgcctcccctgacctaggcaccagcatggccactggtacccctgactccacagcgcccatcaccatctggcgctctgagagccccacagggaagggtcagggcagcaaggtgatcaagaaggtaaagaaga

SEQ ID NO: 380863 - DNA, 977 bp, Homo sapiens
gtggcaggtgaatatggtgaggtttaagcttgagctgtgggaagaccagaggtctgcggctgctactgatgacccagactcctgccccctcaggtgactgcaagggagcctgacaagtgccgctggagacacaagcagtgcactgggcacatgatttaccctttgggctctgactgtgtccgccacagtctggatctacactctgtcatgcattgcagggggcttgataagggtctcctgtgtatcagacatggaaccagacactttgctgggacatggggttactctgcggccaagttactactactgaagcagaaacacttcttggggtggacagctggtggtggcaggtgaatttggtgaggttttagcttgagctgtgggaagacccagaggtctgcggctgctactgatgacccagactcctgccccctcaggtgactgcaaggagcctgacaagtgctgctggagacacaagcagtgcactgggcacatcatctaccctttcgcctctgactgtgtccgccacagcctgcacctacactctgtcaaccactgcaactgtaattctaggctgaaggactcttcagaggatagcagcagctcccggggcgcgggcccaacctgctcccatgtcatcgagtccccttgctttgagctcacaccggaggaggagcatgtggagcgattccggtatggctggtgcaaaagctacagacctgtctctgtggcagtgatccaccatccactctaccatgagtgtggggcagatgatctaaatgaagaagaggaagaggaggaggaggaaagcaagccccccatcccgacacaggtggggcccgccaccgcctcccctgacctaggcaccagcatggccactggtacccctgactccacagcgcccatcaccatctggcgctctgagagccccacagggaagggtcagggcagcaaggtgatcaagaaggtaaagaaga

SEQ ID NO: 380864 - DNA, 828 bp, Homo sapiens
agctgggaagactacgcagcctggagccgggctggggaggccggcgggggctgcgccagcatgaggcggggttaggggctaggcggggcgaagccgagactggagttcacggctgggccgagggctcggccgggctgaggctcagggttggacttcacgcaagagtcctgtagagacgaagacctgggcggagagcgatgtgggtcaggacgacgctcacaattgaaagatggactaaggaaaagaccgagcccaaggcccgctcgtgggatgagagcagatgccgcggtgactgcaaggagcctgacaagtgctgctggagacacaagcagtgcactgggcacatcatctaccctttcgcctctgactgtgtccgccacagcctgcacctacactctgtcaaccactgcaactgtaattctaggctgaaggactcttcagaggatagcagcagctcccggggcgcgggcccaacctgctcccatgtcatcgagtccccttgctttgagctcacaccggaggaggagcatgtggagcgattccggtatggctggtgcaaaagctacagacctgtctctgtggcagtgatccaccatccactctaccatgagtgtggggcagatgatctaaatgaagaagaggaagaggaggaggaggaaagcaagccccccatcccgacacaggtggggcccgccaccgcctcccctgacctaggcaccagcatggccactggtacccctgactccacagcgcccatcaccatctggcgctctgagagccccacagggaagggtcagggcagcaaggtgatcaagaaggtaaagaaga

SEQ ID NO: 380865 - DNA, 401 bp, Homo sapiens
aggaggagcatgtggagcgattccggtatggctggtgagtgagccccggtgggctgatggggaaggggcctctacagggcactgccccccactctctgtcaaacttcccccgttgtcccttctcccaggtgcaaaagctacagacctgtctctgtggcagtgatccaccatccactctaccatgagtgtggggcagatgatctaaatgaagaagaggaagaggaggaggaggaaagcaagccccccatcccgacacaggtggggcccgccaccgcctcccctgacctaggcaccagcatggccactggtacccctgactccacagcgcccatcaccatctggcgctctgagagccccacagggaagggtcagggcagcaaggtgatcaagaaggtaaagaa

SEQ ID NO: 380866 - DNA, 110 bp, Homo sapiens
gtgcatacctggaaactctactttctgcataatttttctataaacctgaaattgctctaaaaagtaaagtctatttaaaaataataaataagaaagaaatatgaatatca

SEQ ID NO: 380867 - DNA, 168 bp, Homo sapiens
ggctctgagaagagcaacatcattttgagagtggtgctaaaaccctgtaagcctgagtgttctgtcctcccaaagctgtgatacggctcagcctcctgacggtgacctacttggttttatttcttcttgctgtctcagaaaatattctaaagatgcttaatattattt

SEQ ID NO: 380868 - DNA, 1490 bp, Homo sapiens
aatctgtggggtctgcttctgtgttttttttttttctcttcatcagttacatttttctgcttccttgcatgttccataatttttttaagtgtacagcagacattctatttttaaagaaccataaagactgaagttggtcatattttcctccatagagagtttgtcctttccctgctgagtagggtgagaactcatcactttattaggaattgaactgggctagggctaggaagccaccttgattagattcagtgccctgtagtttcaaatgtctacagaatgaggcctgccatatgtttattgtggacttgtctttctcagaattttgtttccaagcatatcaagactatgaaaggggccagactctgtggctcacgcctgtaaccccagcactttgggaggctgaggtggaccaaccgattgagcccagaagttagaggccagcctgggcaatatggtgaaaccctgtctcttgtaaaaatacaaaaattaaccaggcgtagtggtgcatgcctgtgatcccagctactcaggaggctgagcctggaggatcacttaatcccaggaggtcgagactgcagtgagttgtgattgcaccacagcactccagcctgggtgacagagtgagaccctgtctcaaaaaaaaaaaaaaaaaaaaagactattgaaggggttaaccttgtctttctcgccttcctagccccaccttccacccttccatgctgccctagtactcagcaaatgccccatagggcaaactggccatgcatttgggggtttttctagattccaatccgtcatgccatcccaatggctgtcaaaatgtctgttggattctctttcctctagtagagatgccagtacctttagcagggcccagtcctcagctctcatgtttgagaaatgacctcagagaataaggccagctcactcaggaaatgtttttccttcttaagaattttagttaagctaagtcattgcttacatcggtctccagtgtcttcaaagaaaaaaatatatacaatgtgcttacttcctaagttatggtggagtaatggcttgctattgctatgtccaaaaagcaaaagctccattaagttttcaattttaattattatattttgttgtttttcaaaaatgcattgtcatttggtggttatgaattataattatgtttaaaatttttttcatttatttatgtaaacatatcaaacagctttatattctgtatctgatagttccagtaatctaataatctttataaatatttctattgtttctgctgactcttgctaatggtgctttattcccctatatttttcatgatgtttatgtatgtgtgtgactttatgctcattaaaactatatgcaaattattcaaggccctaaatgtaaattcttcatgggagaatttgtgtttgtttccatcagacatggggacactaccaattttggtcttctttaaattaaaattctcagcttatacagtt

SEQ ID NO: 380869 - DNA, 1460 bp, Homo sapiens
ctccatagagagtgtgtcctttccctgctgagtagggtgagaactcatcactttattaggaattgaactgggctagggctaggaagccaccttgattagattcagtgccctgtagtttcaaatagagagtttgtcctttccctgctgagtagggtgagaactcatcactttattaggaattgaactgggctagggctaggaagccaccttgattagattcagtgccctgtagtttcaaatgtctacagaatgaggcctgccatatgtttattgtggacttgtctttctcagaattttgtttccaagcatatcaagactatgaaaggggccagactctgtggctcacgcctgtaaccccagcactttgggaggctgaggtggaccaaccgattgagcccagaagttagaggccagcctgggcaatatggtgaaaccctgtctcttgtaaaaatacaaaaattaaccaggcgtagtggtgcatgcctgtgatcccagctactcaggaggctgagcctggaggatcacttaatcccaggaggtcgagactgcagtgagttgtgattgcaccacagcactccagcctgggtgacagagtgagaccctgtctcaaaaaaaaaaaaaaaaaaaaagactattgaaggggttaaccttgtctttctcgccttcctagccccaccttccacccttccatgctgccctagtactcagcaaatgccccatagggcaaactggccatgcatttgggggtttttctagattccaatccgtcatgccatcccaatggctgtcaaaatgtctgttggattctctttcctctagtagagatgccagtacctttagcagggcccagtcctcagctctcatgtttgagaaatgacctcagagaataaggccagctcactcaggaaatgtttttccttcttaagaattttagttaagctaagtcattgcttacatcggtctccagtgtcttcaaagaaaaaaatatatacaatgtgcttacttcctaagttatggtggagtaatggcttgctattgctatgtccaaaaagcaaaagctccattaagttttcaattttaattattatattttgttgtttttcaaaaatgcattgtcatttggtggttatgaattataattatgtttaaaatttttttcatttatttatgtaaacatatcaaacagctttatattctgtatctgatagttccagtaatctaataatctttataaatatttctattgtttctgctgactcttgctaatggtgctttattcccctatatttttcatgatgtttatgtatgtgtgtgactttatgctcattaaaactatatgcaaattattcaaggccctaaatgtaaattcttcatgggagaatttgtgtttgtttccatcagacatggggacactaccaattttggtcttctttaaattaaaattctcagcttatacagtt

SEQ ID NO: 380870 - DNA, 1436 bp, Homo sapiens
aatctgtggggtctgcttctgtgttttttttttttctcttcatcagttacatttttctgcttccttgcatgttccataatttttttaagtgtacagcagacattctatttttaaagaaccataaagactgaagttggtcatattttcctccatagagagtttgtcctttccctgctgagtagggtgagaactcatcactttattaggaattgaactgggctagggctaggaagccaccttgattagattcagtgccctgtagtttcaaatgtctacagaatgaggcctgccatatgtttattgtggacttgtctttctcagaattttgtttccaagcatatcaagactatgaaaggggccagactctgtggctcacgcctgtaaccccagcactttgggaggctgaggtggaccaaccgattgagcccagaagttagaggccagcctgggcaatatggtgaaaccctgtctcttgtaaaaatacaaaaattaaccaggcgtagtggtgcatgcctgtgatcccagctactcaggaggctgagcctggaggatcacttaatcccaggaggtcgagactgcagtgagttgtgattgcaccacagcactccagcctgggtgacagagtgagaccctgtctcaaaaaaaaaaaaaaaaaaaaagactattgaaggggttaaccttgtctttctcgccttcctagccccaccttccacccttccatgctgccctagtactcagcaaatgccccatagggcaaactggccatgcatttgggggtttttctagattccaatccgtcatgccatcccaatggctgtcaaaatgtctgttggattctctttcctctagtagagatgccagtacctttagcagggcccagtcctcagctctcatgtttgagaaatgacctcagagaataaggccagctcactcaggaaatgtttttccttcttaagaattttagttaagctaagtcattgcttacatcggtctccagtgtcttcaaagaaaaaaatatatacaatgtgcttacttcctaagttatggtggagtaatggcttgctattgctatgtccaaaaagcaaaagctccattaagttttcaattttaattattatattttgttgtttttcaaaaatgcattgtcatttggtggttatgaattataattatgtttatgatagttccagtaatctaataatctttataaatatttctattgtttctgctgactcttgctaatggtgctttattcccctatatttttcatgatgtttatgtatgtgtgtgactttatgctcattaaaactatatgcaaattattcaaggccctaaatgtaaattcttcatgggagaatttgtgtttgtttccatcagacatggggacactaccaattttggtcttctttaaattaaaattctcagcttatacagtt

SEQ ID NO: 380871 - DNA, 211 bp, Homo sapiens
aggaaggaaggaagaaaaaaaaattgtgtatcccaaaatgtctctccagaagatacgatagaagaagtctgtaatgactgtatttaggtacactaaaccagcagtgcatatctgcaaattggtcatgagatgtgagaaagaaaggtaagaaaagtatatctaggaaggtactaggttagttaaattaagttgatttctgtctaatgtaaga

SEQ ID NO: 380872 - DNA, 339 bp, Homo sapiens
acctcttctttctttcatgctttttattccgtatcttctgttttggacatacatacatatattctataaaatctctctcagcccaccccctgcattaggatttccatatttaaaatatttgtacactgactggggaagggagagattgcactataaacaagttcagtggatgtttgtagcaatgagtaaaactgtattctaaattaaaaatcaaatatatatacacgcagttatacacacacattttttaaaaggaggaggaggaaagagagctattgtccattcctacattttgaaataaacttgtcaagattacgcatcagtaccagggttatggaa

SEQ ID NO: 380873 - DNA, 365 bp, Homo sapiens
ctgtggttgcagatagtaaatgctattaaaagaaagagcgtctgtaatactggagcttgacaacagcagcagataaggaattttcctgaatttttatttcctgctagtgtggggacaggagtggtggctggatgtcaggggagagttcgggtttgttggtctcattttctgtcttatgtggctgaggaagcggttgtctgtatgtttttgatgcagtcatatgtcatagtttggacgttctcttgcagggagggcaccgctagtcaatgagtggaacctcgatttaaaggtctttttatgaaacggattttcatgtgaagcgtgtaactcttacagatatttgagtaaacctcaggctcattgtt

SEQ ID NO: 380874 - DNA, 458 bp, Homo sapiens
acaggcatgatccaccatacctggcctaaatgattctgaaagcatacatctgctatagtagttctaaactaaagttgcaaagttagtgaatgatttactttaataaataaaaaaaagcacaggtttagtattacctcataacgttgcttgtatcattgtattcctatattctcttaaatgtaagtgattagagtactcaagatacttaaaatcttttccataatagagtatgatgtatttaaaaagtagagacaaatgacgttttaaagcttgtgtaaaccatctacagcttttgtgtttcgtggagtcattcatttgatgatgtctgatcaatatatatgaatgtcctgtttccacctctggtacctattcatttgacagtgagataacatgcattaaagaaacctcatggtatttacatatcagctgaatgaagcaacactcacacctttaattag

SEQ ID NO: 380875 - DNA, 600 bp, Homo sapiens
tctcagctccgataagccagataggcagataataacaacacagtgtgtttgggcttaggacggaggttatgggagcctgaactcagcctggttggagaatacttcctggaggaaatagctgaagctgggaaattgcacttggtgggggagttataaagcatgcataaagggccagaagtagtgaaacttgatatcgttcagaaaaccagaaacagattgcatagggcatgtttgagaagctgagccatgaggcgtaaatcctggagatggtggtggagatagggagaaacggacaaagtggacaaaggacaaagctctaggatgatggctgaggggtagaagaaggggcaagggagacagaggtcttggagatgacgcccatatctctggcatgagcaacccagatggcagggggtggggcctggtttgtgggaaggggtgtcccactagcagatgtgtacccagtggaggtgcagctcagattggagctggccatgggtatttgaaaatcatgtgcgcacaggtagccactgaagccatgggagtggatgagaacacttggaaagtgaactctgggaaacccaatttattagggataag

SEQ ID NO: 380876 - DNA, 708 bp, Homo sapiens
catgggagctgagggatgggtaggaggtcctcctaacttcctgagtttagcttcccaactgcagtggtcttctcaaagctgactgcagagacaggattgaccctgcacacaagaggtctgtctgagattctagagacatagcttatgctcttcacactcttgtgttttgcacacacaggtccttgagttttaagcatggctttttgaccttctcagtattgtcttttatctggagtggaagtggaacgtgactttacccagcctctactgtgagttagggaggggtgttggccccactggccctgacggcatccacacagcctttgctgtcatagagtgacccttctggctcctttgattagtgattggctctcctccatagcaagggctggcaaagggttcctaactctgtttaagtgaaatctgaaacgggttgccaatggtgcctctcttcaagaccccagagccagcctggaaggaacaccatgaaaatgttgcaatagtcaatgagtagaatgtggacttttgtgtcaaccacactaagggtcgtacttttttcattaagaaagtattaacgtgtgttttttgagaagggaggaagaatgtgtgctattcctttattcttgctattaaatcataaagctgggttatataagatcctggaaactcagcctttatgaacagaattaataaaagtttgaaatgtca

SEQ ID NO: 380877 - DNA, 339 bp, Homo sapiens
tggaagagatgttggctagatcacagtaatgagaaaactttctttaaagtaactggaataacatcaagacaaggtgaagatcacacatgaccaggcttcccagaaaacctgggagacagaggcccagctacatagcaaagaattcattaactttattcatgatggaacctcaaacttagccctgtatttcctatgtagcttttgttatgattaagtaatgatttggtctgttatatagtgttcttttcacattttattatgaacttcataccatagctccatttgatttatgctaagttctctttgtggtaaaaatctttaagcctctattttaggtag

SEQ ID NO: 380878 - DNA, 2068 bp, Homo sapiens
gatacttgtgcggttccaagtgtggagaaagcggctctgggtctagattgagggatactccccctttccaccatgggcaagaagggcaaagttggcaagagccgacgagacaagttttatcacttggcgaaggagacgggttaccgttcccgatctgctttcaagctgatccagctcaatcgccgctttcagttcctgcagaaagcccgagccttgctggacctgtgtgctgcgccagggggatggctgcaggtagctgccaagtttatgcctgtatccagccttattgtgggagtggacctggttccaatcaagcctctccccaatgtggtgactctccaggaggacatcacaacagaacgttgtaggcaggccctgaggaaggagctgaagacctggaaggttgatgttgtgctcaatgatggggcccccaacgttggggctagctgggtccatgatgcttactcacaagcccatttgacactgatggctctacgtttggcttgtgactttttggcccgtggtggcagcttcatcacaaaggttttccgttctcgtgactatcagcctctgctatggatctttcagcagctgttccgccgtgtccaggccaccaagccccaagcctctcgccatgaatctgcagagatctttgtagtctgccaaggattcctggcccctgacaaggttgacagtaaattctttgaccccaaatttgcctttaaggaggttgaagttcaggctaagaccgttactgaattggttactaagaagaagccaaaggctgaaggctatgctgagggtgacctcactctctatcaccgtacctcagtcactgacttcctccgagctgccaaccctgttgacttcctctccaaggccagcgaaatcatggtagatgatgaagagttggcacagcatccagctaccactgaggacatacgggtgtgctgtcaggacatcagagtgttggggcgcaaggagctcaggtcgctactaaactggagaacaaaacttcggcgatatgtggccaagaagctgaaagaacaagcaaaggcactggacatcagcctcagctctggagaggaagatgaaggtgatgaggaggactcaacagctggaaccacaaagcagccctctaaggaggaggaggaagaggaggaggaggaacaactgaaccagaccttggcagaaatgaaggcccaggaggtggcggaattgaagaggaagaaaaagaagctgttgcgtgagcagagaaagcagcgggagcgtgtggagctgaagatggatctgcctggggtttccattgcagacgagggggagactggcatgttctccttgtgcaccatccggggtcaccagttattagaggaagtaacacaaggggatatgagtgcagcagacacatttctgtccgatctgccaagggatgatatctatgtgttaatcattttccttatctgcttcctagtcctgtatgcccttttcctaacactcacaacaaaactaactaatactaacatctcagacgctcaggaaatagaaaccgtctgaactatcctgcccgccatcatcctagtcctcatcgccctcccatccctacgcatcctttacataacagacgaggtcaacgatccctcccttaccatcaaatcaattggccaccaatggtactgaacctacgagtacaccgactacggcggactaatcttcaactcctacatacttcccccattattcctagaaccaggcgacctgcgactccttgacgttgacaatcgagtagtactcccgattgaagcccccattcgtataataattacatcacaagacgtcttgcactcatgagctgtccccacattaggcttaaaaacagatgcaattcccggacgtctaaaccaaaccactttcaccgctacacgaccgggggtatactacggtcaatgctctgaaatctgtggagcaaaccacagtttcatgcccatcgtcctagaattaattcccctaaaaatctttgaaatagggcccgtatttaccctatagcaccccctctaccccctctagagcc

SEQ ID NO: 380879 - DNA, 3052 bp, Homo sapiens
ggagaggggcgcggggtggaattgctgcgggaagtgggaaactggaagtgggaaactggaagtggaatctggtgctccggaaagagacgttcccaacttctactttctccccagattgagggatactccccctttccaccatgggcaagaagggcaaagttggcaagagccgacgagacaagttttatcacttggcgaaggagacgggttaccgttcccgatctgctttcaagctgatccagctcaatcgccgctttcagttcctgcagaaagcccgagccttgctggacctgtgtgctgcgccagggggatggctgcaggtagctgccaagtttatgcctgtatccagccttattgtgggagtggacctggttccaatcaagcctctccccaatgtggtgactctccaggaggacatcacaacagaacgttgtaggcaggccctgaggaaggagctgaagacctggaaggttgatgttgtgctcaatgatggggcccccaacgttggggctagctgggtccatgatgcttactcacaagcccatttgacactgatggctctacgtttggcttgtgactttttggcccgtggtggcagcttcatcacaaaggttttccgttctcgtgactatcagcctctgctatggatctttcagcagctgttccgccgtgtccaggccaccaagccccaagcctctcgccatgaatctgcagagatctttgtagtctgccaaggattcctggcccctgacaaggttgacagtaaattctttgaccccaaatttgcctttaaggaggttgaagttcaggctaagaccgttactgaattggttactaagaagaagccaaaggctgaaggctatgctgagggtgacctcactctctatcaccgtacctcagtcactgacttcctccgagctgccaaccctgttgacttcctctccaaggccagcgaaatcatggtagatgatgaagagttggcacagcatccagctaccactgaggacatacgggtgtgctgtcaggacatcagagtgttggggcgcaaggagctcaggtcgctactaaactggagaacaaaacttcggcgatatgtggccaagaagctgaaagaacaagcaaaggcactggacatcagcctcagctctggagaggaagatgaaggtgatgaggaggactcaacagctggaaccacaaagcagccctctaaggaggaggaggaagaggaggaggaggaacaactgaaccagaccttggcagaaatgaaggcccaggaggtggcggaattgaagaggaagaaaaagaagctgttgcgtgagcagagaaagcagcgggagcgtgtggagctgaagatggatctgcctggggtttccattgcagacgagggggagactggcatgttctccttgtgcaccatccggggtcaccagttattagaggaagtaacacaaggggatatgagtgcagcagacacatttctgtccgatctgccaagggatgatatctatgtgtcagatgttgaggacgacggtgatgacacatctctggatagtgacctggatccagaggagctggcaggagtcaggggacatcagggtctaagggaccaaaagcgtatgcgacttactgaagtgcaagatgataaagaggaggaggaggaggagaatccactgctggtaccactggaggaaaaggcagtactgcaggaagaacaagccaacctgtggttctcaaagggcagctttgctgggatcgaggacgatgccgatgaggccctggagatcagtcaggcccagctgttatttgagaaccggcggaagggacggcagcagcagcagaagcagcagctgccacagacacccccttcctgtttgaagactgagataatgtctcccctgtaccaagatgaagcccctaagggaacagaggcttcttcggggacagaagctgccactggccttgaaggggaagaaaaggatggcatctcagacagtgatagcagtactagcagtgaggaagaagagagctgggaacccctccgtggtaagaagcgaagccgtgggcctaagtcagatgatgacgggtttgagatagtgcctattgaggacccagcgaaacatcggatactggaccccgaaggccttgctctaggtgctgttattgcctcttccaaaaaggccaagagagacctcatagataactccttcaaccggtacacatttaatgaggatgagggggagcttccggagtggtttgtgcaagaggaaaagcagcaccggatacgacagttgcctgttggtaagaaggaggtggagcattaccggaaacgctggcgggaaatcaatgcacgtcccatcaagaaggtggctgaggctaaggctagaaagaaaaggaggatgctgaagaggctggagcagaccaggaagaaggcagaagccgtggtgaacacagtggacatctcagaacgagagaaagtggcacagctgcgaagtctctacaagaaggctgggcttggcaaggagaaacgccatgtcacctacgttgtagccaaaaaaggtgtgggccgcaaagtgcgccggccagctggagtcagaggtcatttcaaggtggtggactcaaggatgaagaaggaccaaagagcacagcaacgtaaggaacaaaagaaaaaacacaaacggaagtaagcagagctgccaggctcccaggagagcatggggactaggaggaagggtgtggcatggctcagtctggcccccttgattaccggcctagcccctgctcacatcacagctgtctgaagaacagtgaggtggagtgcctagaactcccgtggtggtcctgagcagagaggaggatgtcctcctgcctgcctgaaggtctcccatgaaaacactgctgaactgtgttgacactcatgaccctttttttaaaccgttaaagggaagttcggtgttggagcgatactcaatgtagtcagtctacacctggacgtgtgggccacttaagccctccccacccccatcctattcctaaataaaaccaggataatgga

SEQ ID NO: 380880 - DNA, 3246 bp, Homo sapiens
gatacttgtgcggttccaagtgtggagaaagcggctctgggtctagattgagggatactccccctttccaccatgggcaagaagggcaaagttggcaagagccgacgagacaagttttatcacttggcgaaggagacgggttaccgttcccgatctgctttcaagctgatccagctcaatcgccgctttcagttcctgcagaaagcccgagccttgctggacctgtgtgctgcgccagggggatggttcgtaacactcgccacaggttgctcctggtggccgctttctgggttctgagctgggatggcttccagtttcactgcgggaggggaacccgaatcccggtcctcttgggggccgtttcctttcttgattgcagagaaagggcttggaatacgtgcctatgatatgctttggccagtacacgtaacaccagggatgagagatcagttgccaagagggggaaaaggatggctctaggtttttaaatttctgttccttttataggctgcaggtagctgccaagtttatgcctgtatccagccttattgtgggagtggacctggttccaatcaagcctctccccaatgtggtgactctccaggaggacatcacaacagaacgttgtaggcaggccctgaggaaggagctgaagacctggaaggttgatgttgtgctcaatgatggggcccccaacgttggggctagctgggtccatgatgcttactcacaagcccatttgacactgatggctctacgtttggcttgtgactttttggcccgtggtggcagcttcatcacaaaggttttccgttctcgtgactatcagcctctgctatggatctttcagcagctgttccgccgtgtccaggccaccaagccccaagcctctcgccatgaatctgcagagatctttgtagtctgccaaggattcctggcccctgacaaggttgacagtaaattctttgaccccaaatttgcctttaaggaggttgaagttcaggctaagaccgttactgaattggttactaagaagaagccaaaggctgaaggctatgctgagggtgacctcactctctatcaccgtacctcagtcactgacttcctccgagctgccaaccctgttgacttcctctccaaggccagcgaaatcatggtagatgatgaagagttggcacagcatccagctaccactgaggacatacgggtgtgctgtcaggacatcagagtgttggggcgcaaggagctcaggtcgctactaaactggagaacaaaacttcggcgatatgtggccaagaagctgaaagaacaagcaaaggcactggacatcagcctcagctctggagaggaagatgaaggtgatgaggaggactcaacagctggaaccacaaagcagccctctaaggaggaggaggaagaggaggaggaggaacaactgaaccagaccttggcagaaatgaaggcccaggaggtggcggaattgaagaggaagaaaaagaagctgttgcgtgagcagagaaagcagcgggagcgtgtggagctgaagatggatctgcctggggtttccattgcagacgagggggagactggcatgttctccttgtgcaccatccggggtcaccagttattagaggaagtaacacaaggggatatgagtgcagcagacacatttctgtccgatctgccaagggatgatatctatgtgtcagatgttgaggacgacggtgatgacacatctctggatagtgacctggatccagaggagctggcaggagtcaggggacatcagggtctaagggaccaaaagcgtatgcgacttactgaagtgcaagatgataaagaggaggaggaggaggagaatccactgctggtaccactggaggaaaaggcagtactgcaggaagaacaagccaacctgtggttctcaaagggcagctttgctgggatcgaggacgatgccgatgaggccctggagatcagtcaggcccagctgttatttgagaaccggcggaagggacggcagcagcagcagaagcagcagctgccacagacacccccttcctgtttgaagactgagataatgtctcccctgtaccaagatgaagcccctaagggaacagaggcttcttcggggacagaagctgccactggccttgaaggggaagaaaaggatggcatctcagacagtgatagcagtactagcagtgaggaagaagagagctgggaacccctccgtggtaagaagcgaagccgtgggcctaagtcagatgatgacgggtttgagatagtgcctattgaggacccagcgaaacatcggatactggaccccgaaggccttgctctaggtgctgttattgcctcttccaaaaaggccaagagagacctcatagataactccttcaaccggtacacatttaatgaggatgagggggagcttccggagtggtttgtgcaagaggaaaagcagcaccggatacgacagttgcctgttggtaagaaggaggtggagcattaccggaaacgctggcgggaaatcaatgcacgtcccatcaagaaggtggctgaggctaaggctagaaagaaaaggaggatgctgaagaggctggagcagaccaggaagaaggcagaagccgtggtgaacacagtggacatctcagaacgagagaaagtggcacagctgcgaagtctctacaagaaggctgggcttggcaaggagaaacgccatgtcacctacgttgtagccaaaaaaggtgtgggccgcaaagtgcgccggccagctggagtcagaggtcatttcaaggtggtggactcaaggatgaagaaggaccaaagagcacagcaacgtaaggaacaaaagaaaaaacacaaacggaagtaagcagagctgccaggctcccaggagagcatggggactaggaggaagggtgtggcatggctcagtctggcccccttgattaccggcctagcccctgctcacatcacagctgtctgaagaacagtgaggtggagtgcctagaactcccgtggtggtcctgagcagagaggaggatgtcctcctgcctgcctgaaggtctcccatgaaaacactgctgaactgtgttgacactcatgaccctttttttaaaccgttaaagggaagttcggtgttggagcgatactcaatgtagtcagtctacacctggacgtgtgggccacttaagccctccccacccccatcctattcctaaataaaaccaggataatgga

SEQ ID NO: 380881 - DNA, 3530 bp, Homo sapiens
gatacttgtgcggttccaagtgtggagaaagcggctctgggtctagattgagggatactccccctttccaccatgggcaagaagggcaaagttggcaagagccgacgagacaagttttatcacttggcgaaggagacgggttaccgttcccgatctgctttcaagctgatccagctcaatcgccgctttcagttcctgcagaaagcccgagccttgctggacctgtgtgctgcgccagggggatggctgcaggtagctgccaagtttatgcctgtatccagccttattgtgggagtggacctggttccaatcaagcctctccccaatgtggtgactctccaggaggacatcacaacagaacgttgtaggcaggccctgaggaaggagctgaagacctggaaggttgatgttgtgctcaatgatggggcccccaacgttggggctagctgggtccatgatgcttactcacaagcccatttgacactgatggctctacgtttggcttgtgactttttggcccgtggtggcagcttcatcacaaaggttttccgttctcgtgactatcagcctctgctatggatctttcagcagctgttccgccgtgtccaggccaccaagccccaagcctctcgccatgaatctgcagagatctttgtagtctgccaaggattcctggcccctgacaaggttgacagtaaattctttgaccccaaatttgcctttaaggaggttgaagttcaggctaagaccgttactgaattggttactaagaagaagccaaaggctgaaggctatgctgagggtgacctcactctctatcaccgtacctcagtcactgacttcctccgagctgccaaccctgttgacttcctctccaaggccagcgaaatcatggtagatgatgaagagttggcacagcatccagctaccactgaggacatacgggtgtgctgtcaggacatcagagtgttggggcgcaaggagctcaggtcgctactaaactggagaacaaaacttcggcgatatgtggccaagaagctgaaagaacaagcaaaggcactggacatcagcctcagctctggagaggaagatgaaggtgatgaggaggactcaacagctggaaccacaaagcagccctctaaggaggaggaggaagaggaggaggaggaacaactgaaccagaccttggcagaaatgaaggcccaggaggtggcggaattgaagaggaagaaaaagaagctgttgcgtgagcagagaaagcagcgggagcgtgtggagctgaagatggatctgcctggggtttccattgcagacgagggggagactggcatgttctccttgtgcaccatccggggtcaccagttattagaggaagtaacacaaggggatatgagtgcagcagacacatttctgtccgatctgccaagggatgatatctatgtgtcagatgttgaggacgacggtgatgacacatctctggatagtgacctggatccagaggagctggcaggagtcaggggacatcagggtctaagggaccaaaagcgtatgcgacttactgaagtgcaagatgataaagaggaggaggaggaggagaatccactgctggtaccactggaggaaaaggcagtactgcaggaagaacaagccaacctgtggttctcaaagggcagctttgctgggatcgaggacgatgccgatgaggccctggagatcagtcaggcccagctgttatttgagaaccggcggaagggacggcagcagcagcagaagcagcagctgccacagacacccccttcctgtttgaagactgagataatgtctcccctgtaccaagatgaagcccctaagggaacagaggcttcttcggggacagaagctgccactggccttgaaggggaagaaaaggatggcatctcagacagtgatagcagtactagcagtgaggaagaagagagctgggaacccctccgtggtaagaagcgaagccgtgggcctaagtcagatgatgacgggtttgagatagtgcctattgaggacccagcgaaacatcggatactggaccccgaaggccttgctctaggtgctgttattgcctcttccaaaaaggccaagagagacctcatagataactccttcaaccggtacacatttaatgaggatgagggggagcttccggagtggtttgtgcaagaggaaaagcagcaccggatacgacagttgcctgttggtaagaaggaggtggagcattaccggaaacgctggcgggaaatcaatgcacgtcccatcaagaaggtggctgaggctaaggctagaaagaaaaggaggatgctgaagaggctggagcagaccaggaagaaggcagaagccgtggtgaacacagtggacatctcagaacgagagaaagtggcacagctgcgaagtctctacaagaaggctgggcttggcaaggagaaacgccatgtcacctacgttgtagccaaaaaaggtgtgggccgcaaagtgcgccggccagctggagtcagaggtcatttcaaggtggtggactcaaggatgaagaaggaccaaagagcacagcaacgtaaggaacaaaagaaaaaacacaaacggaagtaagcagagctgccaggctcccaggagagcatggggactaggaggaagggtgtggcatggctcagtctggcccccttgattaccggcctagcccctgctcacatcacagctgtctgaagaacagtgaggtggagtgcctagaactcccgtggtggtcctgagcagagaggaggatgtcctcctgcctgcctgaaggtctcccatgaaaacactgctgaactgtgttgacactcatgaccctttttttaaaccgttaaagggaagttcggtgttggagcgatactcaatgtagtcagtctacacctggacgtgtgggccacttaagccctccccacccccatcctattcctaaataaaaccaggataatggaaaaaaaaaaaaaaaaaaaaaaaaaaaaaaaaaaaaaaaaaaaaaaaaaaaaaaaaaaaaaaaaaaaaaaaaaaaaaaaaggggggggggggcaaaaaaccccgggggcggccaaaaactataggaaacaccacccacacatgtctgcaaaaaaaccaagggcgccaccaccatataggcgacgcggtaataaaaaaacaaaccaagagcgcacgccacacccagacaacacaaaaccccgctgcactaacgagcagcaacacacgcctcacacgctgacggcacccctcccgcccgacgacaaccccccccccccgcggccgcggcggcaccaccaccgctcgcgcacaccaccacccaccagcaaagaaaaaccgcaacccacgaggagacaacaacaccaccccacgcaggtgcactagggggcccgaacccaccacgccctaatatagactcgccgcagcggcagagcaattgcacccccgccggcgaatgtacagcaaagaacacaacacaccgcggcgcgctgtgctgactgacgcgccgg

SEQ ID NO: 380882 - DNA, 3307 bp, Homo sapiens
gatacttgtgcggttccaagtgtggagaaagcggctctgggtctagattgagggatactccccctttccaccatgggcaagaagggcaaagttggcaagagccgacgagacaagttttatcacttggcgaaggagacgggttaccgttcccgatctgctttcaagctgatccagctcaatcgccgctttcagttcctgcagaaagcccgagccttgctggacctgtgtgctgcgccagggggatggctgcaggtagctgccaagtttatgcctgtatccagccttattgtgggagtggacctggttccaatcaagcctctccccaatgtggtgactctccaggaggacatcacaacagaacgttgtaggcaggccctgaggaaggagctgaagacctggaaggttgatgttgtgctcaatgatggggcccccaacgttggggctagctgggtccatgatgcttactcacaagcccatttgacactgatggctctacgtttggcttgtgactttttggcccgtggtggcagcttcatcacaaaggttttccgttctcgtgactatcagcctctgctatggatctttcagcagctgttccgccgtgtccaggccaccaagccccaagcctctcgccatgaatctgcagagatctttgtagtctgccaaggattcctggcccctgacaaggttgacagtaaattctttgaccccaaatttgcctttaaggaggttgaagttcaggctaagaccgttactgaattggttactaagaagaagccaaaggctgaaggctatgctgagggtgacctcactctctatcaccgtacctcagtcactgacttcctccgagctgccaaccctgttgacttcctctccaaggccagcgaaatcatggtagatgatgaagagttggcacagcatccagctaccactgaggacatacgggtgtgctgtcaggacatcagagtgttggggcgcaaggagctcaggtcgctactaaactggagaacaaaacttcggcgatatgtggccaagaagctgaaagaacaagcaaaggcactggacatcagcctcagctctggagaggaagatgaaggtgatgaggaggactcaacagctggaaccacaaagcagccctctaaggaggaggaggaagaggaagaaaaagaagctgttgcgtgagcagagaaagcagcgggagcgtgtggagctgaagatggatctgcctggggtttccattgcagacgagggggagactggcatgttctccttgtgcaccatccggggtcaccagttattagaggaagtaacacaaggggatatgagtgcagcagacacatttctgtccgatctgccaagggatgatatctatgtgtcagatgttgaggacgacggtgatgacacatctctggatagtgacctggatccagaggagctggcaggagtcaggggacatcagggtctaagggaccaaaagcgtatgcgacttactgaagtgcaagatgataaagaggaggaggaggaggagaatccactgctggtaccactggaggaaaaggcagtactgcaggaagaacaagccaacctgtggttctcaaagggcagctttgctgggatcgaggacgatgccgatgaggccctggagatcagtcaggcccagctgttatttgagaaccggcggaagggacggcagcagcagcagaagcagcagctgccacagacacccccttcctgtttgaagactgagataatgtctcccctgtaccaagatgaagcccctaagggaacagaggcttcttcggggacagaagctgccactggccttgaaggggaagaaaaggatggcatctcagacagtgatagcagtactagcagtgaggaagaagagagctgggaacccctccgtggtaagaagcgaagccgtgggcctaagtcagatgatgacgggtttgagatagtgcctattgaggacccagcgaaacatcggatactggaccccgaaggccttgctctaggtgctgttattgcctcttccaaaaaggccaagagagacctcatagataactccttcaaccggtacacatttaatgaggatgagggggagcttccggagtggtttgtgcaagaggaaaagcagcaccggatacgacagttgcctgttggtaagaaggaggtggagcattaccggaaacgctggcgggaaatcaatgcacgtcccatcaagaaggtggctgaggctaaggctagaaagaaaaggaggatgctgaagaggctggagcagaccaggaagaaggcagaagccgtggtgaacacagtggacatctcagaacgagagaaagtggcacagctgcgaagtctctacaagaaggctgggcttggcaaggagaaacgccatgtcacctacgttgtagccaaaaaaggtgtgggccgcaaagtgcgccggccagctggagtcagaggtcatttcaaggtggtggactcaaggatgaagaaggaccaaagagcacagcaacgtaaggaacaaaagaaaaaacacaaacggaagtaagcagagctgccaggctcccaggagagcatggggactaggaggaagggtgtggcatggctcagtctggcccccttgattaccggcctagcccctgctcacatcacagctgtctgaagaacagtgaggtggagtgcctagaactcccgtggtggtcctgagcagagaggaggatgtcctcctgcctgcctgaaggtctcccatgaaaacactgctgaactgtgttgacactcatgaccctttttttaaaccgttaaagggaagttcggtgttggagcgatactcaatgtagtcagtctacacctggacgtgtgggccacttaagccctccccacccccatcctattcctaaataaaaccaggataatggaagagttgtcttttctgacagttttaataagcacttccctatctgtccctacactgtgtgcggcactattcttaatgtgtaccaattcatagacagaaatgacaaacgatccacaggtcccggtagtaaaacatttactagagagcaagcagaaaggaatgcacatcttaaagaaaccttcacaaagtcacaaaagtcaaagtttgtatatttcttttcctttttataaacgataaacaaaaatcatcaaaatcatttcagcaaaagacttttctatcattggggcaagttaaaaaaaatacaatgaaatagaagacactttaaaagctgttgttgggtttcttgtttaattttaaatttagcaataccatctcaaacctggagcaatcctg

SEQ ID NO: 380883 - DNA, 2500 bp, Homo sapiens
gatacttgtgcggttccaagtgtggagaaagcggctctgggtctagattgagggatactccccctttccaccatgggcaagaagggcaaagttggcaagagccgacgagacaagttttatcacttggcgaaggagacgggttaccgttcccgatctgctttcaagctgatccagctcaatcgccgctttcagttcctgcagaaagcccgagccttgctggacctgtgtgctgcgccagggggatggctgcaggtagctgccaagtttatgcctgtatccagccttattgtgggagtggacctggttccaatcaagcctctccccaatgtggtgactctccaggaggacatcacaacagaacgttgtaggcaggccctgaggaaggagctgaagacctggaaggttgatgttgtgctcaatgatggggcccccaacgttggggctagctgggtccatgatgcttactcacaagcccatttgacactgatggctctacgtttggcttgtgactttttggcccgtggtggcagcttcatcacaaaggttttccgttctcgtgactatcagcctctgctatggatctttcagcagctgttccgccgtgtccaggccaccaagccccaagcctctcgccatgaatctgcagagatctttgtagtctgccaaggattcctggcccctgacaaggttgacagtaaattctttgaccccaaatttgcctttaaggaggttgaagttcaggctaagaccgttactgaattggttactaagaagaagccaaaggctgaaggctatgctgagggtgacctcactctctatcaccgtacctcagtcactgacttcctccgagctgccaaccctgttgacttcctctccaaggccagcgaaatcatggtagatgatgaagagttggcacagcatccagctaccactgaggacatacgggtgtgctgtcaggacatcagagtgttggggcgcaaggagctcaggtcgctactaaactggagaacaaaacttcggcgatatgtggccaagaagctgaaagaacaagcaaaggcactggacatcagcctcagctctggagaggaagatgaaggtgatgaggaggactcaacagctggaaccacaaagcagccctctaaggaggaggaggaagaggaggaggaggaacaactgaaccagaccttggcagaaatgaaggcccaggaggtggcggaattgaagaggaagaaaaagaagctgttgcgtgagcagagaaagcagcgggagcgtgtggagctgaagatggatctgcctggggtttccattgcagacgagggggagactggcatgttctccttgtgcaccatccggggtcaccagttattagaggaagtaacacaaggggatatgagtgcagcagacacatttctgtccgatctgccaagggatgatatctatgtgtcagatgttgaggacgacggtgatgacacatctctggatagtgacctggatccagaggagctggcaggagtcaggggacatcagggtctaagggaccaaaagcgtatgcgacttactgaagtgcaagatgataaagaggaggaggaggaggagaatccactgctggtaccactggaggaaaaggcagtactgcaggaagaacaagccaacctgtggttctcaaagggcagctttgctgggatcgaggacgatgccgatgaggccctggagatcagtcaggcccagctgttatttgagaaccggcggaagggacggcagcagcagcagaagcagcagctgccacagacacccccttcctgtttgaagactgagataatgtctcccctgtaccaagatgaagcccctaagggaacagaggcttcttcggggacagaagctgccactggccttgaaggggaagaaaaggatggcatctcagacagtgatagcagtactagcagtgaggaagaagagagctgggaacccctccgtggtaagaagcgaagccgtgggcctaagtcagatgatgacgggtttgagatagtgcctattgaggacccagcgaaacatcggatactggaccccgaaggccttgctctaggtgctgttattgcctcttccaaaaaggccaagagagacctcatagataactccttcaaccggtacacatttaatgaggatgagggggagcttccggagtggtttgtgcaagaggaaaagcagcaccggatacgacagttgcctgttggtaagaaggaggtggagcattaccggaaacgctggcgggaaatcaatgcacgtcccatcaagaaggtggctgaggctaaggctagaaagaaaaggaggatgctttaggaacatgttttgcttttttaaaatatatatatatttataagagatcctttcccatttattttgggaagatgtttttcaaactcagagacaaggactttggtttttgtaagacaaacgatgatatgaaggccttttgtaagaaaaaataaaagatgaagtgtga

SEQ ID NO: 380884 - DNA, 3190 bp, Homo sapiens
gatacttgtgcggttccaagtgtggagaaagcggctctgggtctagattgagggatactccccctttccaccatgggcaagaagggcaaagttggcaagagccgacgagacaagttttatcacttggcgaaggagacgggttaccgttcccgatctgctttcaagctgatccagctcaatcgccgctttcagttcctgcagaaagcccgagccttgctggacctgtgtgctgcgccagggggatggctgcaggtagctgccaagtttatgcctgtatccagccttattgtgggagtggacctggttccaatcaagcctctccccaatgtggtgactctccaggaggacatcacaacagaacgttgtaggcaggccctgaggaaggagctgaagacctggaaggttgatgttgtgctcaatgatggggcccccaacgttggggctagctgggtccatgatgcttactcacaagcccatttgacactgatggctctacgtttggcttgtgactttttggcccgtggtggcagcttcatcacaaaggttttccgttctcgtgactatcagcctctgctatggatctttcagcagctgttccgccgtgtccaggccaccaagccccaagcctctcgccatgaatctgcagagatctttgtagtctgccaaggattcctggcccctgacaaggttgacagtaaattctttgaccccaaatttgcctttaaggaggttgaagttcaggctaagaccgttactgaattggttactaagaagaagccaaaggctgaaggctatgctgagggtgacctcactctctatcaccgtacctcagtcactgacttcctccgagctgccaaccctgttgacttcctctccaaggccagcgaaatcatggtagatgatgaagagttggcacagcatccagctaccactgaggacatacgggtgtgctgtcaggacatcagagtgttggggcgcaaggagctcaggtcgctactaaactggagaacaaaacttcggcgatatgtggccaagaagctgaaagaacaagcaaaggcactggacatcagcctcagctctggagaggaagatgaaggtgatgaggaggactcaacagctggaaccacaaagcagccctctaaggaggaggaggaagaggaggaggaggaacaactgaaccagaccttggcagaaatgaaggcccaggaggtggcggaattgaagaggaagaaaaagaagctgttgcgtgagcagagaaagcagcgggagcgtgtggagctgaagatggatctgcctggggtttccattgcagacgagggggagactggcatgttctccttgtgcaccatccggggtcaccagtatgcgacttactgaagtgcaagatgataaagaggaggaggaggaggagaatccactgctggtaccactggaggaaaaggcagtactgcaggaagaacaagccaacctgtggttctcaaagggcagctttgctgggatcgaggacgatgccgatgaggccctggagatcagtcaggcccagctgttatttgagaaccggcggaagggacggcagcagcagcagaagcagcagctgccacagacacccccttcctgtttgaagactgagataatgtctcccctgtaccaagatgaagcccctaagggaacagaggcttcttcggggacagaagctgccactggccttgaaggggaagaaaaggatggcatctcagacagtgatagcagtactagcagtgaggaagaagagagctgggaacccctccgtggtaagaagcgaagccgtgggcctaagtcagatgatgacgggtttgagatagtgcctattgaggacccagcgaaacatcggatactggaccccgaaggccttgctctaggtgctgttattgcctcttccaaaaaggccaagagagacctcatagataactccttcaaccggtacacatttaatgaggatgagggggagcttccggagtggtttgtgcaagaggaaaagcagcaccggatacgacagttgcctgttggtaagaaggaggtggagcattaccggaaacgctggcgggaaatcaatgcacgtcccatcaagaaggtggctgaggctaaggctagaaagaaaaggaggatgctgaagaggctggagcagaccaggaagaaggcagaagccgtggtgaacacagtggacatctcagaacgagagaaagtggcacagctgcgaagtctctacaagaaggctgggcttggcaaggagaaacgccatgtcacctacgttgtagccaaaaaaggtgtgggccgcaaagtgcgccggccagctggagtcagaggtcatttcaaggtggtggactcaaggatgaagaaggaccaaagagcacagcaacgtaaggaacaaaagaaaaaacacaaacggaagtaagcagagctgccaggctcccaggagagcatggggactaggaggaagggtgtggcatggctcagtctggcccccttgattaccggcctagcccctgctcacatcacagctgtctgaagaacagtgaggtggagtgcctagaactcccgtggtggtcctgagcagagaggaggatgtcctcctgcctgcctgaaggtctcccatgaaaacactgctgaactgtgttgacactcatgaccctttttttaaaccgttaaagggaagttcggtgttggagcgatactcaatgtagtcagtctacacctggacgtgtgggccacttaagccctccccacccccatcctattcctaaataaaaccaggataatggaagagttgtcttttctgacagttttaataagcacttccctatctgtccctacactgtgtgcggcactattcttaatgtgtaccaattcatagacagaaatgacaaacgatccacaggtcccggtagtaaaacatttactagagagcaagcagaaaggaatgcacatcttaaagaaaccttcacaaagtcacaaaagtcaaagtttgtatatttcttttcctttttataaacgataaacaaaaatcatcaaaatcatttcagcaaaagacttttctatcattggggcaagttaaaaaaaatacaatgaaatagaagacactttaaaagctgttgttgggtttcttgtttaattttaaatttagcaataccatctcaaacctggagcaatcctg

SEQ ID NO: 380885 - DNA, 1833 bp, Homo sapiens
gatacttgtgcggttccaagtgtggagaaagcggctctgggtctagattgagggatactccccctttccaccatgggcaagaagggcaaagttggcaagagccgacgagacaagttttatcacttggcgaaggagacgggttaccgttcccgatctgctttcaagctgatccagctcaatcgccgctttcagttcctgcagaaagcccgagccttgctggacctgtgtgctgcgccagggggatggctgcaggtagctgccaagtttatgcctgtatccagccttattgtgggagtggacctggttccaatcaagcctctccccaatgtggtgactctccaggaggacatcacaacagaacgttgtaggcaggccctgaggaaggagctgaagacctggaaggttgatgttgtgctcaatgatggggcccccaacgttggggctagctgggtccatgatgcttactcacaagcccatttgacactgatggctctacgtttggcttgtgactttttggcccgtggtggcagcttcatcacaaaggttttccgttctcgtgactatcagcctctgctatggatctttcagcagctgttccgccgtgtccaggccaccaagccccaagcctctcgccatgaatctgcagagatctttgtagtctgccaaggattcctggcccctgacaaggttgacagtaaattctttgaccccaaatttgcctttaaggaggttgaagttcaggctaagaccgttactgaattggttactaagaagaagccaaaggctgaaggctatgctgagggtgacctcactctctatcaccgtacctcagtcactgacttcctccgagctgccaaccctgttgacttcctctccaaggccagcgaaatcatggtagatgatgaagagttggcacagcatccagctaccactgaggacatacgggtgtgctgtcaggacatcagagtgttggggcgcaaggagctcaggtcgctactaaactggagaacaaaacttcggcgatatgtggccaagaagctgaaagaacaagcaaaggcactggacatcagcctcagctctggagaggaagatgaaggtgatgaggaggactcaacagctggaaccacaaagcagccctctaaggaggaggaggaagaggaggaggaggaacaactgaaccagaccttggcagaaatgaaggcccaggaggtggcggaattgaagaggaagaaaaagaagctgttgcgtgagcagagaaagcagcgggagcgtgtggagctgaagatggatctgcctggggtttccattgcagacgagggggagactggcatgttctccttgtgcaccatccggggtcaccagttattagaggaagtaacacaaggggatatgagtgcagcagacacatttctgtccgatctgccaagggatgatatctatgtgtcagatgttgaggacgacggtgatgacacatctctggatagtgacctggatccagaggagctggcaggagtcaggggacatcagggtctaagggaccaaaagcgtatgcgacttactgaagtgcaagatgataaagaggaggaggaggtggagtgcctagaactcccgtggtggtcctgagcagagaggaggatgtcctcctgcctgcctgaaggtctcccatgaaaacactgctgaactgtgttgacactcatgaccctttttttaaaccgttaaagggaagttcggtgttggagcgatactcaatgtagtcagtctacacctggacgtgtgggccacttaagccctccccacccccatcctattcctaaataaaaccaggataatgga

SEQ ID NO: 380886 - DNA, 293 bp, Homo sapiens
caggccattcactaccctggatctgagctttcccatctgtgaaaggataatggatttgccagtgttctttctagtgttgctgagcatagactgaggtgagggacacagaaaaaaaaacagtatatttccttttaaatagtttacctttgtttctgttacacttcagttattagaggaagtaacacaaggggatatgagtgcagcagacacatttctgtccgatctgccaagggatgatatctatgtgtcagatgttgaggacgacggtgatgacacatctctggatagtgacc

SEQ ID NO: 380887 - DNA, 2984 bp, Homo sapiens
gatacttgtgcggttccaagtgtggagaaagcggctctgggtctagattgagggatactccccctttccaccatgggcaagaagggcaaagttggcaagagccgacgagacaagttttatcacttggcgaaggagacgggttaccgttcccgatctgctttcaagctgatccagctcaatcgccgctttcagttcctgcagaaagcccgagccttgctggacctgtgtgctgcgccagggggatggctgcaggtagctgccaagtttatgcctgtatccagccttattgtgggagtggacctggttccaatcaagcctctccccaatgtggtgactctccaggaggacatcacaacagaacgttgtaggcaggccctgaggaaggagctgaagacctggaaggttgatgttgtgctcaatgatggggcccccaacgttggggctagctgggtccatgatgcttactcacaagcccatttgacactgatggctctacgtttggcttgtgactttttggcccgtggtggcagcttcatcacaaaggttttccgttctcgtgactatcagcctctgctatggatctttcagcagctgttccgccgtgtccaggccaccaagccccaagcctctcgccatgaatctgcagagatctttgtagtctgccaaggattcctggcccctgacaaggttgacagtaaattctttgaccccaaatttgcctttaaggaggttgaagttcaggctaagaccgttactgaattggttactaagaagaagccaaaggctgaaggctatgctgagggtgacctcactctctatcaccgtacctcagtcactgacttcctccgagctgccaaccctgttgacttcctctccaaggccagcgaaatcatggtagatgatgaagagttggcacagcatccagctaccactgaggacatacgggtgtgctgtcaggacatcagagtgttggggcgcaaggagctcaggtcgctactaaactggagaacaaaacttcggcgatatgtggccaagaagctgaaagaacaagcaaaggcactggacatcagcctcagctctggagaggaagatgaaggtgatgaggaggactcaacagctggaaccacaaagcagccctctaaggaggaggaggaagaggaggaggaggaacaactgaaccagaccttggcagaaatgaaggcccaggaggtggcggaattgaagaggaagaaaaagaagctgttgcgtgagcagagaaagcagcgggagcgtgtggagctgaagatggatctgcctggggtttccattgcagacgagggggagactggcatgttctccttgtgcaccatccggggtcaccagttattagaggaagtaacacaaggggatatgagtgcagcagacacatttctgtccgatctgccaagggatgatatctatgtgtcagatgttgaggacgacggtgatgacacatctctggatagtgacctggatccagaggagctggcaggagtcaggggacatcagggtctaagggaccaaaagcgtatgcgacttactgaagtgcaagatgataaagaggaggaggaggaggagaatccactgctggtaccactggaggaaaaggcagtactgcaggaagaacaagccaacctgtggttctcaaagggcagctttgctgggatcgaggacgatgccgatgaggccctggagatcagtcaggcccagctgttatttgagaaccggcggaagggacggcagcagcagcagaagcagcagctgccacagacacccccttcctgtttgaagactgagataatgtctcccctgtaccaagatgaagcccctaagggaacagaggcttcttcggggacagaagctgccactggccttgaaggggaagaaaaggatggcatctcagacagtgatagcagtactagcagtgaggaagaagagagctgggaacccctccgtggtaagaagcgaagccgtgggcctaagtcagatgatgacgggtttgagatagtgcctattgaggacccagcgaaacatcggatactggaccccgaaggccttgctctaggtgctgttattgcctcttccaaaaaggccaagagagacctcatagataactccttcaaccggtacacatttaatgaggatgagggggagcttccggagtggtttgtgcaagaggaaaagcagcaccggatacgacagttgcctgttggtaagaaggaggtggagcattaccggaaacgctggcgggaaatcaatgcacgtcccatcaagaaggtggctgaggctaaggctagaaagaaaaggaggatgctgaagaggctggagcagaccaggaagaaggcagaagccgtggtgaacacagtggacatctcagaacgagagaaagtggcacagctgcgaagtctctacaagaaggctgggcttggcaaggagaaacgccatgtcacctacgttgtagccaaaaaaggtgtgggccgcaaagtgcgccggccagctggagtcagaggtcatttcaaggtggtggactcaaggatgaagaaggaccaaagagcacagcaacgtaaggaacaaaagaaaaaacacaaacggaagtaagcagagctgccaggctcccaggagagcatggggactaggaggaagggtgtggcatggctcagtctggcccccttgattaccggcctagcccctgctcacatcacagctgtctgaagaacagtgaggtggagtgcctagaactcccgtggtggtcctgagcagagaggaggatgtcctcctgcctgcctgaaggtctcccatgaaaacactgctgaactgtgttgacactcatgaccctttttttaaaccgttaaagggaagttcggtgttggagcgatactcaatgtagtcagtctacacctggacgtgtgggccacttaagccctccccacccccatcctattcctaaataaaaccaggataatgga

SEQ ID NO: 380888 - DNA, 3375 bp, Homo sapiens
gatacttgtgcggttccaagtgtggagaaagcggctctgggtctagattgagggatactccccctttccaccatgggcaagaagggcaaagttggcaagagccgacgagacaagttttatcacttggcgaaggagacgggttaccgttcccgatctgctttcaagctgatccagctcaatcgccgctttcagttcctgcagaaagcccgagccttgctggacctgtgtgctgcgccagggggatggctgcaggtagctgccaagtttatgcctgtatccagccttattgtgggagtggacctggttccaatcaagcctctccccaatgtggtgactctccaggaggacatcacaacagaacgttgtaggcaggccctgaggaaggagctgaagacctggaaggttgatgttgtgctcaatgatggggcccccaacgttggggctagctgggtccatgatgcttactcacaagcccatttgacactgatggctctacgtttggcttgtgactttttggcccgtggtggcagcttcatcacaaaggttttccgttctcgtgactatcagcctctgctatggatctttcagcagctgttccgccgtgtccaggccaccaagccccaagcctctcgccatgaatctgcagagatctttgtagtctgccaaggattcctggcccctgacaaggttgacagtaaattctttgaccccaaatttgcctttaaggaggttgaagttcaggctaagaccgttactgaattggttactaagaagaagccaaaggctgaaggctatgctgagggtgacctcactctctatcaccgtacctcagtcactgacttcctccgagctgccaaccctgttgacttcctctccaaggccagcgaaatcatggtagatgatgaagagttggcacagcatccagctaccactgaggacatacgggtgtgctgtcaggacatcagagtgttggggcgcaaggagctcaggtcgctactaaactggagaacaaaacttcggcgatatgtggccaagaagctgaaagaacaagcaaaggcactggacatcagcctcagctctggagaggaagatgaaggtgatgaggaggactcaacagctggaaccacaaagcagccctctaaggaggaggaggaagaggaggaggaggaacaactgaaccagaccttggcagaaatgaaggcccaggaggtggcggaattgaagaggaagaaaaagaagctgttgcgtgagcagagaaagcagcgggagcgtgtggagctgaagatggatctgcctggggtttccattgcagacgagggggagactggcatgttctccttgtgcaccatccggggtcaccagttattagaggaagtaacacaaggggatatgagtgcagcagacacatttctgtccgatctgccaagggatgatatctatgtgtcagatgttgaggacgacggtgatgacacatctctggatagtgacctggatccagaggagctggcaggagtcaggggacatcagggtctaagggaccaaaagcgtatgcgacttactgaagtgcaagatgataaagaggaggaggaggaggagaatccactgctggtaccactggaggaaaaggcagtactgcaggaagaacaagccaacctgtggttctcaaagggcagctttgctgggatcgaggacgatgccgatgaggccctggagatcagtcaggcccagctgttatttgagaaccggcggaagggacggcagcagcagcagaagcagcagctgccacagacacccccttcctgtttgaagactgagataatgtctcccctgtaccaagatgaagcccctaagggaacagaggcttcttcggggacagaagctgccactggccttgaaggggaagaaaaggatggcatctcagacagtgatagcagtactagcagtgaggaagaagagagctgggaacccctccgtggtaagaagcgaagccgtgggcctaagtcagatgatgacgggtttgagatagtgcctattgaggacccagcgaaacatcggatactggaccccgaaggccttgctctaggtgctgttattgcctcttccaaaaaggccaagagagacctcatagataactccttcaaccggtacacatttaatgaggatgagggggagcttccggagtggtttgtgcaagaggaaaagcagcaccggatacgacagttgcctgttggtaagaaggaggtggagcattaccggaaacgctggcgggaaatcaatgcacgtcccatcaagaaggtggctgaggctaaggctagaaagaaaaggaggatgctgaagaggctggagcagaccaggaagaaggcagaagccgtggtgaacacagtggacatctcagaacgagagaaagtggcacagctgcgaagtctctacaagaaggctgggcttggcaaggagaaacgccatgtcacctacgttgtagccaaaaaaggtgtgggccgcaaagtgcgccggccagctggagtcagaggtcatttcaaggtggtggactcaaggatgaagaaggaccaaagagcacagcaacgtaaggaacaaaagaaaaaacacaaacggaagtaagcagagctgccaggctcccaggagagcatggggactaggaggaagggtgtggcatggctcagtctggcccccttgattaccggcctagcccctgctcacatcacagctgtctgaagaacagtgaggtggagtgcctagaactcccgtggtggtcctgagcagagaggaggatgtcctcctgcctgcctgaaggtctcccatgaaaacactgctgaactgtgttgacactcatgaccctttttttaaaccgttaaagggaagttcggtgttggagcgatactcaatgtagtcagtctacacctggacgtgtgggccacttaagccctccccacccccatcctattcctaaataaaaccaggataatggaagagttgtcttttctgacagttttaataagcacttccctatctgtccctacactgtgtgcggcactattcttaatgtgtaccaattcatagacagaaatgacaaacgatccacaggtcccggtagtaaaacatttactagagagcaagcagaaaggaatgcacatcttaaagaaaccttcacaaagtcacaaaagtcaaagtttgtatatttcttttcctttttataaacgataaacaaaaatcatcaaaatcatttcagcaaaagacttttctatcattggggcaagttaaaaaaaatacaatgaaatagaagacactttaaaagctgttgttgggtttcttgtttaattttaaatttagcaataccatctcaaacctggagcaatcctg

SEQ ID NO: 380889 - DNA, 3321 bp, Homo sapiens
gatacttgtgcggttccaagtgtggagaaagcggctctgggtctagattgagggatactccccctttccaccatgggcaagaagggcaaagttggcaagagccgacgagacaagttttatcacttggcgaaggagacgggttaccgttcccgatctgctttcaagctgatccagctcaatcgccgctttcagttcctgcagaaagcccgagccttgctggacctgtgtgctgcgccagggggatggctgcaggtagctgccaagtttatgcctgtatccagccttattgtgggagtggacctggttccaatcaagcctctccccaatgtggtgactctccaggaggacatcacaacagaacgttgtaggcaggccctgaggaaggagctgaagacctggaaggttgatgttgtgctcaatgatggggcccccaacgttggggctagctgggtccatgatgcttactcacaagcccatttgacactgatggctctacgtttggcttgtgactttttggcccgtggtggcagcttcatcacaaaggttttccgttctcgtgactatcagcctctgctatggatctttcagcagctgttccgccgtgtccaggccaccaagccccaagcctctcgccatgaatctgcagagatctttgtagtctgccaaggattcctggcccctgacaaggttgacagtaaattctttgaccccaaatttgcctttaaggaggttgaagttcaggctaagaccgttactgaattggttactaagaagaagccaaaggctgaaggctatgctgagggtgacctcactctctatcaccgtacctcagtcactgacttcctccgagctgccaaccctgttgacttcctctccaaggccagcgaaatcatggtagatgatgaagagttggcacagcatccagctaccactgaggacatacgggtgtgctgtcaggacatcagagtgttggggcgcaaggagctcaggtcgctactaaactggagaacaaaacttcggcgatatgtggccaagaagctgaaagaacaagcaaaggcactggacatcagcctcagctctggagaggaagatgaaggtgatgaggaggactcaacagctggaaccacaaagcagccctctaaggaggaggaggaagaggaggaggaggaacaactgaaccagaccttggcagaaatgaaggcccaggaggtggcggaattgaagaggaagaaaaagaagctgttgcgtgagcagagaaagcagcgggagcgtgtggagctgaagatggatctgcctggggtttccattgcagacgagggggagactggcatgttctccttgtgcaccatccggggtcaccagttattagaggaagtaacacaaggggatatgagtgcagcagacacatttctgtccgatctgccaagggatgatatctatgtgtcagatgttgaggacgacggtgatgacacatctctggatagtgacctggatccagaggagctggcaggagtcaggggacatcagggtctaagggaccaaaagcgtatgcgacttactgaagtgcaagatgataaagaggaggaggaggaggagaatccactgctggtaccactggaggaaaaggcagtactgcaggaagaacaagccaacctgtggttctcaaagggcagctttgctgggatcgaggacgatgccgatgaggccctggagatcagtcaggcccagctgttatttgagaaccggcggaagggacggcagcagcagcagaagcagcagctgccacagacacccccttcctgtttgaagactgagataatgtctcccctgtaccaagatgaagcccctaagggaacagaggcttcttcggggacagaagctgccactggccttgaaggggaagactgggaacccctccgtggtaagaagcgaagccgtgggcctaagtcagatgatgacgggtttgagatagtgcctattgaggacccagcgaaacatcggatactggaccccgaaggccttgctctaggtgctgttattgcctcttccaaaaaggccaagagagacctcatagataactccttcaaccggtacacatttaatgaggatgagggggagcttccggagtggtttgtgcaagaggaaaagcagcaccggatacgacagttgcctgttggtaagaaggaggtggagcattaccggaaacgctggcgggaaatcaatgcacgtcccatcaagaaggtggctgaggctaaggctagaaagaaaaggaggatgctgaagaggctggagcagaccaggaagaaggcagaagccgtggtgaacacagtggacatctcagaacgagagaaagtggcacagctgcgaagtctctacaagaaggctgggcttggcaaggagaaacgccatgtcacctacgttgtagccaaaaaaggtgtgggccgcaaagtgcgccggccagctggagtcagaggtcatttcaaggtggtggactcaaggatgaagaaggaccaaagagcacagcaacgtaaggaacaaaagaaaaaacacaaacggaagtaagcagagctgccaggctcccaggagagcatggggactaggaggaagggtgtggcatggctcagtctggcccccttgattaccggcctagcccctgctcacatcacagctgtctgaagaacagtgaggtggagtgcctagaactcccgtggtggtcctgagcagagaggaggatgtcctcctgcctgcctgaaggtctcccatgaaaacactgctgaactgtgttgacactcatgaccctttttttaaaccgttaaagggaagttcggtgttggagcgatactcaatgtagtcagtctacacctggacgtgtgggccacttaagccctccccacccccatcctattcctaaataaaaccaggataatggaagagttgtcttttctgacagttttaataagcacttccctatctgtccctacactgtgtgcggcactattcttaatgtgtaccaattcatagacagaaatgacaaacgatccacaggtcccggtagtaaaacatttactagagagcaagcagaaaggaatgcacatcttaaagaaaccttcacaaagtcacaaaagtcaaagtttgtatatttcttttcctttttataaacgataaacaaaaatcatcaaaatcatttcagcaaaagacttttctatcattggggcaagttaaaaaaaatacaatgaaatagaagacactttaaaagctgttgttgggtttcttgtttaattttaaatttagcaataccatctcaaacctggagcaatcctg

SEQ ID NO: 380890 - DNA, 3454 bp, Homo sapiens
gatacttgtgcggttccaagtgtggagaaagcggctctgggtctagattgagggatactccccctttccaccatgggcaagaagggcaaagttggcaagagccgacgagacaagttttatcacttggcgaaggagacgggttaccgttcccgatctgctttcaagctgatccagctcaatcgccgctttcagttcctgcagaaagcccgagccttgctggacctgtgtgctgcgccagggggatggctgcaggtagctgccaagtttatgcctgtatccagccttattgtgggagtggacctggttccaatcaagcctctccccaatgtggtgactctccaggaggacatcacaacagaacgttgtaggcaggccctgaggaaggagctgaagacctggaaggttgatgttgtgctcaatgatggggcccccaacgttggggctagctgggtccatgatgcttactcacaagcccatttgacactgatggctctacgtttggcttgtgactttttggcccgtggtggcagcttcatcacaaaggttttccgttctcgtgactatcagcctctgctatggatctttcagcagctgttccgccgtgtccaggccaccaagccccaagcctctcgccatgaatctgcagagatctttgtagtctgccaaggattcctggcccctgacaaggttgacagtaaattctttgaccccaaatttgcctttaaggaggttgaagttcaggctaagaccgttactgaattggttactaagaagaagccaaaggctgaaggctatgctgagggtgacctcactctctatcaccgtacctcagtcactgacttcctccgagctgccaaccctgttgacttcctctccaaggccagcgaaatcatggtagatgatgaagagttggcacagcatccagctaccactgaggacatacgggtgtgctgtcaggacatcagagtgttggggcgcaaggagctcaggtcgctactaaactggagaacaaaacttcggcgatatgtggccaagaagctgaaagaacaagcaaaggcactggacatcagcctcagctctggagaggaagatgaaggtgatgaggaggactcaacagctggaaccacaaagcagccctctaaggaggaggaggaagaggaggaggaggaacaactgaaccagaccttggcagaaatgaaggcccaggaggtggcggaattgaagaggaagaaaaagaagctgttgcgtgagcagagaaagcagcgggagcgtgtggagctgaagatggatctgcctggggtttccattgcagacgagggggagactggcatgttctccttgtgcaccatccggggtcaccagttattagaggaagtaacacaaggggatatgagtgcagcagacacatttctgtccgatctgccaagggatgatatctatgtgtcagatgttgaggacgacggtgatgacacatctctggatagtgacctggatccagaggagctggcaggagtcaggggacatcagggtctaagggaccaaaagcgtatgcgacttactgaagtgcaagatgataaagaggaggaggaggaggagaatccactgctggtaccactggaggaaaaggcagtactgcaggaagaacaagccaacctgtggttctcaaaggtaaggagaggccgggggcaagactgcggggagatgagtcttccttgggagaagggcagctgatgttctcctatcacagggcagctttgctgggatcgaggacgatgccgatgaggccctggagatcagtcaggcccagctgttatttgagaaccggcggaagggacggcagcagcagcagaagcagcagctgccacagacacccccttcctgtttgaagactgagataatgtctcccctgtaccaagatgaagcccctaagggaacagaggcttcttcggggacagaagctgccactggccttgaaggggaagaaaaggatggcatctcagacagtgatagcagtactagcagtgaggaagaagagagctgggaacccctccgtggtaagaagcgaagccgtgggcctaagtcagatgatgacgggtttgagatagtgcctattgaggacccagcgaaacatcggatactggaccccgaaggccttgctctaggtgctgttattgcctcttccaaaaaggccaagagagacctcatagataactccttcaaccggtacacatttaatgaggatgagggggagcttccggagtggtttgtgcaagaggaaaagcagcaccggatacgacagttgcctgttggtaagaaggaggtggagcattaccggaaacgctggcgggaaatcaatgcacgtcccatcaagaaggtggctgaggctaaggctagaaagaaaaggaggatgctgaagaggctggagcagaccaggaagaaggcagaagccgtggtgaacacagtggacatctcagaacgagagaaagtggcacagctgcgaagtctctacaagaaggctgggcttggcaaggagaaacgccatgtcacctacgttgtagccaaaaaaggtgtgggccgcaaagtgcgccggccagctggagtcagaggtcatttcaaggtggtggactcaaggatgaagaaggaccaaagagcacagcaacgtaaggaacaaaagaaaaaacacaaacggaagtaagcagagctgccaggctcccaggagagcatggggactaggaggaagggtgtggcatggctcagtctggcccccttgattaccggcctagcccctgctcacatcacagctgtctgaagaacagtgaggtggagtgcctagaactcccgtggtggtcctgagcagagaggaggatgtcctcctgcctgcctgaaggtctcccatgaaaacactgctgaactgtgttgacactcatgaccctttttttaaaccgttaaagggaagttcggtgttggagcgatactcaatgtagtcagtctacacctggacgtgtgggccacttaagccctccccacccccatcctattcctaaataaaaccaggataatggaagagttgtcttttctgacagttttaataagcacttccctatctgtccctacactgtgtgcggcactattcttaatgtgtaccaattcatagacagaaatgacaaacgatccacaggtcccggtagtaaaacatttactagagagcaagcagaaaggaatgcacatcttaaagaaaccttcacaaagtcacaaaagtcaaagtttgtatatttcttttcctttttataaacgataaacaaaaatcatcaaaatcatttcagcaaaagacttttctatcattggggcaagttaaaaaaaatacaatgaaatagaagacactttaaaagctgttgttgggtttcttgtttaattttaaatttagcaataccatctcaaacctggagcaatcctg

SEQ ID NO: 380891 - DNA, 2570 bp, Homo sapiens
cagggaaaggccatgatgttggacctctgggaagaggatattgctgtgctaaaggtttgggatgggggcctgagccttttgatttatgtagccgaagcccgaaaggtgggtagtgagcctaaaacagaagggggcggggacaaagagggagatggcaagatcagtaatagtatctctggggcaggtcgctactaaactggagaacaaaacttcggcgatatgtggccaagaagctgaaagaacaagcaaaggcactggacatcagcctcagctctggagaggaagatgaaggtgatgaggaggactcaacagctggaaccacaaagcagccctctaaggaggaggaggaagaggaggaggaggaacaactgaaccagaccttggcagaaatgaaggcccaggaggtggcggaattgaagaggaagaaaaagaagctgttgcgtgagcagagaaagcagcgggagcgtgtggagctgaagatggatctgcctggggtttccattgcagacgagggggagactggcatgttctccttgtgcaccatccggggtcaccagttattagaggaagtaacacaaggggatatgagtgcagcagacacatttctgtccgatctgccaagggatgatatctatgtgtcagatgttgaggacgacggtgatgacacatctctggatagtgacctggatccagaggagctggcaggagtcaggggacatcagggtctaagggaccaaaagcgtatgcgacttactgaagtgcaagatgataaagaggaggaggaggaggagaatccactgctggtaccactggaggaaaaggcagtactgcaggaagaacaagccaacctgtggttctcaaagggcagctttgctgggatcgaggacgatgccgatgaggccctggagatcagtcaggcccagctgttatttgagaaccggcggaagggacggcagcagcagcagaagcagcagctgccacagacacccccttcctgtttgaagactgagataatgtctcccctgtaccaagatgaagcccctaagggaacagaggcttcttcggggacagaagctgccactggccttgaaggggaagaaaaggatggcatctcagacagtgatagcagtactagcagtgaggaagaagagagctgggaacccctccgtggtaagaagcgaagccgtgggcctaagtcagatgatgacgggtttgagatagtgcctattgaggacccagcgaaacatcggatactggaccccgaaggccttgctctaggtgctgttattgcctcttccaaaaaggccaagagagacctcatagataactccttcaaccggtacacatttaatgaggatgagggggagcttccggagtggtttgtgcaagaggaaaagcagcaccggatacgacagttgcctgttggtaagaaggaggtggagcattaccggaaacgctggcgggaaatcaatgcacgtcccatcaagaaggtggctgaggctaaggctagaaagaaaaggaggatgctgaagaggctggagcagaccaggaagaaggcagaagccgtggtgaacacagtggacatctcagaacgagagaaagtggcacagctgcgaagtctctacaagaaggctgggcttggcaaggagaaacgccatgtcacctacgttgtagccaaaaaaggtgtgggccgcaaagtgcgccggccagctggagtcagaggtcatttcaaggtggtggactcaaggatgaagaaggaccaaagagcacagcaacgtaaggaacaaaagaaaaaacacaaacggaagtaagcagagctgccaggctcccaggagagcatggggactaggaggaagggtgtggcatggctcagtctggcccccttgattaccggcctagcccctgctcacatcacagctgtctgaagaacagtgaggtggagtgcctagaactcccgtggtggtcctgagcagagaggaggatgtcctcctgcctgcctgaaggtctcccatgaaaacactgctgaactgtgttgacactcatgaccctttttttaaaccgttaaagggaagttcggtgttggagcgatactcaatgtagtcagtctacacctggacgtgtgggccacttaagccctccccacccccatcctattcctaaataaaaccaggataatggaagagttgtcttttctgacagttttaataagcacttccctatctgtccctacactgtgtgcggcactattcttaatgtgtaccaattcatagacagaaatgacaaacgatccacaggtcccggtagtaaaacatttactagagagcaagcagaaaggaatgcacatcttaaagaaaccttcacaaagtcacaaaagtcaaagtttgtatatttcttttcctttttataaacgataaacaaaaatcatcaaaatcatttcagcaaaagacttttctatcattggggcaagttaaaaaaaatacaatgaaatagaagacactttaaaagctgttgttgggtttcttgtttaattttaaatttagcaataccatctcaaacctggagcaatcctg

SEQ ID NO: 380892 - DNA, 1121 bp, Homo sapiens
tgtcttattgttcataccacagattccagaacggaaacagcttgccatcccaaagacggagtctccagagggctatgctgaagaggctggagcagaccaggaagaaggcagaagccgtggtgaacacagtggacatctcagaacgagagaaagtggcacagctgcgaagtctctacaagaaggctgggcttggcaaggagaaacgccatgtcacctacgttgtagccaaaaaaggtgtgggccgcaaagtgcgccggccagctggagtcagaggtcatttcaaggtggtggactcaaggatgaagaaggaccaaagagcacagcaacgtaaggaacaaaagaaaaaacacaaacggaagtaagcagagctgccaggctcccaggagagcatggggactaggaggaagggtgtggcatggctcagtctggcccccttgattaccggcctagcccctgctcacatcacagctgtctgaagaacagtgaggtggagtgcctagaactcccgtggtggtcctgagcagagaggaggatgtcctcctgcctgcctgaaggtctcccatgaaaacactgctgaactgtgttgacactcatgaccctttttttaaaccgttaaagggaagttcggtgttggagcgatactcaatgtagtcagtctacacctggacgtgtgggccacttaagccctccccacccccatcctattcctaaataaaaccaggataatggaagagttgtcttttctgacagttttaataagcacttccctatctgtccctacactgtgtgcggcactattcttaatgtgtaccaattcatagacagaaatgacaaacgatccacaggtcccggtagtaaaacatttactagagagcaagcagaaaggaatgcacatcttaaagaaaccttcacaaagtcacaaaagtcaaagtttgtatatttcttttcctttttataaacgataaacaaaaatcatcaaaatcatttcagcaaaagacttttctatcattggggcaagttaaaaaaaatacaatgaaatagaagacactttaaaagctgttgttgggtttcttgtttaattttaaatttagcaataccatctcaaacctggagcaatcctg

SEQ ID NO: 380893 - DNA, 311 bp, Homo sapiens
attctctgactcggctattgagtcccatcaattacaacacatggaaaaaactttggacagttaaaaataacataggggcctggtgtttggaagatctggagtttggaatgccagcttgtcaagcacagatccctgcctaccaaaaagcatgtgctgggaactcacatacacaccaaccagcacaagaaggtcacagatgagcaaggtgcctgttacctaccaccctgacaacagtgtgtcaggccaacttggaggacaaactctcagtcctcagccactttggtctaaaggacttccaagccctcttctag

SEQ ID NO: 380894 - DNA, 397 bp, Homo sapiens
atatactagggaagtaaagagatacatactgtacaacatggaaaaaccagggctatgtcttatgactacacagattactgtgggaacaagagttatccagatttggagtaggggaagtaaggaaggtcaggaaaggctttctgcagaaggtagcaactgtaccacgtaaaatcagtttgaggccaggcgaggtggctcaggcctgtaatcccagcactttgggaggccaaggtgggcggatcacaaggtcaggagattgagaccatcctggctaacacggtgaaaccccatctctactaaaaatacaaaaagccgggcatggtggcgggcacctgtagtcccagctactcgggaggctgaggcaggagaatggcgtgaacccgggaagcggaacttg

SEQ ID NO: 380895 - DNA, 253 bp, Homo sapiens
tggtccagaaatgctgtgtgttcatgggcacatggtggccccaacctcagctgctacagttccacacaggtttcactaggaaaaaagagttcattgcttaaaaaggaagaagaaataaacaagtctgtcaaacactggcatgtatgagcactaagatcatttccagctaaaaataattgaccttctaatgttgggatgataaaggaaacttagatgattaaatatgagataactcttactgaatgctacatgc

SEQ ID NO: 380896 - DNA, 600 bp, Homo sapiens
accaacgcaagaacatatgccagttcctcgtagagattggactggctaaggacgatcagctgaaggttcatgggttttaagtgcttgtggctcactgaagcttaagtgaggatttccttgcaatgagtagaatttcccttctctcccttgtcacaggtttaaaaacctcacagcttgtgtaatgattattgacaacagggatttcccagatgacccaggcatgcagtgggacacagagcacgtggccagagtcctccttcagcacatagaagtgaatggcatcaatctggtaagggggcagctccctgaatggaaaacctgaggtcttggtcccattcacaccaggtggtttctgtaattttttctgtggccaccctcccacttccagtccttctccagggccactctctaaggaggccagaacttccaatgctcaccattaaacctactgaagaacaaacacaccttttgatatctttacgatcttgtgtgagactgaataactaaattatcagtgctcagatagaggcagaagttttttctaaactgtgtcctccttaacaccctcaagcccccgcctttgtcctcactacatgccat

SEQ ID NO: 380897 - DNA, 386 bp, Homo sapiens
agtgactgctttaatgttaaaaatatttattttttttcctaaaagatcacacaaaagttgggaagagaaggatgtcaattagactacatcaaaatctgggcagagggaggacaaagagctgcctaaagaaactggtagctggagcaaactgcagagatcaagatgaccctagtcaacggaaccagcagcccaggtcagccacattcaggagcaccaccgaggcacggcagggagagcaaagttgctggccccaatcattcctccttttcagggcaggagaggcagaagctcactctttagacatgttcttgatggtcttgtgctctttcatggccttctcccaatcgctgccattgaattcctcagtgaccatactccgcacaggg

SEQ ID NO: 380898 - DNA, 454 bp, Homo sapiens
taaagccccgcccaaccccacattacccataatgtgctaaaagtcttttttaaaaaatctgtattctttaacctggagattttctttctctctttttttttaactgctccttgtagagcagggtgtaggaagtgtgcccagaatagccagagaacttatttctaagagaattgatcctaaagaagaaatttctaaattgtcaaaaatgtataccaaggaggttcaccagtgttgttgataatcagaaaaaaacgggactcaactgcaatgatgcagagacagtgatggggtaagtagaccaggaaatcggctgtggggaagagggagactggggcatggggacagtagggaaagatttttcactgtgtatatacacattttcttctacctttcaaattttgtaccaagtacaaaaaattccccaaaataataaaattaaagttacaaataagta

SEQ ID NO: 380899 - DNA, 363 bp, Homo sapiens
ggcttattgatatcgacaccaagaagccctccacccggtctttgacatgcaagacacattcgttaacccagcgcagggctgtccagggtagaagaaatttctaaattgtcaaaaatgtataccaaggaggttcaccagtgttgttgataatcagaaaaaaacgggactcaactgcaatgatgcagagacagtgatggggtaagtagaccaggaaatcggctgtggggaagagggagactggggcatggggacagtagggaaagatttttcactgtgtatatacacattttcttctacctttcaaattttgtaccaagtacaaaaaattccccaaaataataaaattaaagttacaaataagta

SEQ ID NO: 380900 - DNA, 2121 bp, Homo sapiens
agtgctgcttacccatcatggaagcaatgtggctcctgtgtgtggcgttggcggtcttggcatggggcttcctctgggtttgggactcctcagaacgaatgaagagtcgggagcagggaggacggctgggagccgaaagccggaccctgctggtcatagcgcaccctgacgatgaagccatgttttttgctcccacagtgctaggcttggcccgcctaaggcactgggtgtacctgctttgcttctctgcaggaaattactacaatcaaggagagactcgtaagaaagaacttttgcagagctgtgatgttttggggattccactctccagtgtaatgattattgacaacagggatttcccagatgacccaggcatgcagtgggacacagagcacgtggccagagtcctccttcagcacatagaagtgaatggcatcaatctggtggtgactttcgatgcagggggagtaagtggccacagcaatcacattgctctgtatgcagctgtgagggccctgcactcagaagggaagttacctaaagggtgctctgtgctcacgcttcagtctgtgaatgtgctgcgcaagtacatctcccttctggatctgcccttgtctctgcttcatacgcaggatgtcctcttcgtgctcaacagcaaagaagtggcacaggccaagaaagccatgtcctgccaccgcagccagctcctctggttccgccgcctctacattatcttctcccggtacatgagaatcaactcactgagcttcctctgaagccttgaagggttttcaggtccaaggaacaaaggggaaaatagacaaaggagtgcagaggacctggcctggcactggcttatttacctgagctcaaggagatccccgctggagcagcctctgcaaaagggagcccatgtaggccaggggctgtccaaactccagcttcttcccctgggaaaaaacccaaagaaccaaaaacaaaccaccccaaggataataatagctacactgctagcttctcaagttcttgtgaaaaacaatttacataatgacacagtagatgtggaacacctagcccagtgcctgggcaggtccctattatcataaatgaacataaaagtgctctaaaaacactccacagatgtgacttttacattgtttccaaagcaggttcaccaaaaacacatacacaaaatgcaacagtgtgtgttgaattggttcaatcataattcctttgatttttcttgtatcagaatgtgggtctaggaaaaacttgctctatttaacaggacagctctgattgaagcatccaagtacaggtcactggggtgggcactgttttatacagagacgattacaagaactctgcctcaaagagcttacaatcaaatatgtcagctctcagtctttttggagaagtaggaagtaggaagataaatctgagacttaaaaaaacacaaaacattcaagaacctgatgtcttaaaattgtcctacgaacaaaagctctctgaaagctctggcttggaaactactctcagaatccagctaacgctccagggaagtggcctgagtcagggaagctaagtggtgaagagcacaggctggtagtcctgcgattgaagccagaatgaccagctgtgtaaccaaaggcaaggtgctgaacctttctctgcctcaattctctcatctgcaaaatgggaaataataatgatcccaacctcagagaactgaacaagataatacatgaaggtgcatatcaaagagtctcacatgctctgctggagcagggtgtaggaagtgtgcccagaatagccagagaacttatttctaagagaattgatcctaaagaagaaatttctaaattgtcaaaaatgtataccaaggaggttcaccagtgttgttgataatcagaaaaaaacgggactcaactgcaatgatgcagagacagtgatggggtaagtagaccaggaaatcggctgtggggaagagggagactggggcatggggacagtagggaaagatttttcactgtgtatatacacattttcttctacctttcaaattttgtaccaagtacaaaaaattccccaaaataataaaattaaagttacaaataagta

SEQ ID NO: 380901 - DNA, 2269 bp, Homo sapiens
agtgctgcttacccatcatggaagcaatgtggctcctgtgtgtggcgttggcggtcttggcatggggcttcctctgggtttgggactcctcagaacgaatgaagagtcgggagcagggaggacggctgggagccgaaagccggaccctgctggtcatagcgcaccctgacgatgaagccatgttttttgctcccacagtgctaggcttggcccgcctaaggcactgggtgtacctgctttgcttctctgcaggaaattactacaatcaaggagagactcgtaagaaagaacttttgcagagctgtgatgttttggggattccactctccagtgtaatgattattgacaacagggatttcccagatgacccaggcatgcagtgggacacagagcacgtggccagagtcctccttcagcacatagaagtgaatggcatcaatctggtggtgactttcgatgcagggggagtaagtggccacagcaatcacattgctctgtatgcagctgtgagggccctgcactcagaagggaagttacctaaagggtgctctgtgctcacgcttcagtctgtgaatgtgctgcgcaagtacatctcccttctggatctgcccttgtctctgcttcatacgcaggatgtcctcttcgtgctcaacagcaaagaagtggcacaggccaagaaagccatgtcctgccaccgcagccagctcctctggttccgccgcctctacattatcttctcccggtacatgagaatcaactcactgagcttcctctgaagccttgaagggttttcaggtccaaggaacaaaggggaaaatagacaaaggagtgcagaggacctggcctggcactggcttatttacctgagctcaaggagatccccgctggagcagcctctgcaaaagggagcccatgtaggccaggggctgtccaaactccagcttcttcccctgggaaaaaacccaaagaaccaaaaacaaaccaccccaaggataataatagctacactgctagcttctcaagttcttgtgaaaaacaatttacataatgacacagtagatgtggaacacctagcccagtgcctgggcaggtccctattatcataaatgaacataaaagtgctctaaaaacactccacagatgtgacttttacattgtttccaaagcaggttcaccaaaaacacatacacaaaatgcaacagtgtgtgttgaattggttcaatcataattcctttgatttttcttgtatcagaatgtgggtctaggaaaaacttgctctatttaacaggacagctctgattgaagcatccaagtacaggtcactggggtgggcactgttttatacagagacgattacaagaactctgcctcaaagagcttacaatcaaatatgtcagctctcagtctttttggagaagtaggaagtaggaagataaatctgagacttaaaaaaacacaaaacattcaagaacctgatgtcttaaaattgtcctacgaacaaaagctctctgaaagctctggcttggaaactactctcagaatccagctaacgctccagggaagtggcctgagtcagggaagctaagtggtgaagagcacaggctggtagtcctgcgattgaagccagaatgaccagctgtgtaaccaaaggcaaggtgctgaacctttctctgcctcaattctctcatctgcaaaatgggaaataataatgatcccaacctcagagaactgaacaagataatacatgaaggtgcatatcaaagagtctcacatgctctgctggatcacacaaaagttgggaagagaaggatgtcaattagactacatcaaaatctgggcagagggaggacaaagagctgcctaaagaaactggtagctggagcaaactgcagagatcaagatgaccctagtcaacggaaccagcagcccagagcagggtgtaggaagtgtgcccagaatagccagagaacttatttctaagagaattgatcctaaagaagaaatttctaaattgtcaaaaatgtataccaaggaggttcaccagtgttgttgataatcagaaaaaaacgggactcaactgcaatgatgcagagacagtgatggggtaagtagaccaggaaatcggctgtggggaagagggagactggggcatggggacagtagggaaagatttttcactgtgtatatacacattttcttctacctttcaaattttgtaccaagtacaaaaaattccccaaaataataaaattaaagttacaaataagta

SEQ ID NO: 380902 - DNA, 1885 bp, Homo sapiens
agtgctgcttacccatcatggaagcaatgtggctcctgtgtgtggcgttggcggtcttggcatggggcttcctctgggtttgggactcctcagaacgaatgaagagtcgggagcagggaggacggctgggagccgaaagccggaccctgctggtcatagcgcaccctgacgatgaagccatgttttttgctcccacagtgctaggcttggcccgcctaaggcactgggtgtacctgctttgcttctctgcaggaaattactacaatcaaggagagactcgtaagaaagaacttttgcagagctgtgatgttttggggattccactctccagtgtaatgattattgacaacagggatttcccagatgacccaggcatgcagtgggacacagagcacgtggccagagtcctccttcagcacatagaagtgaatggcatcaatctggtggtgactttcgatgcagggggagtaagtggccacagcaatcacattgctctgtatgcagctgtgagggccctgcactcagaagggaagttacctaaagggtgctctgtgctcacgcttcagtctgtgaatgtgctgcgcaagtacatctcccttctggatctgcccttgtctctgcttcatacgcaggatgtcctcttcgtgctcaacagcaaagaagtggcacaggccaagaaagccatgtcctgccaccgcagccagctcctctggttccgccgcctctacattatcttctcccggtacatgagaatcaactcactgagcttcctctgaagccttgaagggttttcaggtccaaggaacaaaggggaaaatagacaaaggagtgcagaggacctggcctggcactggcttatttacctgagctcaaggagatccccgctggagcagcctctgcaaaagggagcccatgtaggccaggggctgtccaaactccagcttcttcccctgggaaaaaacccaaagaaccaaaaacaaaccaccccaaggataataatagctacactgctagcttctcaagttcttgtgaaaaacaatttacataatgacacagtagatgtggaacacctagcccagtgcctgggcaggtccctattatcataaatgaacataaaagtgctctaaaaacactccacagatgtgacttttacattgtttccaaagcaggttcaccaaaaacacatacacaaaatgcaacagtgtgtgttgaattggttcaatcataattcctttgatttttcttgtatcagaatgtgggtctaggaaaaacttgctctatttaacaggacagctctgattgaagcatccaagtacaggtcactggggtgggcactgttttatacagagacgattacaagaactctgcctcaaagagcttacaatcaaatatgtcagctctcagtctttttggagaagtaggaagtaggaagataaatctgagacttaaaaaaacacaaaacattcaagaacctgatgtcttaaaattgtcctacgaacaaaagctctctgaaagctctggcttggaaactactctcagaatccagctaacgctccagggaagtggcctgagtcagggaagctaagtggtgaagagcacaggctggtagtcctgcgattgaagccagaatgaccagctgtgtaaccaaaggcaaggtgctgaacctttctctgcctcaattctctcatctgcaaaatgggaaataataatgatcccaacctcagagaactgaacaagataatacatgaaggtgcatatcaaagagtctcacatgctctgctggagctggcaaggtcaccaagtctgcccagaaagctcagaaggctaaatgaatattatccctaatacctgcccccccactcttaatcagtggtggaagaacggt

SEQ ID NO: 380903 - DNA, 2816 bp, Homo sapiens
agtgctgcttacccatcatggaagcaatgtggctcctgtgtgtggcgttggcggtcttggcatggggcttcctctgggtttgggactcctcagaacgaatgaagagtcgggagcagggaggacggctgggagccgaaagccggaccctgctggtcatagcgcaccctgacgatgaagccatgttttttgctcccacagtgctaggcttggcccgcctaaggcactgggtgtacctgctttgcttctctgcaggaaattactacaatcaaggagagactcgtaagaaagaacttttgcagagctgtgatgttttggggattccactctccagtgtaatgattattgacaacaggttggagtgcaacggtgcgatctcggctcactgcaacctccgcttcccaggttcaagcgattctcctgcctcagcctcctgagtagccgggattacaggcgcccgccaccacacccagggatttcccagatgacccaggcatgcagtgggacacagagcacgtggccagagtcctccttcagcacatagaagtgaatggcatcaatctggtggtgactttcgatgcagggggagtaagtggccacagcaatcacattgctctgtatgcagctgtgagggccctgcactcagaagggaagttacctaaaggtaaggcttgttccttttgcaaagggccacaagatactgtccctctgagaaacttatgagggggaaatttgcaaatccacagagagctgccctcagccgagcagaggcagtggttggggaggccgccacactcttcctgactcacctcaaggtacctggcaggttgtatctaccagcaagtgcctgcctgcagggccacctctggatgagtggggaggccaggtttgcccctcaacctgtctagctttttcacagggtggatgttttacacctctggtattcttccagtctgaactcaatcccatcccccaaccaattaggcaggttgtaaatgactgctgggtgcttgatgaaccaatctgcctgagttaggaactcttcctaacccacataaagtatttgaccctacctgaccatttactgcatgacccccatgcttagcctctctggaccagtttctggtctgtcatacctcaccggcgcaatacgaagattcaatgaatgaaaacgtaagtagtttgtgccctttctatgtgggatgactgaaaggagcttaccaagccatgatgactttggaacatgactatagtttgtttgattcttatatcaatcctgtgagacaggcaggtctcacactatcaacaccaatttacagattagaaaactgagactgagagtggttaagggactttgccaagtctgtcaattcttgactgacagagctggaaccaggtctctaaactcccaatacagtaattcctgtctcctttacttcctttggctttgaggtagccagatctcaacctctagcagccaacctttttctggtagggcacaccgcagggtagagggtagccagccaggtcttctatggcccttttactcgttctagctgcaagaatcatgggcacagggcagctttagtgccacagaaacacgtggcaatgctgtggccactgtcctgccctgccctgaccactgctccgggcctcaaatactaaatatttttatgagctaggcacgaaggagagaacactaaacaagatacagcagacacgattgctacccttaccgaccttaacaatttactcaaataataattaattatgattgtgataaaggaggtacaggctgctatgaaaaataagactgtgtactcaatcaagtccagaggtccagaagagccttttgagaaacttaataaaggctcttatatttttgctctatttctttccagtattcttcatacacatgcgttttacatagttgtaatacacattacatagaattttttttttttgagagggagtttcattcttgttgcccaggctggagtgcagtgacgcgatttcagcccaccgcaacctccacctccagggttcaaatgattctcctgcctcagcctcccgagtagctgggattacaggcgcccaccaccacacccagctaattttgtatttttagtagagacggggtttctccatgttggtcaggcagtctcaaactccccacctcaggtgatccacccgcctcggcctcccaaagtgctgggattacaggcatgagccacctcacccagcctacatacaattttaaccctttaaagcttatatataagccaaactcagaaatgaacattaagatctgataaatgtcttaaaatcgctttccaaaaggattgaacacccttacccgatatataaatgagaaaacatttcactgtacagtctcaggcaataattataggaaaaatagctcactgcagttttaatttgcatgattaagactgatcattttttcatgtttctttacgtttatgtattttaattttttctgcacacataatgcttattgtaaaaactccaaacttcacactatttgagagtgctcaaagtgaaagcctcctgtaatctttacacccagagggatctacagttaattatttgttatatattcccccaaacttttttctacacaatattttaacgaaaatggtacagttatacacactttttgaatataatttagtagactttataagtacaaagtcatggcaatctagtgggagaaaaacagcttttttatgtcaatattttaaaactttttcttgaccatttatcagtttgtcttaaaataaaaatttatctcaaatttg

SEQ ID NO: 380904 - DNA, 918 bp, Homo sapiens
agtgctgcttacccatcatggaagcaatgtggctcctgtgtgtggcgttggcggtcttggcatggggcttcctctgggtttgggactcctcagaacgaatgaagagtcgggagcagggaggacggctgggagccgaaagccggaccctgctggtcatagcgcaccctgacgatgaagccatgttttttgctcccacagtgctaggcttggcccgcctaaggcactgggtgtacctgctttgcttctctgcagttttccgtagggagctaagtgaatacaccgaaggtcttacctctgaacccctcacagcctagggacaggagcggccggcttacctggtgggttgggggacgtcggcagctcgcgtactacgccagcaggattgaggagcagagaaacagttgcagttggttgtattcagtacctgcatttccgttgggaactccacctgtacttgttattctgtggaacttttttttatttgtagaaggagcaagaatattgaccttactatatagcacacgaaacaatctatgctgtatcgtgcctgctcaatccttaaagttaacttctaatgatagtaaaagaccttcctgctgcctttaaaatgcagcttgtgctagtaacatgcatgtgtcaaattgaagaattagacatagatgactagatagaaagtaattttgtaggtaattttagagttcaactccacccagctttcagtgaaggaacctttcaaataatagatttttgcttaccatagagaaaagatcaaatgacaaagcaaatattgaccattaagctggaatatggtgataattgaacagttgtataaatgaagtaattgaattgtacacatacaatgggtgaattttatggcatgtcaaagtatacctcaataaagctatttttttaaattgc

SEQ ID NO: 380905 - DNA, 1004 bp, Homo sapiens
agtgctgcttacccatcatggaagcaatgtggctcctgtgtgtggcgttggcggtcttggcatggggcttcctctgggtttgggactcctcagaacgaatgaagagtcgggagcagggaggacggctgggagccgaaagccggaccctgctggtcatagcgcaccctgacgatgaagccatgttttttgctcccacagtgctaggcttggcccgcctaaggcactgggtgtacctgctttgcttctctgcaggtaggaggccataggaggggcgatgggagccggggctttgaaagggatttaagtgctaaccgatctcagtcgccttcttctcgaagttttccgtagggagctaagtgaatacaccgaaggtcttacctctgaacccctcacagcctagggacaggagcggccggcttacctggtgggttgggggacgtcggcagctcgcgtactacgccagcaggattgaggagcagagaaacagttgcagttggttgtattcagtacctgcatttccgttgggaactccacctgtacttgttattctgtggaacttttttttatttgtagaaggagcaagaatattgaccttactatatagcacacgaaacaatctatgctgtatcgtgcctgctcaatccttaaagttaacttctaatgatagtaaaagaccttcctgctgcctttaaaatgcagcttgtgctagtaacatgcatgtgtcaaattgaagaattagacatagatgactagatagaaagtaattttgtaggtaattttagagttcaactccacccagctttcagtgaaggaacctttcaaataatagatttttgcttaccatagagaaaagatcaaatgacaaagcaaatattgaccattaagctggaatatggtgataattgaacagttgtataaatgaagtaattgaattgtacacatacaatgggtgaattttatggcatgtcaaagtatacctcaataaagctatttttttaaattgc

SEQ ID NO: 380906 - DNA, 2770 bp, Homo sapiens
agtgctgcttacccatcatggaagcaatgtggctcctgtgtgtggcgttggcggtcttggcatggggcttcctctgggtttgggactcctcagaacgaatgaagagtcgggagcagggaggacggctgggagccgaaagccggaccctgctggtcatagcgcaccctgacgatgaagccatgttttttgctcccacagtgctaggcttggcccgcctaaggcactgggtgtacctgctttgcttctctgcaggaaattactacaatcaaggagagactcgtaagaaagaacttttgcagagctgtgatgttttggggattccactctccagtgtaatgattattgacaacagggatttcccagatgacccaggcatgcagtgggacacagagcacgtggccagagtcctccttcagcacatagaagtgaatggcatcaatctggtggtgactttcgatgcagggggagtaagtggccacagcaatcacattgctctgtatgcagctgtgagggtgctctgtgctcacgcttcagtctgtgaatgtgctgcgcaagtacatctcccttctggatctgcccttgtctctgcttcatacgcaggatgtcctcttcgtgctcaacagcaaagaagtggcacaggccaagaaagccatgtcctgccaccgcagccagctcctctggttccgccgcctctacattatcttctcccggtacatgagaatcaactcactgagcttcctctgaagccttgaagggttttcaggtccaaggaacaaaggggaaaatagacaaaggagtgcagaggacctggcctggcactggcttatttacctgagctcaaggagatccccgctggagcagcctctgcaaaagggagcccatgtaggccaggggctgtccaaactccagcttcttcccctgggaaaaaacccaaagaaccaaaaacaaaccaccccaaggataataatagctacactgctagcttctcaagttcttgtgaaaaacaatttacataatgacacagtagatgtggaacacctagcccagtgcctgggcaggtccctattatcataaatgaacataaaagtgctctaaaaacactccacagatgtgacttttacattgtttccaaagcaggttcaccaaaaacacatacacaaaatgcaacagtgtgtgttgaattggttcaatcataattcctttgatttttcttgtatcagaatgtgggtctaggaaaaacttgctctatttaacaggacagctctgattgaagcatccaagtacaggtcactggggtgggcactgttttatacagagacgattacaagaactctgcctcaaagagcttacaatcaaatatgtcagctctcagtctttttggagaagtaggaagtaggaagataaatctgagacttaaaaaaacacaaaacattcaagaacctgatgtcttaaaattgtcctacgaacaaaagctctctgaaagctctggcttggaaactactctcagaatccagctaacgctccagggaagtggcctgagtcagggaagctaagtggtgaagagcacaggctggtagtcctgcgattgaagccagaatgaccagctgtgtaaccaaaggcaaggtgctgaacctttctctgcctcaattctctcatctgcaaaatgggaaataataatgatcccaacctcagagaactgaacaagataatacatgaaggtgcatatcaaagagtctcacatgctctgctgggtaagtatgccctccacccgccacaggaaacactgaattgcttctccatagctgcaggttagagacctgcttgttcagacactccacctcaacttgccctcctttgcttagtgtcaccattatcttgaatgcctcctaggggccacataagactaatagagctattaggctctgaagccggaatcaaaaatgcaaatctggttatgtgatttgtctacttaaactttgtcaatagctcctaatagccttcatgtgaaaatgtgaccagaagcacgttactaacactggctagagtgcagtaggagagtgtggtaggacaggctgacccctgccctgttactaggaagacagacactcacccagcctttctgaacagcaactctgctaagagcttttaaaatatgcatattctatgacctaaggaatacttagaaaatcaaaattatatacacactggctgggcgcagtggttcacatctgtaatcccagcactttgggaggtcaaggagggtggatcacttgaggccaggagttcgagacaagcctggccaatgtggcaaaaccccgtgtctactaaaaatacaaaaattagccaggcatggtgccgcaggcctgtggtcccagctactcggaaggctgaggcacaaggattgcttgaacccagaaggcggaggctgcagtgagctgagatcgcgccactgcactccagcctgggcgacagagccctgtctccaaaaaaacaacaacaattatacacacaaagattatcattgtattatttataatagcaaaactggaaaaatccagtgatgcagttgtgttttgtaacaaggaagaacgttcacactattaaatttttaaaagcgggttaggaatagcacaatcccatttttgttgaataaatatatacacaagtatataaataaatacatatatatcaaaagatatatatccaaaagataaatactagctggcaaggtaatctttcaacaatgaacatttataattgtaaaggactt

SEQ ID NO: 380907 - DNA, 422 bp, Homo sapiens
agtgctgcttacccatcatggaagcaatgtggctcctgtgtgtggcgttggcggtcttggcatggggcttcctctgggtttgggactcctcagaacgaatgaagagtcgggagcagggaggacggctgggagccgaaagccggaccctgctggtcatagcgcaccctgacgatgaagccatgttttttgctcccacagtgctaggcttggcccgcctaaggcactgggtgtacctgctttgcttctctgcaggaaattactacaatcaaggagagactcgtaagaaagaacttttgcagagctgtgatgttttggggattccactctccagtgtaatgattattgacaacaggtaatatatcttttaacaatgtagaaatttattggcaataaatatgcagtgatatactcaaaagacacac

SEQ ID NO: 380908 - DNA, 342 bp, Homo sapiens
cgcaagtacatctcccttctggatctgcccttgtctctgcttcatacgcaggatgtcctcttcgtgctcaacagcaaagaagtggcacaggccaaggtgaggattgtaaattcctggacaccccaactcagatccctgccccagacccctgtctcctcaaagccccacctctgcagaagccctaactgaaggtttttcacagtggttcagcacctgtccctgagaattagggctaggccagctagatcttgggaggcatagatttttcaatgactttagccttttttttctaattataaaaataatatatgctttttctaaaagtaaataacacatgctcat

SEQ ID NO: 380909 - DNA, 2802 bp, Homo sapiens
agtgctgcttacccatcatggaagcaatgtggctcctgtgtgtggcgttggcggtcttggcatggggcttcctctgggtttgggactcctcagaacgaatgaagagtcgggagcagggaggacggctgggagccgaaagccggaccctgctggtcatagcgcaccctgacgatgaagccatgttttttgctcccacagtgctaggcttggcccgcctaaggcactgggtgtacctgctttgcttctctgcaggaaattactacaatcaaggagagactcgtaagaaagaacttttgcagagctgtgatgttttggggattccactctccagtgtaatgattattgacaacagggatttcccagatgacccaggcatgcagtgggacacagagcacgtggccagagtcctccttcagcacatagaagtgaatggcatcaatctggtggtgactttcgatgcagggggagtaagtggccacagcaatcacattgctctgtatgcagctgtgagggccctgcactcagaagggaagttacctaaagggtgctctgtgctcacgcttcagtctgtgaatgtgctgcgcaagtacatctcccttctggatctgcccttgtctctgcttcatacgcaggatgtcctcttcgtgctcaacagcaaagaagtggcacaggccaagaaagccatgtcctgccaccgcagccagctcctctggttccgccgcctctacattatcttctcccggtacatgagaatcaactcactgagcttcctctgaagccttgaagggttttcaggtccaaggaacaaaggggaaaatagacaaaggagtgcagaggacctggcctggcactggcttatttacctgagctcaaggagatccccgctggagcagcctctgcaaaagggagcccatgtaggccaggggctgtccaaactccagcttcttcccctgggaaaaaacccaaagaaccaaaaacaaaccaccccaaggataataatagctacactgctagcttctcaagttcttgtgaaaaacaatttacataatgacacagtagatgtggaacacctagcccagtgcctgggcaggtccctattatcataaatgaacataaaagtgctctaaaaacactccacagatgtgacttttacattgtttccaaagcaggttcaccaaaaacacatacacaaaatgcaacagtgtgtgttgaattggttcaatcataattcctttgatttttcttgtatcagaatgtgggtctaggaaaaacttgctctatttaacaggacagctctgattgaagcatccaagtacaggtcactggggtgggcactgttttatacagagacgattacaagaactctgcctcaaagagcttacaatcaaatatgtcagctctcagtctttttggagaagtaggaagtaggaagataaatctgagacttaaaaaaacacaaaacattcaagaacctgatgtcttaaaattgtcctacgaacaaaagctctctgaaagctctggcttggaaactactctcagaatccagctaacgctccagggaagtggcctgagtcagggaagctaagtggtgaagagcacaggctggtagtcctgcgattgaagccagaatgaccagctgtgtaaccaaaggcaaggtgctgaacctttctctgcctcaattctctcatctgcaaaatgggaaataataatgatcccaacctcagagaactgaacaagataatacatgaaggtgcatatcaaagagtctcacatgctctgctgggtaagtatgccctccacccgccacaggaaacactgaattgcttctccatagctgcaggttagagacctgcttgttcagacactccacctcaacttgccctcctttgcttagtgtcaccattatcttgaatgcctcctaggggccacataagactaatagagctattaggctctgaagccggaatcaaaaatgcaaatctggttatgtgatttgtctacttaaactttgtcaatagctcctaatagccttcatgtgaaaatgtgaccagaagcacgttactaacactggctagagtgcagtaggagagtgtggtaggacaggctgacccctgccctgttactaggaagacagacactcacccagcctttctgaacagcaactctgctaagagcttttaaaatatgcatattctatgacctaaggaatacttagaaaatcaaaattatatacacactggctgggcgcagtggttcacatctgtaatcccagcactttgggaggtcaaggagggtggatcacttgaggccaggagttcgagacaagcctggccaatgtggcaaaaccccgtgtctactaaaaatacaaaaattagccaggcatggtgccgcaggcctgtggtcccagctactcggaaggctgaggcacaaggattgcttgaacccagaaggcggaggctgcagtgagctgagatcgcgccactgcactccagcctgggcgacagagccctgtctccaaaaaaacaacaacaattatacacacaaagattatcattgtattatttataatagcaaaactggaaaaatccagtgatgcagttgtgttttgtaacaaggaagaacgttcacactattaaatttttaaaagcgggttaggaatagcacaatcccatttttgttgaataaatatatacacaagtatataaataaatacatatatatcaaaagatatatatccaaaagataaatactagctggcaaggtaatctttcaacaatgaacatttataattgtaaaggactt

SEQ ID NO: 380910 - DNA, 2124 bp, Homo sapiens
agtgctgcttacccatcatggaagcaatgtggctcctgtgtgtggcgttggcggtcttggcatggggcttcctctgggtttgggactcctcagaacgaatgaagagtcgggagcagggaggacggctgggagccgaaagccggaccctgctggtcatagcgcaccctgacgatgaagccatgttttttgctcccacagtgctaggcttggcccgcctaaggcactgggtgtacctgctttgcttctctgcaggaaattactacaatcaaggagagactcgtaagaaagaacttttgcagagctgtgatgttttggggattccactctccagtgtaatgattattgacaacagggatttcccagatgacccaggcatgcagtgggacacagagcacgtggccagagtcctccttcagcacatagaagtgaatggcatcaatctggtggtgactttcgatgcagggggagtaagtggccacagcaatcacattgctctgtatgcagctgtgagggccctgcactcagaagggaagttacctaaagggtgctctgtgctcacgcttcagtctgtgaatgtgctgcgcaagtacatctcccttctggatctgcccttgtctctgcttcatacgcaggatgtcctcttcgtgctcaacagcaaagaagtggcacaggccaagaaagccatgtcctgccaccgcagccagctcctctggttccgccgcctctacattatcttctcccggtacatgagaatcaactcactgagcttcctctgaagccttgaagggttttcaggtccaaggaacaaaggggaaaatagacaaaggagtgcagaggacctggcctggcactggcttatttacctgagctcaaggagatccccgctggagcagcctctgcaaaagggagcccatgtaggccaggggctgtccaaactccagcttcttcccctgggaaaaaacccaaagaaccaaaaacaaaccaccccaaggataataatagctacactgctagcttctcaagttcttgtgaaaaacaatttacataatgacacagtagatgtggaacacctagcccagtgcctgggcaggtccctattatcataaatgaacataaaagtgctctaaaaacactccacagatgtgacttttacattgtttccaaagcaggttcaccaaaaacacatacacaaaatgcaacagtgtgtgttgaattggttcaatcataattcctttgatttttcttgtatcagaatgtgggtctaggaaaaacttgctctatttaacaggacagctctgattgaagcatccaagtacaggtcactggggtgggcactgttttatacagagacgattacaagaactctgcctcaaagagcttacaatcaaatatgtcagctctcagtctttttggagaagtaggaagtaggaagataaatctgagacttaaaaaaacacaaaacattcaagaacctgatgtcttaaaattgtcctacgaacaaaagctctctgaaagctctggcttggaaactactctcagaatccagctaacgctccagggaagtggcctgagtcagggaagctaagtggtgaagagcacaggctggtagtcctgcgattgaagccagaatgaccagctgtgtaaccaaaggcaaggtgctgaacctttctctgcctcaattctctcatctgcaaaatgggaaataataatgatcccaacctcagagaactgaacaagataatacatgaaggtgcatatcaaagagtctcacatgctctgctggatcacacaaaagttgggaagagaaggatgtcaattagactacatcaaaatctgggcagagggaggacaaagagctgcctaaagaaactggtagctggagcaaactgcagagatcaagatgaccctagtcaacggaaccagcagcccaggtcagccacattcaggagcaccaccgaggcacggcagggagagcaaagttgctggccccaatcattcctccttttcagggcaggagaggcagaagctcactctttagacatgttcttgatggtcttgtgctctttcatggccttctcccaatcgctgccattgaattcctcagtgaccatactccgcacaggg

SEQ ID NO: 380911 - DNA, 2698 bp, Homo sapiens
agtgctgcttacccatcatggaagcaatgtggctcctgtgtgtggcgttggcggtcttggcatggggcttcctctgggtttgggactcctcagaacgaatgaagagtcgggagcagggaggacggctgggagccgaaagccggaccctgctggtcatagcgcaccctgacgatgaagccatgttttttgctcccacagtgctaggcttggcccgcctaaggcactgggtgtacctgctttgcttctctgcaggaaattactacaatcaaggagagactcgtaagaaagaacttttgcagagctgtgatgttttggggattccactctccagtgtaatgattattgacaacagggatttcccagatgacccaggcatgcagtgggacacagagcacgtggccagagtcctccttcagcacatagaagtgaatggcatcaatctggtggtgactttcgatgcagggggagtaagtggccacagcaatcacattgctctgtatgcagctgtgagggccctgcactcagaagggaagttacctaaaggtaaggcttgttccttttgcaaagggccacaagatactgtccctctgagaaacttatgagggggaaatttgcaaatccacagagagctgccctcagccgagcagaggcagtggttggggaggccgccacactcttcctgactcacctcaaggtacctggcaggttgtatctaccagcaagtgcctgcctgcagggccacctctggatgagtggggaggccaggtttgcccctcaacctgtctagctttttcacagggtggatgttttacacctctggtattcttccagtctgaactcaatcccatcccccaaccaattaggcaggttgtaaatgactgctgggtgcttgatgaaccaatctgcctgagttaggaactcttcctaacccacataaagtatttgaccctacctgaccatttactgcatgacccccatgcttagcctctctggaccagtttctggtctgtcatacctcaccggcgcaatacgaagattcaatgaatgaaaacgtaagtagtttgtgccctttctatgtgggatgactgaaaggagcttaccaagccatgatgactttggaacatgactatagtttgtttgattcttatatcaatcctgtgagacaggcaggtctcacactatcaacaccaatttacagattagaaaactgagactgagagtggttaagggactttgccaagtctgtcaattcttgactgacagagctggaaccaggtctctaaactcccaatacagtaattcctgtctcctttacttcctttggctttgaggtagccagatctcaacctctagcagccaacctttttctggtagggcacaccgcagggtagagggtagccagccaggtcttctatggcccttttactcgttctagctgcaagaatcatgggcacagggcagctttagtgccacagaaacacgtggcaatgctgtggccactgtcctgccctgccctgaccactgctccgggcctcaaatactaaatatttttatgagctaggcacgaaggagagaacactaaacaagatacagcagacacgattgctacccttaccgaccttaacaatttactcaaataataattaattatgattgtgataaaggaggtacaggctgctatgaaaaataagactgtgtactcaatcaagtccagaggtccagaagagccttttgagaaacttaataaaggctcttatatttttgctctatttctttccagtattcttcatacacatgcgttttacatagttgtaatacacattacatagaattttttttttttgagagggagtttcattcttgttgcccaggctggagtgcagtgacgcgatttcagcccaccgcaacctccacctccagggttcaaatgattctcctgcctcagcctcccgagtagctgggattacaggcgcccaccaccacacccagctaattttgtatttttagtagagacggggtttctccatgttggtcaggcagtctcaaactccccacctcaggtgatccacccgcctcggcctcccaaagtgctgggattacaggcatgagccacctcacccagcctacatacaattttaaccctttaaagcttatatataagccaaactcagaaatgaacattaagatctgataaatgtcttaaaatcgctttccaaaaggattgaacacccttacccgatatataaatgagaaaacatttcactgtacagtctcaggcaataattataggaaaaatagctcactgcagttttaatttgcatgattaagactgatcattttttcatgtttctttacgtttatgtattttaattttttctgcacacataatgcttattgtaaaaactccaaacttcacactatttgagagtgctcaaagtgaaagcctcctgtaatctttacacccagagggatctacagttaattatttgttatatattcccccaaacttttttctacacaatattttaacgaaaatggtacagttatacacactttttgaatataatttagtagactttataagtacaaagtcatggcaatctagtgggagaaaaacagcttttttatgtcaatattttaaaactttttcttgaccatttatcagtttgtcttaaaataaaaatttatctcaaatttg

SEQ ID NO: 380912 - DNA, 3864 bp, Homo sapiens
agtgctgcttacccatcatggaagcaatgtggctcctgtgtgtggcgttggcggtcttggcatggggcttcctctgggtttgggactcctcagaacgaatgaagagtcgggagcagggaggacggctgggagccgaaagccggaccctgctggtcatagcgcaccctgacgatgaagccatgttttttgctcccacagtgctaggcttggcccgcctaaggcactgggtgtacctgctttgcttctctgcaggaaattactacaatcaaggagagactcgtaagaaagaacttttgcagagctgtgatgttttggggattccactctccagtgtaatgattattgacaacagggatttcccagatgacccaggcatgcagtgggacacagagcacgtggccagagtcctccttcagcacatagaagtgaatggcatcaatctggtggtgactttcgatgcagggggagtaagtggccacagcaatcacattgctctgtatgcagctgtgagggccctgcactcagaagggaagttacctaaaggtaaggcttgttccttttgcaaagggccacaagatactgtccctctgagaaacttatgagggggaaatttgcaaatccacagagagctgccctcagccgagcagaggcagtggttggggaggccgccacactcttcctgactcacctcaaggtacctggcaggttgtatctaccagcaagtgcctgcctgcagggccacctctggatgagtggggaggccaggtttgcccctcaacctgtctagctttttcacagggtggatgttttacacctctggtattcttccagtctgaactcaatcccatcccccaaccaattaggcaggttgtaaatgactgctgggtgcttgatgaaccaatctgcctgagttaggaactcttcctaacccacataaagtatttgaccctacctgaccatttactgcatgacccccatgcttagcctctctggaccagtttctggtctgtcatacctcaccggcgcaatacgaagattcaatgaatgaaaacgtaagtagtttgtgccctttctatgtgggatgactgaaaggagcttaccaagccatgatgactttggaacatgactatagtttgtttgattcttatatcaatcctgtgagacaggcaggtctcacactatcaacaccaatttacagattagaaaactgagactgagagtggttaagggactttgccaagtctgtcaattcttgactgacagagctggaaccaggtctctaaactcccaatacagtaattcctgtctcctttacttcctttggctttgaggtagccagatctcaacctctagcagccaacctttttctggtagggcacaccgcagggtagagggtagccagccaggtcttctatggcccttttactcgttctagctgcaagaatcatgggcacagggcagctttagtgccacagaaacacgtggcaatgctgtggccactgtcctgccctgccctgagccacagggtagagggaggatgctcaggggaaaatctggctggaggcctcaaggcttatcacttcaccctgtctcctctccatccagggtgctctgtgctcacgcttcagtctgtgaatgtgctgcgcaagtacatctcccttctggatctgcccttgtctctgcttcatacgcaggatgtcctcttcgtgctcaacagcaaagaagtggcacaggccaagaaagccatgtcctgccaccgcagccagctcctctggttccgccgcctctacattatcttctcccggtacatgagaatcaactcactgagcttcctctgaagccttgaagggttttcaggtccaaggaacaaaggggaaaatagacaaaggagtgcagaggacctggcctggcactggcttatttacctgagctcaaggagatccccgctggagcagcctctgcaaaagggagcccatgtaggccaggggctgtccaaactccagcttcttcccctgggaaaaaacccaaagaaccaaaaacaaaccaccccaaggataataatagctacactgctagcttctcaagttcttgtgaaaaacaatttacataatgacacagtagatgtggaacacctagcccagtgcctgggcaggtccctattatcataaatgaacataaaagtgctctaaaaacactccacagatgtgacttttacattgtttccaaagcaggttcaccaaaaacacatacacaaaatgcaacagtgtgtgttgaattggttcaatcataattcctttgatttttcttgtatcagaatgtgggtctaggaaaaacttgctctatttaacaggacagctctgattgaagcatccaagtacaggtcactggggtgggcactgttttatacagagacgattacaagaactctgcctcaaagagcttacaatcaaatatgtcagctctcagtctttttggagaagtaggaagtaggaagataaatctgagacttaaaaaaacacaaaacattcaagaacctgatgtcttaaaattgtcctacgaacaaaagctctctgaaagctctggcttggaaactactctcagaatccagctaacgctccagggaagtggcctgagtcagggaagctaagtggtgaagagcacaggctggtagtcctgcgattgaagccagaatgaccagctgtgtaaccaaaggcaaggtgctgaacctttctctgcctcaattctctcatctgcaaaatgggaaataataatgatcccaacctcagagaactgaacaagataatacatgaaggtgcatatcaaagagtctcacatgctctgctgggtaagtatgccctccacccgccacaggaaacactgaattgcttctccatagctgcaggttagagacctgcttgttcagacactccacctcaacttgccctcctttgcttagtgtcaccattatcttgaatgcctcctaggggccacataagactaatagagctattaggctctgaagccggaatcaaaaatgcaaatctggttatgtgatttgtctacttaaactttgtcaatagctcctaatagccttcatgtgaaaatgtgaccagaagcacgttactaacactggctagagtgcagtaggagagtgtggtaggacaggctgacccctgccctgttactaggaagacagacactcacccagcctttctgaacagcaactctgctaagagcttttaaaatatgcatattctatgacctaaggaatacttagaaaatcaaaattatatacacactggctgggcgcagtggttcacatctgtaatcccagcactttgggaggtcaaggagggtggatcacttgaggccaggagttcgagacaagcctggccaatgtggcaaaaccccgtgtctactaaaaatacaaaaattagccaggcatggtgccgcaggcctgtggtcccagctactcggaaggctgaggcacaaggattgcttgaacccagaaggcggaggctgcagtgagctgagatcgcgccactgcactccagcctgggcgacagagccctgtctccaaaaaaacaacaacaattatacacacaaagattatcattgtattatttataatagcaaaactggaaaaatccagtgatgcagttgtgttttgtaacaaggaagaacgttcacactattaaatttttaaaagcgggttaggaatagcacaatcccatttttgttgaataaatatatacacaagtatataaataaatacatatatatcaaaagatatatatccaaaagataaatactagctggcaaggtaatctttcaacaatgaacatttataattgtaaaggactt

SEQ ID NO: 380913 - DNA, 2187 bp, Homo sapiens
agtgctgcttacccatcatggaagcaatgtggctcctgtgtgtggcgttggcggtcttggcatggggcttcctctgggtttgggactcctcagaacgaatgaagagtcgggagcagggaggacggctgggagccgaaagccggaccctgctggtcatagcgcaccctgacgatgaagccatgttttttgctcccacagtgctaggcttggcccgcctaaggcactgggtgtacctgctttgcttctctgcaggaaattactacaatcaaggagagactcgtaagaaagaacttttgcagagctgtgatgttttggggattccactctccagtgtaatgattattgacaacagggatttcccagatgacccaggcatgcagtgggacacagagcacgtggccagagtcctccttcagcacatagaagtgaatggcatcaatctggtggtgactttcgatgcagggggagtaagtggccacagcaatcacattgctctgtatgcagctgtgagggccctgcactcagaagggaagttacctaaaggtaaggcttgttccttttgcaaagggccacaagatactgtccctctgagaaacttatgagggggaaatttgcaaatccacagagagctgccctcagccgagcagaggcagtggttggggaggccgccacactcttcctgactcacctcaaggtacctggcaggttgtatctaccagcaagtgcctgcctgcagggccacctctggatgagtggggaggccaggtttgcccctcaacctgtctagctttttcacagggtggatgttttacacctctggtattcttccagtctgaactcaatcccatcccccaaccaattaggcaggttgtaaatgactgctgggtgcttgatgaaccaatctgcctgagttaggaactcttcctaacccacataaagtatttgaccctacctgaccatttactgcatgacccccatgcttagcctctctggaccagtttctggtctgtcatacctcaccggcgcaatacgaagattcaatgaatgaaaacgtaagtagtttgtgccctttctatgtgggatgactgaaaggagcttaccaagccatgatgactttggaacatgactatagtttgtttgattcttatatcaatcctgtgagacaggcaggtctcacactatcaacaccaatttacagattagaaaactgagactgagagtggttaagggactttgccaagtctgtcaattcttgactgacagagctggaaccaggtctctaaactcccaatacagtaattcctgtctcctttacttcctttggctttgaggtagccagatctcaacctctagcagccaacctttttctggtagggcacaccgcagggtagagggtagccagccaggtcttctatggcccttttactcgttctagctgcaagaatcatgggcacagggcagctttagtgccacagaaacacgtggcaatgctgtggccactgtcctgccctgccctgagccacagggtagagggaggatgctcaggggaaaatctggctggaggcctcaaggcttatcacttcaccctgtctcctctccatccagggtgctctgtgctcacgcttcagtctgtgaatgtgctgcgcaagtacatctcccttctggatctgcccttgtctctgcttcatacgcaggatgtcctcttcgtgctcaacagcaaagaagtggcacaggccaagaaagccatgtcctgccaccgcagccagctcctctggttccgccgcctctacattatcttctcccggtacatgagaatcaactcactgagcttcctctgaagccttgaagggttttcaggtccaaggaacaaaggggaaaatagacaaaggagtgcagaggacctggcctggcactggcttatttacctgagctcaaggagatccccgctggagcagcctctgcaaaagggagcccatgtaggccaggggctgtccaaactccagcttcttcccctgggaaaaaacccaaagaaccaaaaacaaaccaccccaaggataataatagctacactgctagcttctcaagttcttgtgaaaaacaatttacataatgacacagtagatgtggaacacctagcccagtgcctgggcaggtccctattatcataaatgaacataaaagtgctct

SEQ ID NO: 380914 - DNA, 1924 bp, Homo sapiens
agtgctgcttacccatcatggaagcaatgtggctcctgtgtgtggcgttggcggtcttggcatggggcttcctctgggtttgggactcctcagaacgaatgaagagtcgggagcagggaggacggctgggagccgaaagccggaccctgctggtcatagcgcaccctgacgatgaagccatgttttttgctcccacagtgctaggcttggcccgcctaaggcactgggtgtacctgctttgcttctctgcaggaaattactacaatcaaggagagactcgtaagaaagaacttttgcagagctgtgatgttttggggattccactctccagtgtaatgattattgacaacagattgtcatatctcagactgatgtgtctatcagaggcacagggacctcaacagcacacgccagtgagtcagtcatcagattatagtagcctgggaatggggtgaatacaggcttgaagtggactagtatctatttccaaggaggcccaatctattgggctggagtacggtggcacgatcttggctcactgcaacctctgccacctgggttgaagcaattctccagccttagcctcccaagtagctgggattacaggcgcctgccaccgcgccctgctaattttgtatttttagtagagatagggcttcaccatcttggccaagctggtcttgaactcctgaccttgtgatccacccacggggactcccaaagtgctgggattacaggcgtgagccactgctccgggcctcaaatactaaatatttttatgagctaggcacgaaggagagaacactaaacaagatacagcagacacgattgctacccttaccgaccttaacaatttactcaaataataattaattatgattgtgataaaggaggtacaggctgctatgaaaaataagactgtgtactcaatcaagtccagaggtccagaagagccttttgagaaacttaataaaggctcttatatttttgctctatttctttccagtattcttcatacacatgcgttttacatagttgtaatacacattacatagaattttttttttttgagagggagtttcattcttgttgcccaggctggagtgcagtgacgcgatttcagcccaccgcaacctccacctccagggttcaaatgattctcctgcctcagcctcccgagtagctgggattacaggcgcccaccaccacacccagctaattttgtatttttagtagagacggggtttctccatgttggtcaggcagtctcaaactccccacctcaggtgatccacccgcctcggcctcccaaagtgctgggattacaggcatgagccacctcacccagcctacatacaattttaaccctttaaagcttatatataagccaaactcagaaatgaacattaagatctgataaatgtcttaaaatcgctttccaaaaggattgaacacccttacccgatatataaatgagaaaacatttcactgtacagtctcaggcaataattataggaaaaatagctcactgcagttttaatttgcatgattaagactgatcattttttcatgtttctttacgtttatgtattttaattttttctgcacacataatgcttattgtaaaaactccaaacttcacactatttgagagtgctcaaagtgaaagcctcctgtaatctttacacccagagggatctacagttaattatttgttatatattcccccaaacttttttctacacaatattttaacgaaaatggtacagttatacacactttttgaatataatttagtagactttataagtacaaagtcatggcaatctagtgggagaaaaacagcttttttatgtcaatattttaaaactttttcttgaccatttatcagtttgtcttaaaataaaaatttatctcaaatttg

SEQ ID NO: 380915 - DNA, 260 bp, Homo sapiens
ggtttcgccttgctggccaggctggtcttgaactcctgacctcaagtgatctgcctgcgtcagcctcccaaagggctgggattacaggcatgagccactgcacctggtcccttgaactctttttaatctatactcatttccgtgatctcatccagtctcctgactttcagtaccatctaagatatataatatcatcatatatgatgacaactcttaaatttatatctccagctcggatctcttacctgaactccagattc

SEQ ID NO: 380916 - DNA, 397 bp, Homo sapiens
tccaacaccctgtggaagccaccaaggggtggggcttacaccctctgaagcaatggcctgaactacatcttcaccccttttagccacagctggagctgaagcagttgggacacaggacaccaagtcctgaggatgcacacagcaatagggtctgggcctggcccacaaaatcactcctgacactaaaaactatcagaacagcataatggaaactgttcccatgatcaaaccacctcccatcaagtccctcccttgacacgtggggattagggggattgcaattcaagatgagatttcagtagggacacagagccaaaccatatcattcccccttgctgtttctgtgatagtgagtgagttctcatgagatctggttgtttgaatgtgtgtggcactt

SEQ ID NO: 380917 - DNA, 373 bp, Homo sapiens
ttttttaaaaagcaacattaagctaatatattcttactgcagaaaaggagctttgttctatttatctctaaaactgatgctcactagtagttctcagatttggaaaggtatttgtactatttatttataggagcatttatttataggaaatactggctgggcgtggtggctcatacctataatcccagcactttgggaggccaatgtgggcggatcagtttgagaccagcctggccaacatggcaaaaccccgtctctactaaaaatacaaaaattagctgggcgtggtggtgagtgcctgtaatcccagctactccggaggctgaggctggagaatcgcctgaacctgggaggcggaggttgcagtgggccg

SEQ ID NO: 380918 - DNA, 443 bp, Homo sapiens
gggagactgtctcaaaaaaaaaaaagaaattcagaggtgctacaatgtggatgaacctagaagacgttatgccaagtgaaatacgacaaccacaaaaagacaaatactttgtggtttcactcacgctgggtacctataggagtcacttccacagagacagaaagtagaatggtggttgccagaggcagggattgggagttagtgtttagtggatatatgggttacagagtttgttttacaaggtgaaagcgttctgaaacgcccagttgtggtggctcatctgtagtcccagcactttgggagactgaggcaggaatattgcttgagcccaggagtttgagaccagcctgagcaacatagcaagaccccatctttaaagaaaataaatacataaattaaaaagttctggagctagatagtgattgcatagtagcgtgaatgca

SEQ ID NO: 380919 - DNA, 2621 bp, Homo sapiens
ggcacgaggcagagaccgagtgagccgtgggctgagcctgggaggccgggactgagggggaggagggaggcccgggggaagggagggagggagagagggaaggagggaggagggcgggcgagctggagccggcaggcagcgggagcccgagagagccgcgtcgggagtgcggtctccatggcagtgctgggcgcagccggagagagcctgtccagggggctgagccccacccccaaatccctggggcatccagaagattcctgactggtcaagaaccagaggcaaaagagacctggaagtcccagcatggggaccagaaccccccagccagcctcatagttgggaaagtagccagcttgcctgccccatcaattgcagggatgcttaaggaaggccccgcccagtatgaaagctgaggattgcctctgctgaccctcagtctcctcccctgccctctacatctgccctcagctgggtccatcatgcaatgctgagcactggggtgagcctgggggcagcctgcctgctgacagggcgaggattgtggggatcatgggagtgtttgtgagtggggctcctgggtgagacctagcccccacccccacagagctcaagggggtggggggctgaggataggatggctcggggcggggcgggggcagaggaggcctccctgcgctccaacgcattgtcctggctggcctgtgggctcctggcgctgctggccaatgcctggatcatcctcagcatctcggccaagcagcagaagcacaagccactggagctgctgctctgcttcctagcgggcacacacatactcatggcagctgtgcccctcaccacctttgccgtggtgcagctgcgtcgtcaggcttcctccgactatgactggaacgagagtatctgcaaggtcttcgtgtccacctactacaccctggcgctggccacctgcttcacggtcgcctccctctcctaccatcgcatgtggatggtgcgctggcccgtcaactaccgcctcagcaacgccaagaagcaggcactgcatgccgtcatgggcatctggatggtcagcttcatcctctccacactgccctccattggctggcacaacaacggcgagcgctactatgcccgcggctgccagttcatagtctccaagatcggcctcggctttggcgtttgcttcagcctcttgctacttgggggaattgtcatgggtctggtctgtgtggccatcaccttctaccagacactgtgggcccggccccggagggctcggcaggcccggagagtggggggtggtggggggaccaaagcgggtgggccaggggccttgggtacccggccagcttttgaggtaccagccattgtggtggaggatgcccgagggaagcggcggtcctcgctggatggctcggagtctgccaagacatccctgcaggtcaccaacttggtcagcgccatcgtctttctctatgactcactcacaggggtgcccatcttggtggtgagcttcttctccctcaagtcggactcggcgcccccctggatggtgctggctgtgctgtggtgctccatggcacagacgctgctgctgccctccttcatctggtcctgcgagcgctaccgcgccgacgtgcgcacagtgtgggagcaatgcgtggccatcatgtctgaggaggatggagatgacgatgggggctgtgacgactatgcagagggccgagtttgcaaagttcgctttgatgctaacggagccacaggaccagggagccgggaccccgcccaggtgaagctgctgcctggaaggcacatgctcttccctcctcttgagagagtccactacttacaggtccccctatcccggcgtctgtcccatgatgagacaaacatcttctctacccctcgggaaccaggctccttcctgcacaagtggtcatcctctgatgacatccgggtcctcccagcccagagccgggccctcgggggtcctcctgagtacctgggacaaagacacaggttggaggacgaggaggacgaggaagaggctgaaggtggggggctggccagccttcgccaattcttggagagtggggttctggggtcaggtgggggacccccacggggtcctggcttcttccgggaggagatcaccaccttcatcgatgagacacctctgccttctccgactgcctcaccagggcactctcctcgtcggccccggccactgggcctctcaccccgccgactctcccttgggtcccctgagagcagagccgttggacttcctttgggactaagcgcagggagacgctgctccctgacggggggtgaagaaagtgcaagggcttggggaggatcctggggcccaggcaaccccatctttccccagctgaccctgtgagcccaagcaggcctgctgaactcagaggagaaagcctgagtgagtaacacctcattctggccgagagtagggcagctgcctccagactctggggagacgggcgctagatttggggctcagaaggccctgctctctcccatccaagtgaccagatgccctactcagcttccatcacccctagcaatatgtattaaagtctgaagtgttgccatggaaa

SEQ ID NO: 380920 - DNA, 1323 bp, Homo sapiens
ggcacgaggcagagaccgagtgagccgtgggctgagcctgggaggccgggactgagggggaggagggaggcccgggggaagggagggagggagagagggaaggagggaggagggcgggcgagctggagccggcaggcagcgggagcccgagagagccgcgtcgggagtgcggtctccatggcagtgctgggcgcagccggagagaggtggtgagcttcttctccctcaagtcggactcggcgcccccctggatggtgctggctgtgctgtggtgctccatggcacagacgctgctgctgccctccttcatctggtcctgcgagcgctaccgcgccgacgtgcgcacagtgtgggagcaatgcgtggccatcatgtctgaggaggatggagatgacgatgggggctgtgacgactatgcagagggccgagtttgcaaagttcgctttgatgctaacggagccacaggaccagggagccgggaccccgcccaggtgaagctgctgcctggaaggcacatgctcttccctcctcttgagagagtccactacttacaggtccccctatcccggcgtctgtcccatgatgagacaaacatcttctctacccctcgggaaccaggctccttcctgcacaagtggtcatcctctgatgacatccgggtcctcccagcccagagccgggccctcgggggtcctcctgagtacctgggacaaagacacaggttggaggacgaggaggacgaggaagaggctgaaggtggggggctggccagccttcgccaattcttggagagtggggttctggggtcaggtgggggacccccacggggtcctggcttcttccgggaggagatcaccaccttcatcgatgagacacctctgccttctccgactgcctcaccagggcactctcctcgtcggccccggccactgggcctctcaccccgccgactctcccttgggtcccctgagagcagagccgttggacttcctttgggactaagcgcagggagacgctgctccctgacggggggtgaagaaagtgcaagggcttggggaggatcctggggcccaggcaaccccatctttccccagctgaccctgtgagcccaagcaggcctgctgaactcagaggagaaagcctgagtgagtaacacctcattctggccgagagtagggcagctgcctccagactctggggagacgggcgctagatttggggctcagaaggccctgctctctcccatccaagtgaccagatgccctactcagcttccatcacccctagcaatatgtattaaagtctgaagtgttgccatggaaa

SEQ ID NO: 380921 - DNA, 1007 bp, Homo sapiens
tgttaggcaccccaatcccctcttccctagccctggctttcagggcaccatagagctgggtgaaagaaagctatagcaagagaggcatcccttcagacctcgtggggccaggtttgcccaccggagcaaacgttttgaaggttaagaaggtggcaccatcttccggagtccccacttggttcctgcctctgcctctgtccctgcagcaccttcaggtcttacccgctcctcttcccaggtccccctatcccggcgtctgtcccatgatgagacaaacatcttctctacccctcgggaaccaggctccttcctgcacaagtggtcatcctctgatgacatccgggtcctcccagcccagagccgggccctcgggggtcctcctgagtacctgggacaaagacacaggttggaggacgaggaggacgaggaagaggctgaaggtggggggctggccagccttcgccaattcttggagagtggggttctggggtcaggtgggggacccccacggggtcctggcttcttccgggaggagatcaccaccttcatcgatgagacacctctgccttctccgactgcctcaccagggcactctcctcgtcggccccggccactgggcctctcaccccgccgactctcccttgggtcccctgagagcagagccgttggacttcctttgggactaagcgcagggagacgctgctccctgacggggggtgaagaaagtgcaagggcttggggaggatcctggggcccaggcaaccccatctttccccagctgaccctgtgagcccaagcaggcctgctgaactcagaggagaaagcctgagtgagtaacacctcattctggccgagagtagggcagctgcctccagactctggggagacgggcgctagatttggggctcagaaggccctgctctctcccatccaagtgaccagatgccctactcagcttccatcacccctagcaatatgtattaaagtctgaagtgttgccatggaaa

SEQ ID NO: 380922 - DNA, 914 bp, Homo sapiens
ccacgcgtcgcccacgcgtcggtcatgggtctggtctgtgtggccatcaccttctaccagacactgtgggcccggccccggagggctcggcaggcccggagagtggggggtggtggggggaccaaagcgggtgggccaggggccttgggtacccggccagcttttgaggtaccagccattgtggtggaggatgcccgagggaagcggcggtcctcgctggatggctcggagtctgccaagacatccctgcaggtcaccaacttggtcagcgccatcgtctttctctatgactcactcacaggggtgcccatcttggtggtgagcttcttctccctcaagtcggactcggcgcccccctggatggtgctggctgtgctgtggtgctccatggcacagacgctgctgctgccctccttcatctggtcctgcgagcgctaccgcgccgacgtgcgcacagtgtgggagcaatgcgtggccatcatgtctgaggaggatggagatgacgatgggggctgtgacgactatgcagagggccgagtttgcaaagttcgctttgatgctaacggagccacaggaccagggagccgggaccccgcccaggtgaagctgctgcctggaaggcacatgctcttccctcctcttgagagagtccactacttacagtccctatccggcgtctgtccatgatgtgacaaacatttttcttaccctcgggaaccaggtcttcctggcaagttggatctctgataaatcggcgccccagccaaagcgggcctgggggccctgagtcggggcaaaccggtgggcgggggagaaaagggtttggggggccctccctgggagggtgtgtctgggccccgctgggttgggggaaccctaaaaacttcctggcagatcttcggggtccacttcgg

SEQ ID NO: 380923 - DNA, 2749 bp, Homo sapiens
ggcacgaggcagagaccgagtgagccgtgggctgagcctgggaggccgggactgagggggaggagggaggcccgggggaagggagggagggagagagggaaggagggaggagggcgggcgagctggagccggcaggcagcgggagcccgagagagccgcgtcgggagtgcggtctccatggcagtgctgggcgcagccggagagagcctgtccagggggctgagccccacccccaaatccctggggcatccagaagattcctgactggtcaagaaccagaggcaaaagagacctggaagtcccagcatggggaccagaaccccccagccagcctcatagttgggaaagtagccagcttgcctgccccatcaattgcagggatgcttaaggaaggccccgcccagtatgaaagctgaggattgcctctgctgaccctcagtctcctcccctgccctctacatctgccctcagctgggtccatcatgcaatgctgagcactggggtgagcctgggggcagcctgcctgctgacagggcgaggattgtggggatcatgggagtgtttgtgagtggggctcctgggtgagacctagcccccacccccacagagctcaagggggtggggggctgaggataggatggctcggggcggggcgggggcagaggaggcctccctgcgctccaacgcattgtcctggctggcctgtgggctcctggcgctgctggccaatgcctggatcatcctcagcatctcggccaagcagcagaagcacaagccactggagctgctgctctgcttcctagcgggcacacacatactcatggcagctgtgcccctcaccacctttgccgtggtgcagctgcgtcgtcaggcttcctccgactatgactggaacgagagtatctgcaaggtcttcgtgtccacctactacaccctggcgctggccacctgcttcacggtcgcctccctctcctaccatcgcatgtggatggtgcgctggcccgtcaactaccgcctcagcaacgccaagaagcaggcactgcatgccgtcatgggcatctggatggtcagcttcatcctctccacactgccctccattggctggcacaacaacggcgagcgctactatgcccgcggctgccagttcatagtctccaagatcggcctcggctttggcgtttgcttcagcctcttgctacttgggggaattgtcatgggtctggtctgtgtggccatcaccttctaccagacactgtgggcccggccccggagggctcggcaggcccggagagtggggggtggtggggggaccaaagcgggtgggccaggggccttgggtacccggccagcttttgaggtaccagccattgtggtggaggatgcccgagggaagcggcggtcctcgctggatggctcggagtctgccaagacatccctgcaggtcaccaacttggtcagcgccatcgtctttctctatgactcactcacaggggtgcccatcttggtggtgagcttcttctccctcaagtcggactcggcgcccccctggatggtgctggctgtgctgtggtgctccatggcacagacgctgctgctgccctccttcatctggtcctgcgagcgctaccgcgccgacgtgcgcacagtgtgggagcaatgcgtggccatcatgtctgaggaggatggagatgacgatgggggctgtgacgactatgcagagggccgagtttgcaaagttcgctttgatgctaacggagccacaggaccagggagccgggaccccgcccaggtgaagctgctgcctggaaggcacatgctcttccctcctcttgagagagtccactacttacaggtccccctatcccggcgtctgtcccatgatgagacaaacatcttctctacccctcgggaaccaggctccttcctgcacaagtggtcatcctctgatgacatccgggtcctcccagcccagagccgggccctcgggggtcctcctgagtacctgggacaaagacacaggttggaggacgaggaggacgaggaagaggctgaaggtggggggctggccagccttcgccaattcttggagagtggggttctggggtcaggtgggggacccccacggggtcctggcttcttccgggaggagatcaccaccttcatcgatgagacacctctgccttctccgactgcctcaccagggcactctcctcgtcggccccggccactgggcctctcaccccgccgactctcccttgggtcccctgagagcagagccgttggacttcctttgggactaagcgcagggagacgctgctccctgacggggggtgaagaaagtgcaagggcttggggaggatcctggggcccaggcaaccccatctttccccagctgaccctgtgagcccaagcaggcctgctgaactcagaggagaaagcctgagtgagtaacacctcattctggccgagagtagggcagctgcctccagactctggggagacgggcgctagatttggggctcagaaggccctgctctctcccatccaagtgaccagatgccctactcagcttccatcacccctagcaatatgtattaaagtctgaagtgttgccatggaaaaaaaaaaaaggcgggccctaaagttccccagggcagttccgtcccgttttggtccagggccctatgagcgttaaaccagcgggcggtaaacggtgcggacaggctcggcttgggggcaccttggggaa

SEQ ID NO: 380924 - DNA, 1915 bp, Homo sapiens
ggcacgaggcagagaccgagtgagccgtgggctgagcctgggaggccgggactgagggggaggagggaggcccgggggaagggagggagggagagagggaaggagggaggagggcgggcgagctggagccggcaggcagcgggagcccgagagagccgcgtcgggagtgcggtctccatggcagtgctgggcgcagccggagagagcctgtccagggggctgagccccacccccaaatccctggggcatccagaagattcctgactggtcaagaaccagaggcaaaagagacctggaagtcccagcatggggaccagaaccccccagccagcctcatagttgggaaagtagccagcttgcctgccccatcaattgcagggatgcttaaggaaggccccgcccagtatgaaagctgaggattgcctctgctgaccctcagtctcctcccctgccctctacatctgccctcagctgggtccatcatgcaatgctgagcactggggtgagcctgggggcagcctgcctgctgacagggcgaggattgtggggatcatgggagtgtttgtgagtggggctcctgggtgagacctagcccccacccccacagagctcaagggggtggggggctgaggataggatggctcggggcggggcgggggcagaggaggcctccctgcgctccaacgcattgtcctggctggcctgtgggctcctggcgctgctggccaatgcctggatcatcctcagcatctcggccaagcagcagaagcacaagccactggagctgctgctctgcttcctagcgggcacacacatactcatggcagctgtgcccctcaccacctttgccgtggtgcagctgcgtcgtcaggcttcctccgactatgactggaacgagagtatctgcaaggtcttcgtgtccacctactacaccctggcgctggccacctgcttcacggtcgcctccctctcctaccatcgcatgtggatggtgcgctggcccgtcaactaccgcctcagcaacgccaagaagcaggcactgcatgccgtcatgggcatctggatggtcagcttcatcctctccacactgccctccattggctggcacaacaacggcgagcgctactatgcccgcggctgccagttcatagtctccaagatcggcctcggctttggcgtttgcttcagcctcttgctacttgggggaattgtcatgggtctggtctgtgtggccatcaccttctaccagacactgtgggcccggccccggagggctcggcaggcccggagagtggggggtggtggggggaccaaagcgggtgggccaggggccttgggtacccggccagcttttgaggtaccagccattgtggtggaggatgcccgagggaagcggcggtcctcgctggatggctcggagtctgccaagacatccctgcaggtcaccaacttggtggtgagcttcttctccctcaagtcggactcggcgcccccctggatggtgctggctgtgctgtggtgctccatggcacagacgctgctgctgccctccttcatctggtcctgcgagcgctaccgcgccgacgtgcgcacagtgtgggagcaatgcgtggccatcatgtctgaggaggatggagatgacgatgggggctgtgacgactatgcagagggccgagtttgcaaagttcgctttgatgctaacggagccacaggaccagggagccgggaccccgcccaggtgaagctgctgcctggaaggcacatgctcttccctcctcttgagagagtccactacttacagttgaagaagctggatctggcagctgcggcagcacacaccttctttgtagcaaaccccatgcacctgcagatgcgggaggacatggctaagtacagacgaatgtcgggagttcgg

SEQ ID NO: 380925 - DNA, 2480 bp, Homo sapiens
ggcacgaggcagagaccgagtgagccgtgggctgagcctgggaggccgggactgagggggaggagggaggcccgggggaagggagggagggagagagggaaggagggaggagggcgggcgagctggagccggcaggcagcgggagcccgagagagccgcgtcgggagtgcggtctccatggcagtgctgggcgcagccggagagagcctgtccagggggctgagccccacccccaaatccctggggcatccagaagattcctgactggtcaagaaccagaggcaaaagagacctggaagtcccagcatggggaccagaaccccccagccagcctcatagttgggaaagtagccagcttgcctgccccatcaattgcagggatgcttaaggaaggccccgcccagtatgaaagctgaggattgcctctgctgaccctcagtctcctcccctgccctctacatctgccctcagctgggtccatcatgcaatgctgagcactggggtgagcctgggggcagcctgcctgctgacagggcgaggattgtggggatcatgggagtgtttgtgagtggggctcctgggtgagacctagcccccacccccacagagctcaagggggtggggggctgaggataggatggctcggggcggggcgggggcagaggaggcctccctgcgctccaacgcattgtcctggctggcctgtgggctcctggcgctgctggccaatgcctggatcatcctcagcatctcggccaagcagcagaagcacaagccactggagctgctgctctgcttcctagcgggcacacacatactcatggcagctgtgcccctcaccacctttgccgtggtgcagctgcgtcgtcaggcttcctccgactatgactggaacgagagtatctgcaaggtcttcgtgtccacctactacaccctggcgctggccacctgcttcacggtcgcctccctctcctaccatcgcatgtggatggtgcgctggcccgtcaactaccgcctcagcaacgccaagaagcaggcactgcatgccgtcatgggcatctggatggtcagcttcatcctctccacactgccctccattggctggcacaacaacggcgagcgctactatgcccgcggctgccagttcatagtctccaagatcggcctcggctttggcgtttgcttcagcctcttgctacttgggggaattgtcatgggtctggtctgtgtggccatcaccttctaccagacactgtgggcccggccccggagggctcggcaggcccggagagtggggggtggtggggggaccaaagcgggtgggccaggggccttgggtacccggccagcttttgaggtaccagccattgtggtggaggatgcccgagggaagcggcggtcctcgctggatggctcggagtctgccaagacatccctgcaggtcaccaacttggtcagcgccatcgtctttctctatgactcactcacaggggtgcccatcttggtggtgagcttcttctccctcaagtcggactcggcgcccccctggatggtgctggctgtgctgtggtgctccatggcacagacgctgctgctgccctccttcatctggtcctgcgagcgctaccgcgccgacgtgcgcacagtgtgggagcaatgcgtggccatcatgtctgaggaggatggagatgacgatgggggctgtgacgactatgcagagggccgagtttgcaaagttcgctttgatgctaacggagccacaggaccagggagccgggaccccgcccaggtgaagctgctgcctggaaggcacatgctcttccctcctcttgagagagtccactacttacaggtccccctatcccggcgtctgtcccatgatgagacaaacatcttctctacccctcgggaaccaggctccttcctgcacaagtggtcatcctctgatgacatccgggtcctcccagcccagagccgggccctcgggggtcctcctgagtacctgggacaaagacacaggttggaggacgaggaggacgaggaagaggctgaaggtggggggctggccagccttcgccaattcttggagagtggggttctggggtcaggtgggggacccccacggggtcctggcttcttccgggaggagatcaccaccttcatcgatgagacacctctgccttctccgactgcctcaccagggcactctcctcgtcggccccggccactgggcctctcaccccgccgactctcccttgggtcccctgagagcagagccgttggacttcctttgggactaagcgcagggagacgctgctccctgacggggggtgaagaaagtgcaagggcttggggaggatcctggggcccaggcaaccccatctttccccagctgaccctgtgagcccaagcaggcctgctgaatcagcttccatcacccctagcaatatgtattaaagtctgaagtgttgccatggaaa

SEQ ID NO: 380926 - DNA, 2376 bp, Homo sapiens
ggcacgaggcagagaccgagtgagccgtgggctgagcctgggaggccgggactgagggggaggagggaggcccgggggaagggagggagggagagagggaaggagggaggagggcgggcgagctggagccggcaggcagcgggagcccgagagagccgcgtcgggagtgcggtctccatggcagtgctgggcgcagccggagagagcctgtccagggggctgagccccacccccaaatccctggggcatccagaagattcctgactggtcaagaaccagaggcaaaagagacctggaagtcccagcatggggaccagaaccccccagccagcctcatagttgggaaagtagccagcttgcctgccccatcaattgcagggatgcttaaggaaggccccgcccagtatgaaagctgaggattgcctctgctgaccctcagtctcctcccctgccctctacatctgccctcagctgggtccatcatgcaatgctgagcactgggcatctcggccaagcagcagaagcacaagccactggagctgctgctctgcttcctagcgggcacacacatactcatggcagctgtgcccctcaccacctttgccgtggtgcagctgcgtcgtcaggcttcctccgactatgactggaacgagagtatctgcaaggtcttcgtgtccacctactacaccctggcgctggccacctgcttcacggtcgcctccctctcctaccatcgcatgtggatggtgcgctggcccgtcaactaccgcctcagcaacgccaagaagcaggcactgcatgccgtcatgggcatctggatggtcagcttcatcctctccacactgccctccattggctggcacaacaacggcgagcgctactatgcccgcggctgccagttcatagtctccaagatcggcctcggctttggcgtttgcttcagcctcttgctacttgggggaattgtcatgggtctggtctgtgtggccatcaccttctaccagacactgtgggcccggccccggagggctcggcaggcccggagagtggggggtggtggggggaccaaagcgggtgggccaggggccttgggtacccggccagcttttgaggtaccagccattgtggtggaggatgcccgagggaagcggcggtcctcgctggatggctcggagtctgccaagacatccctgcaggtcaccaacttggtcagcgccatcgtctttctctatgactcactcacaggggtgcccatcttggtggtgagcttcttctccctcaagtcggactcggcgcccccctggatggtgctggctgtgctgtggtgctccatggcacagacgctgctgctgccctccttcatctggtcctgcgagcgctaccgcgccgacgtgcgcacagtgtgggagcaatgcgtggccatcatgtctgaggaggatggagatgacgatgggggctgtgacgactatgcagagggccgagtttgcaaagttcgctttgatgctaacggagccacaggaccagggagccgggaccccgcccaggtgaagctgctgcctggaaggcacatgctcttccctcctcttgagagagtccactacttacaggtccccctatcccggcgtctgtcccatgatgagacaaacatcttctctacccctcgggaaccaggctccttcctgcacaagtggtcatcctctgatgacatccgggtcctcccagcccagagccgggccctcgggggtcctcctgagtacctgggacaaagacacaggttggaggacgaggaggacgaggaagaggctgaaggtggggggctggccagccttcgccaattcttggagagtggggttctggggtcaggtgggggacccccacggggtcctggcttcttccgggaggagatcaccaccttcatcgatgagacacctctgccttctccgactgcctcaccagggcactctcctcgtcggccccggccactgggcctctcaccccgccgactctcccttgggtcccctgagagcagagccgttggacttcctttgggactaagcgcagggagacgctgctccctgacggggggtgaagaaagtgcaagggcttggggaggatcctggggcccaggcaaccccatctttccccagctgaccctgtgagcccaagcaggcctgctgaactcagaggagaaagcctgagtgagtaacacctcattctggccgagagtagggcagctgcctccagactctggggagacgggcgctagatttggggctcagaaggccctgctctctcccatccaagtgaccagatgccctactcagcttccatcacccctagcaatatgtattaaagtctgaagtgttgccatggaaa

SEQ ID NO: 380927 - DNA, 341 bp, Homo sapiens
aatgggaactaaaggggtctctgggagcttataaaggcagtggtgggaggccgcggtaggcattccctacctgtaaccactctgcccattttctctcctagatgggggctgtgacgactatgcagagggccgagtttgcaaagttcgctttgatgctaacggagccacaggaccagggagccgggaccccgcccaggtgaagctgctgcctggaaggcacatgctcttccctcctcttgagagagtccactacttacaggtatggaactgggggatacatctcctacccttggtgccgctcatcacttttctccagtgtctgttaggcaccccaatcccct

SEQ ID NO: 380928 - DNA, 1619 bp, Homo sapiens
ggcacgaggcagagaccgagtgagccgtgggctgagcctgggaggccgggactgagggggaggagggaggcccgggggaagggagggagggagagagggaaggagggaggagggcgggcgagctggagccggcaggcagcgggagcccgagagagccgcgtcgggagtgcggtctccatggcagtgctgggcgcagccggagagagcctgtccagggggctgagccccacccccaaatccctggggcatccagaagattcctgactggtcaagaaccagaggcaaaagagacctggaagtcccagcatggggaccagaaccccccagccagcctcatagttgggaaagtagccagcttgcctgccccatcaattgcagggatgcttaaggaaggccccgcccagtatgaaagctgaggattgcctctgctgaccctcagtctcctcccctgccctctacatctgccctcagctgggtccatcatgcaatgctgagcactggggtggtgagcttcttctccctcaagtcggactcggcgcccccctggatggtgctggctgtgctgtggtgctccatggcacagacgctgctgctgccctccttcatctggtcctgcgagcgctaccgcgccgacgtgcgcacagtgtgggagcaatgcgtggccatcatgtctgaggaggatggagatgacgatgggggctgtgacgactatgcagagggccgagtttgcaaagttcgctttgatgctaacggagccacaggaccagggagccgggaccccgcccaggtgaagctgctgcctggaaggcacatgctcttccctcctcttgagagagtccactacttacaggtccccctatcccggcgtctgtcccatgatgagacaaacatcttctctacccctcgggaaccaggctccttcctgcacaagtggtcatcctctgatgacatccgggtcctcccagcccagagccgggccctcgggggtcctcctgagtacctgggacaaagacacaggttggaggacgaggaggacgaggaagaggctgaaggtggggggctggccagccttcgccaattcttggagagtggggttctggggtcaggtgggggacccccacggggtcctggcttcttccgggaggagatcaccaccttcatcgatgagacacctctgccttctccgactgcctcaccagggcactctcctcgtcggccccggccactgggcctctcaccccgccgactctcccttgggtcccctgagagcagagccgttggacttcctttgggactaagcgcagggagacgctgctccctgacggggggtgaagaaagtgcaagggcttggggaggatcctggggcccaggcaaccccatctttccccagctgaccctgtgagcccaagcaggcctgctgaactcagaggagaaagcctgagtgagtaacacctcattctggccgagagtagggcagctgcctccagactctggggagacgggcgctagatttggggctcagaaggccctgctctctcccatccaagtgaccagatgccctactcagcttccatcacccctagcaatatgtattaaagtctgaagtgttgccatggaaa

SEQ ID NO: 380929 - DNA, 1191 bp, Homo sapiens
tccgtcatctctcctccagttccatcatccatcttcctctcctctgtccatcccccactccatttgtggcccccatcttgatcatctgtcttttagttcccactaccctgtttaccccagctccagcatctgcttcagttcccactcctcagctccatcaccgtccttcagttccacgacctgtcctccagctccgtcatccatcctgcagctccacggttcagccgcagacctctcatccagccgctgggctccactctccattccctccttccctctggctgccacatggtctctgagcactcttggctggaaatcccacagggctcaccccaccaccccatctagtcactgttcctgggttcctgtctgtctctacggttcctggtccacctctgttcctctccctcctgaccgcaggctttgtctccagcactctccccgaccttcctctgagtcagtcccttccctctgttcactccatctccacctccggcttcgcctctgttggagcacagggatcaggcattacttctgacgtcttgcccaccagctgcactaggatatggggttcaggtgggctcctcagctctggccctgacccagcccgctcccacccttccccaggtggtgagcttcttctccctcaagtcggactcggcgcccccctggatggtgctggctgtgctgtggtgctccatggcacagacgctgctgctgccctccttcatctggtcctgcgagcgctaccgcgccgacgtgcgcacagtgtgggagcaatgcgtggccatcatgtctgaggaggatggagatgacggtcagaggaggggctgggctttggctttcctggacatctgtctattcccttttctgccgctccttctcagccagaggatgggctgccctggagtgccccctactggacagaatctgcaccaccctgggctcccctttccctaagcaggcaccctgctgtccactcactgcttcccgcagcactcagggctcccttcactgggcctaggctcccctccagaaacccacactgcccagctctggcactatggggaacctgagcttcccgagagaggccccccagctatagggacggctcttgggggagtgcaggcaattgtttcaataacttcatctatatgtatgaagcactccactcaggatttagcactgaac

SEQ ID NO: 380930 - DNA, 2570 bp, Homo sapiens
ggcacgaggcagagaccgagtgagccgtgggctgagcctgggaggccgggactgagggggaggagggaggcccgggggaagggagggagggagagagggaaggagggaggagggcgggcgagctggagccggcaggcagcgggagcccgagagagccgcgtcgggagtgcggtctccatggcagtgctgggcgcagccggagagagcctgtccagggggctgagccccacccccaaatccctggggcatccagaagattcctgactggtcaagaaccagaggcaaaagagacctggaagtcccagcatggggaccagaaccccccagccagcctcatagttgggaaagtagccagcttgcctgccccatcaattgcagggatgcttaaggaaggccccgcccagtatgaaagctgaggattgcctctgctgaccctcagtctcctcccctgccctctacatctgccctcagctgggtccatcatgcaatgctgagcactggggtgagcctgggggcagcctgcctgctgacagggcgaggattgtggggatcatgggagtgtttgtgagtggggctcctgggtgagacctagcccccacccccacagagctcaagggggtggggggctgaggataggatggctcggggcggggcgggggcagaggaggcctccctgcgctccaacgcattgtcctggctggcctgtgggctcctggcgctgctggccaatgcctggatcatcctcagcatctcggccaagcagcagaagcacaagccactggagctgctgctctgcttcctagcgggcacacacatactcatggcagctgtgcccctcaccacctttgccgtggtgcagctgcgtcgtcaggcttcctccgactatgactggaacgagagtatctgcaaggtcttcgtgtccacctactacaccctggcgctggccacctgcttcacggtcgcctccctctcctaccatcgcatgtggatggtgcgctggcccgtcaactaccgcctcagcaacgccaagaagcaggcactgcatgccgtcatgggcatctggatggtcagcttcatcctctccacactgccctccattggctggcacaacaacggcgagcgctactatgcccgcggctgccagttcatagtctccaagatcggcctcggctttggcgtttgcttcagcctcttgctacttgggggaattgtcatgggtctggtctgtgtggccatcaccttctaccagacactgtgggcccggccccggagggctcggcaggcccggagagtggggggtggtggggggaccaaagcgggtgggccaggggccttgggtacccggccagcttttgaggtaccagccattgtggtggaggatgcccgagggaagcggcggtcctcgctggatggctcggagtctgccaagacatccctgcaggtcaccaacttggtggtgagcttcttctccctcaagtcggactcggcgcccccctggatggtgctggctgtgctgtggtgctccatggcacagacgctgctgctgccctccttcatctggtcctgcgagcgctaccgcgccgacgtgcgcacagtgtgggagcaatgcgtggccatcatgtctgaggaggatggagatgacgatgggggctgtgacgactatgcagagggccgagtttgcaaagttcgctttgatgctaacggagccacaggaccagggagccgggaccccgcccaggtgaagctgctgcctggaaggcacatgctcttccctcctcttgagagagtccactacttacaggtccccctatcccggcgtctgtcccatgatgagacaaacatcttctctacccctcgggaaccaggctccttcctgcacaagtggtcatcctctgatgacatccgggtcctcccagcccagagccgggccctcgggggtcctcctgagtacctgggacaaagacacaggttggaggacgaggaggacgaggaagaggctgaaggtggggggctggccagccttcgccaattcttggagagtggggttctggggtcaggtgggggacccccacggggtcctggcttcttccgggaggagatcaccaccttcatcgatgagacacctctgccttctccgactgcctcaccagggcactctcctcgtcggccccggccactgggcctctcaccccgccgactctcccttgggtcccctgagagcagagccgttggacttcctttgggactaagcgcagggagacgctgctccctgacggggggtgaagaaagtgcaagggcttggggaggatcctggggcccaggcaaccccatctttccccagctgaccctgtgagcccaagcaggcctgctgaactcagaggagaaagcctgagtgagtaacacctcattctggccgagagtagggcagctgcctccagactctggggagacgggcgctagatttggggctcagaaggccctgctctctcccatccaagtgaccagatgccctactcagcttccatcacccctagcaatatgtattaaagtctgaagtgttgccatggaaa

SEQ ID NO: 380931 - DNA, 2650 bp, Homo sapiens
ggcacgaggcagagaccgagtgagccgtgggctgagcctgggaggccgggactgagggggaggagggaggcccgggggaagggagggagggagagagggaaggagggaggagggcgggcgagctggagccggcaggcagcgggagcccgagagagccgcgtcgggagtgcggtctccatggcagtgctgggcgcagccggagagagcctgtccagggggctgagccccacccccaaatccctggggcatccagaagattcctgactggtcaagaaccagaggcaaaagagacctggaagtcccagcatggggaccagaaccccccagccagcctcatagttgggaaagtagccagcttgcctgccccatcaattgcagggatgcttaaggaaggccccgcccagtatgaaagctgaggattgcctctgctgaccctcagtctcctcccctgccctctacatctgccctcagctgggtccatcatgcaatgctgagcactggggtgagcctgggggcagcctgcctgctgacagggcgaggattgtggggatcatgggagtgtttgtgagtggggctcctgggtgagacctagcccccacccccacagagctcaagggggtggggggctgaggataggatggctcggggcggggcgggggcagaggaggcctccctgcgctccaacgcattgtcctggctggcctgtgggctcctggcgctgctggccaatgcctggatcatcctcagcatctcggccaagcagcagaagcacaagccactggagctgctgctctgcttcctagcgggcacacacatactcatggcagctgtgcccctcaccacctttgccgtggtgcagctgcgtcgtcaggcttcctccgactatgactggaacgagagtatctgcaaggtcttcgtgtccacctactacaccctggcgctggccacctgcttcacggtcgcctccctctcctaccatcgcatgtggatggtgcgctggcccgtcaactaccgcctcagcaacgccaagaagcaggcactgcatgccgtcatgggcatctggatggtcagcttcatcctctccacactgccctccattggctggcacaacaacggcgagcgctactatgcccgcggctgccagttcatagtctccaagatcggcctcggctttggcgtttgcttcagcctcttgctacttgggggaattgtcatgggtctggtctgtgtggccatcaccttctaccagacactgtgggcccggccccggagggctcggcaggcccggagagtggggggtggtggggggaccaaagcgggtgggccaggggccttgggtacccggccagcttttgaggtaccagccattgtggtggaggatgcccgagggaagcggcggtcctcgctggatggctcggagtctgccaagacatccctgcaggtcaccaacttggtcagcgccatcgtctttctctatgactcactcacaggggtgcccatcttggtggtgagcttcttctccctcaagtcggactcggcgcccccctggatggtgctggctgtgctgtggtgctccatggcacagacgctgctgctgccctccttcatctggtcctgcgagcgctaccgcgccgacgtgcgcacagtgtgggagcaatgcgtggccatcatgtctgaggaggatggagatgacgatgggggctgtgacgactatgcagagggccgagtttgcaaagttcgctttgatgctaacggagccacaggaccagggagccgggaccccgcccaggtgaagctgctgcctggaaggcacatgctcttccctcctcttgagagagtccactacttacaggtccccctatcccggcgtctgtcccatgatgagacaaacatcttctctacccctcgggaaccaggctccttcctgcacaagtggtcatcctctgatgacatccgggtcctcccagcccagagccgggccctcgggggtcctcctgagtacctgggacaaagacacaggttggaggacgaggaggacgaggaagaggctgaaggtggggggctggccagccttcgccaattcttggagagtggggttctggggtcaggtgggggacccccacggggtcctggcttcttccgggaggagatcaccaccttcatcgatgagacacctctgccttctccgactgcctcaccagggcactctcctcgtcggccccggccactgggcctctcaccccgccgactctcccttgggtcccctgagagcagagccgttggacttcctttgggactaagcgcagggagacgctgctccctgacggggggtgaagaaagtgcaagggcttggggaggatcctggggcccaggcaaccccatctttccccagctgaccctgtgagcccaagcaggcctgctgaactcagaggagaaagcctgagtgagtaacacctcattctggccgagagtagggcagctgcctccagactctggggagacgggcgctagatttggggctcagaaggccctgctctctcccatccaagtgaccagatgccctactcagcttccatcacccctagcaatatgtattaaagtctgaagtgttgccatggaaaaaacaaaacaaaacaaaaacaaaaattag

SEQ ID NO: 380932 - DNA, 2068 bp, Homo sapiens
ggcacgaggcagagaccgagtgagccgtgggctgagcctgggaggccgggactgagggggaggagggaggcccgggggaagggagggagggagagagggaaggagggaggagggcgggcgagctggagccggcaggcagcgggagcccgagagagccgcgtcgggagtgcggtctccatggcagtgctgggcgcagccggagagagcctgtccagggggctgagccccacccccaaatccctggggcatccagaagattcctgactggtcaagaaccagaggcaaaagagacctggaagtcccagcatggggaccagaaccccccagccagcctcatagttgggaaagtagccagcttgcctgccccatcaattgcagggatgcttaaggaaggccccgcccagtatgaaagctgaggattgcctctgctgaccctcagtctcctcccctgccctctacatctgccctcagctgggtccatcatgcaatgctgagcactggggtgagcctgggggcagcctgcctgctgacagggcgaggattgtggggatcatgggagtgtttgtgagtggggctcctgggtgagacctagcccccacccccacagagctcaagggggtggggggctgaggataggatggctcggggcggggcgggggcagaggaggcctccctgcgctccaacgcattgtcctggctggcctgtgggctcctggcgctgctggccaatgcctggatcatcctcagcatctcggccaagcagcagaagcacaagccactggagctgctgctctgcttcctagcgggcacacacatactcatggcagctgtgcccctcaccacctttgccgtggtgcagctgcgtcgtcaggcttcctccgactatgactggaacgagagtatctgcaaggtcttcgtgtccacctactacaccctggcgctggccacctgcttcacggtcgcctccctctcctaccatcgcatgtggatggtgcgctggcccgtcaactaccgcctcagcaacgccaagaagcaggcactgcatgccgtcatgggcatctggatggtcagcttcatcctctccacactgccctccattggctggcacaacaacggcgagcgctactatgcccgcggctgccagttcatagtctccaagatcggcctcggctttggcgtttgcttcagcctcttgctacttgggggaattgtcatgggtctggtctgtgtggccatcaccttctaccagacactgtgggcccggccccggagggctcggcaggcccggagagtggggggtggtggggggaccaaagcgggtgggccaggggccttgggtacccggccagcttttgaggtaccagccattgtggtggaggatgcccgagggaagcggcggtcctcgctggatggctcggagtctgccaagacatccctgcaggtcaccaacttggtcagcgccatcgtctttctctatgactcactcacaggggtgcccatcttggtggtgagcttcttctccctcaagtcggactcggcgcccccctggatggtgctggctgtgctgtggtgctccatggcacagacgctgctgctgccctccttcatctggtcctgcgagcgctaccgcgccgacgtgcgcacagtgtgggagcaatgcgtggccatcatgtctgaggaggatggagatgacggtcagaggaggggctgggctttggctttcctggacatctgtctattcccttttctgccgctccttctcagccagaggatgggctgccctggagtgccccctactggacagaatctgcaccaccctgggctcccctttccctaagcaggcaccctgctgtccactcactgcttcccgcagcactcagggctcccttcactgggcctaggctcccctccagaaacccacactgcccagctctggcactatggggaacctgagcttcccgagagaggccccccagctatagggacggctcttgggggagtgcaggcaattgtttcaataacttcatctatatgtatgaagcactccactcaggatttagcactgaac

SEQ ID NO: 380933 - DNA, 1744 bp, Homo sapiens
tccgtcatctctcctccagttccatcatccatcttcctctcctctgtccatcccccactccatttgtggcccccatcttgatcatctgtcttttagttcccactaccctgtttaccccagctccagcatctgcttcagttcccactcctcagctccatcaccgtccttcagttccacgacctgtcctccagctccgtcatccatcctgcagctccacggttcagccgcagacctctcatccagccgctgggctccactctccattccctccttccctctggctgccacatggtctctgagcactcttggctggaaatcccacagggctcaccccaccaccccatctagtcactgttcctgggttcctgtctgtctctacggttcctggtccacctctgttcctctccctcctgaccgcaggctttgtctccagcactctccccgaccttcctctgagtcagtcccttccctctgttcactccatctccacctccggcttcgcctctgttggagcacagggatcaggcattacttctgacgtcttgcccaccagctgcactaggatatggggttcaggtgggctcctcagctctggccctgacccagcccgctcccacccttccccaggtggtgagcttcttctccctcaagtcggactcggcgcccccctggatggtgctggctgtgctgtggtgctccatggcacagacgctgctgctgccctccttcatctggtcctgcgagcgctaccgcgccgacgtgcgcacagtgtgggagcaatgcgtggccatcatgtctgaggaggatggagatgacgatgggggctgtgacgactatgcagagggccgagtttgcaaagttcgctttgatgctaacggagccacaggaccagggagccgggaccccgcccaggtgaagctgctgcctggaaggcacatgctcttccctcctcttgagagagtccactacttacaggtccccctatcccggcgtctgtcccatgatgagacaaacatcttctctacccctcgggaaccaggctccttcctgcacaagtggtcatcctctgatgacatccgggtcctcccagcccagagccgggccctcgggggtcctcctgagtacctgggacaaagacacaggttggaggacgaggaggacgaggaagaggctgaaggtggggggctggccagccttcgccaattcttggagagtggggttctggggtcaggtgggggacccccacggggtcctggcttcttccgggaggagatcaccaccttcatcgatgagacacctctgccttctccgactgcctcaccagggcactctcctcgtcggccccggccactgggcctctcaccccgccgactctcccttgggtcccctgagagcagagccgttggacttcctttgggactaagcgcagggagacgctgctccctgacggggggtgaagaaagtgcaagggcttggggaggatcctggggcccaggcaaccccatctttccccagctgaccctgtgagcccaagcaggcctgctgaactcagaggagaaagcctgagtgagtaacacctcattctggccgagagtagggcagctgcctccagactctggggagacgggcgctagatttggggctcagaaggccctgctctctcccatccaagtgaccagatgccctactcagcttccatcacccctagcaatatgtattaaagtctgaagtgttgccatggaaa

SEQ ID NO: 380934 - DNA, 494 bp, Homo sapiens
agaccaaatacacctttaggcaacagccattaacatataaaaggaggaaaagataatcagtttctagtcatgtttcttatatctgctgcattagagaaaacagctgagttattcaatctcaccatgaattaaaacattagcaaagtgagttttttggtgtgagttctcagtttttcaatagcaagatggtgataatggcttattgggggacctctgaaatggaaaaagtagagaataagagtaggaagttgtgttaaggctgtttttacatctcttctttctgttttaagtttgctgggccagaaaaactaagttttataatagctcaaaatatgttaaatcaggcactggctcaggagacagataattggagtatgtaggtaatatgggaaaccagagagcacctgccctatttgcaggcatgaaattcaatttatactaccacaacaacactaagcaccaatcccgacatgtctagaggcaccaatttgggt

SEQ ID NO: 380935 - DNA, 421 bp, Homo sapiens
taattttgagatggagtttcactcttgtcacccaggctggagtgcaatggcgcaatcttggctcactgcaacctccacctcccgggttcaagcaattctcctgcctcagcctcccaagaagctggcacccaccaccacgcccagctggcccgattgatttttaatagttaaaccaactttgcattcttggaataagttcatcctggccataacatatttatcgtttttaaatattactggattgagctggcaaatattttaagatctttgcatttgtgttcatgtgtaaaattggccaaatccttgtcacatttgtgtatcaagattatgctgatttctggccaggcgtggtggatcacgcctgtaattccagcactttgggaggccgagggggtcggattatgaggtcaggagatggaga

SEQ ID NO: 380936 - DNA, 370 bp, Homo sapiens
aaacgttttcaccacaaagaaataaatatttgaggtgatggttaagctaattggcctgatttgatcattccgtgatgtaaacatgtatccaagtatccaaaccatcacattgtacctcatgaatatatacaattattatttgtaaattaaaaataaagtaaaactcaaaaaaagacaaagagagctctcaagcagaggaatagaaaacacagctaagagtgtgacacttgggtaggctgaggggctataggtgaggcactgacaacacctgctgccttgtccttggtattaaagggtgttcatgtcaacctggaagaaggtggtgaggttaggatggaaggtgtggccctacatttgcacctggtggaca

SEQ ID NO: 380937 - DNA, 565 bp, Homo sapiens
cagcgatagagattcaggaagtgaaagatggaaataaaagccagaaagtagtagtaggagtggtaacagaagtggtactagaacgtaagagttccagaggggatgtgtaagagcatagtcctgcaattacataaaggattgagagcaaacccagtcctctgtaattttagtccattattccattaacagagttttaatgatgattctaccaaatataataaattaaaaaccagtggaaatatctgaaatcctgcagagcctccacgtgtggtcgtgcagtgtgtgcactgcacagagtgacccagccaagggcacaggagatggaggcagaaatcctccaagtcttaccactctgcaactgcatctccatgcaggaggactcccttttctaatttgaatacaactttctcataggctattggaagccctgcgaatggaaggagaggaactagagtcagtatagaaaagtttttagaaataaggctgagggtgaagagtgatgtgtccataagggtgtgagaagtctgtcttttaaggtaagagctacttgggcatctatggaaaa

SEQ ID NO: 380938 - DNA, 362 bp, Homo sapiens
cataataaaatactagaaaaaatgagatattttctccctcatcttttcccggttcacattccaattcttgatgaaaatattgacattctttatagttcttaccaatgaacatttaaaaaatggctacatccaagggtgaaacaaatgcgttttcatcaatagagaaacatatgttcagcccttaggtagtgcctgtggaaaacatttaatattgcggggcttcttgtcatttctcaatagttgtcagattgtcaactccacatcccaggtgctcagcaaactgtaatttccagagctctctggcagagggcatatagatctatccagctgacctcacgtaaatattgtagaaatctgtcttc

SEQ ID NO: 380939 - DNA, 185 bp, Homo sapiens
gaacaccccgcttcacaggagcttagagaagggtgaaaagataaggcacattcagcagagaagcacccaaggaggcagtgtggtactgaggccctgctgctaagcactggcatttggacagctagacaggaagaaagggctctgctgtgccataggcctgtggggtgactacagttaacagtact

SEQ ID NO: 380940 - DNA, 293 bp, Homo sapiens
ctatttttgtatttccacttaggattctgagagaacattaaaagtgtatttctgtacatttcagatcgatcccttgaaaacgtacattcaccagaggtcctaactaaaataagtagataggtgagtttgaaaatgaatgttgatatcttcagagatacagaaaccttggtaacatacacaataaaggtcttagacaataggaacaagtcaaatggtaataaaaccaatacatgaatgagtaaagatatgtgagaaaaattagcctacgtaatacactataaggctaaaagaat

SEQ ID NO: 380941 - DNA, 2688 bp, Homo sapiens
agcggggaggcctcgctgactgacttccggtgttggcggtggcgccgcgcagtcaccgcggagcagacgcggaggctggtggcccctgggcgagatgccgtacgccaaccagcctaccgtgcggatcacggagctcactgacgagaatgtcaagttcatcatcgagaacaccgacctggcggtggccaattcgattcggagggtcttcatcgctgaggttcccataatagccattgactgggttcagattgatgccaattcctcagtccttcatgatgaattcattgctcacaggcttggattaattcccctcattagtgatgacattgtggacaagctgcagtactctcgggactgcacatgtgaggagttctgccccgagtgctcggtggagttcaccctcgatgtgcggtgcaatgaagaccagacgcgacatgtcacgtctcgagacctcatctccaacagcccccgggtcattccggtgacatcccggaaccgagataatgaccccaatgactacgtggagcaggatgacatcctcatcgtcaagttgagaaagggccaggagctgagacttcgagcctatgccaaaaagggctttggcaaggagcatgccaagtggaaccctactgcaggggtggcttttgaatacgatccagacaatgccctgaggcacacagtgtaccccaagcccgaggaatggccaaagagtgagtactcggagctggatgaggatgagtcgcaggctccctatgaccccaacggcaagccagaaaggttttactacaatgtggagtcctgtggctctctgcgtcctgaaaccattgtcctgtcagccctctcaggattgaagaagaaactgagtgatttacaaactcaattaagccacgagatccagagtgatgtgctaaccataaattaactgcagcttgcctgcttcagcaaaaacggagattcaggccagcagctggatatgggggtctctcttcagactcttctcgtttctgagaatctagtctactgttggttgagcttcttggcaggacatcagtaccaactagaagtgggtcatagatagattaccagggatgcagtggtgtttaggcaggataggtctttactggccctgactgctgttaataattggcagcagtgctccccagatcccagaaggtccctgctggagtgtttccagtgcacctgtagggaaccaactagacttctctcctggttagtccagctctttactctaaaccctttctgtccaaaatgagtcattttcagttgtaccttagatgtctggtgttgaggatcaagtgccatagcctttattcagggggcctataaacccttccagttcttgccccagggctggcctgctagcgcttcaaattcccaggtgtccctaatttgagaagtaaccttttggaataccgcaggagcaagggcccctcccacatacacaggaggagtatttcatttctccttaatgaaggctctggccctaacccctcagcactgtctccagataggaacatgcacaaagcagttaattaggcagcctggagaaaaccagagatccagtacagaaaggaaaggatatttattgattaacagaagttgtctttttaaaagtgtttatttttggcaataaagagcacaacataatctccttcatgcgtcatcgtgccacttagctgagccagccagctctgcctccctccccaaagacctttggaccccagttcccctctacaggctagctcatccctctgggtggtcattccccgggtcacgttgagagcgaggctgactgcaccacctccctagctcaagggctcctttgggaggggccgcgtgctttatcatcctcctgccacaactcaaatagtggttatttacaagaaggtctgttcccacaaatcaggaccctaaagtattaaaaaacaaaacccaaaaaacaacaaaaaaccccacacaaccaaaagtttgacgtgaatagaaagatagcccttctgcatggtagtcaacaaataccagcactagaaaatcaattgctttaattgcattgcagcagggagcctcagcaccatgtggggaggaggaaatgggaaggtcttggtttcagagtgcttttggctggccagagggtggccaaacagggcaagggggctccctctgcttgggcattgtccacccctggtcagtgagaggggggcagcaggggtgctccccacggcagtcctgctgcggccttccctcctggcctattcctggggcaggaacaagctccagccttcctccacatggctgaggtaatcagcacccctaccccaggggcatcttcccagcctacaaagcaggaaggagcctgtgcagaagttacattttaaaaccagattttcacctgaggcgtcaaccagatgtcacctctgcttaaaactccaactgcaaggctggcaagcagcacagaggaagtgcagatccttcctgtgtcactccaggcccagaggaactgagaagccacctgctgttccggcccttgggctgtttgggaaaagccagcagtcagagtgccagcctcaagctctgattatccccctcctgtggccctggtagttcaagcaggtcctggcagcaggagggctgtgccatggaggatggatacgactgcactcatactcaaaa

SEQ ID NO: 380942 - DNA, 356 bp, Homo sapiens
aatttccagaaaaaaagggtaagcttttgttgtggaaattgaagccttcagttataagagtatggacatttattttaataagtatttgtcaagtattttgtttcggtgtggaagcagccgcaggagcaagggcccctcccacatacacaggaggagtatttcatttctccttaatgaaggctctggccctaacccctcagcactgtctccagataggaacatgcacaaagcagttaattaggcagcctggagaaaaccagagatccagtacagaaaggaaaggatatttattgattaacagaagttgtctttttaaaagtgtttatttttggcaataaagagcacaacataatctc

SEQ ID NO: 380943 - DNA, 2828 bp, Homo sapiens
agcggggaggcctcgctgactgacttccggtgttggcggtggcgccgcgcagtcaccgcggagcagacgcggaggctggtggcccctgggcgagatgccgtacgccaaccagcctaccgtgcggatcacggagctcactgacgagaatgtcaagttcatcatcgagaacaccgacctggcggtggccaattcgattcggagggtcttcatcgctgaggttcccataatagccattgactgggttcagattgatgccaattcctcagtccttcatgatgaattcattgctcacaggcttggattaattcccctcattagtgatgacattgtggacaagctgcagtactctcgggactgcacatgtgaggagttctgccccgagtgctcggtggagttcaccctcgatgtgcggtgcaatgaagaccagacgcgacatgtcacgtctcgagacctcatctccaacagcccccgggtcattccggtgacatcccggaaccgagataatgaccccaatgactacgtggagcaggatgacatcctcatcgtcaagttgagaaagggccaggagctgagacttcgagcctatgccaaaaagggctttggcaaggagcatgccaagtggaaccctactgcaggggtggcttttgaatacgatccagacaatgccctgaggcacacagtgtaccccaagcccgaggaatggccaaagagtgagtactcggagctggatgaggatgagtcgcaggctccctatgaccccaacggcaagccagaaaggttttactacaatgtggagtcctgtggctctctgcgtcctgaaaccattgtcctgtcagccctctcaggattgaagaagaaactgagtgatttacaaactcaattaagccacgagatccagagtgatgtgctaaccataaattaactgcagcttgcctgcttcagcaaaaacggagattcaggccagcagctggatatgggggtctctcttcagactcttctcgtttctgagaatctagtctactgttggttgagcttcttggcaggacatcagtaccaactagaagtgggtcatagatagattaccagggatgcagtggtgtttaggcaggataggtctttactggccctgactgctgttaataattggcagcagtgctccccagatcccagaaggtccctgctggagtgtttccagtgcacctgtagggaaccaactagacttctctcctggttagtccagctctttactctaaaccctttctgtccaaaatgagtcattttcagttgtaccttagatgtctggtgttgaggatcaagtgccatagcctttattcagggggcctataaacccttccagttcttgccccagggctggcctgctagcgcttcaaattcccaggtgtccctaatttgagaagtaaccttttggaatagcattagaccctggctgtcccctccccaccaaataaacatgatatttcattctctgtccagcagtcatgaaccccttcacctccaatgacctgatcatttagtttggtgggggtgggggtgggggtgggggtggaagcagccgcaggagcaagggcccctcccacatacacaggaggagtatttcatttctccttaatgaaggctctggccctaacccctcagcactgtctccagataggaacatgcacaaagcagttaattaggcagcctggagaaaaccagagatccagtacagaaaggaaaggatatttattgattaacagaagttgtctttttaaaagtgtttatttttggcaataaagagcacaacataatctccttcatgcgtcatcgtgccacttagctgagccagccagctctgcctccctccccaaagacctttggaccccagttcccctctacaggctagctcatccctctgggtggtcattccccgggtcacgttgagagcgaggctgactgcaccacctccctagctcaagggctcctttgggaggggccgcgtgctttatcatcctcctgccacaactcaaatagtggttatttacaagaaggtctgttcccacaaatcaggaccctaaagtattaaaaaacaaaacccaaaaaacaacaaaaaaccccacacaaccaaaagtttgacgtgaatagaaagatagcccttctgcatggtagtcaacaaataccagcactagaaaatcaattgctttaattgcattgcagcagggagcctcagcaccatgtggggaggaggaaatgggaaggtcttggtttcagagtgcttttggctggccagagggtggccaaacagggcaagggggctccctctgcttgggcattgtccacccctggtcagtgagaggggggcagcaggggtgctccccacggcagtcctgctgcggccttccctcctggcctattcctggggcaggaacaagctccagccttcctccacatggctgaggtaatcagcacccctaccccaggggcatcttcccagcctacaaagcaggaaggagcctgtgcagaagttacattttaaaaccagattttcacctgaggcgtcaaccagatgtcacctctgcttaaaactccaactgcaaggctggcaagcagcacagaggaagtgcagatccttcctgtgtcactccaggcccagaggaactgagaagccacctgctgttccggcccttgggctgtttgggaaaagccagcagtcagagtgccagcctcaagctctgattatccccctcctgtggccctggtagttcaagcaggtcctggcagcaggagggctgtgccatggaggatggatacgactgcactcatactcaaaa

SEQ ID NO: 380944 - DNA, 1785 bp, Homo sapiens
  misc_feature (16)..(16): n is a, c, g, or t
  misc_feature (27)..(27): n is a, c, g, or t
aaattaggctaggtangaggctggtgntgcgcggagcagacgcggaggctggtggcccctgggcgagatgccgtacgccaaccagcctaccgtgcggatcacggagctcactgacgagaatgtcaagttcatcatcgagaacaccgacctggcggtggccaattcgattcggagggtcttcatcgctgaggttcccataatagccattgactgggttcagattgatgccaattcctcagtccttcatgatgaattcattgctcacaggcttggattaattcccctcattagtgatgacattgtggacaagctgcagtactctcgggactgcacatgtgaggagttctgccccgagtgctcggtggagttcaccctcgatgtgcggtgcaatgaagaccagacgcgacatgtcacgtctcgagacctcatctccaacagcccccgggtcattccggtgacatcccggaaccgagataatgaccccaatgactacgtggagcaggatgacatcctcatcgtcaagttgagaaagggccaggagctgagacttcgagcctatgccaaaaagggctttggcaaggagcatgccaagtggaaccctactgcaggggtggcttttgaatacgatccagacaatgccctgaggcacacagtgtaccccaagcccgaggaatggccaaagagtgagtactcggagctggatgaggatgagtcgcaggctccctatgaccccaacggcaagccagaaaggttttactacaatgtggagtcctgtggctctctgcgtcctgaaaccattgtcctgtcagccctctcaggattgaagaagaaactgagtgatttacaaactcaattaagccacgagatccagagtgatgtgctaaccataaattaactgcagcttgcctgcttcagcaaaaacggagattcaggccagcagctggatatgggggtctctcttcagactcttctcgtttctgagaatctagtctactgttggttgagcttcttggcaggacatcagtaccaactagaagtgggtcatagatagattaccagggatgcagtggtgtttaggcaggataggtctttactggccctgactgctgttaataattggcagcagtgctccccagatcccagaaggtccctgctggagtgtttccagtgcacctgtagggaaccaactagacttctctcctggttagtccagctctttactctaaaccctttctgtccaaaatgagtcattttcagttgtaccttagatgtctggtgttgaggatcaagtgccatagcctttattcagggggcctataaacccttccagttcttgccccagggctggcctgctagcgcttcaaattcccaggtgtccctaatttgagaagtaaccttttggaatagcattagaccctggctgtcccctccccaccaaataaacatgatatttcattctctgtccagcagtcatgaaccccttcacctccaatgacctgatcatttagtttggtgggggtgggggtgggggtgggggtggaagcagccgcaggagcaagggcccctcccacatacacaggaggagtatttcatttctccttaatgaaggctctggccctaacccctcagcactgtctccagataggaacatgcacaaagcagttaattaggcagcctggagaaaaccagagatccagtacagaaaggaaaggatatttattgattaacagaagttgtctttttaaaagtgtttatttttggcaataaagagcacaacataatctc

SEQ ID NO: 380945 - DNA, 2490 bp, Homo sapiens
agcggggaggcctcgctgactgacttccggtgttggcggtggcgccgcgcagtcaccgcggagcagacgcggaggctggtggcccctgggcgagatgccgtacgccaaccagcctaccgtgcggatcacggagctcactgacgagaatgtcaagttcatcatcgagaacaccgacctggcggtggccaattcgattcggagggtcttcatcgctgaggttcccataatagccattgactgggttcagattgatgccaattcctcagtccttcatgatgaattcattgctcacaggcttggattaattcccctcattagtgatgacattgtggacaagctgcagtactctcgggactgcacatgtgaggagttctgccccgagtgctcggtggagttcaccctcgatgtgcggtgcaatgaagaccagacgcgacatgtcacgtctcgagacctcatctccaacagcccccgggtcattccggtgacatcccggaaccgagataatgaccccaatgactacgtggagcaggatgacatcctcatcgtcaagttgagaaagggccaggagctgagacttcgagcctatgccaaaaagggctttggcaaggagcatgccaagtggaaccctactgcaggggtggcttttgaatacgatccagacaatgccctgaggcacacagtgtaccccaagcccgaggaatggccaaagagtgagtactcggagctggatgaggatgagtcgcaggctccctatgaccccaacggcaagccagaaaggttttactacaatgtggagtcctgtggctctctgcgtcctgaaaccattgtcctgtcagccctctcaggattgaagaagaaactgagtgatttacaaactcaattaagccacgagatccagagtgatgtgctaaccataaattaactgcagcttgcctgcttcagcaaaaacggagattcaggccagcagctggatatgggggtctctcttcagactcttctcgtttctgagaatctagtctactgttggttgagcttcttggcaggacatcagtaccaactagaagtgggtcatagatagattaccagggatgcagtggtgtttaggcaggataggtctttactggccctgactgctgttaataattggcagcagtgctccccagatcccagaaggtccctgctggagtgtttccagtgcacctgtagggaaccaactagacttctctcctggttagtccagctctttactctaaaccctttctgtccaaaatgagtcattttcagttgtaccttagatgctctggccctaacccctcagcactgtctccagataggaacatgcacaaagcagttaattaggcagcctggagaaaaccagagatccagtacagaaaggaaaggatatttattgattaacagaagttgtctttttaaaagtgtttatttttggcaataaagagcacaacataatctccttcatgcgtcatcgtgccacttagctgagccagccagctctgcctccctccccaaagacctttggaccccagttcccctctacaggctagctcatccctctgggtggtcattccccgggtcacgttgagagcgaggctgactgcaccacctccctagctcaagggctcctttgggaggggccgcgtgctttatcatcctcctgccacaactcaaatagtggttatttacaagaaggtctgttcccacaaatcaggaccctaaagtattaaaaaacaaaacccaaaaaacaacaaaaaaccccacacaaccaaaagtttgacgtgaatagaaagatagcccttctgcatggtagtcaacaaataccagcactagaaaatcaattgctttaattgcattgcagcagggagcctcagcaccatgtggggaggaggaaatgggaaggtcttggtttcagagtgcttttggctggccagagggtggccaaacagggcaagggggctccctctgcttgggcattgtccacccctggtcagtgagaggggggcagcaggggtgctccccacggcagtcctgctgcggccttccctcctggcctattcctggggcaggaacaagctccagccttcctccacatggctgaggtaatcagcacccctaccccaggggcatcttcccagcctacaaagcaggaaggagcctgtgcagaagttacattttaaaaccagattttcacctgaggcgtcaaccagatgtcacctctgcttaaaactccaactgcaaggctggcaagcagcacagaggaagtgcagatccttcctgtgtcactccaggcccagaggaactgagaagccacctgctgttccggcccttgggctgtttgggaaaagccagcagtcagagtgccagcctcaagctctgattatccccctcctgtggccctggtagttcaagcaggtcctggcagcaggagggctgtgccatggaggatggatacgactgcactcatactcaaaa

SEQ ID NO: 380946 - DNA, 1766 bp, Homo sapiens
  misc_feature (16)..(16): n is a, c, g, or t
  misc_feature (27)..(27): n is a, c, g, or t
aaattaggctaggtangaggctggtgntgcgcggagcagacgcggaggctggtggcccctgggcgagatgccgtgcggatcacggagctcactgacgagaatgtcaagttcatcatcgagaacaccgacctggcggtggccaattcgattcggagggtcttcatcgctgaggttcccataatagccattgactgggttcagattgatgccaattcctcagtccttcatgatgaattcattgctcacaggcttggattaattcccctcattagtgatgacattgtggacaagctgcagtactctcgggactgcacatgtgaggagttctgccccgagtgctcggtggagttcaccctcgatgtgcggtgcaatgaagaccagacgcgacatgtcacgtctcgagacctcatctccaacagcccccgggtcattccggtgacatcccggaaccgagataatgaccccaatgactacgtggagcaggatgacatcctcatcgtcaagttgagaaagggccaggagctgagacttcgagcctatgccaaaaagggctttggcaaggagcatgccaagtggaaccctactgcaggggtggcttttgaatacgatccagacaatgccctgaggcacacagtgtaccccaagcccgaggaatggccaaagagtgagtactcggagctggatgaggatgagtcgcaggctccctatgaccccaacggcaagccagaaaggttttactacaatgtggagtcctgtggctctctgcgtcctgaaaccattgtcctgtcagccctctcaggattgaagaagaaactgagtgatttacaaactcaattaagccacgagatccagagtgatgtgctaaccataaattaactgcagcttgcctgcttcagcaaaaacggagattcaggccagcagctggatatgggggtctctcttcagactcttctcgtttctgagaatctagtctactgttggttgagcttcttggcaggacatcagtaccaactagaagtgggtcatagatagattaccagggatgcagtggtgtttaggcaggataggtctttactggccctgactgctgttaataattggcagcagtgctccccagatcccagaaggtccctgctggagtgtttccagtgcacctgtagggaaccaactagacttctctcctggttagtccagctctttactctaaaccctttctgtccaaaatgagtcattttcagttgtaccttagatgtctggtgttgaggatcaagtgccatagcctttattcagggggcctataaacccttccagttcttgccccagggctggcctgctagcgcttcaaattcccaggtgtccctaatttgagaagtaaccttttggaatagcattagaccctggctgtcccctccccaccaaataaacatgatatttcattctctgtccagcagtcatgaaccccttcacctccaatgacctgatcatttagtttggtgggggtgggggtgggggtgggggtggaagcagccgcaggagcaagggcccctcccacatacacaggaggagtatttcatttctccttaatgaaggctctggccctaacccctcagcactgtctccagataggaacatgcacaaagcagttaattaggcagcctggagaaaaccagagatccagtacagaaaggaaaggatatttattgattaacagaagttgtctttttaaaagtgtttatttttggcaataaagagcacaacataatctc

SEQ ID NO: 380947 - DNA, 1881 bp, Homo sapiens
agcggggaggcctcgctgactgacttccggtgttggcggtggcgccgcgcagtcaccgcggagcagacgcggaggctggtggcccctgggcgagatgccgtacgccaaccagcctaccgtgcggatcacggagctcactgacgagaatgtcaagttcatcatcgagaacaccgacctggcggtggccaattcgattcggagggtcttcatcgctgaggttcccataatagccattgactgggttcagattgatgccaattcctcagtccttcatgatgaattcattgctcacaggcttggattaattcccctcattagtgatgacattgtggacaagctgcagtactctcgggactgcacatgtgaggagttctgccccgagtgctcggtggagttcaccctcgatgtgcggtgcaatgaagaccagacgcgacatgtcacgtctcgagacctcatctccaacagcccccgggtcattccggtgacatcccggaaccgagataatgaccccaatgactacgtggagcaggatgacatcctcatcgtcaagttgagaaagggccaggagctgagacttcgagcctatgccaaaaagggctttggcaaggagcatgccaagtggaaccctactgcaggggtggcttttgaatacgatccagacaatgccctgaggcacacagtgtaccccaagcccgaggaatggctctctaggaacttgggtgccccaaaaggagcagtggcaaccttgtgctgacctgtgtttgacctcaggccaaagagtgagtactcggagctggatgaggatgagtcgcaggctccctatgaccccaacggcaagccagaaaggttttactacaatgtggagtcctgtggctctctgcgtcctgaaaccattgtcctgtcagccctctcaggattgaagaagaaactgagtgatttacaaactcaattaagccacgagatccagagtgatgtgctaaccataaattaactgcagcttgcctgcttcagcaaaaacggagattcaggccagcagctggatatgggggtctctcttcagactcttctcgtttctgagaatctagtctactgttggttgagcttcttggcaggacatcagtaccaactagaagtgggtcatagatagattaccagggatgcagtggtgtttaggcaggataggtctttactggccctgactgctgttaataattggcagcagtgctccccagatcccagaaggtccctgctggagtgtttccagtgcacctgtagggaaccaactagacttctctcctggttagtccagctctttactctaaaccctttctgtccaaaatgagtcattttcagttgtaccttagatgtctggtgttgaggatcaagtgccatagcctttattcagggggcctataaacccttccagttcttgccccagggctggcctgctagcgcttcaaattcccaggtgtccctaatttgagaagtaaccttttggaatagcattagaccctggctgtcccctccccaccaaataaacatgatatttcattctctgtccagcagtcatgaaccccttcacctccaatgacctgatcatttagtttggtgggggtgggggtgggggtgggggtggaagcagccgcaggagcaagggcccctcccacatacacaggaggagtatttcatttctccttaatgaaggctctggccctaacccctcagcactgtctccagataggaacatgcacaaagcagttaattaggcagcctggagaaaaccagagatccagtacagaaaggaaaggatatttattgattaacagaagttgtctttttaaaagtgtttatttttggcaataaagagcacaacataatctc

SEQ ID NO: 380948 - DNA, 2199 bp, Homo sapiens
gtctcgctccctcctagtctctctctgttcggcgccactgcgacttgactgagatgatgttgttgctggttcgctgtccagctcatccgcctccattcgaccccatctctcgccctagccgtctgtcgtcgttggcgcgttaggttcaactttgcatgtgtctagtctctttgccctgtctctgtctgtctggactctcgcttcatcagggatgtgtcgttatgttgtaataccgagacctcggtcctgagtccgttgtgtgctctcttatctcagttcttttcttatcttggtctgcagttctgctgatgtgggcctgttctaacctgtaccgtggttcgtggcgagctgtgtctctcatagtccgcagtagctcttgtagttcggggtcggttgttgtctcacgtgctgcattactggcctggccgcgtggttggttatgtggtatgctggtctcctctgcccgtttcgcttgttgcgttgccttctgcacgttcttttttgatctgtctcgagtgcaacccagccttggcacctcgtcacggtgtgtcttcatgctgatgtagctctgcagccgttgtcctgccaggagatgcagtcaatttcgcacgtggtagcctcacgatgctcctcggctgcctgacggattccagtggtactagcatttaggtgagggggctctatttatggcttacgggttccggtgttaccagggcgtggcagtacatagcggcaatacatgtcgagtgtgttcctgtaagtctgacaaagtaactttttggttaatagcatttagagtcctgtggcttgtcaccgtcgcgcatccatatatcacatgatagtgtcactctcgttccgacgcagtcagtgacaccccttcagcctccaatcacctgctgactttacggttgttggggctgcgccgccggtccggctggaagcagccgcaggagcaagggcccctcccacatacacaggaggagtatttcatttctccttaatgaaggctctggccctaacccctcagcactgtctccagataggaacatgcacaaagcagttaattaggcagcctggagaaaaccagagatccagtacagaaaggaaaggatatttattgattaacagaagttgtctttttaaaagtgtttatttttggcaataaagagcacaacataatctccttcatgcgtcatcgtgccacttagctgagccagccagctctgcctccctccccaaagacctttggaccccagttcccctctacaggctagctcatccctctgggtggtcattccccgggtcacgttgagagcgaggctgactgcaccacctccctagctcaagggctcctttgggaggggccgcgtgctttatcatcctcctgccacaactcaaatagtggttatttacaagaaggtctgttcccacaaatcaggaccctaaagtattaaaaaacaaaacccaaaaaacaacaaaaaaccccacacaaccaaaagtttgacgtgaatagaaagatagcccttctgcatggtagtcaacaaataccagcactagaaaatcaattgctttaattgcattgcagcagggagcctcagcaccatgtggggaggaggaaatgggaaggtcttggtttcagagtgcttttggctggccagagggtggccaaacagggcaagggggctccctctgcttgggcattgtccacccctggtcagtgagaggggggcagcaggggtgctccccacggcagtcctgctgcggccttccctcctggcctattcctggggcaggaacaagctccagccttcctccacatggctgaggtaatcagcacccctaccccaggggcatcttcccagcctacaaagcaggaaggagcctgtgcagaagttacattttaaaaccagattttcacctgaggcgtcaaccagatgtcacctctgcttaaaactccaactgcaaggctggcaagcagcacagaggaagtgcagatccttcctgtgtcactccaggcccagaggaactgagaagccacctgctgttccggcccttgggctgtttgggaaaagccagcagtcagagtgccagcctcaagctctgattatccccctcctgtggccctggtagttcaagcaggtcctggcagcaggagggctgtgccatggaggatggatacgactgcactcatactcaaaa

SEQ ID NO: 380949 - DNA, 1812 bp, Homo sapiens
agcggggaggcctcgctgactgacttccggtgttggcggtggcgccgcgcagtcaccgcggagcagacgcggaggctggtggcccctgggcgagatgccgtacgccaaccagcctaccgtgcggatcacggagctcactgacgagaatgtcaagttcatcatcgagaacaccgacctggcggtggccaattcgattcggagggtcttcatcgctgaggttcccataatagccattgactgggttcagattgatgccaattcctcagtccttcatgatgaattcattgctcacaggcttggattaattcccctcattagtgatgacattgtggacaagctgcagtactctcgggactgcacatgtgaggagttctgccccgagtgctcggtggagttcaccctcgatgtgcggtgcaatgaagaccagacgcgacatgtcacgtctcgagacctcatctccaacagcccccgggtcattccggtgacatcccggaaccgagataatgaccccaatgactacgtggagcaggatgacatcctcatcgtcaagttgagaaagggccaggagctgagacttcgagcctatgccaaaaagggctttggcaaggagcatgccaagtggaaccctactgcaggggtggcttttgaatacgatccagacaatgccctgaggcacacagtgtaccccaagcccgaggaatggccaaagagtgagtactcggagctggatgaggatgagtcgcaggctccctatgaccccaacggcaagccagaaaggttttactacaatgtggagtcctgtggctctctgcgtcctgaaaccattgtcctgtcagccctctcaggattgaagaagaaactgagtgatttacaaactcaattaagccacgagatccagagtgatgtgctaaccataaattaactgcagcttgcctgcttcagcaaaaacggagattcaggccagcagctggatatgggggtctctcttcagactcttctcgtttctgagaatctagtctactgttggttgagcttcttggcaggacatcagtaccaactagaagtgggtcatagatagattaccagggatgcagtggtgtttaggcaggataggtctttactggccctgactgctgttaataattggcagcagtgctccccagatcccagaaggtccctgctggagtgtttccagtgcacctgtagggaaccaactagacttctctcctggttagtccagctctttactctaaaccctttctgtccaaaatgagtcattttcagttgtaccttagatgtctggtgttgaggatcaagtgccatagcctttattcagggggcctataaacccttccagttcttgccccagggctggcctgctagcgcttcaaattcccaggtgtccctaatttgagaagtaaccttttggaatagcattagaccctggctgtcccctccccaccaaataaacatgatatttcattctctgtccagcagtcatgaaccccttcacctccaatgacctgatcatttagtttggtgggggtgggggtgggggtgggggtggaagcagccgcaggagcaagggcccctcccacatacacaggaggagtatttcatttctccttaatgaaggctctggccctaacccctcagcactgtctccagataggaacatgcacaaagcagttaattaggcagcctggagaaaaccagagatccagtacagaaaggaaaggatatttattgattaacagaagttgtctttttaaaagtgtttatttttggcaataaagagcacaacataatctc

SEQ ID NO: 380950 - DNA, 1915 bp, Homo sapiens
agcggggaggcctcgctgactgacttccggtgttggcggtggcgccgcgcagtcaccgcggagcagacgcggaggctggtggcccctgggcgagatgccgtacgccaaccagcctaccgtgcggatcacggagctcactgacgagaatgtcaagttcatcatcgagaacaccgacctggcggtggccaattcgattcggagggtcttcatcgctgaggttcccataatagccattgactgggttcagattgatgccaattcctcagtccttcatgatgaattcattgctcacaggcttggattaattcccctcattagtgatgacattgtggacaagctgcagtactctcgggactgcacatgtgaggagttctgccccgagtgctcggtggagttcaccctcgatgtgcggtgcaatgaagaccagacgcgacatgtcacgtctcgagacctcatctccaacagcccccgggtcattccggtgacatcccggaaccgagataatgaccccaatgactacgtggagcaggatgacatcctcatcgtcaagttgagaaagggccaggagctgagacttcgagcctatgccaaaaagggctttggcaaggagcatgccaagtggaaccctactgcaggggtggcttttgaatacgatccagacaatgccctgaggcacacagtgtaccccaagcccgaggaatggccaaagagtgagtactcggagctggatgaggatgagtcgcaggctccctatgaccccaacggcaagccagaaaggttttactacaatgtggagtcctgtggctctctgcgtcctgaaaccattgtcctgtcagccctctcaggattgaagaagaaactgagtgatttacaaactcaattaagccacgagatccagagtgatgtgctaaccataaattaactgcagcttgcctgcttcagcaaaaacggagattcaggccagcagctggatatgggggtctctcttcagactcttctcgtttctgagaatctagtctactgttggttgagcttcttggcaggacatcagtaccaactagaagtgggtcatagatagattaccagggatgcagtggtgtttaggcaggataggtctttactggccctgactgctgttaataattggcagcagtgctccccagatcccagaaggtccctgctggagtgtttccagtgcacctgtagggaaccaactagacttctctcctggttagtccagctctttactctaaaccctttctgtccaaaatgagtcattttcagttgtaccttagatgtctggtgttgaggatcaagtgccatagcctttattcagggggcctataaacccttccagttcttgccccagggctggcctgctagcgcttcaaattcccaggtgtccctaatttgagaagtaaccttttggaatagcattagaccctggctgtcccctccccaccaaataaacatgatatttcattctctgtccagcagtcatgaaccccttcacctccaatgacctgatcatttagtttggtgggggtgggggtgggggtgggggtggaagcagccgcaggagcaagggcccctcccacatacacaggaggagtatttcatttctccttaatgaaggctctggccctaacccctcagcactgttctccagataggaacatgcacaaagcagttaattaggcagcctggagaaaaccagagatccagtacagaaaggaaaggatatttattgattaacagaagttgtctccagataggaacatgcacaaagcagttaattaggcagcctggagaaaaccagagatccagtacagaaaggaaaggatatttattgattaacagaagttgtctttttaaaagtgtttatttttggcaataaagagcacaacataatctc

SEQ ID NO: 380951 - DNA, 1758 bp, Homo sapiens
agcggggaggcctcgctgactgacttccggtgttggcggtggcgccgcgcagtcaccgcggagcagacgcggaggctggtggcccctgggcgagatgccgtacgccaaccagcctaccgtgcggatcacggagctcactgacgagaatgtcaagttcatcatcgagaacaccgacctggcggtggccaattcgattcggagggtcttcatcgctgaggttcccataatagccattgactgggttcagattgatgccaattcctcagtccttcatgatgaattcattgctcacaggcttggattaattcccctcattagtgatgacattgtggacaagctgcagtactctcgggactgcacatgtgaggagttctgccccgagtgctcggtggagttcaccctcgatgtgcggtgcaatgaagaccagacgcgacatgtcacgtctcgagacctcatctccaacagcccccgggtcattccggtgacatcccggaaccgagataatgaccccaatgactacgtggagcaggatgacatcctcatcgtcaagttgagaaagggccaggagctgagacttcgagcctatgccaaaaagggctttggcaaggagcatgccaagtggaaccctactgcaggggtggcttttgaatacgatccagacaatgccctgaggcacacagtgtaccccaagcccgaggaatggccaaagagtgagtactcggagctggatgaggatgagtcgcaggctccctatgaccccaacggcaagccagaaaggttttactacaatgtggagtcctgtggctctctgcgtcctgaaaccattgtcctgtcagccctctcaggattgaagaagaaactgagtgatttacaaactcaattaagccacgagatccagagtgatgtgctaaccataaattaactgcagcttgcctgcttcagcatcgtttctgagaatctagtctactgttggttgagcttcttggcaggacatcagtaccaactagaagtgggtcatagatagattaccagggatgcagtggtgtttaggcaggataggtctttactggccctgactgctgttaataattggcagcagtgctccccagatcccagaaggtccctgctggagtgtttccagtgcacctgtagggaaccaactagacttctctcctggttagtccagctctttactctaaaccctttctgtccaaaatgagtcattttcagttgtaccttagatgtctggtgttgaggatcaagtgccatagcctttattcagggggcctataaacccttccagttcttgccccagggctggcctgctagcgcttcaaattcccaggtgtccctaatttgagaagtaaccttttggaatagcattagaccctggctgtcccctccccaccaaataaacatgatatttcattctctgtccagcagtcatgaaccccttcacctccaatgacctgatcatttagtttggtgggggtgggggtgggggtgggggtggaagcagccgcaggagcaagggcccctcccacatacacaggaggagtatttcatttctccttaatgaaggctctggccctaacccctcagcactgtctccagataggaacatgcacaaagcagttaattaggcagcctggagaaaaccagagatccagtacagaaaggaaaggatatttattgattaacagaagttgtctttttaaaagtgtttatttttggcaataaagagcacaacataatctc

SEQ ID NO: 380952 - DNA, 1742 bp, Homo sapiens
  misc_feature (1486)..(1486): n is a, c, g, or t
  misc_feature (1500)..(1500): n is a, c, g, or t
agcggggaggcctcgctgactgacttccggtgttggcggtggcgccgcgcagtcaccgcggagcagacgcggaggctggtggcccctgggcgagatgccgtacgccaaccagcctaccgtgcggatcacggagctcactgacgagaatgtcaagttcatcatcgagaacaccgacctggcggtggccaattcgattcggagggtcttcatcgctgaggttcccataatagccattgactgggttcagattgatgccaattcctcagtccttcatgatgaattcattgctcacaggcttggattaattcccctcattagtgatgacattgtggacaagctgcagtactctcgggactgcacatgtgaggagttctgccccgagtgctcggtggagttcaccctcgatgtgcggtgcaatgaagaccagacgcgacatgtcacgtctcgagacctcatctccaacagcccccgggtcattccggtgacatcccggaaccgagataatgaccccaatgactacgtggagcaggatgacatcctcatcgtcaagttgagaaagggccaggagctgagacttcgagcctatgccaaaaagggctttggcaaggagcatgccaagtggaaccctactgcaggggtggcttttgaatacgatccagacaatgccctgaggcacacagtgtaccccaagcccgaggaatggccaaagagtgagtactcggagctggatgaggatgagtcgcaggctccctatgaccccaacggcaagccagaaaggttttactacaatgtggagtcctgtggctctctgcgtcctgaaaccattgtcctgtcagccctctcaggattgaagaagaaactgagtgatttacaaactcaattaagccacgagatccagagtgatgtgctaaccataaattaactgcagcttgcctgcttcagcaaaaacggagattcaggccagcagctggatatgggggtctctcttcagactcttctcgtttctgagaatctagtctactgttggttgagcttcttggcaggacatcagtaccaactagaagtgggtcatagatagattaccagggatgcagtggtgtttaggcaggataggtctttactggccctgactgctgttaataattggcagcagtgctccccagatcccagaaggtccctgctggagtgtttccagtgcacctgtagggaaccaactagacttctctcctggttagtccagctctttactctaaaccctttctgtccaaaatgagtcattttcagttgtaccttagatgtctggtgttgaggatcaagtgccatagcctttattcagggggcctataaacccttccagttcttgccccagggctggcctgctagcgcttcaaattcccaggtgtccctaatttgagaagtaaccttttggaatagcattagaccctggctgtcccctccccaccaaaaagtacaaaatcaggatgtntttcactgtccatngctttgtggtttaataaacaatttgcagtgaccaacacaccacacacaccacaacaaccacaaacagacaaaacaaagaatacaaacaaaggggcggcgagccaaaaaaacacaggggggagcacatggaccccctggagaaagagggcccaaagggagataaaaagagagcgacgggggctcaaacaaacgggggagcacccaggcgctatgaaacaccctggggagaacaggccacacgg

SEQ ID NO: 380953 - DNA, 1474 bp, Homo sapiens
agcggggaggcctcgctgactgacttccggtgttggcggtggcgccgcgcagtcaccgcggagcagacgcggaggctggtggcccctgggcgagatgccgtacgccaaccagcctaccgtgcggatcacggagctcactgacgagaatgtcaagttcatcatcgagaacaccgacctggcggtggccaattcgattcggagggtcttcatcgctgaggttcccataatagccattgactgggttcagattgatgccaattcctcagtccttcatgatgaattcattgctcacaggcttggattaattcccctcattagtgatgacattgtggacaagctgcagtactctcgggactgcacatgtgaggagttctgccccgagtgctcggtggagttcaccctcgatgtgcggtgcaatgaagaccagacgcgacatgtcacgtctcgagacctcatctccaacagcccccgggtcattccggtgacatcccggaaccgagataatgaccccaatgactacgtggagcaggatgacatcctcatcgtcaagttgagaaagggccaggagctgagacttcgagcctatgccaaaaagggctttggcaaggagcatgccaagtggaaccctactgcaggggtggcttttgaatacgatccagacaatgccctgaggcacacagtgtaccccaagcccgaggaatggccaaagagtgagtactcggagctggatgaggatgagtcgcaggctccctatgaccccaacggcaagccagaaaggttttactacaatgtggagtcctgtggctctctgcgtcctgaaaccattgtcctgtcagccctctcaggattgaagaagaaactgagtgatttacaaactcaattaagccacgagatccagagtgatgtgctaaccataaattaactgcagcttgcctgcttcagcaaaaacggagattcaggccagcagctggatatgggggtctctcttcagactcttctcgtttctgagaatctagtctactgttggttgagcttcttggcaggacatcagtaccaactagaagtgggtcatagatagattaccagggatgcagtggtgtttaggcaggataggtctttactggccctgactgctgttaataattggcagcagtgctccccagatcccagaaggtccctgctggagtgtttccagtgcacctgtagggaaccaactagacttctctcctggttagtccagctctttactctaaaccctttctgtccaaaatgagtcattttcagttgtaccttagatgctctggccctaacccctcagcactgtctccagataggaacatgcacaaagcagttaattaggcagcctggagaaaaccagagatccagtacagaaaggaaaggatatttattgattaacagaagttgtctttttaaaagtgtttatttttggcaataaagagcacaacataatctc

SEQ ID NO: 380954 - DNA, 2114 bp, Homo sapiens
tccctctttccttctctctgcgtggtgctcgcgtgcgcgtcctgacgctgtctagttggcgcgcctgtgctcctccggccctctgggctgtgcctgctccccttctctccttcccttccgtgctggcctccgctgtttctcgcccccctcttgtcggctctctggtccttcttctcgtccgtcttggtcgctcggctctctcccgctctgcccctggccccctgccccccctcccctctcggcgctgctcctcccggcctccgccaccctctcccctccctcttcgctcgtccgcgctcgtcgctgtgcctgcttcgtcgtgccgtctggccgcgtcgcctcgtgtttctctcggctttccgtgcgtctctccgcggtccgtctcttggcctgtccgcttgcttcgctcctctctctctcttcttctcttgtcgtcgcctctcgcgtccgctgccgctgccttccctggctctctcctccccccgtcgctggggccgttcgctgctgcttccgctggctctcgctctcgtcgtctcggtcgctctcggggcgacacgcccccctcccgcctgtgccgcccgggcgggggcgcttctctgcgacttcgcgcccgctgtgcggccgggcgtcgctcgcccggcggtcgccccggccgtcctgtcttcgcgccgccgtcgaggcgcgctcgctgcctctcgctcgctcgggccccgccgccccgtggcatgtcctgctggcgtctccgtccgcgcgagcgcccgaccgcttcgctctccggtcgtggtccgcgtcgctccggcttcgttctcgtcgcttctgactcgcctcctgttcttacctttctttctgctggaagcagccgcaggagcaagggcccctcccacatacacaggaggagtatttcatttctccttaatgaaggctctggccctaacccctcagcactgtctccagataggaacatgcacaaagcagttaattaggcagcctggagaaaaccagagatccagtacagaaaggaaaggatatttattgattaacagaagttgtctttttaaaagtgtttatttttggcaataaagagcacaacataatctccttcatgcgtcatcgtgccacttagctgagccagccagctctgcctccctccccaaagacctttggaccccagttcccctctacaggctagctcatccctctgggtggtcattccccgggtcacgttgagagcgaggctgactgcaccacctccctagctcaagggctcctttgggaggggccgcgtgctttatcatcctcctgccacaactcaaatagtggttatttacaagaaggtctgttcccacaaatcaggaccctaaagtattaaaaaacaaaacccaaaaaacaacaaaaaaccccacacaaccaaaagtttgacgtgaatagaaagatagcccttctgcatggtagtcaacaaataccagcactagaaaatcaattgctttaattgcattgcagcagggagcctcagcaccatgtggggaggaggaaatgggaaggtcttggtttcagagtgcttttggctggccagagggtggccaaacagggcaagggggctccctctgcttgggcattgtccacccctggtcagtgagaggggggcagcaggggtgctccccacggcagtcctgctgcggccttccctcctggcctattcctggggcaggaacaagctccagccttcctccacatggctgaggtaatcagcacccctaccccaggggcatcttcccagcctacaaagcaggaaggagcctgtgcagaagttacattttaaaaccagattttcacctgaggcgtcaaccagatgtcacctctgcttaaaactccaactgcaaggctggcaagcagcacagaggaagtgcagatccttcctgtgtcactccaggcccagaggaactgagaagccacctgctgttccggcccttgggctgtttgggaaaagccagcagtcagagtgccagcctcaagctctgattatccccctcctgtggccctggtagttcaagcaggtcctggcagcaggagggctgtgccatggaggatggatacgactgcactcatactcaaaa

SEQ ID NO: 380955 - DNA, 410 bp, Homo sapiens
cacattttccctgattattttaccctctgttgtgatttaattatgtcctttcagttacgtacttttaaggaaaatgaaggatgtatacaaaagctacagaggaagaaatagcggtgatggttttatttctcatcaccatagtctaagttacaaaggttttttgtttgttttgttgggggggtttgttgtttttttgtttgtttgtttagacaggtctcgctcatcacccaggctggagtacagctcactgcagcttcaacttcctgggcacaagtgatcctcccacctcagcctcccaagtagctggaaccacaggcttacaccaccacacccagctaatttttaaattttttgtagagacaaggtctcgctgtgttgcccagactggtctcaaactcctggactcaagc

SEQ ID NO: 380956 - DNA, 282 bp, Homo sapiens
gccagtataaatagagtagctagagatgagtctgaagagttagctagggagtaggttatgaagaatctgaaatccgtgctaaggcttgtgaattcagaaatagtagagagccaatagaaccttttaaacaaatgaagaatatcggtatttaggaccatacttgatgacagtgtggtgaatgagagatgagaaagacttgagtcctggagaacatttggaaggctgttgtagtagtctaggttagcggtcttcaaaccattgatcacacgtccccattaatta

SEQ ID NO: 380957 - DNA, 556 bp, Homo sapiens
ttttcagacggagtctcgctctgccacccagactggagtgccttttcccctcatcgtgtgggagccgccgggcgacatcccgccccggtttccctccactcgaaggcagtcacctcggttgccagctcctgcctctgtgatgatccccacgagggctgcagagtgaagggcacagcggggttcggcctaactccccggggagccctaggcgagagggcttggtcctggggagctgcccaggtcttctatatcccctggcctccatccagtcccgcacgactcagctcctggccctgtgcaccgggcgacgcctgctaggcgcatgaccctcagagtcaggcctgtactcacctcagcatctatcaagggccttcaaggatcgggtttttttaatcatcgtcaaatatatcgttactaaaaagatacgtacactttgggaggccgaggtgggaagatcacttgaggtcaggagtttgagaccatcctggacaacatggtgtaaccccggtctcttctaaaaatacaaaaattatccgggcatggtggcggacgcctg

SEQ ID NO: 380958 - DNA, 751 bp, Homo sapiens
tcagttcaagtctgggttttctttgctagctgtggtaatccagcacaagttacttaactactcagaccacagacatagcaataacgaccttgagaggttgtgaataaccttggtgcccagtgaaggtctacttccctctaccacgtgcagcattctcaagaaaccattgcttggggtttttctgcagcctctgttgccaaacttggacaggaagaggtgggacggagagatagcagaggggcctgagggggctaccctggcatatgcagctgcaggcacccgcagactgacctcttaacatcccagtttatacttagcaaggattaggtgacatgaagacgatcctggcttgatgggtcatgaggctctgaaggaaaagtgggagaaaataagaggtaaacgagcctagcctacagcctcccagaggccagccctgacccagcacagctgggagccccgtgaggaaggcccggctccgtaggggcctcacacaaggagtgtttggcttacagtgaattgtccggggggttttgcccacctcctcctcatctccgtattcttcagcttcatccaaaactgacttagaagcctcccttgaccctcacctgactattcacaggttatagcactttatgtttttcagttctgttattttaattggtgcctctgtttgtgatctttaagaacataaaattctggcaagtaactatttgctaacaataaaaataatctttttaaattaaaaaaaatt

SEQ ID NO: 380959 - DNA, 314 bp, Homo sapiens
atcgactgacacttttgtaaaatataaaatctcatgacgggccacagccacgtcagactgcttgaagagcttctgaacacggcctgtcactttctgtgagtagcctgtgggctgaccgtggcccggggaggccacaggaatgcactgtgctgtgaacgtgccatgctgtctcagcactgcttgagacagtgggagggatttctgaaatgtggtttgggtgcccagtctccagggaaacaggcaaagcacctggtgacaatgtacatgtgatgaggaccacatgggggaagaaacgtgtggcaggggcgggggct

SEQ ID NO: 380960 - DNA, 868 bp, Homo sapiens
ggaagaggatgacgaagaagtccagggcaagccttttcagttatacgcatcactttaacttccacttacattgtattggccaaaactgagtcatgtggacacagctagctaaagatagtccctaactaggcagccatgtagccagtgaatacagagaggtagagagggaattgggtctgttattaaaaggaagaaaaggagtgtgattcctgctgacagtttaggagtcttcaccacaaaaggattccagactctcaggctggaacctccctgccactttgttcatgcctgcaacaggctttattttttcacaaattgcaaaatattgagaaagtaggttagtttatgtacatgtggcacaaataaacttgaagggtaagaccaacagaatttggaaaattcaaattaaaaaaagtaaaatctgctactttagtgatggtttcaggctatatatattttttttgacaaagagatgaatagcttaaaacaatgctcactatctcaacagtttgcgggtatgtatgttttgtaatgcattagccttaatgcaggctttggtagaaggaattaaatatagttaagtttcacgttgaaaataaacctccctcttgccctactgctagcattggaaaggggaacaggagccaggggcaatgaggggtgggcagggtaagcttccttcttgctccgggcaaggcttttagtggaaatgtatagaaggagccaaaattagggagcaatgttttggaggcaaaagccagcctttcccagcatctctgaaaggagcttatcttaacttattgcaacactgaatgatatgcttgaatgttatttgtacgaataaagatatttgcatcatgtcaatacc

SEQ ID NO: 380961 - DNA, 483 bp, Homo sapiens
gaacacgcaacatcctgaggtcaacagtgacccttagaagaagggctgggaaagcacatcctccactgctctcgactgcagccaccgtgagccggagccaccgctgcacccagctaggatacccgtgccttgagccaagaaaacctagcagaaaaatggaggcagccttgggaaatacttgaaaggggaagagggtaaaaaaaagtaaagaagggccgggtgcggtggcttacacctcagcactttcagaggctgaggcaggaggattgcttgagcctaggagttcaagaccagcctgggcaacatagggagaccctgtctctacaaaaaattttaaaaattagccaggcgtggtggcgcacctgtagtcccagctacttgggagacagatgggaggattacgtgagcccaggaggctgtagtgagctgtgatcatgccgtgcactccagactgggcaatagagcaagaccctgtctcaaacc

SEQ ID NO: 380962 - DNA, 505 bp, Homo sapiens
tatgaaatgtcttaggaaactcttctaggacatagactgagatagcaaattatctatttttaaaatttgtcataatcctgatgttacaacctactagaacccaaaacaatttgtccagaatcagttatgaaaatacagcattataaattagcaaatcaaatctagtaacccattgaaaataaatatttgtcacattctgaatttaggaaaaaacaattctgataaatcaaactttctactttctgaaacttgaaaatcaaattgatttagataagattgtatttcttagtgtctgaactcaggaaccaaatagatgtggatagcatgggatttttggaatacaagataagataatttacatgggattgcaaaagttcaaataactaaagttctgtcaatgaaaatatatgctctaacctcaacatcttctagatgaacccttttttctagcagtatttgacaggatgggatatattttataaataaacttggactattatcctat

SEQ ID NO: 380963 - DNA, 318 bp, Homo sapiens
aaatgtgcacaacttgccaactcttggccttcactgcctagtctaatggaagtttgtggccaaactgagaccacaaactgagaaaaggttgctgaggtgtgggccagcatatcctgctgaggactaattcaggactgcaaaatcaggagaaacctggagagagtacataaggctggagcagaagtagatctgaaggagagccacactgcggcacaggtgcagaggcatgaagagggctgagggcagcgagggaatgctaagaaaagccttcagaggaaatctggacacagctctccaaggctacggaaagggaaacaa

SEQ ID NO: 380964 - DNA, 478 bp, Homo sapiens
acttccccttcctgccaaaccctggcaatcatcattcttctgtctctatcagtttgacttatctatatacctcttataagtggaggcgtacagtatttgatcttttgtgactggcatatttcactgagcataatgtctttaaagttcatccatgttgtatcatgtgtcagaattctacctttctgaggcagaataagaattcattgtatgtatttacgggctgagtatacctaatccaaaaattcaatatctgaaatgctccaaaaatctgaaactttctgggcactgacattgtactcaaaagaaattctcattggagcatttcaggttttggaattttggattttcggatgagtgatgcaaaagtggtgtaatgtaaatgttgaatatttcaaaatccaaaaaatttcaaatccaaagcacttctgtcccaagcatttcagataaggaatatttaacctgtaccacgttaaaaaaa

SEQ ID NO: 380965 - DNA, 299 bp, Homo sapiens
cacccgtcttggcctcccaaagtgctgggattacaggcgtgagccaccgcacccagccaattgaagttttccacatgtactcattcaattagtcccactcaaagaatctacgttaaaactgccattaaagataagagaaacaaaatgtaggtcactcagttcaaaacatgtttattaaaaattgggatatatattccccctaggaaagaaggtataattggaagtttacaaacaaatgactttgccagttacagtaggtaagagtattctaggcagaggaataaatctgttaggaaaaa

SEQ ID NO: 380966 - DNA, 861 bp, Homo sapiens
tttagtacagccacataatgtgccatctattgttcattcacaggtttataggtccagcaaggttgagaaattgccacccttgtataaaacattgactttttctgggtcatctcagactataactcctgaaaatcagacgcttaattattcatctaatcagcaagaggtattgtcttcagttacaaatgagaattaccctgctcaaacaagagatctgtcttcagtaagtcagtctcaaagttactcatctggtcactctcagggtttatcaccagttagccagacacaggttagctattcatctcaatcacaagttttgtcagttgttagtctttcagaaagctatgcttcaggggagtccctaacattaacagccccttctctttcttattcttctgcctctcgggctcagaatttgccagactctagcccgacccagaattatatttctatgcattcttcccaaaatgttcagactcaagagtcatcatctccccagtcccagaagtttttgcctgctgtccagtcatcatcttttgcatcctctactcattgtcagacattacaaaataacataacttcccctgacccaaagtcttatgctgaaagaaagcttgactcagatgtgtatccatcttcaaagcaagaagatggttttccaatgcaagagttacaggtgttgcagccacaagcatctcttgagtcatcaacccaaaggctatctgatggagaaattaatgctcaagaatcaacttataaggtgtcaaaggcagatgacagatattctcagagtgtaatcagaagtaattcccgtcttgaagatcaagttattggggttgctctgcaagcatcaaaaaaaaa

SEQ ID NO: 380967 - DNA, 486 bp, Homo sapiens
acaaagtattcaactagttttctagaaagaactactattttttaccttcatattttattagtttgtataatatttaaaaataaattattaataagatctgacattagaaggtctggaataacttgactggtgagagaaaaagtgggtgaatatacgaaagtggcttactcctctagccttcgcatgtcaagggcattggcatttgttatagaaagaatacagaacatcagttaatccaatgaatcaggtatgtggcattaaaagagcttctaatatgatacataaggcttgttaattatatttttcaaattcttgatattttttctcttcttaatctcttaattctgagagagatgattttacttcctcatttttctctgagtatgtctgtcagtttttgccttgtgtaactccaagctatgctagttgcaaaaagaatgataacatttcttcatcatgtactataaactttatcaatgtaaatac

SEQ ID NO: 380968 - DNA, 407 bp, Homo sapiens
tgagaatagtcaatgaagtatagtatttagcacagcgtattttcttccctagtgagaaaggagagatccgtggaatcaaacagaccttccagcgataacctttccacgttgagcctattgattctctgtccgagtgaaattacctgccaggggagaacaagacaagtctttgcatgaaatgctcttgtggaagctagattgccaaataagaaagaatcaaatggtagaaacatgcactgaagtttgaagagatactcagtgcacaaagtagactgtgaaagcctttggggaaatcatgcaatccccgagagactaattgatgacaatccccaaatttatgtttgccagaaaagagagacggtcatgacactgcatagtgagcggtttcggacgtgcgacggcagttt

SEQ ID NO: 380969 - DNA, 388 bp, Homo sapiens
tgtggtagacactgtgatgcactactcagttgcaccttcaataaaggacttaactgcctcagcccttgggagtgctctcagcagacatccttcagctgtcagtcccatcagagattgcctcagccactttggtgcccatactcaaagaacagtgtggtagattaaaggccaagccatctagacccaacttggaacaactctgaagggccattttgggttctgagctccccaggggttatgcaagtctgtaatgggacctgcatgtcaccttaatttctctctctgttcattcttgcctcattcccctcccttcttcagatgttgattgtaacgacacaccttaatatcctgcatgctaaacgttgtcttagagtctttcctagggaac

SEQ ID NO: 380970 - DNA, 448 bp, Homo sapiens
gcccgcttggcctcccaaagtgctgagattacaggcataagccaccatacctggccagaaaccatgattttaacgagcatatggccctgccccgaagaactgtggacatacaggtgagaggcaggcaccccacgctgctgggaaaaatcacagaaagcttcccagaggaggtgatgacagaggtgaaataaatatggatctgtcagcctgtacaagagtcagaggccatgagagagtatggaagaaggagagagatctctcactggaaggtaaagtactaggctgggaatagtggcagatgggaccagagatgtaagcaaagaccacaccacagtgagccttgaatgccaagtacatcagttatgggtcttagctgcaagcaacagaatctactctggtcagtctacatagcaaaaaaataaataaataaaataaaaataaaactgga

SEQ ID NO: 380971 - DNA, 338 bp, Homo sapiens
agtcgacggagactctctaggttcgaggagactctctagttcgacggagactctctagttcgacggagactctctagttcgacggagactctctagttcgacggagactctctagttcgacggagactctctagttcgacggagatctctcactggaaggtaaagtactaggctgggaatagtggcagatgggaccagagatgtaagcaaagaccacaccacagtgagccttgaatgccaagtacatcagttatgggtcttagctgcaagcaacagaatctactctggtcagtctacatagcaaaaaaataaataaataaaataaaaataaaactgga

SEQ ID NO: 380972 - DNA, 392 bp, Homo sapiens
ggaaaagtcctagtagttaaactttgacacagtatcaaatgatatatgagttggctatactagcttcttggtaatttgacatgtacagacatctcaaatttgggggccaggcgtggtgacttacacctgtactcccagcactttgagaggctgaggcgggaggattgcttgaatccaggagttcaggactagcctggacaacatggtgaaaccctgtctctaccaaaaatatacaaaaaaatttagccaagtgtggtgctgggcacttgtagtcccagctacttgggaggttgaggtgggaggatggtttgagcctgggaggtggaagttgcattgagccaaaattgccccattgcactccagcctggcaacagatatatatataatctaaa

SEQ ID NO: 380973 - DNA, 262 bp, Homo sapiens
tttactttttaaaaaaaacttttatctgtttagaattttccctgattaaggagtgaaagataaattattttttttctagatagatacctgatttagccagcatttattgattaatctatcctccacaaatcagagataccaccttttatcctaaattaaattctcatctcgacagagttttagaatgagatggtgcatataattttgtgatgccaaatttggatgttctcttcctaatgcttcctaagatagtaattataca

SEQ ID NO: 380974 - DNA, 805 bp, Homo sapiens
tgtaaaatgatacctcaaagaaatcaatgctggaacccataggatcatatgtttcatggatgtgcttcaaaactatttctcaaagcaatctgttgcatcagtctttgggctaatgaaggctgccagtcacagttccatcatggaatgactggcatactctgtaatgatctataatactacaactacatcagaactgctctgccatacagatagtaccagatggtgatgtgattattgtaaaggcctcacactatccacctgtccttgcaaaaactcccttagcagacatgcacctagttgacatgaaagaacaattttgaaatgtgatttggaagtgttttatatctggcctactttgctttgaattattctttcatttgccaaagagctcttgcaaggtactgcacaatggctaggcaattattattattaatagtaaaaactgcaattgcttttgcaccaacttaaagagctaaagtctaagcttccagtctcccagcatccctcacacgatggagggcagcacttgagtctaatcatgcttgagatggtgattgcctgatatgtatattaaatactatgctgaagagacggatcctttcaatagtgtttttttcaagcatgttacatttagaattaagacctgcctagaaaataagctacatagtgctgaagaaacaaaaacttgacaagattcctaagttatcatttatatgtaatattcttcctacaacactgggtttggaaggataataaatacataaaaataaaattctgcagttaactaatatgaaaaagaggtaat

SEQ ID NO: 380975 - DNA, 386 bp, Homo sapiens
aaagttttagattttagtgcagaagttgtctttgaagattatcaaatcaaaacatccttattttagaaagatgatacagaaaatcataaggaaatctgagtgaacttaccacccttcacattttagggtatagtcatcaggtatttcaggagacttaacttgaacctaacgaaaccaagtttcaggcccctctaaatataaatgttcacttttatacctaagtttctgtttcaaatgttgttattcttgttcttaaagaggccactcaaaattgtgtaagcttcagggctcacaaaatgtggggtccatcactgtcatcaaggtgattaattgatttgtataaatctagttcctttctgttttatgatatgctttgtcatttaata

SEQ ID NO: 380976 - DNA, 2004 bp, Homo sapiens
agtgtcttatgaatttcagcttcttggctcttgagaccgaaaggttctacctattccccctgcagagaagcacccatttcccatcagatgctcgtccctgcagcttcttccttcttggtcatcataatgctaggttcttacccctttcctgccctctgcacctcatgtccacctccaggcagctctggccagtccccgggtattagacccaagaattcaaatcaaatctaaaaacatgcttataactacattttggccaaaactgccaatgtatttgacttcctttgtggaagccctaagccatatgaaggatgtcccaggtatgtatttacccagatctctgcctgaaactgaagagcagattgctgtatttaaattttcccatggaaaaccctgcttctcaaatcccattctaaagtaggaaaccagaaagactttgctgattgtggggggaagggagaaacagacaggttttcacattgttgccaaggctggtcttgaacacctggcctcaagcgatcctcccacctcggcctctcaaagtgttgggattgtaggcatgagccactgcacccagccagactttcctgatttaaatgagagtactgcatcattccctacttcatggcccaaaacttaatcctgggccaaatgcaggagcatctctcgacctctgggcagattggtgggtgcccaggcactagtcacagccttccagcccagccatgattgttggatgccccatccctccaagagcaatttgggcatctactcaggcaggataaaattccctagagctgaggaagttcagcctctcccaggctacacagagagagatgatacaagcacctcagattgagatgcaggattggtccgcagaaggaggcattgttgaccaaccccagctataattgcttgtcaccagagattctgcatacccatttccagagatgttgcagcacaaagaggcaagactccttccaatgccaggccacccagatagcaagagagagaggctggtatacacattccttcagaactcattgaaaagcgctcataactcatgattttaaggagtaagtttttgctgagtagctgaagtcagtgctcctttacttagctgcctctttggccttgtttcctgtggggttgggaggagggagatgtagtgtgaggtaggccttcccttggtctgtattcagcatagttgcctagatgctgctctgccttgtttgatggttgatcttaggaagctctaggttttactctgaggcctcaaaccctccccctatgcagtatagctgttgggtttttgtcctggacaaaggccacggctgttgtgctgcgcttcaggtttgtgaggctgcggagtggtacccccaccatgcacgcaagcacacacacacagatacttccctctccacccttttgggagctctttattttagaatgtaacttgaactcacttttatcattggcctttttcctcttactctgacttcctagcttagctctttccaaaaggaacttgaacttggccaagagaggtaaggaggctgagcagagcagtctttgctcattcctggttgttgccaccctcatttaaatggaagagagaaaacaggagcttcttggctgtttgccaaaatgaattgtccagggaacacagtgctctctgtaattaccctgcctttttctccaccccaacacaaaaatctggaaaggaaaataagtgggtaggattaagagctgttagaagctgaggaccaaaggacactgtgggtccattcatcaagggggagaccctcttcattagagtcctcatgaaattagccaaatgatgagtccttccctagctgggcatggtgggttctctttttttttttttttttttttttgttgggtggttgtgaaatgggattctccttttttcccccgggtgggctcccgggggtttgatccgggctcatggaacccttcgcccccaggttccaggggattccc

SEQ ID NO: 380977 - DNA, 3024 bp, Homo sapiens
agtgtcttatgaatttcagcttcttggctcttgagaccgaaaggttctacctattccccctgcagagaagcacccatttcccatcagatgctcgtccctgcagcttcttccttcttggtcatcataatgctaggttcttacccctttcctgccctctgcacctcatgtccacctccaggcagctctggccagtccccgggtattagacccaagaattcaaatcaaatctaaaaacatgcttataactacattttggccaaaactgccaatgtatttgacttcctttgtggaagccctaagccatatgaaggatgtcccaggtatgtatttacccagatctctgcctgaaactgaagagcagattgctgtatttaaattttcccatggaaaaccctgcttctcaaatcccattctaaagtaggaaaccagaaagactttgctgattgtggggggaagggagaaacagacaggttttcacattgttgccaaggctggtcttgaacacctggcctcaagcgatcctcccacctcggcctctcaaagtgttgggattgtaggcatgagccactgcacccagccagactttcctgatttaaatgagagtactgcatcattccctacttcatggcccaaaacttaatcctgggccaaatgcaggagcatctctcgacctctgggcagattggtgggtgcccaggcactagtcacagccttccagcccagccatgattgttggatgccccatccctccaagagcaatttgggcatctactcaggcaggataaaattccctagagctgaggaagttcagcctctcccaggctacacagagagagatgatacaagcacctcagattgagatgcaggattggtccgcagaaggaggcattgttgaccaaccccagctataattgcttgtcaccagagattctgcatacccatttccagagatgttgcagcacaaagaggcaagactccttccaatgccaggccacccagatagcaagagagagaggctggtatacacattccttcagaactcattgaaaagcgctcataactcatgattttaaggagtaagtttttgctgagtagctgaagtcagtgctcctttacttagctgcctctttggccttgtttcctgtggggttgggaggagggagatgtagtgtgaggtaggccttcccttggtctgtattcagcatagttgcctagatgctgctctgccttgtttgatggttgatcttaggaagctctaggttttactctgaggcctcaaaccctccccctatgcagtatagctgttgggtttttgtcctggacaaaggccacggctgttgtgctgcgcttcaggtttgtgaggctgcggagtggtacccccaccatgcacgcaagcacacacacacagatacttccctctccacccttttgggagctctttattttagaatgtaacttgaactcacttttatcattggcctttttcctcttactctgacttcctagcttagctctttccaaaaggaacttgaacttggccaagagaggtaaggaggctgagcagagcagtctttgctcattcctggttgttgccaccctcatttaaatggaagagagaaaacaggagcttcttggctgtttgccaaaatgaattgtccagggaacacagtgctctctgtaattaccctgcctttttctccaccccaacacaaaaatctggaaaggaaaataagtgggtaggattaagagctgttagaagctgaggaccaaaggacactgtgggtccattcatcaagggggagaccctcttcattagagtcctcatgaaattagccaaatgatgagtccttccctagctgggcatggtgggttctctttttttttttttttttttttttgttgttgttgttgagatggagtctcgctctgtcacccaggctggagtacagtggcatgatctcggctcactgcaacctccgcctcccaggttcaagcgattctcctacctcagcctcctgattagtgggattacaggcatgagccaccatgcctggccaggcactgtgggttctacaggatgggtctgtaatgtcacggtgagggctctctctagtagtagatctggagtgaggtgtgtcttgggttgaggaggtggcttgactttcgaatgtaaaactgactgtgccttagcatcaccctgtccagtgcccctggggcagctggtagtgtccagaagaatggacacctgctccagatttagatgcccatctgggcttttgtttgatttgcggcgttcctgtcttctgtaaagctagtgagttgtcccaagagactgatgccacagcttgttcgcagtttacacaaactcagctttaaaattccaaatagaatctgacttgcaaactctagctgcagcatgtggagcttctagatgtttactaccttgaatggttgtcagtgtcactgaaccacaggggagaggagtatggggtagagcaatggtctgggccaaggaatggtgagcttagggtcttcctctgactccttactcctcaaggaggcagttagggtccctcttaagcaggcttctatttcttaccactaaattggtttcctttttcatccagaagttagaactccccagatattcacactataggatctgaattccgagattctaaaatatcttaaaccacaagagagaaaatctagttctgcctcagccccagtcagcaggccatctgtcccttcctctcctctgagtcagacagctctggcaagcaaggctccttggctagttcctaatgcactgacaggagccctcccattaaggacgacttctactcaaaatgcgactctccctctgaacttcagatgcctctgttagcaggaaaaggcattgattggattggatatatttatgtgactgcgggcatttgtggctgtagaatccgtgaccgtaatgttatatgtaatgggaactatcttataaacttgaaaaaaataaagtttttattttctata

SEQ ID NO: 380978 - DNA, 1086 bp, Homo sapiens
gggccccatatttgatctgtcaagaaactgttggctgggaactcctgacctcaggtgatctgctcaccttggcctcccaaagtgctgggattacaggcatgagccaccatgcctggccaggcactgtgggttctacaggatgggtctgtaatgtcacggtgagggctctctctagtagtagatctggagtgaggtgtgtcttgggttgaggaggtggcttgactttcgaatgtaaaactgactgtgccttagcatcaccctgtccagtgcccctggggcagctggtagtgtccagaagaatggacacctgctccagatttagatgcccatctgggcttttgtttgatttgcggcgttcctgtcttctgtaaagctagtgagttgtcccaagagactgatgccacagcttgttcgcagtttacacaaactcagctttaaaattccaaatagaatctgacttgcaaactctagctgcagcatgtggagcttctagatgtttactaccttgaatggttgtcagtgtcactgaaccacaggggagaggagtatggggtagagcaatggtctgggccaaggaatggtgagcttagggtcttcctctgactccttactcctcaaggaggcagttagggtccctcttaagcaggcttctatttcttaccactaaattggtttcctttttcatccagaagttagaactccccagatattcacactataggatctgaattccgagattctaaaatatcttaaaccacaagagagaaaatctagttctgcctcagccccagtcagcaggccatctgtcccttcctctcctctgagtcagacagctctggcaagcaaggctccttggctagttcctaatgcactgacaggagccctcccattaaggacgacttctactcaaaatgcgactctccctctgaacttcagatgcctctgttagcaggaaaaggcattgattggattggatatatttatgtgactgcgggcatttgtggctgtagaatccgtgaccgtaatgttatatgtaatgggaactatcttataaacttgaaaaaaataaagtttttattttctata

SEQ ID NO: 380979 - DNA, 993 bp, Homo sapiens
actagtgccgccgctgtgccatgtaccagctatgagcatctatgggatgggtctgtaatgtcacggtgagggctctctctagtagtagatctggagtgaggtgtgtcttgggttgaggaggtggcttgactttcgaatgtaaaactgactgtgccttagcatcaccctgtccagtgcccctggggcagctggtagtgtccagaagaatggacacctgctccagatttagatgcccatctgggcttttgtttgatttgcggcgttcctgtcttctgtaaagctagtgagttgtcccaagagactgatgccacagcttgttcgcagtttacacaaactcagctttaaaattccaaatagaatctgacttgcaaactctagctgcagcatgtggagcttctagatgtttactaccttgaatggttgtcagtgtcactgaaccacaggggagaggagtatggggtagagcaatggtctgggccaaggaatggtgagcttagggtcttcctctgactccttactcctcaaggaggcagttagggtccctcttaagcaggcttctatttcttaccactaaattggtttcctttttcatccagaagttagaactccccagatattcacactataggatctgaattccgagattctaaaatatcttaaaccacaagagagaaaatctagttctgcctcagccccagtcagcaggccatctgtcccttcctctcctctgagtcagacagctctggcaagcaaggctccttggctagttcctaatgcactgacaggagccctcccattaaggacgacttctactcaaaatgcgactctccctctgaacttcagatgcctctgttagcaggaaaaggcattgattggattggatatatttatgtgactgcgggcatttgtggctgtagaatccgtgaccgtaatgttatatgtaatgggaactatcttataaacttgaaaaaaataaagtttttattttctata

SEQ ID NO: 380980 - DNA, 3427 bp, Homo sapiens
agtgtcttatgaatttcagcttcttggctcttgagaccgaaaggttctacctattccccctgcagagaagcacccatttcccatcagatgctcgtccctgcagcttcttccttcttggtcatcataatgctaggttcttacccctttcctgccctctgcacctcatgtccacctccaggcagctctggccagtccccgggtattagacccaagaattcaaatcaaatctaaaaacatgcttataactacattttggccaaaactgccaatgtatttgacttcctttgtggaagccctaagccatatgaaggatgtcccaggtatgtatttacccagatctctgcctgaaactgaagagcagattgctgtatttaaattttcccatggaaaaccctgcttctcaaatcccattctaaagtaggaaaccagaaagactttgctgattgtggggggaagggagaaacagacaggttttcacattgttgccaaggctggtcttgaacacctggcctcaagcgatcctcccacctcggcctctcaaagtgttgggattgtaggcatgagccactgcacccagccagactttcctgatttaaatgagagtactgcatcattccctacttcatggcccaaaacttaatcctgggccaaatgcaggagcatctctcgacctctgggcagattggtgggtgcccaggcactagtcacagccttccagcccagccatgattgttggatgccccatccctccaagagcaatttgggcatctactcaggcaggataaaattccctagagctgaggaagttcagcctctcccaggctacacagagagagatgatacaagcacctcagattgagatgcaggattggtccgcagaaggaggcattgttgaccaaccccagctataattgcttgtcaccagagattctgcatacccatttccagagatgttgcagcacaaagaggcaagactccttccaatgccaggccacccagatagcaagagagagaggctggtatacacattccttcagaactcattgaaaagcgctcataactcatgattttaaggagtaagtttttgctgagtagctgaagtcagtgctcctttacttagctgcctctttggccttgtttcctgtggggttgggaggagggagatgtagtgtgaggtaggccttcccttggtctgtattcagcatagttgcctagatgctgctctgccttgtttgatggttgatcttaggaagctctaggttttactctgaggcctcaaaccctccccctatgcagtatagctgttgggtttttgtcctggacaaaggccacggctgttgtgctgcgcttcaggtttgtgaggctgcggagtggtacccccaccatgcacgcaagcacacacacacagatacttccctctccacccttttgggagctctttattttagaatgtaacttgaactcacttttatcattggcctttttcctcttactctgacttcctagcttagctctttccaaaaggaacttgaacttggccaagagaggtaaggaggctgagcagagcagtctttgctcattcctggttgttgccaccctcatttaaatggaagagagaaaacaggagcttcttggctgtttgccaaaatgaattgtccagggaacacagtgctctctgtaattaccctgcctttttctccaccccaacacaaaaatctggaaaggaaaataagtgggtaggattaagagctgttagaagctgaggaccaaaggacactgtgggtccattcatcaagggggagaccctcttcattagagtcctcatgaaattagccaaatgatgagtccttccctagctgggcatggtgggttctctttttttttttttttttttttttgttgttgttgttgagatggagtctcgctctgtcacccaggctggagtacagtggcatgatctcggctcactgcaacctccgcctcccaggttcaagcgattctcctacctcagcctcctgattagtgggattacaggcatgagccaccatgcctggccaggcactgtgggttctacaggatgggtctgtaatgtcacggtgagggctctctctagtagtagatctggagtgaggtgtgtcttgggttgaggaggtggcttgactttcgaatgtaaaactgactgtgccttagcatcaccctgtccagtgcccctggggcagctggtagtgtccagaagaatggacacctgctccagatttagatgcccatctgggcttttgtttgatttgcggcgttcctgtcttctgtaaagctagtgagttgtcccaagagactgatgccacagcttgttcgcagtttacacaaactcagctttaaaattccaaatagaatctgacttgcaaactctagctgcagcatgtggagcttctagatgtttactaccttgaatggttgtcagtgtcactgaaccacaggggagaggagtatggggtagagcaatggtctgggccaaggaatggtgagcttagggtcttcctctgactccttactcctcaaggaggcagttagggtccctcttaagcaggcttctatttcttaccactaaattggtttcctttttcatccagaagttagaactccccagatattcacactataggatctgaattccgagattctaaaatatcttaaaccacaagagagaaaatctagttctgcctcagccccagtcagcaggccatctgtcccttcctctcctctgagtcagacagctctggcaagcaaggctccttggctagttcctaatgcactgacaggagccctcccattaaggacgacttctactcaaaatgcgactctccctctgaacttcagatgcctctgttagcaggaaaaggcattgattggattggatatatttatgtgactgcgggcatttgtggctgtagaatccgtgaccgtaatgttatatgtaatgggaactatcttataaacttgaaaaaaataaagtttttattttctataaaaaaaaaaaaaggggggggggctaaaaagtccgcggaggggcgcaagttagggtaccaagttttgtgaacagggcgcaaaggggggataaagaaaggagggcgggttaaaaggcggcggggaacaccgcgccggagacctggggaagggacgccatccgcgcgggggcacagggcggaccacaccaaagagtaacgtcgggaaaaaaacacaggggagcggtgaccacggcattcgggcggatggtcgcttagcagcaacatcaacagacgacggacacataaaacaagaacagagaagaagacagaaagacagagatgcatacaaacagcgcctgcacatcagactgcacttcgatccagccgctctcatctcgtccatagagagagggagggggggttgt

SEQ ID NO: 380981 - DNA, 2460 bp, Homo sapiens
agtgtcttatgaatttcagcttcttggctcttgagaccgaaaggttctacctattccccctgcagagaagcacccatttcccatcagatgctcgtccctgcagcttcttccttcttggtcatcataatgctaggttcttacccctttcctgccctctgcacctcatgtccacctccaggcagctctggccagtccccgggtattagacccaagaattcaaatcaaatctaaaaacatgcttataactacattttggccaaaactgccaatgtatttgacttcctttgtggaagccctaagccatatgaaggatgtcccaggtatgtatttacccagatctctgcctgaaactgaagagcagattgctgtatttaaattttcccatggaaaaccctgcttctcaaatcccattctaaagtaggaaaccagaaagactttgctgattgtggggggaagggagaaacagacaggttttcacattgttgccaaggctggtcttgaacacctggcctcaagcgatcctcccacctcggcctctcaaagtgttgggattgtaggcatgagccactgcacccagccagactttcctgatttaaatgagagtactgcatcattccctacttcatggcccaaaacttaatcctgggccaaatgcaggagcatctctcgacctctgggcagattggtgggtgcccaggcactagtcacagccttccagcccagccatgattgttggatgccccatccctccaagagcaatttgggcatctactcaggcaggataaaattccctagagctgaggaagttcagcctctcccaggctacacagagagagatgatacaagcacctcagattgagatgcaggattggtccgcagaaggaggcattgttgaccaaccccagctataattgcttgtcaccagagattctgcatacccatttccagagatgttgcagcacaaagaggcaagactccttccaatgccaggccacccagatagcaagagagagaggctggtatacacattccttcagaactcattgaaaagcgctcataactcatgattttaaggagtaagtttttgctgagtagctgaagtcagtgctcctttacttagctgcctctttggccttgtttcctgtggggttgggaggagggagatgtagtgtgaggtaggccttcccttggtctgtattcagcatagttgcctagatgctgctctgccttgtttgatggttgatcttaggaagctctaggttttactctgaggcctcaaaccctccccctatgcagtatagctgttgggtttttgtcctggacaaaggccacggctgttgtgctgcgcttcaggtttgtgaggctgcggagtggtacccccaccatgcacgcaagcacacacacacagatacttccctctccacccttttgggagctctttattttagaatgtaacttgaactcacttttatcattggcctttttcctcttactctgacttcctagcttagctctttccaaaaggaacttgaacttggccaagagaggtaaggaggctgagcagagcagtctttgctcattcctggttgttgccaccctcatttaaatggaagagagaaaacaggagcttcttggctgtttgccaaaatgaattgtccagggaacacagtgctctctgtaattaccctgcctttttctccaccccaacacaaaaatctggaaaggaaaataagtgggtaggattaagagctgttagaagctgaggaccaaaggacactgtgggtccattcatcaagggggagaccctcttcattagagtcctcatgaaattagccaaatgatgagtccttccctagctgggcatggtgggttctctttttttttttttttttttttttgttgttgttgttgagatggagtctcgctctgtcacccaggctggagtacagtggcatgatctcggctcactgcaacctccgcctcccaggttcaagcgattctcctacctcagcctcctgattagtgggattacaggcatgagccaccatgcctggccaggcactgtgggttctacaggatgggtctgtaatgtcacggtgagggctctctctagtagtagatctggagtgaggtgtgtcttgggttgaggaggtggcttgactttcgaatgtaaaactgactgtgccttagcatcaccctgtccagtgcccctggggcagctggtagtgtccagaagaatggacacctgctccagatttagatgcccatctgggcttttgtttgatttgcggctctccctctgaacttcagatgcctctgttagcaggaaaaggcattgattggattggatatatttatgtgactgcgggcatttgtggctgtagaatccgtgaccgtaatgttatatgtaatgggaactatcttataaacttgaaaaaaataaagtttttattttctata

SEQ ID NO: 380982 - DNA, 461 bp, Homo sapiens
ctgtaggggtaacacatctggcatggtgccgtggctaccttgctcactgcacatagtccacgtaggcaaaactcaaccacagtctgacacaggtcttggtagaaaacatcgtgatcctctctggatcctccatggcaagataggccatcgtaaaggagctgtcaaagggccatttatcttgcaaaatacctccctgtcttgcaaaaggctgccgtgagaattttctcatccagctggtttccagtgacctcactctcattcaggtgcagataccgactataaaaatgtttagctatagtttaggagttggctcctcaacagagctatttctacttgttcatctgttcatcttgttccccttggttcagtgttcatccaggggatgtccctaagggaccagggtattacaggggaggctgattcccttcctgatactgcttttgctgtctgtgtaaataata

SEQ ID NO: 380983 - DNA, 411 bp, Homo sapiens
actagttctagatcgcgagcggccgccctttttttttttctcttaatgaacacattttctaaatgaattttttttgtagttactgtatatgtaccaagaaagatataacgttagggtttggttgtttttgtttttgtattttttttcttttgaaagggtttgttaatttttctaattttaccaaagtttgcagcctatacctcaataaaacagggatattttaaatcacatacctgcagacaaactggagcaatgttatttttaaagggtttttttcacctccttattcttagattattaatgtattagggaagaatgagacaattttgtgtaggctttttctaaagtccagtactttgtccagattttagattctcagaataaatgtttttcacagatagaaaaaaatgt

SEQ ID NO: 380984 - DNA, 3791 bp, Homo sapiens
cgcgcgcaggcagacaagctgttcgcggcgaccggagagcgccgacaccatgtggatccaggttcggaccatggacgggaggcagacccacacggtggactcgctgtccaggctgaccaaggtggaggagctgaggcggaagatccaggagctgttccacgtggagccaggcctgcagaggctgttctacaggggcaaacagatggaggacggccataccctcttcgactacgaggtccgcctgaatgacaccatccagctcctggtccgccagagcctcgtgctcccccacagcaccaaggagcgggactccgagctctccgacaccgactccggctgctgcctgggccagagtgagtcagacaagtcctccacccacggtgaggcggccgccgagactgacagcaggccagccgatgaggacatgtgggatgagacggaattggggctgtacaaggtcaatgagtacgtcgatgctcgggacacgaacatgggggcgtggtttgaggcgcaggtggtcagggtgacgcggaaggccccctcccgggacgagccctgcagctccacgtccaggccggcgctggaggaggacgtcatttaccacgtgaaatacgacgactacccggagaacggcgtggtccagatgaactccagggacgtccgagcgcgcgcccgcaccatcatcaagtggcaggacctggaggtgggccaggtggtcatgctcaactacaaccccgacaaccccaaggagcggggcttctggtacgacgcggagatctccaggaagcgcgagaccaggacggcgcgggaactctacgccaacgtggtgctgggggatgattctctgaacgactgtcggatcatcttcgtggacgaagtcttcaagattgagcggccgggtgaagggagccccatggttgacaaccccatgagacggaagagcgggccgtcctgcaagcactgcaaggacgacgtgaacagactctgccgggtctgcgcctgccacctgtgcgggggccggcaggaccccgacaagcagctcatgtgcgatgagtgcgacatggccttccacatctactgcctggacccgcccctcagcagtgttcccagcgaggacgagtggtactgccctgagtgccggaatgatgccagcgaggtggtactggcgggagagcggctgagagagagcaagaagaaggcgaagatggcctcggccacatcgtcctcacagcgggactggggcaagggcatggcctgtgtgggccgcaccaaggaatgtaccatcgtcccgtccaaccactacggacccatcccggggatccccgtgggcaccatgtggcggttccgagtccaggtcagcgagtcgggtgtccatcggccccacgtggctggcatacacggccggagcaacgacggagcgtactccctagtcctggcggggggctatgaggatgacgtggaccatgggaattttttcacatacacgggtagtggtggtcgagatctttccggcaacaagaggaccgcggaacagtcttgtgatcagaaactcaccaacaccaacagggcgctggctctcaactgctttgctcccatcaatgaccaagaaggggccgaggccaaggactggcggtcggggaagccggtcagggtggtgcgcaatgtcaagggtggcaagaatagcaagtacgcccccgctgagggcaaccgctacgatggcatctacaaggttgtgaaatactggcccgagaaggggaagtccgggtttctcgtgtggcgctaccttctgcggagggacgatgatgagcctggcccttggacgaaggaggggaaggaccggatcaagaagctggggctgaccatgcagtatccagaaggctacctggaagccctggccaaccgagagcgagagaaggagaacagcaagagggaggaggaggagcagcaggaggggggcttcgcgtcccccaggacgggcaagggcaagtggaagcggaagtcggcaggaggtggcccgagcagggccgggtccccgcgccggacatccaagaaaaccaaggtggagccctacagtctcacggcccagcagagcagcctcatcagagaggacaagagcaacgccaagctgtggaatgaggtcctggcgtcactcaaggaccggccggcgagcggcagcccgttccagttgttcctgagtaaagtggaggagacgttccagtgtatctgctgtcaggagctggtgttccggcccatcacgaccgtgtgccagcacaacgtgtgcaaggactgcctggacagatcctttcgggcacaggtgttcagctgccctgcctgccgctacgacctgggccgcagctatgccatgcaggtgaaccagcctctgcagaccgtcctcaaccagctcttccccggctacggcaatggccggtgatctccaagcacttctcgacaggcgttttgctgaaaacgtgtcggagggctcgttcatcggcactgattttgttcttagtgggcttaacttaaacaggtagtgtttcctccgttccctaaaaaggtttgtcttcctttttttttttatttttatttttcaaatctatacattttcaggaatttatgtattctggctaaaagttggacttctcagtattgtgtttagttctttgaaaacataaaagcctgcaatttctcgacaaaacaacacaagattttttaaagatggaatcagaaactacgtggtgtggaggctgttgatgtttctggtgtcaagttctcagaagttgctgccaccaactctttaagaaggcgacaggatcagtccttctctcgggttctggcccccaaggtcagagcaagcatcttcctgacagcattttgtcatctaaagtccagtgacatggttccccgtggtggcccgtggcagcccgtggcatggcgtggctcagctgtctgttgaagttgttgcaaggaaaagaggaaacatctcgggcctagttcaaacctttgcctcaaagccatcccccaccagactgcttagcgtctgagatccgcgtgaaaagtcctctgcccacgagagcagggagttggggccacgcagaaatggcctcaaggggactctgctccacgtggggccaggcgtgtgactgacgctgtccgacgaaggcggccacggacggacgccagcacacgaagtcacgtgcaagtgcctttgattcgttccttctttctaaagacgacagtctttgttgttagcactgaattattgaaaatgtcaaccagattctagaaactgcggtcatccagttcttcctgacaccggatgggtgcttgggaaccgtttgagccttatagatcatttacattcaatttttttaactcagcaagtgagaacttacaagagggtttttttttaatttttttttctcttaatgaacacattttctaaatgaattttttttgtagttactgtatatgtaccaagaaagatataacgttagggtttggttgtttttgtttttgtattttttttcttttgaaagggtttgttaatttttctaattttaccaaagtttgcagcctatacctcaataaaacagggatattttaaatcacatacctgcagacaaactggagcaatgttatttttaaagggtttttttcacctccttattcttagattattaatgtattagggaagaatgagacaattttgtgtaggctttttctaaagtccagtactttgtccagattttagattctcagaataaatgtttttcacagatagaaaaaaatgt

SEQ ID NO: 380985 - DNA, 3784 bp, Homo sapiens
ggggcgcgagctgccgggggttggaggtcgagcgccgacaccatgtggatccaggttcggaccatggacgggaggcagacccacacggtggactcgctgtccaggctgaccaaggtggaggagctgaggcggaagatccaggagctgttccacgtggagccaggcctgcagaggctgttctacaggggcaaacagatggaggacggccataccctcttcgactacgaggtccgcctgaatgacaccatccagctcctggtccgccagagcctcgtgctcccccacagcaccaaggagcgggactccgagctctccgacaccgactccggctgctgcctgggccagagtgagtcagacaagtcctccacccacggtgaggcggccgccgagactgacagcaggccagccgatgaggacatgtgggatgagacggaattggggctgtacaaggtcaatgagtacgtcgatgctcgggacacgaacatgggggcgtggtttgaggcgcaggtggtcagggtgacgcggaaggccccctcccgggacgagccctgcagctccacgtccaggccggcgctggaggaggacgtcatttaccacgtgaaatacgacgactacccggagaacggcgtggtccagatgaactccagggacgtccgagcgcgcgcccgcaccatcatcaagtggcaggacctggaggtgggccaggtggtcatgctcaactacaaccccgacaaccccaaggagcggggcttctggtacgacgcggagatctccaggaagcgcgagaccaggacggcgcgggaactctacgccaacgtggtgctgggggatgattctctgaacgactgtcggatcatcttcgtggacgaagtcttcaagattgagcggccgggtgaagggagccccatggttgacaaccccatgagacggaagagcgggccgtcctgcaagcactgcaaggacgacgtgaacagactctgccgggtctgcgcctgccacctgtgcgggggccggcaggaccccgacaagcagctcatgtgcgatgagtgcgacatggccttccacatctactgcctggacccgcccctcagcagtgttcccagcgaggacgagtggtactgccctgagtgccggaatgatgccagcgaggtggtactggcgggagagcggctgagagagagcaagaagaaggcgaagatggcctcggccacatcgtcctcacagcgggactggggcaagggcatggcctgtgtgggccgcaccaaggaatgtaccatcgtcccgtccaaccactacggacccatcccggggatccccgtgggcaccatgtggcggttccgagtccaggtcagcgagtcgggtgtccatcggccccacgtggctggcatacacggccggagcaacgacggagcgtactccctagtcctggcggggggctatgaggatgacgtggaccatgggaattttttcacatacacgggtagtggtggtcgagatctttccggcaacaagaggaccgcggaacagtcttgtgatcagaaactcaccaacaccaacagggcgctggctctcaactgctttgctcccatcaatgaccaagaaggggccgaggccaaggactggcggtcggggaagccggtcagggtggtgcgcaatgtcaagggtggcaagaatagcaagtacgcccccgctgagggcaaccgctacgatggcatctacaaggttgtgaaatactggcccgagaaggggaagtccgggtttctcgtgtggcgctaccttctgcggagggacgatgatgagcctggcccttggacgaaggaggggaaggaccggatcaagaagctggggctgaccatgcagtatccagaaggctacctggaagccctggccaaccgagagcgagagaaggagaacagcaagagggaggaggaggagcagcaggaggggggcttcgcgtcccccaggacgggcaagggcaagtggaagcggaagtcggcaggaggtggcccgagcagggccgggtccccgcgccggacatccaagaaaaccaaggtggagccctacagtctcacggcccagcagagcagcctcatcagagaggacaagagcaacgccaagctgtggaatgaggtcctggcgtcactcaaggaccggccggcgagcggcagcccgttccagttgttcctgagtaaagtggaggagacgttccagtgtatctgctgtcaggagctggtgttccggcccatcacgaccgtgtgccagcacaacgtgtgcaaggactgcctggacagatcctttcgggcacaggtgttcagctgccctgcctgccgctacgacctgggccgcagctatgccatgcaggtgaaccagcctctgcagaccgtcctcaaccagctcttccccggctacggcaatggccggtgatctccaagcacttctcgacaggcgttttgctgaaaacgtgtcggagggctcgttcatcggcactgattttgttcttagtgggcttaacttaaacaggtagtgtttcctccgttccctaaaaaggtttgtcttcctttttttttttatttttatttttcaaatctatacattttcaggaatttatgtattctggctaaaagttggacttctcagtattgtgtttagttctttgaaaacataaaagcctgcaatttctcgacaaaacaacacaagattttttaaagatggaatcagaaactacgtggtgtggaggctgttgatgtttctggtgtcaagttctcagaagttgctgccaccaactctttaagaaggcgacaggatcagtccttctctcgggttctggcccccaaggtcagagcaagcatcttcctgacagcattttgtcatctaaagtccagtgacatggttccccgtggtggcccgtggcagcccgtggcatggcgtggctcagctgtctgttgaagttgttgcaaggaaaagaggaaacatctcgggcctagttcaaacctttgcctcaaagccatcccccaccagactgcttagcgtctgagatccgcgtgaaaagtcctctgcccacgagagcagggagttggggccacgcagaaatggcctcaaggggactctgctccacgtggggccaggcgtgtgactgacgctgtccgacgaaggcggccacggacggacgccagcacacgaagtcacgtgcaagtgcctttgattcgttccttctttctaaagacgacagtctttgttgttagcactgaattattgaaaatgtcaaccagattctagaaactgcggtcatccagttcttcctgacaccggatgggtgcttgggaaccgtttgagccttatagatcatttacattcaatttttttaactcagcaagtgagaacttacaagagggtttttttttaatttttttttctcttaatgaacacattttctaaatgaattttttttgtagttactgtatatgtaccaagaaagatataacgttagggtttggttgtttttgtttttgtattttttttcttttgaaagggtttgttaatttttctaattttaccaaagtttgcagcctatacctcaataaaacagggatattttaaatcacatacctgcagacaaactggagcaatgttatttttaaagggtttttttcacctccttattcttagattattaatgtattagggaagaatgagacaattttgtgtaggctttttctaaagtccagtactttgtccagattttagattctcagaataaatgtttttcacagatagaaaaaaatgt

SEQ ID NO: 380986 - DNA, 3772 bp, Homo sapiens
cgactccttagagcatggcatggctcagaggtgctggtaaaactgatgggggtttttgctgtccctcccctcagcgccgacaccatgtggatccaggttcggaccatggacgggaggcagacccacacggtggactcgctgtccaggctgaccaaggtggaggagctgaggcggaagatccaggagctgttccacgtggagccaggcctgcagaggctgttctacaggggcaaacagatggaggacggccataccctcttcgactacgaggtccgcctgaatgacaccatccagctcctggtccgccagagcctcgtgctcccccacagcaccaaggagcgggactccgagctctccgacaccgactccggctgctgcctgggccagagtgagtcagacaagtcctccacccacggtgaggcggccgccgagactgacagcaggccagccgatgaggacatgtgggatgagacggaattggggctgtacaaggtcaatgagtacgtcgatgctcgggacacgaacatgggggcgtggtttgaggcgcaggtggtcagggtgacgcggaaggccccctcccgggacgagccctgcagctccacgtccaggccggcgctggaggaggacgtcatttaccacgtgaaatacgacgactacccggagaacggcgtggtccagatgaactccagggacgtccgagcgcgcgcccgcaccatcatcaagtggcaggacctggaggtgggccaggtggtcatgctcaactacaaccccgacaaccccaaggagcggggcttctggtacgacgcggagatctccaggaagcgcgagaccaggacggcgcgggaactctacgccaacgtggtgctgggggatgattctctgaacgactgtcggatcatcttcgtggacgaagtcttcaagattgagcggccgggtgaagggagccccatggttgacaaccccatgagacggaagagcgggccgtcctgcaagcactgcaaggacgacgtgaacagactctgccgggtctgcgcctgccacctgtgcgggggccggcaggaccccgacaagcagctcatgtgcgatgagtgcgacatggccttccacatctactgcctggacccgcccctcagcagtgttcccagcgaggacgagtggtactgccctgagtgccggaatgatgccagcgaggtggtactggcgggagagcggctgagagagagcaagaagaaggcgaagatggcctcggccacatcgtcctcacagcgggactggggcaagggcatggcctgtgtgggccgcaccaaggaatgtaccatcgtcccgtccaaccactacggacccatcccggggatccccgtgggcaccatgtggcggttccgagtccaggtcagcgagtcgggtgtccatcggccccacgtggctggcatacacggccggagcaacgacggagcgtactccctagtcctggcggggggctatgaggatgacgtggaccatgggaattttttcacatacacgggtagtggtggtcgagatctttccggcaacaagaggaccgcggaacagtcttgtgatcagaaactcaccaacaccaacagggcgctggctctcaactgctttgctcccatcaatgaccaagaaggggccgaggccaaggactggcggtcggggaagccggtcagggtggtgcgcaatgtcaagggtggcaagaatagcaagtacgcccccgctgagggcaaccgctacgatggcatctacaaggttgtgaaatactggcccgagaaggggaagtccgggtttctcgtgtggcgctaccttctgcggagggacgatgatgagcctggcccttggacgaaggaggggaaggaccggatcaagaagctggggctgaccatgcagtatccagaaggctacctggaagccctggccaaccgagagcgagagaaggagaacagcaagagggaggaggaggagcagcaggaggggggcttcgcgtcccccaggacgggcaagggcaagtggaagcggaagtcggcaggaggtggcccgagcagggccgggtccccgcgccggacatccaagaaaaccaaggtggagccctacagtctcacggcccagcagagcagcctcatcagagaggacaagagcaacgccaagctgtggaatgaggtcctggcgtcactcaaggaccggccggcgagcggcagcccgttccagttgttcctgagtaaagtggaggagacgttccagtgtatctgctgtcaggagctggtgttccggcccatcacgaccgtgtgccagcacaacgtgtgcaaggactgcctggacagatcctttcgggcacaggtgttcagctgccctgcctgccgctacgacctgggccgcagctatgccatgcaggtgaaccagcctctgcagaccgtcctcaaccagctcttccccggctacggcaatggccggtgatctccaagcacttctcgacaggcgttttgctgaaaacgtgtcggagggctcgttcatcggcactgattttgttcttagtgggcttaacttaaacaggtagtgtttcctccgttccctaaaaaggtttgtcttcctttttttttttatttttatttttcaaatctatacattttcaggaatttatgtattctggctaaaagttggacttctcagtattgtgtttagttctttgaaaacataaaagcctgcaatttctcgacaaaacaacacaagattttttaaagatggaatcagaaactacgtggtgtggaggctgttgatgtttctggtgtcaagttctcagaagttgctgccaccaactctttaagaaggcgacaggatcagtccttctctcgggttctggcccccaaggtcagagcaagcatcttcctgacagcattttgtcatctaaagtccagtgacatggttccccgtggtggcccgtggcagcccgtggcatggcgtggctcagctgtctgttgaagttgttgcaaggaaaagaggaaacatctcgggcctagttcaaacctttgcctcaaagccatcccccaccagactgcttagcgtctgagatccgcgtgaaaagtcctctgcccacgagagcagggagttggggccacgcagaaatggcctcaaggggactctgctccacgtggggccaggcgtgtgactgacgctgtccgacgaaggcggccacggacggacgccagcacacgaagtcacgtgcaagtgcctttgattcgttccttctttctaaagacgacagtctttgttgttagcactgaattattgaaaatgtcaaccagattctagaaactgcggtcatccagttcttcctgacaccggatgggtgcttgggaaccgtttgagccttatagatcatttacattcaatttttttaactcagcaagtgagaacttacaagagggtttttttttaatttttttttctcttaatgaacacattttctaaatgaattttttttgtagttactgtatatgtaccaagaaagatataacgttagggtttggttgtttttgtttttgtattttttttcttttgaaagggtttgttaatttttctaattttaccaaagtttgcagcctatacctcaataaaacagggatattttaaatcacatacctgcagacaaactggagcaatgttatttttaaagggttttttttttttttttttccaaaaaacccccccccccccttttttttcccccccccttttttttttttaagctttttctaaagcccag

SEQ ID NO: 380987 - DNA, 1601 bp, Homo sapiens
caaggactgcctggacagatccttgcacacgttgtgctggcacacggtcgtgatgggccggaacaccagctcctgacagcagaacgtgtgcaaggactgcctggacagatcctttcgggcacaggtgttcagctgccctgcctgccgctacgacctgggccgcagctatgccatgcaggtgaaccagcctctgcagaccgtcctcaaccagctcttccccggctacggcaatggccggtgatctccaagcacttctcgacaggcgttttgctgaaaacgtgtcggagggctcgttcatcggcactgattttgttcttagtgggcttaacttaaacaggtagtgtttcctccgttccctaaaaaggtttgtcttcctttttttttttatttttatttttcaaatctatacattttcaggaatttatgtattctggctaaaagttggacttctcagtattgtgtttagttctttgaaaacataaaagcctgcaatttctcgacaaaacaacacaagattttttaaagatggaatcagaaactacgtggtgtggaggctgttgatgtttctggtgtcaagttctcagaagttgctgccaccaactctttaagaaggcgacaggatcagtccttctctcgggttctggcccccaaggtcagagcaagcatcttcctgacagcattttgtcatctaaagtccagtgacatggttccccgtggtggcccgtggcagcccgtggcatggcgtggctcagctgtctgttgaagttgttgcaaggaaaagaggaaacatctcgggcctagttcaaacctttgcctcaaagccatcccccaccagactgcttagcgtctgagatccgcgtgaaaagtcctctgcccacgagagcagggagttggggccacgcagaaatggcctcaaggggactctgctccacgtggggccaggcgtgtgactgacgctgtccgacgaaggcggccacggacggacgccagcacacgaagtcacgtgcaagtgcctttgattcgttccttctttctaaagacgacagtctttgttgttagcactgaattattgaaaatgtcaaccagattctagaaactgcggtcatccagttcttcctgacaccggatgggtgcttgggaaccgtttgagccttatagatcatttacattcaatttttttaactcagcaagtgagaacttacaagagggtttttttttaatttttttttctcttaatgaacacattttctaaatgaattttttttgtagttactgtatatgtaccaagaaagatataacgttagggtttggttgtttttgtttttgtattttttttcttttgaaagggtttgttaatttttctaattttaccaaagtttgcagcctatacctcaataaaacagggatattttaaatcacatacctgcagacaaactggagcaatgttatttttaaagggtttttttcacctccttattcttagattattaatgtattagggaagaatgagacaattttgtgtaggctttttctaaagtccagtactttgtccagattttagattctcagaataaatgtttttcacagatagaaaaaaatgt

SEQ ID NO: 380988 - DNA, 1585 bp, Homo sapiens
  misc_feature (13)..(13): n is a, c, g, or t
  misc_feature (17)..(17): n is a, c, g, or t
  misc_feature (64)..(64): n is a, c, g, or t
gtccatgtcctanaagnaagaacgtccaggattgctgcagactgtgtcggcccatacgacgggncacacaaggtgtcagactgcctggacagatcctttcgggcacaggtgttcagctgccctgcctgccgctacgacctgggccgcagctatgccatgcaggtgaaccagcctctgcagaccgtcctcaaccagctcttccccggctacggcaatggccggtgatctccaagcacttctcgacaggcgttttgctgaaaacgtgtcggagggctcgttcatcggcactgattttgttcttagtgggcttaacttaaacaggtagtgtttcctccgttccctaaaaaggtttgtcttcctttttttttttatttttatttttcaaatctatacattttcaggaatttatgtattctggctaaaagttggacttctcagtattgtgtttagttctttgaaaacataaaagcctgcaatttctcgacaaaacaacacaagattttttaaagatggaatcagaaactacgtggtgtggaggctgttgatgtttctggtgtcaagttctcagaagttgctgccaccaactctttaagaaggcgacaggatcagtccttctctcgggttctggcccccaaggtcagagcaagcatcttcctgacagcattttgtcatctaaagtccagtgacatggttccccgtggtggcccgtggcagcccgtggcatggcgtggctcagctgtctgttgaagttgttgcaaggaaaagaggaaacatctcgggcctagttcaaacctttgcctcaaagccatcccccaccagactgcttagcgtctgagatccgcgtgaaaagtcctctgcccacgagagcagggagttggggccacgcagaaatggcctcaaggggactctgctccacgtggggccaggcgtgtgactgacgctgtccgacgaaggcggccacggacggacgccagcacacgaagtcacgtgcaagtgcctttgattcgttccttctttctaaagacgacagtctttgttgttagcactgaattattgaaaatgtcaaccagattctagaaactgcggtcatccagttcttcctgacaccggatgggtgcttgggaaccgtttgagccttatagatcatttacattcaatttttttaactcagcaagtgagaacttacaagagggtttttttttaatttttttttctcttaatgaacacattttctaaatgaattttttttgtagttactgtatatgtaccaagaaagatataacgttagggtttggttgtttttgtttttgtattttttttcttttgaaagggtttgttaatttttctaattttaccaaagtttgcagcctatacctcaataaaacagggatattttaaatcacatacctgcagacaaactggagcaatgttatttttaaagggtttttttcacctccttattcttagattattaatgtattagggaagaatgagacaattttgtgtaggctttttctaaagtccagtactttgtccagattttagattctcagaataaatgtttttcacagatagaaaaaaatgt

SEQ ID NO: 380989 - DNA, 374 bp, Homo sapiens
ggcctctgcacactgtcgggaggggccgtcccacctcggctcgtttcccattgagggaaggaggcttggtcttagcacggggtctaaggcccgggctttcctcccagctacccggagaacggcgtggtccagatgaactccagggacgtccgagcgcgcgcccgcaccatcatcaagtggcaggacctggaggtgggccaggtggtcatgctcaactacaaccccgacaaccccaaggagcggggcttctggtacgacgcggagatctccaggaagcgcgagaccaggacggcgcgggaactctacgccaacgtggtgctggggtgagcctcgcgtcctggggcgagcccttcctctctcctttcctcccctcc

SEQ ID NO: 380990 - DNA, 3826 bp, Homo sapiens
cgactccttagagcatggcatggctcagaggtgctggtaaaactgatgggggtttttgctgtccctcccctcagcgccgacaccatgtggatccaggttcggaccatggacgggaggcagacccacacggtggactcgctgtccaggctgaccaaggtggaggagctgaggcggaagatccaggagctgttccacgtggagccaggcctgcagaggctgttctacaggggcaaacagatggaggacggccataccctcttcgactacgaggtccgcctgaatgacaccatccagctcctggtccgccagagcctcgtgctcccccacagcaccaaggagcgggactccgagctctccgacaccgactccggctgctgcctgggccagagtgagtcagacaagtcctccacccacggtgaggcggccgccgagactgacagcaggccagccgatgaggacatgtgggatgagacggaattggggctgtacaaggtcaatgagtacgtcgatgctcgggacacgaacatgggggcgtggtttgaggcgcaggtggtcagggtgacgcggaaggccccctcccgggacgagccctgcagctccacgtccaggccggcgctggaggaggacgtcatttaccacgtgaaatacgacgactacccggagaacggcgtggtccagatgaactccagggacgtccgagcgcgcgcccgcaccatcatcaagtggcaggacctggaggtgggccaggtggtcatgctcaactacaaccccgacaaccccaaggagcggggcttctggtacgacgcggagatctccaggaagcgcgagaccaggacggcgcgggaactctacgccaacgtggtgctgggggatgattctctgaacgactgtcggatcatcttcgtggacgaagtcttcaagattgagcggccgggtgaagggagccccatggttgacaaccccatgagacggaagagcgggccgtcctgcaagcactgcaaggacgacgtgaacagactctgccgggtctgcgcctgccacctgtgcgggggccggcaggaccccgacaagcagctcatgtgcgatgagtgcgacatggccttccacatctactgcctggacccgcccctcagcagtgttcccagcgaggacgagtggtactgccctgagtgccggaatgatgccagcgaggtggtactggcgggagagcggctgagagagagcaagaagaaggcgaagatggcctcggccacatcgtcctcacagcgggactggggcaagggcatggcctgtgtgggccgcaccaaggaatgtaccatcgtcccgtccaaccactacggacccatcccggggatccccgtgggcaccatgtggcggttccgagtccaggtcagcgagtcgggtgtccatcggccccacgtggctggcatacacggccggagcaacgacggagcgtactccctagtcctggcggggggctatgaggatgacgtggaccatgggaattttttcacatacacgggtagtggtggtcgagatctttccggcaacaagaggaccgcggaacagtcttgtgatcagaaactcaccaacaccaacagggcgctggctctcaactgctttgctcccatcaatgaccaagaaggggccgaggccaaggactggcggtcggggaagccggtcagggtggtgcgcaatgtcaagggtggcaagaatagcaagtacgcccccgctgagggcaaccgctacgatggcatctacaaggttgtgaaatactggcccgagaaggggaagtccgggtttctcgtgtggcgctaccttctgcggagggacgatgatgagcctggcccttggacgaaggaggggaaggaccggatcaagaagctggggctgaccatgcagtatccagaaggctacctggaagccctggccaaccgagagcgagagaaggagaacagcaagagggaggaggaggagcagcaggaggggggcttcgcgtcccccaggacgggcaagggcaagtggaagcggaagtcggcaggaggtggcccgagcagggccgggtccccgcgccggacatccaagaaaaccaaggtggagccctacagtctcacggcccagcagagcagcctcatcagagaggacaagagcaacgccaagctgtggaatgaggtcctggcgtcactcaaggaccggccggcgagcggcagcccgttccagttgttcctgagtaaagtggaggagacgttccagtgtatctgctgtcaggagctggtgttccggcccatcacgaccgtgtgccagcacaacgtgtgcaaggactgcctggacagatcctttcgggcacaggtgttcagctgccctgcctgccgctacgacctgggccgcagctatgccatgcaggtgaaccagcctctgcagaccgtcctcaaccagctcttccccggctacggcaatggccggtgatctccaagcacttctcgacaggcgttttgctgaaaacgtgtcggagggctcgttcatcggcactgattttgttcttagtgggcttaacttaaacaggtagtgtttcctccgttccctaaaaaggtttgtcttcctttttttttttatttttatttttcaaatctatacattttcaggaatttatgtattctggctaaaagttggacttctcagtattgtgtttagttctttgaaaacataaaagcctgcaatttctcgacaaaacaacacaagattttttaaagatggaatcagaaactacgtggtgtggaggctgttgatgtttctggtgtcaagttctcagaagttgctgccaccaactctttaagaaggcgacaggatcagtccttctctcgggttctggcccccaaggtcagagcaagcatcttcctgacagcattttgtcatctaaagtccagtgacatggttccccgtggtggcccgtggcagcccgtggcatggcgtggctcagctgtctgttgaagttgttgcaaggaaaagaggaaacatctcgggcctagttcaaacctttgcctcaaagccatcccccaccagactgcttagcgtctgagatccgcgtgaaaagtcctctgcccacgagagcagggagttggggccacgcagaaatggcctcaaggggactctgctccacgtggggccaggcgtgtgactgacgctgtccgacgaaggcggccacggacggacgccagcacacgaagtcacgtgcaagtgcctttgattcgttccttctttctaaagacgacagtctttgttgttagcactgaattattgaaaatgtcaaccagattctagaaactgcggtcatccagttcttcctgacaccggatgggtgcttgggaaccgtttgagccttatagatcatttacattcaatttttttaactcagcaagtgagaacttacaagagggtttttttttaatttttttttctcttaatgaacacattttctaaatgaattttttttgtagttactgtatatgtaccaagaaagatataacgttagggtttggttgtttttgtttttgtattttttttcttttgaaagggtttgttaatttttctaattttaccaaagtttgcagcctatacctcaataaaacagggatattttaaatcacatacctgcagacaaactggagcaatgttatttttaaagggtttttttcacctccttattcttagattattaatgtattagggaagaatgagacaattttgtgtaggctttttctaaagtccagtactttgtccagattttagattctcagaataaatgtttttcacagatagaaaaaaatgt

SEQ ID NO: 380991 - DNA, 3800 bp, Homo sapiens
cgactccttagagcatggcatggctcagaggtgctggtaaaactgatgggggtttttgctgtccctcccctcagcgccgacaccatgtggatccaggttcggaccatggacgggaggcagacccacacggtggactcgctgtccaggctgaccaaggtggaggagctgaggcggaagatccaggagctgttccacgtggagccaggcctgcagaggctgttctacaggggcaaacagatggaggacggccataccctcttcgactacgaggtccgcctgaatgacaccatccagctcctggtccgccagagcctcgtgctcccccacagcaccaaggagcgggactccgagctctccgacaccgactccggctgctgcctgggccagagtgagtcagacaagtcctccacccacggtgaggcggccgccgagactgacagcaggccagccgatgaggacatgtgggatgagacggaattggggctgtacaaggtcaatgagtacgtcgatgctcgggacacgaacatgggggcgtggtttgaggcgcaggtggtcagggtgacgcggaaggccccctcccgggacgagccctgcagctccacgtccaggccggcgctggaggaggacgtcatttaccacgtgaaatacgacgactacccggagaacggcgtggtccagatgaactccagggacgtccgagcgcgcgcccgcaccatcatcaagtggcaggacctggaggtgggccaggtggtcatgctcaactacaaccccgacaaccccaaggagcggggcttctggtacgacgcggagatctccaggaagcgcgagaccaggacggcgcgggaactctacgccaacgtggtgctgggggatgattctctgaacgactgtcggatcatcttcgtggacgaagtcttcaagattgagcggccgggtgaagggagccccatggttgacaaccccatgagacggaagagcgggccgtcctgcaagcactgcaaggacgacgtgaacagactctgccgggtctgcgcctgccacctgtgcgggggccggcaggaccccgacaagcagctcatgtgcgatgagtgcgacatggccttccacatctactgcctggacccgcccctcagcagtgttcccagcgaggacgagtggtactgccctgagtgccggaatgatgccagcgaggtggtactggcgggagagcggctgagagagagcaagaagaaggcgaagatggcctcggccacatcgtcctcacagcgggactggggcaagggcatggcctgtgtgggccgcaccaaggaatgtaccatcgtcccgtccaaccactacggacccatcccggggatccccgtgggcaccatgtggcggttccgagtccaggtcagcgagtcgggtgtccatcggccccacgtggctggcatacacggccggagcaacgacggagcgtactccctagtcctggcggggggctatgaggatgacgtggaccatgggaattttttcacatacacgggtagtggtggtcgagatctttccggcaacaagaggaccgcggaacagtcttgtgatcagaaactcaccaacaccaacagggcgctggctctcaactgctttgctcccatcaatgaccaagaaggggccgaggccaaggactggcggtcggggaagccggtcagggtggtgcgcaatgtcaagggtggcaagaatagcaagtacgcccccgctgagggcaaccgctacgatggcatctacaaggttgtgaaatactggcccgagaaggggaagtccgggtttctcgtgtggcgctaccttctgcggagggacgatgatgagcctggcccttggacgaaggaggggaaggaccggatcaagaagctggggctgaccatgcagtatccagaaggctacctggaagccctggccaaccgagagcgagagaaggagaacagcaagagggaggaggaggagcagcaggaggggggcttcgcgtcccccaggacgggcaagggcaagtggaagcggaagtcggcaggaggtggcccgagcagggccgggtccccgcgccggacatccaagaaaaccaaggtggagccctacagtctcacggcccagcagagcagcctcatcagagaggacaagagcaacgccaagctgtggaatgaggtcctggcgtcactcaaggaccggccggcgagcggcagcccgttccagttgttcctgagtaaagtggaggagacgttccagtgtatctgctgtcaggagctggtgttccggcccatcacgaccgtgtgccagcacaacgtgtgcaaggactgcctggacagatcctttcgggcacaggtgttcagctgccctgcctgccgctacgacctgggccgcagctatgccatgcaggtgaaccagcctctgcagaccgtcctcaaccagctcttccccggctacggcaatggccggtgatctccaagcacttctcgacaggcgttttgctgaaaacgtgtcggagggctcgttcatcggcactgattttgttcttagtgggcttaacttaaacaggtagtgtttcctccgttccctaaaaaggtttgtcttcctttttttttttatttttatttttcaaatctatacattttcaggaatttatgtattctggctaaaagttggacttctcagtattgtgtttagttctttgaaaacataaaagcctgcaatttctcgacaaaacaacacaagattttttaaagatggaatcagaaactacgtggtgtggaggctgttgatgtttctggtgtcaagttctcagaagttgctgccaccaactctttaagaaggcgacaggatcagtccttctctcgggttctggcccccaaggtcagagcaagcatcttcctgacagcattttgtcatctaaagtccagtgacatggttccccgtggtggcccgtggcagcccgtggcatggcgtggctcagctgtctgttgaagttgttgcaaggaaaagaggaaacatctcgggcctagttcaaacctttgcctcaaagccatcccccaccagactgcttagcgtctgagatccgcgtgaaaagtcctctgcccacgagagcagggagttggggccacgcagaaatggcctcaaggggactctgctccacgtggggccaggcgtgtgactgacgctgtccgacgaaggcggccacggacggacgccagcacacgaagtcacgtgcaagtgcctttgattcgttccttctttctaaagacgacagtctttgttgttagcactgaattattgaaaatgtcaaccagattctagaaactgcggtcatccagttcttcctgacaccggatgggtgcttgggaaccgtttgagccttatagatcatttacattcaatttttttaactcagcaagtgagaacttacaagagggtttttttttaatttttttttctttttttttgtagttactgtatatgtaccaagaaagatataacgttagggtttggttgtttttgtttttgtattttttttcttttgaaagggtttgttaatttttctaattttaccaaagtttgcagcctatacctcaataaaacagggatattttaaatcacatacctgcagacaaactggagcaatgttatttttaaagggtttttttcacctccttattcttagattattaatgtattagggaagaatgagacaattttgtgtaggctttttctaaagtccagtactttgtccagattttagattctcagaataaatgtttttcacagatagaaaaaaatgt

SEQ ID NO: 380992 - DNA, 3404 bp, Homo sapiens
cgactccttagagcatggcatggctcagaggtgctggtaaaactgatgggggtttttgctgtccctcccctcagcgccgacaccatgtggatccaggttcggaccatggacgggaggcagacccacacggtggactcgctgtccaggctgaccaaggtggaggagctgaggcggaagatccaggagctgttccacgtggagccaggcctgcagaggctgttctacaggggcaaacagatggaggacggccataccctcttcgactacgaggtccgcctgaatgacaccatccagctcctggtccgccagagcctcgtgctcccccacagcaccaaggagcgggactccgagctctccgacaccgactccggctgctgcctgggccagagtgagtcagacaagtcctccacccacggtgaggcggccgccgagactgacagcaggccagccgatgaggacatgtgggatgagacggaattggggctgtacaaggtcaatgagtacgtcgatgctcgggacacgaacatgggggcgtggtttgaggcgcaggtggtcagggtgacgcggaaggccccctcccgggacgagccctgcagctccacgtccaggccggcgctggaggaggacgtcatttaccacgtgaaatacgacgactacccggagaacggcgtggtccagatgaactccagggacgtccgagcgcgcgcccgcaccatcatcaagtggcaggacctggaggtgggccaggtggtcatgctcaactacaaccccgacaaccccaaggagcggggcttctggtacgacgcggagatctccaggaagcgcgagaccaggacggcgcgggaactctacgccaacgtggtgctgggggatgattctctgaacgactgtcggatcatcttcgtggacgaagtcttcaagattgagcggccgggtgaagggagccccatggttgacaaccccatgagacggaagagcgggccgtcctgcaagcactgcaaggacgacgtgaacagactctgccgggtctgcgcctgccacctgtgcgggggccggcaggaccccgacaagcagctcatgtgcgatgagtgcgacatggccttccacatctactgcctggacccgcccctcagcagtgttcccagcgaggacgagtggtactgccctgagtgccggaatgatgccagcgaggtggtactggcgggagagcggctgagagagagcaagaagaaggcgaagatggcctcggccacatcgtcctcacagcgggactggggcaagggcatggcctgtgtgggccgcaccaaggaatgtaccatcgtcccgtccaaccactacggacccatcccggggatccccgtgggcaccatgtggcggttccgagtccaggtcagcgagtcgggtgtccatcggccccacgtggctggcatacacggccggagcaacgacggagcgtactccctagtcctggcggggggctatgaggatgacgtggaccatgggaattttttcacatacacgggtagtggtggtcgagatctttccggcaacaagaggaccgcggaacagtcttgtgatcagaaactcaccaacaccaacagggcgctggctctcaactgctttgctcccatcaatgaccaagaaggggccgaggccaaggactggcggtcggggaagccggtcagggtggtgcgcaatgtcaagggtggcaagaatagcaagtacgcccccgctgagggcaaccgctacgatggcatctacaaggttgtgaaatactggcccgagaaggggaagtccgggtttctcgtgtggcgctaccttctgcggagggacgatgatgagcctggcccttggacgaaggaggggaaggaccggatcaagaagctggggctgaccatgcagtatccagaaggctacctggaagccctggccaaccgagagcgagagaaggagaacagcaagagggaggaggaggagcagcaggaggggggcttcgcgtcccccaggacgggcaagggcaagtggaagcggaagtcggcaggaggtggcccgagcagggccgggtccccgcgccggacatccaagaaaaccaaggtggagccctacagtctcacggcccagcagagcagcctcatcagagaggacaagagcaacgccaagctgtggaatgaggtcctggcgtcactcaaggaccggccggcgagcggcagcccgttccagttgttcctgagtaaagtggaggagacgttccagtgtatctgctgtcaggagctggtgttccggcccatcacgaccgtgtgccagcacaacgtgtgcaaggactgcctggacagatcctttcgggcacaggtgttcagctgccctgcctgccgctacgacctgggccgcagctatgccatgcaggtgaaccagcctctgcagaccgtcctcaaccagctcttccccggctacggcaatggccggtgatctccaagcacttctcgacaggcgttttgctgaaaacgtgtcggagggctcgttcatcggcactgattttgttcttagtgggcttaacttaaacaggtagtgtttcctccgttccctaaaaaggtttgtcttcctttttttttttatttttatttttcaaatctatacattttcaggaatttatgtattctggctaaaagttggacttctcagtattgtgtttagttctttgaaaacataaaagcctgcaatttctcgacaaaacaacacaagattttttaaagatggaatcagaaactacgtggtgtggaggctgttgatgtttctggtgtcaagttctcagaagttgctgccaccaactctttaagaaggcgacaggatcagtccttctctcgggttctggcccccaaggtcagagcaagcatcttcctgacagcattttgtcatctaaagtccagtgacatggttccccgtggtggcccgtggcagcccgtggcatggcgtggctcagctgtctgttgaagttgttgcaaggaaaagaggaaacatctcgggcctagttcaaacctttgcctcaaagccatcccccaccagactgcttagcgtctgagatccgcgtgaaaagtcctctgcccacgagagcagggagttggggccacgcagaaatggcctcaaggggactctgctccacgtggggccaggcgtgtgactgacgctgtccgacgaaggcggcgttggatgcattcgactgcatccaacgccgccttcaaagtcctcgttggaatattttgctactaaccaccaagatctgcaccttggggggatcccacccggggcccggcgccccttaggtttcaagggctcaccgaagcggcccctcctactcgtcgcggcgtagcgtcggcgcggggttggatgcagtcagggcggcgttggat

SEQ ID NO: 380993 - DNA, 1550 bp, Homo sapiens
  misc_feature (8)..(8): n is a, c, g, or t
ccgggtantggtatcgtcgaccagcgtcggccaacgtgtgccggactgcctggacagatcctttcgggcacaggtgttcagctgccctgcctgccgctacgacctgggccgcagctatgccatgcaggtgaaccagcctctgcagaccgtcctcaaccagctcttccccggctacggcaatggccggtgatctccaagcacttctcgacaggcgttttgctgaaaacgtgtcggagggctcgttcatcggcactgattttgttcttagtgggcttaacttaaacaggtagtgtttcctccgttccctaaaaaggtttgtcttcctttttttttttatttttatttttcaaatctatacattttcaggaatttatgtattctggctaaaagttggacttctcagtattgtgtttagttctttgaaaacataaaagcctgcaatttctcgacaaaacaacacaagattttttaaagatggaatcagaaactacgtggtgtggaggctgttgatgtttctggtgtcaagttctcagaagttgctgccaccaactctttaagaaggcgacaggatcagtccttctctcgggttctggcccccaaggtcagagcaagcatcttcctgacagcattttgtcatctaaagtccagtgacatggttccccgtggtggcccgtggcagcccgtggcatggcgtggctcagctgtctgttgaagttgttgcaaggaaaagaggaaacatctcgggcctagttcaaacctttgcctcaaagccatcccccaccagactgcttagcgtctgagatccgcgtgaaaagtcctctgcccacgagagcagggagttggggccacgcagaaatggcctcaaggggactctgctccacgtggggccaggcgtgtgactgacgctgtccgacgaaggcggccacggacggacgccagcacacgaagtcacgtgcaagtgcctttgattcgttccttctttctaaagacgacagtctttgttgttagcactgaattattgaaaatgtcaaccagattctagaaactgcggtcatccagttcttcctgacaccggatgggtgcttgggaaccgtttgagccttatagatcatttacattcaatttttttaactcagcaagtgagaacttacaagagggtttttttttaatttttttttctcttaatgaacacattttctaaatgaattttttttgtagttactgtatatgtaccaagaaagatataacgttagggtttggttgtttttgtttttgtattttttttcttttgaaagggtttgttaatttttctaattttaccaaagtttgcagcctatacctcaataaaacagggatattttaaatcacatacctgcagacaaactggagcaatgttatttttaaagggtttttttcacctccttattcttagattattaatgtattagggaagaatgagacaattttgtgtaggctttttctaaagtccagtactttgtccagattttagattctcagaataaatgtttttcacagatagaaaaaaatgt

SEQ ID NO: 380994 - DNA, 166 bp, Homo sapiens
ccctacctcagtccctccttcctcctgacacaccctgtggcttaggactgttgaccccgaagcctccacctcacctagcaccccacgccacccctacccaaacaggggaggaggcggacgtgccttggaaccacacccaaggaggtgagtctgagctgggccgggg

SEQ ID NO: 380995 - DNA, 430 bp, Homo sapiens
gatcccacgaatgacacgggacaggtttgtgcagttggttggacgtctactttgcccctacagaggggttttggcaagaagtcgactgacttctgccattgacctggggaatcagccaaacaataagatcagtacgggttgaatagaggttggagaactgggctcatctgtgctaaggaggggatgggaaaaaagtcccacagcgaatcttggcgctggggataggtaccatctccacatgttccttgacatttggagagacgatagagagcgtaggtcaggcaatgggaagcaaacttcggctagaagtctgtcaggaaccccaaccccgcacatgcgctttggtcagcctggccgttgggttttccccacgaactgctgcatctccacgcttcaatgcccgtggccaggttggtctgactaacgggac

SEQ ID NO: 380996 - DNA, 851 bp, Homo sapiens
tgaaatcaaatagtttgttctctgaccacaatgaaattaaattggaaaccaaaaacaataagataactaggaaaaccccaagcatttggaaactaagcaacacacttctaaatatttattgggctaaagactaaatcacaagagagattgaaaatattttgccctgatgataatataaatacacatttcaaaatttgtgcaatgtagctaacatagcactttgagggaaatttacagttttgaaagcctatacgaagtggggaaagttcttaaatcaatgatcttaattttcactgttaaaaaatagaaaaaaaagagtaaattgaactcaaagcaagcagaggaagaaaataataaagataatgacagacatcaatgaattagagaacgaaaaaaagagataaaaaaatcattaaaagcaaaaagcagtcctttgaaaaaactaataaaattgataaatctcaagactgactggcaaagaaaaaaaaatgaacaatatcaagaatgagagaagggacattattactttggatattaaaagaataacaattctctattgttatgaacaactttatgacattaaatgtgtcacagatgaaatgaacacattctgggaaatacataaattataaatctaatcaaagatgaaatagaaagcttgaacagccctgtatcaattaaagatattgaatttgtaattaaaaacttactgagagaattctgggtttagatgcttcattgatgaattctgacaaacatttatgaaaaaataataccaatcctacaaaaactgtttaagaaaataaaggaggaggcatgattttatgatgcagtattattctaattctaca

SEQ ID NO: 380997 - DNA, 1289 bp, Homo sapiens
aagaagtcaaagcttgctccagcttctttatactttcccttctgcatgcttgcagataaaactcagatttgtgatgccaaatttttgatgtagacagtgtttggaagttgctacccctggacttacgaattgccttcatagaatctagggttatcctcaccatttttggtacagctgatttacaggcaacttgaaataacaacaacaaatccctcatgaatcagccgaagcgtgacagggaggtggggtaaagtgggtacctccacccagttcaccagtatttcccaaaccactcccaagcatttccttcacctgggcctcagcctgaccaaagatgaacctcagcttattgagtggtaaggaaaatgggatcattagagaaagggggaatgcctttgtcagcttggcttaataagatcacaacccatcagctgacgctgatgactcaaggagggaggctgaagtcagggttagcgctaggcccaaaggccagctttttgggcaaattactctgagaactgcacagccacaccatctgccctctgcagcattgccccatctggagcaggtataatgaggggcagcatcatcacaaagtggcacctgaagtattggtggctttggaatcagtctaagtccaagtatttcctctgcccgttacaagttgtataaagttggacaacttaaagtgtcagagtcccttgatttaggcacgattcaaggcccagcttgcgttcctacaggacaactatgctctgtcaatgcacttcagtgagctatttctgccctccccatctgtccatgagctccttgagtgcatccttatacatttttgttgctccagtctctggcatggtccctgtcacaccataaggcctctaaacatgtataatgaattaataaatactgaaaaattgtgatggtcactggaggctcggtggtgataagccttattatctgctctatattatacatcctattatgaacatgccgtctttgagagcacattaaacaaatgcattaatgcaaggatgaacacttaccaaggattaagtgtactgaatacaagaatccagaacagctaaaagaaaaatacttgtaatataatgattgtgtccatagaacaactgtgttataaacaaaagaagtccaaggcaaattgtgttattttcccagtagttttgtgatctgttttgtgttcttacggtaaggcctgataagaaccatgttccacaatgcatgtgtaagcatgacctaaaaatacatatagtttaaattcctgcctaaca

SEQ ID NO: 380998 - DNA, 718 bp, Homo sapiens
taagtttcaacactcaggcccggcgcggtggctcacgcctggaatcccagcactttggaaggccaaggcagacagatcacttgaggtcaggagtttgagactagcctggccaacgtgatgaaacactatctctactaaaaatacagaaactagccagcacaaaaatggcacctgtagtcccaactacttgggaggctgaggcaagagaatcgtttgaacccaggaggcggaagttgcagtgagccgagatgatgccactgcactccgcactggacaacagagtgagactctgtctcaaaataaatacattaattaataataaataaaaagtacaaaaaattagctgggtgtggtggcacacacctgtggtaccaactacttggtaggctaaggtgagaggagtgcttgagcccaggagatcaaggttgcatcaagtcgagatcgaaccattacactctggccttggcaacagagtgacgccctgtctcaaaaaaaaaaaaaaaatgttgactccctaaaaacatgactgctaatagtctactgttgaccagaagccttaccaataacatagtcaaataacacatagactagtatctacatatattttatgcattcaagacatacctaacatttcttaatttttgccatatttctagtctatgtggttcacctgcaagatttttcaaattgttgccaatttgaaaaaggaaaaaaaaaa

SEQ ID NO: 380999 - DNA, 478 bp, Homo sapiens
gaaaatccagccctggctttgcgtcgagctgctgagtgccgcgcttacgcgcgcggggccagccggggcctggtttccatctgccccttttgcctccgtgttaagttcgccggggaaaacccaacgatccgtgctgagcccctcggaggagagcccccgccccaccccacccccagcccgatcccgaccgatggaaaaaatgacagtataggtcagaacaggctgcccgcgagtattaatatggacggcctccgttcctggtgcttggggaggatgggcgcttcgccaggaaaccgccgaaggaggcgccatgagggccgcctgccccttctcgggctagaaaacgtggattctcagagggaccagacaaatgtggtcagatagctgcaggaacttaccccatctaaatacaggttgcccgtgtatattccaaccaagatcatttttgtttcaatctaatacacgttgaatcaattag

SEQ ID NO: 381000 - DNA, 488 bp, Homo sapiens
tggcacgaggagatgcaatcgcaccttatgttcccatctagtttggagaacagcccaaggagtttttcaggctctagacctcaagatccttcttacctctccacagaatcaacttctttctctgacaagggagaaaggcaaggagaggagggaggctttgctactctctcctgatacctagaaaatctttctggagccaaagggctctgagttgagtttgcaagaggggaggacaaagaagggagtgtgtgatgattttaagcataaaggggatgatgtgggagaattttggaattttttttagggaagtggctgttcaagggaagaactctattgtccaaggagagaaaaggctgggactggtccatcagtgaagagcactttttgcccattatcttctccccataaaggatccactctttggaagcgccccctggggccttggaacatgaagatggctcagatgcccataattccagtgaggcctc

SEQ ID NO: 381001 - DNA, 526 bp, Homo sapiens
gtcagcttaccctgaggcgcattgaccactgggagagatgtggatatagaaatccaatcatggatcattaggaagaaggaagcgttggataggctctcagcatggtccaccacagttgcattaaggattgtgtattacgttttttacttatgtgaaacaccaccttcccccatcaagcctgtaagtatgaagtcgagtccctagtgaatctactctctgactcctgtgtttcaagcaccctcattagcagagcttatatagttcggagttgaagaatttttttttcccaaaaattctcttctcatttaatagacacctgtctgtagagtaaactatgcaggccataaatggaacaaagatagtttaggaaaatacagtttcttaaataaattacttttaaaaagtatattttctctcagctcttctctccaaaggagttttgtatcataacctctgtagtaaatagtgtcatctttattgtctgattataaaggtgaagtataatttatgggataatttacaaagc

SEQ ID NO: 381002 - DNA, 403 bp, Homo sapiens
cgatttttagtcggcttttgtgcaaatgagtgctatgccccaagctctgaaaggggaaacgtcaccactcacaggtagcagaagggcaggcatttggaaggaagttagtattcagtggggaggagctggagttttatttcttttcttccactcatatgaccctctttctcccctctttcagatgctgtttgtttcataccagtgtatctaatttgcaaaaaatatgtagaacttatgaaaggttgtttagtagatggggggataattggctcactctatggagaaaaaaacaacaaaacttatccctacttaacactgtaaaggaaataggacaaaaaatgtaggcgaatatcatgggagagggatggggaaggatttctcatacaaaacttcaaaagcataa

SEQ ID NO: 381003 - DNA, 334 bp, Homo sapiens
caggaactcacagatcattctttcttttccatctcattcttagcacgctaatccaacctttgcaatcttaaatctaggacaaagcaatagaaggatttgggctatggagaaaagagaactcattttggtgtctaaagacctggatctgactttcagccttgcaatacttttaggaggtgaaatcactactctgggggaaatatctgattcagaaggttttgggcgggggggatttaatgtatgcagaagcagtttgtaaactgtaaaatctctatacaagaggaagagaactggctgcactccagcctgggtgacagagtgagagttctgcctc

SEQ ID NO: 381004 - DNA, 421 bp, Homo sapiens
ttccgcctcccgggttccagtgattctcctgtctcagcctcctgggtagctgggattacaggtgtctgccaccacgcctggctaatttttgtatttttagtagagacagggtttcaccatgttggccaggatggtctcaaactcctgacctctgcccacctgagcttcccaaagtgctgggattacagtcgtgagccaccatgcctggccaaaatttactttcttatttacatttttccatactgcttgatgttttagtttgtgaatatatcattttaccaatataatttttaatatttaacttttaaaagaacgaaaaaagagaaacaaagtgactctagattaactttactttttttttcttttttgttttttgtttgacatggagtattgccccgtcgccagactggagtgcagtggc

SEQ ID NO: 381005 - DNA, 463 bp, Homo sapiens
gtatgccaccatacctagctgatttttgtatttttaatagagacggggtttgatcatgttggccaggctggtcttaaactcatgatctcaggtgatctgcccacctcagcctcttgaagtgctgggattacagacatgagccaccatgtccagcctgaagttatttttcaaaagtggtactttggaggaaactgatgtaatgatagaatgtcacacttttgaagggaggagtataacctatagagtctggggttctattttattttatttttcaagacaaggttttgccctgccacctagcctggagtgcagtgatacgatcacggctcgctgcagccttgacctcccagctacttgggaggctaaggtgggaggatcgctgagctgaggaagttgagacttcagtgagccatgattgcaccactgcattctagtctgggtgacagagtaagacctaatctca

SEQ ID NO: 381006 - DNA, 1214 bp, Homo sapiens
ggctcagcctcaggcatgagacctgtaccagcccccgggagccgtgcggggccaacaatgaggagcagaatgcaaggggcggcctcgctcccctggccaccgcgggggtcgcggcctcccattacatagcgcgtgtctcgagccctggcctgctctcggcaccgccacaacgggcgtaatatggccgctggtgccgggacctgccgggcgcgcggagggtcgggccgaggtccgggatccggaactgctcccggcattcctcgcgagtgtatggcgtgggctcccttccccctctgtgggtcccgcgaggagactctcgggctttgaggtgtgcctgcacaggagacagcaccagccaagctgattgtgtatctacagcgtttccggcctcaagactatcagcgcctgctagaagtgaacagctccagagagaggccacaggagactgaagatcctgaccactgcctgggctaggggtgtcacttcctagaaggggaagggaactctgggtctaacggagtccactcctgggcccactgtgcctctcccctcagtgtcccttctgacagtgactcctctctctccagcgctgcctgtttcttccccctcctctaagctactcttccttgagccctccctggctgcttcctctcgctcatccgtcagatgcaatctgtgggccgcccctctcccctggccgctaagcagcctccattgatttccgctcgtgtttataggatttccacttagccgtgatcagtagttaagcacaggaaaatcccttgccaccccccctcccttggtcgatgccattgattctgccagcggctccctaaaccgccttacagctgagttagaagatgaggagaggcagcagggatttccctgccttgggatgtgggaaacagaagaaaagttgaggaaatggttgggaatcgctgttagaactctagaaattctaatctgactttgccactgtgcccagctctggcccagagggtagagtgcctcctgtggaagtttaggggcaaatttgttccctgacctggagagggttagaaagaaccaacagctgccccctccccgcccccgtgttgagacaggttctcaaggctcaggggaagatgcatacctcctatgtaagaatgctcttcccttgctgttattcatacacactttccacttcaaatatacccaaatatggctttcctcac

SEQ ID NO: 381007 - DNA, 1905 bp, Homo sapiens
ggctcagcctcaggcatgagacctgtaccagcccccgggagccgtgcggggccaacaatgaggagcagaatgcaaggggcggcctcgctcccctggccaccgcgggggtcgcggcctcccattacatagcgcgtgtctcgagccctggcctgctctcggcaccgccacaacgggcgtaatatggccgctggtgccgggacctgccgggcgcgcggagggtcgggccgaggtccgggatccggaactgctcccggcattcctcgcgagtgtatggcgtgggctcccttccccctctgtgggtcccgcgaggagactctcgggctttgaggtgagacctgaagttccgctggccggtagtgtagcaggaaagggcaggtcctcccgggtcgtgagccagtagcctcctggggtggcaaggtgtagagaggggggcgttgaaaggacacccgctacccggcctgctttctaggggtctctttggattgaggacatcagcagcagtggaagggattttactggagacctgtcactgtcagagccttaaaatatcaccgacggggccttaatgtcaccgaggtagagagaaaagggcagtagccctagagactattgcgacacagtgtgcccctcataagtttttccagggaggggttctgtactgagttgacgccccaggagctgagcaccaggctttgcatccttgggaactcagcaaacgtttgttcagccaattgcaggtagcatggcccagggcttgattgaggtggagcgaaagttccttccagggcctggcacagaggagcggctgcaggagttggggggcaccctggagtaccgggtcaccttccgagacacctactatgacacccctgagctgagcctcatgcaggctgaccactggctgcgacgacgagaggatagtggatgggagctcaaatgtcctggagcagcaggtgtcttaggaccccacacggagtataaggaactcacagcggaacctacaattgtggcccaactctgtgtgcctgcacaggagacagcaccagccaagctgattgtgtatctacagcgtttccggcctcaagactatcagcgcctgctagaagtgaacagctccagagagaggccacaggagactgaagatcctgaccactgcctgggctaggggtgtcacttcctagaaggggaagggaactctgggtctaacggagtccactcctgggcccactgtgcctctcccctcagtgtcccttctgacagtgactcctctctctccagcgctgcctgtttcttccccctcctctaagctactcttccttgagccctccctggctgcttcctctcgctcatccgtcagatgcaatctgtgggccgcccctctcccctggccgctaagcagcctccattgatttccgctcgtgtttataggatttccacttagccgtgatcagtagttaagcacaggaaaatcccttgccaccccccctcccttggtcgatgccattgattctgccagcggctccctaaaccgccttacagctgagttagaagatgaggagaggcagcagggatttccctgccttgggatgtgggaaacagaagaaaagttgaggaaatggttgggaatcgctgttagaactctagaaattctaatctgactttgccactgtgcccagctctggcccagagggtagagtgcctcctgtggaagtttaggggcaaatttgttccctgacctggagagggttagaaagaaccaacagctgccccctccccgcccccgtgttgagacaggttctcaaggctcaggggaagatgcatacctcctatgtaagaatgctcttcccttgctgttattcatacacactttccacttcaaatatacccaaatatggctttcctcac

SEQ ID NO: 381008 - DNA, 1776 bp, Homo sapiens
ggctcagcctcaggcatgagacctgtaccagcccccgggagccgtgcggggccaacaatgaggagcagaatgcaaggggcggcctcgctcccctggccaccgcgggggtcgcggcctcccattacatagcgcgtgtctcgagccctggcctgctctcggcaccgccacaacgggcgtaatatggccgctggtgccgggacctgccgggcgcgcggagggtcgggccgaggtccgggatccggaactgctcccggcattcctcgcgagtgtatggcgtgggctcccttccccctctgtgggtcccgcgaggagactctcgggctttgagccaattgcaggtagcatggcccagggcttgattgaggtggagcgaaagttccttccagggcctggcacagaggagcggctgcaggagttggggggcaccctggagtaccgggtcaccttccgagacacctactatgacacccctgagctgagcctcatgcaggctgaccactggctgcgacgacgagaggatagtggatgggagctcaaatgtcctggagcagcaggtgtcttaggaccccacacggagtataaggaactcacagcggaacctacaattgtggcccaactctgtaaggtgctgcgggctgacggcctgggggctggagatgtggctgctgtgctgggcccactggggctgcaggaagtagctagttttgtgactaagcggagtgcctggaagctggtgctcttgggagctgatgaagaggagccacagctcagggtggacttggatacagccgactttggctacgctgtgggtgaggtagaggccctggtgcatgaggaggctgaagtaccaactgccctagagaagatccacaggctcagcagcatgcttggtgtgcctgcacaggagacagcaccagccaagctgattgtgtatctacagcgtttccggcctcaagactatcagcgcctgctagaagtgaacagctccagagagaggccacaggagactgaagatcctgaccactgcctgggctaggggtgtcacttcctagaaggggaagggaactctgggtctaacggagtccactcctgggcccactgtgcctctcccctcagtgtcccttctgacagtgactcctctctctccagcgctgcctgtttcttccccctcctctaagctactcttccttgagccctccctggctgcttcctctcgctcatccgtcagatgcaatctgtgggccgcccctctcccctggccgctaagcagcctccattgatttccgctcgtgtttataggatttccacttagccgtgatcagtagttaagcacaggaaaatcccttgccaccccccctcccttggtcgatgccattgattctgccagcggctccctaaaccgccttacagctgagttagaagatgaggagaggcagcagggatttccctgccttgggatgtgggaaacagaagaaaagttgaggaaatggttgggaatcgctgttagaactctagaaattctaatctgactttgccactgtgcccagctctggcccagagggtagagtgcctcctgtggaagtttaggggcaaatttgttccctgacctggagagggttagaaagaaccaacagctgccccctccccgcccccgtgttgagacaggttctcaaggctcaggggaagatgcatacctcctatgtaagaatgctcttcccttgctgttattcatacacactttccacttcaaatatacccaaatatggctttcctcac

SEQ ID NO: 381009 - DNA, 1351 bp, Homo sapiens
ggagaagcaactgttggagtcagctgcctgaggaatatacttctctaggctggggtggggaaatgagcttgaagacaaggaactggctgagtcttaatttgggcgagtgaaagaaggtgactgagccaggaggagagcacagatggcttggtggtggtatggtgtgctccatcggctgccaacctagggccatcgtctgcctccatcacccctccgcccgcccgcctacccacccaatcccaaacgggtgctggatcaggtgctgaatccggctgcctcctcgggtcctccttccccttccctcttaggcatggggagtggagcaacagacggagagtggcatgaagacacaaaggaggaagcacaccattgccaagaccccaaggaagaaggatggaaagcgctggcagtcctgcctggcccccagccagttccctgctgaagatggccagatccccttgtctggtgtgcctgcacaggagacagcaccagccaagctgattgtgtatctacagcgtttccggcctcaagactatcagcgcctgctagaagtgaacagctccagagagaggccacaggagactgaagatcctgaccactgcctgggctaggggtgtcacttcctagaaggggaagggaactctgggtctaacggagtccactcctgggcccactgtgcctctcccctcagtgtcccttctgacagtgactcctctctctccagcgctgcctgtttcttccccctcctctaagctactcttccttgagccctccctggctgcttcctctcgctcatccgtcagatgcaatctgtgggccgcccctctcccctggccgctaagcagcctccattgatttccgctcgtgtttataggatttccacttagccgtgatcagtagttaagcacaggaaaatcccttgccaccccccctcccttggtcgatgccattgattctgccagcggctccctaaaccgccttacagctgagttagaagatgaggagaggcagcagggatttccctgccttgggatgtgggaaacagaagaaaagttgaggaaatggttgggaatcgctgttagaactctagaaattctaatctgactttgccactgtgcccagctctggcccagagggtagagtgcctcctgtggaagtttaggggcaaatttgttccctgacctggagagggttagaaagaaccaacagctgccccctccccgcccccgtgttgagacaggttctcaaggctcaggggaagatgcatacctcctatgtaagaatgctcttcccttgctgttattcatacacactttccacttcaaatatacccaaatatggctttcctcac

SEQ ID NO: 381010 - DNA, 927 bp, Homo sapiens
caatttgcctgcctcggccttccaaagtgctgggattacaggtgtgcctgcacaggagacagcaccagccaagctgattgtgtatctacagcgtttccggcctcaagactatcagcgcctgctagaagtgaacagctccagagagaggccacaggagactgaagatcctgaccactgcctgggctaggggtgtcacttcctagaaggggaagggaactctgggtctaacggagtccactcctgggcccactgtgcctctcccctcagtgtcccttctgacagtgactcctctctctccagcgctgcctgtttcttccccctcctctaagctactcttccttgagccctccctggctgcttcctctcgctcatccgtcagatgcaatctgtgggccgcccctctcccctggccgctaagcagcctccattgatttccgctcgtgtttataggatttccacttagccgtgatcagtagttaagcacaggaaaatcccttgccaccccccctcccttggtcgatgccattgattctgccagcggctccctaaaccgccttacagctgagttagaagatgaggagaggcagcagggatttccctgccttgggatgtgggaaacagaagaaaagttgaggaaatggttgggaatcgctgttagaactctagaaattctaatctgactttgccactgtgcccagctctggcccagagggtagagtgcctcctgtggaagtttaggggcaaatttgttccctgacctggagagggttagaaagaaccaacagctgccccctccccgcccccgtgttgagacaggttctcaaggctcaggggaagatgcatacctcctatgtaagaatgctcttcccttgctgttattcatacacactttccacttcaaatatacccaaatatggctttcctcac

SEQ ID NO: 381011 - DNA, 399 bp, Homo sapiens
ccacttttctcttttggaggcacctgctggaccatgcagtgggggagggcctccggattaaaaattttttttttaatagagacaaggttttgccgtgttgcccaggctggtctggaactcctggactcaagcaatttgcctgcctcggccttccaaagtgctgggattacaggtgtgagcctctgtgcctggcctggattatttttgtaatgggaattgttttagcaattttctaagtttgcttacagttctgtgaaatctcgttttctctttaacagtagctaatttggatctagtccttccacgtgtctaattccagccaacctgcctcatttagttctcatacctatagccagatctccttcagtttcatttctcagttccctgctttgactcttc

SEQ ID NO: 381012 - DNA, 2175 bp, Homo sapiens
ggctcagcctcaggcatgagacctgtaccagcccccgggagccgtgcggggccaacaatgaggagcagaatgcaaggggcggcctcgctcccctggccaccgcgggggtcgcggcctcccattacatagcgcgtgtctcgagccctggcctgctctcggcaccgccacaacgggcgtaatatggccgctggtgccgggacctgccgggcgcgcggagggtcgggccgaggtccgggatccggaactgctcccggcattcctcgcgagtgtatggcgtgggctcccttccccctctgtgggtcccgcgaggagactctcgggctttgaggtgagacctgaagttccgctggccggtagtgtagcaggaaagggcaggtcctcccgggtcgtgagccagtagcctcctggggtggcaaggtgtagagaggggggcgttgaaaggacacccgctacccggcctgctttctaggggtctctttggattgaggacatcagcagcagtggaagggattttactggagacctgtcactgtcagagccttaaaatatcaccgacggggccttaatgtcaccgaggtagagagaaaagggcagtagccctagagactattgcgacacagtgtgcccctcataagtttttccagggaggggttctgtactgagttgacgccccaggagctgagcaccaggctttgcatccttgggaactcagcaaacgtttgttcagccaattgcaggtagcatggcccagggcttgattgaggtggagcgaaagttccttccagggcctggcacagaggagcggctgcaggagttggggggcaccctggagtaccgggtcaccttccgagacacctactatgacacccctgagctgagcctcatgcaggctgaccactggctgcgacgacgagaggatagtggatgggagctcaaatgtcctggagcagcaggtgtcttaggaccccacacggagtataaggaactcacagcggaacctacaattgtggcccaactctgtaaggtgctgcgggctgacggcctgggggctggagatgtggctgctgtgctgggcccactggggctgcaggaagtagctagttttgtgactaagcggagtgcctggaagctggtgctcttgggagctgatgaagaggagccacagctcagggtggacttggatacagccgactttggctacgctgtgggtgaggtagaggccctggtgcatgaggaggctgaagtaccaactgccctagagaagatccacaggctcagcagcatgcttggtgtgcctgcacaggagacagcaccagccaagctgattgtgtatctacagcgtttccggcctcaagactatcagcgcctgctagaagtgaacagctccagagagaggccacaggagactgaagatcctgaccactgcctgggctaggggtgtcacttcctagaaggggaagggaactctgggtctaacggagtccactcctgggcccactgtgcctctcccctcagtgtcccttctgacagtgactcctctctctccagcgctgcctgtttcttccccctcctctaagctactcttccttgagccctccctggctgcttcctctcgctcatccgtcagatgcaatctgtgggccgcccctctcccctggccgctaagcagcctccattgatttccgctcgtgtttataggatttccacttagccgtgatcagtagttaagcacaggaaaatcccttgccaccccccctcccttggtcgatgccattgattctgccagcggctccctaaaccgccttacagctgagttagaagatgaggagaggcagcagggatttccctgccttgggatgtgggaaacagaagaaaagttgaggaaatggttgggaatcgctgttagaactctagaaattctaatctgactttgccactgtgcccagctctggcccagagggtagagtgcctcctgtggaagtttaggggcaaatttgttccctgacctggagagggttagaaagaaccaacagctgccccctccccgcccccgtgttgagacaggttctcaaggctcaggggaagatgcatacctcctatgtaagaatgctcttcccttgctgttattcatacacactttccacttcaaatatacccaaatatggctttcctcac

SEQ ID NO: 381013 - DNA, 967 bp, Homo sapiens
ccctaaacagtttaattttaattatagaatgttcatctacaaagtatctagaggaggcttttgctttattccatttctgccaaacttaagagaaaatgtactgatgaagggaaacatatccacattggaaaacatttgactgtctaatttttcagaccttgattcttatatcactcaatctctgtttattgtgccaaagactgagaatcagtgcagtggaaagcctgtttttgacgtcaggacagccatcaaaacttgtgaagaggggacctggaaggaaacctaaagtagaagttaataccaatagtggtgaaattatacacaagaaaaggggtagaaagcccaaaaagctacagtatgcaaagccagaagatttagagcaaaataatgtgcatcccatcagagatgaagtacttccttcttcaacatgcaattttctttctgaaactaataatgtaaaggaagatttgttacagaaaaagaatcgtggaggtaggaagcccaaaaggaagatgaagacacaaaaattagatgcagatctcctagtccctgcaagtgtcaaagtgttaaggagaagtaaccgaaaaaagatagatgatcctatagatgaggaagaagagtttgaagaactcaaaggctctgaaccccacatgagaactagaaatcaaggtcgaaggacagctttctataatgaggatgactctgaagaggagcaaaggcagctgttgttcgaagacacctctttaacttttggaacttctagtagaggacgagtccgaaagttgactgaaaaagcaaaagctaatttaattggttggtaacttgtaccaaaatattttacttcaaaatctataaagcaggtacagttaaggaataagtagaactaaggcttctgcttccttgctgctgtggtggagtagggaatgttatgatttgatttgcaaaaaaaaaaacaaaaaaaaaaaca

SEQ ID NO: 381014 - DNA, 445 bp, Homo sapiens
  misc_feature (18)..(18): n is a, c, g, or t
  misc_feature (24)..(24): n is a, c, g, or t
  misc_feature (26)..(26): n is a, c, g, or t
  misc_feature (29)..(29): n is a, c, g, or t
gactggtgttctagaggntccccncnggnggaagtgtcaaagtgttaaggagaagtaaccgaaaaaagatagatgatcctatagatgaggaagaagagtttgaagaactcaaaggctctgaaccccacatgagaactagaaatcaaggtcgaaggacagctttctataatgaggatgactctgaagaggagcaaaggcagctgttgttcgaagacacctctttaacttttggaacttctagtagaggacgagtccgaaagttgactgaaaaagcaaaagctaatttaattggttggtaacttgtaccaaaatattttacttcaaaatctataaagcaggtacagttaaggaataagtagaactaaggcttctgcttccttgctgctgtggtggagtagggaatgttatgatttgatttgcaaaaaaaaaaacaaaaaaaaaaaca

SEQ ID NO: 381015 - DNA, 7098 bp, Homo sapiens
taaaaagtttaatttaaaaaaaaaaaattaagaacaaaaaaattaaatccaagcctgttcttttcacaagatttaaatttgctcattttattttccattcagaattatggccagccacaatggagattgtgccgttaagtaacatgataacattaatatcatctagtaaagaaatatcaacagtatatagttgcactgtgttttagtattaactaccttcttattataaaatcttaagggagaattaaatttcaaatacccttgcatttcaaaaactttaaagttgtaagatattgaaataaaaaataaaattatcttctcatgagttcattttttgtattaaagtttaaaattagtgttcctcaatttgtgttgttcagtttcaccttgatggtttgagttttttcagtcggtgaaacctgacctccctgtctctggaaagagtgtagttctttcagggctttccgtgtaacctcagggtctgttgtattgaatttttaaagagattccagctatctatatggaacagaagattatcaaagcataggccctatcctaaaaaaaaaaaaaaaaatccaatttctcactcttggaaaaattaccctaggaatcaccacattcccagaatctaatacttggtttgccagagaccatagcaggaaccagtagtatcaagttggggtagacagagtttgtctttccattatttcagtcatttaatgccggatgtcctgagcccacaacctatgaaattaaacttagaaatctttatcacatgcttccatcttaaaataaaacatcaggagtagcgttcctttcctgatacctaacattccttttggaggaaagttatgtgtaaaattctagattaatgcatatggcttttgtctttcagtaggcaagaagaatggagaactgcaaagggagaagaagaaataaagacttacaggtcagaagagaaaagaaaacacttaactgttccaaaagagaataaaatacccactgtctcaaagaatcatgctcatgagcatttcctggatcttggagaatccaaaaagcaacagacaaatcaacacaattatcgtacaagatctgcattggaagagactcctagaccctcagaagagatagaaaatggcagtagttcttcagatgaaggcgaagtagttgctgtcagtggtggaacatccgaagaagaagagagagcatggcacagtgatggcagttctagtgactactccagtgattactctgactggacagcagatgcaggaattaatctgcagccaccaaagaaagttcctaagaataaaaccaagaaagcagaaagcagttcagatgaagaagaagaatctgaaaaacagaagcaaaaacagattaaaaaggaaaagaaaaaagtaaatgaagaaaaagatggaccaatatcaccaaagaaaaagaagcccaaagaaagaaaacaaaagagattggctgtgggagaactaactgaaaatggtttgacattagaagaatggttgccatcaacatggattacagataccattccccgaagatgtccatttgtgccacagatgggtgatgaggtttattatttccgacaaggacatgaagcctatgtcgaaatggcccggaaaaataaaatatatagtatcaatcccaaaaaacaaccatggcataaaatggagctacgggaacaagaacttatgaaaatagttggcataaagtatgaagtgggattacctaccctttgctgccttaaacttgcttttctagatcctgatactggtaaactgactggcggatcatttaccatgaaataccatgatatgcctgacgttatagatttcctagtcttgagacaacaatttgatgatgcaaaatacaggcgatggaatataggtgaccgcttcaggtctgtcatagatgatgcctggtggtttggaacaatcgaaagccaggaacctcttcaacctgagtaccctgatagtctgtttcaatgctacaatgtttgctgggacaatggagatacagaaaagatgagtccttgggatatggagcttatacctaataatgctgtatttcctgaagaactaggtaccagtgttcctttaactgatggtgagtgcagatcactaatctataaacctcttgatggagaatggggtaccaatcccagggatgaagaatgtgaaagaattgtggcaggaataaaccagttgatgacactagatattgcctcagcatttgtggcccccgtggatctgcaagcctatcccatgtattgcacagtagtggcatatccaacggatctaagtacaattaaacaaagactggaaaacaggttttacaggcgggtttcttccctaatgtgggaagttcgatatatagagcataatacacgaacatttaatgagcctggaagccctattgtgaaatctgctaaattcgtgactgatcttcttctacattttataaagtaagttatcttttcatatgtaattatgatagttttaataattaatggcactacagttcctcttaaaatagaaaacatactgtttgtaaagaagaaacatttaagagtagccaaaatagctcagctgggagagcattagactgaagatctaaaggtctctggtttgatcctgggtttcagaagaaacagttcattggctaataataagaatgaaatcataaaaatcgtattaccattgtgttttaaggttaaaattgtttaaaaaaagattattttctcaatctaactgttagacaataataatagtaaaaatttatttaacatgtaatgttttacctacattaactcttctaacccaaataacaatcttacaggtggaagagataattatctggaattttgaattgaggaaactgtggcctatagtggttaacatgtataaggttgcacggtaaatgagtgtctgccatctgatttgagaatttttcatcctaacagtatattgcccctgtcaagtatattaacaagtatttaaatagtccagcaggagactgaatttaactttcatgattcttcttcaaagtcaagtttacttcctcattgatcccataacaagagtgataagcactatttattaaggcagaagtactttcccttccttatcttaaggattttatgcaatcatataatgaattgagcctcctaagttgaaggcagagaaatgaattctatattttgtacaaagactgctgtgattccatgtcattatttgtattgaatttttttttcctggttgagaagtagtaacagcattttaaaagcttacttagctgttatcagctttcatttttacataatgaaaaattcaggattattcagttttttttttttttttaataaacatccctgcttcattctcattaatggacataatctttgagctcctttttgattaatgtgttttaactgaggaatgcaggtcatttcagtataagaaaacaccaaacataattaataaggtaaagtttgtgccctttctctaccttattctctaagaaatctattgctttccaatggtttgggggctattattgctatgcttttgttttccttattgaaattagtaattaagcattatcctctgaagactcttatgtctgtaattttttataagtgttataactatgtgtatgtgtatctgttttttcaaagagaatcagtagaactacatgagatagtatattcatatttcagtgaaataatttagatgaaaattgttaatacatttgaaagtctgtgaaatgtatttctttcaaacggctactttgaaatgtctttgaagtcagattcatgaaatacttaaagcatttgtattgtatatttctaaaaataaatccatggcatttttttagatgtgtatagtttgtttaaaaatactttttttagcagatagtcttcaagatattaagtattccttgaaattttgattattatactttttaattgagttatttggcaaaatttcaagcaattgatacatacaaagtaatgtgatggatccttttaatacagtttcataggatagataaatctgtaagaaagtataatataaggaaaactgtgacaagtagtaagagaattgtataaaagtttagataagaataggattacttttagctgtgatgatggggattcagatacaggggaggagaagtctgttaagacattgtatacaaggtgtagatactgatagattctggaaatgttagatgaaaagaaagccattccagggataaggagcagcgtgaggtaggaagttttaattaagggtaatataaattggagaagtcacagtagagatacagtgctataaatctgagttggggccacatcgtgggtggctttgaatatgaatctaaaatataagctctgagagcaaggggctgttgaaagtatattaacatgagaataacatgttttacactatgccttaaaaatgttaatttgactgcagtgtctaatttaattgacagagaagagacaaaaagcataaatagcagattgactgctacagttgaccaactaagagttgatgagggcttaatttatgaaagtgagaaagggacagatgcccagacatacttgaggatagagttcacagcccttgaccactaattgggtttataaggaggaggaaagggaaagaataatgaaaaaccaagattcccattactgtaagaatgatatgttgttaaagaaaaatagaaaaaggaacaaggatatctggggagtcactattaagtttagacgtggaattttaggtgttggtagaatgctcaggagaagggttaggacaaattgcaggaattttggaattcatttacacagataaaccacaagtatgtgaagcaaaaggtacagtgtcaagatgcgttaagaacaaaattttaggaaatacatttaaaaataaaagaaagagttggaagacaagaaatgtattagctgtttgaagactgaggaatggaagaagcacagcagatacctaagcaaagactgggagatgagacttgggtttggtgtaatgatatagtgaggccacactgaaagctctacatagagtggaggggtcagggttaaatgtgtgtgcataaattattggagtaagccaatggagaagaaagcaagccttcagcttcaacttttaccttaaaatatggttttacgaacaaatttttaaggaaaaaaattatcatggttctaatcttacatgttaacatttccttgttatgtagggatcagacttgttataacataattccactttataattcaatgaagaagaaagttttgtctgattctgaggatgaagagaaagatgctgatgtgccaggaacttctactcgaaaaaggaaggaccatcagcctagaagaagattacgtaatagagcccagtcttacgatattcaagcatggaagaaacagtgtgaagaattgttaaatctcatatttcaatgtgaagattcagagcctttccgtcagccggtagatctccttgaatatccagactacagagacatcattgacactccaatggattttgctaccgttagagaaactttagaggctgggaattatgagtcaccaatggagttatgtaaagatgtcagacttattttcagtaattccaaagcatatacaccaagcaaaagatcaaggatttacagcatgagtttgcgcctgtctgctttctttgaagaacacattagttcagttttatcagattataaatctgctcttcgttttcataaaagaaataccataaccaaaaggaggaagaaaagaaacagaagcagctctgtttccagtagtgctgcatcaagccctgaaaggaaaaaaaggatcttaaaaccccagctaaaatcagaaagctctacctctgcattctctacacctacacgatcaataccgccaagacacaatgctgctcagataaacggtaaaacagaatctagttctgtggttcgaaccagaagcaaccgagtggttgtagatccagttgtcactgagcaaccatctacttcttcagctgcaaagacttttattacaaaagctaatgcatctgcaataccagggaaaacaatactagagaattctgtgaaacattccaaagctttgaatactctttccagtcctggtcaatccagttttagtcatggcactaggaataattctgcaaaagaaaacatggaaaaggaaaagccagtcaaacgtaaaatgaagtcatctgtactcccaaaggcgtccactctttcaaagtcatcagctgtcattgagcaaggagattgtaagaacaacgctcttgtaccaggaaccattcaagtaaatggccatggaggacagccatcaaaacttgtgaagaggggacctggaaggaaacctaaagtagaagttaataccaatagtggtgaaattatacacaagaaaaggggtagaaagcccaaaaagctacagtatgcaaagccagaagatttagagcaaaataatgtgcatcccatcagagatgaagtacttccttcttcaacatgcaattttctttctgaaactaataatgtaaaggaagatttgttacagaaaaagaatcgtggaggtaggaagcccaaaaggaagatgaagacacaaaaattagatgcagatctcctagtccctgcaagtgtcaaagtgttaaggagaagtaaccgaaaaaagatagatgatcctatagatgaggaagaagagtttgaagaactcaaaggctctgaaccccacatgagaactagaaatcaaggtcgaaggacagctttctataatgaggatgactctgaagaggagcaaaggcagctgttgttcgaagacacctctttaacttttggaacttctagtagaggacgagtccgaaagttgactgaaaaagcaaaagctaatttaattggttggtaacttgtaccaaaatattttacttcaaaatctataaagcaggtacagttaaggaataagtagaactaaggcttctgcttccttgctgctgtggtggagtagggaatgttatgatttgatttgcaaaaaaaaaaacaaaaaaaaaaaca

SEQ ID NO: 381016 - DNA, 2934 bp, Homo sapiens
  misc_feature (26)..(26): n is a, c, g, or t
  misc_feature (40)..(40): n is a, c, g, or t
tcgcagctgtacgccccgccgattantggcatatcgtcgnaccgagcgctcgggaaaaagatggaccaatatcaccaaagaaaaagaagcccaaagaaagaaaacaaaagagattggctgtgggagaactaactgaaaatggtttgacattagaagaatggttgccatcaacatggattacagataccattccccgaagatgtccatttgtgccacagatgggtgatgaggacatgaagcctatgtcgaaatggcccggaaaaataaaatatatagtatcaatcccaaaaaacaaccatggcataaaatggagctacgggaacaagaacttatgaaaatagttggcataaagtatgaagtgggattacctaccctttgctgccttaaacttgcttttctagatcctgatactggtaaactgactggcggatcatttaccatgaaataccatgatatgcctgacgttatagatttcctagtcttgagacaacaatttgatgatgcaaaatacaggcgatggaatataggtgaccgcttcaggtctgtcatagatgatgcctggtggtttggaacaatcgaaagccaggaacctcttcaacctgagtaccctgatagtctgtttcaatgctacaatgtttgctgggacaatggagatacagaaaagatgagtccttgggatatggagcttatacctaataatgctgtatttcctgaagaactaggtaccagtgttcctttaactgatggtgagtgcagatcactaatctataaacctcttgatggagaatggggtaccaatcccagggatgaagaatgtgaaagaattgtggcaggaataaaccagttgatgacactagatattgcctcagcatttgtggcccccgtggatctgcaagcctatcccatgtattgcacagtagtggcatatccaacggatctaagtacaattaaacaaagactggaaaacaggttttacaggcgggtttcttccctaatgtgggaagttcgatatatagagcataatacacgaacatttaatgagcctggaagccctattgtgaaatctgctaaattcgtgactgatcttcttctacattttataaaggatcagacttgttataacataattccactttataattcaatgaagaagaaagttttgtctgattctgaggatgaagagaaagatgctgatgtgccaggaacttctactcgaaaaaggaaggaccatcagcctagaagaagattacgtaatagagcccagtcttacgatattcaagcatggaagaaacagtgtgaagaattgttaaatctcatatttcaatgtgaagattcagagcctttccgtcagccggtagatctccttgaatatccagactacagagacatcattgacactccaatggattttgctaccgttagagaaactttagaggctgggaattatgagtcaccaatggagttatgtaaagatgtcagacttattttcagtaattccaaagcatatacaccaagcaaaagatcaaggatttacagcatgagtttgcgcctgtctgctttctttgaagaacacattagttcagttttatcagattataaatctgctcttcgttttcataaaagaaataccataaccaaaaggaggaagaaaagaaacagaagcagctctgtttccagtagtgctgcatcaagccctgaaaggaaaaaaaggatcttaaaaccccagctaaaatcagaaagctctacctctgcattctctacacctacacgatcaataccgccaagacacaatgctgctcagataaacggtaaaacagaatctagttctgtggttcgaaccagaagcaaccgagtggttgtagatccagttgtcactgagcaaccatctacttcttcagctgcaaagacttttattacaaaagctaatgcatctgcaataccagggaaaacaatactagagaattctgtgaaacattccaaagctttgaatactctttccagtcctggtcaatccagttttagtcatggcactaggaataattctgcaaaagaaaacatggaaaaggaaaagccagtcaaacgtaaaatgaagtcatctgtactcccaaaggcgtccactctttcaaagtcatcagctgtcattgagcaaggagattgtaagaacaacgctcttgtaccaggaaccattcaagtaaatggccatggaggacagccatcaaaacttgtgaagaggggacctggaaggaaacctaaagtagaagttaataccaatagtggtgaaattatacacaagaaaaggggtagaaagcccaaaaagctacagtatgcaaagccagaagatttagagcaaaataatgtgcatcccatcagagatgaagtacttccttcttcaacatgcaattttctttctgaaactaataatgtaaaggaagatttgttacagaaaaagaatcgtggaggtaggaagcccaaaaggaagatgaagacacaaaaattagatgcagatctcctagtccctgcaagtgtcaaagtgttaaggagaagtaaccgaaaaaagatagatgatcctatagatgaggaagaagagtttgaagaactcaaaggctctgaaccccacatgagaactagaaatcaaggtcgaaggacagctttctataatgaggatgactctgaagaggagcaaaggcagctgttgttcgaagacacctctttaacttttggaacttctagtagaggacgagtccgaaagttgactgaaaaagcaaaagctaatttaattggttggtaacttgtaccaaaatattttacttcaaaatctataaagcaggtacagttaaggaataagtagaactaaggcttctgcttccttgctgctgtggtggagtagggaatgttatgatttgatttgcaaaaaaaaaaacaaaaaaaaaaaca

SEQ ID NO: 381017 - DNA, 4919 bp, Homo sapiens
ggttgttagctaccttaagaggacatgctgctgaaatatcagacatggctgtaaactatgagaataccatgatagcagctggaagttgtgataaaatgatccgagtctggtgtcttcgaacctgtgcacctttggctgttcttcagggccatagtgcatctattacatcactacagttctcaccattgtgcagtggctcaaagagatatctatcttctactggggcagatggcactatttgtttttggctctgggatgctggaacccttaaaataaacccaagacctgcaaaatttacagagcgccctcggcctggagttcaaatgatctgttcttcttttagtgctggtggaatgtttctggcgacgggaagcacagatcatattattcgggtttatttttttggatcaggtcagccagagaaaatatcagaattggagtttcatactgacaaagttgacagtatccagttttccaacactagtaacaggtttgtaagtggcagtcgtgatgggacagcacgtatttggcaatttaaacgaagagagtggaagagcattttgttggatatggctactcgtccagcaggccaaaaccttcaaggaatagaagataaaatcacaaaaatgaaggttactatggtagcttgggatcgacatgacaatacagttataactgcagttaataacatgactctgaaagtttggaattcttacactggtcaactaattcatgtcctgatgggtcatgaagatgaggtatttgttcttgaaccacacccgttcgatcctagagttctcttttctgctggtcatgatggaaacgtgatagtgtgggatctggcaagaggagtcaaaatacgatcttatttcaatatgattgaaggccaaggacatggcgcagtatttgactgcaaatgctctcctgatggtcagcattttgcatgcacagactctcatggacatcttttaatttttggctttgggtccagtagcaaatatgacaagatagcagatcagatgttctttcatagtgattatcggccacttattcgtgatgccaacaatttgtattagatgaacagactcagcaagcacctcatcttatgcctccccctttttggttgatgttgatggtaaccctcatccatcaagatatcaaagattagttcctggccgtgaaaattgcagggaggagcaactcatccctcagatgggagtaacttcctcaggactgaatcaagttttaagtcagcaagcaaaccaggagatcagcccactggacagcatgattcaaagactacaacaggagcaagacctgagacgttctggtgaagcaggtatcagtaataccagccgtttaagtagaggctccataagttctacctcagaggttcattcaccaccaaacgtaggactaagacgtagtggacaaattgaaggtgtacggcaaatgcacagcaacgcaccaagaagtgaaatagccacagagcgggatctggtagcttggagtcgaagggtggtagtacccgagctatcagctggtgtagccagtaggcaagaagaatggagaactgcaaagggagaagaagaaataaagacttacaggtcagaagagaaaagaaaacacttaactgttccaaaagagaataaaatacccactgtctcaaagaatcatgctcatgagcatttcctggatcttggagaatccaaaaagcaacagacaaatcaacacaattatcgtacaagatctgcattggaagagactcctagaccctcagaagagatagaaaatggcagtagttcttcagatgaaggcgaagtagttgctgtcagtggtggaacatccgaagaagaagagagagcatggcacagtgatggcagttctagtgactactccagtgattactctgactggacagcagatgcaggaattaatctgcagccaccaaagaaagttcctaagaataaaaccaagaaagcagaaagcagttcagatgaagaagaagaatctgaaaaacagaagcaaaaacagattaaaaaggaaaagaaaaaagtaaatgaagaaaaagatggaccaatatcaccaaagaaaaagaagcccaaagaaagaaaacaaaagagattggctgtgggagaactaactgaaaatggtttgacattagaagaatggttgccatcaacatggattacagataccattccccgaagatgtccatttgtgccacagatgggtgatgaggtttattatttccgacaaggacatgaagcctatgtcgaaatggcccggaaaaataaaatatatagtatcaatcccaaaaaacaaccatggcataaaatggagctacgggaacaagaacttatgaaaatagttggcataaagtatgaagtgggattacctaccctttgctgccttaaacttgcttttctagatcctgatactggtaaactgactggcggatcatttaccatgaaataccatgatatgcctgacgttatagatttcctagtcttgagacaacaatttgatgatgcaaaatacaggcgatggaatataggtgaccgcttcaggtctgtcatagatgatgcctggtggtttggaacaatcgaaagccaggaacctcttcaacctgagtaccctgatagtctgtttcaatgctacaatgtttgctgggacaatggagatacagaaaagatgagtccttgggatatggagcttatacctaataatgctgtatttcctgaagaactaggtaccagtgttcctttaactgatggtgagtgcagatcactaatctataaacctcttgatggagaatggggtaccaatcccagggatgaagaatgtgaaagaattgtggcaggaataaaccagttgatgacactagatattgcctcagcatttgtggcccccgtggatctgcaagcctatcccatgtattgcacagtagtggcatatccaacggatctaagtacaattaaacaaagactggaaaacaggttttacaggcgggtttcttccctaatgtgggaagttcgatatatagagcataatacacgaacatttaatgagcctggaagccctattgtgaaatctgctaaattcgtgactgatcttcttctacattttataaaggatcagacttgttataacataattccactttataattcaatgaagaagaaagttttgtctgattctgaggatgaagagaaagatgctgatgtgccaggaacttctactcgaaaaaggaaggatattcaagcatggaagaaacagtgtgaagaattgttaaatctcatatttcaatgtgaagattcagagcctttccgtcagccggtagatctccttgaatatccagactacagagacatcattgacactccaatggattttgctaccgttagagaaactttagaggctgggaattatgagtcaccaatggagttatgtaaagatgtcagacttattttcagtaattccaaagcatatacaccaagcaaaagatcaaggatttacagcatgagtttgcgcctgtctgctttctttgaagaacacattagttcagttttatcagattataaatctgctcttcgttttcataaaagaaataccataaccaaaaggaggaagaaaagaaacagaagcagctctgtttccagtagtgctgcatcaagccctgaaaggaaaaaaaggatcttaaaaccccagctaaaatcagaaagctctacctctgcattctctacacctacacgatcaataccgccaagacacaatgctgctcagataaacggtaaaacagaatctagttctgtggttcgaaccagaagcaaccgagtggttgtagatccagttgtcactgagcaaccatctacttcttcagctgcaaagacttttattacaaaagctaatgcatctgcaataccagggaaaacaatactagagaattctgtgaaacattccaaagctttgaatactctttccagtcctggtcaatccagttttagtcatggcactaggaataattctgcaaaagaaaacatggaaaaggaaaagccagtcaaacgtaaaatgaagtcatctgtactcccaaaggcgtccactctttcaaagtcatcagctgtcattgagcaaggagattgtaagaacaacgctcttgtaccaggaaccattcaagtaaatggccatggaggacagccatcaaaacttgtgaagaggggacctggaaggaaacctaaagtagaagttaataccaatagtggtgaaattatacacaagaaaaggggtagaaagcccaaaaagctacagtatgcaaagccagaagatttagagcaaaataatgtgcatcccatcagagatgaagtacttccttcttcaacatgcaattttctttctgaaactaataatgtaaaggaagatttgttacagaaaaagaatcgtggaggtaggaagcccaaaaggaagatgaagacacaaaaattagatgcagatctcctagtccctgcaagtgtcaaagtgttaaggagaagtaaccgaaaaaagatagatgatcctatagatgaggaagaagagtttgaagaactcaaaggctctgaaccccacatgagaactagaaatcaaggtcgaaggacagctttctataatgaggatgactctgaagaggagcaaaggcagctgttgttcgaagacacctctttaacttttggaacttctagtagaggacgagtccgaaagttgactgaaaaagcaaaagctaatttaattggttggtaacttgtaccaaaatattttacttcaaaatctataaagcaggtacagttaaggaataagtagaactaaggcttctgcttccttgctgctgtggtggagtagggaatgttatgatttgatttgcaaaaaaaaaaacaaaaaaaaaaaca

SEQ ID NO: 381018 - DNA, 6527 bp, Homo sapiens
ggttgttagctaccttaagaggacatgctgctgaaatatcagacatggctgtaaactatgagaataccatgatagcagctggaagttgtgataaaatgatccgagtctggtgtcttcgaacctgtgcacctttggctgttcttcagggccatagtgcatctattacatcactacagttctcaccattgtgcagtggctcaaagagatatctatcttctactggggcagatggcactatttgtttttggctctgggatgctggaacccttaaaataaacccaagacctgcaaaatttacagagcgccctcggcctggagttcaaatgatctgttcttcttttagtgctggtggaatgtttctggcgacgggaagcacagatcatattattcgggtttatttttttggatcaggtcagccagagaaaatatcagaattggagtttcatactgacaaagttgacagtatccagttttccaacactagtaacaggtttgtaagtggcagtcgtgatgggacagcacgtatttggcaatttaaacgaagagagtggaagagcattttgttggatatggctactcgtccagcaggccaaaaccttcaaggaatagaagataaaatcacaaaaatgaaggttactatggtagcttgggatcgacatgacaatacagttataactgcagttaataacatgactctgaaagtttggaattcttacactggtcaactaattcatgtcctgatgggtcatgaagatgaggtatttgttcttgaaccacacccgttcgatcctagagttctcttttctgctggtcatgatggaaacgtgatagtgtgggatctggcaagaggagtcaaaatacgatcttatttcaatatgattgaaggccaaggacatggcgcagtatttgactgcaaatgctctcctgatggtcagcattttgcatgcacagactctcatggacatcttttaatttttggctttgggtccagtagcaaatatgacaagatagcagatcagatgttctttcatagtgattatcggccacttattcgtgatgccaacaatttgtattagatgaacagactcagcaagcacctcatcttatgcctccccctttttggttgatgttgatggtaaccctcatccatcaagatatcaaagattagttcctggccgtgaaaattgcagggaggagcaactcatccctcagatgggagtaacttcctcaggactgaatcaagttttaagtcagcaagcaaaccaggagatcagcccactggacagcatgattcaaagactacaacaggagcaagacctgagacgttctggtgaagcaggtatcagtaataccagccgtttaagtagaggctccataagttctacctcagaggttcattcaccaccaaacgtaggactaagacgtagtggacaaattgaaggtgtacggcaaatgcacagcaacgcaccaagaagtgaaatagccacagagcgggatctggtagcttggagtcgaagggtggtagtacccgagctatcagctggtgtagccagtaggcaagaagaatggagaactgcaaagggagaagaagaaataaagacttacaggtcagaagagaaaagaaaacacttaactgttccaaaagagaataaaatacccactgtctcaaagaatcatgctcatgagcatttcctggatcttggagaatccaaaaagcaacagacaaatcaacacaattatcgtacaagatctgcattggaagagactcctagaccctcagaagagatagaaaatggcagtagttcttcagatgaaggcgaagtagttgctgtcagtggtggaacatccgaagaagaagagagagcatggcacagtgatggcagttctagtgactactccagtgattactctgactggacagcagatgcaggaattaatctgcagccaccaaagaaagttcctaagaataaaaccaagaaagcagaaagcagttcagatgaagaagaagaatctgaaaaacagaagcaaaaacagattaaaaaggaaaagaaaaaagtaaatgaagaaaaagatggaccaatatcaccaaagaaaaagaagcccaaagaaagaaaacaaaagagattggctgtgggagaactaactgaaaatggtttgacattagaagaatggttgccatcaacatggattacagataccattccccgaagatgtccatttgtgccacagatgggtgatgaggtttattatttccgacaaggacatgaagcctatgtcgaaatggcccggaaaaataaaatatatagtatcaatcccaaaaaacaaccatggcataaaatggagctacgggaacaagaacttatgaaaatagttggcataaagtatgaagtgggattacctaccctttgctgccttaaacttgcttttctagatcctgatactggtaaactgactggcggatcatttaccatgaaataccatgatatgcctgacgttatagatttcctagtcttgagacaacaatttgatgatgcaaaatacaggcgatggaatataggtgaccgcttcaggtctgtcatagatgatgcctggtggtttggaacaatcgaaagccaggaacctcttcaacctgagtaccctgatagtctgtttcaatgctacaatgtttgctgggacaatggagatacagaaaagatgagtccttgggatatggagcttatacctaataatgctgtatttcctgaagaactaggtaccagtgttcctttaactgatggtgagtgcagatcactaatctataaacctcttgatggagaatggggtaccaatcccagggatgaagaatgtgaaagaattgtggcaggaataaaccagttgatgacactagatattgcctcagcatttgtggcccccgtggatctgcaagcctatcccatgtattgcacagtagtggcatatccaacggatctaagtacaattaaacaaagactggaaaacaggttttacaggcgggtttcttccctaatgtgggaagttcgatatatagagcataatacacgaacatttaatgagcctggaagccctattgtgaaatctgctaaattcgtgactgatcttcttctacattttataaagtaagttatcttttcatatgtaattatgatagttttaataattaatggcactacagttcctcttaaaatagaaaacatactgtttgtaaagaagaaacatttaagagtagccaaaatagctcagctgggagagcattagactgaagatctaaaggtctctggtttgatcctgggtttcagaagaaacagttcattggctaataataagaatgaaatcataaaaatcgtattaccattgtgttttaaggttaaaattgtttaaaaaaagattattttctcaatctaactgttagacaataataatagtaaaaatttatttaacatgtaatgttttacctacattaactcttctaacccaaataacaatcttacaggtggaagagataattatctggaattttgaattgaggaaactgtggcctatagtggttaacatgtataaggttgcacggtaaatgagtgtctgccatctgatttgagaatttttcatcctaacagtatattgcccctgtcaagtatattaacaagtatttaaatagtccagcaggagactgaatttaactttcatgattcttcttcaaagtcaagtttacttcctcattgatcccataacaagagtgataagcactatttattaaggcagaagtactttcccttccttatcttaaggattttatgcaatcatataatgaattgagcctcctaagttgaaggcagagaaatgaattctatattttgtacaaagactgctgtgattccatgtcattatttgtattgaatttttttttcctggttgagaagtagtaacagcattttaaaagcttacttagctgttatcagctttcatttttacataatgaaaaattcaggattattcagttttttttttttttttaataaacatccctgcttcattctcattaatggacataatctttgagctcctttttgattaatgtgttttaactgaggaatgcaggtcatttcagtataagaaaacaccaaacataattaataaggtaaagtttgtgccctttctctaccttattctctaagaaatctattgctttccaatggtttgggggctattattgctatgcttttgttttccttattgaaattagtaattaagcattatcctctgaagactcttatgtctgtaattttttataagtgttataactatgtgtatgtgtatctgttttttcaaagagaatcagtagaactacatgagatagtatattcatatttcagtgaaataatttagatgaaaattgttaatacatttgaaagtctgtgaaatgtatttctttcaaacggctactttgaaatgtctttgaagtcagattcatgaaatacttaaagcatttgtattgtatatttctaaaaataaatccatggcatttttttagatgtgtatagtttgtttaaaaatactttttttagcagatagtcttcaagatattaagtattccttgaaattttgattattatactttttaattgagttatttggcaaaatttcaagcaattgatacatacaaagtaatgtgatggatccttttaatacagtttcataggatagataaatctgtaagaaagtataatataaggaaaactgtgacaagtagtaagagaattgtataaaagtttagataagaataggattacttttagctgtgatgatggggattcagatacaggggaggagaagtctgttaagacattgtatacaaggtgtagatactgatagattctggaaatgttagatgaaaagaaagccattccagggataaggagcagcgtgaggtaggaagttttaattaagggtaatataaattggagaagtcacagtagagatacagtgctataaatctgagttggggccacatcgtgggtggctttgaatatgaatctaaaatataagctctgagagcaaggggctgttgaaagtatattaacatgagaataacatgttttacactatgccttaaaaatgttaatttgactgcagtgtctaatttaattgacagagaagagacaaaaagcataaatagcagattgactgctacagttgaccaactaagagttgatgagggcttaatttatgaaagtgagaaagggacagatgcccagacatacttgaggatagagttcacagcccttgaccactaattgggtttataaggaggaggaaagggaaagaataatgaaaaaccaagattcccattactgtaagaatgatatgttgttaaagaaaaatagaaaaaggaacaaggatatctggggagtcactattaagtttagacgtggaattttaggtgttggtagaatgctcaggagaagggttaggacaaattgcaggaattttggaattcatttacacagataaaccacaagtatgtgaagcaaaaggtacagtgtcaagatgcgttaagaacaaaattttaggaaatacatttaaaaataaaagaaagagttggaagacaagaaatgtattagctgtttgaagactgaggaatggaagaagcacagcagatacctaagcaaagactgggagatgagacttgggtttggtgtaatgatatagtgaggccacactgaaagctctacatagagtggaggggtcagggttaaatgtgtgtgcataaattattggagtaagccaatggagaagaaagcaagccttcagcttcaacttttaccttaaaatatggttttacgaacaaatttttaaggaaaaaaattatcatggttctaatcttacatgttaacatttccttgttatgtagggatcagacttgttataacataattccactttataattcaatgaagaagaaagttttgtctgattctgaggatgaagagaaagatgctgatgtgccaggaacttctactcgaaaaaggaaggaccatcagcctagaagaagattacgtaatagagcccagtcttacgatattcaagcatggaagaaacagtgtgaagaattgttaaatctcatatttcaatgtgaagattcagagcctttccgtcagccggtagatctccttgaatatccagactacagagacatcattgacactccaatggattttgctaccgttagagaaactttagaggctgggaattatgagtcaccaatggagttatgtaaagatgtcagacttattttcagtaattccaaagcatatacaccaagcaaaagatcaaggatttacagcatgagtttgcgcctgtctgctttctttgaagaacacattagttcagttttatcagattataaatctgctcttcgttttcataaaagaaataccataaccaaaaggaggaagaatctgaaaaacagaagcaaaaacagattaaaaaggaaaagaaaaaagtaaatgaag

SEQ ID NO: 381019 - DNA, 3382 bp, Homo sapiens
ggttgttagctaccttaagaggacatgctgctgaaatatcagacatggctgtaaactatgagaataccatgatagcagctggaagttgtgataaaatgatccgagtctggtgtcttcgaacctgtgcacctttggctgttcttcagggccatagtgcatctattacatcactacagttctcaccattgtgcagtggctcaaagagatatctatcttctactggggcagatggcactatttgtttttggctctgggatgctggaacccttaaaataaacccaagacctgcaaaatttacagagcgccctcggcctggagttcaaatgatctgttcttcttttagtgctggtggaatgtttctggcgacgggaagcacagatcatattattcgggtttatttttttggatcaggtcagccagagaaaatatcagaattggagtttcatactgacaaagttgacagtatccagttttccaacactagtaacaggtttgtaagtggcagtcgtgatgggacagcacgtatttggcaatttaaacgaagagagtggaagagcattttgttggatatggctactcgtccagcaggccaaaaccttcaaggaatagaagataaaatcacaaaaatgaaggttactatggtagcttgggatcgacatgacaatacagttataactgcagttaataacatgactctgaaagtttggaattcttacactggtcaactaattcatgtcctgatgggtcatgaagatgaggtatttgttcttgaaccacacccgttcgatcctagagttctcttttctgctggtcatgatggaaacgtgatagtgtgggatctggcaagaggagtcaaaatacgatcttatttcaatatgattgaaggccaaggacatggcgcagtatttgactgcaaatgctctcctgatggtcagcattttgcatgcacagactctcatggacatcttttaatttttggctttgggtccagtagcaaatatgacaagatagcagatcagatgttctttcatagtgattatcggccacttattcgtgatgccaacaatttgtattagatgaacagactcagcaagcacctcatcttatgcctccccctttttggttgatgttgatggtaaccctcatccatcaagatatcaaagattagttcctggccgtgaaaattgcagggaggagcaactcatccctcagatgggagtaacttcctcaggactgaatcaagttttaagtcagcaagcaaaccaggagatcagcccactggacagcatgattcaaagactacaacaggagcaagacctgagacgttctggtgaagcaggtatcagtaataccagccgtttaagtagaggctccataagttctacctcagaggttcattcaccaccaaacgtaggactaagacgtagtggacaaattgaaggtgtacggcaaatgcacagcaacgcaccaagaagtgaaatagccacagagcgggatctggtagcttggagtcgaagggtggtagtacccgagctatcagctggtgtagccagtaggcaagaagaatggagaactgcaaagggagaagaagaaataaagacttacaggtcagaagagaaaagaaaacacttaactgttccaaaagagaataaaatacccactgtctcaaagaatcatgctcatgagcatttcctggatcttggagaatccaaaaagcaacagacaaatcaacacaattatcgtacaagatctgcattggaagagactcctagaccctcagaagagatagaaaatggcagtagttcttcagatgaaggcgaagtagttgctgtcagtggtggaacatccgaagaagaagagagagcatggcacagtgatggcagttctagtgactactccagtgattactctgactggacagcagatgcaggaattaatctgcagccaccaaagaaagttcctaagaataaaaccaagaaagcagaaagcagttcagatgaagaagaagaatctgaaaaacagaagcaaaaacagattaaaaaggaaaagaaaaaagtaaatgaagaaaaagatggaccaatatcaccaaagaaaaagaagcccaaagaaagaaaacaaaagagattggctgtgggagaactaactgaaaatggtttgacattagaagaatggttgccatcaacatggattacagataccattccccgaagatgtccatttgtgccacagatgggtgatgaggtttattatttccgacaaggacatgaagcctatgtcgaaatggcccggaaaaataaaatatatagtatcaatcccaaaaaacaaccatggcataaaatggagctacgggaacaagaacttatgaaaatagttggcataaagtatgaagtgggattacctaccctttgctgccttaaacttgcttttctagatcctgatactggtaaactgactggcggatcatttaccatgaaataccatgatatgcctgacgttatagatttcctagtcttgagacaacaatttgatgatgcaaaatacaggcgatggaatataggtgaccgcttcaggtctgtcatagatgatgcctggtggtttggaacaatcgaaagccaggaacctcttcaacctgagtaccctgatagtctgtttcaatgctacaatgtttgctgggacaatggagatacagaaaagatgagtccttgggatatggagcttatacctaataatgctgtatttcctgaagaactaggtaccagtgttcctttaactgatggtgagtgcagatcactaatctataaacctcttgatggagaatggggtaccaatcccagggatgaagaatgtgaaagaattgtggcaggaataaaccagttgatgacactagatattgcctcagcatttgtggcccccgtggatctgcaagcctatcccatgtattgcacagtagtggcatatccaacggatctaagtacaattaaacaaagactggaaaacaggttttacagtggtgatctttccacccatttactgatctttagcagtgtttctcaactttttgtatataggaatgcacataagattatggggattatgttaaaatgtagaatcttattcagtagatttggagtgggacctgagattctgcatttctaacaagtcccagtaatgtcgatgctgctggtctttagacacttaaaatacaattcctagatcctagatacagtttttcctagaggctgacatgatttgatattcactgtctttatattgtattttataaagcaaggcaaggtatttcattttctcctagataacattaaaatatttgttcattgatttttaatataatatataataaaaattttgtattcgtattatg

SEQ ID NO: 381020 - DNA, 553 bp, Homo sapiens
acaaacttatctatttattttagatattgcctcagcatttgtggcccccgtggatctgcaagcctatcccatgtattgcacagtagtggcatatccaacggatctaagtacaattaaacaaagactggaaaacaggttttacagcaggttagaaccatttgatgtagctactatcaaaggaaagctggtgatctttccacccatttactgatctttagcagtgtttctcaactttttgtatataggaatgcacataagattatggggattatgttaaaatgtagaatcttattcagtagatttggagtgggacctgagattctgcatttctaacaagtcccagtaatgtcgatgctgctggtctttagacacttaaaatacaattcctagatcctagatacagtttttcctagaggctgacatgatttgatattcactgtctttatattgtattttataaagcaaggcaaggtatttcattttctcctagataacattaaaatatttgttcattgatttttaatataatatataataaaaattttgtattcgt

SEQ ID NO: 381021 - DNA, 381 bp, Homo sapiens
cgttcacatagagctataagagtgactgacaatactattttatttacagccctgaaaggaaaaaaaggatcttaaaaccccagctaaaatcagaaagctctacctctgcattctctacacctacacgatcaataccgccaagacacaatgctgctcagataaacggtaaaacagaatctagttctgtggttcgaaccagaagcaaccgagtggttgtagatccagttgtcactgagcaaccatctacttcttcagctgcaaagacttttattacaaaagctaatgcatctgcaataccagggaaaacaagtaagactcactttctaaattgaaatgtatatgatgattttcttaatttaagcttttactttgccaaatgca

SEQ ID NO: 381022 - DNA, 361 bp, Homo sapiens
aggggtcagggttaaatgtgtgtgcataaattattggagtaagccaatggagaagaaagcaagccttcagcttcaacttttaccttaaaatatggttttacgaacaaatttttaaggaaaaaaattatcatggttctaatcttacatgttaacatttccttgttatgtagggatcagacttgttataacataattccactttataattcaatgaagaagaaagttttgtctgattctgaggtatgtaatatttcattattattaccatattgatattctctatataaaaaaatttacatattgtagttttcaggtaaaagctgttgtgaacattattttttgtctagtgtagttaatttaa

SEQ ID NO: 381023 - DNA, 2468 bp, Homo sapiens
aaaaagcagtgacagcagccatgcatttcagaatgatgagttagtttttgttcttggccaggtgaccgcttcaggtctgtcatagatgatgcctggtggtttggaacaatcgaaagccaggaacctcttcaacctgagtaccctgatagtctgtttcaatgctacaatgtttgctgggacaatggagatacagaaaagatgagtccttgggatatggagcttatacctaataatgctgtatttcctgaagaactaggtaccagtgttcctttaactgatggtgagtgcagatcactaatctataaacctcttgatggagaatggggtaccaatcccagggatgaagaatgtgaaagaattgtggcaggaataaaccagttgatgacactagatattgcctcagcatttgtggcccccgtggatctgcaagcctatcccatgtattgcacagtagtggcatatccaacggatctaagtacaattaaacaaagactggaaaacaggttttacaggcgggtttcttccctaatgtgggaagttcgatatatagagcataatacacgaacatttaatgagcctggaagccctattgtgaaatctgctaaattcgtgactgatcttcttctacattttataaaggatcagacttgttataacataattccactttataattcaatgaagaagaaagttttgtctgattctgaggatgaagagaaagatgctgatgtgccaggaacttctactcgaaaaaggaaggaccatcagcctagaagaagattacgtaatagagcccagtcttacgatattcaagcatggaagaaacagtgtgaagaattgttaaatctcatatttcaatgtgaagattcagagcctttccgtcagccggtagatctccttgaatatccagactacagagacatcattgacactccaatggattttgctaccgttagagaaactttagaggctgggaattatgagtcaccaatggagttatgtaaagatgtcagacttattttcagtaattccaaagcatatacaccaagcaaaagatcaaggatttacagcatgagtttgcgcctgtctgctttctttgaagaacacattagttcagttttatcagattataaatctgctcttcgttttcataaaagaaataccataaccaaaaggaggaagaaaagaaacagaagcagctctgtttccagtagtgctgcatcaagccctgaaaggaaaaaaaggatcttaaaaccccagctaaaatcagaaagctctacctctgcattctctacacctacacgatcaataccgccaagacacaatgctgctcagataaacggtaaaacagaatctagttctgtggttcgaaccagaagcaaccgagtggttgtagatccagttgtcactgagcaaccatctacttcttcagctgcaaagacttttattacaaaagctaatgcatctgcaataccagggaaaacaatactagagaattctgtgaaacattccaaagctttgaatactctttccagtcctggtcaatccagttttagtcatggcactaggaataattctgcaaaagaaaacatggaaaaggaaaagccagtcaaacgtaaaatgaagtcatctgtactcccaaaggcgtccactctttcaaagtcatcagctgtcattgagcaaggagattgtaagaacaacgctcttgtaccaggaaccattcaagtaaatggccatggaggacagccatcaaaacttgtgaagaggggacctggaaggaaacctaaagtagaagttaataccaatagtggtgaaattatacacaagaaaaggggtagaaagcccaaaaagctacagtatgcaaagccagaagatttagagcaaaataatgtgcatcccatcagagatgaagtacttccttcttcaacatgcaattttctttctgaaactaataatgtaaaggaagatttgttacagaaaaagaatcgtggaggtaggaagcccaaaaggaagatgaagacacaaaaattagatgcagatctcctagtccctgcaagtgtcaaagtgttaaggagaagtaaccgaaaaaagatagatgatcctatagatgaggaagaagagtttgaagaactcaaaggctctgaaccccacatgagaactagaaatcaaggtcgaaggacagctttctataatgaggatgactctgaagaggagcaaaggcagctgttgttcgaagacacctctttaacttttggaacttctagtagaggacgagtccgaaagttgactgaaaaagcaaaagctaatttaattggttggtaacttgtaccaaaatattttacttcaaaatctataaagcaggtacagttaaggaataagtagaactaaggcttctgcttccttgctgctgtggtggagtagggaatgttatgatttgatttgcaaaaaaaaaaacaaaaaaaaaaaca

SEQ ID NO: 381024 - DNA, 7756 bp, Homo sapiens
ggttgttagctaccttaagaggacatgctgctgaaatatcagacatggctgtaaactatgagaataccatgatagcagctggaagttgtgataaaatgatccgagtctggtgtcttcgaacctgtgcacctttggctgttcttcagggccatagtgcatctattacatcactacagttctcaccattgtgcagtggctcaaagagatatctatcttctactggggcagatggcactatttgtttttggctctgggatgctggaacccttaaaataaacccaagacctgcaaaatttacagagcgccctcggcctggagttcaaatgatctgttcttcttttagtgctggtggaatgtttctggcgacgggaagcacagatcatattattcgggtttatttttttggatcaggtcagccagagaaaatatcagaattggagtttcatactgacaaagttgacagtatccagttttccaacactagtaacaggtttgtaagtggcagtcgtgatgggacagcacgtatttggcaatttaaacgaagagagtggaagagcattttgttggatatggctactcgtccagcaggccaaaaccttcaaggaatagaagataaaatcacaaaaatgaaggttactatggtagcttgggatcgacatgacaatacagttataactgcagttaataacatgactctgaaagtttggaattcttacactggtcaactaattcatgtcctgatgggtcatgaagatgaggtatttgttcttgaaccacacccgttcgatcctagagttctcttttctgctggtcatgatggaaacgtgatagtgtgggatctggcaagaggagtcaaaatacgatcttatttcaatatgattgaaggccaaggacatggcgcagtatttgactgcaaatgctctcctgatggtcagcattttgcatgcacagactctcatggacatcttttaatttttggctttgggtccagtagcaaatatgacaagatagcagatcagatgttctttcatagtgattatcggccacttattcgtgatgccaacaatttgtattagatgaacagactcagcaagcacctcatcttatgcctccccctttttggttgatgttgatggtaaccctcatccatcaagatatcaaagattagttcctggccgtgaaaattgcagggaggagcaactcatccctcagatgggagtaacttcctcaggactgaatcaagttttaagtcagcaagcaaaccaggagatcagcccactggacagcatgattcaaagactacaacaggagcaagacctgagacgttctggtgaagcaggtatcagtaataccagccgtttaagtagaggctccataagttctacctcagaggttcattcaccaccaaacgtaggactaagacgtagtggacaaattgaaggtgtacggcaaatgcacagcaacgcaccaagaagtgaaatagccacagagcgggatctggtagcttggagtcgaagggtggtagtacccgagctatcagctggtgtagccagtaggcaagaagaatggagaactgcaaagggagaagaagaaataaagacttacaggtcagaagagaaaagaaaacacttaactgttccaaaagagaataaaatacccactgtctcaaagaatcatgctcatgagcatttcctggatcttggagaatccaaaaagcaacagacaaatcaacacaattatcgtacaagatctgcattggaagagactcctagaccctcagaagagatagaaaatggcagtagttcttcagatgaaggcgaagtagttgctgtcagtggtggaacatccgaagaagaagagagagcatggcacagtgatggcagttctagtgactactccagtgattactctgactggacagcagatgcaggaattaatctgcagccaccaaagaaagttcctaagaataaaaccaagaaagcagaaagcagttcagatgaagaagaagaatctgaaaaacagaagcaaaaacagattaaaaaggaaaagaaaaaagtaaatgaagaaaaagatggaccaatatcaccaaagaaaaagaagcccaaagaaagaaaacaaaagagattggctgtgggagaactaactgaaaatggtttgacattagaagaatggttgccatcaacatggattacagataccattccccgaagatgtccatttgtgccacagatgggtgatgaggtttattatttccgacaaggacatgaagcctatgtcgaaatggcccggaaaaataaaatatatagtatcaatcccaaaaaacaaccatggcataaaatggagctacgggaacaagaacttatgaaaatagttggcataaagtatgaagtgggattacctaccctttgctgccttaaacttgcttttctagatcctgatactggtaaactgactggcggatcatttaccatgaaataccatgatatgcctgacgttatagatttcctagtcttgagacaacaatttgatgatgcaaaatacaggcgatggaatataggtgaccgcttcaggtctgtcatagatgatgcctggtggtttggaacaatcgaaagccaggaacctcttcaacctgagtaccctgatagtctgtttcaatgctacaatgtttgctgggacaatggagatacagaaaagatgagtccttgggatatggagcttatacctaataatgctgtatttcctgaagaactaggtaccagtgttcctttaactgatggtgagtgcagatcactaatctataaacctcttgatggagaatggggtaccaatcccagggatgaagaatgtgaaagaattgtggcaggaataaaccagttgatgacactagatattgcctcagcatttgtggcccccgtggatctgcaagcctatcccatgtattgcacagtagtggcatatccaacggatctaagtacaattaaacaaagactggaaaacaggttttacaggcgggtttcttccctaatgtgggaagttcgatatatagagcataatacacgaacatttaatgagcctggaagccctattgtgaaatctgctaaattcgtgactgatcttcttctacattttataaagtaagttatcttttcatatgtaattatgatagttttaataattaatggcactacagttcctcttaaaatagaaaacatactgtttgtaaagaagaaacatttaagagtagccaaaatagctcagctgggagagcattagactgaagatctaaaggtctctggtttgatcctgggtttcagaagaaacagttcattggctaataataagaatgaaatcataaaaatcgtattaccattgtgttttaaggttaaaattgtttaaaaaaagattattttctcaatctaactgttagacaataataatagtaaaaatttatttaacatgtaatgttttacctacattaactcttctaacccaaataacaatcttacaggtggaagagataattatctggaattttgaattgaggaaactgtggcctatagtggttaacatgtataaggttgcacggtaaatgagtgtctgccatctgatttgagaatttttcatcctaacagtatattgcccctgtcaagtatattaacaagtatttaaatagtccagcaggagactgaatttaactttcatgattcttcttcaaagtcaagtttacttcctcattgatcccataacaagagtgataagcactatttattaaggcagaagtactttcccttccttatcttaaggattttatgcaatcatataatgaattgagcctcctaagttgaaggcagagaaatgaattctatattttgtacaaagactgctgtgattccatgtcattatttgtattgaatttttttttcctggttgagaagtagtaacagcattttaaaagcttacttagctgttatcagctttcatttttacataatgaaaaattcaggattattcagttttttttttttttttaataaacatccctgcttcattctcattaatggacataatctttgagctcctttttgattaatgtgttttaactgaggaatgcaggtcatttcagtataagaaaacaccaaacataattaataaggtaaagtttgtgccctttctctaccttattctctaagaaatctattgctttccaatggtttgggggctattattgctatgcttttgttttccttattgaaattagtaattaagcattatcctctgaagactcttatgtctgtaattttttataagtgttataactatgtgtatgtgtatctgttttttcaaagagaatcagtagaactacatgagatagtatattcatatttcagtgaaataatttagatgaaaattgttaatacatttgaaagtctgtgaaatgtatttctttcaaacggctactttgaaatgtctttgaagtcagattcatgaaatacttaaagcatttgtattgtatatttctaaaaataaatccatggcatttttttagatgtgtatagtttgtttaaaaatactttttttagcagatagtcttcaagatattaagtattccttgaaattttgattattatactttttaattgagttatttggcaaaatttcaagcaattgatacatacaaagtaatgtgatggatccttttaatacagtttcataggatagataaatctgtaagaaagtataatataaggaaaactgtgacaagtagtaagagaattgtataaaagtttagataagaataggattacttttagctgtgatgatggggattcagatacaggggaggagaagtctgttaagacattgtatacaaggtgtagatactgatagattctggaaatgttagatgaaaagaaagccattccagggataaggagcagcgtgaggtaggaagttttaattaagggtaatataaattggagaagtcacagtagagatacagtgctataaatctgagttggggccacatcgtgggtggctttgaatatgaatctaaaatataagctctgagagcaaggggctgttgaaagtatattaacatgagaataacatgttttacactatgccttaaaaatgttaatttgactgcagtgtctaatttaattgacagagaagagacaaaaagcataaatagcagattgactgctacagttgaccaactaagagttgatgagggcttaatttatgaaagtgagaaagggacagatgcccagacatacttgaggatagagttcacagcccttgaccactaattgggtttataaggaggaggaaagggaaagaataatgaaaaaccaagattcccattactgtaagaatgatatgttgttaaagaaaaatagaaaaaggaacaaggatatctggggagtcactattaagtttagacgtggaattttaggtgttggtagaatgctcaggagaagggttaggacaaattgcaggaattttggaattcatttacacagataaaccacaagtatgtgaagcaaaaggtacagtgtcaagatgcgttaagaacaaaattttaggaaatacatttaaaaataaaagaaagagttggaagacaagaaatgtattagctgtttgaagactgaggaatggaagaagcacagcagatacctaagcaaagactgggagatgagacttgggtttggtgtaatgatatagtgaggccacactgaaagctctacatagagtggaggggtcagggttaaatgtgtgtgcataaattattggagtaagccaatggagaagaaagcaagccttcagcttcaacttttaccttaaaatatggttttacgaacaaatttttaaggaaaaaaattatcatggttctaatcttacatgttaacatttccttgttatgtagggatcagacttgttataacataattccactttataattcaatgaagaagaaagttttgtctgattctgaggatgaagagaaagatgctgatgtgccaggaacttctactcgaaaaaggaaggaccatcagcctagaagaagattacgtaatagagcccagtcttacgatattcaagcatggaagaaacagtgtgaagaattgttaaatctcatatttcaatgtgaagattcagagcctttccgtcagccggtagatctccttgaatatccagactacagagacatcattgacactccaatggattttgctaccgttagagaaactttagaggctgggaattatgagtcaccaatggagttatgtaaagatgtcagacttattttcagtaattccaaagcatatacaccaagcaaaagatcaaggatttacagcatgagtttgcgcctgtctgctttctttgaagaacacattagttcagttttatcagattataaatctgctcttcgttttcataaaagaaataccataaccaaaaggaggaagaaaagaaacagaagcagctctgtttccagtagtgctgcatcaagccctgaaaggaaaaaaaggatcttaaaaccccagctaaaatcagaaagctctacctctgcattctctacacctacacgatcaataccgccaagacacaatgctgctcagataaacggtaaaacagaatctagttctgtggttcgaaccagaagcaaccgagtggttgtagatccagttgtcactgagcaaccatctacttcttcagctgcaaagacttttattacaaaagctaatgcatctgcaataccagggaaaacaatactagagaattctgtgaaacattccaaagctttgaatactctttccagtcctggtcaatccagttttagtcatggcactaggaataattctgcaaaagaaaacatggaaaaggaaaagccagtcaaacgtaaaatgaagtcatctgtactcccaaaggcgtccactctttcaaagtcatcagctgtcattgagcaaggagattgtaagaacaacgctcttgtaccaggaaccattcaagtaaatggccatggaggacagccatcaaaacttgtgaagaggggacctggaaggaaacctaaagtagaagttaataccaatagtggtgaaattatacacaagaaaaggggtagaaagcccaaaaagctacagtatgcaaagccagaagatttagagcaaaataatgtgcatcccatcagagatgaagtacttccttcttcaacatgcaattttctttctgaaactaataatgtaaaggaagatttgttacagaaaaagaatcgtggaggtaggaagcccaaaaggaagatgaagacacaaaaattagatgcagatctcctagtccctgcaagtgtcaaagtgttaaggagaagtaaccgaaaaaagatagatgatcctatagatgaggaagaagagtttgaagaactcaaaggctctgaaccccacatgagaactagaaatcaaggtcgaaggacagctttctataatgaggatgactctgaagaggagcaaaggcagctgttgttcgaagacacctctttaacttttggaacttctagtagaggacgagtccgaaagttgactgaaaaagcaaaagctaatttaattggttggtaacttgtaccaaaatattttacttcaaaatctataaagcaggtacagttaaggaataagtagaactaaggcttctgcttccttgctgctgtggtggagtagggaatgttatgatttgatttgcaaaaaaaaaaacaaaaaaaaaaaca

SEQ ID NO: 381025 - DNA, 4964 bp, Homo sapiens
ggttgttagctaccttaagaggacatgctgctgaaatatcagacatggctgtaaactatgagaataccatgatagcagctggaagttgtgataaaatgatccgagtctggtgtcttcgaacctgtgcacctttggctgttcttcagggccatagtgcatctattacatcactacagttctcaccattgtgcagtggctcaaagagatatctatcttctactggggcagatggcactatttgtttttggctctgggatgctggaacccttaaaataaacccaagacctgcaaaatttacagagcgccctcggcctggagttcaaatgatctgttcttcttttagtgctggtggaatgtttctggcgacgggaagcacagatcatattattcgggtttatttttttggatcaggtcagccagagaaaatatcagaattggagtttcatactgacaaagttgacagtatccagttttccaacactagtaacaggtttgtaagtggcagtcgtgatgggacagcacgtatttggcaatttaaacgaagagagtggaagagcattttgttggatatggctactcgtccagcaggccaaaaccttcaaggaatagaagataaaatcacaaaaatgaaggttactatggtagcttgggatcgacatgacaatacagttataactgcagttaataacatgactctgaaagtttggaattcttacactggtcaactaattcatgtcctgatgggtcatgaagatgaggtatttgttcttgaaccacacccgttcgatcctagagttctcttttctgctggtcatgatggaaacgtgatagtgtgggatctggcaagaggagtcaaaatacgatcttatttcaatatgattgaaggccaaggacatggcgcagtatttgactgcaaatgctctcctgatggtcagcattttgcatgcacagactctcatggacatcttttaatttttggctttgggtccagtagcaaatatgacaagatagcagatcagatgttctttcatagtgattatcggccacttattcgtgatgccaacaatttgtattagatgaacagactcagcaagcacctcatcttatgcctccccctttttggttgatgttgatggtaaccctcatccatcaagatatcaaagattagttcctggccgtgaaaattgcagggaggagcaactcatccctcagatgggagtaacttcctcaggactgaatcaagttttaagtcagcaagcaaaccaggagatcagcccactggacagcatgattcaaagactacaacaggagcaagacctgagacgttctggtgaagcaggtatcagtaataccagccgtttaagtagaggctccataagttctacctcagaggttcattcaccaccaaacgtaggactaagacgtagtggacaaattgaaggtgtacggcaaatgcacagcaacgcaccaagaagtgaaatagccacagagcgggatctggtagcttggagtcgaagggtggtagtacccgagctatcagctggtgtagccagtaggcaagaagaatggagaactgcaaagggagaagaagaaataaagacttacaggtcagaagagaaaagaaaacacttaactgttccaaaagagaataaaatacccactgtctcaaagaatcatgctcatgagcatttcctggatcttggagaatccaaaaagcaacagacaaatcaacacaattatcgtacaagatctgcattggaagagactcctagaccctcagaagagatagaaaatggcagtagttcttcagatgaaggcgaagtagttgctgtcagtggtggaacatccgaagaagaagagagagcatggcacagtgatggcagttctagtgactactccagtgattactctgactggacagcagatgcaggaattaatctgcagccaccaaagaaagttcctaagaataaaaccaagaaagcagaaagcagttcagatgaagaagaagaatctgaaaaacagaagcaaaaacagattaaaaaggaaaagaaaaaagtaaatgaagaaaaagatggaccaatatcaccaaagaaaaagaagcccaaagaaagaaaacaaaagagattggctgtgggagaactaactgaaaatggtttgacattagaagaatggttgccatcaacatggattacagataccattccccgaagatgtccatttgtgccacagatgggtgatgaggtttattatttccgacaaggacatgaagcctatgtcgaaatggcccggaaaaataaaatatatagtatcaatcccaaaaaacaaccatggcataaaatggagctacgggaacaagaacttatgaaaatagttggcataaagtatgaagtgggattacctaccctttgctgccttaaacttgcttttctagatcctgatactggtaaactgactggcggatcatttaccatgaaataccatgatatgcctgacgttatagatttcctagtcttgagacaacaatttgatgatgcaaaatacaggcgatggaatataggtgaccgcttcaggtctgtcatagatgatgcctggtggtttggaacaatcgaaagccaggaacctcttcaacctgagtaccctgatagtctgtttcaatgctacaatgtttgctgggacaatggagatacagaaaagatgagtccttgggatatggagcttatacctaataatgctgtatttcctgaagaactaggtaccagtgttcctttaactgatggtgagtgcagatcactaatctataaacctcttgatggagaatggggtaccaatcccagggatgaagaatgtgaaagaattgtggcaggaataaaccagttgatgacactagatattgcctcagcatttgtggcccccgtggatctgcaagcctatcccatgtattgcacagtagtggcatatccaacggatctaagtacaattaaacaaagactggaaaacaggttttacaggcgggtttcttccctaatgtgggaagttcgatatatagagcataatacacgaacatttaatgagcctggaagccctattgtgaaatctgctaaattcgtgactgatcttcttctacattttataaaggatcagacttgttataacataattccactttataattcaatgaagaagaaagttttgtctgattctgaggatgaagagaaagatgctgatgtgccaggaacttctactcgaaaaaggaaggaccatcagcctagaagaagattacgtaatagagcccagtcttacgatattcaagcatggaagaaacagtgtgaagaattgttaaatctcatatttcaatgtgaagattcagagcctttccgtcagccggtagatctccttgaatatccagactacagagacatcattgacactccaatggattttgctaccgttagagaaactttagaggctgggaattatgagtcaccaatggagttatgtaaagatgtcagacttattttcagtaattccaaagcatatacaccaagcaaaagatcaaggatttacagcatgagtttgcgcctgtctgctttctttgaagaacacattagttcagttttatcagattataaatctgctcttcgttttcataaaagaaataccataaccaaaaggaggaagaaaagaaacagaagcagctctgtttccagtagtgctgcatcaagccctgaaaggaaaaaaaggatcttaaaaccccagctaaaatcagaaagctctacctctgcattctctacacctacacgatcaataccgccaagacacaatgctgctcagataaacggtaaaacagaatctagttctgtggttcgaaccagaagcaaccgagtggttgtagatccagttgtcactgagcaaccatctacttcttcagctgcaaagacttttattacaaaagctaatgcatctgcaataccagggaaaacaatactagagaattctgtgaaacattccaaagctttgaatactctttccagtcctggtcaatccagttttagtcatggcactaggaataattctgcaaaagaaaacatggaaaaggaaaagccagtcaaacgtaaaatgaagtcatctgtactcccaaaggcgtccactctttcaaagtcatcagctgtcattgagcaaggagattgtaagaacaacgctcttgtaccaggaaccattcaagtaaatggccatggaggacagccatcaaaacttgtgaagaggggacctggaaggaaacctaaagtagaagttaataccaatagtggtgaaattatacacaagaaaaggggtagaaagcccaaaaagctacagtatgcaaagccagaagatttagagcaaaataatgtgcatcccatcagagatgaagtacttccttcttcaacatgcaattttctttctgaaactaataatgtaaaggaagatttgttacagaaaaagaatcgtggaggtaggaagcccaaaaggaagatgaagacacaaaaattagatgcagatctcctagtccctgcaagtgtcaaagtgttaaggagaagtaaccgaaaaaagatagatgatcctatagatgaggaagaagagtttgaagaactcaaaggctctgaaccccacatgagaactagaaatcaaggtcgaaggacagctttctataatgaggatgactctgaagaggagcaaaggcagctgttgttcgaagacacctctttaacttttggaacttctagtagaggacgagtccgaaagttgactgaaaaagcaaaagctaatttaattggttggtaacttgtaccaaaatattttacttcaaaatctataaagcaggtacagttaaggaataagtagaactaaggcttctgcttccttgctgctgtggtggagtagggaatgttatgatttgatttgcaaaaaaaaaaacaaaaaaaaaaaca

SEQ ID NO: 381026 - DNA, 7815 bp, Homo sapiens
ggttgttagctaccttaagaggacatgctgctgaaatatcagacatggctgtaaactatgagaataccatgatagcagctggaagttgtgataaaatgatccgagtctggtgtcttcgaacctgtgcacctttggctgttcttcagggccatagtgcatctattacatcactacagttctcaccattgtgcagtggctcaaagagatatctatcttctactggggcagatggcactatttgtttttggctctgggatgctggaacccttaaaataaacccaagacctgcaaaatttacagagcgccctcggcctggagttcaaatgatctgttcttcttttagtgctggtggaatgtttctggcgacgggaagcacagatcatattattcgggtttatttttttggatcaggtcagccagagaaaatatcagaattggagtttcatactgacaaagttgacagtatccagttttccaacactagtaacaggtttgtaagtggcagtcgtgatgggacagcacgtatttggcaatttaaacgaagagagtggaagagcattttgttggatatggctactcgtccagcaggccaaaaccttcaaggaatagaagataaaatcacaaaaatgaaggttactatggtagcttgggatcgacatgacaatacagttataactgcagttaataacatgactctgaaagtttggaattcttacactggtcaactaattcatgtcctgatgggtcatgaagatgaggtatttgttcttgaaccacacccgttcgatcctagagttctcttttctgctggtcatgatggaaacgtgatagtgtgggatctggcaagaggagtcaaaatacgatcttatttcaatatgattgaaggccaaggacatggcgcagtatttgactgcaaatgctctcctgatggtcagcattttgcatgcacagactctcatggacatcttttaatttttggctttgggtccagtagcaaatatgacaagatagcagatcagatgttctttcatagtgattatcggccacttattcgtgatgccaacaatttgtattagatgaacagactcagcaagcacctcatcttatgcctccccctttttggttgatgttgatggtaaccctcatccatcaagatatcaaagattagttcctggccgtgaaaattgcagggaggagcaactcatccctcagatgggagtaacttcctcaggactgaatcaagttttaagtcagcaagcaaaccaggagatcagcccactggacagcatgattcaaagactacaacaggagcaagacctgagacgttctggtgaagcaggtatcagtaataccagccgtttaagtagaggctccataagttctacctcagaggttcattcaccaccaaacgtaggactaagacgtagtggacaaattgaaggtgtacggcaaatgcacagcaacgcaccaagaagtgaaatagccacagagcgggatctggtagcttggagtcgaagggtggtagtacccgagctatcagctggtgtagccagtaggcaagaagaatggagaactgcaaagggagaagaagaaataaagacttacaggtcagaagagaaaagaaaacacttaactgttccaaaagagaataaaatacccactgtctcaaagaatcatgctcatgagcatttcctggatcttggagaatccaaaaagcaacagacaaatcaacacaattatcgtacaagatctgcattggaagagactcctagaccctcagaagagatagaaaatggcagtagttcttcagatgaaggcgaagtagttgctgtcagtggtggaacatccgaagaagaagagagagcatggcacagtgatggcagttctagtgactactccagtgattactctgactggacagcagatgcaggaattaatctgcagccaccaaagaaagttcctaagaataaaaccaagaaagcagaaagcagttcagatgaagaagaagaatctgaaaaacagaagcaaaaacagattaaaaaggaaaagaaaaaagtaaatgaagaaaaagatggaccaatatcaccaaagaaaaagaagcccaaagaaagaaaacaaaagagattggctgtgggagaactaactgaaaatggtttgacattagaagaatggttgccatcaacatggattacagataccattccccgaagatgtccatttgtgccacagatgggtgatgaggtttattatttccgacaaggacatgaagcctatgtcgaaatggcccggaaaaataaaatatatagtatcaatcccaaaaaacaaccatggcataaaatggagctacgggaacaagaacttatgaaaatagttggcataaagtatgaagtgggattacctaccctttgctgccttaaacttgcttttctagatcctgatactggtaaactgactggcggatcatttaccatgaaataccatgatatgcctgacgttatagatttcctagtcttgagacaacaatttgatgatgcaaaatacaggcgatggaatataggtgaccgcttcaggtctgtcatagatgatgcctggtggtttggaacaatcgaaagccaggaacctcttcaacctgagtaccctgatagtctgtttcaatgctacaatgtttgctgggacaatggagatacagaaaagatgagtccttgggatatggagcttatacctaataatgctgtatttcctgaagaactaggtaccagtgttcctttaactgatggtgagtgcagatcactaatctataaacctcttgatggagaatggggtaccaatcccagggatgaagaatgtgaaagaattgtggcaggaataaaccagttgatgacactagatattgcctcagcatttgtggcccccgtggatctgcaagcctatcccatgtattgcacagtagtggcatatccaacggatctaagtacaattaaacaaagactggaaaacaggttttacaggcgggtttcttccctaatgtgggaagttcgatatatagagcataatacacgaacatttaatgagcctggaagccctattgtgaaatctgctaaattcgtgactgatcttcttctacattttataaagtaagttatcttttcatatgtaattatgatagttttaataattaatggcactacagttcctcttaaaatagaaaacatactgtttgtaaagaagaaacatttaagagtagccaaaatagctcagctgggagagcattagactgaagatctaaaggtctctggtttgatcctgggtttcagaagaaacagttcattggctaataataagaatgaaatcataaaaatcgtattaccattgtgttttaaggttaaaattgtttaaaaaaagattattttctcaatctaactgttagacaataataatagtaaaaatttatttaacatgtaatgttttacctacattaactcttctaacccaaataacaatcttacaggtggaagagataattatctggaattttgaattgaggaaactgtggcctatagtggttaacatgtataaggttgcacggtaaatgagtgtctgccatctgatttgagaatttttcatcctaacagtatattgcccctgtcaagtatattaacaagtatttaaatagtccagcaggagactgaatttaactttcatgattcttcttcaaagtcaagtttacttcctcattgatcccataacaagagtgataagcactatttattaaggcagaagtactttcccttccttatcttaaggattttatgcaatcatataatgaattgagcctcctaagttgaaggcagagaaatgaattctatattttgtacaaagactgctgtgattccatgtcattatttgtattgaatttttttttcctggttgagaagtagtaacagcattttaaaagcttacttagctgttatcagctttcatttttacataatgaaaaattcaggattattcagttttttttttttttttaataaacatccctgcttcattctcattaatggacataatctttgagctcctttttgattaatgtgttttaactgaggaatgcaggtcatttcagtataagaaaacaccaaacataattaataaggtaaagtttgtgccctttctctaccttattctctaagaaatctattgctttccaatggtttgggggctattattgctatgcttttgttttccttattgaaattagtaattaagcattatcctctgaagactcttatgtctgtaattttttataagtgttataactatgtgtatgtgtatctgttttttcaaagagaatcagtagaactacatgagatagtatattcatatttcagtgaaataatttagatgaaaattgttaatacatttgaaagtctgtgaaatgtatttctttcaaacggctactttgaaatgtctttgaagtcagattcatgaaatacttaaagcatttgtattgtatatttctaaaaataaatccatggcatttttttagatgtgtatagtttgtttaaaaatactttttttagcagatagtcttcaagatattaagtattccttgaaattttgattattatactttttaattgagttatttggcaaaatttcaagcaattgatacatacaaagtaatgtgatggatccttttaatacagtttcataggatagataaatctgtaagaaagtataatataaggaaaactgtgacaagtagtaagagaattgtataaaagtttagataagaataggattacttttagctgtgatgatggggattcagatacaggggaggagaagtctgttaagacattgtatacaaggtgtagatactgatagattctggaaatgttagatgaaaagaaagccattccagggataaggagcagcgtgaggtaggaagttttaattaagggtaatataaattggagaagtcacagtagagatacagtgctataaatctgagttggggccacatcgtgggtggctttgaatatgaatctaaaatataagctctgagagcaaggggctgttgaaagtatattaacatgagaataacatgttttacactatgccttaaaaatgttaatttgactgcagtgtctaatttaattgacagagaagagacaaaaagcataaatagcagattgactgctacagttgaccaactaagagttgatgagggcttaatttatgaaagtgagaaagggacagatgcccagacatacttgaggatagagttcacagcccttgaccactaattgggtttataaggaggaggaaagggaaagaataatgaaaaaccaagattcccattactgtaagaatgatatgttgttaaagaaaaatagaaaaaggaacaaggatatctggggagtcactattaagtttagacgtggaattttaggtgttggtagaatgctcaggagaagggttaggacaaattgcaggaattttggaattcatttacacagataaaccacaagtatgtgaagcaaaaggtacagtgtcaagatgcgttaagaacaaaattttaggaaatacatttaaaaataaaagaaagagttggaagacaagaaatgtattagctgtttgaagactgaggaatggaagaagcacagcagatacctaagcaaagactgggagatgagacttgggtttggtgtaatgatatagtgaggccacactgaaagctctacatagagtggaggggtcagggttaaatgtgtgtgcataaattattggagtaagccaatggagaagaaagcaagccttcagcttcaacttttaccttaaaatatggttttacgaacaaatttttaaggaaaaaaattatcatggttctaatcttacatgttaacatttccttgttatgtagggatcagacttgttataacataattccactttataattcaatgaagaagaaagttttgtctgattctgaggatgaagagaaagatgctgatgtgccaggaacttctactcgaaaaaggaaggaccatcagcctagaagaagattacgtaatagagcccagtcttacgatattcaagcatggaagaaacagtgtgaagaattgttaaatctcatatttcaatgtgaagattcagagcctttccgtcagccggtagatctccttgaatatccagactacagagacatcattgacactccaatggattttgctaccgttagagaaactttagaggctgggaattatgagtcaccaatggagttatgtaaagatgtcagacttattttcagtaattccaaagcatatacaccaagcaaaagatcaaggatttacagcatgagtttgcgcctgtctgctttctttgaagaacacattagttcagttttatcagattataaatctgctcttcgttttcataaaagaaataccataaccaaaaggaggaagaaaagaaacagaagcagctctgtttccagtagtgctgcatcaagccctgaaaggaaaaaaaggatcttaaaaccccagctaaaatcagaaagctctacctctgcattctctacacctacacgatcaataccgccaagacacaatgctgctcagataaacggtaaaacagaatctagttctgtggttcgaaccagaagcaaccgagtggttgtagatccagttgtcactgagcaaccatctacttcttcagctgcaaagacttttattacaaaagctaatgcatctgcaataccagggaaaacaatactagagaattctgtgaaacattccaaagctttgaatactctttccagtcctggtcaatccagttttagtcatggcactaggaataattctgcaaaagaaaacatggaaaaggaaaagccagtcaaacgtaaaatgaagtcatctgtactcccaaaggcgtccactctttcaaagtcatcagctgtcattgagcaaggagattgtaagaacaacgctcttgtaccaggaaccattcaagtaaatggccatggaggacagccatcaaaacttgtgaagaggggacctggaaggaaacctaaagtagaagttaataccaatagtggtgaaattatacacaagaaaaggggtagaaagcccaaaaagctacagtatgcaaagccagaagatttagagcaaaataatgtgcatcccatcagagatgaagtacttccttcttcaacatgcaattttctttctgaaactaataatgtaaaggaagatttgttacagaaaaagaatcgtggaggtaggaagcccaaaaggaagatgaagacacaaaaattagatgcagatctcctagtccctgcaagtgtcaaagtgttaaggagaagtaaccgaaaaaagatagatgatcctatagatgaggaagaagagtttgaagaactcaaaggctctgaaccccacatgagaactagaaatcaaggtcgaaggacagctttctataatgaggatgactctgaagaggagcaaaggcagctgatgggagcaacaaacagaaagaggagaagcaaatgtaattaatactgtgtggttgattctacgcagatttcttctcagtgcttatgctagatgaatatgatatagaagttgcgtcggctgttccctcaggtagaccgtattcctctagtgtgagtctcttgatgtactgagcctgaatctagattttataatctaccatataatttttatactacatgatgtgtaaatgaagctattcttatctagggctccagcacgcacaaagtgcttagttctcactgactgatggtccgcaagattc

SEQ ID NO: 381027 - DNA, 3423 bp, Homo sapiens
ggttgttagctaccttaagaggacatgctgctgaaatatcagacatggctgtaaactatgagaataccatgatagcagctggaagttgtgataaaatgatccgagtctggtgtcttcgaacctgtgcacctttggctgttcttcagggccatagtgcatctattacatcactacagttctcaccattgtgcagtggctcaaagagatatctatcttctactggggcagatggcactatttgtttttggctctgggatgctggaacccttaaaataaacccaagacctgcaaaatttacagagcgccctcggcctggagttcaaatgatctgttcttcttttagtgctggtggaatgtttctggcgacgggaagcacagatcatattattcgggtttatttttttggatcaggtcagccagagaaaatatcagaattggagtttcatactgacaaagttgacagtatccagttttccaacactagtaacaggtttgtaagtggcagtcgtgatgggacagcacgtatttggcaatttaaacgaagagagtggaagagcattttgttggatatggctactcgtccagcaggccaaaaccttcaaggaatagaagataaaatcacaaaaatgaaggttactatggtagcttgggatcgacatgacaatacagttataactgcagttaataacatgactctgaaagtttggaattcttacactggtcaactaattcatgtcctgatgggtcatgaagatgaggtatttgttcttgaaccacacccgttcgatcctagagttctcttttctgctggtcatgatggaaacgtgatagtgtgggatctggcaagaggagtcaaaatacgatcttatttcaatatgattgaaggccaaggacatggcgcagtatttgactgcaaatgctctcctgatggtcagcattttgcatgcacagactctcatggacatcttttaatttttggctttgggtccagtagcaaatatgacaagatagcagatcagatgttctttcatagtgattatcggccacttattcgtgatgccaacaatttgtattagatgaacagactcagcaagcacctcatcttatgcctccccctttttggttgatgttgatggtaaccctcatccatcaagatatcaaagattagttcctggccgtgaaaattgcagggaggagcaactcatccctcagatgggagtaacttcctcaggactgaatcaagttttaagtcagcaagcaaaccaggagatcagcccactggacagcatgattcaaagactacaacaggagcaagacctgagacgttctggtgaagcaggtatcagtaataccagccgtttaagtagaggctccataagttctacctcagaggttcattcaccaccaaacgtaggactaagacgtagtggacaaattgaaggtgtacggcaaatgcacagcaacgcaccaagaagtgaaatagccacagagcgggatctggtagcttggagtcgaagggtggtagtacccgagctatcagctggtgtagccagtaggcaagaagaatggagaactgcaaagggagaagaagaaataaagacttacaggtcagaagagaaaagaaaacacttaactgttccaaaagagaataaaatacccactgtctcaaagaatcatgctcatgagcatttcctggatcttggagaatccaaaaagcaacagacaaatcaacacaattatcgtacaagatctgcattggaagagactcctagaccctcagaagagatagaaaatggcagtagttcttcagatgaaggcgaagtagttgctgtcagtggtggaacatccgaagaagaagagagagcatggcacagtgatggcagttctagtgactactccagtgattactctgactggacagcagatgcaggaattaatctgcagccaccaaagaaagttcctaagaataaaaccaagaaagcagaaagcagttcagatgaagaagaagaatctgaaaaacagaagcaaaaacagattaaaaaggaaaagaaaaaagtaaatgaagaaaaagatggaccaatatcaccaaagaaaaagaagcccaaagaaagaaaacaaaagagattggctgtgggagaactaactgaaaatggtttgacattagaagaatggttgccatcaacatggattacagataccattccccgaagatgtccatttgtgccacagatgggtgatgaggtttattatttccgacaaggacatgaagcctatgtcgaaatggcccggaaaaataaaatatatagtatcaatcccaaaaaacaaccatggcataaaatggagctacgggaacaagaacttatgaaaatagttggcataaagtatgaagtgggattacctaccctttgctgccttaaacttgcttttctagatcctgatactggtaaactgactggcggatcatttaccatgaaataccatgatatgcctgacgttatagatttcctagtcttgagacaacaatttgatgatgcaaaatacaggcgatggaatataggtgaccgcttcaggtctgtcatagatgatgcctggtggtttggaacaatcgaaagccaggaacctcttcaacctgagtaccctgatagtctgtttcaatgctacaatgtttgctgggacaatggagatacagaaaagatgagtccttgggatatggagcttatacctaataatgctgtatttcctgaagaactaggtaccagtgttcctttaactgatggtgagtgcagatcactaatctataaacctcttgatggagaatggggtaccaatcccagggatgaagaatgtgaaagaattgtggcaggaataaaccagttgatgacactagatattgcctcagcatttgtggcccccgtggatctgcaagcctatcccatgtattgcacagtagtggcatatccaacggatctaagtacaattaaacaaagactggaaaacaggttttacagcaggttagaaccatttgatgtagctactatcaaaggaaagctggtgatctttccacccatttactgatctttagcagtgtttctcaactttttgtatataggaatgcacataagattatggggattatgttaaaatgtagaatcttattcagtagatttggagtgggacctgagattctgcatttctaacaagtcccagtaatgtcgatgctgctggtctttagacacttaaaatacaattcctagatcctagatacagtttttcctagaggctgacatgatttgatattcactgtctttatattgtattttataaagcaaggcaaggtatttcattttctcctagataacattaaaatatttgttcattgatttttaatataatatataataaaaattttgtattcgtattatg

SEQ ID NO: 381028 - DNA, 2248 bp, Homo sapiens
  misc_feature (2037)..(2037): n is a, c, g, or t
  misc_feature (2043)..(2043): n is a, c, g, or t
  misc_feature (2049)..(2049): n is a, c, g, or t
atatcacataatgatatgtttaatttaacctcagttttttaaaccagaatgcttctaccataaaagaattgtgatttcagttatacttccatcaaggaatatgtgggaagatatacatattgtcaaaatggttgggatgggatagttacaaaggacacttttgtatgttgtatgggatcacttgcctgatagtataaggaacattgtatgaaaagatgaaaagatacttcatttttagaaactgatcagagatgtcactggtctttaagtgatgtcttgaaaatccagtatgtatttgcccaaaagttttagcctacatctagctagcttacacttagcagccaaaccatcattgtgtaggttctgttttggaggaagctcatgggggatctgtgtatttcttaggtttctccctgttctccaatgttttatccatttcgtagcttttttactgtctccagaaagtagtgtgggacctgcacttaggggaataccagaatcatagcgtggttctgccttcttgatgagtgattgtgaaaaacacctgcataagggtgctaattggttgtgtattttttcatttatttgaaatcaaactgagaacacctcttttcggtttacagcataacatggcttgaagtaaaaggcagtatccaagtccttcacctggtcttgccctgtctactttctgatcattctgatggtctgatgtggctgttgatgtggaactgcagaagagttcagagaagagtatgcaacaaagccataggaaaacacacaggagcttttccctccccttcaggtccccgccctctttccaagctggacaattttttattaagttgtttattccctgccttaaaactgaaacaggaaattttctggtagaaggagggtcatttagtcacgaacactgaagtgggtcaaaattctattctgggtcaaatccttgaattcaaacagatgtccataatcagtactgatggaatagagcaagtttttctatgtaagacaaataaatcaaacatcatgtgcatctcctcataagggtctgcaagggtctgatggtttaaagttcctaacagatctggttgcagcatctgccggagcttgcaccccatcatcggacggtcatcttcctgctgcagaagttaggtaacataagacttagatttcttcctgttctagcaatctgcaagaccaccaggcttaactttttagctgccagaagacaaacccccttttctgtttcggcaatttgtcctggcacgtgttttggacttcctccgatttacacgaaaagctctgatattcattggagtactttattttttttcctcagttttgtttcttttctcatgtaaaaacaaacaaaaaggtcaacaaaaaaaaattgaggtttttcttgtttctatctagttcatgctttctttgcggtgtttgaacagtagtctgttaacttagtaggtggtacctggaaaggtattttaagtatagtgactgtttaataaatacttaattggatgatggaggaggagaaattgttttcttcccaggattctctttgggggtcattttgtgtgacagatatattttagacatttggagaaacagtttcagatcctgccaggatatttttgtaaaaaaggaaaatggaagattccaataaactagaaacagtacgtatctaagatgctgacacagaagctaatgtgacttttcagcttatcaagaggatggccaataaaacttaaaggtgtggttagatgttttctcacttttgtgacattaatttatcactgagtctcattcaaccaagtaatctaaaatactgtgcaaattctagcagtatgtcttcgataacttggatgttaggatagccaatatgtacaaaaaattaaatcaagtattttgtcctatgtataacacaaattaattttacacagagaaagatgtttctaggcaagtgaaattctggtaattcatactatttctttgtatgaacaaataaaatatattttgccaaaaaaaaaacancaaganaaaacnaacaaaccgctgtttgggccacgccctcggcgccccgtgaaaaaagcatgtgtgtaagagaacactttacgatagggtgccgccgggtgccccatgacggtatagtgaggacaaaaggggcacaacacgcggttccccagagacaaaaccgaggactaggaacgtggtggcgtggtagtttcacacaattaaagaagcg

SEQ ID NO: 381029 - DNA, 759 bp, Homo sapiens
ctcacttttgtgacattaatttatcactgagtctcattcaaccaagtaatctaaaatactgtgcaaattctagcagtatgtcttcgataacttggatgttaggatagccaatatgtacaaaaaattaaatcaagtattttgtcctatgtataacacaaattaattttacacagagaaagatgtttctaggcaagtgaaattctggtaattcatactatttctttgtatgaacaaataaaatatattttgccaacatgtgggtacctttatgttttcttaagtattacagaaggacaaggtagcaatattttgtttaataatcccatgtgcgtgcatgcgcacacacacacacacacacacacacacacacacacacacagagtcattctgagggcaagctgatctttcagattttaaagggtccaatccaatatacaactaatccacaagcatttagggtggattttttttttataaatgactctgaagacaagatcggcgagaggggctcgtgtgtcttggtggagcttccccgcagcccccaggaagtgctgtctattacacaggattccaagaatactgaagccgctgcctgccccggtctttcagtgccacaggttcgtgtgcatgggcagccacatgtcacacgacaggtgcaatgtgagcacagcacctatggctggatggattttgataataggtgccttctcttctcacttttgcagagtgttctcctattaggtggagatccttatctgt

SEQ ID NO: 381030 - DNA, 1197 bp, Homo sapiens
gtgaaactttaggaaggtctgagaagccctcttccctttaaaaaaaaaaaaaaaaaggctgcttctcgcagagtggaaagccccggtccccatcccaccaaaaccatttgacaagcaggacaacgaagaggcagaaggatctgggcctgtgcgcgacgccccgggggacgaggctcatggagaagtttcgggcggtgctggacctgcacgtcaagcaccacagcgccttgggctacggcctggtgaccctgctgacggcgggcggggagcgcatcttctccgccgtggcattccagtgcccgtgcagcgccgcctggaacctgccctacggcctggtcttcttgctggtgccggcgctcgcgctcttcctcctgggctacgtgctgagcgcacgcacgtggcgcctgctcaccggatgctgctccagcgcccgcgcgagttgcggatcggcgctgcgcggctccctggtgtgcgcgcaaatcagcgcggccgccgcgctcgcgcccctcacctgggtggccgtggcgctgctcgggggcgccttttacgagtgcgcggccaccgggagcgcggccttcgcgcagcgcctgtgcctcggccgcaaccgcagctgcgccgcggagctgccgctggtgccgtgcaaccaggccaaggcgtcggacgtgcaggacctcctgaaggatctgaaggctcagtcgcaggtgttgggctggatcttgatagcagttgttatcatcattcttctgatttttacatctgtcacccgatgcctatctccagttagttttctgcagctgaaattctggaaaatctatttggaacaggagcagcagatccttaaaagtaaagccacagagcatgcaactgaattggcaaaagagaatattaaatgtttctttgagggctcgcatccaaaagaatataacactccaagcatgaaagagtggcagcaaatttcatcactgtatactttcaatccgaagggccagtactacagcatgttgcacaaatatgtcaacagaaaagagaagactcacagtatcaggtctactgaaggagatacggtgattcctgttcttggctttgtagattcatctggtataaacagcactcctgagttatgaccttttgaatgagtagaaaaaaaaattgttttgaattattgctttattaaaaaataaacattggtattttttg

SEQ ID NO: 381031 - DNA, 1382 bp, Homo sapiens
gtgaaactttaggaaggtctgagaagccctcttccctttaaaaaaaaaaaaaaaaaggctgcttctcgcagagtggaaagccccggtccccatcccaccaaaaccatttgacaagcaggacaacgaagaggcagaaggatctgggcctgtgcgcgacgccccgggggacgaggctcatggagaagtttcgggcggtgctggacctgcacgtcaagcaccacagcgccttgggctacggcctggtgaccctgctgacggcgggcggggagcgcatcttctccgccgtggcattccagtgcccgtgcagcgccgcctggaacctgccctacggcctggtcttcttgctggtgccggcgctcgcgctcttcctcctgggctacgtgctgagcgcacgcacgtggcgcctgctcaccggatgctgctccagcgcccgcgcgagttgcggatcggcgctgcgcggctccctggtgtgcgcgcaaatcagcgcggccgccgcgctcgcgcccctcacctgggtggccgtggcgctgctcgggggcgccttttacgagtgcgcggccaccgggagcgcggccttcgcgcagcgcctgtgcctcggccgcaaccgcagctgcgccgcggagctgccgctggtgccgtgcaaccaggccaaggcgtcggacgtgcaggacctcctgaaggatctgaaggctcagtcgcaggtgttgggctggatcttgatagcagttgttatcatcattcttctgatttttacatctgtcacccgatgcctatctccagttagttttctgcagctgaaattctggaaaatctatttggaacaggagcagcagatccttaaaagtaaagccacagagcatgcaactgaattggcaaaagagaatattaaatgtttctttgagggctcgcatccaaaagaatataacactccaagcatgaaagagtggcagcaaatttcatcactgtatactttcaatccgaagggccagtactacagcatgttgcacaaatatgtcaacagaaaagagaagactcacagtatcaggtctactgaaggagatacggtgattcctgttcttggctttgtagattcatctggtataaacagcactcctgagttatgaccttttgaatgagtagaaaaaaaaattgttttgaattattgctttattaaaaaataaacattggtattttttgagtgctttttttcttccaaattgtggaattttatatctgaaattaaaatatagagcttaacctctttataatattatttaaaacaaacaaaaaaagaaagtgattcatccaaagtaaaagctagaactaaaagaagtcttatatccttgttctagagtccttttcaaataaaagacttttggagc

SEQ ID NO: 381032 - DNA, 477 bp, Homo sapiens
tctcccctatatagtgacttcactgagtctaagtaaagttgtttgcccagccaatagaaagcagaattgttagaattaaaggggtctatagaataaaatgggtttgtctggctctaaagccaccactggacttagaaagctcagaggttctttaaaatgaacacttctttcccaggatttgcagaaattccacattttgagttctaagggaatggtatgggctcctccctgggcagaatcatagtgcataacttggactacagttgactttccaaacgagaagttgtactggggggctagggaggttactgcgacaccttactcttaaggaattaagacctaaaactgttgcttgttcatcatcataactggcgagtagttgaaactttatctgaggatttttaaatttcttgtaaaaaaccaagtaactaaattactattttgttgtgttttcttaaggtgttgggctggatcttg

SEQ ID NO: 381033 - DNA, 556 bp, Homo sapiens
actttgctgatttagcttatggaagaggaaccagaaatttgtccttgaataatgtttcccgtgttgggctggatcttgatagcagttgttatcatcattcttctgatttttacatctgtcacccgatgcctatctccagttagttttctgcagctgaaattctggaaaatctatttggaacaggagcagcagatccttaaaagtaaagccacagagcatgcaactgaattggcaaaagagaatattaaatgtttctttgagggctcgcatccaaaagaatataacactccaagcatgaaagagtggcagcaaatttcatcactgtatactttcaatccgaagggccagtactacagcatgttgcacaaatatgtcaacagaaaagagaagactcacagtatcaggtctactgaaggagatacggtgattcctgttcttggctttgtagattcatctggtataaacagcactcctgagttatgaccttttgaatgagtagaaaaaaaaattgttttgaattattgctttattaaaaaataaacattggtattttttg

SEQ ID NO: 381034 - DNA, 430 bp, Homo sapiens
aaattatatattgataagtaaatggcttgttgcatataccaactttagaatttattaactctaaagtttttattggttaaagccaaataaaataatataagctcatatttttttagatttttcatgtcctaaaatgaacatagttgtatactttatctcactaggataatttttatctttgcctatatgtgctgctggaccttgtaaaaatatgtatactttctagatttgtggtagaaatttagctatagaatcatttaatttgcaaactgggaatggggcattagagaatcatacagtttttctttctcattttaccggtaaaatcactgatgtctcaatttgtgactaatttcctaaaggttgcaaagctgagtagatagagctagaactaaatctagatcttttgtcttcttggtaactgataatg

SEQ ID NO: 381035 - DNA, 457 bp, Homo sapiens
cactgccccaccctcattcccagctccaaccttcaggcaggagttagaaagatcctagtatgttgaaactgaatggcacaacaataaagtagttcactacctgaccacccagcaatgatattcactagtcaacaagttctatccatgggacacagagctttgaaatgctttctagggttcaggggtataccaggtattagaggaaagcctccaacaacaacaaatcagacactaaaacaaataggagaggaaaatcctatcgagagatagaaacagccaggcacagtggctcacacctgtaatctcacacctgtaatcccaaggttcaaatgccattttgggaagctgaggcaggtggatcacttgatcctagaagttcgagaccagcctgggtaatatggcaatacctagtctctacaaataataataataaaaaaagccaaaaaaaaaacccaaa

SEQ ID NO: 381036 - DNA, 578 bp, Homo sapiens
atacaagctagaccctgttccctcaccctgtatcctgtctcccctaattgacattctatcagcccaaccctcattctgcagggccacctggtgtgtggaggtggcgggaggggtcagtgactctgggggtctcctcagtgacccccatacctcatcatgaacccttgggtagcttgattctgcctaccatccagatacaagctagaccctgttccctcaccctgtatcctgtctcccctaattgacattctatcagcccaaccctcattctgcagggccacctggtgtgtggaggtggcgggaggggtcagtgactctgggggtctcctcagtgacccccatacctcatcatgaacccttgggtagcttgattctgcctaccatccaggaaaacttgtgctggaattgctgatggaaacaattaaatattttactataaaaaaaaacacaacaaaaaaaaaaacccgagcaaaaaaacaagacacaacaaggcaaaacacaaaaagaaacaacacaaaagcaaacaacgacaacacacaaaacaacgaacaacacaaaggggggcgggcccaaagaac

SEQ ID NO: 381037 - DNA, 1040 bp, Homo sapiens
tctttgtcctggttgggaccgggctgtgatggggacctgatgaaagatggtgagaagggcaggtactgggccctggagagtgggagagggcagaagacaggaggagtggcccattcccaggcgtagcttgtgatttaacacccactgggggcttctggtagtcagctcctccgtcgggaagttctgtgggaaagagatgatggcaggggagcagtgggggatccccaggggccatggctgcacagaccctttgttcctccacctcgaactgtacaggtggggaaacggacctgagagggaatgggagttgtccaaggtcaccctccctgctgtgccgtggcagcaccaggtctgggacccaggcctgccaatgcgccatgcactttgcacccaactggtggcctcctgggagtgggagtctggctgggccatgtgctctcagcctgggcttttgtttgggccctgctctgggctgagctagggcttggcctccctgactggccctgggcagcccctcactccttggtccccacagccctgtacttcccccatctctgcatatatgaccctgcacagttatgacttggtgcttgtctgtctctctcactagaccatgatctcatttttctctgtttccccagcctcccaccctcagagggctcaggactgtgtatggtcaaggaatatttaccaaagaagtgaggccacctgttccccctcccccaacctgtgaaaaggaagcaaccatccctcctgccctgcagcccaggaatgaagctgcaaagttctgatagtgcctgccatgagatgttacagcacagagcagtggggcttttggacagctgggaaagaggagtggcataagcgccccacctagactgcccaataattagggataaagctgacaccgtgggaaaagcctagagtttgcctggcactaacagatctaactcagactttgtaggtggggtgacctcaggactctttaagcctcgggttcctcatctgtaaaatgggagtaatcaggatgtatctcatag

SEQ ID NO: 381038 - DNA, 2374 bp, Homo sapiens
tcccacgctcccattttaccgaggtggatcctgaggcccagagtgggcaaagggcttgccaaggtcgcagagcgcgcagaggattagaaccctgacttccgtccagcacctgcggagttggagacgcccacaggaaacgcccacctgaccgggtgagtgagggggcgggcgagccggaggggtggagtttattcgcgccccgctccgccaccagggcttgggggcggggccttcctgcaacctttgcggctccaacatggctccgcggctgtgcagcatctctgtgacggcgcggcggctgctggggggcccggggcctcgcgctggggacgttgcgtctgcagctgcggcgcgtttctattccaaggacaatgaaggcagctggttccgctccctctttgttcacaaagtggatccccggaaggatgcccactccaccctgctgtccaagaaggaaaccagcaacctctataagatccagtttcacaatgtaaagcctgaatacctggatgcctacaacagcctcacggaggctgtgctgcccaagcttcacctggatgaggactacccatgctcactcgtgggcaactggaacacgtggtatggggagcaggaccaggcagtgcacctgtggcgattctcaggtggctacccagccctcatggactgcatgaacaagctcaaaaacaataaggagtacctggagttccgaagggagcggagccagatgctgctgtccaggagaaaccagctgctcctcgagttcagcttctggaatgagccacagcccagaatgggtcccaacatctatgagctgaggacatacaagctcaagccaggaaccatgatcgagtgggggaacaactgggctcgggccatcaagtaccggcaggagaaccaggaggcagtgggcggcttcttctcacagataggagagctctacgtggtgcaccatctctgggcctataaagacctgcagtctcgggaggagactcgaaacgctgcctggaggaagagaggctgggatgaaaatgtctactatacagtccccctggtgcgacacatggagtctaggatcatgatccccttgaagatctcgcctctgcagtgatgctgcctacacctccacctccttccccttctccctcaggcaaccccgacagacagtggcactcctggtcctgctgtcttggttttgtcttggctctgggaggactctgaggggcagtgctcagttcagacaagggggaactgaaggctgacaagttctgaggattacagctctgcccaggccctttctactttccctgcctgcctccctccccctgctagaagtagtttctgatttccctgaatgaaagatagtgatcttttaggccttcatatatcttctaaaattcctcatctcaaggccaccagtccccagttatcacccttggaaatcctctgtttagcttagttgcacaaaaggtagtatgtccagtggctagaggtggggtgggaagagaggaggccaggccaggccctcaggaattccctggtttccactgggccacccacttgctggacagtctgagccaagtccctcctgctggagaaaagcctggaactgccaaaacaaaaaaacaaatacaaacaaacctcgtcaccacggtcaggaggaggttcagacattctgcccagaggggctggggaaagggatgggagccaggaaagatttaggggcaggagacagacacgtaacaggaactcggaaggtagaacttagaattcagaacttgggtttcaattgtagaatttggaatctggaatacagaattgggaagaagaacagagatgacaaaagaccacttgaagagaggttcctaatactagacagatggagagtggcttggctgtttccccctgcatattggggttgaaaacttaaatgtgtagttccagtccttctatgcagagtctctcctgccctccctccttcctgcaggcaaatatacaagctagaccctgttccctcaccctgtatcctgtctcccctaattgacattctatcagcccaaccctcattctgcagggccacctggtgtgtggaggtggcgggaggggtcagtgactctgggggtctcctcagtgacccccatacctcatcatgaacccttgggtagcttgattctgcctaccatccaggaaaacttgtgctggaattgctgatggaaacaattaaatattttactataaaaaaaaaaaaggggggcgccaaaatttccctcagggcgccatttgcgtacccgttctgacaaggggccatatggagcgttaaaaaagaggccggtaaaggcgggaaactctggtcttgaagacctctggggacaag

SEQ ID NO: 381039 - DNA, 2326 bp, Homo sapiens
tcccacgctcccattttaccgaggtggatcctgaggcccagagtgggcaaagggcttgccaaggtcgcagagcgcgcagaggattagaaccctgacttccgtccagcacctgcggagttggagacgcccacaggaaacgcccacctgaccgggtgagtgagggggcgggcgagccggaggggtggagtttattcgcgccccgctccgccaccagggcttgggggcggggccttcctgcaacctttgcggctccaacatggctccgcggctgtgcagcatctctgtgacggcgcggcggctgctggggggcccggggcctcgcgctggggacgttgcgtctgcagctgcggcgcgtttctattccaaggacaatgaaggcagctggttccgctccctctttgttcacaaagtggatccccggaaggatgcccactccaccctgctgtccaagaaggaaaccagcaacctctataagatccagtttcacaatgtaaagcctgaatacctggatgcctacaacagcctcacggaggctgtgctgcccaagcttcacctggatgaggactacccatgctcactcgtgggcaactggaacacgtggtatggggagcaggaccaggcagtgcacctgtggcgattctcaggtggctacccagccctcatggactgcatgaacaagctcaaaaacaataaggagtacctggagttccgaagggagcggagccagatgctgctgtccaggagaaaccagctgctcctcgagttcagcttctggaatgagccacagcccagaatgggtcccaacatctatgagctgaggacatacaagctcaagccaggaaccatgatcgagtgggggaacaactgggctcgggccatcaagtaccggcaggagaaccaggaggcagtgggcggcttcttctcacagataggagagctctacgtggtgcaccatctctgggcctataaagacctgcagtctcgggaggagactcgaaacgctgcctggaggaagagaggctgggatgaaaatgtctactatacagtccccctggtgcgacacatggagtctaggatcatgatccccttgaagatctcgcctctgcagtgatgctgcctacacctccacctccttccccttctccctcaggcaaccccgacagacagtggcactcctggtcctgctgtcttggttttgtcttggctctgggaggactctgaggggcagtgctcagttcagacaagggggaactgaaggctgacaagttctgaggattacagctctgcccaggccctttctactttccctgcctgcctccctccccctgctagaagtagtttctgatttccctgaatgaaagatagtgatcttttaggccttcatatatcttctaaaattcctcatctcaaggccaccagtccccagttatcacccttggaaatcctctgtttagcttagttgcacaaaaggtagtatgtccagtggctagaggtggggtgggaagagaggaggccaggccaggccctcaggaattccctggtttccactgggccacccacttgctggacagtctgagccaagtccctcctgctggagaaaagcctggaactgccaaaacaaaaaaacatgcccagaggggctggggaaagggatgggagccaggaaagatttaggggcaggagacagacacgtaacaggaactcggaaggtagaacttagaattcagaacttgggtttcaattgtagaatttggaatctggaatacagaattgggaagaagaacagagatgacaaaagaccacttgaagagaggttcctaatactagacagatggagagtggcttggctgtttccccctgcatattggggttgaaaacttaaatgtgtagttccagtccttctatgcagagtctctcctgccctccctccttcctgcaggcaaatatacaagctagaccctgttccctcaccctgtatcctgtctcccctaattgacattctatcagcccaaccctcattctgcagggccacctggtgtgtggaggtggcgggaggggtcagtgactctgggggtctcctcagtgacccccatacctcatcatgaacccttgggtagcttgattctgcctaccatccaggaaaacttgtgctggaattgctgatggaaacaattaaatattttactataaaaaaaaaaaaggggggcgccaaaatttccctcagggcgccatttgcgtacccgttctgacaaggggccatatggagcgttaaaaaagaggccggtaaaggcgggaaactctggtcttgaagacctctggggacaag

SEQ ID NO: 381040 - DNA, 2172 bp, Homo sapiens
tcccacgctcccattttaccgaggtggatcctgaggcccagagtgggcaaagggcttgccaaggtcgcagagcgcgcagaggattagaaccctgacttccgtccagcacctgcggagttggagacgcccacaggaaacgcccacctgaccggtttctattccaaggacaatgaaggcagctggttccgctccctctttgttcacaaagtggatccccggaaggatgcccactccaccctgctgtccaagaaggaaaccagcaacctctataagatccagtttcacaatgtaaagcctgaatacctggatgcctacaacagcctcacggaggctgtgctgcccaagcttcacctggatgaggactacccatgctcactcgtgggcaactggaacacgtggtatggggagcaggaccaggcagtgcacctgtggcgattctcaggtggctacccagccctcatggactgcatgaacaagctcaaaaacaataaggagtacctggagttccgaagggagcggagccagatgctgctgtccaggagaaaccagctgctcctcgagttcagcttctggaatgagccacagcccagaatgggtcccaacatctatgagctgaggacatacaagctcaagccaggaaccatgatcgagtgggggaacaactgggctcgggccatcaagtaccggcaggagaaccaggaggcagtgggcggcttcttctcacagataggagagctctacgtggtgcaccatctctgggcctataaagacctgcagtctcgggaggagactcgaaacgctgcctggaggaagagaggctgggatgaaaatgtctactatacagtccccctggtgcgacacatggagtctaggatcatgatccccttgaagatctcgcctctgcagtgatgctgcctacacctccacctccttccccttctccctcaggcaaccccgacagacagtggcactcctggtcctgctgtcttggttttgtcttggctctgggaggactctgaggggcagtgctcagttcagacaagggggaactgaaggctgacaagttctgaggattacagctctgcccaggccctttctactttccctgcctgcctccctccccctgctagaagtagtttctgatttccctgaatgaaagatagtgatcttttaggccttcatatatcttctaaaattcctcatctcaaggccaccagtccccagttatcacccttggaaatcctctgtttagcttagttgcacaaaaggtagtatgtccagtggctagaggtggggtgggaagagaggaggccaggccaggccctcaggaattccctggtttccactgggccacccacttgctggacagtctgagccaagtccctcctgctggagaaaagcctggaactgccaaaacaaaaaaacaaatacaaacaaacctcgtcaccacggtcaggaggaggttcagacattctgcccagaggggctggggaaagggatgggagccaggaaagatttaggggcaggagacagacacgtaacaggaactcggaaggtagaacttagaattcagaacttgggtttcaattgtagaatttggaatctggaatacagaattgggaagaagaacagagatgacaaaagaccacttgaagagaggttcctaatactagacagatggagagtggcttggctgtttccccctgcatattggggttgaaaacttaaatgtgtagttccagtccttctatgcagagtctctcctgccctccctccttcctgcaggcaaatatacaagctagaccctgttccctcaccctgtatcctgtctcccctaattgacattctatcagcccaaccctcattctgcagggccacctggtgtgtggaggtggcgggaggggtcagtgactctgggggtctcctcagtgacccccatacctcatcatgaacccttgggtagcttgattctgcctaccatccaggaaaacttgtgctggaattgctgatggaaacaattaaatattttactataaaaaaaaaaaaggggggcgccaaaatttccctcagggcgccatttgcgtacccgttctgacaaggggccatatggagcgttaaaaaagaggccggtaaaggcgggaaactctggtcttgaagacctctggggacaag

SEQ ID NO: 381041 - DNA, 2270 bp, Homo sapiens
tcccacgctcccattttaccgaggtggatcctgaggcccagagtgggcaaagggcttgccaaggtcgcagagcgcgcagaggattagaaccctgacttccgtccagcacctgcggagttggagacgcccacaggaaacgcccacctgaccgggtgagtgagggggcgggcgagccggaggggtggagtttattcgcgccccgctccgccaccagggcttgggggcggggccttcctgcaacctttgcggctccaacatggctccgcggctgtgcagcatctctgtgacggcgcggcggctgctggggggcccggggcctcgcgctggggacgttgcgtctgcagctgcggcgcgtttctattccaaggacaatgaaggcagctggttccgctccctctttgttcacaaagtggatccccggaaggatgcccactccaccctgctgtccaagaaggaaaccagcaacctctataagatccagtttcacaatgtaaagcctgaatacctggatgcctacaacagcctcacggaggctgtgctgcccaagcttcacctggatgaggactacccatgctcactcgtgggcaactggaacacgtggtatggggagcaggaccaggcagtgcacctgtggcgattctcaggtggctacccagccctcatggactgcatgaacaagctcaaaaacaataaggagtacctggagttccgaagggagcggagccagatgctgctgtccaggagaaaccagctgctcctcgagttcagcttctggaatgagccacagcccagaatgggtcccaacatctatgagctgaggacatacaagctcaagccaggaaccatgatcgagtgggggaacaactgggctcgggccatcaagtaccggcaggagaaccaggaggcagtgggcggcttcttctcacagataggagagctctacgtggtgcaccatctctgggcctataaagacctgcagtctcgggaggagactcgaaacgctgcctggaggaagagaggctgggatgaaaatgtctactatacagtccccctggtgcgacacatggagtctaggatcatgatccccttgaagatctcgcctctgcagtgatgctgcctacacctccacctccttccccttctccctcaggcaaccccgacagacagtggcactcctggtcctgctgtcttggttttgtcttggctctgggaggactctgaggggcagtgctcagttcagacaagggggaactgaaggctgacaagttctgaggattacagctctgcccaggccctttctactttccctgcctgcctccctccccctgctagaagtagtttctgatttccctgaatgaaagatagtgatcttttaggccttcatatatcttctaaaattcctcatctcaaggccaccagtccccagttatcacccttggaaatcctctgtttagcttagttgcacaaaaggtagtatgtccagtggctagaggtggggtgggaagagaggaggccaggccaggccctcaggaattccctggtttccactgggccacccacttgctggacagtctgagccaagtccctcctgctggagaaaagcctggaactgccaaaacaaaaaaacaaatacaaacaaacctcgtcaccacggtcaggaggaggttcagacattctgcccagaggggctggggaaagggatgggagccaggaaagatttaggggcaggagacagacacgtaacaggaactcggaaggtagaacttagaattcagaacttgggtttcaattgtagaatttggaatctggaatacagaattgggaagaagaacagagatgatccttctatgcagagtctctcctgccctccctccttcctgcaggcaaatatacaagctagaccctgttccctcaccctgtatcctgtctcccctaattgacattctatcagcccaaccctcattctgcagggccacctggtgtgtggaggtggcgggaggggtcagtgactctgggggtctcctcagtgacccccatacctcatcatgaacccttgggtagcttgattctgcctaccatccaggaaaacttgtgctggaattgctgatggaaacaattaaatattttactataaaaaaaaaaaaggggggcgccaaaatttccctcagggcgccatttgcgtacccgttctgacaaggggccatatggagcgttaaaaaagaggccggtaaaggcgggaaactctggtcttgaagacctctggggacaag

SEQ ID NO: 381042 - DNA, 2252 bp, Homo sapiens
tcccacgctcccattttaccgaggtggatcctgaggcccagagtgggcaaagggcttgccaaggtcgcagagcgcgcagaggattagaaccctgacttccgtccagcacctgcggagttggagacgcccacaggaaacgcccacctgaccgggtgagtgagggggcgggcgagccggaggggtggagtttattcgcgccccgctccgccaccagggcttgggggcggggccttcctgcaacctttgcggctccaacatggctccgcggctgtgcagcatctctgtgacggcgcggcggctgctggggggcccggggcctcgcgctggggacgttgcgtctgcagctgcggcgcgtttctattccaaggacaatgaaggcagctggttccgctccctctttgttcacaaagtggatccccggaaggatgcccactccaccctgctgtccaagaaggaaaccagcaacctctataagatccagtttcacaatgtaaagcctgaatacctggatgcctacaacagcctcacggaggctgtgctgcccaagcttcacctggatgaggactacccatgctcactcgtgggcaactggaacacgtggtatggggagcaggaccaggcagtgcacctgtggcgattctcaggtggctacccagccctcatggactgcatgaacaagctcaaaaacaataaggagtacctggagttccgaagggagcggagccagatgctgctgtccaggagaaaccagctgctcctcgagttcagcttctggaatgagccacagcccagaatgggtcccaacatctatgagctgaggacatacaagctcaagccaggaaccatgatcgagtgggggaacaactgggctcgggccatcaagtaccggcaggagaaccaggaggcagtgggcggcttcttctcacagataggagagctctacgtggtgcaccatctctgggcctataaagacctgcagtctcgggaggagactcgaaacgctgcctggaggaagagaggctgggatgaaaatgtctactatacagtccccctggtgcgacacatggagtctaggatcatgatccccttgaagatctcgcctctgcagtgatgctgcctacacctccacctccttccccttctccctcaggcaaccccgacagacagtggcactcctggtcctgctgtcttggttttgtcttggctctgggaggactctgaggggcagtgctcagttcagacaagggggaactgaaggctgacaagttctgaggattacagctctgcccaggccctttctactttccctgcctgcctccctccccctgctagaagtagtttctgatttccctgaatgaaagatagtgatcttttaggccttcatatatcttctaaaattcctcatctcaaggccaccagtccccagttatcacccttggaaatcctctgtttagcttagttgcacaaaaggtagtatgtccagtggctagaggtggggtgggaagagaggaggccaggccaggccctcaggaattccctggtttccactgggccacccacttgctggacagtctgagccaagtccctcctgctggagaaaagcctggaactgccaaaacaaaaaaacaaatacaaacaaacctcgtcaccacggtcaggaggaggttcagacattctgcccagaggggctggggaaagggatgggagccaggaaagatttaggggcaggagacagacacgtaacaggaactcggaaggtagaacttagaattcagaacttgggtttcaattgtagaatttggaatctggaatacagaattgggaagaagaacagagatgacaaaagaccacttgaagagaggttcctaataatacaagctagaccctgttccctcaccctgtatcctgtctcccctaattgacattctatcagcccaaccctcattctgcagggccacctggtgtgtggaggtggcgggaggggtcagtgactctgggggtctcctcagtgacccccatacctcatcatgaacccttgggtagcttgattctgcctaccatccaggaaaacttgtgctggaattgctgatggaaacaattaaatattttactataaaaaaaaaaaaggggggcgccaaaatttccctcagggcgccatttgcgtacccgttctgacaaggggccatatggagcgttaaaaaagaggccggtaaaggcgggaaactctggtcttgaagacctctggggacaag

SEQ ID NO: 381043 - DNA, 1598 bp, Homo sapiens
cgcggacgaacaactacgtgctaggtacgaggccgggtgttaatcggccgaggccaacatggctccgcggctgtgcagcatctctgtgacggcgcggcggctgctggggggcccggggcctcgcgctggggacgttgcgtctgcagctgcggcgcgtttctattccaaggacaatgaaggcagctggttccgctccctctttgttcacaaagtggatccccggaaggatgcccactccaccctgctgtccaagaaggaaaccagcaacctctataagatccagtttcacaatgtaaagcctgaatacctggatgcctacaacagcctcacggaggctgtgctgcccaagcttcacctggatgaggactacccatgctcactcgtgggcaactggaacacgtggtcctgctgtcttggttttgtcttggctctgggaggactctgaggggcagtgctcagttcagacaagggggaactgaaggctgacaagttctgaggattacagctctgcccaggccctttctactttccctgcctgcctccctccccctgctagaagtagtttctgatttccctgaatgaaagatagtgatcttttaggccttcatatatcttctaaaattcctcatctcaaggccaccagtccccagttatcacccttggaaatcctctgtttagcttagttgcacaaaaggtagtatgtccagtggctagaggtggggtgggaagagaggaggccaggccaggccctcaggaattccctggtttccactgggccacccacttgctggacagtctgagccaagtccctcctgctggagaaaagcctggaactgccaaaacaaaaaaacaaatacaaacaaacctcgtcaccacggtcaggaggaggttcagacattctgcccagaggggctggggaaagggatgggagccaggaaagatttaggggcaggagacagacacgtaacaggaactcggaaggtagaacttagaattcagaacttgggtttcaattgtagaatttggaatctggaatacagaattgggaagaagaacagagatgacaaaagaccacttgaagagaggttcctaatactagacagatggagagtggcttggctgtttccccctgcatattggggttgaaaacttaaatgtgtagttccagtccttctatgcagagtctctcctgccctccctccttcctgcaggcaaatatacaagctagaccctgttccctcaccctgtatcctgtctcccctaattgacattctatcagcccaaccctcattctgcagggccacctggtgtgtggaggtggcgggaggggtcagtgactctgggggtctcctcagtgacccccatacctcatcatgaacccttgggtagcttgattctgcctaccatccaggaaaacttgtgctggaattgctgatggaaacaattaaatattttactataaaaaaaaaaaaggggggcgccaaaatttccctcagggcgccatttgcgtacccgttctgacaaggggccatatggagcgttaaaaaagaggccggtaaaggcgggaaactctggtcttgaagacctctggggacaag

SEQ ID NO: 381044 - DNA, 1332 bp, Homo sapiens
cgcggacgaacaactacgtgctaggtacgaggccgggtgttaatcggccgaggccaacatggctccgcggctgtgcagcatctctgtgacggcgcggcggctgctggggggcccggggcctcgcgctggggacgttgcgtctgcagctgcggcgcgtttctattccaaggacaatgaaggcagctggttccgctccctctttgttcacaaagtggatccccggaaggatgcccactccaccctgcccaggccctttctactttccctgcctgcctccctccccctgctagaagtagtttctgatttccctgaatgaaagatagtgatcttttaggccttcatatatcttctaaaattcctcatctcaaggccaccagtccccagttatcacccttggaaatcctctgtttagcttagttgcacaaaaggtagtatgtccagtggctagaggtggggtgggaagagaggaggccaggccaggccctcaggaattccctggtttccactgggccacccacttgctggacagtctgagccaagtccctcctgctggagaaaagcctggaactgccaaaacaaaaaaacaaatacaaacaaacctcgtcaccacggtcaggaggaggttcagacattctgcccagaggggctggggaaagggatgggagccaggaaagatttaggggcaggagacagacacgtaacaggaactcggaaggtagaacttagaattcagaacttgggtttcaattgtagaatttggaatctggaatacagaattgggaagaagaacagagatgacaaaagaccacttgaagagaggttcctaatactagacagatggagagtggcttggctgtttccccctgcatattggggttgaaaacttaaatgtgtagttccagtccttctatgcagagtctctcctgccctccctccttcctgcaggcaaatatacaagctagaccctgttccctcaccctgtatcctgtctcccctaattgacattctatcagcccaaccctcattctgcagggccacctggtgtgtggaggtggcgggaggggtcagtgactctgggggtctcctcagtgacccccatacctcatcatgaacccttgggtagcttgattctgcctaccatccaggaaaacttgtgctggaattgctgatggaaacaattaaatattttactataaaaaaaaaaaaggggggcgccaaaatttccctcagggcgccatttgcgtacccgttctgacaaggggccatatggagcgttaaaaaagaggccggtaaaggcgggaaactctggtcttgaagacctctggggacaag

SEQ ID NO: 381045 - DNA, 1339 bp, Homo sapiens
tcccacgctcccattttaccgaggtggatcctgaggcccagagtgggcaaagggcttgccaaggtcgcagagcgcgcagaggattagaaccctgacttccgtccagcacctgcggagttggagacgcccacaggaaacgcccacctgaccgggtgagtgagggggcgggcgagccggaggggtggagtttattcgcgccccgctccgccaccagggcttgggggcggggccttcctgcaacctttgcggctccaacatggctccgcggctgtgcagcatctctgtgacggcgcggcggctgctggggggcccggggcctcgcgctggggacgttgcgtctgcagctgcggcgcgtttctattccaaggacaatgaaggcagctggttccgctccctctttgttcacaaagtggatccccggaaggatgcccactccaccctgctgtccaagaaggaaaccagcaacctctataagatccagtttcacaatgtaaagcctgaatacctggatgcctacaacagcctcacggaggctgtgctgcccaagcttcacctggatgaggactacccatgctcactcgtgggcaactggaacacgtggtatggggagcaggaccaggcagtgcacctgtggcgattctcaggtggctacccagccctcatggactgcatgaacaagctcaaaaacaataaggagtacctggagttccgaagggagcggagccagatgctgctgtccaggagaaaccagctgctcctcgagttcagcttctggaatgagccacagcccagaatgggtcccaacatctatgagctgaggacatacaagctcaagccaggaaccatgatcgagtgggggaacaactgggctcgggccatcaagtaccggcaggagaaccaggaggcagtgggcggcttcttctcacagataggagagctctacgtggtgcaccatctctgggcctataaagacctgcagtctcgggaggagactcgaaacgctgcctggaggaagagaggctgggatgaaaatgtctactatacagtccccctggtgcgacacatggagtctaggatcatgatccccttgaagatctcgcctctgcagtgatgctgcctacacctccacctccttccccttctccctcaggcaaccccgacagacagtggcactcctggtcctgctgtcttggttttgtcttggctctgggaggactctgaggggcagtgctcagttcagacaagggggaactgaaggctgacaagttctgaggattacagctctgcccacagccgatactagaattccaacgtagtccatgagtttccaccgtcgcat

SEQ ID NO: 381046 - DNA, 990 bp, Homo sapiens
gctagaggtggcctggcctcctctcttcccaccccacctctagccactggacatactaccttttgtgcaactaagctaaacagaggatttccaagggtgataactggggactggtgggaagagaggaggccaggccaggccctcaggaattccctggtttccactgggccacccacttgctggacagtctgagccaagtccctcctgctggagaaaagcctggaactgccaaaacaaaaaaacaaatacaaacaaacctcgtcaccacggtcaggaggaggttcagacattctgcccagaggggctggggaaagggatgggagccaggaaagatttaggggcaggagacagacacgtaacaggaactcggaaggtagaacttagaattcagaacttgggtttcaattgtagaatttggaatctggaatacagaattgggaagaagaacagagatgacaaaagaccacttgaagagaggttcctaatactagacagatggagagtggcttggctgtttccccctgcatattggggttgaaaacttaaatgtgtagttccagtccttctatgcagagtctctcctgccctccctccttcctgcaggcaaatatacaagctagaccctgttccctcaccctgtatcctgtctcccctaattgacattctatcagcccaaccctcattctgcagggccacctggtgtgtggaggtggcgggaggggtcagtgactctgggggtctcctcagtgacccccatacctcatcatgaacccttgggtagcttgattctgcctaccatccaggaaaacttgtgctggaattgctgatggaaacaattaaatattttactataaaaaaaaaaaaggggggcgccaaaatttccctcagggcgccatttgcgtacccgttctgacaaggggccatatggagcgttaaaaaagaggccggtaaaggcgggaaactctggtcttgaagacctctggggacaag

SEQ ID NO: 381047 - DNA, 854 bp, Homo sapiens
agaggatccccactatcatgtggtctatgagggctggtttgccacctgagaattgccacaggtgcactgcgcgtggcctgctcccgataccacgtgttccagttgcccacgagtgagcatgggtagtcctcatccaggtgaagcttggatgaggactgcccagaggggctggggaaagggatgggagccaggaaagatttaggggcaggagacagacacgtaacaggaactcggaaggtagaacttagaattcagaacttgggtttcaattgtagaatttggaatctggaatacagaattgggaagaagaacagagatgacaaaagaccacttgaagagaggttcctaatactagacagatggagagtggcttggctgtttccccctgcatattggggttgaaaacttaaatgtgtagttccagtccttctatgcagagtctctcctgccctccctccttcctgcaggcaaatatacaagctagaccctgttccctcaccctgtatcctgtctcccctaattgacattctatcagcccaaccctcattctgcagggccacctggtgtgtggaggtggcgggaggggtcagtgactctgggggtctcctcagtgacccccatacctcatcatgaacccttgggtagcttgattctgcctaccatccaggaaaacttgtgctggaattgctgatggaaacaattaaatattttactataaaaaaaaaaaaggggggcgccaaaatttccctcagggcgccatttgcgtacccgttctgacaaggggccatatggagcgttaaaaaagaggccggtaaaggcgggaaactctggtcttgaagacctctggggacaag

SEQ ID NO: 381048 - DNA, 747 bp, Homo sapiens
cgcggacgaacaactacgtgctaggtacgaggccgggtgttaatcggccgaggccaacatggctccgcggctgtgcagcatctctgtgacggcgcggcggctgctggggggcccggggcctcgcgctggggacgttgcgtctgcagctgcggcgcgcctcccaccctcagagggctcaggactgtgtatggtcaaggaatatttaccaaagaatttctattccaaggacaatgaaggcagctggttccgctccctctttgttcacaaagtggatccccggaaggatgcccactccaccctgctgtccaagaaggaaaccagcaacctctataagatccagtttcacaatgtaaagcctgaatacctggatgcctacaacagcctcacggaggctgtgctgcccaagcttcacctggatgaggactacccatgctcactcgtgggcaactggaacacgtggtatggggagcaggaccaggcagtgcacctgtggcgattctcaggtggctacccagccctcatggactgcatgaacaagctcaaaaacaataaggagtacctggagttccgaagggagcggagccagatgctgctgtccaggagaaaccagctgctcctcgagttcagcttctggaatgagccacagcccagaatgggtcccaacatctatgagctgaggacatacaagctcaagccaggaaccatgatcgagtgggggaacaactgggctcgggccatcaagtaccg

SEQ ID NO: 381049 - DNA, 642 bp, Homo sapiens
tcccacgctcccattttaccgaggtggatcctgaggcccagagtgggcaaagggcttgccaaggtcgcagagcgcgcagaggattagaaccctgacttccgtccagcacctgcggagttggagacgcccacaggaaacgcccacctgaccggtttctattccaaggacaatgaaggcagctggttccgctccctctttgttcacaaagtggatccccggaaggatgcccactccaccctgctgtccaagaaggaaaccagcaacctctataagatccagtttcacaatgtaaagcctgaatacctggatgcctacaacagcctcacaaccctcattctgcagggccacctggtgtgtggaggtggcgggaggggtcagtgactctgggggtctcctcagtgacccccatacctcatcatgaacccttgggtagcttgattctgcctaccatccaggaaaacttgtgctggaattgctgatggaaacaattaaatattttactataaaaaaaaaaaaggggggcgccaaaatttccctcagggcgccatttgcgtacccgttctgacaaggggccatatggagcgttaaaaaagaggccggtaaaggcgggaaactctggtcttgaagacctctggggacaag

SEQ ID NO: 381050 - DNA, 558 bp, Homo sapiens
  misc_feature (125)..(125): n is a, c, g, or t
agccacagcccagaatgggtcccaacatctatgagctgaggacatacaagctcaagcaggaccaggcagtgcacctgtggcgattctcaggtggctacccagccctcatggactgcatgaacaanctcaaaaacaataaggagtactccgctccctctttgttcacaaagtggatccccggaaggatgcccactccaccctgctgtccaagaaggaaaccagcaacctctataagatccagtaaccctcattctgcagggccacctggtgtgtggaggtggcgggaggggtcagtgactctgggggtctcctcagtgacccccatacctcatcatgaacccttgggtagcttgattctgcctaccatccaggaaaacttgtgctggaattgctgatggaaacaattaaatattttactataaaaaaaaaaaaggggggcgccaaaatttccctcagggcgccatttgcgtacccgttctgacaaggggccatatggagcgttaaaaaagaggccggtaaaggcgggaaactctggtcttgaagacctctggggacaag

SEQ ID NO: 381051 - DNA, 555 bp, Homo sapiens
cgcggacgaacaactacgtgctaggtacgaggccgggtgttaatcggccgaggccaacatggctccgcggctgtgcagcatctctgtgacggcgcggcggctgctggggggcccggggcctcgcgctggggacgttgcgtctgcagctgcggcgcgcctcccaccctcagagggctcaggactgtgtatggtcaaggaatatttaccaaagaagtgaggccacctgttccccctcccccaacctgtgaaaaggaagcaaccatccctcctgccctgcagcccaggaatgaagctgcaaagttctgatagtgcctgccatgagatgttacagcacagagcagtggggcttttggacagctgggaaagaggagtggcataagcgccccacctagactgcccaataattagggataaagctgacaccgtgggaaaagcctagagtttgcctggcactaacagatctaactcagactttgtaggtggggtgacctcaggactctttaagcctcgggttcctcatctgtaaaatgggagtaatcaggatgtatctcatag

SEQ ID NO: 381052 - DNA, 584 bp, Homo sapiens
ctaaaaatgctgacacaccaaagtagagatgtcaagtaggcagtagatggatataggagtctggagcccttgggagtgtttgcgactagaaatataaatgtaggcaatattaacatatgtactgattggatggatgattaaagcagacagtgtttgctaatagtctgagggaggcatctagggaggaggagacagcagtgcagggtttaggggacagtgggaagagggccctgtgctgggtaagggatccagtcctctgtgcctgaggaatgagcctgtgcctttctcacagcctataaagacctgcagtctcgggaggagactcgaaacgctgcctggaggaagagaggctgggatgaaaatgtctactatacaggtgagtgaagcctttggaggtcttctgctgagaaccctgtctgaggatggaatcctctctgcaaggagatctagtctttcttgattacctccagtgatggggaactcacttttaagacaatgagttaatgggtttctatccaagtggcacactccataggataccagcaggcctaggtgagtactctaggggatgataacatagccag

SEQ ID NO: 381053 - DNA, 686 bp, Homo sapiens
tcccacgctcccattttaccgaggtggatcctgaggcccagagtgggcaaagggcttgccaaggtcgcagagcgcgcagaggattagaaccctgacttccgtccagcacctgcggagttggagacgcccacaggaaacgcccacctgaccggtttctattccaaggacaatgaaggcagctggttccgctccctctttgttcacaaagtggatccccggaaggatgcccactccaccctgctgtccaagaaggaaaccagcaacctctataagatccagtttcacaatgtaaagcctgaatacctggatgcctacaacagcctcacggaggctgtgctgcccaagcttcacctggatgaggactacccatgctcactcgtgggcaactggaacacgtggtatggggagcaggaccaggcagtgcacctgtggcgattctcaggtggctacccagccctcatggactgcatgaacaagctcaaaaacaataaggagtacctggagttccgaagggagcggagccagatgctgctgtccaggagaaaccagctgctcctcgagttcagcttctggaatgagccacagcccagaatgggtcccaacatctatgagctgaggacatacaagctcaagccaggaaccatgatcgagtgggggaacaactgggctcgggccatcaagtaccg

SEQ ID NO: 381054 - DNA, 2176 bp, Homo sapiens
cgcggacgaacaactacgtgctaggtacgaggccgggtgttaatcggccgaggccaacatggctccgcggctgtgcagcatctctgtgacggcgcggcggctgctggggggcccggggcctcgcgctggggacgttgcgtctgcagctgcggcgcgtttctattccaaggacaatgaaggcagctggttccgctccctctttgttcacaaagtggatccccggaaggatgcccactccaccctgctgtccaagaaggaaaccagcaacctctataagatccagtttcacaatgtaaagcctgaatacctggatgcctacaacagcctcacggaggctgtgctgcccaagcttcacctggatgaggactacccatgctcactcgtgggcaactggaacacgtggtatggggagcaggaccaggcagtgcacctgtggcgattctcaggtggctacccagccctcatggactgcatgaacaagctcaaaaacaataaggagtacctggagttccgaagggagcggagccagatgctgctgtccaggagaaaccagctgctcctcgagttcagcttctggaatgagccacagcccagaatgggtcccaacatctatgagctgaggacatacaagctcaagccaggaaccatgatcgagtgggggaacaactgggctcgggccatcaagtaccggcaggagaaccaggaggcagtgggcggcttcttctcacagataggagagctctacgtggtgcaccatctctgggcctataaagacctgcagtctcgggaggagactcgaaacgctgcctggaggaagagaggctgggatgaaaatgtctactatacagtccccctggtgcgacacatggagtctaggatcatgatccccttgaagatctcgcctctgcagtgatgctgcctacacctccacctccttccccttctccctcaggcaaccccgacagacagtggcactcctggtcctgctgtcttggttttgtcttggctctgggaggactctgaggggcagtgctcagttcagacaagggggaactgaaggctgacaagttctgaggattacagctctgcccaggccctttctactttccctgcctgcctccctccccctgctagaagtagtttctgatttccctgaatgaaagatagtgatcttttaggccttcatatatcttctaaaattcctcatctcaaggccaccagtccccagttatcacccttggaaatcctctgtttagcttagttgcacaaaaggtagtatgtccagtggctagaggtggggtgggaagagaggaggccaggccaggccctcaggaattccctggtttccactgggccacccacttgctggacagtctgagccaagtccctcctgctggagaaaagcctggaactgccaaaacaaaaaaacaaatacaaacaaacctcgtcaccacggtcaggaggaggttcagacattctgcccagaggggctggggaaagggatgggagccaggaaagatttaggggcaggagacagacacgtaacaggaactcggaaggtagaacttagaattcagaacttgggtttcaattgtagaatttggaatctggaatacagaattgggaagaagaacagagatgacaaaagaccacttgaagagaggttcctaatactagacagatggagagtggcttggctgtttccccctgcatattggggttgaaaacttaaatgtgtagttccagtccttctatgcagagtctctcctgccctccctccttcctgcaggcaaatatacaagctagaccctgttccctcaccctgtatcctgtctcccctaattgacattctatcagcccaaccctcattctgcagggccacctggtgtgtggaggtggcgggaggggtcagtgactctgggggtctcctcagtgacccccatacctcatcatgaacccttgggtagcttgattctgcctaccatccaggaaaacttgtgctggaattgctgatggaaacaattaaatattttactataaaaaaaaaaaaggggggcgccaaaatttccctcagggcgccatttgcgtacccgttctgacaaggggccatatggagcgttaaaaaagaggccggtaaaggcgggaaactctggtcttgaagacctctggggacaag

SEQ ID NO: 381055 - DNA, 2718 bp, Homo sapiens
tctttgtcctggttgggaccgggctgtgatggggacctgatgaaagatggtgagaagggcaggtactgggccctggagagtgggagagggcagaagacaggaggagtggcccattcccaggcgtagcttgtgatttaacacccactgggggcttctggtagtcagctcctccgtcgggaagttctgtgggaaagagatgatggcaggggagcagtgggggatccccaggggccatggctgcacagaccctttgttcctccacctcgaactgtacaggtggggaaacggacctgagagggaatgggagttgtccaaggtcaccctccctgctgtgccgtggcagcaccaggtctgggacccaggcctgccaatgcgccatgcactttgcacccaactggtggcctcctgggagtgggagtctggctgggccatgtgctctcagcctgggcttttgtttgggccctgctctgggctgagctagggcttggcctccctgactggccctgggcagcccctcactccttggtccccacagccctgtacttcccccatctctgcatatatgaccctgcacagttatgacttggtgcttgtctgtctctctcactagaccatgatctcatttttctctgtttccccagcctcccaccctcagagggctcaggactgtgtatggtcaaggaatatttaccaaagaatttctattccaaggacaatgaaggcagctggttccgctccctctttgttcacaaagtggatccccggaaggatgcccactccaccctgctgtccaagaaggaaaccagcaacctctataagatccagtttcacaatgtaaagcctgaatacctggatgcctacaacagcctcacggaggctgtgctgcccaagcttcacctggatgaggactacccatgctcactcgtgggcaactggaacacgtggtatggggagcaggaccaggcagtgcacctgtggcgattctcaggtggctacccagccctcatggactgcatgaacaagctcaaaaacaataaggagtacctggagttccgaagggagcggagccagatgctgctgtccaggagaaaccagctgctcctcgagttcagcttctggaatgagccacagcccagaatgggtcccaacatctatgagctgaggacatacaagctcaagccaggaaccatgatcgagtgggggaacaactgggctcgggccatcaagtaccggcaggagaaccaggaggcagtgggcggcttcttctcacagataggagagctctacgtggtgcaccatctctgggcctataaagacctgcagtctcgggaggagactcgaaacgctgcctggaggaagagaggctgggatgaaaatgtctactatacagtccccctggtgcgacacatggagtctaggatcatgatccccttgaagatctcgcctctgcagtgatgctgcctacacctccacctccttccccttctccctcaggcaaccccgacagacagtggcactcctggtcctgctgtcttggttttgtcttggctctgggaggactctgaggggcagtgctcagttcagacaagggggaactgaaggctgacaagttctgaggattacagctctgcccaggccctttctactttccctgcctgcctccctccccctgctagaagtagtttctgatttccctgaatgaaagatagtgatcttttaggccttcatatatcttctaaaattcctcatctcaaggccaccagtccccagttatcacccttggaaatcctctgtttagcttagttgcacaaaaggtagtatgtccagtggctagaggtggggtgggaagagaggaggccaggccaggccctcaggaattccctggtttccactgggccacccacttgctggacagtctgagccaagtccctcctgctggagaaaagcctggaactgccaaaacaaaaaaacaaatacaaacaaacctcgtcaccacggtcaggaggaggttcagacattctgcccagaggggctggggaaagggatgggagccaggaaagatttaggggcaggagacagacacgtaacaggaactcggaaggtagaacttagaattcagaacttgggtttcaattgtagaatttggaatctggaatacagaattgggaagaagaacagagatgacaaaagaccacttgaagagaggttcctaatactagacagatggagagtggcttggctgtttccccctgcatattggggttgaaaacttaaatgtgtagttccagtccttctatgcagagtctctcctgccctccctccttcctgcaggcaaatatacaagctagaccctgttccctcaccctgtatcctgtctcccctaattgacattctatcagcccaaccctcattctgcagggccacctggtgtgtggaggtggcgggaggggtcagtgactctgggggtctcctcagtgacccccatacctcatcatgaacccttgggtagcttgattctgcctaccatccaggaaaacttgtgctggaattgctgatggaaacaattaaatattttactataaaaaaaaaaaaggggggcgccaaaatttccctcagggcgccatttgcgtacccgttctgacaaggggccatatggagcgttaaaaaagaggccggtaaaggcgggaaactctggtcttgaagacctctggggacaag

SEQ ID NO: 381056 - DNA, 2174 bp, Homo sapiens
aattcggcacgaggttgctttgagggaagttacgcttattttttttttttcctttttctggagaacggggtctcgctatattgcccaggcaggtctcgaactcctgggctcaagctatcctcccgcctcttagcctccctgagagctgggattacaggcgtgagctcgtgccgaattcggcacgagtccgctccctctttgttcacaaagtggatccccggaaggatgcccactccaccctgctgtccaagaaggaaaccagcaacctctataagatccagtttcacaatgtaaagcctgaatacctggatgcctacaacagcctcacggaggctgtgctgcccaagcttcacctggatgaggactacccatgctcactcgtgggcaactggaacacgtggtatggggagcaggaccaggcagtgcacctgtggcgattctcaggtggctacccagccctcatggactgcatgaacaagctcaaaaacaataaggagtacctggagttccgaagggagcggagccagatgctgctgtccaggagaaaccagctgctcctcgagttcagcttctggaatgagccacagcccagaatgggtcccaacatctatgagctgaggacatacaagctcaagccaggaaccatgatcgagtgggggaacaactgggctcgggccatcaagtaccggcaggagaaccaggaggcagtgggcggcttcttctcacagataggagagctctacgtggtgcaccatctctgggcctataaagacctgcagtctcgggaggagactcgaaacgctgcctggaggaagagaggctgggatgaaaatgtctactatacagtccccctggtgcgacacatggagtctaggatcatgatccccttgaagatctcgcctctgcagtgatgctgcctacacctccacctccttccccttctccctcaggcaaccccgacagacagtggcactcctggtcctgctgtcttggttttgtcttggctctgggaggactctgaggggcagtgctcagttcagacaagggggaactgaaggctgacaagttctgaggattacagctctgcccaggccctttctactttccctgcctgcctccctccccctgctagaagtagtttctgatttccctgaatgaaagatagtgatcttttaggccttcatatatcttctaaaattcctcatctcaaggccaccagtccccagttatcacccttggaaatcctctgtttagcttagttgcacaaaaggtagtatgtccagtggctagaggtggggtgggaagagaggaggccaggccaggccctcaggaattccctggtttccactgggccacccacttgctggacagtctgagccaagtccctcctgctggagaaaagcctggaactgccaaaacaaaaaaacaaatacaaacaaacctcgtcaccacggtcaggaggaggttcagacattctgcccagaggggctggggaaagggatgggagccaggaaagatttaggggcaggagacagacacgtaacaggaactcggaaggtagaacttagaattcagaacttgggtttcaattgtagaatttggaatctggaatacagaattgggaagaagaacagagatgacaaaagaccacttgaagagaggttcctaatactagacagatggagagtggcttggctgtttccccctgcatattggggttgaaaacttaaatgtgtagttccagtccttctatgcagagtctctcctgccctccctccttcctgcaggcaaatatacaagctagaccctgttccctcaccctgtatcctgtctcccctaattgacattctatcagcccaaccctcattctgcagggccacctggtgtgtggaggtggcgggaggggtcagtgactctgggggtctcctcagtgacccccatacctcatcatgaacccttgggtagcttgattctgcctaccatccaggaaaacttgtgctggaattgctgatggaaacaattaaatattttactataaaaaaaaaaaaggggggcgccaaaatttccctcagggcgccatttgcgtacccgttctgacaaggggccatatggagcgttaaaaaagaggccggtaaaggcgggaaactctggtcttgaagacctctggggacaag

SEQ ID NO: 381057 - DNA, 2096 bp, Homo sapiens
cgcggacgaacaactacgtgctaggtacgaggccgggtgttaatcggccgaggccaacatggctccgcggctgtgcagcatctctgtgacggcgcggcggctgctggggggcccggggcctcgcgctggggacgttgcgtctgcagctgcggcgcgtttctattccaaggacaatgaaggcagctggttccgctccctctttgttcacaaagtggatccccggaaggatgcccactccaccctgctgtccaagaaggaaaccagcaacctctataagatccagtttcacaatgtaaagcctgaatacctggatgcctacaacagcctcacggaggctgtgctgcccaagcttcacctggatgaggactacccatgctcactcgtgggcaactggaacacgtggtatggggagcaggaccaggcagtgcacctgtggcgattctcaggtggctacccagcccaggagaaaccagctgctcctcgagttcagcttctggaatgagccacagcccagaatgggtcccaacatctatgagctgaggacatacaagctcaagccaggaaccatgatcgagtgggggaacaactgggctcgggccatcaagtaccggcaggagaaccaggaggcagtgggcggcttcttctcacagataggagagctctacgtggtgcaccatctctgggcctataaagacctgcagtctcgggaggagactcgaaacgctgcctggaggaagagaggctgggatgaaaatgtctactatacagtccccctggtgcgacacatggagtctaggatcatgatccccttgaagatctcgcctctgcagtgatgctgcctacacctccacctccttccccttctccctcaggcaaccccgacagacagtggcactcctggtcctgctgtcttggttttgtcttggctctgggaggactctgaggggcagtgctcagttcagacaagggggaactgaaggctgacaagttctgaggattacagctctgcccaggccctttctactttccctgcctgcctccctccccctgctagaagtagtttctgatttccctgaatgaaagatagtgatcttttaggccttcatatatcttctaaaattcctcatctcaaggccaccagtccccagttatcacccttggaaatcctctgtttagcttagttgcacaaaaggtagtatgtccagtggctagaggtggggtgggaagagaggaggccaggccaggccctcaggaattccctggtttccactgggccacccacttgctggacagtctgagccaagtccctcctgctggagaaaagcctggaactgccaaaacaaaaaaacaaatacaaacaaacctcgtcaccacggtcaggaggaggttcagacattctgcccagaggggctggggaaagggatgggagccaggaaagatttaggggcaggagacagacacgtaacaggaactcggaaggtagaacttagaattcagaacttgggtttcaattgtagaatttggaatctggaatacagaattgggaagaagaacagagatgacaaaagaccacttgaagagaggttcctaatactagacagatggagagtggcttggctgtttccccctgcatattggggttgaaaacttaaatgtgtagttccagtccttctatgcagagtctctcctgccctccctccttcctgcaggcaaatatacaagctagaccctgttccctcaccctgtatcctgtctcccctaattgacattctatcagcccaaccctcattctgcagggccacctggtgtgtggaggtggcgggaggggtcagtgactctgggggtctcctcagtgacccccatacctcatcatgaacccttgggtagcttgattctgcctaccatccaggaaaacttgtgctggaattgctgatggaaacaattaaatattttactataaaaaaaaaaaaggggggcgccaaaatttccctcagggcgccatttgcgtacccgttctgacaaggggccatatggagcgttaaaaaagaggccggtaaaggcgggaaactctggtcttgaagacctctggggacaag

SEQ ID NO: 381058 - DNA, 1634 bp, Homo sapiens
  misc_feature (125)..(125): n is a, c, g, or t
agccacagcccagaatgggtcccaacatctatgagctgaggacatacaagctcaagcaggaccaggcagtgcacctgtggcgattctcaggtggctacccagccctcatggactgcatgaacaanctcaaaaacaataaggagtactccgctccctctttgttcacaaagtggatccccggaaggatgcccactccaccctgctgtccaagaaggaaaccagcaacctctataagatccagtttcacaatgtaaagcctgaatacctggaggaagagaggctgggatgaaaatgtctactatacagtccccctggtgcgacacatggagtctaggatcatgatccccttgaagatctcgcctctgcagtgatgctgcctacacctccacctccttccccttctccctcaggcaaccccgacagacagtggcactcctggtcctgctgtcttggttttgtcttggctctgggaggactctgaggggcagtgctcagttcagacaagggggaactgaaggctgacaagttctgaggattacagctctgcccaggccctttctactttccctgcctgcctccctccccctgctagaagtagtttctgatttccctgaatgaaagatagtgatcttttaggccttcatatatcttctaaaattcctcatctcaaggccaccagtccccagttatcacccttggaaatcctctgtttagcttagttgcacaaaaggtagtatgtccagtggctagaggtggggtgggaagagaggaggccaggccaggccctcaggaattccctggtttccactgggccacccacttgctggacagtctgagccaagtccctcctgctggagaaaagcctggaactgccaaaacaaaaaaacaaatacaaacaaacctcgtcaccacggtcaggaggaggttcagacattctgcccagaggggctggggaaagggatgggagccaggaaagatttaggggcaggagacagacacgtaacaggaactcggaaggtagaacttagaattcagaacttgggtttcaattgtagaatttggaatctggaatacagaattgggaagaagaacagagatgacaaaagaccacttgaagagaggttcctaatactagacagatggagagtggcttggctgtttccccctgcatattggggttgaaaacttaaatgtgtagttccagtccttctatgcagagtctctcctgccctccctccttcctgcaggcaaatatacaagctagaccctgttccctcaccctgtatcctgtctcccctaattgacattctatcagcccaaccctcattctgcagggccacctggtgtgtggaggtggcgggaggggtcagtgactctgggggtctcctcagtgacccccatacctcatcatgaacccttgggtagcttgattctgcctaccatccaggaaaacttgtgctggaattgctgatggaaacaattaaatattttactataaaaaaaaaaaaggggggcgccaaaatttccctcagggcgccatttgcgtacccgttctgacaaggggccatatggagcgttaaaaaagaggccggtaaaggcgggaaactctggtcttgaagacctctggggacaag

SEQ ID NO: 381059 - DNA, 1455 bp, Homo sapiens
tcccacgctcccattttaccgaggtggatcctgaggcccagagtgggcaaagggcttgccaaggtcgcagagcgcgcagaggattagaaccctgacttccgtccagcacctgcggagttggagacgcccacaggaaacgcccacctgaccgggtgagtgagggggcgggcgagccggaggggtggagtttattcgcgccccgctccgccaccagggcttgggggcggggccttcctgcaacctttgcggctccaacatggctccgcggctgtgcagcatctctgtgacggcgcggcggctgctggggggcccggggcctcgcgctggggacgttgcgtctgcagctgcggcgcgtttctattccaaggacaatgaaggcagctggttccgctccctctttgttcacaaagtggatccccggaaggatgcccactccaccctgctgtccaagaaggaaaccagcaacctctataagatccagtttcacaatgtaaagcctgaatacctggatgcctacaacagcctcacggaggctgtgctgcccaagcttcacctggatgaggactacccatgctcactcgtgggcaactggaacacgtggtatggggagcaggaccaggcagtgcacctgtggcgattctcaggtggctacccagccctcatggactgcatgaacaagctcaaaaacaataaggagtacctggagttccgaagggagcggagccagatgctgctgtccaggagaaaccagctgctcctcgagttcagcttctggaatgagccacagcccagaatgggtcccaacatctatgagctgaggacatacaagctcaagccaggaaccatgatcgagtgggggaacaactgggctcgggccatcaagtaccggcaggagaaccaggaggcagtgggcggcttcttctcacagataggagagctctacgtggtgcaccatctctgggcctataaagacctgcagtctcgggaggagactcgaaacgctgcctggaggaagagaggctgggatgaaaatgtctactatacagtccccctggtgcgacacatggagtctaggatcatgatccccttgaagatctcgccctgtatcctgtctcccctaattgacattctatcagcccaaccctcattctgcagggccacctggtgtgtggaggtggcgggaggggtcagtgactctgggggtctcctcagtgacccccatacctcatcatgaacccttgggtagcttgattctgcctaccatccaggaaaacttgtgctggaattgctgatggaaacaattaaatattttactataaaaaaaaaaaaggggggcgccaaaatttccctcagggcgccatttgcgtacccgttctgacaaggggccatatggagcgttaaaaaagaggccggtaaaggcgggaaactctggtcttgaagacctctggggacaag

SEQ ID NO: 381060 - DNA, 1087 bp, Homo sapiens
tcccacgctcccattttaccgaggtggatcctgaggcccagagtgggcaaagggcttgccaaggtcgcagagcgcgcagaggattagaaccctgacttccgtccagcacctgcggagttggagacgcccacaggaaacgcccacctgaccgggtgagtgagggggcgggcgagccggaggggtggagtttattcgcgccccgctccgccaccagggcttgggggcggggccttcctgcaacctttgcggctccaacatggctccgcggctgtgcagcatctctgtgacggcgcggcggctgctggggggcccggggcctcgcgctggggacgttgcgtctgcagctgcggcgcgtttctattccaaggacaatgaaggcagctggttccgctccctctttgttcacaaagtggatccccggaaggatgcccactccaccctgctgtccaagaaggaaaccagcaacctctataagatccagtttcacaatgtaaagcctgaatacctggatgcctacaacagcctcacggaggctgtgctgcccaagcttcacctggatgaggactacccatgctcactcgtgggcaactggaacacgtggtatggggagcaggaccaggcagtgcacctgtggcgattctcaggtggctacccagccctcatggactgcatgaacaagctcaaaaacaataaggtatgttagtgtccactcagcacacctctctggatgtgggatgcagcccagccctgttctggggactactctgctaccccatgaggcacactgtcaggatggagcgcacttcctggtagccatgcctttaccaccatgcccacaggactccctctttgttcacaaagtggatccccggaaggatgcccactccaccctgctgtccaagaaggaaaccagcaacctctataagatccagtttcacaatgtaaagcctgaatacctggatgcctacaacagcctcacggaggctgtgctgcccaagcttcacctggatgaggactacccatgctcactcgtgggcaactggaacacgtggtcctgctcttccagggcccttccccggcggccgct

SEQ ID NO: 381061 - DNA, 352 bp, Homo sapiens
ggaggctgtgctgcccaagcttcacctggatgaggactacccatgctcactcgtgggcaactggaacacgtggtatggggagcaggaccaggcaggtaaggcgctcacctccctagtgccattgccactgcccagccctggcctccagcacctttcacacctggctgttctccactccctctccacaacagcacctggtggggctcttactaaaacctcatcacctcactcccctgctcaaatacctgtcctggctcccctgtgccctcaaggtgacccgtgaagcctgtgactccttcccggccctgcccccagcctcatggcaccaaatcctccatgcctcgctgtgctg

SEQ ID NO: 381062 - DNA, 401 bp, Homo sapiens
gactgctttaggtcgggcgtggtggctcatacctgtaatcccagcaccttgagaggcggaggcaggtggatcacctgaggtcaggagttcatgaccagcctggccaacaatggtaaaacctcgtgtgtattaaaaataccaaatgagttgggcgtggtggtgtgcacctgtaatcccagctacttgggagtctgaggcaggagaatcacttgaacctgggaggtggaggttgcagtgagccaagatggtgccattgcactccagcctggacaaaaagagcaaaactgcatctcaaacaataaataaataaataaataaataaataaagactgttatatatgacattctttgacacctaatcaaagatatatggttaagcttatgcttatttagacctttct

SEQ ID NO: 381063 - DNA, 335 bp, Homo sapiens
ctatattcctgtgtaaattattaaatcctaaacataatccaggtataccggcaatttaagcacctgttgctggctctcctgattttggtcagggtaattgaatcatgtgacaaacaggaactcttgaaggcactgcaggtttggactaagatacaaaataaaatcaagtaaataagctttattttaagtaaacaacagcaataacaataataaaactgcctgagaattcaaaagaagggcctggcacagtgactactcacacctgtaatcacacactttggaggccaaggcaggaggattacttgaggccaagtgtttgagaccagcctaggcaa

SEQ ID NO: 381064 - DNA, 467 bp, Homo sapiens
ctctgcccttccaactaggtctcaaaggagaaaagagctctcacctgggagtcagggagtctggcttccagtcctgcctctgaccctcacaaccctcttaagcactaacattcaagatgtttttaccaaggacctcatccaaagagacaatatccaaggagagtaagaacaccagctttacctgcctcacaggatggtgggaaaggtctaactacatgttgttccccaaagcattttaaaaaccatagagggctggctgttgacatgtcagtttctcttaccatagagtgggatcgccaactgtcgccggaaaagactgtggactttctcaagctgtgaatcaaagaaacaagatattggaggaaactgggtgaagggagtacacaagacttctctgtactatttctgcaacttcctatgactctataattacttcaaaataaaaaggttttcttttaatgttttaa

SEQ ID NO: 381065 - DNA, 431 bp, Homo sapiens
tctccttcccgagtgctgctatgcactgtaacttcagataacccttccaagttcagcacaccttgtacgtgctgcagaagtagaaagaaagaaggaaaaagacagatggaccagtataaatccagcaaataaaccaagaggtggatgggacacagggccagcagcccaggtgcccagggaagtgctgtacctgaacacctataggaagaaggaagacagagaaaaaccatgattcgaggcatgacccagctcacctgactcctctgacaccagccttgtccccatgagcagcccagccaggcagactagagccaagccatgctctgaaacttgttaatggggccaccggagcgagtcacttaacctctccaggcctccatgtcttcctctgtaaaacggcaagaataaaagtaaccattcacagagtctca

SEQ ID NO: 381066 - DNA, 3549 bp, Homo sapiens
gaggccggcggagaaggaggacccgggagccggcggcccggagctgggagcgcggggaaggcggttggggttctgacagctgcgcgcgatcctgctctctctcagccgcctgtggacatgcgcaaagggccctctcctgagtccagatgatgctcataccaatggcttcagtgatggcggtgactgaaccgaaatgggtctcggtctggagccgcttcctctgggtgacgctgctgagcatggtgctggggtccctgctggccctgctgctgccgctgggggctgtggaggagcagtgcttggctgtgctcaaaggcctctacctgctcaggagcaaaccggacagggcgcagcatgccgccaccaagtgcaccagcccgtccacggagctcagcatcacctccaggggcgcgacgctgctggtggccaagaccaaggcctctccagcgggtaagttggaagccagagctgccctgaaccaggccctggagatgaagcgccagggcaagcgggaaaaagcccaaaagctcttcatgcacgccctcaagatggacccggacttcgtggacgcgctcaccgagtttggcatcttctcggaagaagacaaggacatcatccaggcggactacttgtacaccagagcattgaccatctcaccctaccatgagaaagcactggtcaaccgcgatcggacactgcctcttgtggaagagatcgaccagaggtatttcagcatcatcgacagcaaagtgaagaaggtcatgtccatccccaaggggaactcagctctgcgcagggtcatggaggagacctactaccatcacatctaccacacagtggccatcgagggcaacaccctcaccctctcggaaatcaggcacatcctggagacccgctacgccgtgcccgggaagagcctggaggagcagaacgaggtcataggcatgcatgcagccatgaagtacatcaacacgactctggtttcgcgcatcggctccgtcaccatcagcgacgtgctggagatccacaggcgggtgctgggctacgtggaccccgtggaagccggcaggtttcggacaacacaggtcctggtcggacaccacatccctccccatccgcaggatgtggaaaagcagatgcaggagtttgtacagtggctcaactccgaggaagccatgaacctgcacccagtggagtttgcagccttagcccattataaactcgtttacatccaccctttcattgatggcaacgggaggacctcccgtctgctcatgaacctcatcctcatgcaggcgggctacccgcccatcaccatccgcaaggagcagcggtccgactactaccacgtgttggaagctgccaacgagggcgacgtgaggcctttcattcgcttcatcgccaagtgtactgagaccaccctggacaccctgctttttgccacaactgagtactcggtggcactgccagaagcccaacccaaccactctgggttcaaggagacgcttcctgtgaagccctaaccctagaaatcctcagtgacaaaggctgtcctgaggtaggaaaaaaaaaaagaaacagcatttctagaaacctagtcacttcctaaagcaaaaggagaaacattctttacctccaaatgttttagttttaaaaaaaaaaaaaaactaagttatgaagccttgtcctaaaataacttataattcaaccaagctatttattttcttctttggagcaagctagtcagtattgtatggtgtctgctgtgtcttgctggtggccgtgctttaggggcaacagtgccaccatgtgaccagaacaaaggttctggagcagaatttgcactaaggtggaggagcggccaagaggtgtgggacggggcccagagccactgacataactcctccaagtgcttctctgaaacaggctgagaggttctgtgactgcaactgggaagtcagacccaagtcgcagctgagagaaatggttgaaagctcactttctcaaggtttagattagtggtgactaacttccaagcaaacttcatagaagagtttgcaaactttagtgccagcagctgtttttttttttttttttttcatattgagactatttttctaattaagaatagggggtagccataaagagctgtatgttggagggggaaacatggtgggcgggcagtttggttttctttgtgtatccgcgtttctctcacacttcatttgtagcaactcaggccagatgttttcgtctgaaattctctgggcttgtcattccacctgtatcgtgctgcaaaccaggtgttatgctagtaggcatctgccctcacccctctgcctgagttttctgtaggcagatgttaacctgagaaaacaagtgccatgtggacaccaagtaagcatttttgataatgaattagagcaccagtttctactgaatggagcaaaaaccttcagccatggccaggctgcatccctttggtcctggagtttcatctacttactgccatcttccacggtctttgcactgtcccgtgtcccatccccctgggaggcagaagagattgcctcggagtggccttatttttctcgcaacttgtgaaatgatgtagtgctctatgtaatatggccgggtttccaagctgtcatccaatggaagtagaatcttctctttgaatcatatggtacaggtgccaatatgactgctgctatttagagtcagagaggtggaagtcactgggtccctttcccagtgacagagcccatgatgtctaacactactgcactttgtcagtgtgtgagtgatggcgaatacgcagtgttgtctctttgatttggtaattccgttcctgacagtaatgaggccactgctctaaagtagtttatacagttcttcagttgtataaatagcacagagtagtttttgaaaggttaagaaaaataagtgaaaagacatacacgatatatgaaatggctccaaatgataattgttcaaacctttataaaatgtgttttcgtactcttatgctgccagaggtacttcttaaaactcttctcgtcttggttttataagcacaccacggaggtctgacagatgtgcttgcttctactacagagcaagagaatttgcactttagctatatgtgaaggatattattttaacaaattcctgattctaataaagttattttattacatgaatgcttgagactgtcttatttgggagatgttcccatctgtcataagggcagtgggggtattctgacctttagccctattcataatactgttctgggagagcaacagatccaagatggtgatttccatgggcaagagacccagaagttggataaaccgcctacctaggtgggcaaggatgaattactgatttttttttactaacaaacagtcaagtaactgaagtagtttttcacatttctatttatcatcagttctggattttctggggaaaacacacaaacccactcatgtagtcctggaaatccatttctagaacagtcaacacccggaacctaactgggttctg

SEQ ID NO: 381067 - DNA, 3270 bp, Homo sapiens
ttgcatatgggcaaggccaaggtcagaagatgaaccacgtgacgaaatagaaaaagctacctatggagttgtgcttggccttgccatattgcaagcattatggcaaggccaaggcgggtaagttggaagccagagctgccctgaaccaggccctggagatgaagcgccagggcaagcgggaaaaagcccaaaagctcttcatgcacgccctcaagatggacccggacttcgtggacgcgctcaccgagtttggcatcttctcggaagaagacaaggacatcatccaggcggactacttgtacaccagagcattgaccatctcaccctaccatgagaaagcactggtcaaccgcgatcggacactgcctcttgtggaagagatcgaccagaggtatttcagcatcatcgacagcaaagtgaagaaggtcatgtccatccccaaggggaactcagctctgcgcagggtcatggaggagacctactaccatcacatctaccacacagtggccatcgagggcaacaccctcaccctctcggaaatcaggcacatcctggagacccgctacgccgtgcccgggaagagcctggaggagcagaacgaggtcataggcatgcatgcagccatgaagtacatcaacacgactctggtttcgcgcatcggctccgtcaccatcagcgacgtgctggagatccacaggcgggtgctgggctacgtggaccccgtggaagccggcaggtttcggacaacacaggtcctggtcggacaccacatccctccccatccgcaggatgtggaaaagcagatgcaggagtttgtacagtggctcaactccgaggaagccatgaacctgcacccagtggagtttgcagccttagcccattataaactcgtttacatccaccctttcattgatggcaacgggaggacctcccgtctgctcatgaacctcatcctcatgcaggcgggctacccgcccatcaccatccgcaaggagcagcggtccgactactaccacgtgttggaagctgccaacgagggcgacgtgaggcctttcattcgcttcatcgccaagtgtactgagaccaccctggacaccctgctttttgccacaactgagtactcggtggcactgccagaagcccaacccaaccactctgggttcaaggagacgcttcctgtgaagccctaaccctagaaatcctcagtgacaaaggctgtcctgaggtaggaaaaaaaaaaagaaacagcatttctagaaacctagtcacttcctaaagcaaaaggagaaacattctttacctccaaatgttttagttttaaaaaaaaaaaaaaactaagttatgaagccttgtcctaaaataacttataattcaaccaagctatttattttcttctttggagcaagctagtcagtattgtatggtgtctgctgtgtcttgctggtggccgtgctttaggggcaacagtgccaccatgtgaccagaacaaaggttctggagcagaatttgcactaaggtggaggagcggccaagaggtgtgggacggggcccagagccactgacataactcctccaagtgcttctctgaaacaggctgagaggttctgtgactgcaactgggaagtcagacccaagtcgcagctgagagaaatggttgaaagctcactttctcaaggtttagattagtggtgactaacttccaagcaaacttcatagaagagaaaatgaatgccgacattccttacttacctgcaggaagactttttgagccatagtttgcaaactttagtgccagcagctgtttttttttttttttttttcatattgagactatttttctaattaagaatagggggtagccataaagagctgtatgttggagggggaaacatggtgggcgggcagtttggttttctttgtgtatccgcgtttctctcacacttcatttgtagcaactcaggccagatgttttcgtctgaaattctctgggcttgtcattccacctgtatcgtgctgcaaaccaggtgttatgctagtaggcatctgccctcacccctctgcctgagttttctgtaggcagatgttaacctgagaaaacaagtgccatgtggacaccaagtaagcatttttgataatgaattagagcaccagtttctactgaatggagcaaaaaccttcagccatggccaggctgcatccctttggtcctggagtttcatctacttactgccatcttccacggtctttgcactgtcccgtgtcccatccccctgggaggcagaagagattgcctcggagtggccttatttttctcgcaacttgtgaaatgatgtagtgctctatgtaatatggccgggtttccaagctgtcatccaatggaagtagaatcttctctttgaatcatatggtacaggtgccaatatgactgctgctatttagagtcagagaggtggaagtcactgggtccctttcccagtgacagagcccatgatgtctaacactactgcactttgtcagtgtgtgagtgatggcgaatacgcagtgttgtctctttgatttggtaattccgttcctgacagtaatgaggccactgctctaaagtagtttatacagttcttcagttgtataaatagcacagagtagtttttgaaaggttaagaaaaataagtgaaaagacatacacgatatatgaaatggctccaaatgataattgttcaaacctttataaaatgtgttttcgtactcttatgctgccagaggtacttcttaaaactcttctcgtcttggttttataagcacaccacggaggtctgacagatgtgcttgcttctactacagagcaagagaatttgcactttagctatatgtgaaggatattattttaacaaattcctgattctaataaagttattttattacatgaatgcttgagactgtcttatttgggagatgttcccatctgtcataagggcagtgggggtattctgacctttagccctattcataatactgttctgggagagcaacagatccaagatggtgatttccatgggcaagagacccagaagttggataaaccgcctacctaggtgggcaaggatgaattactgatttttttttactaacaaacagtcaagtaactgaagtagtttttcacatttctatttatcatcagttctggattttctggggaaaacacacaaacccactcatgtagtcctggaaatccatttctagaacagtcaacacccggaacctaactgggttctg

SEQ ID NO: 381068 - DNA, 701 bp, Homo sapiens
gaggccggcggagaaggaggacccgggagccggcggcccggagctgggagcgcggggaaggcggttggggttctgacagctgcgcgcgatcctgctctctctcagccgcctgtggacatgcgcaaagggccctctcctgagtccagatgatgctcataccaatggcttcagtgatggcggtgactgaaccgaaatgggtctcggtctggagccgcttcctctgggtgacgctgctgagcatggtgctggggtccctgctggccctgctgctgccgctgggggctgtggaggagcagtgcttggctgtgctcaaaggcctctacctgctcaggagcaaaccggacagggcgcagcatgccgccaccaagtgcaccagcccgtccacggagctcagcatcacctccaggggcgcgacgctgctggtggccaagaccaaggcctctccagggaagtgctgtacctgaacacctataggaagaaggaagacagagaaaaaccatgattcgaggcatgacccagctcacctgactcctctgacaccagccttgtccccatgagcagcccagccaggcagactagagccaagccatgctctgaaacttgttaatggggccaccggagcgagtcacttaacctctccaggcctccatgtcttcctctgtaaaacggcaagaataaaagtaaccattcacagagtctca

SEQ ID NO: 381069 - DNA, 382 bp, Homo sapiens
tgatgtggtccccaattcacatggagaaaatatttaagacaattatactatatacaagggacggtaaagagacttaaagggaggtgagtcttctatacttcacttgcactggtaagatgtcaataccagcaggcgagggaggtctctgtggggacagaacagctctgtatctggactgcagcagtggttagatgaatctacacatgtaataaaatgtcttttttttcccattgttccaaggtcaatttcctggttttgattttgtattacagaaacaagatattggaggaaactgggtgaagggagtacacaagacttctctgtactatttctgcaacttcctatgactctataattacttcaaaataaaaaggttttcttt

SEQ ID NO: 381070 - DNA, 3603 bp, Homo sapiens
gaggccggcggagaaggaggacccgggagccggcggcccggagctgggagcgcggggaaggcggttggggttctgacagctgcgcgcgatcctgctctctctcagccgcctgtggacatgcgcaaagggccctctcctgagtccagatgatgctcataccaatggcttcagtgatggcggtgactgaaccgaaatgggtctcggtctggagccgcttcctctgggtgacgctgctgagcatggtgctggggtccctgctggccctgctgctgccgctgggggctgtggaggagcagtgcttggctgtgctcaaaggcctctacctgctcaggagcaaaccggacagggcgcagcatgccgccaccaagtgcaccagcccgtccacggagctcagcatcacctccaggggcgcgacgctgctggtggccaagaccaaggcctctccagcgggtaagttggaagccagagctgccctgaaccaggccctggagatgaagcgccagggcaagcgggaaaaagcccaaaagctcttcatgcacgccctcaagatggacccggacttcgtggacgcgctcaccgagtttggcatcttctcggaagaagacaaggacatcatccaggcggactacttgtacaccagagcattgaccatctcaccctaccatgagaaagcactggtcaaccgcgatcggacactgcctcttgtggaagagatcgaccagaggtatttcagcatcatcgacagcaaagtgaagaaggtcatgtccatccccaaggggaactcagctctgcgcagggtcatggaggagacctactaccatcacatctaccacacagtggccatcgagggcaacaccctcaccctctcggaaatcaggcacatcctggagacccgctacgccgtgcccgggaagagcctggaggagcagaacgaggtcataggcatgcatgcagccatgaagtacatcaacacgactctggtttcgcgcatcggctccgtcaccatcagcgacgtgctggagatccacaggcgggtgctgggctacgtggaccccgtggaagccggcaggtttcggacaacacaggtcctggtcggacaccacatccctccccatccgcaggatgtggaaaagcagatgcaggagtttgtacagtggctcaactccgaggaagccatgaacctgcacccagtggagtttgcagccttagcccattataaactcgtttacatccaccctttcattgatggcaacgggaggacctcccgtctgctcatgaacctcatcctcatgcaggcgggctacccgcccatcaccatccgcaaggagcagcggtccgactactaccacgtgttggaagctgccaacgagggcgacgtgaggcctttcattcgcttcatcgccaagtgtactgagaccaccctggacaccctgctttttgccacaactgagtactcggtggcactgccagaagcccaacccaaccactctgggttcaaggagacgcttcctgtgaagccctaaccctagaaatcctcagtgacaaaggctgtcctgaggtaggaaaaaaaaaaagaaacagcatttctagaaacctagtcacttcctaaagcaaaaggagaaacattctttacctccaaatgttttagttttaaaaaaaaaaaaaaactaagttatgaagccttgtcctaaaataacttataattcaaccaagctatttattttcttctttggagcaagctagtcagtattgtatggtgtctgctgtgtcttgctggtggccgtgctttaggggcaacagtgccaccatgtgaccagaacaaaggttctggagcagaatttgcactaaggtggaggagcggccaagaggtgtgggacggggcccagagccactgacataactcctccaagtgcttctctgaaacaggctgagaggttctgtgactgcaactgggaagtcagacccaagtcgcagctgagagaaatggttgaaagctcactttctcaaggtttagattagtggtgactaacttccaagcaaacttcatagaagagaaaatgaatgccgacattccttacttacctgcaggaagactttttgagccatagtttgcaaactttagtgccagcagctgtttttttttttttttttttcatattgagactatttttctaattaagaatagggggtagccataaagagctgtatgttggagggggaaacatggtgggcgggcagtttggttttctttgtgtatccgcgtttctctcacacttcatttgtagcaactcaggccagatgttttcgtctgaaattctctgggcttgtcattccacctgtatcgtgctgcaaaccaggtgttatgctagtaggcatctgccctcacccctctgcctgagttttctgtaggcagatgttaacctgagaaaacaagtgccatgtggacaccaagtaagcatttttgataatgaattagagcaccagtttctactgaatggagcaaaaaccttcagccatggccaggctgcatccctttggtcctggagtttcatctacttactgccatcttccacggtctttgcactgtcccgtgtcccatccccctgggaggcagaagagattgcctcggagtggccttatttttctcgcaacttgtgaaatgatgtagtgctctatgtaatatggccgggtttccaagctgtcatccaatggaagtagaatcttctctttgaatcatatggtacaggtgccaatatgactgctgctatttagagtcagagaggtggaagtcactgggtccctttcccagtgacagagcccatgatgtctaacactactgcactttgtcagtgtgtgagtgatggcgaatacgcagtgttgtctctttgatttggtaattccgttcctgacagtaatgaggccactgctctaaagtagtttatacagttcttcagttgtataaatagcacagagtagtttttgaaaggttaagaaaaataagtgaaaagacatacacgatatatgaaatggctccaaatgataattgttcaaacctttataaaatgtgttttcgtactcttatgctgccagaggtacttcttaaaactcttctcgtcttggttttataagcacaccacggaggtctgacagatgtgcttgcttctactacagagcaagagaatttgcactttagctatatgtgaaggatattattttaacaaattcctgattctaataaagttattttattacatgaatgcttgagactgtcttatttgggagatgttcccatctgtcataagggcagtgggggtattctgacctttagccctattcataatactgttctgggagagcaacagatccaagatggtgatttccatgggcaagagacccagaagttggataaaccgcctacctaggtgggcaaggatgaattactgatttttttttactaacaaacagtcaagtaactgaagtagtttttcacatttctatttatcatcagttctggattttctggggaaaacacacaaacccactcatgtagtcctggaaatccatttctagaacagtcaacacccggaacctaactgggttctg

SEQ ID NO: 381071 - DNA, 2363 bp, Homo sapiens
gaggccggcggagaaggaggacccgggagccggcggcccggagctgggagcgcggggaaggcggttggggttctgacagctgcgcgcgatcctgctctctctcagccgcctgtggacatgcgcaaagggccctctcctgagtccagatgatgctcataccaatggcttcagtgatggcggtgactgaaccgaaatgggtctcggtctggagccgcttcctctgggtgacgctgctgagcatggtgctggggtccctgctggccctgctgctgccgctgggggctgtggaggagcagtgcttggctgtgctcaaaggcctctacctgctcaggagcaaaccggacagggcgcagcatgccgccaccaagtgcaccagcccgtccacggagctcagcatcacctccaggggcgcgacgctgctggtggccaagaccaaggcctctccagcgggtaagttggaagccagagctgccctgaaccaggccctggagatgaagcgccagggcaagcgggaaaaagcccaaaagctcttcatgcacgccctcaagatggacccggacttcgtggacgcgctcaccgagtttggcatcttctcggaagaagacaaggacatcatccaggcggactacttgtacaccagagcattgaccatctcaccctaccatgagaaagcactggtcaaccgcgatcggacactgcctcttgtggaagagatcgaccagaggtatttcagcatcatcgacagcaaagtgaagaaggtcatgtccatccccaaggggaactcagctctgcgcagggtcatggaggagacctactaccatcacatctaccacacagtggccatcgagggcaacaccctcaccctctcggaaatcaggcacatcctggagacccgctacgccgtgcccgggaagagcctggaggagcagaacgaggtcataggcatgcatgcagccatgaagtacatcaacacgactctggtttcgcgcatcggctccgtcaccatcagcgacgtgctggagatccacaggcgggtgctgggctacgtggaccccgtggaagccggcaggtttcggacaacacaggtcctggtcggacaccacatccctccccatccgcaggatgtggaaaagcagatgcaggagtttgtacagtggctcaactccgaggaagccatgaacctgcacccagtggagtttgcagccttagcccattataaactcgtttacatccaccctttcattgatggcaacgggaggacctcccgtctgctcatgaacctcatcctcatgcaggcgggctacccgcccatcaccatccgcaaggagcagcggtccgactactaccacgtgttggaagctgccaacgagggcgacgtgaggcctttcattcgcttcatcgccaagtgtactgagaccaccctggacaccctgctttttgccacaactgagtactcggtggcactgccagaagcccaacccaaccactctgggttcaaggagacgcttcctgtgaagccctaaccctagaaatcctcagtgacaaaggctgtcctgaggtaggaaaaaaaaaaagaaacagcatttctagaaacctagtcacttcctaaagcaaaaggagaaacattctttacctccaaatgttttagttttaaaaaaaaaaaaaaactaagttatgaagccttgtctctaaagtagtttatacagttcttcagttgtataaatagcacagagtagtttttgaaaggttaagaaaaataagtgaaaagacatacacgatatatgaaatggctccaaatgataattgttcaaacctttataaaatgtgttttcgtactcttatgctgccagaggtacttcttaaaactcttctcgtcttggttttataagcacaccacggaggtctgacagatgtgcttgcttctactacagagcaagagaatttgcactttagctatatgtgaaggatattattttaacaaattcctgattctaataaagttattttattacatgaatgcttgagactgtcttatttgggagatgttcccatctgtcataagggcagtgggggtattctgacctttagccctattcataatactgttctgggagagcaacagatccaagatggtgatttccatgggcaagagacccagaagttggataaaccgcctacctaggtgggcaaggatgaattactgatttttttttactaacaaacagtcaagtaactgaagtagtttttcacatttctatttatcatcagttctggattttctggggaaaacacacaaacccactcatgtagtcctggaaatccatttctagaacagtcaacacccggaacctaactgggttctg

SEQ ID NO: 381072 - DNA, 568 bp, Homo sapiens
gaggccggcggagaaggaggacccgggagccggcggcccggagctgggagcgcggggaaggcggttggggttctgacagctgcgcgcgatcctgctctctctcagccgcctgtggacatgcgcaaagggccctctcctgagtccagatgatgctcataccaatggcttcagtgatggcggtgactgaaccgaaatgggtctcggtctggagccgcttcctctgggtgacgctgctgagcatggtgctggggtccctgctggccctgctgctgccgctgggggctgtggaggagcagtgcttggctgtgctcaaaggcctctacctgctcaggagcaaaccggacagggcgcagcatgccgccaccaagtgcaccagcccgtccacggagctcagcatcacctccaggggcgcgacgctgctggtggccaagaccaaggcctctccagaaacaagatattggaggaaactgggtgaagggagtacacaagacttctctgtactatttctgcaacttcctatgactctataattacttcaaaataaaaaggttttcttttaatgttttaa

SEQ ID NO: 381073 - DNA, 328 bp, Homo sapiens
caacttcaaggcctattggtcagtaaaatcagctaataagagtggagggagtgggggaatgtccagaaaatttaaggaaggaatcaactaatttcaagttggaagggttttacggactcatgatctcacagagtctaaaggaccttaggaacttccttgtccagcctcacaccaaacgcaagacggccatagatcttcaccccttttttgtgaggctctggttaggggtaggaaatcatctagattccttagatcttctctaattctctgagtccatcacatcatcctataatattggatgaggaaatcaggcaatgatctctgattt

SEQ ID NO: 381074 - DNA, 505 bp, Homo sapiens
agttcattagctgacactataccttttatttccaattagtcttctacttcatcaattcatatatcttctctctggctacccaaatgctgccatgcagcagggattctcctctaaacagcagaagagacgtgcctggagaccagagccagtgcctcaacagaaagtcaagtctgtctttccagttctgggcttacagcagattccatatcctctgatcttctgtggcagtctcattctccctcttccttctgtcatagaatctctccaaataagatttaaacatctggaactcccaagctgcgcttcccaaaaggaccccgtgacccatggttaattgtaatacccatccaatagccatctaccacgaagggctgcaaccctactttaactttagacagtttttttgttgtcattgttttttgttagtttgagtcagagtctctctctgtcactccagcataccaacagaggaagacattatatcaaaaaataaaataataaaata

SEQ ID NO: 381075 - DNA, 455 bp, Homo sapiens
ggtggatcacctgaggtcaggagttcaggaccagcctggccaacatggtgaaaccccgtctctactaaaattacaaaaattagctggcccaccattttaaacagagaaccaattccccattttttgtatccatttgctttatcttttttatatcttagaatatcaacctagaagctaggcacagtggctcacacctataatctcagcacttttggaggccaaggcaggaaggattgcttgaggacaggagttcgagaccagtgtgagcaaaatatggagaccttgtctctacaaaaaataaaatagttgtgggtgtggtggtaccagatgtggtggtacacacctgtgtagttccagctacccgacaggctgaggcgggaagagctcttgagcccaggagttcaaggctacagtgagctatgattgcaccactgcactttagcctgggtaacaga

SEQ ID NO: 381076 - DNA, 491 bp, Homo sapiens
cacagggcatcagccacatcaagagacatcccaggatgctccaaagatgtgagtagtccaaacccaaagtaagatagaattactccaggtaaggcttagtttcccaaagtgcacaggatgattccactgagagagatatacaggtctttctagatggtcacaatttttttttttttttgagacagagtctcactctgtgtcacaggctgtagtgcagtggcaggatctcggctcactgcaacctctgcctcccaggctcaagcgattctcctgcctcagcctcctgagtagctgggactataggtctgcaccatcacacccagttaatttttgtgcttttaatgcagatgggatttcgccatgttggccaggctggtctggtactcctgacctcaaagtgatccacctgccttggcttcccaaagtgctgggcttataggcatgagccactgcagatggtcacagattcttgaaccagaaccttagcccta

SEQ ID NO: 381077 - DNA, 835 bp, Homo sapiens
gatcatgccactgcactctagcctgggcgacagagcaagacttcgtctcaaaacaacaacaaaaattatggttatgtcaggtacagtggctcacacctgtaatcccagcactttgggaggccaagatgggaggatcacttgaggctaagagtttgagatcagtctagaaaacatagtgagattccatctctacaaaaagtttaaaaattagctgggtgtggtaggtacatgcctgtagtcccagctacgtgggaggttaaggtgagaggatcacttgagcctaggagtttgaggctgcagtgagatgtgatcacaccactgcactccagcctgggcaacagagcaagaccttgtctcaaaataaataaatgaaagaaaagaaaatttatggttacaaatggttcatcattttagtttgtcacatataaatatcttctattcttttggttcttgtccgctgccagcccccgcattcctggatcaattttacagtctgccttctctgtttctgcctgtgccttaaaaactgagtgctataaagttatggaattgctgcctctctaagctcatgtctctaaattccaatctcatttgagttctctttaccagtcaccatttttttttttaattttacgttggttggttccctttgccttttccttcagcagctgttacagacttctactcatctcagaccccttcctaatctctgtctcattgtcatacaacccaccttggatctgggacaccaaaaagtttaggctttctcttgtgaactctttcaacttccttctgactttctcattacatgtctctgtttgacctcatttttacc

SEQ ID NO: 381078 - DNA, 296 bp, Homo sapiens
gtttcagcactgttgaaaagactcttctttccctgttgaattttcatgacctctttgctgaaaatcaatttaccataaatgttagtgtttatttctggactgtcggttctatgccattgatctacatgactgtccttatgccagcactgtgctgtcttgattattgtagctttggagtaagttttgacatcggaaagagtgagtcctccaacgatgtttgtcattttcaagattattttggctgttctgggtttatgatctgcttgtcaattactgaaaaaaaaaaggctaggctt

SEQ ID NO: 381079 - DNA, 427 bp, Homo sapiens
gtgctaggcagtgaacacagggtatgaacttgaaaatctgattgcaccctcaatatctggaatatacactgatctatgacctgaaattgtatggactgcagcaatccaaggggacactaagcagggtttgagtaatgctacaatggatttataggtcattttggagaaggtgttccacatcattagggagtctgggtttcccagatgtgcctgttttatcctttttattttaaataacatcactgtctttcctaactaaaaattcttcatcttcaggaaataagattgagatacggactgaaaatataaaattagcaataatgtttattattagatacttcctcaattaaatttctccctgaaagtcttagggcaaaagcccctgtctcttacttcatatatcaagtttggagggaaagacataatt

SEQ ID NO: 381080 - DNA, 770 bp, Homo sapiens
tatattaatgccagatatagtatatttcagaacaaataaactaatcagagacagagagggagactatataatgtgcaaaggaccaatccaccaactcctcgcctgacaaattcataaatgtctacgcaagaacaactgaaagtacttaacagagaactagacaaatccacaaatacagctgtatgcttcaatgtccccctttctcaacaatttatacaacaaccagatagaaaatcagcaagaatacagaagaacccaacaacacgatcaaccagcgggacttaaattggcaattttagaacacccaaccacaccagaatacacattgttatgggatgcattgtgcccagcccccccaaattcatatgttgaaatcagaacattattagccactagtgatttactaattaaaacaatgagaaattgctacgtacctatcagaatggccaacataaaagtgtgaccacatcaagtgctgtcaaggattcagagaaagctggatcactcatacattgctggtggggatgtaaaagattacagcccactctggagaatatctgtataatttttacttttaaaactctatgtgcaactaccataccacctcggaattacattccctgcatttatcacagagaaatagaatcttatgttcacacaaaacccatgtacttcaagtttatagcagccttgtttttaatagccaaaactggggaaacaatgtatacacgacttttgtgagatgaatggttaaactgtggtatatatcc

SEQ ID NO: 381081 - DNA, 400 bp, Homo sapiens
tgaccagggcacgtcacttgacctctctgatcctcagttccctcatctgtaaggtgctcataacaatggttctaagggtcctggtctcagaaggtgttgggaagatggggcaaaataacccccagaaggcacttagcacagtgcctggcaacttaaaaatgatcagtttctattattgctatttccaaagtcgggcaaatttgcagtgatctctgagggagaaataggggtaaggtggggcaagagacagcacatgcaaaggccctggggtgggatgttggaactgaaagtgaagagtatggcataaggcaggaccagagatggggactggggcctgagagccaggagaagtcagcgttgggggatggacggatcctctgtgacttctcctggccacctt

SEQ ID NO: 381082 - DNA, 428 bp, Homo sapiens
actctccttgaccccagagtccactctgggatggaagaacttgaaggtggggcaggatgcaggggtgtgggcgcaagggacacccaagaaacagccaggtgatggctctcagcggccacacgcagaaactgatgacaaagaatcggtttaaaaataagaaggccaggggcaggggctcacgcctgtgaccccagcactgtgggaggccaaggtgggtgatcacttggggctagatgttcaggatgagcctgaacatagcgagaccccatctctacaaaaaatttaaaaatcagccaggcgtggtggtgcacacccagctacttagaggctgaggcaggaggattccttgagcacaggagatcgaggctgcagtgagcccagactgcaccactgtactccagccagggacagagtgagaccctgtctca

SEQ ID NO: 381083 - DNA, 407 bp, Homo sapiens
tctagaatacgcctcataatattaaaatattttgtgtatgagatcagagctggagtcccggtcaactgtggagaatggccaattccagcctccaaaataaaggcgggggtggcggtgttggggggggggaggggagtcgcgcagcagagaaaagacgtaagggtggagagggactttcaaaatgccccagtgccacggttaactataacctggttaataaaatctaagccaatgctctcaagacgaggagggccacaggcaggggaaaccgagaattaactcataggctgagactaagttattccactttccatgtaacagcgccccccacaactccccgtctgccccagagttaagattccaaggggcagccccccctcctcaaacacactaaagaagggacacca

SEQ ID NO: 381084 - DNA, 1123 bp, Homo sapiens
caacggggtttcggggctgtggaccctgtgccaggaaaggaagggcgcactcctgcaatgcggaagcacagggcagtgggcaccaggctttagctccctttctcaccctacagagggcaggcccttcagctccattctcctccaaggctgcagagggggcaggaattgggggtgacaggagagctgtaaggtctccagtgggtcattctgggcccagagatgggtgctgaagctcccacgcctgcctgtgaaaatggagtcctctctcacctgggagagccaggtgctgccccgagaaggatgcatttatggcttcgtgaagtctttcctgacccccgatgctgcttgactatagagacaaagtctcactatgttgctcaggctggtcttgaactcctggcctcaagcgatcctcccacctcagcctcccaaagtgttgggattatagacatgagccactgcacctggccgaccttgggcaagttcttaaacccttcaaagcctcatttttctccaatcacaaaagggaaagatggtaatattttccccaccaaattcttgtcggatgccctcacagaattgagattatgtacgtaaaacaccaggtgcctaacccggcacagagcaggagggctaagcgtgacatccaggcacgtggtcagtggaatccagtattcctacccacctctctagtctcccctccacccctctccctttcagaggcaccaagctgcttgtggtcttgtctattcccactccctgcctgactgaacattttctccacctcctgatcatcagcagcagaaactggctgctcttcctcctgggtagacagccagactgtatttcccagctgcccctgcagtgagatgtggccatcggagccagcattggccaatggactctgcatgggagtgacgcatgctgcctccaggcttgtccctaaaacctcccacgtgtcctccgcctgctcttcccacctccaaggagcacggcaattgtggaagacccagattagtgatggcagaaccatagatgggaggaacctgggtccctgacttaaagtatcatggatttggatgttcccttagtgagaaataaacttccattgtgtttaagcctt

SEQ ID NO: 381085 - DNA, 386 bp, Homo sapiens
acctggggcaaacaggtgaacttctccaaacctcaatctcctgttctgtgaagtggaggtggggaggggacttccggaacactgttgacttgactggctcgcaatcacagcgagtgttcacaacgtgctccccgtgtcccaggcacacttccgagtgcttgattaccttacgagtggctgcagccgtgtgctggcccacaagagccaactgttaaatgttctgaaatgtggtgaatggttgttaaaacacaggtagcttgaaatcagccataaggaaaatatttggacgacaggaattggcagatatgacacattaggacttgttgctgttgttgttgttgttttgagacccagcctgggcaacagggcgagactcagactcaaaa

SEQ ID NO: 381086 - DNA, 373 bp, Homo sapiens
ggactaaacaatggaaatggatttgaacaaaattgtgctggtttaggccgaaggaaagagaaaacagcattcacttgtaattctagtataaatgtgagaacaggtcagcagaagtggtgggtgaatctgtatcactagagatccttagtagcttaaatagacaactgctagttttaaattgcttaaggttcctctttttctggtcagcagcctggactaagtaacatttgaaatatattttcagttctgtagttatgtaaataattggacttttctgaaagccttttaacgtgcaaatctcccaagtcctgagttggaaaaagcccaaaacaaatactctcccctccccctacaaaacctaatttctgccaaa

SEQ ID NO: 381087 - DNA, 1633 bp, Homo sapiens
gggtatattttatttgcctatggccagacatttaggaaggcaaactggagcaagaggaaaagcaggaaaaaatagactgataaccaaaatgtaaaatatttctgtgttgatcatcagggaagtgaataacacaggccacaaagacccctttttttcccacagaacttttcaacagatggttatactagttgtttcagaattaataccaaggattgagggttggaggcatgcaacttagaagcagtgctggtgtgaaagtgataaggtttttggctccaagtaacacctcccaatttgtacagcaaccacaatagaaatgtgcttcaggcaaggtggcgtcctacattttaacttacccccaagaaaatatcctgaatttcacaggtgttctcagtaatatgacctgactgaaaatagcttctcttctgtatttttccccaggttaaaattaagctcggcaggctcgacgtaaatgtgcagacaaagcaaagcaggaagcctcccacactaaaaagggaagataagaatcacagaagctgggatggtttttattgaagggcatttcaaagcaaatacagacatctacagcatatttgtaaatcctccgtatgtgtatggaaacacacaccttcacacatcaaaactggatttgttcctgagtaacaaaacgtcctaagaacaaaatgaaagaaaaccaaatagcagaaaaatacttccaatgtatataccacaaaggattatttatcaactcaacacaccaagagttaagaaaataatgcaacaggaacaaagggcaaaggatatgtactgggaagaccacagagaaagaaaatgcaaatggctaataatataaaatatttcctaggttcaatagtaatcagggaaagacaaaattacacttttgacctcttagactggcagtgacaaagattatttgagtgaccaagctttagtcaggctcctggatcttctaggcccatctgggcacttcctcgtaaaatacagttttaacaaaagccctgctaaattggtttaccgagaactcccaccctcaatcgagttccttagcccttcacctttcctcaggtgagggctgatcatcctgtcctgtcttcagcaagactgctctaacgctgacgtttccttttagtaattttccatccactgacacccacttgtaatttatagccaaggagcaagatacactgctccttggctataagttattttccctgttacattcagagttgagcccaatcccactccccgactacaaaatcgatagcagtggtccctatacctattgcaatggtcctaaataaaacctgccttaccgtgcttgaacaagtgtcatcgaataattttttaacagcaaattgttggaggtaaagacatttttaaatgtcttcaattagtttagctacttccacgtaatgttaaaatctccatcaattggctagttactgtcccttcctgagaagaagcagacaccatagccctgcatactgtggattcactcctaagttgatattgatatgaatgaaatagttatctcccaaactttgctttctacatttgtatcaaaaaacatgatgcccctctgcccagcgcccccgccactggatccccagtc

SEQ ID NO: 381088 - DNA, 1579 bp, Homo sapiens
gggtatattttatttgcctatggccagacatttaggaaggcaaactggagcaagaggaaaagcaggaaaaaatagactgataaccaaaatgtaaaatatttctgtgttgatcatcagggaagtgaataacacaggccacaaagacccctttttttcccacagaacttttcaacagatggttatactagttgtttcagaattaataccaaggattgagggttggaggcatgcaacttagaagcagtgctggtgtgaaagtgataaggtttttggctccaagtaacacctcccaatttgtacagcaaccacaatagaaatgtgcttcaggcaaggtggcgtcctacattttaacttacccccaagaaaatatcctgaatttcacaggtgttctcagtaatatgacctgactgaaaatagcttctcttctgtatttttccccaggttaaaattaagctcggcaggctcgacgtaaatgtgcagacaaagcaaagcaggaagcctcccacactaaaaagggaagataagaatcacagaagctgggatggtttttattgaagggcatttcaaagcaaatacagacatctacagcatatttgtaaatcctccgtatgtgtatggaaacacacaccttcacacatcaaaactggatttgttcctgagtaacaaaacgtcctaagaacaaaatgaaagaaaaccaaatagcagaaaaatacttccaatgtatataccacaaaggattatttatcaactcaacacaccaagagttaagaaaataatgcaacaggaacaaagggcaaaggatatgtactgggaagaccacagagaaagaaaatgcaaatggctaataatgacctcttagactggcagtgacaaagattatttgagtgaccaagctttagtcaggctcctggatcttctaggcccatctgggcacttcctcgtaaaatacagttttaacaaaagccctgctaaattggtttaccgagaactcccaccctcaatcgagttccttagcccttcacctttcctcaggtgagggctgatcatcctgtcctgtcttcagcaagactgctctaacgctgacgtttccttttagtaattttccatccactgacacccacttgtaatttatagccaaggagcaagatacactgctccttggctataagttattttccctgttacattcagagttgagcccaatcccactccccgactacaaaatcgatagcagtggtccctatacctattgcaatggtcctaaataaaacctgccttaccgtgcttgaacaagtgtcatcgaataattttttaacagcaaattgttggaggtaaagacatttttaaatgtcttcaattagtttagctacttccacgtaatgttaaaatctccatcaattggctagttactgtcccttcctgagaagaagcagacaccatagccctgcatactgtggattcactcctaagttgatattgatatgaatgaaatagttatctcccaaactttgctttctacatttgtatcaaaaaacatgatgcccctctgcccagcgcccccgccactggatccccagtc

SEQ ID NO: 381089 - DNA, 495 bp, Homo sapiens
tgaacttggaggacatcatgctatttgaaatcagtcagggacagaaagacaaatattgcatgatctcacttatatgtggaatattaaaaggttgaactcatagaagaggagagtgggcctaggttgccagcagctgaagggtggtgggaggcactgggggagatgttggttaaaggatacaaagtttcttttagactggatgaataaattctagagatctaatgtaagtctagttacattagagtatagttaataatgtaatgtatacttaaaaactgcagagattagatctcaaacgttctcaccacacacacaaaaaagatatgtgaggtaatggctatgttaattttgtttgatttaatcatttgacaatgtatacctatatcaaaacgtattgtattctgtaaatatatataattttaattgattaattatgccttaataaagctgaacaaaatatataaactagtaaaacaatttacttaccataattca

SEQ ID NO: 381090 - DNA, 508 bp, Homo sapiens
gtctttttaccatgcttgtgtgagatcattattccatggacgcttatggcattagactgaattgattttatagagaaaaagaactcaagattgcataagcccatattagcagcaaattcctaatatctaagtttctttctgtcttaaaatagatgaatttttccatttcgatgaaaggttttggatgaaaagattttgcagtctttatagagcagcaatcactgagtgctacaaaatattttattacatttttttgccttgaattttgcattatgggtaaagaactgtgtgacttaaaatagcttaccaatcttttaggaagttagaaaatatttcattgttgttgatttagagactgagtcttgttctgttgcccagtttggaatgcagtggtatgatcatggctcactgtagcctcaagttcctgggctcaggagatccctcctgcttcagcctctcctgtagctgggactataggcacttgccaacatgactggctaattaaaaa

SEQ ID NO: 381091 - DNA, 440 bp, Homo sapiens
cttcttgttaaaccccccaggtctttacaccattgttaacaacaatcactgagtctcattgaacactcactgtagtccaggtactgtgaggaaggctttctttttgtgctttaaattattttttcccatttatgattgacagaaaggttatgcgtcttgcctgaggtcacacagctagtgtatggccaacagaactgcaatcctggaggggtgtgattccaaagacagagtttctcattactgtttggcatcatttctacttatggtgattttcactgttttaacagtttagaatcccttatgtcactttcataataaaagggagaaaagggcaaatactttgtcacagaaagaagattcattaaagggatatttttaagccactgttttcacaagaaaaccaaatgctagaaaaggtacaatgctaaaaagaaactgta

SEQ ID NO: 381092 - DNA, 528 bp, Homo sapiens
tgatcgtctggcctcagcctcccaaagtgctgggattacaggcatgagccaccatgcccagccctttccagcttctttaaataactgctgtggaatacactttcctttgaaaatctaaatacatagccactaataaaatgtacttaggtttttatttgtttctgactcataaactatatcagcctttaaaattgcatataataagcagacacattttctttatttttctttcattattttatttaacaattataaggttgctggatttttaaaaatctccagaattgtattgtgcttataatagaaagaatgatgaaaacgtgtcctttatctatagttctgtgaggctatattaacaaaagcatgctttacttttcagtttttagagataatattatatttcattacatttttacatcactcactttcctgatatgttttatatgatttcctttataaatttttatgacgttgtttctactaatagaattttcttttacacattaaaattcttcctttttctgaagc

SEQ ID NO: 381093 - DNA, 507 bp, Homo sapiens
tggtgtgatcttggttcactgaaacctcaacttctgtggctcaagccatcctcccacttcagcctcctgagtagctgggactacagatacatgctaccatgcccagctaattttttaaaattttttgaagagacagagtctcgccatgttgcctgggctggcctcaaactctccggctcaagcaatccttccacctcggcttccccaaatgttgagattacaggtgtgagccaccgaacatggccagcaggcagcttataatcagccaattctaggccatgttgtaaggaagtggacctgtctttgacagcagggtcctggcacccaagtggacacaggtggtggtcctgtaacagtggcttgattacgctgttttgtgtgtctaatctgaacatagggaagtataagatgtgtaagcagctttatcaaagagttataacaagttttactttccagatatgaaatgctgaatttgtataaataaattaaaccttaatagcacagtca

SEQ ID NO: 381094 - DNA, 502 bp, Homo sapiens
cggctttcaccctttccccgcaccccacacactcctcctttcccattacagagcaacacactctccctagaatatatgcactccctttagctgttttctcagctctacatggcaaactcctactcatctgccaagccccacattaaacctcctcttccaggaagcgttcccagactacccctgtcacagtcagtcatttgcttttctatcctcctgcagaccagtgtacctacctctctcatagctcttaagatattaatgataataagggctaaatgtttactgatcacttatcagaatgctagacagccttctacactttacaaaggttaccttatttaactctcatggtaactccatgaagtagctactcttattatcctcattttacagagaatgctactgaggaccagagatattaagtaacttgcccaaggctacagagctattacatagctagacaaatgcctgacacatagtagctgctcaataactattcacc

SEQ ID NO: 381095 - DNA, 660 bp, Homo sapiens
atattcacctatgtctgctccttgccacaggaaccctggcctctcagtatgacaccttttcactgacagagttcttttaatttgcacccaaacaggtatagcatactcaagatactagggcaaggggctcaagaggggttctcaaatcactcttacagtctgcctgaaaccagcacccccaccgtcattacctagattcaagtgtttcattgggtttaatactctcatatgcataatttctaggtagtgtgaccatataaaaatcccaaaaaggatatttttgaggatgaaatggagcaggaaaagtagtaaaaatcatataatttctttgaaatatgtatattggacttacaatttaatatcattatctcattggctgttcaatgaactttattcattgctgaaaatataaaaatattcttgccgaaatatagaactaacatttgttattaaagcaaaataaaaaatgtctttatatgaattattcgtaccttaaaaaataaatgggataattatttttggttcacatacacattcttaatcattttcttagcctgtacctgtttctaacactgtgtcactggcaattttctgaagaatatattttgcaatgttgtgctgttttacattttttaataaaattgcttgcagttttcttca

SEQ ID NO: 381096 - DNA, 276 bp, Homo sapiens
gtacaaagaaacccatctattggaattttaaacattcagattttattctaatccttaattatcaaaacatttttcttccaaacagtggttatcttacatgattctggaaataaggattaaaatttttctttctcagaaaaaacttcctgaaattaaaatttagaaaatttttgactatattttaaaaacatattcctcttatatgataagaaatggtcaaatcctacatgtgatacaacaaagttcagttcaagaaagatgtgtaaaatataataa

SEQ ID NO: 381097 - DNA, 761 bp, Homo sapiens
atgagctgccacgcccggccaattcagcaaatttatgtgggattccacctagaactccaaaccaaggtgctctgaatatgtattggtagtataaacagaatccacagccctatcctggattataagctcgttagggaggtagcaaaatacatgacactgacctaagaacacatgaaaagcaaagaaacatgaatgcaaagtcatgtcatataagctgtttaaatcctgagtaagatgaatttaatttgcatctatcctactgacctataatccgtgactcacttgtctctctcctccagtagacatgactaggcatgacccatatagtactgaactttgtattcccagcaccttaccaaagtaggtgctgggaatacaaagaggagacaccccacaaatgttaaataaaacacttaatgaatggttctaggtaggtggggttgatcaaggaattatcttacaagtggtatgggttttttggttttttctgaggtgcagtctcaccatgttgcccaggtgattctcctgactcagcctcccaagtagctgggattacaggcactaatttttgtattttagtagagacagagtttcaccatgttggccaggtgggtctcgagctcctggcctcaggtggtccacctgcctctgcctcccaaagtgctgggattacaggtgtgagccaccgcgcccaacctagtctttttatagaacagttatctctgtagccaaacttacatcatattatttaattttccttg

SEQ ID NO: 381098 - DNA, 646 bp, Homo sapiens
gaattattatcatttcctctttcacttagaaaatacattgtcgaatgcagcattcagcatttgttgtactttcatgaggcaaaacatatggtctgtttttattttttaagcaacagaacaacacagatgacttcaacagactgctagttggctaaaatataaaatcccgtatgcttctgtatgtcaattcatatctgtgaattttctagctatattttaaatggtaataaatgattaaataattatcttcagaaaccatgttaggagattagaacccaaaggtataaaatatctttttctttttttctgtatggtttcacttttctaatacaaaatcaggccactgtaccttgccatttagagaggtcacatttacaactttgcctatttataagcaaccctgaaggacaacagctaatttgaatggatgtgctgactgcttgtgttgcatgggaggaagccatgcataccccacacctacctcccagaatcccctcagggaggctccgctggtatctctgtcacagattcagtgaccttcccctccagtggagtacagattgatttttctatttcattataatttcatgtttaaaatataggttaagttcacatcaatattcctatgacaatgacagagtcaaga

SEQ ID NO: 381099 - DNA, 3988 bp, Homo sapiens
ccgccacttgattctggaggatttgttctggggctgcggccgcggagtcggggcggccgcgggcgagcttcggggcgggagccgcgccgtctccgcctgcccggcgccctgacggccgctgttatgcgtattcccgtagacccaagcaccagccgccgcttcacacctccctccccggccttcccctgcggcggcggcggcggcaagatgggcgagaacagcggcgcgctgagcgcgcaggcggccgtggggcccggagggcgcgcccggcccgaggtgcgctcgatggtggacgtgctggcggaccacgcaggcgagctcgtgcgcaccgacagccccaacttcctctgctccgtgctgccctcgcactggcgctgcaacaagacgctgcccgtcgccttcaaggtggtggcattgggggacgtgccggatggtacggtggtgactgtgatggcaggcaatgacgagaactactccgctgagctgcgcaatgcctcggccgtcatgaagaaccaggtggccaggttcaacgaccttcgcttcgtgggccgcagtgggcgagggaagagtttcaccctgaccatcactgtgttcaccaaccccacccaagtggcgacctaccaccgagccatcaaggtgaccgtggacggaccccgggagcccagacggcaccggcagaagctggaggaccagaccaagccgttccctgaccgctttggggacctggaacggctgcgcatgcgggtgacaccgagcacacccagcccccgaggctcactcagcaccacaagccacttcagcagccagccccagaccccaatccaaggcacctcggaactgaacccattctccgacccccgccagtttgaccgctccttccccacgctgccaaccctcacggagagccgcttcccagaccccaggatgcattatcccggggccatgtcagctgccttcccctacagcgccacgccctcgggcacgagcatcagcagcctcagcgtggcgggcatgccggccaccagccgcttccaccatacctacctcccgccaccctacccgggggccccgcagaaccagagcgggcccttccaggccaacccgtccccctaccacctctactacgggacatcctctggctcctaccagttctccatggtggccggcagcagcagtgggggcgaccgctcacctacccgcatgctggcctcttgcaccagcagcgctgcctctgtcgccgccggcaacctcatgaaccccagcctgggcggccagagtgatggcgtggaggccgacggcagccacagcaactcacccacggccctgagcacgccaggccgcatggatgaggccgtgtggcggccctactgaccgccctggtggactcctcccgctggaggcggggaccctaacaaccttcaagaccagtgatgggccggctccgaggctccgggcgggaatgggacctgcgctccagggtggtctcggtcccagggtggtcccagctggtgggagcctctggctgcatctgtgcagccacatccttgtacagaggcataggttaccacccccaccccggcccgggatactgcccccggcccagatcctggccgtctcatcccatacttctgtggggaatcagcctcctgccacccccccggaaggacctcactgtctccagctatgcccagtgctgcatgggacccatgtctcctgggacagaggccatctctcttccagagagaggcagcattggcccacaggataagcctcaggccctgggaaacctcccgacccctgcaccttcgttggagcccctgcatcccctgggtccagccccctctgcatttacacagatttgagtcagaactggaaagtgtcccccacccccaccaccctcgagcggggttcccctcattgtacagatggggcaggacccagcacgctgctggcagagatggtttgagaacacatccaagccagtccccccagcccagcttcccctccgttcctaactgttggctttcccccagccgcacgggtcccaggccccagagaagatgagtctatggcatcaggttcttaaacccaggaaagcacctacagaccggctcctccatgcactttaccagctcaacgcatccactctctgttctcttggcagggcgggggaggggggataggaggtcccctttcccctaggtggtctcataattccatttgtggagagaacaggagggccagatagataggtcctagcagaaggcattgaggtgagggatcattttgggtcagacatcaatgtccctgtcccccctgggtccagccaagctgtgccccatcccccaagcctcctgggaggatccagccaaatcttgcgactcctggcacacacctgtctgtaacctgttttgtgctctgaaagcaaatagtcctgagcaaaaaaaaaaaaaaaaaacaaaaaaacaaaaaaaaaacaaaacagtttttaaaactgattttagaaaaagaagcttaatctaacgttttcaaacacaaggtctcttacaggtatagttccgtgattatgatagctctgtgattataagcaacatccccgccccctctcccccccgcggacccccagctgcctcctgagggtgtggggttattagggtctcaatactttctcaaggggctacactccccatcaggcagcatcccaccagcctgcaccacaggctcccctgggaggacgagggaaacgctgatgagacgctgggcatctctcctctgtggctctaggacatctgtccaggaggctgggccggaggtgggcaggatgtgagaggtggggagtactggctgtgcgtggcaggacagaagcactgtaaagggctctccagccgcagctcagctgcactgcgttccgaggtgaagtcttgcccctgaattttgcaaaatgggaaagtgggcgcttgcccaagggccaggctgcatggattctcacatcagagttctctggccctagaaaggcttagaaaaggcgtaagggaactcataaaggctagcagcatgcggtattttaactttctgcctcggcctctgtggatgcagaaatctgccctacaaaatgctcttcattggttgtctctgtgagagcactgtccccacccaacctgtcacaacggccagaaccatacaccagagacacactggcaggttaggcagtccttctggtgatcctattccattccctcctgctgcggtttctcttggcctgtcctcactggaaaaacagtctccatctcctcaaaatagttgctgactccctgcacccaaggggcctctccatgccttcttaggaagcagctatgaatccattgtccttgtagtttcttccctcctgttctctggttatagctggtcccaggtcagcgtgggaggcacctttgggttcccagtgcccagcactttgtagtctcatcccagattactaacccttcctgatcctggagaggcagggatagtaaataaattgctcttcctaccccatcccccatcccctgacaaaaagtgacggcagccgtactgagtctgtaaggcccaaagtgggtacagacagcctgggctggtaaaagtaggtccttatttacaaggctgcgttaaagttgtactaggcaaacacactgatgtaggaagcacgaggaaaggaagacgttttgatatagtgttactgtgagcctgtcagtagtgggtaccaatcttttgtgacatattgtcatgctgaggtgtgacacctgctgcactcatctgatgtaaaaccatcccagagctggcgagaggatggagctgggtggaaactgctttgcactatcgtttgcttggtgtttgtttttaacgcacaacttgcttgtacagtaaactgtcttctgtactatttaactgtaaaatggaattttgactgatttgttacaataatataactctgagatgtgaggaaggaaac

SEQ ID NO: 381100 - DNA, 4017 bp, Homo sapiens
ggcccttgccgcctccagggccctgcgcgggagctggttggctcctggtgctccccacccccggccgccctcgtacccaccagagcctgggctctgtcaaggagcggggcatggcatcgaacagcatcttcgactccttcccgacctactcgccgaccttcatccgcgacccaagcaccagccgccgcttcacacctccctccccggccttcccctgcggcggcggcggcggcaagatgggcgagaacagcggcgcgctgagcgcgcaggcggccgtggggcccggagggcgcgcccggcccgaggtgcgctcgatggtggacgtgctggcggaccacgcaggcgagctcgtgcgcaccgacagccccaacttcctctgctccgtgctgccctcgcactggcgctgcaacaagacgctgcccgtcgccttcaaggtggtggcattgggggacgtgccggatggtacggtggtgactgtgatggcaggcaatgacgagaactactccgctgagctgcgcaatgcctcggccgtcatgaagaaccaggtggccaggttcaacgaccttcgcttcgtgggccgcagtgggcgagggaagagtttcaccctgaccatcactgtgttcaccaaccccacccaagtggcgacctaccaccgagccatcaaggtgaccgtggacggaccccgggagcccagacggcaccggcagaagctggaggaccagaccaagccgttccctgaccgctttggggacctggaacggctgcgcatgcgggtgacaccgagcacacccagcccccgaggctcactcagcaccacaagccacttcagcagccagccccagaccccaatccaaggcacctcggaactgaacccattctccgacccccgccagtttgaccgctccttccccacgctgccaaccctcacggagagccgcttcccagaccccaggatgcattatcccggggccatgtcagctgccttcccctacagcgccacgccctcgggcacgagcatcagcagcctcagcgtggcgggcatgccggccaccagccgcttccaccatacctacctcccgccaccctacccgggggccccgcagaaccagagcgggcccttccaggccaacccgtccccctaccacctctactacgggacatcctctggctcctaccagttctccatggtggccggcagcagcagtgggggcgaccgctcacctacccgcatgctggcctcttgcaccagcagcgctgcctctgtcgccgccggcaacctcatgaaccccagcctgggcggccagagtgatggcgtggaggccgacggcagccacagcaactcacccacggccctgagcacgccaggccgcatggatgaggccgtgtggcggccctactgaccgccctggtggactcctcccgctggaggcggggaccctaacaaccttcaagaccagtgatgggccggctccgaggctccgggcgggaatgggacctgcgctccagggtggtctcggtcccagggtggtcccagctggtgggagcctctggctgcatctgtgcagccacatccttgtacagaggcataggttaccacccccaccccggcccgggatactgcccccggcccagatcctggccgtctcatcccatacttctgtggggaatcagcctcctgccacccccccggaaggacctcactgtctccagctatgcccagtgctgcatgggacccatgtctcctgggacagaggccatctctcttccagagagaggcagcattggcccacaggataagcctcaggccctgggaaacctcccgacccctgcaccttcgttggagcccctgcatcccctgggtccagccccctctgcatttacacagatttgagtcagaactggaaagtgtcccccacccccaccaccctcgagcggggttcccctcattgtacagatggggcaggacccagcacgctgctggcagagatggtttgagaacacatccaagccagtccccccagcccagcttcccctccgttcctaactgttggctttcccccagccgcacgggtcccaggccccagagaagatgagtctatggcatcaggttcttaaacccaggaaagcacctacagaccggctcctccatgcactttaccagctcaacgcatccactctctgttctcttggcagggcgggggaggggggataggaggtcccctttcccctaggtggtctcataattccatttgtggagagaacaggagggccagatagataggtcctagcagaaggcattgaggtgagggatcattttgggtcagacatcaatgtccctgtcccccctgggtccagccaagctgtgccccatcccccaagcctcctgggaggatccagccaaatcttgcgactcctggcacacacctgtctgtaacctgttttgtgctctgaaagcaaatagtcctgagcaaaaaaaaaaaaaaaaaacaaaaaaacaaaaaaaaaacaaaacagtttttaaaactgattttagaaaaagaagcttaatctaacgttttcaaacacaaggtctcttacaggtatagttccgtgattatgatagctctgtgattataagcaacatccccgccccctctcccccccgcggacccccagctgcctcctgagggtgtggggttattagggtctcaatactttctcaaggggctacactccccatcaggcagcatcccaccagcctgcaccacaggctcccctgggaggacgagggaaacgctgatgagacgctgggcatctctcctctgtggctctaggacatctgtccaggaggctgggccggaggtgggcaggatgtgagaggtggggagtactggctgtgcgtggcaggacagaagcactgtaaagggctctccagccgcagctcagctgcactgcgttccgaggtgaagtcttgcccctgaattttgcaaaatgggaaagtgggcgcttgcccaagggccaggctgcatggattctcacatcagagttctctggccctagaaaggcttagaaaaggcgtaagggaactcataaaggctagcagcatgcggtattttaactttctgcctcggcctctgtggatgcagaaatctgccctacaaaatgctcttcattggttgtctctgtgagagcactgtccccacccaacctgtcacaacggccagaaccatacaccagagacacactggcaggttaggcagtccttctggtgatcctattccattccctcctgctgcggtttctcttggcctgtcctcactggaaaaacagtctccatctcctcaaaatagttgctgactccctgcacccaaggggcctctccatgccttcttaggaagcagctatgaatccattgtccttgtagtttcttccctcctgttctctggttatagctggtcccaggtcagcgtgggaggcacctttgggttcccagtgcccagcactttgtagtctcatcccagattactaacccttcctgatcctggagaggcagggatagtaaataaattgctcttcctaccccatcccccatcccctgacaaaaagtgacggcagccgtactgagtctgtaaggcccaaagtgggtacagacagcctgggctggtaaaagtaggtccttatttacaaggctgcgttaaagttgtactaggcaaacacactgatgtaggaagcacgaggaaaggaagacgttttgatatagtgttactgtgagcctgtcagtagtgggtaccaatcttttgtgacatattgtcatgctgaggtgtgacacctgctgcactcatctgatgtaaaaccatcccagagctggcgagaggatggagctgggtggaaactgctttgcactatcgtttgcttggtgtttgtttttaacgcacaacttgcttgtacagtaaactgtcttctgtactatttaactgtaaaatggaattttgactgatttgttacaataatataactctgagatgtgaggaaggaaac

SEQ ID NO: 381101 - DNA, 3217 bp, Homo sapiens
taggctggtacgcctcggagtaacgggatcgtggacggaccccgggagcccagacgcacctcggaactgaacccattctccgacccccgccagtttgaccgctccttccccacgctgccaaccctcacggagagccgcttcccagaccccaggatgcattatcccggggccatgtcagctgccttcccctacagcgccacgccctcgggcacgagcatcagcagcctcagcgtggcgggcatgccggccaccagccgcttccaccatacctacctcccgccaccctacccgggggccccgcagaaccagagcgggcccttccaggccaacccgtccccctaccacctctactacgggacatcctctggctcctaccagttctccatggtggccggcagcagcagtgggggcgaccgctcacctacccgcatgctggcctcttgcaccagcagcgctgcctctgtcgccgccggcaacctcatgaaccccagcctgggcggccagagtgatggcgtggaggccgacggcagccacagcaactcacccacggccctgagcacgccaggccgcatggatgaggccgtgtggcggccctactgaccgccctggtggactcctcccgctggaggcggggaccctaacaaccttcaagaccagtgatgggccggctccgaggctccgggcgggaatgggacctgcgctccagggtggtctcggtcccagggtggtcccagctggtgggagcctctggctgcatctgtgcagccacatccttgtacagaggcataggttaccacccccaccccggcccgggatactgcccccggcccagatcctggccgtctcatcccatacttctgtggggaatcagcctcctgccacccccccggaaggacctcactgtctccagctatgcccagtgctgcatgggacccatgtctcctgggacagaggccatctctcttccagagagaggcagcattggcccacaggataagcctcaggccctgggaaacctcccgacccctgcaccttcgttggagcccctgcatcccctgggtccagccccctctgcatttacacagatttgagtcagaactggaaagtgtcccccacccccaccaccctcgagcggggttcccctcattgtacagatggggcaggacccagcacgctgctggcagagatggtttgagaacacatccaagccagtccccccagcccagcttcccctccgttcctaactgttggctttcccccagccgcacgggtcccaggccccagagaagatgagtctatggcatcaggttcttaaacccaggaaagcacctacagaccggctcctccatgcactttaccagctcaacgcatccactctctgttctcttggcagggcgggggaggggggataggaggtcccctttcccctaggtggtctcataattccatttgtggagagaacaggagggccagatagataggtcctagcagaaggcattgaggtgagggatcattttgggtcagacatcaatgtccctgtcccccctgggtccagccaagctgtgccccatcccccaagcctcctgggaggatccagccaaatcttgcgactcctggcacacacctgtctgtaacctgttttgtgctctgaaagcaaatagtcctgagcaaaaaaaaaaaaaaaaaacaaaaaaacaaaaaaaaaacaaaacagtttttaaaactgattttagaaaaagaagcttaatctaacgttttcaaacacaaggtctcttacaggtatagttccgtgattatgatagctctgtgattataagcaacatccccgccccctctcccccccgcggacccccagctgcctcctgagggtgtggggttattagggtctcaatactttctcaaggggctacactccccatcaggcagcatcccaccagcctgcaccacaggctcccctgggaggacgagggaaacgctgatgagacgctgggcatctctcctctgtggctctaggacatctgtccaggaggctgggccggaggtgggcaggatgtgagaggtggggagtactggctgtgcgtggcaggacagaagcactgtaaagggctctccagccgcagctcagctgcactgcgttccgaggtgaagtcttgcccctgaattttgcaaaatgggaaagtgggcgcttgcccaagggccaggctgcatggattctcacatcagagttctctggccctagaaaggcttagaaaaggcgtaagggaactcataaaggctagcagcatgcggtattttaactttctgcctcggcctctgtggatgcagaaatctgccctacaaaatgctcttcattggttgtctctgtgagagcactgtccccacccaacctgtcacaacggccagaaccatacaccagagacacactggcaggttaggcagtccttctggtgatcctattccattccctcctgctgcggtttctcttggcctgtcctcactggaaaaacagtctccatctcctcaaaatagttgctgactccctgcacccaaggggcctctccatgccttcttaggaagcagctatgaatccattgtccttgtagtttcttccctcctgttctctggttatagctggtcccaggtcagcgtgggaggcacctttgggttcccagtgcccagcactttgtagtctcatcccagattactaacccttcctgatcctggagaggcagggatagtaaataaattgctcttcctaccccatcccccatcccctgacaaaaagtgacggcagccgtactgagtctgtaaggcccaaagtgggtacagacagcctgggctggtaaaagtaggtccttatttacaaggctgcgttaaagttgtactaggcaaacacactgatgtaggaagcacgaggaaaggaagacgttttgatatagtgttactgtgagcctgtcagtagtgggtaccaatcttttgtgacatattgtcatgctgaggtgtgacacctgctgcactcatctgatgtaaaaccatcccagagctggcgagaggatggagctgggtggaaactgctttgcactatcgtttgcttggtgtttgtttttaacgcacaacttgcttgtacagtaaactgtcttctgtactatttaactgtaaaatggaattttgactgatttgttacaataatataactctgagatgtgaggaaggaaac

SEQ ID NO: 381102 - DNA, 2198 bp, Homo sapiens
cagcccagcttcccctccgttcctaactgttggctttcccccagccgcacgggtcccaggccccagagaagatgagtctatggcatcaggttcttaaacccaggaaagcacctacagaccggctcctccatgcactttaccagctcaacgcatccactctctgttctcttggcagggcgggggaggggggataggaggtcccctttcccctaggtggtctcataattgttggctttcccccagccgcacgggtcccaggccccagagaagatgagtctatggcatcaggttcttaaacccaggaaagcacctacagaccggctcctccatgcactttaccagctcaacgcatccactctctgttctcttggcagggcgggggaggggggataggaggtcccctttcccctaggtggtctcataattccatttgtggagagaacaggagggccagatagataggtcctagcagaaggcattgaggtgagggatcattttgggtcagacatcaatgtccctgtcccccctgggtccagccaagctgtgccccatcccccaagcctcctgggaggatccagccaaatcttgcgactcctggcacacacctgtctgtaacctgttttgtgctctgaaagcaaatagtcctgagcaaaaaaaaaaaaaaaaaacaaaaaaacaaaaaaaaaacaaaacagtttttaaaactgattttagaaaaagaagcttaatctaacgttttcaaacacaaggtctcttacaggtatagttccgtgattatgatagctctgtgattataagcaacatccccgccccctctcccccccgcggacccccagctgcctcctgagggtgtggggttattagggtctcaatactttctcaaggggctacactccccatcaggcagcatcccaccagcctgcaccacaggctcccctgggaggacgagggaaacgctgatgagacgctgggcatctctcctctgtggctctaggacatctgtccaggaggctgggccggaggtgggcaggatgtgagaggtggggagtactggctgtgcgtggcaggacagaagcactgtaaagggctctccagccgcagctcagctgcactgcgttccgaggtgaagtcttgcccctgaattttgcaaaatgggaaagtgggcgcttgcccaagggccaggctgcatggattctcacatcagagttctctggccctagaaaggcttagaaaaggcgtaagggaactcataaaggctagcagcatgcggtattttaactttctgcctcggcctctgtggatgcagaaatctgccctacaaaatgctcttcattggttgtctctgtgagagcactgtccccacccaacctgtcacaacggccagaaccatacaccagagacacactggcaggttaggcagtccttctggtgatcctattccattccctcctgctgcggtttctcttggcctgtcctcactggaaaaacagtctccatctcctcaaaatagttgctgactccctgcacccaaggggcctctccatgccttcttaggaagcagctatgaatccattgtccttgtagtttcttccctcctgttctctggttatagctggtcccaggtcagcgtgggaggcacctttgggttcccagtgcccagcactttgtagtctcatcccagattactaacccttcctgatcctggagaggcagggatagtaaataaattgctcttcctaccccatcccccatcccctgacaaaaagtgacggcagccgtactgagtctgtaaggcccaaagtgggtacagacagcctgggctggtaaaagtaggtccttatttacaaggctgcgttaaagttgtactaggcaaacacactgatgtaggaagcacgaggaaaggaagacgttttgatatagtgttactgtgagcctgtcagtagtgggtaccaatcttttgtgacatattgtcatgctgaggtgtgacacctgctgcactcatctgatgtaaaaccatcccagagctggcgagaggatggagctgggtggaaactgctttgcactatcgtttgcttggtgtttgtttttaacgcacaacttgcttgtacagtaaactgtcttctgtactatttaactgtaaaatggaattttgactgatttgttacaataatataactctgagatgtgaggaaggaaac

SEQ ID NO: 381103 - DNA, 2671 bp, Homo sapiens
ccgccacttgattctggaggatttgttctggggctgcggccgcggagtcggggcggccgcgggcgagcttcggggcgggaggcggcggcagcggcacagccccgcgcgggccccgccgcggcccaggcagccgggacagccacgaggggcggccgcacgcggggccgcgcgccgaggatgcgggactagccgggcaggctgcgggcggccgtcgggccagcgaggcctcgcagcgggcgggccctggcgagtagtggccgggcgccgccccctgcgccctgaggcccgggccccgccgcttctgctttcccgcttctcgcggcagcggcggccgaggaggcgcccgcgccggccgcccccgggggaagccgcgccgtctccgcctgcccggcgccctgacggccgctgttatgcgtattcccgtagacccaagcaccagccgccgcttcacacctccctccccggccttcccctgcggcggcggcggcggcaagatgggcgagaacagcggcgcgctgagcgcgcaggcggccgtggggcccggagggcgcgcccggcccgaggtgcgctcgatggtggacgtgctggcggaccacgcaggcgagctcgtgcgcaccgacagccccaacttcctctgctccgtgctgccctcgcactggcgctgcaacaagacgctgcccgtcgccttcaaggtggtggcattgggggacgtgccggatggtacggtggtgactgtgatggcaggcaatgacgagaactactccgctgagctgcgcaatgcctcggccgtcatgaagaaccaggtggccaggttcaacgaccttcgcttcgtgggccgcagtgggcgagggaagagtttcaccctgaccatcactgtgttcaccaaccccacccaagtggcgacctaccaccgagccatcaaggtgaccgtggacggaccccgggagcccagacggcaccggcagaagctggaggaccagaccaagccgttccctgaccgctttggggacctggaacggctgcgcatgcgggtgacaccgagcacacccagcccccgaggctcactcagcaccacaagccacttcagcagccagccccagaccccaatccaaggcacctcggaactgaacccattctccgacccccgccagtttgaccgctccttccccacgctgccaaccctcacggagagccgcttcccagaccccaggatgcattatcccggggccatgtcagctgccttcccctacagcgccacgccctcgggcacgagcatcagcagcctcagcgtggcgggcatgccggccaccagccgcttccaccatacctacctcccgccaccctacccgggggccccgcagaaccagagcgggcccttccaggccaacccgtccccctaccacctctactacgggacatcctctggctcctaccagttctccatggtggccggcagcagcagtgggggcgaccgctcacctacccgcatgctggcctcttgcaccagcagcgctgcctctgtcgccgccggcaacctcatgaaccccagcctgggcggccagagtgatggcgtggaggccgacggcagccacagcaactcacccacggccctgagcacgccaggccgcatggatgaggccgtgtggcggccctactgaccgccctggtggactcctcccgctggaggcggggaccctaacaaccttcaagaccagtgatgggccggctccgaggctccgggcgggaatgggacctgcgctccagggtggtctcggtcccagggtggtcccagctggtgggagcctctggctgcatctgtgcagccacatccttgtacagaggcataggttaccacccccaccccggcccgggatactgcccccggcccagatcctggccgtctcatcccatacttctgtggggaatcagcctcctgccacccccccggaaggacctcactgtctccagctatgcccagtgctgcatgggacccatgtctcctgggacagaggccatctctcttccagagagaggcagcattggcccacaggataagcctcaggccctgggaaacctcccgacccctgcaccttcgttggagcccctgcatcccctgggtccagccccctctgcatttacacagatttgagtcagaactggaaagtgtcccccacccccaccaccctcgagcggggttcccctcattgtacagatggggcaggacccagcacgctgctggcagagatggtttgagaacacatccaagccagtccccccagcccagcttcccctccgttcctaactgttggctttcccccagccgcacgggtcccaggccccagagaagatgagtctatggcatcaggttcttaaacccaggaaagcacctacagaccggctcctccatgcactttaccagctcaacgcatccactctctgttctcttggcagggcgggggaggggggataggaggtcccctttcccctaggtggtctcataattccatttgtggagagaacaggagggccagatagataggtcctagcagaaggcattgaggtgagggatcattttgggtcagacatcaatgtccctgtcccccctgggtccagccaagctgtgccccatcccccagcggggatcctcagatcaccgcagcatacagctgcc

SEQ ID NO: 381104 - DNA, 2248 bp, Homo sapiens
ccgccacttgattctggaggatttgttctggggctgcggccgcggagtcggggcggccgcgggcgagcttcggggcgggaggcggcggcagcggcacagccccgcgcgggccccgccgcggcccaggcagccgggacagccacgaggggcggccgcacgcggggccgcgcgccgaggatgcgggactagccgggcaggctgcgggcggccgtcgggccagcgaggcctcgcagcgggcgggccctggcgagtagtggccgggcgccgccccctgcgccctgaggcccgggccccgccgcttctgctttcccgcttctcgcggcagcggcggccgaggaggcgcccgcgccggccgcccccgggggaagccgcgccgtctccgcctgcccggcgccctgacggccgctgttatgcgtattcccgtagacccaagcaccagccgccgcttcacacctccctccccggccttcccctgcggcggcggcggcggcaagatgggcgagaacagcggcgcgctgagcgcgcaggcggccgtggggcccggagggcgcgcccggcccgaggtgcgctcgatggtggacgtgctggcggaccacgcaggcgagctcgtgcgcaccgacagccccaacttcctctgctccgtgctgccctcgcactggcgctgcaacaagacgctgcccgtcgccttcaaggtggtggcattgggggacgtgccggatggtacggtggtgactgtgatggcaggcaatgacgagaactactccgctgagctgcgcaatgcctcggccgtcatgaagaaccaggtggccaggttcaacgaccttcgcttcgtgggccgcagtgggcgagggaagagtttcaccctgaccatcactgtgttcaccaaccccacccaagtggcgacctaccaccgagccatcaaggtgaccgtggacggaccccgggagcccagacggcaccggcagaagctggaggaccagaccaagccgttccctgaccgctttggggacctggaacggctgcgcatgcgggtgacaccgagcacacccagcccccgaggctcactcagcaccacaagccacttcagcagccagccccagaccccaatccaaggcacctcggaactgaacccattctccgacccccgccagtttgaccgctccttccccacgctgccaaccctcacggagagccgcttcccagaccccaggatgcattatcccggggccatgtcagctgccttcccctacagcgccacgccctcgggcacgagcatcagcagcctcagcgtggcgggcatgccggccaccagccgcttccaccatacctacctcccgccaccctacccgggggccccgcagaaccagagcgggcccttccaggccaacccgtccccctaccacctctactacgggacatcctctggctcctaccagttctccatggtggccggcagcagcagtgggggcgaccgctcacctacccgcatgctggcctcttgcaccagcagcgctgcctctgtcgccgccggcaacctcatgaaccccagcctgggcggccagagtgatggcgtggaggccgacggcagccacagcaactcacccacggccctgagcacgccaggccgcatggatgaggccgtgtggcggccctactgaccgccctggtggactcctcccgctggaggcggggaccctaacaaccttcaagaccagtgatgggccggctccgaggctccgggcgggaatgggacctgcgctccagggtggtctcggtcccagggtggtcccagctggtgggagcctctggctgcatctgtgcagccacatccttgtacagaggcataggttaccacccccaccccggcccgggatactgcccccggcccagatcctggccgtctcatcccatacttctgtggggaatcagcctcctgccacccccccggaaggacctcactgtctccagctatgcccagtgctgcatgggacccatgtctcctgggacagaggccatctctcttccagagagaggcagcattggcccacaggataagcctcaggccctgggaaacctcccgacccctgcaccttcgttggaaactgctttgcactatcgtttgcttggtgtttgtttttaacgcacaacttgcttgtacagtaaactgtcttctgtactatttaactgtaaaatggaattttgactgatttgttacaataatataactctgagatgtgaggaaggaaac

SEQ ID NO: 381105 - DNA, 4275 bp, Homo sapiens
ccgccacttgattctggaggatttgttctggggctgcggccgcggagtcggggcggccgcgggcgagcttcggggcgggaggcggcggcagcggcacagccccgcgcgggccccgccgcggcccaggcagccgggacagccacgaggggcggccgcacgcggggccgcgcgccgaggatgcgggactagccgggcaggctgcgggcggccgtcgggccagcgaggcctcgcagcgggcgggccctggcgagtagtggccgggcgccgccccctgcgccctgaggcccgggccccgccgcttctgctttcccgcttctcgcggcagcggcggccgaggaggcgcccgcgccggccgcccccgggggaagccgcgccgtctccgcctgcccggcgccctgacggccgctgttatgcgtattcccgtagacccaagcaccagccgccgcttcacacctccctccccggccttcccctgcggcggcggcggcggcaagatgggcgagaacagcggcgcgctgagcgcgcaggcggccgtggggcccggagggcgcgcccggcccgaggtgcgctcgatggtggacgtgctggcggaccacgcaggcgagctcgtgcgcaccgacagccccaacttcctctgctccgtgctgccctcgcactggcgctgcaacaagacgctgcccgtcgccttcaaggtggtggcattgggggacgtgccggatggtacggtggtgactgtgatggcaggcaatgacgagaactactccgctgagctgcgcaatgcctcggccgtcatgaagaaccaggtggccaggttcaacgaccttcgcttcgtgggccgcagtgggcgagggaagagtttcaccctgaccatcactgtgttcaccaaccccacccaagtggcgacctaccaccgagccatcaaggtgaccgtggacggaccccgggagcccagacggcaccggcagaagctggaggaccagaccaagccgttccctgaccgctttggggacctggaacggctgcgcatgcgggtgacaccgagcacacccagcccccgaggctcactcagcaccacaagccacttcagcagccagccccagaccccaatccaaggcacctcggaactgaacccattctccgacccccgccagtttgaccgctccttccccacgctgccaaccctcacggagagccgcttcccagaccccaggatgcattatcccggggccatgtcagctgccttcccctacagcgccacgccctcgggcacgagcatcagcagcctcagcgtggcgggcatgccggccaccagccgcttccaccatacctacctcccgccaccctacccgggggccccgcagaaccagagcgggcccttccaggccaacccgtccccctaccacctctactacgggacatcctctggctcctaccagttctccatggtggccggcagcagcagtgggggcgaccgctcacctacccgcatgctggcctcttgcaccagcagcgctgcctctgtcgccgccggcaacctcatgaaccccagcctgggcggccagagtgatggcgtggaggccgacggcagccacagcaactcacccacggccctgagcacgccaggccgcatggatgaggccgtgtggcggccctactgaccgccctggtggactcctcccgctggaggcggggaccctaacaaccttcaagaccagtgatgggccggctccgaggctccgggcgggaatgggacctgcgctccagggtggtctcggtcccagggtggtcccagctggtgggagcctctggctgcatctgtgcagccacatccttgtacagaggcataggttaccacccccaccccggcccgggatactgcccccggcccagatcctggccgtctcatcccatacttctgtggggaatcagcctcctgccacccccccggaaggacctcactgtctccagctatgcccagtgctgcatgggacccatgtctcctgggacagaggccatctctcttccagagagaggcagcattggcccacaggataagcctcaggccctgggaaacctcccgacccctgcaccttcgttggagcccctgcatcccctgggtccagccccctctgcatttacacagatttgagtcagaactggaaagtgtcccccacccccaccaccctcgagcggggttcccctcattgtacagatggggcaggacccagcacgctgctggcagagatggtttgagaacacatccaagccagtccccccagcccagcttcccctccgttcctaactgttggctttcccccagccgcacgggtcccaggccccagagaagatgagtctatggcatcaggttcttaaacccaggaaagcacctacagaccggctcctccatgcactttaccagctcaacgcatccactctctgttctcttggcagggcgggggaggggggataggaggtcccctttcccctaggtggtctcataattccatttgtggagagaacaggagggccagatagataggtcctagcagaaggcattgaggtgagggatcattttgggtcagacatcaatgtccctgtcccccctgggtccagccaagctgtgccccatcccccaagcctcctgggaggatccagccaaatcttgcgactcctggcacacacctgtctgtaacctgttttgtgctctgaaagcaaatagtcctgagcaaaaaaaaaaaaaaaaaacaaaaaaacaaaaaaaaaacaaaacagtttttaaaactgattttagaaaaagaagcttaatctaacgttttcaaacacaaggtctcttacaggtatagttccgtgattatgatagctctgtgattataagcaacatccccgccccctctcccccccgcggacccccagctgcctcctgagggtgtggggttattagggtctcaatactttctcaaggggctacactccccatcaggcagcatcccaccagcctgcaccacaggctcccctgggaggacgagggaaacgctgatgagacgctgggcatctctcctctgtggctctaggacatctgtccaggaggctgggccggaggtgggcaggatgtgagaggtggggagtactggctgtgcgtggcaggacagaagcactgtaaagggctctccagccgcagctcagctgcactgcgttccgaggtgaagtcttgcccctgaattttgcaaaatgggaaagtgggcgcttgcccaagggccaggctgcatggattctcacatcagagttctctggccctagaaaggcttagaaaaggcgtaagggaactcataaaggctagcagcatgcggtattttaactttctgcctcggcctctgtggatgcagaaatctgccctacaaaatgctcttcattggttgtctctgtgagagcactgtccccacccaacctgtcacaacggccagaaccatacaccagagacacactggcaggttaggcagtccttctggtgatcctattccattccctcctgctgcggtttctcttggcctgtcctcactggaaaaacagtctccatctcctcaaaatagttgctgactccctgcacccaaggggcctctccatgccttcttaggaagcagctatgaatccattgtccttgtagtttcttccctcctgttctctggttatagctggtcccaggtcagcgtgggaggcacctttgggttcccagtgcccagcactttgtagtctcatcccagattactaacccttcctgatcctggagaggcagggatagtaaataaattgctcttcctaccccatcccccatcccctgacaaaaagtgacggcagccgtactgagtctgtaaggcccaaagtgggtacagacagcctgggctggtaaaagtaggtccttatttacaaggctgcgttaaagttgtactaggcaaacacactgatgtaggaagcacgaggaaaggaagacgttttgatatagtgttactgtgagcctgtcagtagtgggtaccaatcttttgtgacatattgtcatgctgaggtgtgacacctgctgcactcatctgatgtaaaaccatcccagagctggcgagaggatggagctgggtggaaactgctttgcactatcgtttgcttggtgtttgtttttaacgcacaacttgcttgtacagtaaactgtcttctgtactatttaactgtaaaatggaattttgactgatttgttacaataatataactctgagatgtgaggaaggaaac

SEQ ID NO: 381106 - DNA, 4162 bp, Homo sapiens
  misc_feature (6)..(7): n is a, c, g, or t
  misc_feature (9)..(9): n is a, c, g, or t
ggcacnngnggcggcccactctgctctgtcagcttcggagctcctccaccctggctgccgaaagccccttcccgccatctaatgatacactctgcatacgcttctgttgagaatttgtggctagacattcctgtgggaccgggaatccaaattcttggtagctagaggaaaaaaaaataaaacaacagccaaccaagtgaatcccaacccaaccccctgaagggctgaaaattctcgccttcttcagagcggggcatggcatcgaacagcatcttcgactccttcccgacctactcgccgaccttcatccgcgacccaagcaccagccgccgcttcacacctccctccccggccttcccctgcggcggcggcggcggcaagatgggcgagaacagcggcgcgctgagcgcgcaggcggccgtggggcccggagggcgcgcccggcccgaggtgcgctcgatggtggacgtgctggcggaccacgcaggcgagctcgtgcgcaccgacagccccaacttcctctgctccgtgctgccctcgcactggcgctgcaacaagacgctgcccgtcgccttcaaggtggtggcattgggggacgtgccggatggtacggtggtgactgtgatggcaggcaatgacgagaactactccgctgagctgcgcaatgcctcggccgtcatgaagaaccaggtggccaggttcaacgaccttcgcttcgtgggccgcagtgggcgagggaagagtttcaccctgaccatcactgtgttcaccaaccccacccaagtggcgacctaccaccgagccatcaaggtgaccgtggacggaccccgggagcccagacggcaccggcagaagctggaggaccagaccaagccgttccctgaccgctttggggacctggaacggctgcgcatgcgggtgacaccgagcacacccagcccccgaggctcactcagcaccacaagccacttcagcagccagccccagaccccaatccaaggcacctcggaactgaacccattctccgacccccgccagtttgaccgctccttccccacgctgccaaccctcacggagagccgcttcccagaccccaggatgcattatcccggggccatgtcagctgccttcccctacagcgccacgccctcgggcacgagcatcagcagcctcagcgtggcgggcatgccggccaccagccgcttccaccatacctacctcccgccaccctacccgggggccccgcagaaccagagcgggcccttccaggccaacccgtccccctaccacctctactacgggacatcctctggctcctaccagttctccatggtggccggcagcagcagtgggggcgaccgctcacctacccgcatgctggcctcttgcaccagcagcgctgcctctgtcgccgccggcaacctcatgaaccccagcctgggcggccagagtgatggcgtggaggccgacggcagccacagcaactcacccacggccctgagcacgccaggccgcatggatgaggccgtgtggcggccctactgaccgccctggtggactcctcccgctggaggcggggaccctaacaaccttcaagaccagtgatgggccggctccgaggctccgggcgggaatgggacctgcgctccagggtggtctcggtcccagggtggtcccagctggtgggagcctctggctgcatctgtgcagccacatccttgtacagaggcataggttaccacccccaccccggcccgggatactgcccccggcccagatcctggccgtctcatcccatacttctgtggggaatcagcctcctgccacccccccggaaggacctcactgtctccagctatgcccagtgctgcatgggacccatgtctcctgggacagaggccatctctcttccagagagaggcagcattggcccacaggataagcctcaggccctgggaaacctcccgacccctgcaccttcgttggagcccctgcatcccctgggtccagccccctctgcatttacacagatttgagtcagaactggaaagtgtcccccacccccaccaccctcgagcggggttcccctcattgtacagatggggcaggacccagcacgctgctggcagagatggtttgagaacacatccaagccagtccccccagcccagcttcccctccgttcctaactgttggctttcccccagccgcacgggtcccaggccccagagaagatgagtctatggcatcaggttcttaaacccaggaaagcacctacagaccggctcctccatgcactttaccagctcaacgcatccactctctgttctcttggcagggcgggggaggggggataggaggtcccctttcccctaggtggtctcataattccatttgtggagagaacaggagggccagatagataggtcctagcagaaggcattgaggtgagggatcattttgggtcagacatcaatgtccctgtcccccctgggtccagccaagctgtgccccatcccccaagcctcctgggaggatccagccaaatcttgcgactcctggcacacacctgtctgtaacctgttttgtgctctgaaagcaaatagtcctgagcaaaaaaaaaaaaaaaaaacaaaaaaacaaaaaaaaaacaaaacagtttttaaaactgattttagaaaaagaagcttaatctaacgttttcaaacacaaggtctcttacaggtatagttccgtgattatgatagctctgtgattataagcaacatccccgccccctctcccccccgcggacccccagctgcctcctgagggtgtggggttattagggtctcaatactttctcaaggggctacactccccatcaggcagcatcccaccagcctgcaccacaggctcccctgggaggacgagggaaacgctgatgagacgctgggcatctctcctctgtggctctaggacatctgtccaggaggctgggccggaggtgggcaggatgtgagaggtggggagtactggctgtgcgtggcaggacagaagcactgtaaagggctctccagccgcagctcagctgcactgcgttccgaggtgaagtcttgcccctgaattttgcaaaatgggaaagtgggcgcttgcccaagggccaggctgcatggattctcacatcagagttctctggccctagaaaggcttagaaaaggcgtaagggaactcataaaggctagcagcatgcggtattttaactttctgcctcggcctctgtggatgcagaaatctgccctacaaaatgctcttcattggttgtctctgtgagagcactgtccccacccaacctgtcacaacggccagaaccatacaccagagacacactggcaggttaggcagtccttctggtgatcctattccattccctcctgctgcggtttctcttggcctgtcctcactggaaaaacagtctccatctcctcaaaatagttgctgactccctgcacccaaggggcctctccatgccttcttaggaagcagctatgaatccattgtccttgtagtttcttccctcctgttctctggttatagctggtcccaggtcagcgtgggaggcacctttgggttcccagtgcccagcactttgtagtctcatcccagattactaacccttcctgatcctggagaggcagggatagtaaataaattgctcttcctaccccatcccccatcccctgacaaaaagtgacggcagccgtactgagtctgtaaggcccaaagtgggtacagacagcctgggctggtaaaagtaggtccttatttacaaggctgcgttaaagttgtactaggcaaacacactgatgtaggaagcacgaggaaaggaagacgttttgatatagtgttactgtgagcctgtcagtagtgggtaccaatcttttgtgacatattgtcatgctgaggtgtgacacctgctgcactcatctgatgtaaaaccatcccagagctggcgagaggatggagctgggtggaaactgctttgcactatcgtttgcttggtgtttgtttttaacgcacaacttgcttgtacagtaaactgtcttctgtactatttaactgtaaaatggaattttgactgatttgttacaataatataactctgagatgtgaggaaggaaac

SEQ ID NO: 381107 - DNA, 3639 bp, Homo sapiens
cctgctcccattaagacgactctaaatgggaaaaaaaggaagagtggctctttgaggtggtggcattgggggacgtgccggatggtacggtggtgactgtgatggcaggcaatgacgagaactactccgctgagctgcgcaatgcctcggccgtcatgaagaaccaggtggccaggttcaacgaccttcgcttcgtgggccgcagtgggcgagggaagagtttcaccctgaccatcactgtgttcaccaaccccacccaagtggcgacctaccaccgagccatcaaggtgaccgtggacggaccccgggagcccagacggcaccggcagaagctggaggaccagaccaagccgttccctgaccgctttggggacctggaacggctgcgcatgcgggtgacaccgagcacacccagcccccgaggctcactcagcaccacaagccacttcagcagccagccccagaccccaatccaaggcacctcggaactgaacccattctccgacccccgccagtttgaccgctccttccccacgctgccaaccctcacggagagccgcttcccagaccccaggatgcattatcccggggccatgtcagctgccttcccctacagcgccacgccctcgggcacgagcatcagcagcctcagcgtggcgggcatgccggccaccagccgcttccaccatacctacctcccgccaccctacccgggggccccgcagaaccagagcgggcccttccaggccaacccgtccccctaccacctctactacgggacatcctctggctcctaccagttctccatggtggccggcagcagcagtgggggcgaccgctcacctacccgcatgctggcctcttgcaccagcagcgctgcctctgtcgccgccggcaacctcatgaaccccagcctgggcggccagagtgatggcgtggaggccgacggcagccacagcaactcacccacggccctgagcacgccaggccgcatggatgaggccgtgtggcggccctactgaccgccctggtggactcctcccgctggaggcggggaccctaacaaccttcaagaccagtgatgggccggctccgaggctccgggcgggaatgggacctgcgctccagggtggtctcggtcccagggtggtcccagctggtgggagcctctggctgcatctgtgcagccacatccttgtacagaggcataggttaccacccccaccccggcccgggatactgcccccggcccagatcctggccgtctcatcccatacttctgtggggaatcagcctcctgccacccccccggaaggacctcactgtctccagctatgcccagtgctgcatgggacccatgtctcctgggacagaggccatctctcttccagagagaggcagcattggcccacaggataagcctcaggccctgggaaacctcccgacccctgcaccttcgttggagcccctgcatcccctgggtccagccccctctgcatttacacagatttgagtcagaactggaaagtgtcccccacccccaccaccctcgagcggggttcccctcattgtacagatggggcaggacccagcacgctgctggcagagatggtttgagaacacatccaagccagtccccccagcccagcttcccctccgttcctaactgttggctttcccccagccgcacgggtcccaggccccagagaagatgagtctatggcatcaggttcttaaacccaggaaagcacctacagaccggctcctccatgcactttaccagctcaacgcatccactctctgttctcttggcagggcgggggaggggggataggaggtcccctttcccctaggtggtctcataattccatttgtggagagaacaggagggccagatagataggtcctagcagaaggcattgaggtgagggatcattttgggtcagacatcaatgtccctgtcccccctgggtccagccaagctgtgccccatcccccaagcctcctgggaggatccagccaaatcttgcgactcctggcacacacctgtctgtaacctgttttgtgctctgaaagcaaatagtcctgagcaaaaaaaaaaaaaaaaaacaaaaaaacaaaaaaaaaacaaaacagtttttaaaactgattttagaaaaagaagcttaatctaacgttttcaaacacaaggtctcttacaggtatagttccgtgattatgatagctctgtgattataagcaacatccccgccccctctcccccccgcggacccccagctgcctcctgagggtgtggggttattagggtctcaatactttctcaaggggctacactccccatcaggcagcatcccaccagcctgcaccacaggctcccctgggaggacgagggaaacgctgatgagacgctgggcatctctcctctgtggctctaggacatctgtccaggaggctgggccggaggtgggcaggatgtgagaggtggggagtactggctgtgcgtggcaggacagaagcactgtaaagggctctccagccgcagctcagctgcactgcgttccgaggtgaagtcttgcccctgaattttgcaaaatgggaaagtgggcgcttgcccaagggccaggctgcatggattctcacatcagagttctctggccctagaaaggcttagaaaaggcgtaagggaactcataaaggctagcagcatgcggtattttaactttctgcctcggcctctgtggatgcagaaatctgccctacaaaatgctcttcattggttgtctctgtgagagcactgtccccacccaacctgtcacaacggccagaaccatacaccagagacacactggcaggttaggcagtccttctggtgatcctattccattccctcctgctgcggtttctcttggcctgtcctcactggaaaaacagtctccatctcctcaaaatagttgctgactccctgcacccaaggggcctctccatgccttcttaggaagcagctatgaatccattgtccttgtagtttcttccctcctgttctctggttatagctggtcccaggtcagcgtgggaggcacctttgggttcccagtgcccagcactttgtagtctcatcccagattactaacccttcctgatcctggagaggcagggatagtaaataaattgctcttcctaccccatcccccatcccctgacaaaaagtgacggcagccgtactgagtctgtaaggcccaaagtgggtacagacagcctgggctggtaaaagtaggtccttatttacaaggctgcgttaaagttgtactaggcaaacacactgatgtaggaagcacgaggaaaggaagacgttttgatatagtgttactgtgagcctgtcagtagtgggtaccaatcttttgtgacatattgtcatgctgaggtgtgacacctgctgcactcatctgatgtaaaaccatcccagagctggcgagaggatggagctgggtggaaactgctttgcactatcgtttgcttggtgtttgtttttaacgcacaacttgcttgtacagtaaactgtcttctgtactatttaactgtaaaatggaattttgactgatttgttacaataatataactctgagatgtgaggaaggaaac

SEQ ID NO: 381108 - DNA, 3541 bp, Homo sapiens
  misc_feature (6)..(7): n is a, c, g, or t
  misc_feature (9)..(9): n is a, c, g, or t
ggcacnngnggcggcccactctgctctgtcagcttcggagctcctccaccctggctgccgaaagccccttcccgccatctaatgatacactctgcatacgcttctgttgagaatttgtggctagacattcctgtgggaccgggaatccaaattcttggtagctagaggaaaaaaaaataaaacaacagccaaccaagtgaatcccaacccaaccccctgaagggctgaaaattctcgccttcttcagagcggggcatggcatcgaacagcatcttcgactccttcccgacctactcgccgaccttcatccgcgacccaagcaccagccgccgcttcacacctccctccccggccttcccctgcggcggcggcggcggcaagatgggcgagaacagcggcgcgctgagcgcgcaggcggccgtggggcccggagggcgcgcccggcccgaggtgcgctcgatggtggacgtgctggcggaccacgcaggcgagctcgtgcgcaccgacagccccaacttcctctgctccgtgctgccctcgcactggcgctgcaacaagacgctgcccgtcgccttcaaggtggtggcattgggggacgtgccggatggtacggtggtgactgtgatggcaggcaatgacgagaactactccgctgagctgcgcaatgcctcggccgtcatgaagaaccaggtggccaggttcaacgaccttcgcttcgtgggccgcagtgggcgagggaagagtttcaccctgaccatcactgtgttcaccaaccccacccaagtggcgacctaccaccgagccatcaaggtgaccgtggacggaccccgggagcccagacggcaccggcagaagctggaggaccagaccaagccgttccctgaccgctttggggacctggaacggctgcgcatgcgggtgacaccgagcacacccagcccccgaggctcactcagcaccacaagccacttcagcagccagccccagaccccaatccaaggcacctcggaactgaacccattctccgacccccgccagtttgaccgctccttccccacgctgccaaccctcacggagagccgcttcccagaccccaggatgcattatcccggggccatgtcagctgccttcccctacagcgccacgccctcgggcacgagcatcagcagcctcagcgtggcgggcatgccggccaccagccgcttccaccatacctacctcccgccaccctacccgggggccccgcagaaccagagcgggcccttccaggccaacccgtccccctaccacctctactacgggacatcctctggctcctaccagttctccatggtggccggcagcagcagtgggggcgaccgctcacctacccgcatgctggcctcttgcaccagcagcgctgcctctgtcgccgccggcaacctcatgaaccccagcctgggcggccagagtgatggcgtggaggccgacggcagccacagcaactcacccacggccctgagcacgccaggccgcatggatgaggccgtgtggcggccctactgaccgccctggtggactcctcccgctggaggcggggaccctaacaaccttcaagaccagtgatgggccggctccgaggctccgggcgggaatgggacctgcgctccagggtggtctcggtcccagggtggtcccagctggtgggagcctctggctgcatctgtgcagccacatccttgtacagaggcataggttaccacccccaccccggcccgggatactgcccccggcccagatcctggccgtctcatcccatacttctgtggggaatcagcctcctgccacccccccggaaggacctcactgtctccagctatgcccagtgctgcatgggacccatgtctcctgggacagaggccatctctcttccagagagaggcagcattggcccacaggataagcctcaggccctgggaaacctcccgacccctgcaccttcgttggagcccctgcatcccctgggtccagccccctctgcatttacacagatttgagtcagaactggaaagtgtcccccacccccaccaccctcgagcggggttcccctcattgtacagatggggcaggacccagcacgctgctggcagagatggtttgagaacacatccaagccagtccccccagcccagcttcccctccgttcctaactgttggctttcccccagccgcacgggtcccaggccccagagaagatgagtctatggcatcaggttcttaaacccaggaaagcacctacagaccggctcctccatgcactttaccagctcaacgcatccactctctgttctcttggcagggcgggggaggggggataggaggtcccctttcccctaggtggtctcataattccatttgtggagagaacaggagggccagatagataggtcctagcagaaggcattgaggtgagggatcattttgggtcagacatcaatgtccctgtcccccctgggtccagccaagctgtgccccatcccccaagcctcctgggaggatccagccaaatcttgcgactcctggcacacacctgtctgtaacctgttttgtgctctgaaagcaaatagtcctgagcaaaaaaaaaaaaaaaaaacaaaaaaacaaaaaaaaaacaaaacagtttttaaaactgattttagaaaaagaagcttaatctaacgttttcaaacacaaggtctcttacaggtatagttccgtgattatgatagctctgtgattataagcaacatccccgccccctctcccccccgcggacccccagctgcctcctgagggtgtggggttattagggtctcaatactttctcaaggggctacactccccatcaggcagcatcccaccagcctgcaccacaggctcccctgggaggacgagggaaacgctgatgagacgctgggcatctctcctctgtggctctaggacatctgtccaggaggctgggccggaggtgggcaggatgtgagaggtggggagtactggctgtgcgtggcaggacagaagcactgtaaagggctctccagccgcagctcagctgcactgcgttccgaggtgaagtcttgcccctgaattttgcaaaatgggaaagtgggcgcttgcccaagggccaggctgcatggattctcacatcagagttctctggccctagaaaggcttagaaaaggcgtaagggaactcataaaggctagcagcatgcggtattttaactttctgcctcggcctctgtggatgcagaaatctgccctacaaaatgctcttcattggttgtctctgtgagagcactgtccccacccaacctgtcacaacggccagaaccatacaccagagacacactggcaggttaggcagtccttctggtgatcctattccattccctcctgctgcggtttctcttggcctgtcctcactggaaaaacagtctccatctcctcaaaatagttgctgactcctggcacacacctgtctgtaacctgttttgtgctctgaaagcaaatagtcctgagca

SEQ ID NO: 381109 - DNA, 589 bp, Homo sapiens
gagcccaaggtcattcttcaggaagccctcctggggttgtctcgagctggaactgacctcttccctgctgtcctccaggcacctcggaactgaacccattctccgacccccgccagtttgaccgctccttccccacgctgccaaccctcacggagagccgcttcccagaccccaggatgcattatcccggggccatgtcagctgccttcccctacagcgccacgccctcgggcacgagcatcagcagcctcagcgtggcgggcatgccggccaccagccgcttccaccatacctacctcccgccaccctacccgggggccccgcagaaccagagcgggcccttccaggccaacccgtccccctaccacctctactacgggacatcctctggctcctaccagttctccatggtggccggcagcagcagtgggggcgaccgctcacctacccgcatgctggcctcttgcaccagcagcgctgcctctgtcgccgccggcaacctcatgaaccccagcctgggcggccagagtgatggcgtggaggccgacggcagccacagcaactcacccacggccctgagcacgccagg

SEQ ID NO: 381110 - DNA, 266 bp, Homo sapiens
gcgtcgacatcccgtatatccatcccttggtatccacaggcgattctttccagcacccattctccccacccccggccaataccaaaatccatagatgttgaagtcccttatataaaatggtgtagtatttggccgggcatggtggctcatgcctgtaatcccagcactttgggaggccaaggagggtggatcacaaggtcaggagatcgagaccatcctggctaacatgatgaaaccccatctctactaaaaatacaaaaaattag

SEQ ID NO: 381111 - DNA, 541 bp, Homo sapiens
ttgaactagttatttaccatctctaagcctctgttttctcacacgcaaaatgggagtagtgtaaaaattaaatatgatatatagataggatgaagaatattaagagttcaatgcatggagttattattgttaatattatttattatctttactcccctcaacaacttcaattgggattctcccctgattctaccttggagaacctttcttgagtgttgtatgctggtcaggactagtttcctggatgtgaccttttcagcattttatacacaaaataatgtcagacactacatattttctgaacaaagacttaggacataattttataaatacatgcatatttatggggataataaaagacaagatttgaaaccaggtctgctccaggagatcagagacttaatctcctatatctaaccttaggatgtgaattctatacactggacaaagatgaattttagagtcgtaaggtaatactgataattaagaatatgatagctctgataaccaattgtattaagaaaggatggtcaattacaca

SEQ ID NO: 381112 - DNA, 1100 bp, Homo sapiens
ggacttgctatatctaaggacttctggggaaccgtgggatacagagagaaacctcaggcctctgagtcttcaatgccagtcccttgccctcccctagactccctgccagaactccagagagagagttccctggaagatccatccagatataagccccagtgggaatgcagagaaaactcaggaaacctctgggcttttgagtctccagtcttggacctcaacccagagctctctggaaccagccctgaatgtgtcccaccagcatctgagacaccatggaagggcatgcaaagtagagaaaatatttgggtccctgcagacccagtttcacctcccagccttccctcagtccctctcctggagtctctagtaatgggcccccagggagtcctgtctgaatccaaagctttgtgggagaccatggggcagaaagagaacctctgggcatctgattccccagaccctgttcatagcacacctccaaccacccttatggaaccacacagaatcaatcctggggaatgcctcgctacatcagaagctacatggaaggatactgagcattccaggaattcctcggcttctaggtctccatctctggccctcagcccacccccagctcttgcaccggagctgctcagagttagatccatgggggtcctgtctgattctgaagctagatgtggggacatacaaaagacaaaaaactcctgggcctctaagcacccagcttgtaacttaccccaagacctgcatggagccagccctctgggagtcttgtctgattctcagtctattgtaggggaaatggagcaaaaagaaaactgtgttcctgtgttcccaggtaggggctccagcccatcctcaaactctgtttcaaagtcccacgtaagtgagcctatcgcagaccaaagcaactataagcctgacggggaggcagtggagcaaagaaagaaccactgggccactgagctcccagcccccagctcactctctactcctctaccagagccacacattgaccttgaacttgtgtggagaaatgtgcaacaaagagaagttccccaaggccccagccctctggcagtggatcccctaca

SEQ ID NO: 381113 - DNA, 917 bp, Homo sapiens
tctgaatacttgcttatttattcttatacaattaatgatcccctcttaagaactaccattgcagtggctgctcccacagagccccctccaggcccttcccccaccaccctgggtatccctagcacctgtaggacagcatcgttgaaacattaggggtgctggggtctgagagggtatcctgctgggacaatgcccgcggaacctcctgcctgtctttagacatggacaaggaagatgcactgatctgttttgaggagcacatccgagctttggagagggaagaggaggaggaacgggagcgggcccggcttcgggagcgacgccaacaacgcaagaatcgggaggccttccaggtatctttgctgtcctttctagatcagagctcagctctgccctagagcacaacctcttcacccattccctgcccccttctggatacgctgcctgttctttctgtgcctagccctgtccaagctctatgagacctctctctgcctgcagtctgtttctgctgtacctcctcaattctggactgtgctcttctagggagactagatgtatgcaccacccagaaactgccagtagagagcaccctacaggcatgacttggcagctaggccatgtttatttcccttggtggggcacccgacaggcagagtttattccctcagcttgggggtggcagtggtggtggtagtgctaggggttactgcaggcaggtttctgtttctttgcatcccgggactggcttgttctcacctttttgttctgtccctctctgtgtatttactttctctctttttgcattgttctcagccttccatctgcatctcttcatctctgcctctcttgcctgcatttcctcaatcttgattgtccctgcctcttcctctgccattccctctcttccccctcag

SEQ ID NO: 381114 - DNA, 458 bp, Homo sapiens
tctgaatacttgcttatttattcttatacaattaatgatcccctcttaagaactaccattgcagtggctgctcccacagagccccctccaggcccttcccccaccaccctgggtatccctagcacctgtaggacagcatcgttgaaacattaggggtggtggggacagcagaagagagcaggctgtagcgctccagctgttcttctgagacactctgggtttctatgtaggtgccttgagacaagcaagggttggagttgagtatggggggatttggtgctgcttcctgttttcaagtgaagcagcttgaatcttttttatgcataaaggttctacataagatttctattttaataaactgtttctgctgtttaaaaaaaaaagggagaattcaacaccagtgggatagagtcactaagtagaattgatagattttgtgaaatggagggaaaggaagg

SEQ ID NO: 381115 - DNA, 3589 bp, Homo sapiens
cgattctggtccccggcccccagcagcgcctgcccccttcccaccggggccccccatgatgccaccacccttcatgccccctccagggatccccccaccctttcctccgatggggctaccccccatgagtcagagaccaccagctatcccccccatgccacctggcatcctgcccccaatgcttccaccaatgggggcgccaccaccactcacacagataccaggaatggtacctccgatgatgccaggaatgctgatgccagcggtgcctgtcaccgcagcgacggctccgggtgcggacaccgccagctctgctgtggctgggacaggccctccgagggccctatggagtgagcatgtggccccagatgggcgcatctactactacaatgctgacgacaagcagtccgtgtgggagaagcccagcgtgctcaagtccaaggcagagctgctcctgtcccaatgtccctggaaagagtacaagtcggacacaggcaaaccttattactataacaaccagagtaaagagtcccgctggacccggcccaaggatctggatgacctagaggttctagtcaaacaagaggctgcagggaaacagcagcagcagctgccacagacacttcagccacagccacctcagccacagcctgaccccccacctgtgcctcctggccccaccccagtgcccacaggcctcctggaacctgagccaggtgggagtgaagattgtgatgtgttggaggccacccagcccctggaacaggggttcctgcagcagctggaggagggccccagcagttctggacagcatcagccacagcaggaggaggaggaatcaaagccagaaccagagaggtctggcctcagttggagcaaccgggagaaggcaaagcaggcattcaaggaactgctgagggacaaggctgtcccctccaatgcctcatgggaacaggccatgaagatggtggtcaccgacccccgttacagtgccttgcctaaactgagtgagaaaaagcaggcattcaatgcctacaaggcgcagcgggagaaggaggagaaggaggaggcccggctaagggccaaagaggccaagcagaccctgcagcatttcctggagcagcatgaacgcatgacctccaccacccgctaccggcgggcagaacagacctttggggagctggaggtctgggctgtggtccctgagagggatcgaaaagaggtttatgatgatgtcctcttcttcctggccaagaaggagaaggaacaggccaagcagctccggcgccgcaatatccaggccctaaagagcatcctggatgggatgagtagtgtcaacttccaaaccacgtggtcccaggcccagcagtacctcatggataaccccagctttgctcaggaccatcagctgcagaacatggacaaggaagatgcactgatctgttttgaggagcacatccgagctttggagagggaagaggaggaggaacgggagcgggcccggcttcgggagcgacgccaacaacgcaagaatcgggaggccttccagaccttcctggacgagctgcatgagacagggcagctgcactctatgtccacctggatggagctatatccagcagtcagcactgatgtccgctttgccaacatgctgggccagccgggctccacccctctggacttattcaagttctatgtggaggagttgaaggcacgattccatgatgaaaagaagatcattaaggacatccttaaggaccggggcttctgcgtggaggtgaacacggcctttgaggacttcgcccacgtcataagctttgacaagagggctgccgcactggacgcaggcaacatcaagctgaccttcaatagtctgctggagaaagcagaggcacgggagagggagcgggagaaggaggaggcacgcaggatgcggcgcagggaagctgcctttcgaagcatgctgaggcaggctgtgcctgctctggagctaggcactgcctgggaagaggtccgtgagcgttttgtgtgtgactcagcctttgagcagatcaccctggagtcggagcggatccggctcttccgggagttcctacaggtgctggagactgaatgccagcacctccacaccaaaggccgaaagcatggcaggaaaggcaagaagcaccatcacaagcgttcccactcaccctcaggctctgagtcagaagaagaggagctgcccccaccatctctccggccccccaagcggaggaggcggaacccctcagagtcaggctctgagccctcttcctcacttgattcagttgaaagtgggggtgctgcccttggaggacggggctccccttcctcccatcttcttggagcagatcatggccttcggaaagccaagaaaccaaaaaagaaaactaagaagagaagacacaagtcgaatagtcctgagagtgagacagaccctgaggagaaagctggcaaggagagcgatgagaaagaacaagaacaggacaaggacagggagctccaacaggcagagctccctaaccgttccccaggctttggaatcaagaaggagaagacaggctgggacacgtcagaaagtgagctgagtgagggtgagctggagaggcggcggcggacactcctacagcagctggatgatcaccagtgacccaatgagctgttctctgcctcgggtctgtgtgaggccatggctcctgggccaccctcaccgtctgcctcagacttcttccttagtctggtctgtgtccactttttctaaagtaaccccacccccagcacaccattgttggcacctctcaaggttgctcttggtgttcaagggtcccctactccctggactagtgcagtccttgccctcagccccagaccagagatgggtggtatatgccatgtggggtgggtgatgccagtagataaaagtgtgagagaaggggtctccagggaagagtcacaggctgttggacgcagcctgggtggcagagggcagggtcatcaccctctagcatcagtgcctgctcctgcctgccctggccctgaggctccaccacttcttcctccacccaggacctaatgtacgtgtgttttgttttttgttttttaaataacaatatttataacatggccagtgactcttttccatgtgctactggggcaggctggggactggacacatgcccagcagagggcactagtgtctcatggcaggcctgcttccctttgtgtggctagagcccacctagccggttctcctttccccagagttctgatctcatctcctccaaaacagatgcagtgccccaaagatttcttttctatccccatagcccaggtcagactaaatggccaccctagccccctaagctcagaaagaggagacaaagtcaggcctggtgcatcaagcctttgttgagagggggagagtctgaggtttatgtacagtaagaggaaagggaggtggtacatgtacaaaaaagtgggcccccacattcccttccaggggcagaggagaaacgggaaggtaagcaaatagccaagaccaccatgctccttgtcccctgccaaaaaaaaa

SEQ ID NO: 381116 - DNA, 3667 bp, Homo sapiens
cgattctggtccccggcccccagcagcgcctgcccccttcccaccggggccccccatgatgccaccacccttcatgccccctccagggatccccccaccctttcctccgatggggctaccccccatgagtcagagaccaccagctatcccccccatgccacctggcatcctgcccccaatgcttccaccaatgggggcgccaccaccactcacacagataccaggaatggtacctccgatgatgccaggaatgctgatgccagcggtgcctgtcaccgcagcgacggctccgggtgcggacaccgccagctctgctgtggctgggacaggccctccgagggccctatggagtgagcatgtggccccagatgggcgcatctactactacaatgctgacgacaagcagtccgtgtgggagaagcccagcgtgctcaagtccaaggcagagctgctcctgtcccaatgtccctggaaagagtacaagtcggacacaggcaaaccttattactataacaaccagagtaaagagtcccgctggacccggcccaaggatctggatgacctagaggttctagtcaaacaagaggctgcagggaaacagcagcagcagctgccacagacacttcagccacagccacctcagccacagcctgaccccccacctgtgcctcctggccccaccccagtgcccacaggcctcctggaacctgagccaggtgggagtgaagattgtgatgtgttggaggccacccagcccctggaacaggggttcctgcagcagctggaggagggccccagcagttctggacagcatcagccacagcaggaggaggaggaatcaaagccagaaccagagaggtctggcctcagttggagcaaccgggagaaggcaaagcaggcattcaaggaactgctgagggacaaggctgtcccctccaatgcctcatgggaacaggccatgaagatggtggtcaccgacccccgttacagtgccttgcctaaactgagtgagaaaaagcaggcattcaatgcctacaaggcgcagcgggagaaggaggagaaggaggaggcccggctaagggccaaagaggccaagcagaccctgcagcatttcctggagcagcatgaacgcatgacctccaccacccgctaccggcgggcagaacagacctttggggagctggaggtctgggctgtggtccctgagagggatcgaaaagaggtttatgatgatgtcctcttcttcctggccaagaaggagaaggaacaggccaagcagctccggcgccgcaatatccaggccctaaagagcatcctggatgggatgagtagtgtcaacttccaaaccacgtggtcccaggcccagcagtacctcatggataaccccagctttgctcaggaccatcagctgcagaacatggacaaggaagatgcactgatctgttttgaggagcacatccgagctttggagagggaagaggaggaggaacgggagcgggcccggcttcgggagcgacgccaacaacgcaagaatcgggaggccttccagaccttcctggacgagctgcatgagacagggcagctgcactctatgtccacctggatggagctatatccagcagtcagcactgatgtccgctttgccaacatgctgggccagccgggctccacccctctggacttattcaagttctatgtggaggagttgaaggcacgattccatgatgaaaagaagatcattaaggacatccttaaggaccggggcttctgcgtggaggtgaacacggcctttgaggacttcgcccacgtcataagctttgacaagagggctgccgcactggacgcaggcaacatcaagctgaccttcaatagtctgctggagaaagcagaggcacgggagagggagcgggagaaggaggaggcacgcaggatgcggcgcagggaagctgcctttcgaagcatgctgaggcaggctgtgcctgctctggagctaggcactgcctgggaagaggtccgtgagcgttttgtgtgtgactcagcctttgagcagatcaccctggagtcggagcggatccggctcttccgggagttcctacaggtgctggagactgaatgccagcacctccacaccaaaggccgaaagcatggcaggaaaggcaagaagcaccatcacaagcgttcccactcaccctcaggctctgagtcagaagaagaggagctgcccccaccatctctccggccccccaagcggaggaggcggaacccctcagagtcaggctctgagccctcttcctcacttgattcagttgaaagtgggggtgctgcccttggaggacggggctccccttcctcccatcttcttggagcagatcatggccttcggaaagccaagaaaccaaaaaagaaaactaagaagagaagacacaagtcgaatagtcctgagagtgagacagaccctgaggagaaagctggcaaggagagcgatgagaaagaacaagaacaggacaaggacagggagctccaacaggcagagctccctaaccgttccccaggctttggaatcaagaaggagaagacaggctgggacacgtcagaaagtgagctgagtgagggtgagctggagaggcggcggcggacactcctacagcagctggatgatcaccagtgacccaatgagctgttctctgcctcgggtctgtgtgaggccatggctcctgggccaccctcaccgtctgcctcagacttcttccttagtctggtctgtgtccactttttctaaagtaaccccacccccagcacaccattgttggcacctctcaaggttgctcttggtgttcaagggtcccctactccctggactagtgcagtccttgccctcagccccagaccagagatgggtggtatatgccatgtggggtgggtgatgccagtagataaaagtgtgagagaaggggtctccagggaagagtcacaggctgttggacgcagcctgggtggcagagggcagggtcatcaccctctagcatcagtgcctgctcctgcctgccctggccctgaggctccaccacttcttcctccacccaggacctaatgtacgtgtgttttgttttttgttttttaaataacaatatttataacatgaaaaaaaaaaaaaaaaaaaaaaaaaaaaaaaaaaaaaacaaaaaaaaaaaaaaaacaaaaaacaaacaaaaaaaaaaaacaactattcgtgtgcggcgcgcgccgccgcccccaaaaaaaactttctaaaaacacacccctctcttagtgggaggagccggcgccgcccacaataggtgtataagaccatgcgagggcaaaatcgggcttcagacgagaaaacacgcctgtagcaacaaaacgaggggcggtgctactcccacataagaaaaaccaccccgcgggggcaaccacagagttgttgtgatagaaacaccacgcacacggatgctttccgcggagaatctacgaggcgtactcatcacacaaggaacagcaccacacagagcagcaccgaattataaaagatgacccccccgagtcgtgagttaagcgacgaacaagacgctaaagcagaacgaagactaaagagaaaaggacaaagcaaaaaagcaagaaacacagaaaaccgaacaaaggcaagcaa

SEQ ID NO: 381117 - DNA, 3662 bp, Homo sapiens
gttcctgcctatggagggcagatgagcccaggagtccctcttgctttccacagccaggcagaccatgatggtgcctttcatcccataggataatgcaaagagccctggacttagaacaggcagacagatccgggtcagggagatccatggaggatgctcatgagaaatatattctcttgagatctgttgaattttaagtgtctgaaatatccagtctaggatgtttgaaaatcaggagagatgaaggatgagattgcgagggagtacagattgggtagtgaaagaggactaagtgctgttctcaggaacatgcatatgcaagagaataaaaggtcagagagggtgtgacctggagaggggagtgttgaagaagtaagtggtagaggcactgaggaccagatgagtgaggacaaagaaggcggccttggatttggctagtagacacaagcaacctttgggagagtagagtcatggaggtggcatgggggcagcacatgttttagagtcagattactcctggttgcttattggctctgagacctccgtaagttccgtgtctctgagcctgtttgctcacctgtaaatcagggataattcataggtaaggttgtgagaattaaataacatctgtaaagtgtctaataggttctcaataaatgtttattccttttcctttctgctgcatttcaagaggttttgaaacaatggaaaagagcagaggtagttagcttgatgaaggggagagcatggtggaaaggatgttccaggttaggtgaggtgtctgcttgatggaaggagccagtaacaagggtgacttggagctttcaattccctgagaatgaatgctgtgttgataaggactgtagcagggttgaggaagtacccttggaaagaagaaagaggagcacacctctgccatcagcaaaaaggccagaggaggtgagagctatgtggagggagagaaagggaatctggcctgtgcttaactgacgtgagagccagactttgaactccagtggcttcatttaccactcatgtcatcttgggccaactgagatcacttttctaagcctctgcttcactggaatgttgtgaggcctaaatgagaagcatagagcctggcctgtggacatgtttttagtattggtggggagctgcacacctggtggcctccgtttctcccatggactaagtcatctgggtgggtgtggtgcttgaaagcagacactttggggatagagagcccccccagggtagggttcttgcccagccgtatatcagctgtgagaccttgggcaagtgctctagtttctctgaaccttggtttctccttctgtgtaaaattaggatactaggacctattcttaaatgtagaaccaagaggattaaatgagataatgtgtgaaacactcatcatggtacctggtacatagtaagcactcaataaatagacccaaagggtaggggccagcaaatgttgattgagaatgcatggaagcactgctgagcagcaggagggcccagctggggccagagctttaagccaaaggaacaaaagttaattttgagaaactcagcattaatcagcagttgggagacatctcccaaccccttcagctctgtgtgacatccaaaccaagggtaggcatgggggcttaattgtcaagtgatgaggacttggataacttggtttctaatgcagaccacagtcctgtggatctcttccagaggcaagggccttcttgaccatctgtaatgtgaccactctgcctgccagctttggcctcaggcacgtggtgcccctgcttcatgcactgctgtacccacaggaccggggcttctgcgtggaggtgaacacggcctttgaggacttcgcccacgtcataagctttgacaagagggctgccgcactggacgcaggcaacatcaagctgaccttcaatagtctgctggagaaagcagaggcacgggagagggagcgggagaaggaggaggcacgcaggatgcggcgcagggaagctgcctttcgaagcatgctgaggcaggctgtgcctgctctggagctaggcactgcctgggaagaggtccgtgagcgttttgtgtgtgactcagcctttgagcagatcaccctggagtcggagcggatccggctcttccgggagttcctacaggtgctggagactgaatgccagcacctccacaccaaaggccgaaagcatggcaggaaaggcaagaagcaccatcacaagcgttcccactcaccctcaggctctgagtcagaagaagaggagctgcccccaccatctctccggccccccaagcggaggaggcggaacccctcagagtcaggctctgagccctcttcctcacttgattcagttgaaagtgggggtgctgcccttggaggacggggctccccttcctcccatcttcttggagcagatcatggccttcggaaagccaagaaaccaaaaaagaaaactaagaagagaagacacaagtcgaatagtcctgagagtgagacagaccctgaggagaaagctggcaaggagagcgatgagaaagaacaagaacaggacaaggacagggagctccaacaggcagagctccctaaccgttccccaggctttggaatcaagaaggagaagacaggctgggacacgtcagaaagtgagctgagtgagggtgagctggagaggcggcggcggacactcctacagcagctggatgatcaccagtgacccaatgagctgttctctgcctcgggtctgtgtgaggccatggctcctgggccaccctcaccgtctgcctcagacttcttccttagtctggtctgtgtccactttttctaaagtaaccccacccccagcacaccattgttggcacctctcaaggttgctcttggtgttcaagggtcccctactccctggactagtgcagtccttgccctcagccccagaccagagatgggtggtatatgccatgtggggtgggtgatgccagtagataaaagtgtgagagaaggggtctccagggaagagtcacaggctgttggacgcagcctgggtggcagagggcagggtcatcaccctctagcatcagtgcctgctcctgcctgccctggccctgaggctccaccacttcttcctccacccaggacctaatgtacgtgtgttttgttttttgttttttaaataacaatatttataacatggccagtgactcttttccatgtgctactggggcaggctggggactggacacatgcccagcagagggcactagtgtctcatggcaggcctgcttccctttgtgtggctagagcccacctagccggttctcctttccccagagttctgatctcatctcctccaaaacagatgcagtgccccaaagatttcttttctatccccatagcccaggtcagactaaatggccaccctagccccctaagctcagaaagaggagacaaagtcaggcctggtgcatcaagcctttgttgagagggggagagtctgaggtttatgtacagtaagaggaaagggaggtggtacatgtacaaaaaagtgggcccccacattcccttccaggggcagaggagaaacgggaaggtaagcaaatagccaagaccaccatgctccttgtcccctgccaaaaaaaaa

SEQ ID NO: 381118 - DNA, 3624 bp, Homo sapiens
gttcctgcctatggagggcagatgagcccaggagtccctcttgctttccacagccaggcagaccatgatggtgcctttcatcccataggataatgcaaagagccctggacttagaacaggcagacagatccgggtcagggagatccatggaggatgctcatgagaaatatattctcttgagatctgttgaattttaagtgtctgaaatatccagtctaggatgtttgaaaatcaggagagatgaaggatgagattgcgagggagtacagattgggtagtgaaagaggactaagtgctgttctcaggaacatgcatatgcaagagaataaaaggtcagagagggtgtgacctggagaggggagtgttgaagaagtaagtggtagaggcactgaggaccagatgagtgaggacaaagaaggcggccttggatttggctagtagacacaagcaacctttgggagagtagagtcatggaggtggcatgggggcagcacatgttttagagtcagattactcctggttgcttattggctctgagacctccgtaagttccgtgtctctgagcctgtttgctcacctgtaaatcagggataattcataggtaaggttgtgagaattaaataacatctgtaaagtgtctaataggttctcaataaatgtttattccttttcctttctgctgcatttcaagaggttttgaaacaatggaaaagagcagaggtagttagcttgatgaaggggagagcatggtggaaaggatgttccaggttaggtgaggtgtctgcttgatggaaggagccagtaacaagggtgacttggagctttcaattccctgagaatgaatgctgtgttgataaggactgtagcagggttgaggaagtacccttggaaagaagaaagaggagcacacctctgccatcagcaaaaaggccagaggaggtgagagctatgtggagggagagaaagggaatctggcctgtgcttaactgacgtgagagccagactttgaactccagtggcttcatttaccactcatgtcatcttgggccaactgagatcacttttctaagcctctgcttcactggaatgttgtgaggcctaaatgagaagcatagagcctggcctgtggacatgtttttagtattggtggggagctgcacacctggtggcctccgtttctcccatggactaagtcatctgggtgggtgtggtgcttgaaagcagacactttggggatagagagcccccccagggtagggttcttgcccagccgtatatcagctgtgagaccttgggcaagtgctctagtttctctgaaccttggtttctccttctgtgtaaaattaggatactaggacctattcttaaatgtagaaccaagaggattaaatgagataatgtgtgaaacactcatcatggtacctggtacatagtaagcactcaataaatagacccaaagggtaggggccagcaaatgttgattgagaatgcatggaagcactgctgagcagcaggagggcccagctggggccagagctttaagccaaaggaacaaaagttaattttgagaaactcagcattaatcagcagttgggagacatctcccaaccccttcagctctgtgtgacatccaaaccaagggtaggcatgggggcttaattgtcaagtgatgaggacttggataacttggtttctaatgcagaccacagtcctgtggatctcttccagaggcaagggccttcttgaccatctgtaatgtgaccactctgcctgccagctttggcctcaggcacgtggtgcccctgcttcatgcactgctgtacccacaggaccggggcttctgcgtggaggtgaacacggcctttgaggacttcgcccacgtcataagctttgacaagagggctgccgcactggacgcaggcaacatcaagctgaccttcaatagtctgctggagaaagcagaggcacgggagagggagcgggagaaggaggaggcacgcaggatgcggcgcagggaagctgcctttcgaagcatgctgaggcaggctgtgcctgctctggagctaggcactgcctgggaagaggtccgtgagcgttttgtgtgtgactcagcctttgagcagatcaccctggagtcggagcggatccggctcttccgggagttcctacaggtgctggagactgaatgccagcacctccacaccaaaggccgaaagcatggcaggaaagggctctgagtcagaagaagaggagctgcccccaccatctctccggccccccaagcggaggaggcggaacccctcagagtcaggctctgagccctcttcctcacttgattcagttgaaagtgggggtgctgcccttggaggacggggctccccttcctcccatcttcttggagcagatcatggccttcggaaagccaagaaaccaaaaaagaaaactaagaagagaagacacaagtcgaatagtcctgagagtgagacagaccctgaggagaaagctggcaaggagagcgatgagaaagaacaagaacaggacaaggacagggagctccaacaggcagagctccctaaccgttccccaggctttggaatcaagaaggagaagacaggctgggacacgtcagaaagtgagctgagtgagggtgagctggagaggcggcggcggacactcctacagcagctggatgatcaccagtgacccaatgagctgttctctgcctcgggtctgtgtgaggccatggctcctgggccaccctcaccgtctgcctcagacttcttccttagtctggtctgtgtccactttttctaaagtaaccccacccccagcacaccattgttggcacctctcaaggttgctcttggtgttcaagggtcccctactccctggactagtgcagtccttgccctcagccccagaccagagatgggtggtatatgccatgtggggtgggtgatgccagtagataaaagtgtgagagaaggggtctccagggaagagtcacaggctgttggacgcagcctgggtggcagagggcagggtcatcaccctctagcatcagtgcctgctcctgcctgccctggccctgaggctccaccacttcttcctccacccaggacctaatgtacgtgtgttttgttttttgttttttaaataacaatatttataacatggccagtgactcttttccatgtgctactggggcaggctggggactggacacatgcccagcagagggcactagtgtctcatggcaggcctgcttccctttgtgtggctagagcccacctagccggttctcctttccccagagttctgatctcatctcctccaaaacagatgcagtgccccaaagatttcttttctatccccatagcccaggtcagactaaatggccaccctagccccctaagctcagaaagaggagacaaagtcaggcctggtgcatcaagcctttgttgagagggggagagtctgaggtttatgtacagtaagaggaaagggaggtggtacatgtacaaaaaagtgggcccccacattcccttccaggggcagaggagaaacgggaaggtaagcaaatagccaagaccaccatgctccttgtcccctgccaaaaaaaaa

SEQ ID NO: 381119 - DNA, 3719 bp, Homo sapiens
gttcctgcctatggagggcagatgagcccaggagtccctcttgctttccacagccaggcagaccatgatggtgcctttcatcccataggataatgcaaagagccctggacttagaacaggcagacagatccgggtcagggagatccatggaggatgctcatgagaaatatattctcttgagatctgttgaattttaagtgtctgaaatatccagtctaggatgtttgaaaatcaggagagatgaaggatgagattgcgagggagtacagattgggtagtgaaagaggactaagtgctgttctcaggaacatgcatatgcaagagaataaaaggtcagagagggtgtgacctggagaggggagtgttgaagaagtaagtggtagaggcactgaggaccagatgagtgaggacaaagaaggcggccttggatttggctagtagacacaagcaacctttgggagagtagagtcatggaggtggcatgggggcagcacatgttttagagtcagattactcctggttgcttattggctctgagacctccgtaagttccgtgtctctgagcctgtttgctcacctgtaaatcagggataattcataggtaaggttgtgagaattaaataacatctgtaaagtgtctaataggttctcaataaatgtttattccttttcctttctgctgcatttcaagaggttttgaaacaatggaaaagagcagaggtagttagcttgatgaaggggagagcatggtggaaaggatgttccaggttaggtgaggtgtctgcttgatggaaggagccagtaacaagggtgacttggagctttcaattccctgagaatgaatgctgtgttgataaggactgtagcagggttgaggaagtacccttggaaagaagaaagaggagcacacctctgccatcagcaaaaaggccagaggaggtgagagctatgtggagggagagaaagggaatctggcctgtgcttaactgacgtgagagccagactttgaactccagtggcttcatttaccactcatgtcatcttgggccaactgagatcacttttctaagcctctgcttcactggaatgttgtgaggcctaaatgagaagcatagagcctggcctgtggacatgtttttagtattggtggggagctgcacacctggtggcctccgtttctcccatggactaagtcatctgggtgggtgtggtgcttgaaagcagacactttggggatagagagcccccccagggtagggttcttgcccagccgtatatcagctgtgagaccttgggcaagtgctctagtttctctgaaccttggtttctccttctgtgtaaaattaggatactaggacctattcttaaatgtagaaccaagaggattaaatgagataatgtgtgaaacactcatcatggtacctggtacatagtaagcactcaataaatagacccaaagggtaggggccagcaaatgttgattgagaatgcatggaagcactgctgagcagcaggagggcccagctggggccagagctttaagccaaaggaacaaaagttaattttgagaaactcagcattaatcagcagttgggagacatctcccaaccccttcagctctgtgtgacatccaaaccaagggtaggcatgggggcttaattgtcaagtgatgaggacttggataacttggtttctaatgcagaccacagtcctgtggatctcttccagaggcaagggccttcttgaccatctgtaatgtgaccactctgcctgccagctttggcctcaggcacgtggtgcccctgcttcatgcactgctgtacccacaggaccggggcttctgcgtggaggtgaacacggcctttgaggacttcgcccacgtcataagctttgacaagagggctgccgcactggacgcaggcaacatcaagctgaccttcaatagtctgctggagaaagcagaggcacgggagagggagcgggagaaggaggaggcacgcaggatgcggcgcagggaagctgcctttcgaagcatgctgaggcaggctgtgcctgctctggagctaggcactgcctgggaagaggtccgtgagcgttttgtgtgtgactcagcctttgagcagatcaccctggagtcggagcggatccggctcttccgggagttcctacaggtgctggagactgaatgccagcacctccacaccaaaggccgaaagcatggcaggaaagggctctgagtcagaagaagaggagctgcccccaccatctctccggccccccaagcggaggaggcggaacccctcagagtcaggctctgagccctcttcctcacttgattcagttgaaagtgggggtgctgcccttggaggacggggctccccttcctcccatcttcttggagcagatcatggccttcggaaagccaagaaaccaaaaaagaaaactaagaagagaagacacaagtcgaatagtcctgagagtgagacagaccctgaggagaaagctggcaaggagagcgatgagaaagaacaagaacaggacaaggacagggagctccaacaggcagagctccctaaccgttccccaggctttggaatcaagaaggagaaggtgaggggcaggggccctaggccagtcagcacgctggtcaagcttccacggcccttagtgcaggctaagggtgaactgtgcctttgctccaacagacaggctgggacacgtcagaaagtgagctgagtgagggtgagctggagaggcggcggcggacactcctacagcagctggatgatcaccagtgacccaatgagctgttctctgcctcgggtctgtgtgaggccatggctcctgggccaccctcaccgtctgcctcagacttcttccttagtctggtctgtgtccactttttctaaagtaaccccacccccagcacaccattgttggcacctctcaaggttgctcttggtgttcaagggtcccctactccctggactagtgcagtccttgccctcagccccagaccagagatgggtggtatatgccatgtggggtgggtgatgccagtagataaaagtgtgagagaaggggtctccagggaagagtcacaggctgttggacgcagcctgggtggcagagggcagggtcatcaccctctagcatcagtgcctgctcctgcctgccctggccctgaggctccaccacttcttcctccacccaggacctaatgtacgtgtgttttgttttttgttttttaaataacaatatttataacatggccagtgactcttttccatgtgctactggggcaggctggggactggacacatgcccagcagagggcactagtgtctcatggcaggcctgcttccctttgtgtggctagagcccacctagccggttctcctttccccagagttctgatctcatctcctccaaaacagatgcagtgccccaaagatttcttttctatccccatagcccaggtcagactaaatggccaccctagccccctaagctcagaaagaggagacaaagtcaggcctggtgcatcaagcctttgttgagagggggagagtctgaggtttatgtacagtaagaggaaagggaggtggtacatgtacaaaaaagtgggcccccacattcccttccaggggcagaggagaaacgggaaggtaagcaaatagccaagaccaccatgctccttgtcccctgccaaaaaaaaa

SEQ ID NO: 381120 - DNA, 2127 bp, Homo sapiens
gttcctgcctatggagggcagatgagcccaggagtccctcttgctttccacagccaggcagaccatgatggtgcctttcatcccataggataatgcaaagagccctggacttagaacaggcagacagatccgggtcagggagatccatggaggatgctcatgagaaatatattctcttgagatctgttgaattttaagtgtctgaaatatccagtctaggatgtttgaaaatcaggagagatgaaggatgagattgcgagggagtacagattgggtagtgaaagaggactaagtgctgttctcaggaacatgcatatgcaagagaataaaaggtcagagagggtgtgacctggagaggggagtgttgaagaagtaagtggtagaggcactgaggaccagatgagtgaggacaaagaaggcggccttggatttggctagtagacacaagcaacctttgggagagtagagtcatggaggtggcatgggggcagcacatgttttagagtcagattactcctggttgcttattggctctgagacctccgtaagttccgtgtctctgagcctgtttgctcacctgtaaatcagggataattcataggtaaggttgtgagaattaaataacatctgtaaagtgtctaataggttctcaataaatgtttattccttttcctttctgctgcatttcaagaggttttgaaacaatggaaaagagcagaggtagttagcttgatgaaggggagagcatggtggaaaggatgttccaggttaggtgaggtgtctgcttgatggaaggagccagtaacaagggtgacttggagctttcaattccctgagaatgaatgctgtgttgataaggactgtagcagggttgaggaagtacccttggaaagaagaaagaggagcacacctctgccatcagcaaaaaggccagaggaggtgagagctatgtggagggagagaaagggaatctggcctgtgcttaactgacgtgagagccagactttgaactccagtggcttcatttaccactcatgtcatcttgggccaactgagatcacttttctaagcctctgcttcactggaatgttgtgaggcctaaatgagaagcatagagcctggcctgtggacatgtttttagtattggtggggagctgcacacctggtggcctccgtttctcccatggactaagtcatctgggtgggtgtggtgcttgaaagcagacactttggggatagagagcccccccagggtagggttcttgcccagccgtatatcagctgtgagaccttgggcaagtgctctagtttctctgaaccttggtttctccttctgtgtaaaattaggatactaggacctattcttaaatgtagaaccaagaggattaaatgagataatgtgtgaaacactcatcatggtacctggtacatagtaagcactcaataaatagacccaaagggtaggggccagcaaatgttgattgagaatgcatggaagcactgctgagcagcaggagggcccagctggggccagagctttaagccaaaggaacaaaagttaattttgagaaactcagcattaatcagcagttgggagacatctcccaaccccttcagctctgtgtgacatccaaaccaagggtaggcatgggggcttaattgtcaagtgatgaggacttggataacttggtttctaatgcagaccacagtcctgtggatctcttccagaggcaagggccttcttgaccatctgtaatgtgaccactctgcctgccagctttggcctcaggcacgtggtgcccctgcttcatgcactgctgtacccacaggaccggggcttctgcgtggaggtgaacacggcctttgaggacttcgcccacgtcataagctttgacaagagggctgccgcactggacgcaggcaacatcaagctgaccttcaatagtgtgaggggctgggcggggcgtgggaagttctctaattcatctgtgtcttgctccattccttctcactcactgtcccactgactatattcccaattcaggggatggtggtagaagcccagaccctaactttccacctcctaaggtatgcctgagtgggacctggcatccaccctcctgggtg

SEQ ID NO: 381121 - DNA, 2466 bp, Homo sapiens
gttcctgcctatggagggcagatgagcccaggagtccctcttgctttccacagccaggcagaccatgatggtgcctttcatcccataggataatgcaaagagccctggacttagaacaggcagacagatccgggtcagggagatccatggaggatgctcatgagaaatatattctcttgagatctgttgaattttaagtgtctgaaatatccagtctaggatgtttgaaaatcaggagagatgaaggatgagattgcgagggagtacagattgggtagtgaaagaggactaagtgctgttctcaggaacatgcatatgcaagagaataaaaggtcagagagggtgtgacctggagaggggagtgttgaagaagtaagtggtagaggcactgaggaccagatgagtgaggacaaagaaggcggccttggatttggctagtagacacaagcaacctttgggagagtagagtcatggaggtggcatgggggcagcacatgttttagagtcagattactcctggttgcttattggctctgagacctccgtaagttccgtgtctctgagcctgtttgctcacctgtaaatcagggataattcataggtaaggttgtgagaattaaataacatctgtaaagtgtctaataggttctcaataaatgtttattccttttcctttctgctgcatttcaagaggttttgaaacaatggaaaagagcagaggtagttagcttgatgaaggggagagcatggtggaaaggatgttccaggttaggtgaggtgtctgcttgatggaaggagccagtaacaagggtgacttggagctttcaattccctgagaatgaatgctgtgttgataaggactgtagcagggttgaggaagtacccttggaaagaagaaagaggagcacacctctgccatcagcaaaaaggccagaggaggtgagagctatgtggagggagagaaagggaatctggcctgtgcttaactgacgtgagagccagactttgaactccagtggcttcatttaccactcatgtcatcttgggccaactgagatcacttttctaagcctctgcttcactggaatgttgtgaggcctaaatgagaagcatagagcctggcctgtggacatgtttttagtattggtggggagctgcacacctggtggcctccgtttctcccatggactaagtcatctgggtgggtgtggtgcttgaaagcagacactttggggatagagagcccccccagggtagggttcttgcccagccgtatatcagctgtgagaccttgggcaagtgctctagtttctctgaaccttggtttctccttctgtgtaaaattaggatactaggacctattcttaaatgtagaaccaagaggattaaatgagataatgtgtgaaacactcatcatggtacctggtacatagtaagcactcaataaatagacccaaagggtaggggccagcaaatgttgattgagaatgcatggaagcactgctgagcagcaggagggcccagctggggccagagctttaagccaaaggaacaaaagttaattttgagaaactcagcattaatcagcagttgggagacatctcccaaccccttcagctctgtgtgacatccaaaccaagggtaggcatgggggcttaattgtcaagtgatgaggacttggataacttggtttctaatgcagaccacagtcctgtggatctcttccagaggcaagggccttcttgaccatctgtaatgtgaccactctgcctgccagctttggcctcaggcacgtggtgcccctgcttcatgcactgctgtacccacaggaccggggcttctgcgtggaggtgaacacggcctttgaggacttcgcccacgtcataagctttgacaagagggctgccgcactggacgcaggcaacatcaagctgaccttcaatagtctgctggagaaagcagaggcacgggagagggagcgggagaaggaggaggcacgcaggatgcggcgcagggaagctgcctttcgaagcatgctgaggcaggctgtgcctgctctggagctaggcactgcctgggaagaggtccgtgagcgttttgtgtgtgactcagcctttgagcagatcaccctggagtcggagcggatccggctcttccgggagttcctacaggtgctggagactgaatgccagcacctccacaccaaaggccgaaagcatggcaggaaaggcaagaagcaccatcacaagcgttcccactcaccctcagtgagtaagcgtgtagaagggacatggggtgaagctgggttgttttggggaaataaacactttgttttccccttacaatatctcccttggagggaagtttgaggattcctttggccctgggtcctcctcctctctcgaattcccagacgagggcttctggagggcagagaacctctgcactgacatgtatctgctgatc

SEQ ID NO: 381122 - DNA, 1272 bp, Homo sapiens
aaatgaggggaggtcctgaggtgactcctcacccctcctcccacctgccctgctgacttcagagaggggagaaaactgaaaaaaaagaaaactaagaagagaagacacaagtcgaatagtcctgagagtgagacagaccctgaggagaaagctggcaaggagagcgatgagaaagaacaagaacaggacaaggacagggagctccaacaggcagagctccctaaccgttccccaggctttggaatcaagaaggagaagacaggctgggacacgtcagaaagtgagctgagtgagggtgagctggagaggcggcggcggacactcctacagcagctggatgatcaccagtgacccaatgagctgttctctgcctcgggtctgtgtgaggccatggctcctgggccaccctcaccgtctgcctcagacttcttccttagtctggtctgtgtccactttttctaaagtaaccccacccccagcacaccattgttggcacctctcaaggttgctcttggtgttcaagggtcccctactccctggactagtgcagtccttgccctcagccccagaccagagatgggtggtatatgccatgtggggtgggtgatgccagtagataaaagtgtgagagaaggggtctccagggaagagtcacaggctgttggacgcagcctgggtggcagagggcagggtcatcaccctctagcatcagtgcctgctcctgcctgccctggccctgaggctccaccacttcttcctccacccaggacctaatgtacgtgtgttttgttttttgttttttaaataacaatatttataacatggccagtgactcttttccatgtgctactggggcaggctggggactggacacatgcccagcagagggcactagtgtctcatggcaggcctgcttccctttgtgtggctagagcccacctagccggttctcctttccccagagttctgatctcatctcctccaaaacagatgcagtgccccaaagatttcttttctatccccatagcccaggtcagactaaatggccaccctagccccctaagctcagaaagaggagacaaagtcaggcctggtgcatcaagcctttgttgagagggggagagtctgaggtttatgtacagtaagaggaaagggaggtggtacatgtacaaaaaagtgggcccccacattcccttccaggggcagaggagaaacgggaaggtaagcaaatagccaagaccaccatgctccttgtcccctgccaaaaaaaaa

SEQ ID NO: 381123 - DNA, 1165 bp, Homo sapiens
  misc_feature (1023)..(1023): n is a, c, g, or t
  misc_feature (1119)..(1119): n is a, c, g, or t
cgattctggtccccggcccccagcagcgcctgcccccttcccaccggggccccccatgatgccaccacccttcatgccccctccagggatccccccaccctttcctccgatggggctaccccccatgagtcagagaccaccagctatcccccccatgccacctggcatcctgcccccaatgcttccaccaatgggggcgccaccaccactcacacagataccaggaatggtacctccgatgatgccaggaatgctgatgccagcggtgcctgtcaccgcagcgacggctccgggtgcggacaccgccagctctgctgtggctgggacaggccctccgagggccctatggagtgagcatgtggccccagatgggcgcatctactactacaatgctgacgacaagcagtccgtgtgggagaagcccagcgtgctcaagtccaaggcagagctgctcctgtcccaatgtccctggaaagagtacaagtcggacacaggcaaaccttattactataacaaccagagtaaagagtcccgctggacccggcccaaggatctggatgacctagaggttctagtcaaacaagaggctgcagggaaacagcagcagcagctgccacagacacttcagccacagccacctcagccacagcctgaccccccacctgtgcctcctggccccaccccagtgcccacaggcctcctggaacctgagccaggtgggagtgaagattgtgatgtgttggaggccacccagcccctggaacaggggttcctgcagcagctggaggagggccccagcagttctggacagcatcagccacagcaggaggaggaggaatcaaagccagaaccagagaggtctggcctcagttggagcaaccgggagaaggcaaagcaggcattcaaggaactgctgagggacaaggctgtcccctcctcctcctccgtctgtttcctttcacctctgcgccaggtcggtcctccctgccaaccttccccagctccaatatgtagcagtctctntggatggcggagagtgaaggagacggagaaacgcgccccatcccttccgccggctcctttcccccccgaccctattcaggttttaagtcaaaaatntcgatatgtcattatgcactttacagatgaggggaggggccgcagt

SEQ ID NO: 381124 - DNA, 331 bp, Homo sapiens
atccttcctggggctaagtctggtgctgtcctcacccttcttcctctgcctctagcagactgaatgccagcacctccacaccaaaggccgaaagcatggcaggaaaggcaagaagcaccatcacaagcgttcccactcaccctcagtgagtaagcgtgtagaagggacatggggtgaagctgggttgttttggggaaataaacactttgttttccccttacaatatctcccttggagggaagtttgaggattcctttggccctgggtcctcctcctctctcgaattcccagacgagggcttctggagggcagagaacctctgcactgacat

SEQ ID NO: 381125 - DNA, 443 bp, Homo sapiens
tgaggaggtgggctctggactcttacagaatagtcctgagagtgagacagaccctgaggagaaagctggcaaggagagcgatgagaaagaacaagaacaggacaaggacagggagctccaacaggcagagctccctaaccgttccccaggctttggaatcaagaaggagaaggtgaggggcaggggccctaggccagtcagcacgctggtcaagcttccacggcccttagtgcaggctaagggtgaactgtgcctttgctccaacagacaggctgggacacgtcagaaagtgagctgagtgagggtgagctggagaggcggcggcggacactcctacagcagctggatgatcaccagtgacccaatgagctgttctctgcctcgggtctgtgtgaggccatggctcctgggccaccctcaccgtctgcctcagacttcttcct

SEQ ID NO: 381126 - DNA, 523 bp, Homo sapiens
agagtttattccctcagcttgggggtggcagtggtggtggtagtgctaggggttactgcaggcaggtttctgtttctttgcatcccgggactggcttgttctcacctttttgttctgtccctctctgtgtatttactttctctctttttgcattgttctcagccttccatctgcatctcttcatctctgcctctcttgcctgcatttcctcaatcttgattgtccctgcctcttcctctgccattccctctcttccccctcagtctgtggctctgcctccctgtctcactctccctataactggcctctccctgctcagaccttcctggacgagctgcatgagacagggcagctgcactctatgtccacctggatggagctatatccagcagtcagcactgatgtccgctttgccaacatgctgggccagccgggtaaggcagccaggctcccccttctctggcctggcttcctgccctgccagcctctctgcaccccctactaccggctcctgtcctcggcc

SEQ ID NO: 381127 - DNA, 3476 bp, Homo sapiens
cgattctggtccccggcccccagcagcgcctgcccccttcccaccggggccccccatgatgccaccacccttcatgccccctccagggatccccccaccctttcctccgatggggctaccccccatgagtcagagaccaccagctatcccccccatgccacctggcatcctgcccccaatgcttccaccaatgggggcgccaccaccactcacacagataccaggaatggtacctccgatgatgccaggaatgctgatgccagcggtgcctgtcaccgcagcgacggctccgggtgcggacaccgccagctctgctgtggctgggacaggccctccgagggccctatggagtgagcatgtggccccagatgggcgcatctactactacaatgctgacgacaagcagtccgtgtgggagaagcccagcgtgctcaagtccaaggcagagctgctcctgtcccaatgtccctggaaagagtacaagtcggacacaggcaaaccttattactataacaaccagagtaaagagtcccgctggacccggcccaaggatctggatgacctagaggttctagtcaaacaagaggctgcagggaaacagcagcagcagctgccacagacacttcagccacagccacctcagccacagcctgaccccccacctgtgcctcctggccccaccccagtgcccacaggcctcctggaacctgagccaggtgggagtgaagattgtgatgtgttggaggccacccagcccctggaacaggggttcctgcagcagctggaggagggccccagcagttctggacagcatcagccacagcaggaggaggaggaatcaaagccagaaccagagaggtctggcctcagttggagcaaccgggagaaggcaaagcaggcattcaaggaactgctgagggacaaggctgtcccctccaatgcctcatgggaacaggccatgaagatggtggtcaccgacccccgttacagtgccttgcctaaactgagtgagaaaaagcaggcattcaatgcctacaaggcgcagcgggagaaggaggagaaggaggaggcccggctaagggccaaagaggccaagcagaccctgcagcatttcctggagcagcatgaacgcatgacctccaccacccgctaccggcgggcagaacagacctttggggagctggaggtctgggctgtggtccctgagagggatcgaaaagaggtttatgatgatgtcctcttcttcctggccaagaaggagaaggaacaggccaagcagctccggcgccgcaatatccaggccctaaagagcatcctggatgggatgagtagtgtcaacttccaaaccacgtggtcccaggcccagcagtacctcatggataaccccagctttgctcaggaccatcagctgcagaacatggacaaggaagatgcactgatctgttttgaggagcacatccgagctttggagagggaagaggaggaggaacgggagcgggcccggcttcgggagcgacgccaacaacgcaagaatcgggaggccttccagaccttcctggacgagctgcatgagacagggcagctgcactctatgtccacctggatggagctatatccagcagtcagcactgatgtccgctttgccaacatgctgggccagccgggctccacccctctggacttattcaagttctatgtggaggagttgaaggcacgattccatgatgaaaagaagatcattaaggacatccttaaggaccggggcttctgcgtggaggtgaacacggcctttgaggacttcgcccacgtcataagctttgacaagagggctgccgcactggacgcaggcaacatcaagctgaccttcaatagtctgctggagaaagcagaggcacgggagagggagcgggagaaggaggaggcacgcaggatgcggcgcagggaagctgcctttcgaagcatgctgaggcaggctgtgcctgctctggagctaggcactgcctgggaagaggtccgtgagcgttttgtgtgtgactcagcctttgagcagatcaccctggagtcggagcggatccggctcttccgggagttcctacaggtgctggagactgaatgccagcacctccacaccaaaggccgaaagcatggcaggaaaggcaagaagcaccatcacaagcgttcccactcaccctcaggctctgagtcagaagaagaggagctgcccccaccatctctccggccccccaagcggaggaggcggaacccctcagagtcaggctctgagccctcttcctcacttgattcagttgaaagtgggggtgctgcccttggaggacggggctccccttcctcccatcttcttggagcagatcatggccttcggaaagccaagaaaccaaaaaagaaaactaagaagagaagacacaagtcgaatagtcctgagagtgagacagaccctgaggagaaagctggcaaggagagcgatgagaaagaacaagaacaggacaaggacagggagctccaacaggcagagctccctaaccgttccccaggctttggaatcaagaaggagaagacaggctgggacacgtcagaaagtgagctgagtgagggtgagctggagaggcggcggcggacactcctacagcagctggatgatcaccagtgacccaatgagctgttctctgcctcgggtctgtgtgaggccatggctcctgggccaccctcaccgtctgcctcagacttcttccttagtctggtctgtgtccactttttctaaagtaaccccacccccagcacaccattgttggcacctctcaaggttgctcttggtgttcaagggtcccctactccctggactagtgcagtccttgccctcagccccagaccagagatgggtggtatatgccatgtggggtgggtgatgccagtagataaaagtgtgagagaaggggtctccagggaagagtcacaggctgttggacgcagcctgggtggcagagggcagggtcatcaccctctagcatcagtgcctgctcctgcctgccctggccctgaggctccaccacttcttcctccacccaggacctaatgtacgtgtgttttgttttttgttttttaaataacaatatttataacatggccagtgactcttttccatgtgctactggggcaggctggggactggacacatgcccagcagagggcactagtgtctcatggcaggcctgcttccctttgtgtggctagagcccacctagccggttctcctttccccagagttctgatctcatctcctccaaaacagatgcagtgccccaaagatttcttttctatccccatagcccaggtcagactaaatggccaccctagccccctaagctcagaaagagatgaactgagactggcagggtcccagggctccctaagcctagatacatctagaccagagctgaccatgggcctgcaaaaaggaa

SEQ ID NO: 381128 - DNA, 3335 bp, Homo sapiens
ggaataagatggaggtcggagcaaggacttagtatgtatcctttggcttttttctagctgctgtggctgggacaggccctccgagggccctatggagtgagcatgtggccccagatgggcgcatctactactacaatgctgacgacaagcagtccgtgtgggagaagcccagcgtgctcaagtccaaggcagagctgctcctgtcccaatgtccctggaaagagtacaagtcggacacaggcaaaccttattactataacaaccagagtaaagagtcccgctggacccggcccaaggatctggatgacctagaggttctagtcaaacaagaggctgcagggaaacagcagcagcagctgccacagacacttcagccacagccacctcagccacagcctgaccccccacctgtgcctcctggccccaccccagtgcccacaggcctcctggaacctgagccaggtgggagtgaagattgtgatgtgttggaggccacccagcccctggaacaggggttcctgcagcagctggaggagggccccagcagttctggacagcatcagccacagcaggaggaggaggaatcaaagccagaaccagagaggtctggcctcagttggagcaaccgggagaaggcaaagcaggcattcaaggaactgctgagggacaaggctgtcccctccaatgcctcatgggaacaggccatgaagatggtggtcaccgacccccgttacagtgccttgcctaaactgagtgagaaaaagcaggcattcaatgcctacaaggcgcagcgggagaaggaggagaaggaggaggcccggctaagggccaaagaggccaagcagaccctgcagcatttcctggagcagcatgaacgcatgacctccaccacccgctaccggcgggcagaacagacctttggggagctggaggtctgggctgtggtccctgagagggatcgaaaagaggtttatgatgatgtcctcttcttcctggccaagaaggagaaggaacaggccaagcagctccggcgccgcaatatccaggccctaaagagcatcctggatgggatgagtagtgtcaacttccaaaccacgtggtcccaggcccagcagtacctcatggataaccccagctttgctcaggaccatcagctgcagaacatggacaaggaagatgcactgatctgttttgaggagcacatccgagctttggagagggaagaggaggaggaacgggagcgggcccggcttcgggagcgacgccaacaacgcaagaatcgggaggccttccagaccttcctggacgagctgcatgagacagggcagctgcactctatgtccacctggatggagctatatccagcagtcagcactgatgtccgctttgccaacatgctgggccagccgggctccacccctctggacttattcaagttctatgtggaggagttgaaggcacgattccatgatgaaaagaagatcattaaggacatccttaaggaccggggcttctgcgtggaggtgaacacggcctttgaggacttcgcccacgtcataagctttgacaagagggctgccgcactggacgcaggcaacatcaagctgaccttcaatagtctgctggagaaagcagaggcacgggagagggagcgggagaaggaggaggcacgcaggatgcggcgcagggaagctgcctttcgaagcatgctgaggcaggctgtgcctgctctggagctaggcactgcctgggaagaggtccgtgagcgttttgtgtgtgactcagcctttgagcagatcaccctggagtcggagcggatccggctcttccgggagttcctacaggtgctggagactgaatgccagcacctccacaccaaaggccgaaagcatggcaggaaaggcaagaagcaccatcacaagcgttcccactcaccctcaggctctgagtcagaagaagaggagctgcccccaccatctctccggccccccaagcggaggaggcggaacccctcagagtcaggctctgagccctcttcctcacttgattcagttgaaagtgggggtgctgcccttggaggacggggctccccttcctcccatcttcttggagcagatcatggccttcggaaagccaagaaaccaaaaaagaaaactaagaagagaagacacaagtcgaatagtcctgagagtgagacagaccctgaggagaaagctggcaaggagagcgatgagaaagaacaagaacaggacaaggacagggagctccaacaggcagagctccctaaccgttccccaggctttggaatcaagaaggagaagacaggctgggacacgtcagaaagtgagctgagtgagggtgagctggagaggcggcggcggacactcctacagcagctggatgatcaccagtgacccaatgagctgttctctgcctcgggtctgtgtgaggccatggctcctgggccaccctcaccgtctgcctcagacttcttccttagtctggtctgtgtccactttttctaaagtaaccccacccccagcacaccattgttggcacctctcaaggttgctcttggtgttcaagggtcccctactccctggactagtgcagtccttgccctcagccccagaccagagatgggtggtatatgccatgtggggtgggtgatgccagtagataaaagtgtgagagaaggggtctccagggaagagtcacaggctgttggacgcagcctgggtggcagagggcagggtcatcaccctctagcatcagtgcctgctcctgcctgccctggccctgaggctccaccacttcttcctccacccaggacctaatgtacgtgtgttttgttttttgttttttaaataacaatatttataacatggccagtgactcttttccatgtgctactggggcaggctggggactggacacatgcccagcagagggcactagtgtctcatggcaggcctgcttccctttgtgtggctagagcccacctagccggttctcctttccccagagttctgatctcatctcctccaaaacagatgcagtgccccaaagatttcttttctatccccatagcccaggtcagactaaatggccaccctagccccctaagctcagaaagaggagacaaagtcaggcctggtgcatcaagcctttgttgagagggggagagtctgaggtttatgtacagtaagaggaaagggaggtggtacatgtacaaaaaagtgggcccccacattcccttccaggggcagaggagaaacgggaaggtaagcaaatagccaagaccaccatgctccttgtcccctgccaaaaaaaaa

SEQ ID NO: 381129 - DNA, 3732 bp, Homo sapiens
cgattctggtccccggcccccagcagcgcctgcccccttcccaccggggccccccatgatgccaccacccttcatgccccctccagggatccccccaccctttcctccgatggggctaccccccatgagtcagagaccaccagctatcccccccatgccacctggcatcctgcccccaatgcttccaccaatgggggcgccaccaccactcacacagataccaggaatggtacctccgatgatgccaggaatgctgatgccagcggtgcctgtcaccgcagcgacggctccgggtgcggacaccgccagctctgctgtggctgggacaggccctccgagggccctatggagtgagcatgtggccccagatgggcgcatctactactacaatgctgacgacaagcagtccgtgtgggagaagcccagcgtgctcaagtccaaggcagagctgctcctgtcccaatgtccctggaaagagtacaagtcggacacaggcaaaccttattactataacaaccagagtaaagagtcccgctggacccggcccaaggatctggatgacctagaggttctagtcaaacaagaggctgcagggaaacagcagcagcagctgccacagacacttcagccacagccacctcagccacagcctgaccccccacctgtgcctcctggccccaccccagtgcccacaggcctcctggaacctgagccaggtgggagtgaagattgtgatgtgttggaggccacccagcccctggaacaggggttcctgcagcagctggaggagggccccagcagttctggacagcatcagccacagcaggaggaggaggaatcaaagccagaaccagagaggtctggcctcagttggagcaaccgggagaaggcaaagcaggcattcaaggaactgctgagggacaaggctgtcccctccaatgcctcatgggaacaggccatgaagatggtggtcaccgacccccgttacagtgccttgcctaaactgagtgagaaaaagcaggcattcaatgcctacaaggcgcagcgggagaaggaggagaaggaggaggcccggctaagggccaaagaggccaagcagaccctgcagcatttcctggagcagcatgaacgcatgacctccaccacccgctaccggcgggcagaacagacctttggggagctggaggtctgggctgtggtccctgagagggatcgaaaagaggtttatgatgatgtcctcttcttcctggccaagaaggagaaggaacaggccaagcagctccggcgccgcaatatccaggccctaaagagcatcctggatgggatgagtagtgtcaacttccaaaccacgtggtcccaggcccagcagtacctcatggataaccccagctttgctcaggaccatcagctgcagaacatggacaaggaagatgcactgatctgttttgaggagcacatccgagctttggagagggaagaggaggaggaacgggagcgggcccggcttcgggagcgacgccaacaacgcaagaatcgggaggccttccagaccttcctggacgagctgcatgagacagggcagctgcactctatgtccacctggatggagctatatccagcagtcagcactgatgtccgctttgccaacatgctgggccagccgggtaaggcagccaggctcccccttctctggcctggcttcctgccctgccagcctctctgcaccccctactaccggctcctgtcctcggcccagcccccaggccttgggaagctgccgcccgccaggcccccctccctccctccggctccacccctctggacttattcaagttctatgtggaggagttgaaggcacgattccatgatgaaaagaagatcattaaggacatccttaaggaccggggcttctgcgtggaggtgaacacggcctttgaggacttcgcccacgtcataagctttgacaagagggctgccgcactggacgcaggcaacatcaagctgaccttcaatagtctgctggagaaagcagaggcacgggagagggagcgggagaaggaggaggcacgcaggatgcggcgcagggaagctgcctttcgaagcatgctgaggcaggctgtgcctgctctggagctaggcactgcctgggaagaggtccgtgagcgttttgtgtgtgactcagcctttgagcagatcaccctggagtcggagcggatccggctcttccgggagttcctacaggtgctggagactgaatgccagcacctccacaccaaaggccgaaagcatggcaggaaaggcaagaagcaccatcacaagcgttcccactcaccctcaggctctgagtcagaagaagaggagctgcccccaccatctctccggccccccaagcggaggaggcggaacccctcagagtcaggctctgagccctcttcctcacttgattcagttgaaagtgggggtgctgcccttggaggacggggctccccttcctcccatcttcttggagcagatcatggccttcggaaagccaagaaaccaaaaaagaaaactaagaagagaagacacaagtcgaatagtcctgagagtgagacagaccctgaggagaaagctggcaaggagagcgatgagaaagaacaagaacaggacaaggacagggagctccaacaggcagagctccctaaccgttccccaggctttggaatcaagaaggagaagacaggctgggacacgtcagaaagtgagctgagtgagggtgagctggagaggcggcggcggacactcctacagcagctggatgatcaccagtgacccaatgagctgttctctgcctcgggtctgtgtgaggccatggctcctgggccaccctcaccgtctgcctcagacttcttccttagtctggtctgtgtccactttttctaaagtaaccccacccccagcacaccattgttggcacctctcaaggttgctcttggtgttcaagggtcccctactccctggactagtgcagtccttgccctcagccccagaccagagatgggtggtatatgccatgtggggtgggtgatgccagtagataaaagtgtgagagaaggggtctccagggaagagtcacaggctgttggacgcagcctgggtggcagagggcagggtcatcaccctctagcatcagtgcctgctcctgcctgccctggccctgaggctccaccacttcttcctccacccaggacctaatgtacgtgtgttttgttttttgttttttaaataacaatatttataacatggccagtgactcttttccatgtgctactggggcaggctggggactggacacatgcccagcagagggcactagtgtctcatggcaggcctgcttccctttgtgtggctagagcccacctagccggttctcctttccccagagttctgatctcatctcctccaaaacagatgcagtgccccaaagatttcttttctatccccatagcccaggtcagactaaatggccaccctagccccctaagctcagaaagaggagacaaagtcaggcctggtgcatcaagcctttgttgagagggggagagtctgaggtttatgtacagtaagaggaaagggaggtggtacatgtacaaaaaagtgggcccccacattcccttccaggggcagaggagaaacgggaaggtaagcaaatagccaagaccaccatgctccttgtcccctgccaaaaaaaaa

SEQ ID NO: 381130 - DNA, 2113 bp, Homo sapiens
cgattctggtccccggcccccagcagcgcctgcccccttcccaccggggccccccatgatgccaccacccttcatgccccctccagggatccccccaccctttcctccgatggggctaccccccatgagtcagagaccaccagctatcccccccatgccacctggcatcctgcccccaatgcttccaccaatgggggcgccaccaccactcacacagataccaggaatggtacctccgatgatgccaggaatgctgatgccagcggtgcctgtcaccgcagcgacggctccgggtgcggacaccgccagctctgctgtggctgggacaggccctccgagggccctatggagtgagcatgtggccccagatgggcgcatctactactacaatgctgacgacaagcagtccgtgtgggagaagcccagcgtgctcaagtccaaggcagagctgctcctgtcccaatgtccctggaaagagtacaagtcggacacaggcaaaccttattactataacaaccagagtaaagagtcccgctggacccggcccaaggatctggatgacctagaggttctagtcaaacaagaggctgcagggaaacagcagcagcagctgccacagacacttcagccacagccacctcagccacagcctgaccccccacctgtgcctcctggccccaccccagtgcccacaggcctcctggaacctgagccaggtgggagtgaagattgtgatgtgttggaggccacccagcccctggaacaggggttcctgcagcagctggaggagggccccagcagttctggacagcatcagccacagcaggaggaggaggaatcaaagccagaaccagagaggtctggcctcagttggagcaaccgggagaaggcaaagcaggcattcaaggaactgctgagggacaaggctgtcccctccaatgcctcatgggaacaggccatgaagatggtggtcaccgacccccgttacagtgccttgcctaaactgagtgagaaaaagcaggcattcaatgcctacaaggcgcagcgggagaaggaggagaaggaggaggcccggctaagggccaaagaggccaagcagaccctgcagcatttcctggagcagcatgaacgcatgacctccaccacccgctaccggcgggcagaacagacctttggggagctggaggtctgggctgtggtccctgagagggatcgaaaagaggtttatgatgatgtcctcttcttcctggccaagaaggagaaggaacaggccaagcagctccggcgccgcaatatccaggccctaaagagcatcctggatgggatgagtagtgtcaacttccaaaccacgtggtcccaggcccagcagtacctcatggataaccccagctttgctcaggaccatcagctgcagaacatggacaaggaagatgcactgatctgttttgaggagcacatccgagctttggagagggaagaggaggaggaacgggagcgggcccggcttcgggagcgacgccaacaacgcaagaatcgggaggccttccaggtatctttgctgtcctttctagatcagagctcagctctgccctagagcacaacctcttcacccattccctgcccccttctggatacgctgcctgttctttctgtgcctagccctgtccaagctctatgagacctctctctgcctgcagtctgtttctgctgtacctcctcaattctggactgtgctcttctagggagactagatgtatgcaccacccagaaactgccagtagagagcaccctacaggcatgacttggcagctaggccatgtttatttcccttggtggggcacccgacaggcagagtttattccctcagcttgggggtggcagtggtggtggtagtgctaggggttactgcaggcaggtttctgtttctttgcatcccgggactggcttgttctcacctttttgttctgtccctctctgtgtatttactttctctctttttgcattgttctcagccttccatctgcatctcttcatctctgcctctcttgcctgcatttcctcaatcttgattgtccctgcctcttcctctgccattccctctcttccccctcag

SEQ ID NO: 381131 - DNA, 541 bp, Homo sapiens
ttcatgcactgctgtacccacaggaccggggcttctgcgtggaggtgaacacggcctttgaggacttcgcccacgtcataagctttgacaagagggctgccgcactggacgcaggcaacatcaagctgaccttcaatagtgtgaggggctgggcggggcgtgggaagttctctaattcatctgtgtcttgctccattccttctcactcactgtcccactgactatattcccaattcaggggatggtggtagaagcccagaccctaactttccacctcctaaggtatgcctgagtgggacctggcatccaccctcctgggtgaccctgttccgtgtcccttctttcctcagctgctggagaaagcagaggcacgggagagggagcgggagaaggaggaggcacgcaggatgcggcgcagggaagctgcctttcgaagcatgctgaggcaggctgtgcctgctctggagctaggcactgcctgggaagaggtcaggagcgtagcctggccccaagcacccctcaagcctgagggcagcggtgc

SEQ ID NO: 381132 - DNA, 1155 bp, Homo sapiens
gtttgttcatggagggaagtaaggaaattttaatgatattccttagataatacattttcttacctaaaagtggtacaataatgggttttactctacctcagtccactatgcagcatgcatactctacttaatactaggttgtgttcctacagttagttaaaaaaccaaccagctggtagtatttttttagatccaacctaagaaagacagtgtggtctagtgtagagggcactggctttggagtcagatgggtctaagttcgaatgctggctctgctgcttggaaggtgtgtaactttaggtaagttgcataacttctctaagcctcagtctccgtcaccataaaatggggatatctatgtatcttgcagagctgatatacggttatgcgttacacgtgtacatacagaggcaaagtacatgtacgaagtagatgtggcctgtgaataagtgttagggccaattttacacgatgggtaagctcacaattaggaaacatgaataacttcttttggagtaatatatatatataatggaaagtcagagtataaataatggattcacttcaatcatgtttctttaatgtggatcatcatgacacaattccatctcctagcatgtgtttataaaataaatttctattatccctgtgctttcacattttctcatatatttgagaaattcctagattcttaagcagtgtaatcctatttaatgtgctgttaatggcaatatcatgtttaactagagaaaacagttacaaatgggcctggcatgaactagtcctacaggtgccataaagctacccaaatggtataatgaagtgatgagggcatttggggattctgctacatttttttccttctgaacgtgttggtgggggtagtggactagttttaattagaatcgtttggagaacaggaatccaagcacacgacctaatattctcctagttagccttcggcctgaggcagctgtggacagccttcctagaagtcagtctcaagacaaagaatagagcgggaagtggtttacctagtgggaggtttgcagggggaattgaatgtaagatgggatataagaaaacttacaaaaacaactggaatttttaaaaaatacaccattatgaccatcaaggacattttgcaaaaaaaaa

SEQ ID NO: 381133 - DNA, 517 bp, Homo sapiens
tataaattatatataatatataattaatatataaaattatataaatatatatattttttgagatggatgttcgctatttcacccaggctggagggcagtggttcagtctttgttcactgcagcctccgcctcctgggttcaagcattcctctcacctcagcctctagtagctgggactacagacgcacaccaccatgcctggctaacttttgtatctttaatagagatgaggtttcacccagttgatcagttggccaggctgatctcaaattcttgacctcaaatgatccgcccaccttggcctctgaagtgccgggattacaggcgtgagccaccatgcccagcctaaactatgctatcttatgtaaggaaaccaacacaagaaaaaagagatattattctccctgcagacacaggctaaaggaaaccttacaagtatcacaaaactgcttcctagttgagatgcagagcagagcagtcatgttagggcagcgcaaatcagctgaattcgttttta

SEQ ID NO: 381134 - DNA, 1003 bp, Homo sapiens
atgaactgctggattcagtttgcaagtactttgttaaggatttttgcataaatgtttgtcaaggatattgacctaaagttttgttgttgccaggttttggtatcaggatgatgctggcctcatagaatgagctggggaggggcctttcctcctcaattttttggaatagtttcagtaggaatgggaccagctcttctttgttcatctgatagaattcagctgtggatccttcttgtcctgcgctttattttgttgagagttgcccaaggaagtcaacaggagagccagatcaggaaacagcaaccagagggagatgatcacctgaaccactgctccaaaccatgggcagtaaatgctgtaaaggtggtccagatgaagatgcagtagaaagacagaggcggcagaagggcctggatgattcagtgctggtggaggacgttggtgcagagacggatccgtcagcggcggcaggccctgttgagggtctacgtcatccaggagcaggcgacggtcaagctccagtcctgcatccgcatgtggcagtgccggcaatgttaccgccaaatgtgcaatgctctctgcttgttccaggtcccagagagcagccttgccttccagactgatggctttttacaggtccaatatgcaatcccttcaaagcagccagagttccacattgaaatcctatcaatctgaaaggcctggggcatggagaacaggctgcactaccctaataaatgtctgaccaggtaaaaaaaaaacaaaaaaagggaaaaaaaaaaaaaaactctcctccaaagcggtgggactccgcgcaacaaaggggccgagacccttccagagggggggcgcccgggaaccaacgtttggggtcccctttaaggagaaggggtaaattcccaacgctggggaggataaccgatgggccaaaaggctggtcccctggggtcgacactaggttaacccggttcacaatttcccacacaacttagacacaacagat

SEQ ID NO: 381135 - DNA, 863 bp, Homo sapiens
atgaactgctggattcagtttgcaagtactttgttaaggatttttgcataaatgtttgtcaaggatattgacctaaagttttgttgttgccaggttttggtatcaggatgatgctggcctcatagaatgagctggggaggggcctttcctcctcaattttttggaatagtttcagtaggaatgggaccagctcttctttgttcatctgatagaattcagctgtggatccttcttgtcctgcgctttattttgttgagagttgcccaaggaagtcaacaggagagccagatcaggaaacagcaaccagagggagatgatcacctgaaccactgctccaaaccatgggcagtaaatgctgtaaaggtggtccagatgaagatgcagtagaaagacagaggcggcagaagaatagccaaaaaagtgaaccaacccaaatgggtgaatggatagacaacctgtggtacatgcatatcacagactactcttcagctataaaaagtgttgacctaaaaggaagaggctgaggcacaaaatataatttaaagagtttgcttgagacaaagttaagacagctgcctggaagactcagatgcagatttgaatcatcttctggtgtcattttctttcaggctgaaggacttgctttagatttcttgtaagacagatcaactagcgatgaattatctctgtctttgtctggaaatgtctttattttgctttcatttttgaaagacagttaaactggatatggaattctgggtcataagggctcctcccagcccccagcattttagagttgctgttcaattgtcttctggttccattgtttctcattaaaagtcagccaacttcgtaaatgtggt

SEQ ID NO: 381136 - DNA, 1113 bp, Homo sapiens
atgaactgctggattcagtttgcaagtactttgttaaggatttttgcataaatgtttgtcaaggatattgacctaaagttttgttgttgccaggttttggtatcaggatgatgctggcctcatagaatgagctggggaggggcctttcctcctcaattttttggaatagtttcagtaggaatgggaccagctcttctttgttcatctgatagaattcagctgtggatccttcttgtcctgcgctttattttgttgagagttgcccaaggaagtcaacaggagagccagatcaggaaacagcaaccagagggagatgatcacctgaaccactgctccaaaccatgggcagtaaatgctgtaaaggtggtccagatgaagatgcagtagaaagacagaggcggcagaagttgcttcttgcacaactgcatcacagaaaaagggtgaaggcagctgggcagatccaggcctggtggcgtggggtcctggtgcgcaggaccctgctggttgctgccctcagggcctggatgattcagtgctggtggaggacgttggtgcagagacggatccgtcagcggcggcaggccctgttgagggtctacgtcatccaggagcaggcgacggtcaagctccagtcctgcatccgcatgtggcagtgccggcaatgttaccgccaaatgtgcaatgctctctgcttgttccaggtcccagagagcagccttgccttccagactgatggctttttacaggtccaatatgcaatcccttcaaagcagccagagttccacattgaaatcctatcaatctgaaaggcctggggcatggagaacaggctgcactaccctaataaatgtctgaccaggtaaaaaaaaaacaaaaaaagggaaaaaaaaaaaaaaactctcctccaaagcggtgggactccgcgcaacaaaggggccgagacccttccagagggggggcgcccgggaaccaacgtttggggtcccctttaaggagaaggggtaaattcccaacgctggggaggataaccgatgggccaaaaggctggtcccctggggtcgacactaggttaacccggttcacaatttcccacacaacttagacacaacagat

SEQ ID NO: 381137 - DNA, 829 bp, Homo sapiens
atgaactgctggattcagtttgcaagtactttgttaaggatttttgcataaatgtttgtcaaggatattgacctaaagttttgttgttgccaggttttggtatcaggatgatgctggcctcatagaatgagctggggaggggcctttcctcctcaattttttggaatagtttcagtaggaatgggaccagctcttctttgttcatctgatagaattcagctgtggatccttcttgtcctgcgctttattttgttgagagttgcccaaggaagtcaacaggagagccagatcaggaaacagcaaccagagggagatgatcacctgaaccactgctccaaaccatgggcagtaaatgctgtaaaggtggtccagatgaagatgcagtagaaagacagaggcggcagaagaatagccaaaaaagtgaaccaacccaaatgggtgaatggatagacaacctgtggtacatgcatatcacagactactcttcagctataaaaagtgttgacctaaaaggaagaggctgaggcacaaaatataatttaaagagtttgcttgagacaaagttaagacagctgcctggaagactcagatgcaggctgaaggacttgctttagatttcttgtaagacagatcaactagcgatgaattatctctgtctttgtctggaaatgtctttattttgctttcatttttgaaagacagttaaactggatatggaattctgggtcataagggctcctcccagcccccagcattttagagttgctgttcaattgtcttctggttccattgtttctcattaaaagtcagccaacttcgtaaatgtggt

SEQ ID NO: 381138 - DNA, 726 bp, Homo sapiens
cctctgctttgcttggccagttgcttcttgcacaactgcatcacagaaaaagggtgaaggcagctgggcagatccaggcctggtggcgtggggtcctggtgcgcaggaccctgctggttgctgccctcagggcctggatgattcagtgctggtggaggacgttggtgcagagacggatccgtcagcggcggcaggccctgttgagggtctacgtcatccaggagcaggcgacggtcaagctccagtcctgcatccgcatgtggcagtgccggcaatgttaccgccaaatgtgcaatgctctctgcttgttccaggtcccagagagcagccttgccttccagactgatggctttttacaggtccaatatgcaatcccttcaaagcagccagagttccacattgaaatcctatcaatctgaaaggcctggggcatggagaacaggctgcactaccctaataaatgtctgaccaggtaaaaaaaaaacaaaaaaagggaaaaaaaaaaaaaaactctcctccaaagcggtgggactccgcgcaacaaaggggccgagacccttccagagggggggcgcccgggaaccaacgtttggggtcccctttaaggagaaggggtaaattcccaacgctggggaggataaccgatgggccaaaaggctggtcccctggggtcgacactaggttaacccggttcacaatttcccacacaacttagacacaacagat

SEQ ID NO: 381139 - DNA, 2265 bp, Homo sapiens
aatctctagctcgctcgcgctccctctccccgggccgtggaaaggatcccacttccggtggggtgtcatggcggcgtctcggactgtgatggctgtggggagacggcgctagtggggagagcgaccaagaggccccctcccctccccgggtccccttcccctatccccctccccccagcctccttgccaacgccccctttccctctccccctcccgctcggcgctgaccccccatccccacccccgtgggaacactgggagcctgcactccacagaccctctccttgcctcttccctcacctcagcctccgctccccgccctcttcccggcccagggcgccggcccacccttccctccgccgccccccggccgcggggaggacatggccgcgcacaggccggtggaatgggtccaggccgtggtcagccgcttcgacgagcagcttccaataaaaacaggacagcagaacacacataccaaagtcagtactgagcacaacaaggaatgtctaatcaatatttccaaatacaagttttctttggttataagcggcctcactactattttaaagaatgttaacaatatgagaatatttggagaagctgctgaaaaaaatttatatctctctcagttgattatattggatacactggaaaaatgtcttgctgggcaaccaaaggacacaatgagattagatgaaacgatgctggtcaaacagttgctgccagaaatctgccattttcttcacacctgtcgtgaaggaaaccagcatgcagctgaacttcggaattctgcctctggggttttattttctctcagctgcaacaacttcaatgcagtctttagtcgcatttctaccaggttacaggaattaactgtttgttcagaagacaatgttgatgttcatgatatagaattgttacagtatatcaatgtggattgtgcaaaattaaaacgactcctgaaggaaacagcatttaaatttaaagccctaaagaaggttgcgcagttagcagttataaatagcctggaaaaggcattttggaactgggtagaaaattatccagatgaatttacaaaactataccagatcccacagactgatatggctgaatgtgcagaaaagctatttgacttggtggatggttttgctgaaagcaccaaacgtaaagcagcagtttggccactacaaatcattctccttatcttgtgtccagaaataatccaggatatatccaaagacgtggttgatgaaaacaacatgaataagaagttatttctggacagtctacgaaaagctcttgctggccatggaggaagtaggcagctgacagaaagtgctgcaattgcctgtgtcaaactgtgtaaagcaagtacttacatcaattgggaagataactctgtcattttcctacttgttcagtccatggtggttgatcttaagaacctgctttttaatccaagtaagccattctcaagaggcagtcagcctgcagatgtggatctaatgattgactgccttgtttcttgctttcgtataagccctcacaacaaccaacactttaagatctgcctggctcagaattcaccttctacatttcactatgtgctggtaaattcactccatcgaatcatcaccaattccgcattggattggtggcctaagattgatgctgtgtattgtcactcggttgaacttcgaaatatgtttggtgaaacacttcataaagcagtgcaaggttgtggagcacacccagcaatacgaatggcaccgagtcttacatttaaagaaaaagtaacaagccttaaatttaaagaaaaacctacagacctggagacaagaagctataagtatcttctcttgtccatggtgaaactaattcatgcagatccaaagctcttgctttgtaatccaagaaaacaggggcccgaaacccaaggcagtacagcagaattaattacagggctcgtccaactggtccctcagtcacacatgccagagattgctcaggaagcaatggaggtaaggggaaaatgaattccatgttcttgaaggaaagactgtaactatgtacattcatgatgttcctttggtgtgtggtttctgtgagtaacaggtagatgtcatttctggaaatggtatgtttatgtctatacattgttttataaaactccatggagaaagaaggggtttacttgctttgtatcacatagcaataacattgtacaaattctgatgcttaataaaatagttcgagattttc

SEQ ID NO: 381140 - DNA, 1756 bp, Homo sapiens
gaaaaaattatgtagacacaaatgtttttagtgtgtgatctacttgtaatgaatattttatattacatttctcaaaagctaggaattaaccaaaatgtaaatatttaatatcctcaaattcacttggagagagtttttctgtgattcatagccagaaatagtagacatgattgggtctcaacatttcttgctgttttagtgcttggcttaaaaatgtaataaaaattaaaacccagaattaaaattcattcctcaaaattcagttgatttctaattttttgttgattccatttgtgttacattttatggtgtaattttatgtacaagccaacattgtttttgttgctgtatgtagtcggtgctgtgacttgtttgtgctcatctctgttctgtaggcaacttgccactccctactgaataaagctacagtaaaagaaaaaaaggaaaacaaaaaatcagtaagtttggagaactttttattagctgtttctttcaaagcaaaacaaaaatcttttgctgtttgttaagaatatcttcacttcagcctatttgaccttcactgtaaaatcattctactaattctggcacaaaatagctttcatttcaattaaccctggaattaagttacattgaaacattctctgtgttcctttggtttgatttatcccaaaggcaatttgtgggcatttgttgcattggatatccttggtctaattttattattgttactttttaaattataaatgaatgcaaagaaacttaatttcaaggccttaggaaacgctgactgtcttcattcttgcttcttgtttgaaggtaatgtgagtggtttcttttcccagagatgacagtgtttcttaattgttagaagtatatggtgggaaagagtcactttctaaatcttacctaaaagttgctaaattttatttttttactcttcatatttttatctaggcagtctcaggcataatttagatatttgtgcatagattatagaaattttaatggtaaaactacttttacctcaaaaaaataagaggtaaatgataagatagtacttttgagataaaagaaaactgagttcatatttgtagaaaaacacatcattctgcaaacataatgtgaatatactatctgcttctatgaacttgccttgatttatttaaaaggaagaaaattatgagagtcgtaattattttcttccagtgaatggaatttgtccaaaatataatatgcattcattttacatttgccattatctgtcacagtgacttatcaggctgagccctgtctttgttcatataatccaaatgattgtagagtaagatgtaaagaaaactaagtaggtagttttcttaaaagggtgtaatttagaatacagtgttcatctggtttcatctttcatgccttatctaaactttacatataataaaagctttatggctgggcacagtggctcatacctgtaatccgggcactttgggagaccaaggtgggagtatctcttgagcccaagagttaaagaccagcttgggcaacatagcgagtcgtctctacaaataatttttttttttttttaattagccaggcgtggtggtgtactcctgtagtcccagctactcgggaggctgaggcaggaggattgcttgagcccaggtggttgaggctgcagtgagctgtgattgtatcactgtactccaccatgagtgacagagtaagaccctgtctcacaaaaaaaaaaaaaaaaaaagaaaac

SEQ ID NO: 381141 - DNA, 395 bp, Homo sapiens
tagtattgttaacttctttaaatgatgtaacgcagtcgcaaaaagaagttaacaatactaacacgagaatattgttaacttctttttgcgactgcgttacatcatttaaagaaaatgctgtgtattgtaaacttaaattgtatatgataacttactgtcctttccatccgggcctaaactttggcagttcctttgtctacaaccttgttaatactgtaaacagttgtacgccagcaggaaaaatactgcccaacagacaaaatcgatcattgtaggggaaaatcatagaaatccatttcagatctttattgttcctcaccccattttcctccttgtgtatgtacttcccccacccccctttttttaagtaaaatgtaaattcaatctgctctaag

SEQ ID NO: 381142 - DNA, 904 bp, Homo sapiens
gtagggatcaggaaacttttctctaaaaggccagatagtaaatattttagggcttgtgggtcatatagtttctgtcataaccattcagttctgcctttggagcatgaaagtggccacagacatgtgaatgaacgggcatggctgtgtttaactaaaactgtatatttacaatagcaagtgataggctaggtttggcctgtggatggtagcttgcagacccccactgtggagcactgggtttatagacagtctctgctgtgcatgtggtttattgtttcttcttatgtctactacaaggatgagatacatggatagaaacactgggagtttaatgaaacatagggggcttatagataaatacttgctttttttctataacctgtagacttatttcctttgattataatgctattgacactttgataactgtttctctaaaaccttacaagaaaaactaagcttctctaaacttgtattcattatgggagaatgccattcttatgtctggttatatctgcattaggttattgatgatgctagtaacaatgaactttatgttactgcagctcacaaatgcttttttacatctgcaagaaattaactagtcatcaaatgcttagtagcacagaaattctcaagtggttgcgggaaatattgatctgcaggaataaatttcttcttaaaaataaggtaagcaaaatgacatatttaaaaaatggaagaatatttggaatggtaatggtgagagattactaaagtgttttatagccaaattaggttctatttcagcttctccttcctcccaatgttctcaaaaggaaatatgtatgcagaggacaatgactggcaaatcagcattttaaaaattattctgaggctttggccttagaaccacactgttgat

SEQ ID NO: 381143 - DNA, 12361 bp, Homo sapiens
aatctctagctcgctcgcgctccctctccccgggccgtggaaaggatcccacttccggtggggtgtcatggcggcgtctcggactgtgatggctgtggggagacggcgctagtggggagagcgaccaagaggccccctcccctccccgggtccccttcccctatccccctccccccagcctccttgccaacgccccctttccctctccccctcccgctcggcgctgaccccccatccccacccccgtgggaacactgggagcctgcactccacagaccctctccttgcctcttccctcacctcagcctccgctccccgccctcttcccggcccagggcgccggcccacccttccctccgccgccccccggccgcggggaggacatggccgcgcacaggccggtggaatgggtccaggccgtggtcagccgcttcgacgagcagcttccaataaaaacaggacagcagaacacacataccaaagtcagtactgagcacaacaaggaatgtctaatcaatatttccaaatacaagttttctttggttataagcggcctcactactattttaaagaatgttaacaatatgagaatatttggagaagctgctgaaaaaaatttatatctctctcagttgattatattggatacactggaaaaatgtcttgctgggcaaccaaaggacacaatgagattagatgaaacgatgctggtcaaacagttgctgccagaaatctgccattttcttcacacctgtcgtgaaggaaaccagcatgcagctgaacttcggaattctgcctctggggttttattttctctcagctgcaacaacttcaatgcagtctttagtcgcatttctaccaggttacaggaattaactgtttgttcagaagacaatgttgatgttcatgatatagaattgttacagtatatcaatgtggattgtgcaaaattaaaacgactcctgaaggaaacagcatttaaatttaaagccctaaagaaggttgcgcagttagcagttataaatagcctggaaaaggcattttggaactgggtagaaaattatccagatgaatttacaaaactataccagatcccacagactgatatggctgaatgtgcagaaaagctatttgacttggtggatggttttgctgaaagcaccaaacgtaaagcagcagtttggccactacaaatcattctccttatcttgtgtccagaaataatccaggatatatccaaagacgtggttgatgaaaacaacatgaataagaagttatttctggacagtctacgaaaagctcttgctggccatggaggaagtaggcagctgacagaaagtgctgcaattgcctgtgtcaaactgtgtaaagcaagtacttacatcaattgggaagataactctgtcattttcctacttgttcagtccatggtggttgatcttaagaacctgctttttaatccaagtaagccattctcaagaggcagtcagcctgcagatgtggatctaatgattgactgccttgtttcttgctttcgtataagccctcacaacaaccaacactttaagatctgcctggctcagaattcaccttctacatttcactatgtgctggtaaattcactccatcgaatcatcaccaattccgcattggattggtggcctaagattgatgctgtgtattgtcactcggttgaacttcgaaatatgtttggtgaaacacttcataaagcagtgcaaggttgtggagcacacccagcaatacgaatggcaccgagtcttacatttaaagaaaaagtaacaagccttaaatttaaagaaaaacctacagacctggagacaagaagctataagtatcttctcttgtccatggtgaaactaattcatgcagatccaaagctcttgctttgtaatccaagaaaacaggggcccgaaacccaaggcagtacagcagaattaattacagggctcgtccaactggtccctcagtcacacatgccagagattgctcaggaagcaatggaggctctgctggttcttcatcagttagatagcattgatttgtggaatcctgatgctcctgtagaaacattttgggagattagctcacaaatgcttttttacatctgcaagaaattaactagtcatcaaatgcttagtagcacagaaattctcaagtggttgcgggaaatattgatctgcaggaataaatttcttcttaaaaataagcaggcagatagaagttcctgtcactttctccttttttacggggtaggatgtgatattccttctagtggaaataccagtcaaatgtccatggatcatgaagaattactacgtactcctggagcctctctccggaagggaaaagggaactcctctatggatagtgcagcaggatgcagcggaacccccccgatttgccgacaagcccagaccaaactagaagtggccctgtacatgtttctgtggaaccctgacactgaagctgttctggttgccatgtcctgtttccgccacctctgtgaggaagcagatatccggtgtggggtggatgaagtgtcagtgcataacctcttgcccaactataacacattcatggagtttgcctctgtcagcaatatgatgtcaacaggaagagcagcacttcagaaaagagtgatggcactgctgaggcgcattgagcatcccactgcaggaaacactgaggcttgggaagatacacatgcaaaatgggaacaagcaacaaagctaatccttaactatccaaaagccaaaatggaagatggccaggctgctgaaagccttcacaagaccattgttaagaggcgaatgtcccatgtgagtggaggaggatccatagatttgtctgacacagactccctacaggaatggatcaacatgactggcttcctttgtgcccttggaggagtgtgcctccagcagagaagcaattctggcctggcaacctatagcccacccatgggtccagtcagtgaacgtaagggttctatgatttcagtgatgtcttcagagggaaacgcagatacacctgtcagcaaatttatggatcggctgttgtccttaatggtgtgtaaccatgagaaagtgggacttcaaatacggaccaatgttaaggatctggtgggtctagaattgagtcctgctctgtatccaatgctatttaacaaattgaagaataccatcagcaagttttttgactcccaaggacaggttttattgactgataccaatactcaatttgtagaacaaaccatagctataatgaagaacttgctagataatcatactgaaggcagctctgaacatctagggcaagctagcattgaaacaatgatgttaaatctggtcaggtatgttcgtgtgcttgggaatatggtccatgcaattcaaataaaaacgaaactgtgtcaattagttgaagtaatgatggcaaggagagatgacctctcattttgccaagagatgaaatttaggaataagatggtagaatacctgacagactgggttatgggaacatcaaaccaagcagcagatgatgatgtaaaatgtcttacaagagatttggaccaggcaagcatggaagcagtagtttcacttctagctggtctccctctgcagcctgaagaaggagatggtgtggaattgatggaagccaaatcacagttatttcttaaatacttcacattatttatgaaccttttgaatgactgcagtgaagttgaagatgaaagtgcgcaaacaggtggcaggaaacgtggcatgtctcggaggctggcatcactgaggcactgtacggtccttgcaatgtcaaacttactcaatgccaacgtagacagtggtctcatgcactccataggcttaggttaccacaaggatctccagacaagagctacatttatggaagttctgacaaaaatccttcaacaaggcacagaatttgacacacttgcagaaacagtattggctgatcggtttgagagattggtggaactggtcacaatgatgggtgatcaaggagaactccctatagcgatggctctggccaatgtggttccttgttctcagtgggatgaactagctcgagttctggttactctgtttgattctcggcatttactctaccaactgctctggaacatgttttctaaagaagtagaattggcagactccatgcagactctcttccgaggcaacagcttggccagtaaaataatgacattctgtttcaaggtatatggtgctacctatctacaaaaactcctggatcctttattacgaattgtgatcacatcctctgattggcaacatgttagctttgaagtggatcctaccaggttagaaccatcagagagccttgaggaaaaccagcggaacctccttcagatgactgaaaagttcttccatgccatcatcagttcctcctcagaattcccccctcaacttcgaagtgtgtgccactgtttataccaggtggttagccagcgtttccctcagaacagcatcggtgcagtaggaagtgccatgttcctcagatttatcaatcctgccattgtctcaccgtatgaagcagggattttagataaaaagccaccacctagaatcgaaaggggcttgaagttaatgtcaaagatacttcagagtattgccaatcatgttctcttcacaaaagaagaacatatgcggcctttcaatgattttgtgaaaagcaactttgatgcagcacgcaggtttttccttgatatagcatctgattgtcctacaagtgatgcagtaaatcatagtctttccttcataagtgacggcaatgtgcttgctttacatcgtctactctggaacaatcaggagaaaattgggcagtatctttccagcaacagggatcataaagctgttggaagacgaccttttgataagatggcaacacttcttgcatacctgggtcctccagagcacaaacctgtggcagatacacactggtccagccttaaccttaccagttcaaagtttgaggaatttatgactaggcatcaggtacatgaaaaagaagaattcaaggctttgaaaacgttaagtattttctaccaagctgggacttccaaagctgggaatcctattttttattatgttgcacggaggttcaaaactggtcaaatcaatggtgatttgctgatataccatgtcttactgactttaaagccatattatgcaaagccatatgaaattgtagtggaccttacccataccgggcctagcaatcgctttaaaacagactttctctctaagtggtttgttgtttttcctggctttgcttacgacaacgtctccgcagtctatatctataactgtaactcctgggtcagggagtacaccaagtatcatgagcggctgctgactggcctcaaaggtagcaaaaggcttgttttcatagactgtcctgggaaactggctgagcacatagagcatgaacaacagaaactacctgctgccaccttggctttagaagaggacctgaaggtattccacaatgctctcaagctagctcacaaagacaccaaagtttctattaaagttggttctactgctgtccaagtaacttcagcagagcgaacaaaagtcctagggcaatcagtctttctaaatgacatttattatgcttcggaaattgaagaaatctgcctagtagatgagaaccagttcaccttaaccattgcaaaccagggcacgccgctcaccttcatgcaccaggagtgtgaagccattgtccagtctatcattcatatccggacccgctgggaactgtcacagcccgactctatcccccaacacaccaagattcggccaaaagatgtccctgggacactgctcaatatcgcattacttaatttaggcagttctgacccgagtttacggtcagctgcctataatcttctgtgtgccttaacttgtacctttaatttaaaaatcgagggccagttactagagacatcaggtttatgtatccctgccaacaacaccctctttattgtctctattagtaagacactggcagccaatgagccacacctcacgttagaatttttggaagagtgtatttctggatttagcaaatctagtattgaattgaaacacctttgtttggaatacatgactccatggctgtcaaatctagttcgtttttgcaagcataatgatgatgccaaacgacaaagagttactgctattcttgacaagctgataacaatgaccatcaatgaaaaacagatgtacccatctattcaagcaaaaatatggggaagccttgggcagattacagatctgcttgatgttgtactagacagtttcatcaaaaccagtgcaacaggtggcttgggatcaataaaagctgaggtgatggcagatactgctgtagctttggcttctggaaatgtgaaattggtttcaagcaaggttattggaaggatgtgcaaaataattgacaagacatgcttatctccaactcctactttagaacaacatcttatgtgggatgatattgctattttagcacgctacatgctgatgctgtccttcaacaattcccttgatgtggcagctcatcttccctacctcttccacgttgttactttcttagtagccacaggtccgctctcccttagagcttccacacatggactggtcattaatatcattcactctctgtgtacttgttcacagcttcattttagtgaagagaccaagcaagttttgagactcagtctgacagagttctcattacccaaattttacttgctgtttggcattagcaaagtcaagtcagctgctgtcattgccttccgttccagttaccgggacaggtcattctctcctggctcctatgagagagagacttttgctttgacatccttggaaacagtcacagaagctttgttggagatcatggaggcatgcatgagagatattccaacgtgcaagtggctggaccagtggacagaactagctcaaagatttgcattccaatataatccatccctgcaaccaagagctcttgttgtctttgggtgtattagcaaacgagtgtctcatgggcagataaagcagataatccgtattcttagcaaggcacttgagagttgcttaaaaggacctgacacttacaacagtcaagttctgatagaagctacagtaatagcactaaccaaattacagccacttcttaataaggactcgcctctgcacaaagccctcttttgggtagctgtggctgtgctgcagcttgatgaggtcaacttgtattcagcaggtaccgcacttcttgaacaaaacctgcatactttagatagtctccgtatattcaatgacaagagtccagaggaagtatttatggcaatccggaatcctctggagtggcactgcaagcaaatggatcattttgttggactcaatttcaactctaactttaactttgcattggttggacaccttttaaaagggtacaggcatccttcacctgctattgttgcaagaacagtcagaattttacatacactactaactctggttaacaaacacagaaattgtgacaaatttgaagtgaatacacagagcgtggcctacttagcagctttacttacagtgtctgaagaagttcgaagtcgctgcagcctaaaacatagaaagtcacttcttcttactgatatttcaatggaaaatgttcctatggatacatatcccattcatcatggtgacccttcctataggacactaaaggagactcagccatggtcctctcccaaaggttctgaaggataccttgcagccacctatccaactgtcggccagaccagtccccgagccaggaaatccatgagcctggacatggggcaaccttctcaggccaacactaagaagttgcttggaacaaggaaaagttttgatcacttgatatcagacacaaaggctcctaaaaggcaagaaatggaatcagggatcacaacaccccccaaaatgaggagagtagcagaaactgattatgaaatggaaactcagaggatttcctcatcacaacagcacccacatttacgtaaagtttcagtgtctgaatcaaatgttctcttggatgaagaagtacttactgatccgaagatccaggcgctgcttcttactgttctagctacactggtaaaatataccacagatgagtttgatcaacgaattctttatgaatacttagcagaggccagtgttgtgtttcccaaagtctttcctgttgtgcataatttgttggactctaagatcaacaccctgttatcattgtgccaagatccaaatttgttaaatccaatccatggaattgtgcagagtgtggtgtaccatgaagaatccccaccacaataccaaacatcttacctgcaaagttttggttttaatggcttgtggcggtttgcaggaccgttttcaaagcaaacacaaattccagactatgctgagcttattgttaagtttcttgatgccttgattgacacgtacctgcctggaattgatgaagaaaccagtgaagaatccctcctgactcccacatctccttaccctcctgcactgcagagccagcttagtatcactgccaaccttaacctttctaattccatgacctcacttgcaacttcccagcattccccaggaatcgacaaggagaacgttgaactctcccctaccactggccactgtaacagtggacgaactcgccacggatccgcaagccaagtgcagaagcaaagaagcgctggcagtttcaaacgtaatagcattaagaagatcgtgtgaagcttgcttgctttcttttttaaaatcaacttaacatgggctcttcactagtgaccccttccctgtccttgccctttccccccatgttgtaatgctgcacttcctgttttataatgaacccatccggtttgccatgttgccagatgatcaactcttcgaagccttgcctaaatttaatgctgccttttctttaactttttttcttctacttttggcgtgtatctggtatatgtaagtgttcagaacaactgcaaagaaagtgggaggtcaggaaacttttaactgagaaatctcaattgtaagagaggatgaattcttgaatactgctactactggccagtgatgaaagccatttgcacagagctctgccttctgtggttttcccttcttcatcctacagagtaaagtgttagtcctatttatacatttttcaagatacaagtttatgagagaaatagtattataaccccagtatgtttaatcttttagctgtggactttttttttaaccgtacaaaactgaaagaaccatagaggtcaagcctcagtgacttgacaccataaagccacagacaaggtacttgggggggagggcagggaaatttcatattttatagtggattcttaagaaatactaacacttgagtattagcaataattacaggaaaataagtgcgaccacatatatcttaacattactgaattaaaactatggcttctaagtccttatccaaactcagtcatccaaactagtttatttttttctccagttgattatcttttaatttttaattttgctaaaggtggtttttttgtgttttgttttttgtaaaccaaaactatactaagtatagtaattatatatatatatatattttttcccctccccctcttctttcctaactaattctgagcagggtaatcagtgaacaaagtgttgaaaattgttcccagaaggtaattttcatagatgtttgcattagctccatagcaaaatggaatggtacgtgacatttagggtagctgatatttttattttgttaaataatttccaagaatagagtatggtgtatattataaatttctttgataagatgtattttgaatgtcttttaatcttcctcctcctctccaaaaaaatcagaaacctctttaagaaaacatgtaggttatatatgctagaattgcatttaatcactgtgaaaagactggtcagcctgcattagtatgacagtaggggggctgttagaattgctgctatactggtggtatggattatcatggcattggaattttcatagtaatgcagatccaatttctttgtggtacctgcagtttacaaaataatttgacttcagtgagcatattggtatctggatgttccaatttagaactaaaccatatttattacaaaaagatattaatccctctactcccaggttccctttatatgttaagatataatggctttgaggggggaaaaaataaacctaggggagaggggagtttcctgtagtgctgtttcattagaggatttcagtaaattaaattccacagctaattcaataaataatggtacatttaagtgttctgattttaataatatatttcacatttatccacacagtaacaatgtaatatgttaatgtaaataaaattggttttgatactcagaaataacaagaatttaattttttaaatttgtttacagtcctgggaaaagtaagaattatttgccaaaataagaggaaagaaaaccttagtattattaatgagtttaccatagaattgttggaaatactgaagacaggtgcaatttactaaacttttgtttttaaactattgtagaggctgcattagaagaaaatgtttataatgacagagcaactatgactatataaaaaagctgaaattagaactgtgtttagaaatagatcagtaacccagtgccaaggatgccaagctgccaccatggtcttggctctcccacaacccagtgtttctggggtaagtttcacagtttctaggccctggaatagcaggcagtgtaagcctttgataactttagttcgatgtttttcttgtttttgtttgttggtttggtgcatatgatagtgggtgttatgctattttgctcttcccatcaaaataaagaaacttccagaggtttactgttaaaaatactgatatttccataaacgggtttaccaagggtgtagtatttcataccgcctgaaatgatcagcattggcacaaatcaaaattcagccgcctttgaaatgcaaaaatacctttgactagtaagtacatcctaggagtttgaaaacttaactaaggtttaaaatttaccttgtttaaagaacttctgacttttgaggaaaatctagctttccaagtaactaaaatgtacatgagataaacctctcaccactatgtgtcccttgagaaatgcaacacttttttagtcttcatacttgtaatctataaaagaaattctgaagtttagaccaagttgcccatttctgcgtaattgacataagttctgttaaaaatattataagtaattcgtttcggtttgtagatgtttcccctgacttgttaaagaggaaaccaggaactcagtcatgtttttgtcctggataatctacctgttatgccagtactcccatccgaggggcatgcccttagttgcccagatggagatgcagttcagtagatttggggcaaagtggctacagctctgtcttccattcactcaacacctgttcatgactgagccaggtgcccaggacacatcctaaacagtcagcttctatcctgtgtcctagtcggggagacagagtgccagccagcaaccctcccaggtttgtaggttttaggggttttcagttttgtttgggttttttgttttttgtttttgtttctacatccttccccgactcccaggcataatgaggcatgtcttactcaatgttatgcaatggatttaggcaaaaattcattcttagtgtcagccacacaattttttttaatgcagtatattcacctgtaaatagtttgtgtaaaatttgacaaaaaaagtatatttactatactgtaaatatatgtgatgatatattgtattattttgcttttttgtaaagcagttagttgctgcacatggataacaacaaaaatttgattattctcgtgttagtattgttaacttctttttgcgactgcgttacatcatttaaagaaaatgctgtgtattgtaaacttaaattgtatatgataacttactgtcctttccatccgggcctaaactttggcagttcctttgtctacaaccttgttaatactgtaaacagttgtacgccagcaggaaaaatactgcccaacagacaaaatcgatcattgtaggggaaaatcatagaaatccatttcagatctttattgttcctcaccccattttcctccttgtgtatgtacttcccccacccccctttttttaagtaaaatgtaaattcaatctgctctaag

SEQ ID NO: 381144 - DNA, 12364 bp, Homo sapiens
aatctctagctcgctcgcgctccctctccccgggccgtggaaaggatcccacttccggtggggtgtcatggcggcgtctcggactgtgatggctgtggggagacggcgctagtggggagagcgaccaagaggccccctcccctccccgggtccccttcccctatccccctccccccagcctccttgccaacgccccctttccctctccccctcccgctcggcgctgaccccccatccccacccccgtgggaacactgggagcctgcactccacagaccctctccttgcctcttccctcacctcagcctccgctccccgccctcttcccggcccagggcgccggcccacccttccctccgccgccccccggccgcggggaggacatggccgcgcacaggccggtggaatgggtccaggccgtggtcagccgcttcgacgagcagcttccaataaaaacaggacagcagaacacacataccaaagtcagtactgagcacaacaaggaatgtctaatcaatatttccaaatacaagttttctttggttataagcggcctcactactattttaaagaatgttaacaatatgagaatatttggagaagctgctgaaaaaaatttatatctctctcagttgattatattggatacactggaaaaatgtcttgctgggcaaccaaaggacacaatgagattagatgaaacgatgctggtcaaacagttgctgccagaaatctgccattttcttcacacctgtcgtgaaggaaaccagcatgcagctgaacttcggaattctgcctctggggttttattttctctcagctgcaacaacttcaatgcagtctttagtcgcatttctaccaggttacaggaattaactgtttgttcagaagacaatgttgatgttcatgatatagaattgttacagtatatcaatgtggattgtgcaaaattaaaacgactcctgaaggaaacagcatttaaatttaaagccctaaagaaggttgcgcagttagcagttataaatagcctggaaaaggcattttggaactgggtagaaaattatccagatgaatttacaaaactataccagatcccacagactgatatggctgaatgtgcagaaaagctatttgacttggtggatggttttgctgaaagcaccaaacgtaaagcagcagtttggccactacaaatcattctccttatcttgtgtccagaaataatccaggatatatccaaagacgtggttgatgaaaacaacatgaataagaagttatttctggacagtctacgaaaagctcttgctggccatggaggaagtaggcagctgacagaaagtgctgcaattgcctgtgtcaaactgtgtaaagcaagtacttacatcaattgggaagataactctgtcattttcctacttgttcagtccatggtggttgatcttaagaacctgctttttaatccaagtaagccattctcaagaggcagtcagcctgcagatgtggatctaatgattgactgccttgtttcttgctttcgtataagccctcacaacaaccaacactttaagatctgcctggctcagaattcaccttctacatttcactatgtgctggtaaattcactccatcgaatcatcaccaattccgcattggattggtggcctaagattgatgctgtgtattgtcactcggttgaacttcgaaatatgtttggtgaaacacttcataaagcagtgcaaggttgtggagcacacccagcaatacgaatggcaccgagtcttacatttaaagaaaaagtaacaagccttaaatttaaagaaaaacctacagacctggagacaagaagctataagtatcttctcttgtccatggtgaaactaattcatgcagatccaaagctcttgctttgtaatccaagaaaacaggggcccgaaacccaaggcagtacagcagaattaattacagggctcgtccaactggtccctcagtcacacatgccagagattgctcaggaagcaatggaggctctgctggttcttcatcagttagatagcattgatttgtggaatcctgatgctcctgtagaaacattttgggagattagctcacaaatgcttttttacatctgcaagaaattaactagtcatcaaatgcttagtagcacagaaattctcaagtggttgcgggaaatattgatctgcaggaataaatttcttcttaaaaataagcaggcagatagaagttcctgtcactttctccttttttacggggtaggatgtgatattccttctagtggaaataccagtcaaatgtccatggatcatgaagaattactacgtactcctggagcctctctccggaagggaaaagggaactcctctatggatagtgcagcaggatgcagcggaacccccccgatttgccgacaagcccagaccaaactagaagtggccctgtacatgtttctgtggaaccctgacactgaagctgttctggttgccatgtcctgtttccgccacctctgtgaggaagcagatatccggtgtggggtggatgaagtgtcagtgcataacctcttgcccaactataacacattcatggagtttgcctctgtcagcaatatgatgtcaacaggaagagcagcacttcagaaaagagtgatggcactgctgaggcgcattgagcatcccactgcaggaaacactgaggcttgggaagatacacatgcaaaatgggaacaagcaacaaagctaatccttaactatccaaaagccaaaatggaagatggccaggctgctgaaagccttcacaagaccattgttaagaggcgaatgtcccatgtgagtggaggaggatccatagatttgtctgacacagactccctacaggaatggatcaacatgactggcttcctttgtgcccttggaggagtgtgcctccagcagagaagcaattctggcctggcaacctatagcccacccatgggtccagtcagtgaacgtaagggttctatgatttcagtgatgtcttcagagggaaacgcagatacacctgtcagcaaatttatggatcggctgttgtccttaatggtgtgtaaccatgagaaagtgggacttcaaatacggaccaatgttaaggatctggtgggtctagaattgagtcctgctctgtatccaatgctatttaacaaattgaagaataccatcagcaagttttttgactcccaaggacaggttttattgactgataccaatactcaatttgtagaacaaaccatagctataatgaagaacttgctagataatcatactgaaggcagctctgaacatctagggcaagctagcattgaaacaatgatgttaaatctggtcaggtatgttcgtgtgcttgggaatatggtccatgcaattcaaataaaaacgaaactgtgtcaattagttgaagtaatgatggcaaggagagatgacctctcattttgccaagagatgaaatttaggaataagatggtagaatacctgacagactgggttatgggaacatcaaaccaagcagcagatgatgatgtaaaatgtcttacaagagatttggaccaggcaagcatggaagcagtagtttcacttctagctggtctccctctgcagcctgaagaaggagatggtgtggaattgatggaagccaaatcacagttatttcttaaatacttcacattatttatgaaccttttgaatgactgcagtgaagttgaagatgaaagtgcgcaaacaggtggcaggaaacgtggcatgtctcggaggctggcatcactgaggcactgtacggtccttgcaatgtcaaacttactcaatgccaacgtagacagtggtctcatgcactccataggcttaggttaccacaaggatctccagacaagagctacatttatggaagttctgacaaaaatccttcaacaaggcacagaatttgacacacttgcagaaacagtattggctgatcggtttgagagattggtggaactggtcacaatgatgggtgatcaaggagaactccctatagcgatggctctggccaatgtggttccttgttctcagtgggatgaactagctcgagttctggttactctgtttgattctcggcatttactctaccaactgctctggaacatgttttctaaagaagtagaattggcagactccatgcagactctcttccgaggcaacagcttggccagtaaaataatgacattctgtttcaaggtatatggtgctacctatctacaaaaactcctggatcctttattacgaattgtgatcacatcctctgattggcaacatgttagctttgaagtggatcctaccaggttagaaccatcagagagccttgaggaaaaccagcggaacctccttcagatgactgaaaagttcttccatgccatcatcagttcctcctcagaattcccccctcaacttcgaagtgtgtgccactgtttataccaggtggttagccagcgtttccctcagaacagcatcggtgcagtaggaagtgccatgttcctcagatttatcaatcctgccattgtctcaccgtatgaagcagggattttagataaaaagccaccacctagaatcgaaaggggcttgaagttaatgtcaaagatacttcagagtattgccaatcatgttctcttcacaaaagaagaacatatgcggcctttcaatgattttgtgaaaagcaactttgatgcagcacgcaggtttttccttgatatagcatctgattgtcctacaagtgatgcagtaaatcatagtctttccttcataagtgacggcaatgtgcttgctttacatcgtctactctggaacaatcaggagaaaattgggcagtatctttccagcaacagggatcataaagctgttggaagacgaccttttgataagatggcaacacttcttgcatacctgggtcctccagagcacaaacctgtggcagatacacactggtccagccttaaccttaccagttcaaagtttgaggaatttatgactaggcatcaggtacatgaaaaagaagaattcaaggctttgaaaacgttaagtattttctaccaagctgggacttccaaagctgggaatcctattttttattatgttgcacggaggttcaaaactggtcaaatcaatggtgatttgctgatataccatgtcttactgactttaaagccatattatgcaaagccatatgaaattgtagtggaccttacccataccgggcctagcaatcgctttaaaacagactttctctctaagtggtttgttgtttttcctggctttgcttacgacaacgtctccgcagtctatatctataactgtaactcctgggtcagggagtacaccaagtatcatgagcggctgctgactggcctcaaaggtagcaaaaggcttgttttcatagactgtcctgggaaactggctgagcacatagagcatgaacaacagaaactacctgctgccaccttggctttagaagaggacctgaaggtattccacaatgctctcaagctagctcacaaagacaccaaagtttctattaaagttggttctactgctgtccaagtaacttcagcagagcgaacaaaagtcctagggcaatcagtctttctaaatgacatttattatgcttcggaaattgaagaaatctgcctagtagatgagaaccagttcaccttaaccattgcaaaccagggcacgccgctcaccttcatgcaccaggagtgtgaagccattgtccagtctatcattcatatccggacccgctgggaactgtcacagcccgactctatcccccaacacaccaagattcggccaaaagatgtccctgggacactgctcaatatcgcattacttaatttaggcagttctgacccgagtttacggtcagctgcctataatcttctgtgtgccttaacttgtacctttaatttaaaaatcgagggccagttactagagacatcaggtttatgtatccctgccaacaacaccctctttattgtctctattagtaagacactggcagccaatgagccacacctcacgttagaatttttggaagagtgtatttctggatttagcaaatctagtattgaattgaaacacctttgtttggaatacatgactccatggctgtcaaatctagttcgtttttgcaagcataatgatgatgccaaacgacaaagagttactgctattcttgacaagctgataacaatgaccatcaatgaaaaacagatgtacccatctattcaagcaaaaatatggggaagccttgggcagattacagatctgcttgatgttgtactagacagtttcatcaaaaccagtgcaacaggtggcttgggatcaataaaagctgaggtgatggcagatactgctgtagctttggcttctggaaatgtgaaattggtttcaagcaaggttattggaaggatgtgcaaaataattgacaagacatgcttatctccaactcctactttagaacaacatcttatgtgggatgatattgctattttagcacgctacatgctgatgctgtccttcaacaattcccttgatgtggcagctcatcttccctacctcttccacgttgttactttcttagtagccacaggtccgctctcccttagagcttccacacatggactggtcattaatatcattcactctctgtgtacttgttcacagcttcattttagtgaagagaccaagcaagttttgagactcagtctgacagagttctcattacccaaattttacttgctgtttggcattagcaaagtcaagtcagctgctgtcattgccttccgttccagttaccgggacaggtcattctctcctggctcctatgagagagagacttttgctttgacatccttggaaacagtcacagaagctttgttggagatcatggaggcatgcatgagagatattccaacgtgcaagtggctggaccagtggacagaactagctcaaagatttgcattccaatataatccatccctgcaaccaagagctcttgttgtctttgggtgtattagcaaacgagtgtctcatgggcagataaagcagataatccgtattcttagcaaggcacttgagagttgcttaaaaggacctgacacttacaacagtcaagttctgatagaagctacagtaatagcactaaccaaattacagccacttcttaataaggactcgcctctgcacaaagccctcttttgggtagctgtggctgtgctgcagcttgatgaggtcaacttgtattcagcaggtaccgcacttcttgaacaaaacctgcatactttagatagtctccgtatattcaatgacaagagtccagaggaagtatttatggcaatccggaatcctctggagtggcactgcaagcaaatggatcattttgttggactcaatttcaactctaactttaactttgcattggttggacaccttttaaaagggtacaggcatccttcacctgctattgttgcaagaacagtcagaattttacatacactactaactctggttaacaaacacagaaattgtgacaaatttgaagtgaatacacagagcgtggcctacttagcagctttacttacagtgtctgaagaagttcgaagtcgctgcagcctaaaacatagaaagtcacttcttcttactgatatttcaatggaaaatgttcctatggatacatatcccattcatcatggtgacccttcctataggacactaaaggagactcagccatggtcctctcccaaaggttctgaaggataccttgcagccacctatccaactgtcggccagaccagtccccgagccaggaaatccatgagcctggacatggggcaaccttctcaggccaacactaagaagttgcttggaacaaggaaaagttttgatcacttgatatcagacacaaaggctcctaaaaggcaagaaatggaatcagggatcacaacaccccccaaaatgaggagagtagcagaaactgattatgaaatggaaactcagaggatttcctcatcacaacagcacccacatttacgtaaagtttcagtgtctgaatcaaatgttctcttggatgaagaagtacttactgatccgaagatccaggcgctgcttcttactgttctagctacactggtaaaatataccacagatgagtttgatcaacgaattctttatgaatacttagcagaggccagtgttgtgtttcccaaagtctttcctgttgtgcataatttgttggactctaagatcaacaccctgttatcattgtgccaagatccaaatttgttaaatccaatccatggaattgtgcagagtgtggtgtaccatgaagaatccccaccacaataccaaacatcttacctgcaaagttttggttttaatggcttgtggcggtttgcaggaccgttttcaaagcaaacacaaattccagactatgctgagcttattgttaagtttcttgatgccttgattgacacgtacctgcctggaattgatgaagaaaccagtgaagaatccctcctgactcccacatctccttaccctcctgcactgcagagccagcttagtatcactgccaaccttaacctttctaattccatgacctcacttgcaacttcccagcattccccaggaatcgacaaggagaacgttgaactctcccctaccactggccactgtaacagtggacgaactcgccacggatccgcaagccaagtgcagaagcaaagaagcgctggcagtttcaaacgtaatagcattaagaagatcgtgtgaagcttgcttgctttcttttttaaaatcaacttaacatgggctcttcactagtgaccccttccctgtccttgccctttccccccatgttgtaatgctgcacttcctgttttataatgaacccatccggtttgccatgttgccagatgatcaactcttcgaagccttgcctaaatttaatgctgccttttctttaactttttttcttctacttttggcgtgtatctggtatatgtaagtgttcagaacaactgcaaagaaagtgggaggtcaggaaacttttaactgagaaatctcaattgtaagagaggatgaattcttgaatactgctactactggccagtgatgaaagccatttgcacagagctctgccttctgtggttttcccttcttcatcctacagagtaaagtgttagtcctatttatacatttttcaagatacaagtttatgagagaaatagtattataaccccagtatgtttaatcttttagctgtggactttttttttaaccgtacaaaactgaaagaaccatagaggtcaagcctcagtgacttgacaccataaagccacagacaaggtacttgggggggagggcagggaaatttcatattttatagtggattcttaagaaatactaacacttgagtattagcaataattacaggaaaataagtgcgaccacatatatcttaacattactgaattaaaactatggcttctaagtccttatccaaactcagtcatccaaactagtttatttttttctccagttgattatcttttaatttttaattttgctaaaggtggtttttttgtgttttgttttttgtaaaccaaaactatactaagtatagtaattatatatatatatatattttttcccctccccctcttctttcctaactaattctgagcagggtaatcagtgaacaaagtgttgaaaattgttcccagaaggtaattttcatagatgtttgcattagctccatagcaaaatggaatggtacgtgacatttagggtagctgatatttttattttgttaaataatttccaagaatagagtatggtgtatattataaatttctttgataagatgtattttgaatgtcttttaatcttcctcctcctctccaaaaaaatcagaaacctctttaagaaaacatgtaggttatatatgctagaattgcatttaatcactgtgaaaagactggtcagcctgcattagtatgacagtaggggggctgttagaattgctgctatactggtggtatggattatcatggcattggaattttcatagtaatgcagatccaatttctttgtggtacctgcagtttacaaaataatttgacttcagtgagcatattggtatctggatgttccaatttagaactaaaccatatttattacaaaaagatattaatccctctactcccaggttccctttatatgttaagatataatggctttgaggggggaaaccgggggggggagggattcctaggaattttaaaaagaagttggatttaattagaccggctttttatccaataggtaggatagtatgggggaatggtttctttgaagatgttctgattttaataatatatttcacatttatccacacagtaacaatgtaatatgttaatgtaaataaaattggttttgatactcagaaataacaagaatttaattttttaaatttgtttacagtcctgggaaaagtaagaattatttgccaaaataagaggaaagaaaaccttagtattattaatgagtttaccatagaattgttggaaatactgaagacaggtgcaatttactaaacttttgtttttaaactattgtagaggctgcattagaagaaaatgtttataatgacagagcaactatgactatataaaaaagctgaaattagaactgtgtttagaaatagatcagtaacccagtgccaaggatgccaagctgccaccatggtcttggctctcccacaacccagtgtttctggggtaagtttcacagtttctaggccctggaatagcaggcagtgtaagcctttgataactttagttcgatgtttttcttgtttttgtttgttggtttggtgcatatgatagtgggtgttatgctattttgctcttcccatcaaaataaagaaacttccagaggtttactgttaaaaatactgatatttccataaacgggtttaccaagggtgtagtatttcataccgcctgaaatgatcagcattggcacaaatcaaaattcagccgcctttgaaatgcaaaaatacctttgactagtaagtacatcctaggagtttgaaaacttaactaaggtttaaaatttaccttgtttaaagaacttctgacttttgaggaaaatctagctttccaagtaactaaaatgtacatgagataaacctctcaccactatgtgtcccttgagaaatgcaacacttttttagtcttcatacttgtaatctataaaagaaattctgaagtttagaccaagttgcccatttctgcgtaattgacataagttctgttaaaaatattataagtaattcgtttcggtttgtagatgtttcccctgacttgttaaagaggaaaccaggaactcagtcatgtttttgtcctggataatctacctgttatgccagtactcccatccgaggggcatgcccttagttgcccagatggagatgcagttcagtagatttggggcaaagtggctacagctctgtcttccattcactcaacacctgttcatgactgagccaggtgcccaggacacatcctaaacagtcagcttctatcctgtgtcctagtcggggagacagagtgccagccagcaaccctcccaggtttgtaggttttaggggttttcagttttgtttgggttttttgttttttgtttttgtttctacatccttccccgactcccaggcataatgaggcatgtcttactcaatgttatgcaatggatttaggcaaaaattcattcttagtgtcagccacacaattttttttaatgcagtatattcacctgtaaatagtttgtgtaaaatttgacaaaaaaagtatatttactatactgtaaatatatgtgatgatatattgtattattttgcttttttgtaaagcagttagttgctgcacatggataacaacaaaaatttgattattctcgtgttagtattgttaacttctttttgcgactgcgttacatcatttaaagaaaatgctgtgtattgtaaacttaaattgtatatgataacttactgtcctttccatccgggcctaaactttggcagttcctttgtctacaaccttgttaatactgtaaacagttgtacgccagcaggaaaaatactgcccaacagacaaaatcgatcattgtaggggaaaatcatagaaatccatttcagatctttattgttcctcaccccattttcctccttgtgtatgtacttcccccacccccctttttttaagtaaaatgtaaattcaatctgctctaag

SEQ ID NO: 381145 - DNA, 12424 bp, Homo sapiens
aatctctagctcgctcgcgctccctctccccgggccgtggaaaggatcccacttccggtggggtgtcatggcggcgtctcggactgtgatggctgtggggagacggcgctagtggggagagcgaccaagaggccccctcccctccccgggtccccttcccctatccccctccccccagcctccttgccaacgccccctttccctctccccctcccgctcggcgctgaccccccatccccacccccgtgggaacactgggagcctgcactccacagaccctctccttgcctcttccctcacctcagcctccgctccccgccctcttcccggcccagggcgccggcccacccttccctccgccgccccccggccgcggggaggacatggccgcgcacaggccggtggaatgggtccaggccgtggtcagccgcttcgacgagcagcttccaataaaaacaggacagcagaacacacataccaaagtcagtactgagcacaacaaggaatgtctaatcaatatttccaaatacaagttttctttggttataagcggcctcactactattttaaagaatgttaacaatatgagaatatttggagaagctgctgaaaaaaatttatatctctctcagttgattatattggatacactggaaaaatgtcttgctgggcaaccaaaggacacaatgagattagatgaaacgatgctggtcaaacagttgctgccagaaatctgccattttcttcacacctgtcgtgaaggaaaccagcatgcagctgaacttcggaattctgcctctggggttttattttctctcagctgcaacaacttcaatgcagtctttagtcgcatttctaccaggttacaggaattaactgtttgttcagaagacaatgttgatgttcatgatatagaattgttacagtatatcaatgtggattgtgcaaaattaaaacgactcctgaaggaaacagcatttaaatttaaagccctaaagaaggttgcgcagttagcagttataaatagcctggaaaaggcattttggaactgggtagaaaattatccagatgaatttacaaaactataccagatcccacagactgatatggctgaatgtgcagaaaagctatttgacttggtggatggttttgctgaaagcaccaaacgtaaagcagcagtttggccactacaaatcattctccttatcttgtgtccagaaataatccaggatatatccaaagacgtggttgatgaaaacaacatgaataagaagttatttctggacagtctacgaaaagctcttgctggccatggaggaagtaggcagctgacagaaagtgctgcaattgcctgtgtcaaactgtgtaaagcaagtacttacatcaattgggaagataactctgtcattttcctacttgttcagtccatggtggttgatcttaagaacctgctttttaatccaagtaagccattctcaagaggcagtcagcctgcagatgtggatctaatgattgactgccttgtttcttgctttcgtataagccctcacaacaaccaacactttaagatctgcctggctcagaattcaccttctacatttcactatgtgctggtaaattcactccatcgaatcatcaccaattccgcattggattggtggcctaagattgatgctgtgtattgtcactcggttgaacttcgaaatatgtttggtgaaacacttcataaagcagtgcaaggttgtggagcacacccagcaatacgaatggcaccgagtcttacatttaaagaaaaagtaacaagccttaaatttaaagaaaaacctacagacctggagacaagaagctataagtatcttctcttgtccatggtgaaactaattcatgcagatccaaagctcttgctttgtaatccaagaaaacaggggcccgaaacccaaggcagtacagcagaattaattacagggctcgtccaactggtccctcagtcacacatgccagagattgctcaggaagcaatggaggctctgctggttcttcatcagttagatagcattgatttgtggaatcctgatgctcctgtagaaacattttgggagattagctcacaaatgcttttttacatctgcaagaaattaactagtcatcaaatgcttagtagcacagaaattctcaagtggttgcgggaaatattgatctgcaggaataaatttcttcttaaaaataagcaggcagatagaagttcctgtcactttctccttttttacggggtaggatgtgatattccttctagtggaaataccagtcaaatgtccatggatcatgaagaattactacgtactcctggagcctctctccggaagggaaaagggaactcctctatggatagtgcagcaggatgcagcggaacccccccgatttgccgacaagcccagaccaaactagaagtggccctgtacatgtttctgtggaaccctgacactgaagctgttctggttgccatgtcctgtttccgccacctctgtgaggaagcagatatccggtgtggggtggatgaagtgtcagtgcataacctcttgcccaactataacacattcatggagtttgcctctgtcagcaatatgatgtcaacaggaagagcagcacttcagaaaagagtgatggcactgctgaggcgcattgagcatcccactgcaggaaacactgaggcttgggaagatacacatgcaaaatgggaacaagcaacaaagctaatccttaactatccaaaagccaaaatggaagatggccaggctgctgaaagccttcacaagaccattgttaagaggcgaatgtcccatgtgagtggaggaggatccatagatttgtctgacacagactccctacaggaatggatcaacatgactggcttcctttgtgcccttggaggagtgtgcctccagcagagaagcaattctggcctggcaacctatagcccacccatgggtccagtcagtgaacgtaagggttctatgatttcagtgatgtcttcagagggaaacgcagatacacctgtcagcaaatttatggatcggctgttgtccttaatggtgtgtaaccatgagaaagtgggacttcaaatacggaccaatgttaaggatctggtgggtctagaattgagtcctgctctgtatccaatgctatttaacaaattgaagaataccatcagcaagttttttgactcccaaggacaggttttattgactgataccaatactcaatttgtagaacaaaccatagctataatgaagaacttgctagataatcatactgaaggcagctctgaacatctagggcaagctagcattgaaacaatgatgttaaatctggtcaggtatgttcgtgtgcttgggaatatggtccatgcaattcaaataaaaacgaaactgtgtcaattagttgaagtaatgatggcaaggagagatgacctctcattttgccaagagatgaaatttaggaataagatggtagaatacctgacagactgggttatgggaacatcaaaccaagcagcagatgatgatgtaaaatgtcttacaagagatttggaccaggcaagcatggaagcagtagtttcacttctagctggtctccctctgcagcctgaagaaggagatggtgtggaattgatggaagccaaatcacagttatttcttaaatacttcacattatttatgaaccttttgaatgactgcagtgaagttgaagatgaaagtgcgcaaacaggtggcaggaaacgtggcatgtctcggaggctggcatcactgaggcactgtacggtccttgcaatgtcaaacttactcaatgccaacgtagacagtggtctcatgcactccataggcttaggttaccacaaggatctccagacaagagctacatttatggaagttctgacaaaaatccttcaacaaggcacagaatttgacacacttgcagaaacagtattggctgatcggtttgagagattggtggaactggtcacaatgatgggtgatcaaggagaactccctatagcgatggctctggccaatgtggttccttgttctcagtgggatgaactagctcgagttctggttactctgtttgattctcggcatttactctaccaactgctctggaacatgttttctaaagaagtagaattggcagactccatgcagactctcttccgaggcaacagcttggccagtaaaataatgacattctgtttcaaggtatatggtgctacctatctacaaaaactcctggatcctttattacgaattgtgatcacatcctctgattggcaacatgttagctttgaagtggatcctaccaggttagaaccatcagagagccttgaggaaaaccagcggaacctccttcagatgactgaaaagttcttccatgccatcatcagttcctcctcagaattcccccctcaacttcgaagtgtgtgccactgtttataccaggcaacttgccactccctactgaataaagctacagtaaaagaaaaaaaggaaaacaaaaaatcagtggttagccagcgtttccctcagaacagcatcggtgcagtaggaagtgccatgttcctcagatttatcaatcctgccattgtctcaccgtatgaagcagggattttagataaaaagccaccacctagaatcgaaaggggcttgaagttaatgtcaaagatacttcagagtattgccaatcatgttctcttcacaaaagaagaacatatgcggcctttcaatgattttgtgaaaagcaactttgatgcagcacgcaggtttttccttgatatagcatctgattgtcctacaagtgatgcagtaaatcatagtctttccttcataagtgacggcaatgtgcttgctttacatcgtctactctggaacaatcaggagaaaattgggcagtatctttccagcaacagggatcataaagctgttggaagacgaccttttgataagatggcaacacttcttgcatacctgggtcctccagagcacaaacctgtggcagatacacactggtccagccttaaccttaccagttcaaagtttgaggaatttatgactaggcatcaggtacatgaaaaagaagaattcaaggctttgaaaacgttaagtattttctaccaagctgggacttccaaagctgggaatcctattttttattatgttgcacggaggttcaaaactggtcaaatcaatggtgatttgctgatataccatgtcttactgactttaaagccatattatgcaaagccatatgaaattgtagtggaccttacccataccgggcctagcaatcgctttaaaacagactttctctctaagtggtttgttgtttttcctggctttgcttacgacaacgtctccgcagtctatatctataactgtaactcctgggtcagggagtacaccaagtatcatgagcggctgctgactggcctcaaaggtagcaaaaggcttgttttcatagactgtcctgggaaactggctgagcacatagagcatgaacaacagaaactacctgctgccaccttggctttagaagaggacctgaaggtattccacaatgctctcaagctagctcacaaagacaccaaagtttctattaaagttggttctactgctgtccaagtaacttcagcagagcgaacaaaagtcctagggcaatcagtctttctaaatgacatttattatgcttcggaaattgaagaaatctgcctagtagatgagaaccagttcaccttaaccattgcaaaccagggcacgccgctcaccttcatgcaccaggagtgtgaagccattgtccagtctatcattcatatccggacccgctgggaactgtcacagcccgactctatcccccaacacaccaagattcggccaaaagatgtccctgggacactgctcaatatcgcattacttaatttaggcagttctgacccgagtttacggtcagctgcctataatcttctgtgtgccttaacttgtacctttaatttaaaaatcgagggccagttactagagacatcaggtttatgtatccctgccaacaacaccctctttattgtctctattagtaagacactggcagccaatgagccacacctcacgttagaatttttggaagagtgtatttctggatttagcaaatctagtattgaattgaaacacctttgtttggaatacatgactccatggctgtcaaatctagttcgtttttgcaagcataatgatgatgccaaacgacaaagagttactgctattcttgacaagctgataacaatgaccatcaatgaaaaacagatgtacccatctattcaagcaaaaatatggggaagccttgggcagattacagatctgcttgatgttgtactagacagtttcatcaaaaccagtgcaacaggtggcttgggatcaataaaagctgaggtgatggcagatactgctgtagctttggcttctggaaatgtgaaattggtttcaagcaaggttattggaaggatgtgcaaaataattgacaagacatgcttatctccaactcctactttagaacaacatcttatgtgggatgatattgctattttagcacgctacatgctgatgctgtccttcaacaattcccttgatgtggcagctcatcttccctacctcttccacgttgttactttcttagtagccacaggtccgctctcccttagagcttccacacatggactggtcattaatatcattcactctctgtgtacttgttcacagcttcattttagtgaagagaccaagcaagttttgagactcagtctgacagagttctcattacccaaattttacttgctgtttggcattagcaaagtcaagtcagctgctgtcattgccttccgttccagttaccgggacaggtcattctctcctggctcctatgagagagagacttttgctttgacatccttggaaacagtcacagaagctttgttggagatcatggaggcatgcatgagagatattccaacgtgcaagtggctggaccagtggacagaactagctcaaagatttgcattccaatataatccatccctgcaaccaagagctcttgttgtctttgggtgtattagcaaacgagtgtctcatgggcagataaagcagataatccgtattcttagcaaggcacttgagagttgcttaaaaggacctgacacttacaacagtcaagttctgatagaagctacagtaatagcactaaccaaattacagccacttcttaataaggactcgcctctgcacaaagccctcttttgggtagctgtggctgtgctgcagcttgatgaggtcaacttgtattcagcaggtaccgcacttcttgaacaaaacctgcatactttagatagtctccgtatattcaatgacaagagtccagaggaagtatttatggcaatccggaatcctctggagtggcactgcaagcaaatggatcattttgttggactcaatttcaactctaactttaactttgcattggttggacaccttttaaaagggtacaggcatccttcacctgctattgttgcaagaacagtcagaattttacatacactactaactctggttaacaaacacagaaattgtgacaaatttgaagtgaatacacagagcgtggcctacttagcagctttacttacagtgtctgaagaagttcgaagtcgctgcagcctaaaacatagaaagtcacttcttcttactgatatttcaatggaaaatgttcctatggatacatatcccattcatcatggtgacccttcctataggacactaaaggagactcagccatggtcctctcccaaaggttctgaaggataccttgcagccacctatccaactgtcggccagaccagtccccgagccaggaaatccatgagcctggacatggggcaaccttctcaggccaacactaagaagttgcttggaacaaggaaaagttttgatcacttgatatcagacacaaaggctcctaaaaggcaagaaatggaatcagggatcacaacaccccccaaaatgaggagagtagcagaaactgattatgaaatggaaactcagaggatttcctcatcacaacagcacccacatttacgtaaagtttcagtgtctgaatcaaatgttctcttggatgaagaagtacttactgatccgaagatccaggcgctgcttcttactgttctagctacactggtaaaatataccacagatgagtttgatcaacgaattctttatgaatacttagcagaggccagtgttgtgtttcccaaagtctttcctgttgtgcataatttgttggactctaagatcaacaccctgttatcattgtgccaagatccaaatttgttaaatccaatccatggaattgtgcagagtgtggtgtaccatgaagaatccccaccacaataccaaacatcttacctgcaaagttttggttttaatggcttgtggcggtttgcaggaccgttttcaaagcaaacacaaattccagactatgctgagcttattgttaagtttcttgatgccttgattgacacgtacctgcctggaattgatgaagaaaccagtgaagaatccctcctgactcccacatctccttaccctcctgcactgcagagccagcttagtatcactgccaaccttaacctttctaattccatgacctcacttgcaacttcccagcattccccaggaatcgacaaggagaacgttgaactctcccctaccactggccactgtaacagtggacgaactcgccacggatccgcaagccaagtgcagaagcaaagaagcgctggcagtttcaaacgtaatagcattaagaagatcgtgtgaagcttgcttgctttcttttttaaaatcaacttaacatgggctcttcactagtgaccccttccctgtccttgccctttccccccatgttgtaatgctgcacttcctgttttataatgaacccatccggtttgccatgttgccagatgatcaactcttcgaagccttgcctaaatttaatgctgccttttctttaactttttttcttctacttttggcgtgtatctggtatatgtaagtgttcagaacaactgcaaagaaagtgggaggtcaggaaacttttaactgagaaatctcaattgtaagagaggatgaattcttgaatactgctactactggccagtgatgaaagccatttgcacagagctctgccttctgtggttttcccttcttcatcctacagagtaaagtgttagtcctatttatacatttttcaagatacaagtttatgagagaaatagtattataaccccagtatgtttaatcttttagctgtggactttttttttaaccgtacaaaactgaaagaaccatagaggtcaagcctcagtgacttgacaccataaagccacagacaaggtacttgggggggagggcagggaaatttcatattttatagtggattcttaagaaatactaacacttgagtattagcaataattacaggaaaataagtgcgaccacatatatcttaacattactgaattaaaactatggcttctaagtccttatccaaactcagtcatccaaactagtttatttttttctccagttgattatcttttaatttttaattttgctaaaggtggtttttttgtgttttgttttttgtaaaccaaaactatactaagtatagtaattatatatatatatatattttttcccctccccctcttctttcctaactaattctgagcagggtaatcagtgaacaaagtgttgaaaattgttcccagaaggtaattttcatagatgtttgcattagctccatagcaaaatggaatggtacgtgacatttagggtagctgatatttttattttgttaaataatttccaagaatagagtatggtgtatattataaatttctttgataagatgtattttgaatgtcttttaatcttcctcctcctctccaaaaaaatcagaaacctctttaagaaaacatgtaggttatatatgctagaattgcatttaatcactgtgaaaagactggtcagcctgcattagtatgacagtaggggggctgttagaattgctgctatactggtggtatggattatcatggcattggaattttcatagtaatgcagatccaatttctttgtggtacctgcagtttacaaaataatttgacttcagtgagcatattggtatctggatgttccaatttagaactaaaccatatttattacaaaaagatattaatccctctactcccaggttccctttatatgttaagatataatggctttgaggggggaaaaaataaacctaggggagaggggagtttcctgtagtgctgtttcattagaggatttcagtaaattaaattccacagctaattcaataaataatggtacatttaagtgttctgattttaataatatatttcacatttatccacacagtaacaatgtaatatgttaatgtaaataaaattggttttgatactcagaaataacaagaatttaattttttaaatttgtttacagtcctgggaaaagtaagaattatttgccaaaataagaggaaagaaaaccttagtattattaatgagtttaccatagaattgttggaaatactgaagacaggtgcaatttactaaacttttgtttttaaactattgtagaggctgcattagaagaaaatgtttataatgacagagcaactatgactatataaaaaagctgaaattagaactgtgtttagaaatagatcagtaacccagtgccaaggatgccaagctgccaccatggtcttggctctcccacaacccagtgtttctggggtaagtttcacagtttctaggccctggaatagcaggcagtgtaagcctttgataactttagttcgatgtttttcttgtttttgtttgttggtttggtgcatatgatagtgggtgttatgctattttgctcttcccatcaaaataaagaaacttccagaggtttactgttaaaaatactgatatttccataaacgggtttaccaagggtgtagtatttcataccgcctgaaatgatcagcattggcacaaatcaaaattcagccgcctttgaaatgcaaaaatacctttgactagtaagtacatcctaggagtttgaaaacttaactaaggtttaaaatttaccttgtttaaagaacttctgacttttgaggaaaatctagctttccaagtaactaaaatgtacatgagataaacctctcaccactatgtgtcccttgagaaatgcaacacttttttagtcttcatacttgtaatctataaaagaaattctgaagtttagaccaagttgcccatttctgcgtaattgacataagttctgttaaaaatattataagtaattcgtttcggtttgtagatgtttcccctgacttgttaaagaggaaaccaggaactcagtcatgtttttgtcctggataatctacctgttatgccagtactcccatccgaggggcatgcccttagttgcccagatggagatgcagttcagtagatttggggcaaagtggctacagctctgtcttccattcactcaacacctgttcatgactgagccaggtgcccaggacacatcctaaacagtcagcttctatcctgtgtcctagtcggggagacagagtgccagccagcaaccctcccaggtttgtaggttttaggggttttcagttttgtttgggttttttgttttttgtttttgtttctacatccttccccgactcccaggcataatgaggcatgtcttactcaatgttatgcaatggatttaggcaaaaattcattcttagtgtcagccacacaattttttttaatgcagtatattcacctgtaaatagtttgtgtaaaatttgacaaaaaaagtatatttactatactgtaaatatatgtgatgatatattgtattattttgcttttttgtaaagcagttagttgctgcacatggataacaacaaaaatttgattattctcgtgttagtattgttaacttctttttgcgactgcgttacatcatttaaagaaaatgctgtgtattgtaaacttaaattgtatatgataacttactgtcctttccatccgggcctaaactttggcagttcctttgtctacaaccttgttaatactgtaaacagttgtacgccagcaggaaaaatactgcccaacagacaaaatcgatcattgtaggggaaaatcatagaaatccatttcagatctttattgttcctcaccccattttcctccttgtgtatgtacttcccccacccccctttttttaagtaaaatgtaaattcaatctgctctaag

SEQ ID NO: 381146 - DNA, 11601 bp, Homo sapiens
gtggcgcctgcctatttactccattcggaattctgcctctggggttttattttctctcagctgcaacaacttcaatgcagtctttagtcgcatttctaccaggttacaggaattaactgtttgttcagaagacaatgttgatgttcatgatatagaattgttacagtatatcaatgtggattgtgcaaaattaaaacgactcctgaaggaaacagcatttaaatttaaagccctaaagaaggttgcgcagttagcagttataaatagcctggaaaaggcattttggaactgggtagaaaattatccagatgaatttacaaaactataccagatcccacagactgatatggctgaatgtgcagaaaagctatttgacttggtggatggttttgctgaaagcaccaaacgtaaagcagcagtttggccactacaaatcattctccttatcttgtgtccagaaataatccaggatatatccaaagacgtggttgatgaaaacaacatgaataagaagttatttctggacagtctacgaaaagctcttgctggccatggaggaagtaggcagctgacagaaagtgctgcaattgcctgtgtcaaactgtgtaaagcaagtacttacatcaattgggaagataactctgtcattttcctacttgttcagtccatggtggttgatcttaagaacctgctttttaatccaagtaagccattctcaagaggcagtcagcctgcagatgtggatctaatgattgactgccttgtttcttgctttcgtataagccctcacaacaaccaacactttaagatctgcctggctcagaattcaccttctacatttcactatgtgctggtaaattcactccatcgaatcatcaccaattccgcattggattggtggcctaagattgatgctgtgtattgtcactcggttgaacttcgaaatatgtttggtgaaacacttcataaagcagtgcaaggttgtggagcacacccagcaatacgaatggcaccgagtcttacatttaaagaaaaagtaacaagccttaaatttaaagaaaaacctacagacctggagacaagaagctataagtatcttctcttgtccatggtgaaactaattcatgcagatccaaagctcttgctttgtaatccaagaaaacaggggcccgaaacccaaggcagtacagcagaattaattacagggctcgtccaactggtccctcagtcacacatgccagagattgctcaggaagcaatggaggctctgctggttcttcatcagttagatagcattgatttgtggaatcctgatgctcctgtagaaacattttgggagattagctcacaaatgcttttttacatctgcaagaaattaactagtcatcaaatgcttagtagcacagaaattctcaagtggttgcgggaaatattgatctgcaggaataaatttcttcttaaaaataagcaggcagatagaagttcctgtcactttctccttttttacggggtaggatgtgatattccttctagtggaaataccagtcaaatgtccatggatcatgaagaattactacgtactcctggagcctctctccggaagggaaaagggaactcctctatggatagtgcagcaggatgcagcggaacccccccgatttgccgacaagcccagaccaaactagaagtggccctgtacatgtttctgtggaaccctgacactgaagctgttctggttgccatgtcctgtttccgccacctctgtgaggaagcagatatccggtgtggggtggatgaagtgtcagtgcataacctcttgcccaactataacacattcatggagtttgcctctgtcagcaatatgatgtcaacaggaagagcagcacttcagaaaagagtgatggcactgctgaggcgcattgagcatcccactgcaggaaacactgaggcttgggaagatacacatgcaaaatgggaacaagcaacaaagctaatccttaactatccaaaagccaaaatggaagatggccaggctgctgaaagccttcacaagaccattgttaagaggcgaatgtcccatgtgagtggaggaggatccatagatttgtctgacacagactccctacaggaatggatcaacatgactggcttcctttgtgcccttggaggagtgtgcctccagcagagaagcaattctggcctggcaacctatagcccacccatgggtccagtcagtgaacgtaagggttctatgatttcagtgatgtcttcagagggaaacgcagatacacctgtcagcaaatttatggatcggctgttgtccttaatggtgtgtaaccatgagaaagtgggacttcaaatacggaccaatgttaaggatctggtgggtctagaattgagtcctgctctgtatccaatgctatttaacaaattgaagaataccatcagcaagttttttgactcccaaggacaggttttattgactgataccaatactcaatttgtagaacaaaccatagctataatgaagaacttgctagataatcatactgaaggcagctctgaacatctagggcaagctagcattgaaacaatgatgttaaatctggtcaggtatgttcgtgtgcttgggaatatggtccatgcaattcaaataaaaacgaaactgtgtcaattagttgaagtaatgatggcaaggagagatgacctctcattttgccaagagatgaaatttaggaataagatggtagaatacctgacagactgggttatgggaacatcaaaccaagcagcagatgatgatgtaaaatgtcttacaagagatttggaccaggcaagcatggaagcagtagtttcacttctagctggtctccctctgcagcctgaagaaggagatggtgtggaattgatggaagccaaatcacagttatttcttaaatacttcacattatttatgaaccttttgaatgactgcagtgaagttgaagatgaaagtgcgcaaacaggtggcaggaaacgtggcatgtctcggaggctggcatcactgaggcactgtacggtccttgcaatgtcaaacttactcaatgccaacgtagacagtggtctcatgcactccataggcttaggttaccacaaggatctccagacaagagctacatttatggaagttctgacaaaaatccttcaacaaggcacagaatttgacacacttgcagaaacagtattggctgatcggtttgagagattggtggaactggtcacaatgatgggtgatcaaggagaactccctatagcgatggctctggccaatgtggttccttgttctcagtgggatgaactagctcgagttctggttactctgtttgattctcggcatttactctaccaactgctctggaacatgttttctaaagaagtagaattggcagactccatgcagactctcttccgaggcaacagcttggccagtaaaataatgacattctgtttcaaggtatatggtgctacctatctacaaaaactcctggatcctttattacgaattgtgatcacatcctctgattggcaacatgttagctttgaagtggatcctaccaggttagaaccatcagagagccttgaggaaaaccagcggaacctccttcagatgactgaaaagttcttccatgccatcatcagttcctcctcagaattcccccctcaacttcgaagtgtgtgccactgtttataccaggtggttagccagcgtttccctcagaacagcatcggtgcagtaggaagtgccatgttcctcagatttatcaatcctgccattgtctcaccgtatgaagcagggattttagataaaaagccaccacctagaatcgaaaggggcttgaagttaatgtcaaagatacttcagagtattgccaatcatgttctcttcacaaaagaagaacatatgcggcctttcaatgattttgtgaaaagcaactttgatgcagcacgcaggtttttccttgatatagcatctgattgtcctacaagtgatgcagtaaatcatagtctttccttcataagtgacggcaatgtgcttgctttacatcgtctactctggaacaatcaggagaaaattgggcagtatctttccagcaacagggatcataaagctgttggaagacgaccttttgataagatggcaacacttcttgcatacctgggtcctccagagcacaaacctgtggcagatacacactggtccagccttaaccttaccagttcaaagtttgaggaatttatgactaggcatcaggtacatgaaaaagaagaattcaaggctttgaaaacgttaagtattttctaccaagctgggacttccaaagctgggaatcctattttttattatgttgcacggaggttcaaaactggtcaaatcaatggtgatttgctgatataccatgtcttactgactttaaagccatattatgcaaagccatatgaaattgtagtggaccttacccataccgggcctagcaatcgctttaaaacagactttctctctaagtggtttgttgtttttcctggctttgcttacgacaacgtctccgcagtctatatctataactgtaactcctgggtcagggagtacaccaagtatcatgagcggctgctgactggcctcaaaggtagcaaaaggcttgttttcatagactgtcctgggaaactggctgagcacatagagcatgaacaacagaaactacctgctgccaccttggctttagaagaggacctgaaggtattccacaatgctctcaagctagctcacaaagacaccaaagtttctattaaagttggttctactgctgtccaagtaacttcagcagagcgaacaaaagtcctagggcaatcagtctttctaaatgacatttattatgcttcggaaattgaagaaatctgcctagtagatgagaaccagttcaccttaaccattgcaaaccagggcacgccgctcaccttcatgcaccaggagtgtgaagccattgtccagtctatcattcatatccggacccgctgggaactgtcacagcccgactctatcccccaacacaccaagattcggccaaaagatgtccctgggacactgctcaatatcgcattacttaatttaggcagttctgacccgagtttacggtcagctgcctataatcttctgtgtgccttaacttgtacctttaatttaaaaatcgagggccagttactagagacatcaggtttatgtatccctgccaacaacaccctctttattgtctctattagtaagacactggcagccaatgagccacacctcacgttagaatttttggaagagtgtatttctggatttagcaaatctagtattgaattgaaacacctttgtttggaatacatgactccatggctgtcaaatctagttcgtttttgcaagcataatgatgatgccaaacgacaaagagttactgctattcttgacaagctgataacaatgaccatcaatgaaaaacagatgtacccatctattcaagcaaaaatatggggaagccttgggcagattacagatctgcttgatgttgtactagacagtttcatcaaaaccagtgcaacaggtggcttgggatcaataaaagctgaggtgatggcagatactgctgtagctttggcttctggaaatgtgaaattggtttcaagcaaggttattggaaggatgtgcaaaataattgacaagacatgcttatctccaactcctactttagaacaacatcttatgtgggatgatattgctattttagcacgctacatgctgatgctgtccttcaacaattcccttgatgtggcagctcatcttccctacctcttccacgttgttactttcttagtagccacaggtccgctctcccttagagcttccacacatggactggtcattaatatcattcactctctgtgtacttgttcacagcttcattttagtgaagagaccaagcaagttttgagactcagtctgacagagttctcattacccaaattttacttgctgtttggcattagcaaagtcaagtcagctgctgtcattgccttccgttccagttaccgggacaggtcattctctcctggctcctatgagagagagacttttgctttgacatccttggaaacagtcacagaagctttgttggagatcatggaggcatgcatgagagatattccaacgtgcaagtggctggaccagtggacagaactagctcaaagatttgcattccaatataatccatccctgcaaccaagagctcttgttgtctttgggtgtattagcaaacgagtgtctcatgggcagataaagcagataatccgtattcttagcaaggcacttgagagttgcttaaaaggacctgacacttacaacagtcaagttctgatagaagctacagtaatagcactaaccaaattacagccacttcttaataaggactcgcctctgcacaaagccctcttttgggtagctgtggctgtgctgcagcttgatgaggtcaacttgtattcagcaggtaccgcacttcttgaacaaaacctgcatactttagatagtctccgtatattcaatgacaagagtccagaggaagtatttatggcaatccggaatcctctggagtggcactgcaagcaaatggatcattttgttggactcaatttcaactctaactttaactttgcattggttggacaccttttaaaagggtacaggcatccttcacctgctattgttgcaagaacagtcagaattttacatacactactaactctggttaacaaacacagaaattgtgacaaatttgaagtgaatacacagagcgtggcctacttagcagctttacttacagtgtctgaagaagttcgaagtcgctgcagcctaaaacatagaaagtcacttcttcttactgatatttcaatggaaaatgttcctatggatacatatcccattcatcatggtgacccttcctataggacactaaaggagactcagccatggtcctctcccaaaggttctgaaggataccttgcagccacctatccaactgtcggccagaccagtccccgagccaggaaatccatgagcctggacatggggcaaccttctcaggccaacactaagaagttgcttggaacaaggaaaagttttgatcacttgatatcagacacaaaggctcctaaaaggcaagaaatggaatcagggatcacaacaccccccaaaatgaggagagtagcagaaactgattatgaaatggaaactcagaggatttcctcatcacaacagcacccacatttacgtaaagtttcagtgtctgaatcaaatgttctcttggatgaagaagtacttactgatccgaagatccaggcgctgcttcttactgttctagctacactggtaaaatataccacagatgagtttgatcaacgaattctttatgaatacttagcagaggccagtgttgtgtttcccaaagtctttcctgttgtgcataatttgttggactctaagatcaacaccctgttatcattgtgccaagatccaaatttgttaaatccaatccatggaattgtgcagagtgtggtgtaccatgaagaatccccaccacaataccaaacatcttacctgcaaagttttggttttaatggcttgtggcggtttgcaggaccgttttcaaagcaaacacaaattccagactatgctgagcttattgttaagtttcttgatgccttgattgacacgtacctgcctggaattgatgaagaaaccagtgaagaatccctcctgactcccacatctccttaccctcctgcactgcagagccagcttagtatcactgccaaccttaacctttctaattccatgacctcacttgcaacttcccagcattccccaggaatcgacaaggagaacgttgaactctcccctaccactggccactgtaacagtggacgaactcgccacggatccgcaagccaagtgcagaagcaaagaagcgctggcagtttcaaacgtaatagcattaagaagatcgtgtgaagcttgcttgctttcttttttaaaatcaacttaacatgggctcttcactagtgaccccttccctgtccttgccctttccccccatgttgtaatgctgcacttcctgttttataatgaacccatccggtttgccatgttgccagatgatcaactcttcgaagccttgcctaaatttaatgctgccttttctttaactttttttcttctacttttggcgtgtatctggtatatgtaagtgttcagaacaactgcaaagaaagtgggaggtcaggaaacttttaactgagaaatctcaattgtaagagaggatgaattcttgaatactgctactactggccagtgatgaaagccatttgcacagagctctgccttctgtggttttcccttcttcatcctacagagtaaagtgttagtcctatttatacatttttcaagatacaagtttatgagagaaatagtattataaccccagtatgtttaatcttttagctgtggactttttttttaaccgtacaaaactgaaagaaccatagaggtcaagcctcagtgacttgacaccataaagccacagacaaggtacttgggggggagggcagggaaatttcatattttatagtggattcttaagaaatactaacacttgagtattagcaataattacaggaaaataagtgcgaccacatatatcttaacattactgaattaaaactatggcttctaagtccttatccaaactcagtcatccaaactagtttatttttttctccagttgattatcttttaatttttaattttgctaaaggtggtttttttgtgttttgttttttgtaaaccaaaactatactaagtatagtaattatatatatatatatattttttcccctccccctcttctttcctaactaattctgagcagggtaatcagtgaacaaagtgttgaaaattgttcccagaaggtaattttcatagatgtttgcattagctccatagcaaaatggaatggtacgtgacatttagggtagctgatatttttattttgttaaataatttccaagaatagagtatggtgtatattataaatttctttgataagatgtattttgaatgtcttttaatcttcctcctcctctccaaaaaaatcagaaacctctttaagaaaacatgtaggttatatatgctagaattgcatttaatcactgtgaaaagactggtcagcctgcattagtatgacagtaggggggctgttagaattgctgctatactggtggtatggattatcatggcattggaattttcatagtaatgcagatccaatttctttgtggtacctgcagtttacaaaataatttgacttcagtgagcatattggtatctggatgttccaatttagaactaaaccatatttattacaaaaagatattaatccctctactcccaggttccctttatatgttaagatataatggctttgaggggggaaaaaataaacctaggggagaggggagtttcctgtagtgctgtttcattagaggatttcagtaaattaaattccacagctaattcaataaataatggtacatttaagtgttctgattttaataatatatttcacatttatccacacagtaacaatgtaatatgttaatgtaaataaaattggttttgatactcagaaataacaagaatttaattttttaaatttgtttacagtcctgggaaaagtaagaattatttgccaaaataagaggaaagaaaaccttagtattattaatgagtttaccatagaattgttggaaatactgaagacaggtgcaatttactaaacttttgtttttaaactattgtagaggctgcattagaagaaaatgtttataatgacagagcaactatgactatataaaaaagctgaaattagaactgtgtttagaaatagatcagtaacccagtgccaaggatgccaagctgccaccatggtcttggctctcccacaacccagtgtttctggggtaagtttcacagtttctaggccctggaatagcaggcagtgtaagcctttgataactttagttcgatgtttttcttgtttttgtttgttggtttggtgcatatgatagtgggtgttatgctattttgctcttcccatcaaaataaagaaacttccagaggtttactgttaaaaatactgatatttccataaacgggtttaccaagggtgtagtatttcataccgcctgaaatgatcagcattggcacaaatcaaaattcagccgcctttgaaatgcaaaaatacctttgactagtaagtacatcctaggagtttgaaaacttaactaaggtttaaaatttaccttgtttaaagaacttctgacttttgaggaaaatctagctttccaagtaactaaaatgtacatgagataaacctctcaccactatgtgtcccttgagaaatgcaacacttttttagtcttcatacttgtaatctataaaagaaattctgaagtttagaccaagttgcccatttctgcgtaattgacataagttctgttaaaaatattataagtaattcgtttcggtttgtagatgtttcccctgacttgttaaagaggaaaccaggaactcagtcatgtttttgtcctggataatctacctgttatgccagtactcccatccgaggggcatgcccttagttgcccagatggagatgcagttcagtagatttggggcaaagtggctacagctctgtcttccattcactcaacacctgttcatgactgagccaggtgcccaggacacatcctaaacagtcagcttctatcctgtgtcctagtcggggagacagagtgccagccagcaaccctcccaggtttgtaggttttaggggttttcagttttgtttgggttttttgttttttgtttttgtttctacatccttccccgactcccaggcataatgaggcatgtcttactcaatgttatgcaatggatttaggcaaaaattcattcttagtgtcagccacacaattttttttaatgcagtatattcacctgtaaatagtttgtgtaaaatttgacaaaaaaagtatatttactatactgtaaatatatgtgatgatatattgtattattttgcttttttgtaaagcagttagttgctgcacatggataacaacaaaaatttgattattctcgtgttagtattgttaacttctttttgcgactgcgttacatcatttaaagaaaatgctgtgtattgtaaacttaaattgtatatgataacttactgtcctttccatccgggcctaaactttggcagttcctttgtctacaaccttgttaatactgtaaacagttgtacgccagcaggaaaaatactgcccaacagacaaaatcgatcattgtaggggaaaatcatagaaatccatttcagatctttattgttcctcaccccattttcctccttgtgtatgtacttcccccacccccctttttttaagtaaaatgtaaattcaatctgctctaag

SEQ ID NO: 381147 - DNA, 10886 bp, Homo sapiens
gtagggatcaggaaacttttctctaaaaggccagatagtaaatattttagggcttgtgggtcatatagtttctgtcataaccattcagttctgcctttggagcatgaaagtggccacagacatgtgaatgaacgggcatggctgtgtttaactaaaactgtatatttacaatagcaagtgataggctaggtttggcctgtggatggtagcttgcagacccccactgtggagcactgggtttatagacagtctctgctgtgcatgtggtttattgtttcttcttatgtctactacaaggatgagatacatggatagaaacactgggagtttaatgaaacatagggggcttatagataaatacttgctttttttctataacctgtagacttatttcctttgattataatgctattgacactttgataactgtttctctaaaaccttacaagaaaaactaagcttctctaaacttgtattcattatgggagaatgccattcttatgtctggttatatctgcattaggttattgatgatgctagtaacaatgaactttatgttactgcagctcacaaatgcttttttacatctgcaagaaattaactagtcatcaaatgcttagtagcacagaaattctcaagtggttgcgggaaatattgatctgcaggaataaatttcttcttaaaaataagcaggcagatagaagttcctgtcactttctccttttttacggggtaggatgtgatattccttctagtggaaataccagtcaaatgtccatggatcatgaagaattactacgtactcctggagcctctctccggaagggaaaagggaactcctctatggatagtgcagcaggatgcagcggaacccccccgatttgccgacaagcccagaccaaactagaagtggccctgtacatgtttctgtggaaccctgacactgaagctgttctggttgccatgtcctgtttccgccacctctgtgaggaagcagatatccggtgtggggtggatgaagtgtcagtgcataacctcttgcccaactataacacattcatggagtttgcctctgtcagcaatatgatgtcaacaggaagagcagcacttcagaaaagagtgatggcactgctgaggcgcattgagcatcccactgcaggaaacactgaggcttgggaagatacacatgcaaaatgggaacaagcaacaaagctaatccttaactatccaaaagccaaaatggaagatggccaggctgctgaaagccttcacaagaccattgttaagaggcgaatgtcccatgtgagtggaggaggatccatagatttgtctgacacagactccctacaggaatggatcaacatgactggcttcctttgtgcccttggaggagtgtgcctccagcagagaagcaattctggcctggcaacctatagcccacccatgggtccagtcagtgaacgtaagggttctatgatttcagtgatgtcttcagagggaaacgcagatacacctgtcagcaaatttatggatcggctgttgtccttaatggtgtgtaaccatgagaaagtgggacttcaaatacggaccaatgttaaggatctggtgggtctagaattgagtcctgctctgtatccaatgctatttaacaaattgaagaataccatcagcaagttttttgactcccaaggacaggttttattgactgataccaatactcaatttgtagaacaaaccatagctataatgaagaacttgctagataatcatactgaaggcagctctgaacatctagggcaagctagcattgaaacaatgatgttaaatctggtcaggtatgttcgtgtgcttgggaatatggtccatgcaattcaaataaaaacgaaactgtgtcaattagttgaagtaatgatggcaaggagagatgacctctcattttgccaagagatgaaatttaggaataagatggtagaatacctgacagactgggttatgggaacatcaaaccaagcagcagatgatgatgtaaaatgtcttacaagagatttggaccaggcaagcatggaagcagtagtttcacttctagctggtctccctctgcagcctgaagaaggagatggtgtggaattgatggaagccaaatcacagttatttcttaaatacttcacattatttatgaaccttttgaatgactgcagtgaagttgaagatgaaagtgcgcaaacaggtggcaggaaacgtggcatgtctcggaggctggcatcactgaggcactgtacggtccttgcaatgtcaaacttactcaatgccaacgtagacagtggtctcatgcactccataggcttaggttaccacaaggatctccagacaagagctacatttatggaagttctgacaaaaatccttcaacaaggcacagaatttgacacacttgcagaaacagtattggctgatcggtttgagagattggtggaactggtcacaatgatgggtgatcaaggagaactccctatagcgatggctctggccaatgtggttccttgttctcagtgggatgaactagctcgagttctggttactctgtttgattctcggcatttactctaccaactgctctggaacatgttttctaaagaagtagaattggcagactccatgcagactctcttccgaggcaacagcttggccagtaaaataatgacattctgtttcaaggtatatggtgctacctatctacaaaaactcctggatcctttattacgaattgtgatcacatcctctgattggcaacatgttagctttgaagtggatcctaccaggttagaaccatcagagagccttgaggaaaaccagcggaacctccttcagatgactgaaaagttcttccatgccatcatcagttcctcctcagaattcccccctcaacttcgaagtgtgtgccactgtttataccaggcaacttgccactccctactgaataaagctacagtaaaagaaaaaaaggaaaacaaaaaatcagtggttagccagcgtttccctcagaacagcatcggtgcagtaggaagtgccatgttcctcagatttatcaatcctgccattgtctcaccgtatgaagcagggattttagataaaaagccaccacctagaatcgaaaggggcttgaagttaatgtcaaagatacttcagagtattgccaatcatgttctcttcacaaaagaagaacatatgcggcctttcaatgattttgtgaaaagcaactttgatgcagcacgcaggtttttccttgatatagcatctgattgtcctacaagtgatgcagtaaatcatagtctttccttcataagtgacggcaatgtgcttgctttacatcgtctactctggaacaatcaggagaaaattgggcagtatctttccagcaacagggatcataaagctgttggaagacgaccttttgataagatggcaacacttcttgcatacctgggtcctccagagcacaaacctgtggcagatacacactggtccagccttaaccttaccagttcaaagtttgaggaatttatgactaggcatcaggtacatgaaaaagaagaattcaaggctttgaaaacgttaagtattttctaccaagctgggacttccaaagctgggaatcctattttttattatgttgcacggaggttcaaaactggtcaaatcaatggtgatttgctgatataccatgtcttactgactttaaagccatattatgcaaagccatatgaaattgtagtggaccttacccataccgggcctagcaatcgctttaaaacagactttctctctaagtggtttgttgtttttcctggctttgcttacgacaacgtctccgcagtctatatctataactgtaactcctgggtcagggagtacaccaagtatcatgagcggctgctgactggcctcaaaggtagcaaaaggcttgttttcatagactgtcctgggaaactggctgagcacatagagcatgaacaacagaaactacctgctgccaccttggctttagaagaggacctgaaggtattccacaatgctctcaagctagctcacaaagacaccaaagtttctattaaagttggttctactgctgtccaagtaacttcagcagagcgaacaaaagtcctagggcaatcagtctttctaaatgacatttattatgcttcggaaattgaagaaatctgcctagtagatgagaaccagttcaccttaaccattgcaaaccagggcacgccgctcaccttcatgcaccaggagtgtgaagccattgtccagtctatcattcatatccggacccgctgggaactgtcacagcccgactctatcccccaacacaccaagattcggccaaaagatgtccctgggacactgctcaatatcgcattacttaatttaggcagttctgacccgagtttacggtcagctgcctataatcttctgtgtgccttaacttgtacctttaatttaaaaatcgagggccagttactagagacatcaggtttatgtatccctgccaacaacaccctctttattgtctctattagtaagacactggcagccaatgagccacacctcacgttagaatttttggaagagtgtatttctggatttagcaaatctagtattgaattgaaacacctttgtttggaatacatgactccatggctgtcaaatctagttcgtttttgcaagcataatgatgatgccaaacgacaaagagttactgctattcttgacaagctgataacaatgaccatcaatgaaaaacagatgtacccatctattcaagcaaaaatatggggaagccttgggcagattacagatctgcttgatgttgtactagacagtttcatcaaaaccagtgcaacaggtggcttgggatcaataaaagctgaggtgatggcagatactgctgtagctttggcttctggaaatgtgaaattggtttcaagcaaggttattggaaggatgtgcaaaataattgacaagacatgcttatctccaactcctactttagaacaacatcttatgtgggatgatattgctattttagcacgctacatgctgatgctgtccttcaacaattcccttgatgtggcagctcatcttccctacctcttccacgttgttactttcttagtagccacaggtccgctctcccttagagcttccacacatggactggtcattaatatcattcactctctgtgtacttgttcacagcttcattttagtgaagagaccaagcaagttttgagactcagtctgacagagttctcattacccaaattttacttgctgtttggcattagcaaagtcaagtcagctgctgtcattgccttccgttccagttaccgggacaggtcattctctcctggctcctatgagagagagacttttgctttgacatccttggaaacagtcacagaagctttgttggagatcatggaggcatgcatgagagatattccaacgtgcaagtggctggaccagtggacagaactagctcaaagatttgcattccaatataatccatccctgcaaccaagagctcttgttgtctttgggtgtattagcaaacgagtgtctcatgggcagataaagcagataatccgtattcttagcaaggcacttgagagttgcttaaaaggacctgacacttacaacagtcaagttctgatagaagctacagtaatagcactaaccaaattacagccacttcttaataaggactcgcctctgcacaaagccctcttttgggtagctgtggctgtgctgcagcttgatgaggtcaacttgtattcagcaggtaccgcacttcttgaacaaaacctgcatactttagatagtctccgtatattcaatgacaagagtccagaggaagtatttatggcaatccggaatcctctggagtggcactgcaagcaaatggatcattttgttggactcaatttcaactctaactttaactttgcattggttggacaccttttaaaagggtacaggcatccttcacctgctattgttgcaagaacagtcagaattttacatacactactaactctggttaacaaacacagaaattgtgacaaatttgaagtgaatacacagagcgtggcctacttagcagctttacttacagtgtctgaagaagttcgaagtcgctgcagcctaaaacatagaaagtcacttcttcttactgatatttcaatggaaaatgttcctatggatacatatcccattcatcatggtgacccttcctataggacactaaaggagactcagccatggtcctctcccaaaggttctgaaggataccttgcagccacctatccaactgtcggccagaccagtccccgagccaggaaatccatgagcctggacatggggcaaccttctcaggccaacactaagaagttgcttggaacaaggaaaagttttgatcacttgatatcagacacaaaggctcctaaaaggcaagaaatggaatcagggatcacaacaccccccaaaatgaggagagtagcagaaactgattatgaaatggaaactcagaggatttcctcatcacaacagcacccacatttacgtaaagtttcagtgtctgaatcaaatgttctcttggatgaagaagtacttactgatccgaagatccaggcgctgcttcttactgttctagctacactggtaaaatataccacagatgagtttgatcaacgaattctttatgaatacttagcagaggccagtgttgtgtttcccaaagtctttcctgttgtgcataatttgttggactctaagatcaacaccctgttatcattgtgccaagatccaaatttgttaaatccaatccatggaattgtgcagagtgtggtgtaccatgaagaatccccaccacaataccaaacatcttacctgcaaagttttggttttaatggcttgtggcggtttgcaggaccgttttcaaagcaaacacaaattccagactatgctgagcttattgttaagtttcttgatgccttgattgacacgtacctgcctggaattgatgaagaaaccagtgaagaatccctcctgactcccacatctccttaccctcctgcactgcagagccagcttagtatcactgccaaccttaacctttctaattccatgacctcacttgcaacttcccagcattccccaggaatcgacaaggagaacgttgaactctcccctaccactggccactgtaacagtggacgaactcgccacggatccgcaagccaagtgcagaagcaaagaagcgctggcagtttcaaacgtaatagcattaagaagatcgtgtgaagcttgcttgctttcttttttaaaatcaacttaacatgggctcttcactagtgaccccttccctgtccttgccctttccccccatgttgtaatgctgcacttcctgttttataatgaacccatccggtttgccatgttgccagatgatcaactcttcgaagccttgcctaaatttaatgctgccttttctttaactttttttcttctacttttggcgtgtatctggtatatgtaagtgttcagaacaactgcaaagaaagtgggaggtcaggaaacttttaactgagaaatctcaattgtaagagaggatgaattcttgaatactgctactactggccagtgatgaaagccatttgcacagagctctgccttctgtggttttcccttcttcatcctacagagtaaagtgttagtcctatttatacatttttcaagatacaagtttatgagagaaatagtattataaccccagtatgtttaatcttttagctgtggactttttttttaaccgtacaaaactgaaagaaccatagaggtcaagcctcagtgacttgacaccataaagccacagacaaggtacttgggggggagggcagggaaatttcatattttatagtggattcttaagaaatactaacacttgagtattagcaataattacaggaaaataagtgcgaccacatatatcttaacattactgaattaaaactatggcttctaagtccttatccaaactcagtcatccaaactagtttatttttttctccagttgattatcttttaatttttaattttgctaaaggtggtttttttgtgttttgttttttgtaaaccaaaactatactaagtatagtaattatatatatatatatattttttcccctccccctcttctttcctaactaattctgagcagggtaatcagtgaacaaagtgttgaaaattgttcccagaaggtaattttcatagatgtttgcattagctccatagcaaaatggaatggtacgtgacatttagggtagctgatatttttattttgttaaataatttccaagaatagagtatggtgtatattataaatttctttgataagatgtattttgaatgtcttttaatcttcctcctcctctccaaaaaaatcagaaacctctttaagaaaacatgtaggttatatatgctagaattgcatttaatcactgtgaaaagactggtcagcctgcattagtatgacagtaggggggctgttagaattgctgctatactggtggtatggattatcatggcattggaattttcatagtaatgcagatccaatttctttgtggtacctgcagtttacaaaataatttgacttcagtgagcatattggtatctggatgttccaatttagaactaaaccatatttattacaaaaagatattaatccctctactcccaggttccctttatatgttaagatataatggctttgaggggggaaaaaataaacctaggggagaggggagtttcctgtagtgctgtttcattagaggatttcagtaaattaaattccacagctaattcaataaataatggtacatttaagtgttctgattttaataatatatttcacatttatccacacagtaacaatgtaatatgttaatgtaaataaaattggttttgatactcagaaataacaagaatttaattttttaaatttgtttacagtcctgggaaaagtaagaattatttgccaaaataagaggaaagaaaaccttagtattattaatgagtttaccatagaattgttggaaatactgaagacaggtgcaatttactaaacttttgtttttaaactattgtagaggctgcattagaagaaaatgtttataatgacagagcaactatgactatataaaaaagctgaaattagaactgtgtttagaaatagatcagtaacccagtgccaaggatgccaagctgccaccatggtcttggctctcccacaacccagtgtttctggggtaagtttcacagtttctaggccctggaatagcaggcagtgtaagcctttgataactttagttcgatgtttttcttgtttttgtttgttggtttggtgcatatgatagtgggtgttatgctattttgctcttcccatcaaaataaagaaacttccagaggtttactgttaaaaatactgatatttccataaacgggtttaccaagggtgtagtatttcataccgcctgaaatgatcagcattggcacaaatcaaaattcagccgcctttgaaatgcaaaaatacctttgactagtaagtacatcctaggagtttgaaaacttaactaaggtttaaaatttaccttgtttaaagaacttctgacttttgaggaaaatctagctttccaagtaactaaaatgtacatgagataaacctctcaccactatgtgtcccttgagaaatgcaacacttttttagtcttcatacttgtaatctataaaagaaattctgaagtttagaccaagttgcccatttctgcgtaattgacataagttctgttaaaaatattataagtaattcgtttcggtttgtagatgtttcccctgacttgttaaagaggaaaccaggaactcagtcatgtttttgtcctggataatctacctgttatgccagtactcccatccgaggggcatgcccttagttgcccagatggagatgcagttcagtagatttggggcaaagtggctacagctctgtcttccattcactcaacacctgttcatgactgagccaggtgcccaggacacatcctaaacagtcagcttctatcctgtgtcctagtcggggagacagagtgccagccagcaaccctcccaggtttgtaggttttaggggttttcagttttgtttgggttttttgttttttgtttttgtttctacatccttccccgactcccaggcataatgaggcatgtcttactcaatgttatgcaatggatttaggcaaaaattcattcttagtgtcagccacacaattttttttaatgcagtatattcacctgtaaatagtttgtgtaaaatttgacaaaaaaagtatatttactatactgtaaatatatgtgatgatatattgtattattttgcttttttgtaaagcagttagttgctgcacatggataacaacaaaaatttgattattctcgtgttagtattgttaacttctttttgcgactgcgttacatcatttaaagaaaatgctgtgtattgtaaacttaaattgtatatgataacttactgtcctttccatccgggcctaaactttggcagttcctttgtctacaaccttgttaatactgtaaacagttgtacgccagcaggaaaaatactgcccaacagacaaaatcgatcattgtaggggaaaatcatagaaatccatttcagatctttattgttcctcaccccattttcctccttgtgtatgtacttcccccacccccctttttttaagtaaaatgtaaattcaatctgctctaag

SEQ ID NO: 381148 - DNA, 5431 bp, Homo sapiens
acaatatgtattcagagtatccccttttttaggcatgcatgagagatattccaacgtgcaagtggctggaccagtggacagaactagctcaaagatttgcattccaatataatccatccctgcaaccaagagctcttgttgtctttgggtgtattagcaaacgagtgtctcatgggcagataaagcagataatccgtattcttagcaaggcacttgagagttgcttaaaaggacctgacacttacaacagtcaagttctgatagaagctacagtaatagcactaaccaaattacagccacttcttaataaggactcgcctctgcacaaagccctcttttgggtagctgtggctgtgctgcagcttgatgaggtcaacttgtattcagcaggtaccgcacttcttgaacaaaacctgcatactttagatagtctccgtatattcaatgacaagagtccagaggaagtatttatggcaatccggaatcctctggagtggcactgcaagcaaatggatcattttgttggactcaatttcaactctaactttaactttgcattggttggacaccttttaaaagggtacaggcatccttcacctgctattgttgcaagaacagtcagaattttacatacactactaactctggttaacaaacacagaaattgtgacaaatttgaagtgaatacacagagcgtggcctacttagcagctttacttacagtgtctgaagaagttcgaagtcgctgcagcctaaaacatagaaagtcacttcttcttactgatatttcaatggaaaatgttcctatggatacatatcccattcatcatggtgacccttcctataggacactaaaggagactcagccatggtcctctcccaaaggttctgaaggataccttgcagccacctatccaactgtcggccagaccagtccccgagccaggaaatccatgagcctggacatggggcaaccttctcaggccaacactaagaagttgcttggaacaaggaaaagttttgatcacttgatatcagacacaaaggctcctaaaaggcaagaaatggaatcagggatcacaacaccccccaaaatgaggagagtagcagaaactgattatgaaatggaaactcagaggatttcctcatcacaacagcacccacatttacgtaaagtttcagtgtctgaatcaaatgttctcttggatgaagaagtacttactgatccgaagatccaggcgctgcttcttactgttctagctacactggtaaaatataccacagatgagtttgatcaacgaattctttatgaatacttagcagaggccagtgttgtgtttcccaaagtctttcctgttgtgcataatttgttggactctaagatcaacaccctgttatcattgtgccaagatccaaatttgttaaatccaatccatggaattgtgcagagtgtggtgtaccatgaagaatccccaccacaataccaaacatcttacctgcaaagttttggttttaatggcttgtggcggtttgcaggaccgttttcaaagcaaacacaaattccagactatgctgagcttattgttaagtttcttgatgccttgattgacacgtacctgcctggaattgatgaagaaaccagtgaagaatccctcctgactcccacatctccttaccctcctgcactgcagagccagcttagtatcactgccaaccttaacctttctaattccatgacctcacttgcaacttcccagcattccccaggaatcgacaaggagaacgttgaactctcccctaccactggccactgtaacagtggacgaactcgccacggatccgcaagccaagtgcagaagcaaagaagcgctggcagtttcaaacgtaatagcattaagaagatcgtgtgaagcttgcttgctttcttttttaaaatcaacttaacatgggctcttcactagtgaccccttccctgtccttgccctttccccccatgttgtaatgctgcacttcctgttttataatgaacccatccggtttgccatgttgccagatgatcaactcttcgaagccttgcctaaatttaatgctgccttttctttaactttttttcttctacttttggcgtgtatctggtatatgtaagtgttcagaacaactgcaaagaaagtgggaggtcaggaaacttttaactgagaaatctcaattgtaagagaggatgaattcttgaatactgctactactggccagtgatgaaagccatttgcacagagctctgccttctgtggttttcccttcttcatcctacagagtaaagtgttagtcctatttatacatttttcaagatacaagtttatgagagaaatagtattataaccccagtatgtttaatcttttagctgtggactttttttttaaccgtacaaaactgaaagaaccatagaggtcaagcctcagtgacttgacaccataaagccacagacaaggtacttgggggggagggcagggaaatttcatattttatagtggattcttaagaaatactaacacttgagtattagcaataattacaggaaaataagtgcgaccacatatatcttaacattactgaattaaaactatggcttctaagtccttatccaaactcagtcatccaaactagtttatttttttctccagttgattatcttttaatttttaattttgctaaaggtggtttttttgtgttttgttttttgtaaaccaaaactatactaagtatagtaattatatatatatatatattttttcccctccccctcttctttcctaactaattctgagcagggtaatcagtgaacaaagtgttgaaaattgttcccagaaggtaattttcatagatgtttgcattagctccatagcaaaatggaatggtacgtgacatttagggtagctgatatttttattttgttaaataatttccaagaatagagtatggtgtatattataaatttctttgataagatgtattttgaatgtcttttaatcttcctcctcctctccaaaaaaatcagaaacctctttaagaaaacatgtaggttatatatgctagaattgcatttaatcactgtgaaaagactggtcagcctgcattagtatgacagtaggggggctgttagaattgctgctatactggtggtatggattatcatggcattggaattttcatagtaatgcagatccaatttctttgtggtacctgcagtttacaaaataatttgacttcagtgagcatattggtatctggatgttccaatttagaactaaaccatatttattacaaaaagatattaatccctctactcccaggttccctttatatgttaagatataatggctttgaggggggaaaaaataaacctaggggagaggggagtttcctgtagtgctgtttcattagaggatttcagtaaattaaattccacagctaattcaataaataatggtacatttaagtgttctgattttaataatatatttcacatttatccacacagtaacaatgtaatatgttaatgtaaataaaattggttttgatactcagaaataacaagaatttaattttttaaatttgtttacagtcctgggaaaagtaagaattatttgccaaaataagaggaaagaaaaccttagtattattaatgagtttaccatagaattgttggaaatactgaagacaggtgcaatttactaaacttttgtttttaaactattgtagaggctgcattagaagaaaatgtttataatgacagagcaactatgactatataaaaaagctgaaattagaactgtgtttagaaatagatcagtaacccagtgccaaggatgccaagctgccaccatggtcttggctctcccacaacccagtgtttctggggtaagtttcacagtttctaggccctggaatagcaggcagtgtaagcctttgataactttagttcgatgtttttcttgtttttgtttgttggtttggtgcatatgatagtgggtgttatgctattttgctcttcccatcaaaataaagaaacttccagaggtttactgttaaaaatactgatatttccataaacgggtttaccaagggtgtagtatttcataccgcctgaaatgatcagcattggcacaaatcaaaattcagccgcctttgaaatgcaaaaatacctttgactagtaagtacatcctaggagtttgaaaacttaactaaggtttaaaatttaccttgtttaaagaacttctgacttttgaggaaaatctagctttccaagtaactaaaatgtacatgagataaacctctcaccactatgtgtcccttgagaaatgcaacacttttttagtcttcatacttgtaatctataaaagaaattctgaagtttagaccaagttgcccatttctgcgtaattgacataagttctgttaaaaatattataagtaattcgtttcggtttgtagatgtttcccctgacttgttaaagaggaaaccaggaactcagtcatgtttttgtcctggataatctacctgttatgccagtactcccatccgaggggcatgcccttagttgcccagatggagatgcagttcagtagatttggggcaaagtggctacagctctgtcttccattcactcaacacctgttcatgactgagccaggtgcccaggacacatcctaaacagtcagcttctatcctgtgtcctagtcggggagacagagtgccagccagcaaccctcccaggtttgtaggttttaggggttttcagttttgtttgggttttttgttttttgtttttgtttctacatccttccccgactcccaggcataatgaggcatgtcttactcaatgttatgcaatggatttaggcaaaaattcattcttagtgtcagccacacaattttttttaatgcagtatattcacctgtaaatagtttgtgtaaaatttgacaaaaaaagtatatttactatactgtaaatatatgtgatgatatattgtattattttgcttttttgtaaagcagttagttgctgcacatggataacaacaaaaatttgattattctcgtgttagtattgttaacttctttttgcgactgcgttacatcatttaaagaaaatgctgtgtattgtaaacttaaattgtatatgataacttactgtcctttccatccgggcctaaactttggcagttcctttgtctacaaccttgttaatactgtaaacagttgtacgccagcaggaaaaatactgcccaacagacaaaatcgatcattgtaggggaaaatcatagaaatccatttcagatctttattgttcctcaccccattttcctccttgtgtatgtacttcccccacccccctttttttaagtaaaatgtaaattcaatctgctctaag

SEQ ID NO: 381149 - DNA, 4196 bp, Homo sapiens
catacaagtttgtgcttcacgtgtcccaggactgtcatctcccctgtcctactgtctccaaggcccacggacaccagctcctgcaggaaggagcaggcagttcccatggtcacgtccagagtcaccttgcccaagaggagttgcacccttccagacttgcggatgagtagcttgccaacctgaccctctgtcaggtcagccagggtacaagcattctctgcccatttggcttctcggtctttctcctgcttgatgagcaccacctgtccgtcctcgccctgcgaacctatgaggttcgcaggaccgttttcaaagcaaacacaaattccagactatgctgagcttattgttaagtttcttgatgccttgattgacacgtacctgcctggaattgatgaagaaaccagtgaagaatccctcctgactcccacatctccttaccctcctgcactgcagagccagcttagtatcactgccaaccttaacctttctaattccatgacctcacttgcaacttcccagcattccccaggaatcgacaaggagaacgttgaactctcccctaccactggccactgtaacagtggacgaactcgccacggatccgcaagccaagtgcagaagcaaagaagcgctggcagtttcaaacgtaatagcattaagaagatcgtgtgaagcttgcttgctttcttttttaaaatcaacttaacatgggctcttcactagtgaccccttccctgtccttgccctttccccccatgttgtaatgctgcacttcctgttttataatgaacccatccggtttgccatgttgccagatgatcaactcttcgaagccttgcctaaatttaatgctgccttttctttaactttttttcttctacttttggcgtgtatctggtatatgtaagtgttcagaacaactgcaaagaaagtgggaggtcaggaaacttttaactgagaaatctcaattgtaagagaggatgaattcttgaatactgctactactggccagtgatgaaagccatttgcacagagctctgccttctgtggttttcccttcttcatcctacagagtaaagtgttagtcctatttatacatttttcaagatacaagtttatgagagaaatagtattataaccccagtatgtttaatcttttagctgtggactttttttttaaccgtacaaaactgaaagaaccatagaggtcaagcctcagtgacttgacaccataaagccacagacaaggtacttgggggggagggcagggaaatttcatattttatagtggattcttaagaaatactaacacttgagtattagcaataattacaggaaaataagtgcgaccacatatatcttaacattactgaattaaaactatggcttctaagtccttatccaaactcagtcatccaaactagtttatttttttctccagttgattatcttttaatttttaattttgctaaaggtggtttttttgtgttttgttttttgtaaaccaaaactatactaagtatagtaattatatatatatatatattttttcccctccccctcttctttcctaactaattctgagcagggtaatcagtgaacaaagtgttgaaaattgttcccagaaggtaattttcatagatgtttgcattagctccatagcaaaatggaatggtacgtgacatttagggtagctgatatttttattttgttaaataatttccaagaatagagtatggtgtatattataaatttctttgataagatgtattttgaatgtcttttaatcttcctcctcctctccaaaaaaatcagaaacctctttaagaaaacatgtaggttatatatgctagaattgcatttaatcactgtgaaaagactggtcagcctgcattagtatgacagtaggggggctgttagaattgctgctatactggtggtatggattatcatggcattggaattttcatagtaatgcagatccaatttctttgtggtacctgcagtttacaaaataatttgacttcagtgagcatattggtatctggatgttccaatttagaactaaaccatatttattacaaaaagatattaatccctctactcccaggttccctttatatgttaagatataatggctttgaggggggaaaaaataaacctaggggagaggggagtttcctgtagtgctgtttcattagaggatttcagtaaattaaattccacagctaattcaataaataatggtacatttaagtgttctgattttaataatatatttcacatttatccacacagtaacaatgtaatatgttaatgtaaataaaattggttttgatactcagaaataacaagaatttaattttttaaatttgtttacagtcctgggaaaagtaagaattatttgccaaaataagaggaaagaaaaccttagtattattaatgagtttaccatagaattgttggaaatactgaagacaggtgcaatttactaaacttttgtttttaaactattgtagaggctgcattagaagaaaatgtttataatgacagagcaactatgactatataaaaaagctgaaattagaactgtgtttagaaatagatcagtaacccagtgccaaggatgccaagctgccaccatggtcttggctctcccacaacccagtgtttctggggtaagtttcacagtttctaggccctggaatagcaggcagtgtaagcctttgataactttagttcgatgtttttcttgtttttgtttgttggtttggtgcatatgatagtgggtgttatgctattttgctcttcccatcaaaataaagaaacttccagaggtttactgttaaaaatactgatatttccataaacgggtttaccaagggtgtagtatttcataccgcctgaaatgatcagcattggcacaaatcaaaattcagccgcctttgaaatgcaaaaatacctttgactagtaagtacatcctaggagtttgaaaacttaactaaggtttaaaatttaccttgtttaaagaacttctgacttttgaggaaaatctagctttccaagtaactaaaatgtacatgagataaacctctcaccactatgtgtcccttgagaaatgcaacacttttttagtcttcatacttgtaatctataaaagaaattctgaagtttagaccaagttgcccatttctgcgtaattgacataagttctgttaaaaatattataagtaattcgtttcggtttgtagatgtttcccctgacttgttaaagaggaaaccaggaactcagtcatgtttttgtcctggataatctacctgttatgccagtactcccatccgaggggcatgcccttagttgcccagatggagatgcagttcagtagatttggggcaaagtggctacagctctgtcttccattcactcaacacctgttcatgactgagccaggtgcccaggacacatcctaaacagtcagcttctatcctgtgtcctagtcggggagacagagtgccagccagcaaccctcccaggtttgtaggttttaggggttttcagttttgtttgggttttttgttttttgtttttgtttctacatccttccccgactcccaggcataatgaggcatgtcttactcaatgttatgcaatggatttaggcaaaaattcattcttagtgtcagccacacaattttttttaatgcagtatattcacctgtaaatagtttgtgtaaaatttgacaaaaaaagtatatttactatactgtaaatatatgtgatgatatattgtattattttgcttttttgtaaagcagttagttgctgcacatggataacaacaaaaatttgattattctcgtgttagtattgttaacttctttttgcgactgcgttacatcatttaaagaaaatgctgtgtattgtaaacttaaattgtatatgataacttactgtcctttccatccgggcctaaactttggcagttcctttgtctacaaccttgttaatactgtaaacagttgtacgccagcaggaaaaatactgcccaacagacaaaatcgatcattgtaggggaaaatcatagaaatccatttcagatctttattgttcctcaccccattttcctccttgtgtatgtacttcccccacccccctttttttaagtaaaatgtaaattcaatctgctctaag

SEQ ID NO: 381150 - DNA, 8521 bp, Homo sapiens
aatctctagctcgctcgcgctccctctccccgggccgtggaaaggatcccacttccggtggggtgtcatggcggcgtctcggactgtgatggctgtggggagacggcgctagtggggagagcgaccaagaggccccctcccctccccgggtccccttcccctatccccctccccccagcctccttgccaacgccccctttccctctccccctcccgctcggcgctgaccccccatccccacccccgtgggaacactgggagcctgcactccacagaccctctccttgcctcttccctcacctcagcctccgctccccgccctcttcccggcccagggcgccggcccacccttccctccgccgccccccggccgcggggaggacatggccgcgcacaggccggtggaatgggtccaggccgtggtcagccgcttcgacgagcagcttccaataaaaacaggacagcagaacacacataccaaagtcagtactgagcacaacaaggaatgtctaatcaatatttccaaatacaagttttctttggttataagcggcctcactactattttaaagaatgttaacaatatgagaatatttggagaagctgctgaaaaaaatttatatctctctcagttgattatattggatacactggaaaaatgtcttgctgggcaaccaaaggacacaatgagattagatgaaacgatgctggtcaaacagttgctgccagaaatctgccattttcttcacacctgtcgtgaaggaaaccagcatgcagctgaacttcggaattctgcctctggggttttattttctctcagctgcaacaacttcaatgcagtctttagtcgcatttctaccaggttacaggaattaactgtttgttcagaagacaatgttgatgttcatgatatagaattgttacagtatatcaatgtggattgtgcaaaattaaaacgactcctgaaggaaacagcatttaaatttaaagccctaaagaaggttgcgcagttagcagttataaatagcctggaaaaggcattttggaactgggtagaaaattatccagatgaatttacaaaactataccagatcccacagactgatatggctgaatgtgcagaaaagctatttgacttggtggatggttttgctgaaagcaccaaacgtaaagcagcagtttggccactacaaatcattctccttatcttgtgtccagaaataatccaggatatatccaaagacgtggttgatgaaaacaacatgaataagaagttatttctggacagtctacgaaaagctcttgctggccatggaggaagtaggcagctgacagaaagtgctgcaattgcctgtgtcaaactgtgtaaagcaagtacttacatcaattgggaagataactctgtcattttcctacttgttcagtccatggtggttgatcttaagaacctgctttttaatccaagtaagccattctcaagaggcagtcagcctgcagatgtggatctaatgattgactgccttgtttcttgctttcgtataagccctcacaacaaccaacactttaagatctgcctggctcagaattcaccttctacatttcactatgtgctggtaaattcactccatcgaatcatcaccaattccgcattggattggtggcctaagattgatgctgtgtattgtcactcggttgaacttcgaaatatgtttggtgaaacacttcataaagcagtgcaaggttgtggagcacacccagcaatacgaatggcaccgagtcttacatttaaagaaaaagtaacaagccttaaatttaaagaaaaacctacagacctggagacaagaagctataagtatcttctcttgtccatggtgaaactaattcatgcagatccaaagctcttgctttgtaatccaagaaaacaggggcccgaaacccaaggcagtacagcagaattaattacagggctcgtccaactggtccctcagtcacacatgccagagattgctcaggaagcaatggaggctctgctggttcttcatcagttagatagcattgatttgtggaatcctgatgctcctgtagaaacattttgggagattagctcacaaatgcttttttacatctgcaagaaattaactagtcatcaaatgcttagtagcacagaaattctcaagtggttgcgggaaatattgatctgcaggaataaatttcttcttaaaaataagcaggcagatagaagttcctgtcactttctccttttttacggggtaggatgtgatattccttctagtggaaataccagtcaaatgtccatggatcatgaagaattactacgtactcctggagcctctctccggaagggaaaagggaactcctctatggatagtgcagcaggatgcagcggaacccccccgatttgccgacaagcccagaccaaactagaagtggccctgtacatgtttctgtggaaccctgacactgaagctgttctggttgccatgtcctgtttccgccacctctgtgaggaagcagatatccggtgtggggtggatgaagtgtcagtgcataacctcttgcccaactataacacattcatggagtttgcctctgtcagcaatatgatgtcaacaggaagagcagcacttcagaaaagagtgatggcactgctgaggcgcattgagcatcccactgcaggaaacactgaggcttgggaagatacacatgcaaaatgggaacaagcaacaaagctaatccttaactatccaaaagccaaaatggaagatggccaggctgctgaaagccttcacaagaccattgttaagaggcgaatgtcccatgtgagtggaggaggatccatagatttgtctgacacagactccctacaggaatggatcaacatgactggcttcctttgtgcccttggaggagtgtgcctccagcagagaagcaattctggcctggcaacctatagcccacccatgggtccagtcagtgaacgtaagggttctatgatttcagtgatgtcttcagagggaaacgcagatacacctgtcagcaaatttatggatcggctgttgtccttaatggtgtgtaaccatgagaaagtgggacttcaaatacggaccaatgttaaggatctggtgggtctagaattgagtcctgctctgtatccaatgctatttaacaaattgaagaataccatcagcaagttttttgactcccaaggacaggttttattgactgataccaatactcaatttgtagaacaaaccatagctataatgaagaacttgctagataatcatactgaaggcagctctgaacatctagggcaagctagcattgaaacaatgatgttaaatctggtcaggtatgttcgtgtgcttgggaatatggtccatgcaattcaaataaaaacgaaactgtgtcaattagttgaagtaatgatggcaaggagagatgacctctcattttgccaagagatgaaatttaggaataagatggtagaatacctgacagactgggttatgggaacatcaaaccaagcagcagatgatgatgtaaaatgtcttacaagagatttggaccaggcaagcatggaagcagtagtttcacttctagctggtctccctctgcagcctgaagaaggagatggtgtggaattgatggaagccaaatcacagttatttcttaaatacttcacattatttatgaaccttttgaatgactgcagtgaagttgaagatgaaagtgcgcaaacaggtggcaggaaacgtggcatgtctcggaggctggcatcactgaggcactgtacggtccttgcaatgtcaaacttactcaatgccaacgtagacagtggtctcatgcactccataggcttaggttaccacaaggatctccagacaagagctacatttatggaagttctgacaaaaatccttcaacaaggcacagaatttgacacacttgcagaaacagtattggctgatcggtttgagagattggtggaactggtcacaatgatgggtgatcaaggagaactccctatagcgatggctctggccaatgtggttccttgttctcagtgggatgaactagctcgagttctggttactctgtttgattctcggcatttactctaccaactgctctggaacatgttttctaaagaagtagaattggcagactccatgcagactctcttccgaggcaacagcttggccagtaaaataatgacattctgtttcaaggtatatggtgctacctatctacaaaaactcctggatcctttattacgaattgtgatcacatcctctgattggcaacatgttagctttgaagtggatcctaccaggttagaaccatcagagagccttgaggaaaaccagcggaacctccttcagatgactgaaaagttcttccatgccatcatcagttcctcctcagaattcccccctcaacttcgaagtgtgtgccactgtttataccaggcaacttgccactccctactgaataaagctacagtaaaagaaaaaaaggaaaacaaaaaatcagtggttagccagcgtttccctcagaacagcatcggtgcagtaggaagtgccatgttcctcagatttatcaatcctgccattgtctcaccgtatgaagcagggattttagataaaaagccaccacctagaatcgaaaggggcttgaagttaatgtcaaagatacttcagagtattgccaatcatgttctcttcacaaaagaagaacatatgcggcctttcaatgattttgtgaaaagcaactttgatgcagcacgcaggtttttccttgatatagcatctgattgtcctacaagtgatgcagtaaatcatagtctttccttcataagtgacggcaatgtgcttgctttacatcgtctactctggaacaatcaggagaaaattgggcagtatctttccagcaacagggatcataaagctgttggaagacgaccttttgataagatggcaacacttcttgcatacctgggtcctccagagcacaaacctgtggcagatacacactggtccagccttaaccttaccagttcaaagtttgaggaatttatgactaggcatcaggtacatgaaaaagaagaattcaaggctttgaaaacgttaagtattttctaccaagctgggacttccaaagctgggaatcctattttttattatgttgcacggaggttcaaaactggtcaaatcaatggtgatttgctgatataccatgtcttactgactttaaagccatattatgcaaagccatatgaaattgtagtggaccttacccataccgggcctagcaatcgctttaaaacagactttctctctaagtggtttgttgtttttcctggctttgcttacgacaacgtctccgcagtctatatctataactgtaactcctgggtcagggagtacaccaagtatcatgagcggctgctgactggcctcaaaggtagcaaaaggcttgttttcatagactgtcctgggaaactggctgagcacatagagcatgaacaacagaaactacctgctgccaccttggctttagaagaggacctgaaggtattccacaatgctctcaagctagctcacaaagacaccaaagtttctattaaagttggttctactgctgtccaagtaacttcagcagagcgaacaaaagtcctagggcaatcagtctttctaaatgacatttattatgcttcggaaattgaagaaatctgcctagtagatgagaaccagttcaccttaaccattgcaaaccagggcacgccgctcaccttcatgcaccaggagtgtgaagccattgtccagtctatcattcatatccggacccgctgggaactgtcacagcccgactctatcccccaacacaccaagattcggccaaaagatgtccctgggacactgctcaatatcgcattacttaatttaggcagttctgacccgagtttacggtcagctgcctataatcttctgtgtgccttaacttgtacctttaatttaaaaatcgagggccagttactagagacatcaggtttatgtatccctgccaacaacaccctctttattgtctctattagtaagacactggcagccaatgagccacacctcacgttagaatttttggaagagtgtatttctggatttagcaaatctagtattgaattgaaacacctttgtttggaatacatgactccatggctgtcaaatctagttcgtttttgcaagcataatgatgatgccaaacgacaaagagttactgctattcttgacaagctgataacaatgaccatcaatgaaaaacagatgtacccatctattcaagcaaaaatatggggaagccttgggcagattacagatctgcttgatgttgtactagacagtttcatcaaaaccagtgcaacaggtggcttgggatcaataaaagctgaggtgatggcagatactgctgtagctttggcttctggaaatgtgaaattggtttcaagcaaggttattggaaggatgtgcaaaataattgacaagacatgcttatctccaactcctactttagaacaacatcttatgtgggatgatattgctattttagcacgctacatgctgatgctgtccttcaacaattcccttgatgtggcagctcatcttccctacctcttccacgttgttactttcttagtagccacaggtccgctctcccttagagcttccacacatggactggtcattaatatcattcactctctgtgtacttgttcacagcttcattttagtgaagagaccaagcaagttttgagactcagtctgacagagttctcattacccaaattttacttgctgtttggcattagcaaagtcaagtcagctgctgtcattgccttccgttccagttaccgggacaggtcattctctcctggctcctatgagagagagacttttgctttgacatccttggaaacagtcacagaagctttgttggagatcatggaggcatgcatgagagatattccaacgtgcaagtggctggaccagtggacagaactagctcaaagatttgcattccaatataatccatccctgcaaccaagagctcttgttgtctttgggtgtattagcaaacgagtgtctcatgggcagataaagcagataatccgtattcttagcaaggcacttgagagttgcttaaaaggacctgacacttacaacagtcaagttctgatagaagctacagtaatagcactaaccaaattacagccacttcttaataaggactcgcctctgcacaaagccctcttttgggtagctgtggctgtgctgcagcttgatgaggtcaacttgtattcagcaggtaccgcacttcttgaacaaaacctgcatactttagatagtctccgtatattcaatgacaagagtccagaggaagtatttatggcaatccggaatcctctggagtggcactgcaagcaaatggatcattttgttggactcaatttcaactctaactttaactttgcattggttggacaccttttaaaagggtacaggcatccttcacctgctattgttgcaagaacagtcagaattttacatacactactaactctggttaacaaacacagaaattgtgacaaatttgaagtgaatacacagagcgtggcctacttagcagctttacttacagtgtctgaagaagttcgaagtcgctgcagcctaaaacatagaaagtcacttcttcttactgatatttcaatggaaaatgttcctatggatacatatcccattcatcatggtgacccttcctataggacactaaaggagactcagccatggtcctctcccaaaggttctgaaggataccttgcagccacctatccaactgtcggccagaccagtccccgagccaggaaatccatgagcctggacatggggcaaccttctcaggccaacactaagaagttgcttggaacaaggaaaagttttgatcacttgatatcagacacaaaggctcctaaaaggcaagaaatggaatcagggatcacaacaccccccaaaatgaggagagtagcagaaactgattatgaaatggaaactcagaggatttcctcatcacaacagcacccacatttacgtaaagtttcagtgtctgaatcaaatgttctcttggatgaagaagtacttactgatccgaagatccaggcgctgcttcttactgttctagctacactggtaaaatataccacagatgagtttgatcaacgaattctttatgaatacttagcagaggccagtgttgtgtttcccaaagtctttcctgttgtgcataatttgttggactctaagatcaacaccctgttatcattgtgccaagatccaaatttgttaaatccaatccatggaattgtgcagagtgtggtgtaccatgaagaatccccaccacaataccaaacatcttacctgcaaagtaaataaatgtatctggagaagga

SEQ ID NO: 381151 - DNA, 3229 bp, Homo sapiens
aatctctagctcgctcgcgctccctctccccgggccgtggaaaggatcccacttccggtggggtgtcatggcggcgtctcggactgtgatggctgtggggagacggcgctagtggggagagcgaccaagaggccccctcccctccccgggtccccttcccctatccccctccccccagcctccttgccaacgccccctttccctctccccctcccgctcggcgctgaccccccatccccacccccgtgggaacactgggagcctgcactccacagaccctctccttgcctcttccctcacctcagcctccgctccccgccctcttcccggcccagggcgccggcccacccttccctccgccgccccccggccgcggggaggacatggccgcgcacaggccggtggaatgggtccaggccgtggtcagccgcttcgacgagcagcttccaataaaaacaggacagcagaacacacataccaaagtcagtactgagcacaacaaggaatgtctaatcaatatttccaaatacaagttttctttggttataagcggcctcactactattttaaagaatgttaacaatatgagaatatttggagaagctgctgaaaaaaatttatatctctctcagttgattatattggatacactggaaaaatgtcttgctgggcaaccaaaggacacaatgagattagatgaaacgatgctggtcaaacagttgctgccagaaatctgccattttcttcacacctgtcgtgaaggaaaccagcatgcagctgaacttcggaattctgcctctggggttttattttctctcagctgcaacaacttcaatgcagtctttagtcgcatttctaccaggttacaggaattaactgtttgttcagaagacaatgttgatgttcatgatatagaattgttacagtatatcaatgtggattgtgcaaaattaaaacgactcctgaaggaaacagcatttaaatttaaagccctaaagaaggttgcgcagttagcagttataaatagcctggaaaaggcattttggaactgggtagaaaattatccagatgaatttacaaaactataccagatcccacagactgatatggctgaatgtgcagaaaagctatttgacttggtggatggttttgctgaaagcaccaaacgtaaagcagcagtttggccactacaaatcattctccttatcttgtgtccagaaataatccaggatatatccaaagacgtggttgatgaaaacaacatgaataagaagttatttctggacagtctacgaaaagctcttgctggccatggaggaagtaggcagctgacagaaagtgctgcaattgcctgtgtcaaactgtgtaaagcaagtacttacatcaattgggaagataactctgtcattttcctacttgttcagtccatggtggttgatcttaagaacctgctttttaatccaagtaagccattctcaagaggcagtcagcctgcagatgtggatctaatgattgactgccttgtttcttgctttcgtataagccctcacaacaaccaacactttaagatctgcctggctcagaattcaccttctacatttcactatgtgctggtaaattcactccatcgaatcatcaccaattccgcattggattggtggcctaagattgatgctgtgtattgtcactcggttgaacttcgaaatatgtttggtgaaacacttcataaagcagtgcaaggttgtggagcacacccagcaatacgaatggcaccgagtcttacatttaaagaaaaagtaacaagccttaaatttaaagaaaaacctacagacctggagacaagaagctataagtatcttctcttgtccatggtgaaactaattcatgcagatccaaagctcttgctttgtaatccaagaaaacaggggcccgaaacccaaggcagtacagcagaattaattacagggctcgtccaactggtccctcagtcacacatgccagagattgctcaggaagcaatggaggctctgctggttcttcatcagttagatagcattgatttgtggaatcctgatgctcctgtagaaacattttgggagattaggtatatgtacttttattttttaaattcaacttttaaattttattttgtatttttgtcttgaaatattaactctgtagtacttagtacattgtaaaacttacacttccaaaggttttatggttttgtattttatttgacttcaaattattagaatttcttgttttaactgtaagaaaagtatcacagcaatttagaaaataaattttaagaatagtgctaaattttgtcaccctaacataagtactgttgtttggtatattacttttttcagatttcaatgtggttactactgtatttttaatagattttcatagttataagcctagaatgataaaattttgtaacaatactgttttttcagttttttgaactatgatctttcataaactttctgtaataccaatgctttcgatgaatgaattaataatggacacctgcttagaagaaaaaaatgtatgcagaattttgtggtctgcttcctagattatacaaatcattacattttaatgagcatgaagtcaccacacggaggaaaatgtaaatgtgtaaacctcaagtttgccattatcttataagaatgggtgtgctaagttacttggcagctgaattaaaccttactctagagtagtgctgtccactagtaatataatgagaaccccatatgttaaaaacttttttacttactacattaaagagtaaaaagaagcaggtaaaattaattgtaattatgttttgtttaacccggtgtatattatctataatttcaacatgtaatcaatataaaagttattaatgacatttcattctcttttttttaataaagtcttcaaactttaaaaaaaaaaaaaaaaaaaaaaaaaagggggggggggacaaaaagaacacccgcgaggggggccaaattcaaagcttaaccaggtcttccttgcacaagggcccaaagggaagacgcaaaaaaacagagcaagggccggcgtaaacacgccggagggaaaacagtcacggggacctcgggaaagacccacatcggggggggaaaacacggggacaccccaaaagaataggccaggcataacatcaggcaaggggcaaacgagatcacgcagagaatgatacgtaatgcaa

SEQ ID NO: 381152 - DNA, 5133 bp, Homo sapiens
aatctctagctcgctcgcgctccctctccccgggccgtggaaaggatcccacttccggtggggtgtcatggcggcgtctcggactgtgatggctgtggggagacggcgctagtggggagagcgaccaagaggccccctcccctccccgggtccccttcccctatccccctccccccagcctccttgccaacgccccctttccctctccccctcccgctcggcgctgaccccccatccccacccccgtgggaacactgggagcctgcactccacagaccctctccttgcctcttccctcacctcagcctccgctccccgccctcttcccggcccagggcgccggcccacccttccctccgccgccccccggccgcggggaggacatggccgcgcacaggccggtggaatgggtccaggccgtggtcagccgcttcgacgagcagcttccaataaaaacaggacagcagaacacacataccaaagtcagtactgagcacaacaaggaatgtctaatcaatatttccaaatacaagttttctttggttataagcggcctcactactattttaaagaatgttaacaatatgagaatatttggagaagctgctgaaaaaaatttatatctctctcagttgattatattggatacactggaaaaatgtcttgctgggcaaccaaaggacacaatgagattagatgaaacgatgctggtcaaacagttgctgccagaaatctgccattttcttcacacctgtcgtgaaggaaaccagcatgcagctgaacttcggaattctgcctctggggttttattttctctcagctgcaacaacttcaatgcagtctttagtcgcatttctaccaggttacaggaattaactgtttgttcagaagacaatgttgatgttcatgatatagaattgttacagtatatcaatgtggattgtgcaaaattaaaacgactcctgaaggaaacagcatttaaatttaaagccctaaagaaggttgcgcagttagcagttataaatagcctggaaaaggcattttggaactgggtagaaaattatccagatgaatttacaaaactataccagatcccacagactgatatggctgaatgtgcagaaaagctatttgacttggtggatggttttgctgaaagcaccaaacgtaaagcagcagtttggccactacaaatcattctccttatcttgtgtccagaaataatccaggatatatccaaagacgtggttgatgaaaacaacatgaataagaagttatttctggacagtctacgaaaagctcttgctggccatggaggaagtaggcagctgacagaaagtgctgcaattgcctgtgtcaaactgtgtaaagcaagtacttacatcaattgggaagataactctgtcattttcctacttgttcagtccatggtggttgatcttaagaacctgctttttaatccaagtaagccattctcaagaggcagtcagcctgcagatgtggatctaatgattgactgccttgtttcttgctttcgtataagccctcacaacaaccaacactttaagatctgcctggctcagaattcaccttctacatttcactatgtgctggtaaattcactccatcgaatcatcaccaattccgcattggattggtggcctaagattgatgctgtgtattgtcactcggttgaacttcgaaatatgtttggtgaaacacttcataaagcagtgcaaggttgtggagcacacccagcaatacgaatggcaccgagtcttacatttaaagaaaaagtaacaagccttaaatttaaagaaaaacctacagacctggagacaagaagctataagtatcttctcttgtccatggtgaaactaattcatgcagatccaaagctcttgctttgtaatccaagaaaacaggggcccgaaacccaaggcagtacagcagaattaattacagggctcgtccaactggtccctcagtcacacatgccagagattgctcaggaagcaatggaggctctgctggttcttcatcagttagatagcattgatttgtggaatcctgatgctcctgtagaaacattttgggagattagctcacaaatgcttttttacatctgcaagaaattaactagtcatcaaatgcttagtagcacagaaattctcaagtggttgcgggaaatattgatctgcaggaataaatttcttcttaaaaataagcaggcagatagaagttcctgtcactttctccttttttacggggtaggatgtgatattccttctagtggaaataccagtcaaatgtccatggatcatgaagaattactacgtactcctggagcctctctccggaagggaaaagggaactcctctatggatagtgcagcaggatgcagcggaacccccccgatttgccgacaagcccagaccaaactagaagtggccctgtacatgtttctgtggaaccctgacactgaagctgttctggttgccatgtcctgtttccgccacctctgtgaggaagcagatatccggtgtggggtggatgaagtgtcagtgcataacctcttgcccaactataacacattcatggagtttgcctctgtcagcaatatgatgtcaacaggaagagcagcacttcagaaaagagtgatggcactgctgaggcgcattgagcatcccactgcaggaaacactgaggcttgggaagatacacatgcaaaatgggaacaagcaacaaagctaatccttaactatccaaaagccaaaatggaagatggccaggctgctgaaagccttcacaagaccattgttaagaggcgaatgtcccatgtgagtggaggaggatccatagatttgtctgacacagactccctacaggaatggatcaacatgactggcttcctttgtgcccttggaggagtgtgcctccagcagagaagcaattctggcctggcaacctatagcccacccatgggtccagtcagtgaacgtaagggttctatgatttcagtgatgtcttcagagggaaacgcagatacacctgtcagcaaatttatggatcggctgttgtccttaatggtgtgtaaccatgagaaagtgggacttcaaatacggaccaatgttaaggatctggtgggtctagaattgagtcctgctctgtatccaatgctatttaacaaattgaagaataccatcagcaagttttttgactcccaaggacaggttttattgactgataccaatactcaatttgtagaacaaaccatagctataatgaagaacttgctagataatcatactgaaggcagctctgaacatctagggcaagctagcattgaaacaatgatgttaaatctggtcaggtatgttcgtgtgcttgggaatatggtccatgcaattcaaataaaaacgaaactgtgtcaattagttgaagtaatgatggcaaggagagatgacctctcattttgccaagagatgaaatttaggaataagatggtagaatacctgacagactgggttatgggaacatcaaaccaagcagcagatgatgatgtaaaatgtcttacaagagatttggaccaggcaagcatggaagcagtagtttcacttctagctggtctccctctgcagcctgaagaaggagatggtgtggaattgatggaagccaaatcacagttatttcttaaatacttcacattatttatgaaccttttgaatgactgcagtgaagttgaagatgaaagtgcgcaaacaggtggcaggaaacgtggcatgtctcggaggctggcatcactgaggcactgtacggtccttgcaatgtcaaacttactcaatgccaacgtagacagtggtctcatgcactccataggcttaggttaccacaaggatctccagacaagagctacatttatggaagttctgacaaaaatccttcaacaaggcacagaatttgacacacttgcagaaacagtattggctgatcggtttgagagattggtggaactggtcacaatgatgggtgatcaaggagaactccctatagcgatggctctggccaatgtggttccttgttctcagtgggatgaactagctcgagttctggttactctgtttgattctcggcatttactctaccaactgctctggaacatgttttctaaagaagtagaattggcagactccatgcagactctcttccgaggcaacagcttggccagtaaaataatgacattctgtttcaaggtatatggtgctacctatctacaaaaactcctggatcctttattacgaattgtgatcacatcctctgattggcaacatgttagctttgaagtggatcctaccaggttagaaccatcagagagccttgaggaaaaccagcggaacctccttcagatgactgaaaagttcttccatgccatcatcagttcctcctcagaattcccccctcaacttcgaagtgtgtgccactgtttataccaggtggttagccagcgtttccctcagaacagcatcggtgcagtaggaagtgccatgttcctcagatttatcaatcctgccattgtctcaccgtatgaagcagggattttagataaaaagccaccacctagaatcgaaaggggcttgaagttaatgtcaaagatacttcagagtattgccaatcatgttctcttcacaaaagaagaacatatgcggcctttcaatgattttgtgaaaagcaactttgatgcagcacgcaggtttttccttgatatagcatctgattgtcctacaagtgatgcagtaaatcatagtctttccttcataagtgacggcaatgtgcttgctttacatcgtctactctggaacaatcaggagaaaattgggcagtatctttccagcaacagggatcataaagctgttggaagacgaccttttgataagatggcaacacttcttgcatacctgggtcctccagagcacaaacctgtggcagatacacactggtccagccttaaccttaccagttcaaagtttgaggaatttatgactaggcatcaggtacatgaaaaagaagaattcaaggctttgaaaacgttaacaccaccaccagaaccagaaacatgagctctagagaatccta

SEQ ID NO: 381153 - DNA, 227 bp, Homo sapiens
gaaccaccgcgtccagcctagttctagaacattgttatcacccctaaaagaaacttggtaccctttagcagtcactgtctatttcttcctccttctaatctctctcgatttatttattttttttaattgaagtttcctttttttccttgcagaatccaagaaaacaggggcccgaaacccaaggcagtacagcagaattaattacagggctcgtccaactggtccct

SEQ ID NO: 381154 - DNA, 207 bp, Homo sapiens
agaataatgtgattatttctattttagcaaccaaaggacacaatgagattagatgaaacgatgctggtcaaacagttgctgccagaaatctgccattttcttcacacctgtcgtgaaggaaaccagcatgcagctgaacttcggaattctgcctctggggttttattttctctcagctgcaacaacttcaatgcagtctttagtcgc

SEQ ID NO: 381155 - DNA, 653 bp, Homo sapiens
cttgcatggactgtgttattggtaacaggtcacttaatgacatcataataaacattatttaaacagttctaaaaacatttatgtacaatatgtattcagagtatccccttttttaggcatgcatgagagatattccaacgtgcaagtggctggaccagtggacagaactagctcaaaggtatgtcctaaattaaatataagttgtaaaaatatgcatattgttgaaaatacagctattactgtatgatcaatgttataatttattatttagtatatataaacacaaaggtttttataagttctgtggatcttttaattgcagatttgcattccaatataatccatccctgcaaccaagagctcttgttgtctttgggtgtattagcaaacgagtgtctcatgggcagataaagcagataatccgtattcttagcaaggtacctgttccgccctcacttctcccaaatatttatggttctcaagttgtaaagcatatctttcatttttctaaaagacgtttaaatttgaggtcaatgaaatatcttatatgttacttattaagcctttaaaatgtattttgattatttattgtaattctttgaagaagtcttctctaaagaagctgtctttatatgtaaactctgattacttca

SEQ ID NO: 381156 - DNA, 1070 bp, Homo sapiens
agcagcaagagattaccatactggttaagagtgacaagaagttgaaaagacagtttaaaataaagttaaagggaaacataggagttaatgtaggtagagagaaagggagagagctgcacaagaatgccaggacaatggagggaaggtgggtagaacattctagttgtaatggagaagcttttcaaaggaatcgagagagggaaagttgtgaggactggatagacctcatctcacattcagcattgttcaaaagagtttggaaatgtacagtttttaagcagacaagtcatacgatgaaagcaggacttagctcctggtggtagtgtgcacagtggattggagtagggagaaactgaagtaaaaagaatccacctttataataaagaaggttggcatgtggtaatgtcattagcaataagaaagaaatgacaaaagatacaaaagagactactctagaagaatcaacaaaccttggtgactggatttagaaatcaaagaacagggagaagtcaaaggaggtgctaagtaacgttctcagtccagctaacagtgtctttagttatacatatggaaaagtgaagagcttactcatatctttatcttccccaaaagagaaaacatgggtaatttaggaagataagctgctttatttttaactgcagtgtgttttgaaagagactatgtcatgattcatcttactagcctcaaacatatcttctttgccaggactcgcctctgcacaaagccctcttttgggtagctgtggctgtgctgcagcttgatgaggtcaacttgtattcagcaggtaccgcacttcttgaacaaaacctgcatactttagatagtctccgtatattcaatgacaaggtaagcaaactttgccttgaggttcctagattactcaaatttagtactcttccatcttttcttgttgctattcttttaaaatcacaagaagtccataacttaagtaggaatttgtataatgtaacttattgtgagtatatttccttaccagctcataaagaactatgtaaacttgaatgcatattttttacataaaaatagca

SEQ ID NO: 381157 - DNA, 12606 bp, Homo sapiens
aatctctagctcgctcgcgctccctctccccgggccgtggaaaggatcccacttccggtggggtgtcatggcggcgtctcggactgtgatggctgtggggagacggcgctagtggggagagcgaccaagaggccccctcccctccccgggtccccttcccctatccccctccccccagcctccttgccaacgccccctttccctctccccctcccgctcggcgctgaccccccatccccacccccgtgggaacactgggagcctgcactccacagaccctctccttgcctcttccctcacctcagcctccgctccccgccctcttcccggcccagggcgccggcccacccttccctccgccgccccccggccgcggggaggacatggccgcgcacaggccggtggaatgggtccaggccgtggtcagccgcttcgacgagcagcttccaataaaaacaggacagcagaacacacataccaaagtcagtactgagcacaacaaggaatgtctaatcaatatttccaaatacaagttttctttggttataagcggcctcactactattttaaagaatgttaacaatatgagaatatttggagaagctgctgaaaaaaatttatatctctctcagttgattatattggatacactggaaaaatgtcttgctgggcaaccaaaggacacaatgagattagatgaaacgatgctggtcaaacagttgctgccagaaatctgccattttcttcacacctgtcgtgaaggaaaccagcatgcagctgaacttcggaattctgcctctggggttttattttctctcagctgcaacaacttcaatgcagtctttagtcgcatttctaccaggttacaggaattaactgtttgttcagaagacaatgttgatgttcatgatatagaattgttacagtatatcaatgtggattgtgcaaaattaaaacgactcctgaaggaaacagcatttaaatttaaagccctaaagaaggttgcgcagttagcagttataaatagcctggaaaaggcattttggaactgggtagaaaattatccagatgaatttacaaaactataccagatcccacagactgatatggctgaatgtgcagaaaagctatttgacttggtggatggttttgctgaaagcaccaaacgtaaagcagcagtttggccactacaaatcattctccttatcttgtgtccagaaataatccaggatatatccaaagacgtggttgatgaaaacaacatgaataagaagttatttctggacagtctacgaaaagctcttgctggccatggaggaagtaggcagctgacagaaagtgctgcaattgcctgtgtcaaactgtgtaaagcaagtacttacatcaattgggaagataactctgtcattttcctacttgttcagtccatggtggttgatcttaagaacctgctttttaatccaagtaagccattctcaagaggcagtcagcctgcagatgtggatctaatgattgactgccttgtttcttgctttcgtataagccctcacaacaaccaacactttaagatctgcctggctcagaattcaccttctacatttcactatgtgctggtaaattcactccatcgaatcatcaccaattccgcattggattggtggcctaagattgatgctgtgtattgtcactcggttgaacttcgaaatatgtttggtgaaacacttcataaagcagtgcaaggttgtggagcacacccagcaatacgaatggcaccgagtcttacatttaaagaaaaagtaacaagccttaaatttaaagaaaaacctacagacctggagacaagaagctataagtatcttctcttgtccatggtgaaactaattcatgcagatccaaagctcttgctttgtaatccaagaaaacaggggcccgaaacccaaggcagtacagcagaattaattacagggctcgtccaactggtccctcagtcacacatgccagagattgctcaggaagcaatggaggctctgctggttcttcatcagttagatagcattgatttgtggaatcctgatgctcctgtagaaacattttgggagattagctcacaaatgcttttttacatctgcaagaaattaactagtcatcaaatgcttagtagcacagaaattctcaagtggttgcgggaaatattgatctgcaggaataaatttcttcttaaaaataagcaggcagatagaagttcctgtcactttctccttttttacggggtaggatgtgatattccttctagtggaaataccagtcaaatgtccatggatcatgaagaattactacgtactcctggagcctctctccggaagggaaaagggaactcctctatggatagtgcagcaggatgcagcggaacccccccgatttgccgacaagcccagaccaaactagaagtggccctgtacatgtttctgtggaaccctgacactgaagctgttctggttgccatgtcctgtttccgccacctctgtgaggaagcagatatccggtgtggggtggatgaagtgtcagtgcataacctcttgcccaactataacacattcatggagtttgcctctgtcagcaatatgatgtcaacaggaagagcagcacttcagaaaagagtgatggcactgctgaggcgcattgagcatcccactgcaggaaacactgaggcttgggaagatacacatgcaaaatgggaacaagcaacaaagctaatccttaactatccaaaagccaaaatggaagatggccaggctgctgaaagccttcacaagaccattgttaagaggcgaatgtcccatgtgagtggaggaggatccatagatttgtctgacacagactccctacaggaatggatcaacatgactggcttcctttgtgcccttggaggagtgtgcctccagcagagaagcaattctggcctggcaacctatagcccacccatgggtccagtcagtgaacgtaagggttctatgatttcagtgatgtcttcagagggaaacgcagatacacctgtcagcaaatttatggatcggctgttgtccttaatggtgtgtaaccatgagaaagtgggacttcaaatacggaccaatgttaaggatctggtgggtctagaattgagtcctgctctgtatccaatgctatttaacaaattgaagaataccatcagcaagttttttgactcccaaggacaggttttattgactgataccaatactcaatttgtagaacaaaccatagctataatgaagaacttgctagataatcatactgaaggcagctctgaacatctagggcaagctagcattgaaacaatgatgttaaatctggtcaggtatgttcgtgtgcttgggaatatggtccatgcaattcaaataaaaacgaaactgtgtcaattagttgaagtaatgatggcaaggagagatgacctctcattttgccaagagatgaaatttaggaataagatggtagaatacctgacagactgggttatgggaacatcaaaccaagcagcagatgatgatgtaaaatgtcttacaagagatttggaccaggcaagcatggaagcagtagtttcacttctagctggtctccctctgcagcctgaagaaggagatggtgtggaattgatggaagccaaatcacagttatttcttaaatacttcacattatttatgaaccttttgaatgactgcagtgaagttgaagatgaaagtgcgcaaacaggtggcaggaaacgtggcatgtctcggaggctggcatcactgaggcactgtacggtccttgcaatgtcaaacttactcaatgccaacgtagacagtggtctcatgcactccataggcttaggttaccacaaggatctccagacaagagctacatttatggaagttctgacaaaaatccttcaacaaggcacagaatttgacacacttgcagaaacagtattggctgatcggtttgagagattggtggaactggtcacaatgatgggtgatcaaggagaactccctatagcgatggctctggccaatgtggttccttgttctcagtgggatgaactagctcgagttctggttactctgtttgattctcggcatttactctaccaactgctctggaacatgttttctaaagaagtagaattggcagactccatgcagactctcttccgaggcaacagcttggccagtaaaataatgacattctgtttcaaggtatatggtgctacctatctacaaaaactcctggatcctttattacgaattgtgatcacatcctctgattggcaacatgttagctttgaagtggatcctaccaggttagaaccatcagagagccttgaggaaaaccagcggaacctccttcagatgactgaaaagttcttccatgccatcatcagttcctcctcagaattcccccctcaacttcgaagtgtgtgccactgtttataccaggtggttagccagcgtttccctcagaacagcatcggtgcagtaggaagtgccatgttcctcagatttatcaatcctgccattgtctcaccgtatgaagcagggattttagataaaaagccaccacctagaatcgaaaggggcttgaagttaatgtcaaagatacttcagagtattgccaatcatgttctcttcacaaaagaagaacatatgcggcctttcaatgattttgtgaaaagcaactttgatgcagcacgcaggtttttccttgatatagcatctgattgtcctacaagtgatgcagtaaatcatagtctttccttcataagtgacggcaatgtgcttgctttacatcgtctactctggaacaatcaggagaaaattgggcagtatctttccagcaacagggatcataaagctgttggaagacgaccttttgataagatggcaacacttcttgcatacctgggtcctccagagcacaaacctgtggcagatacacactggtccagccttaaccttaccagttcaaagtttgaggaatttatgactaggcatcaggtacatgaaaaagaagaattcaaggctttgaaaacgttaagtattttctaccaagctgggacttccaaagctgggaatcctattttttattatgttgcacggaggttcaaaactggtcaaatcaatggtgatttgctgatataccatgtcttactgactttaaagccatattatgcaaagccatatgaaattgtagtggaccttacccataccgggcctagcaatcgctttaaaacagactttctctctaagtggtttgttgtttttcctggctttgcttacgacaacgtctccgcagtctatatctataactgtaactcctgggtcagggagtacaccaagtatcatgagcggctgctgactggcctcaaaggtagcaaaaggcttgttttcatagactgtcctgggaaactggctgagcacatagagcatgaacaacagaaactacctgctgccaccttggctttagaagaggacctgaaggtattccacaatgctctcaagctagctcacaaagacaccaaagtttctattaaagttggttctactgctgtccaagtaacttcagcagagcgaacaaaagtcctagggcaatcagtctttctaaatgacatttattatgcttcggaaattgaagaaatctgcctagtagatgagaaccagttcaccttaaccattgcaaaccagggcacgccgctcaccttcatgcaccaggagtgtgaagccattgtccagtctatcattcatatccggacccgctgggaactgtcacagcccgactctatcccccaacacaccaagattcggccaaaagatgtccctgggacactgctcaatatcgcattacttaatttaggcagttctgacccgagtttacggtcagctgcctataatcttctgtgtgccttaacttgtacctttaatttaaaaatcgagggccagttactagagacatcaggtttatgtatccctgccaacaacaccctctttattgtctctattagtaagacactggcagccaatgagccacacctcacgttagaatttttggaagagtgtatttctggatttagcaaatctagtattgaattgaaacacctttgtttggaatacatgactccatggctgtcaaatctagttcgtttttgcaagcataatgatgatgccaaacgacaaagagttactgctattcttgacaagctgataacaatgaccatcaatgaaaaacagatgtacccatctattcaagcaaaaatatggggaagccttgggcagattacagatctgcttgatgttgtactagacagtttcatcaaaaccagtgcaacaggtggcttgggatcaataaaagctgaggtgatggcagatactgctgtagctttggcttctggaaatgtgaaattggtttcaagcaaggttattggaaggatgtgcaaaataattgacaagacatgcttatctccaactcctactttagaacaacatcttatgtgggatgatattgctattttagcacgctacatgctgatgctgtccttcaacaattcccttgatgtggcagctcatcttccctacctcttccacgttgttactttcttagtagccacaggtccgctctcccttagagcttccacacatggactggtcattaatatcattcactctctgtgtacttgttcacagcttcattttagtgaagagaccaagcaagttttgagactcagtctgacagagttctcattacccaaattttacttgctgtttggcattagcaaagtcaagtcagctgctgtcattgccttccgttccagttaccgggacaggtcattctctcctggctcctatgagagagagacttttgctttgacatccttggaaacagtcacagaagctttgttggagatcatggaggcatgcatgagagatattccaacgtgcaagtggctggaccagtggacagaactagctcaaagatttgcattccaatataatccatccctgcaaccaagagctcttgttgtctttgggtgtattagcaaacgagtgtctcatgggcagataaagcagataatccgtattcttagcaaggcacttgagagttgcttaaaaggacctgacacttacaacagtcaagttctgatagaagctacagtaatagcactaaccaaattacagccacttcttaataaggactcgcctctgcacaaagccctcttttgggtagctgtggctgtgctgcagcttgatgaggtcaacttgtattcagcaggtaccgcacttcttgaacaaaacctgcatactttagatagtctccgtatattcaatgacaagagtccagaggaagtatttatggcaatccggaatcctctggagtggcactgcaagcaaatggatcattttgttggactcaatttcaactctaactttaactttgcattggttggacaccttttaaaagggtacaggcatccttcacctgctattgttgcaagaacagtcagaattttacatacactactaactctggttaacaaacacagaaattgtgacaaatttgaagtgaatacacagagcgtggcctacttagcagctttacttacagtgtctgaagaagttcgaagtcgctgcagcctaaaacatagaaagtcacttcttcttactgatatttcaatggaaaatgttcctatggatacatatcccattcatcatggtgacccttcctataggacactaaaggagactcagccatggtcctctcccaaaggttctgaaggataccttgcagccacctatccaactgtcggccagaccagtccccgagccaggaaatccatgagcctggacatggggcaaccttctcaggccaacactaagaagttgcttggaacaaggaaaagttttgatcacttgatatcagacacaaaggctcctaaaaggcaagaaatggaatcagggatcacaacaccccccaaaatgaggagagtagcagaaactgattatgaaatggaaactcagaggatttcctcatcacaacagcacccacatttacgtaaagtttcagtgtctgaatcaaatgttctcttggatgaagaagtacttactgatccgaagatccaggcgctgcttcttactgttctagctacactggtaaaatataccacagatgagtttgatcaacgaattctttatgaatacttagcagaggccagtgttgtgtttcccaaagtctttcctgttgtgcataatttgttggactctaagatcaacaccctgttatcattgtgccaagatccaaatttgttaaatccaatccatggaattgtgcagagtgtggtgtaccatgaagaatccccaccacaataccaaacatcttacctgcaaagttttggttttaatggcttgtggcggtttgcaggaccgttttcaaagcaaacacaaattccagactatgctgagcttattgttaagtttcttgatgccttgattgacacgtacctgcctggaattgatgaagaaaccagtgaagaatccctcctgactcccacatctccttaccctcctgcactgcagagccagcttagtatcactgccaaccttaacctttctaattccatgacctcacttgcaacttcccagcattccccaggaatcgacaaggagaacgttgaactctcccctaccactggccactgtaacagtggacgaactcgccacggatccgcaagccaagtgcagaagcaaagaagcgctggcagtttcaaacgtaatagcattaagaagatcgtgtgaagcttgcttgctttcttttttaaaatcaacttaacatgggctcttcactagtgaccccttccctgtccttgccctttccccccatgttgtaatgctgcacttcctgttttataatgaacccatccggtttgccatgttgccagatgatcaactcttcgaagccttgcctaaatttaatgctgccttttctttaactttttttcttctacttttggcgtgtatctggtatatgtaagtgttcagaacaactgcaaagaaagtgggaggtcaggaaacttttaactgagaaatctcaattgtaagagaggatgaattcttgaatactgctactactggccagtgatgaaagccatttgcacagagctctgccttctgtggttttcccttcttcatcctacagagtaaagtgttagtcctatttatacatttttcaagatacaagtttatgagagaaatagtattataaccccagtatgtttaatcttttagctgtggactttttttttaaccgtacaaaactgaaagaaccatagaggtcaagcctcagtgacttgacaccataaagccacagacaaggtacttgggggggagggcagggaaatttcatattttatagtggattcttaagaaatactaacacttgagtattagcaataattacaggaaaataagtgcgaccacatatatcttaacattactgaattaaaactatggcttctaagtccttatccaaactcagtcatccaaactagtttatttttttctccagttgattatcttttaatttttaattttgctaaaggtggtttttttgtgttttgttttttgtaaaccaaaactatactaagtatagtaattatatatatatatatattttttcccctccccctcttctttcctaactaattctgagcagggtaatcagtgaacaaagtgttgaaaattgttcccagaaggtaattttcatagatgtttgcattagctccatagcaaaatggaatggtacgtgacatttagggtagctgatatttttattttgttaaataatttccaagaatagagtatggtgtatattataaatttctttgataagatgtattttgaatgtcttttaatcttcctcctcctctccaaaaaaatcagaaacctctttaagaaaacatgtaggttatatatgctagaattgcatttaatcactgtgaaaagactggtcagcctgcattagtatgacagtaggggggctgttagaattgctgctatactggtggtatggattatcatggcattggaattttcatagtaatgcagatccaatttctttgtggtacctgcagtttacaaaataatttgacttcagtgagcatattggtatctggatgttccaatttagaactaaaccatatttattacaaaaagatattaatccctctactcccaggttccctttatatgttaagatataatggctttgaggggggaaaaaataaacctaggggagaggggagtttcctgtagtgctgtttcattagaggatttcagtaaattaaattccacagctaattcaataaataatggtacatttaagtgttctgattttaataatatatttcacatttatccacacagtaacaatgtaatatgttaatgtaaataaaattggttttgatactcagaaataacaagaatttaattttttaaatttgtttacagtcctgggaaaagtaagaattatttgccaaaataagaggaaagaaaaccttagtattattaatgagtttaccatagaattgttggaaatactgaagacaggtgcaatttactaaacttttgtttttaaactattgtagaggctgcattagaagaaaatgtttataatgacagagcaactatgactatataaaaaagctgaaattagaactgtgtttagaaatagatcagtaacccagtgccaaggatgccaagctgccaccatggtcttggctctcccacaacccagtgtttctggggtaagtttcacagtttctaggccctggaatagcaggcagtgtaagcctttgataactttagttcgatgtttttcttgtttttgtttgttggtttggtgcatatgatagtgggtgttatgctattttgctcttcccatcaaaataaagaaacttccagaggtttactgttaaaaatactgatatttccataaacgggtttaccaagggtgtagtatttcataccgcctgaaatgatcagcattggcacaaatcaaaattcagccgcctttgaaatgcaaaaatacctttgactagtaagtacatcctaggagtttgaaaacttaactaaggtttaaaatttaccttgtttaaagaacttctgacttttgaggaaaatctagctttccaagtaactaaaatgtacatgagataaacctctcaccactatgtgtcccttgagaaatgcaacacttttttagtcttcatacttgtaatctataaaagaaattctgaagtttagaccaagttgcccatttctgcgtaattgacataagttctgttaaaaatattataagtaattcgtttcggtttgtagatgtttcccctgacttgttaaagaggaaaccaggaactcagtcatgtttttgtcctggataatctacctgttatgccagtactcccatccgaggggcatgcccttagttgcccagatggagatgcagttcagtagatttggggcaaagtggctacagctctgtcttccattcactcaacacctgttcatgactgagccaggtgcccaggacacatcctaaacagtcagcttctatcctgtgtcctagtcggggagacagagtgccagccagcaaccctcccaggtttgtaggttttaggggttttcagttttgtttgggttttttgttttttgtttttgtttctacatccttccccgactcccaggcataatgaggcatgtcttactcaatgttatgcaatggatttaggcaaaaattcattcttagtgtcagccacacaattttttttaatgcagtatattcacctgtaaatagtttgtgtaaaatttgacaaaaaaagtatatttactatactgtaaatatatgtgatgatatattgtattattttgcttttttgtaaagcagttagttgctgcacatggataacaacaaaaatttgattattctcgtgttagtattgttaacttctttttgcgactgcgttacatcatttaaagaaaatgctgtgtattgtaaacttaaattgtatatgataacttactgtcctttccatccgggcctaaactttggcagttcctttgtctacaaccttgttaatactgtaaacagttgtacgccagcaggaaaaatactgcccaacagacaaaatcgatcattgtaggggaaaatcatagaaatccatttcagatctttattgttcctcaccccattttcctccttgtgtatgtacttcccccacccccctttttttaagtaaaatgtaaattcaatctgctctaagaaaaaggagttatttaatttcttcagatgtatcgagctctgttttcttccccccgagtcctcccaatcttttgaaacattaaggccattttccttaaggatgtttttggctctcctactccccgtgagaaagatctttccatttccagaacttctccacactaaaagtgaaatatttttgtgaaatgcttttttagggcctgccaaactcaggtgagtctgttctctgggataagctggcttctc

SEQ ID NO: 381158 - DNA, 10601 bp, Homo sapiens
aatctctagctcgctcgcgctccctctccccgggccgtggaaaggatcccacttccggtggggtgtcatggcggcgtctcggactgtgatggctgtggggagacggcgctagtggggagagcgaccaagaggccccctcccctccccgggtccccttcccctatccccctccccccagcctccttgccaacgccccctttccctctccccctcccgctcggcgctgaccccccatccccacccccgtgggaacactgggagcctgcactccacagaccctctccttgcctcttccctcacctcagcctccgctccccgccctcttcccggcccagggcgccggcccacccttccctccgccgccccccggccgcggggaggacatggccgcgcacaggccggtggaatgggtccaggccgtggtcagccgcttcgacgagcagcttccaataaaaacaggacagcagaacacacataccaaagtcagtactgagcacaacaaggaatgtctaatcaatatttccaaatacaagttttctttggttataagcggcctcactactattttaaagaatgttaacaatatgagaatatttggagaagctgctgaaaaaaatttatatctctctcagttgattatattggatacactggaaaaatgtcttgctgggcaaccaaaggacacaatgagattagatgaaacgatgctggtcaaacagttgctgccagaaatctgccattttcttcacacctgtcgtgaaggaaaccagcatgcagctgaacttcggaattctgcctctggggttttattttctctcagctgcaacaacttcaatgcagtctttagtcgcatttctaccaggttacaggaattaactgtttgttcagaagacaatgttgatgttcatgatatagaattgttacagtatatcaatgtggattgtgcaaaattaaaacgactcctgaaggaaacagcatttaaatttaaagccctaaagaaggttgcgcagttagcagttataaatagcctggaaaaggcattttggaactgggtagaaaattatccagatgaatttacaaaactataccagatcccacagactgatatggctgaatgtgcagaaaagctatttgacttggtggatggttttgctgaaagcaccaaacgtaaagcagcagtttggccactacaaatcattctccttatcttgtgtccagaaataatccaggatatatccaaagacgtggttgatgaaaacaacatgaataagaagttatttctggacagtctacgaaaagctcttgctggccatggaggaagtaggcagctgacagaaagtgctgcaattgcctgtgtcaaactgtgtaaagcaagtacttacatcaattgggaagataactctgtcattttcctacttgttcagtccatggtggttgatcttaagaacctgctttttaatccaagtaagccattctcaagaggcagtcagcctgcagatgtggatctaatgattgactgccttgtttcttgctttcgtataagccctcacaacaaccaacactttaagatctgcctggctcagaattcaccttctacatttcactatgtgctggtaaattcactccatcgaatcatcaccaattccgcattggattggtggcctaagattgatgctgtgtattgtcactcggttgaacttcgaaatatgtttggtgaaacacttcataaagcagtgcaaggttgtggagcacacccagcaatacgaatggcaccgagtcttacatttaaagaaaaagtaacaagccttaaatttaaagaaaaacctacagacctggagacaagaagctataagtatcttctcttgtccatggtgaaactaattcatgcagatccaaagctcttgctttgtaatccaagaaaacaggggcccgaaacccaaggcagtacagcagaattaattacagggctcgtccaactggtccctcagtcacacatgccagagattgctcaggaagcaatggaggctctgctggttcttcatcagttagatagcattgatttgtggaatcctgatgctcctgtagaaacattttgggagattagctcacaaatgcttttttacatctgcaagaaattaactagtcatcaaatgcttagtagcacagaaattctcaagtggttgcgggaaatattgatctgcaggaataaatttcttcttaaaaataagcaggcagatagaagttcctgtcactttctccttttttacggggtaggatgtgatattccttctagtggaaataccagtcaaatgtccatggatcatgaagaattactacgtactcctggagcctctctccggaagggaaaagggaactcctctatggatagtgcagcaggatgcagcggaacccccccgatttgccgacaagcccagaccaaactagaagtggccctgtacatgtttctgtggaaccctgacactgaagctgttctggttgccatgtcctgtttccgccacctctgtgaggaagcagatatccggtgtggggtggatgaagtgtcagtgcataacctcttgcccaactataacacattcatggagtttgcctctgtcagcaatatgatgtcaacaggaagagcagcacttcagaaaagagtgatggcactgctgaggcgcattgagcatcccactgcaggaaacactgaggcttgggaagatacacatgcaaaatgggaacaagcaacaaagctaatccttaactatccaaaagccaaaatggaagatggccaggctgctgaaagccttcacaagaccattgttaagaggcgaatgtcccatgtgagtggaggaggatccatagatttgtctgacacagactccctacaggaatggatcaacatgactggcttcctttgtgcccttggaggagtgtgcctccagcagagaagcaattctggcctggcaacctatagcccacccatgggtccagtcagtgaacgtaagggttctatgatttcagtgatgtcttcagagggaaacgcagatacacctgtcagcaaatttatggatcggctgttgtccttaatggtgtgtaaccatgagaaagtgggacttcaaatacggaccaatgttaaggatctggtgggtctagaattgagtcctgctctgtatccaatgctatttaacaaattgaagaataccatcagcaagttttttgactcccaaggacaggttttattgactgataccaatactcaatttgtagaacaaaccatagctataatgaagaacttgctagataatcatactgaaggcagctctgaacatctagggcaagctagcattgaaacaatgatgttaaatctggtcaggtatgttcgtgtgcttgggaatatggtccatgcaattcaaataaaaacgaaactgtgtcaattagttgaagtaatgatggcaaggagagatgacctctcattttgccaagagatgaaatttaggaataagatggtagaatacctgacagactgggttatgggaacatcaaaccaagcagcagatgatgatgtaaaatgtcttacaagagatttggaccaggcaagcatggaagcagtagtttcacttctagctggtctccctctgcagcctgaagaaggagatggtgtggaattgatggaagccaaatcacagttatttcttaaatacttcacattatttatgaaccttttgaatgactgcagtgaagttgaagatgaaagtgcgcaaacaggtggcaggaaacgtggcatgtctcggaggctggcatcactgaggcactgtacggtccttgcaatgtcaaacttactcaatgccaacgtagacagtggtctcatgcactccataggcttaggttaccacaaggatctccagacaagagctacatttatggaagttctgacaaaaatccttcaacaaggcacagaatttgacacacttgcagaaacagtattggctgatcggtttgagagattggtggaactggtcacaatgatgggtgatcaaggagaactccctatagcgatggctctggccaatgtggttccttgttctcagtgggatgaactagctcgagttctggttactctgtttgattctcggcatttactctaccaactgctctggaacatgttttctaaagaagtagaattggcagactccatgcagactctcttccgaggcaacagcttggccagtaaaataatgacattctgtttcaaggtatatggtgctacctatctacaaaaactcctggatcctttattacgaattgtgatcacatcctctgattggcaacatgttagctttgaagtggatcctaccaggttagaaccatcagagagccttgaggaaaaccagcggaacctccttcagatgactgaaaagttcttccatgccatcatcagttcctcctcagaattcccccctcaacttcgaagtgtgtgccactgtttataccaggtggttagccagcgtttccctcagaacagcatcggtgcagtaggaagtgccatgttcctcagatttatcaatcctgccattgtctcaccgtatgaagcagggattttagataaaaagccaccacctagaatcgaaaggggcttgaagttaatgtcaaagatacttcagagtattgccaatcatgttctcttcacaaaagaagaacatatgcggcctttcaatgattttgtgaaaagcaactttgatgcagcacgcaggtttttccttgatatagcatctgattgtcctacaagtgatgcagtaaatcatagtctttccttcataagtgacggcaatgtgcttgctttacatcgtctactctggaacaatcaggagaaaattgggcagtatctttccagcaacagggatcataaagctgttggaagacgaccttttgataagatggcaacacttcttgcatacctgggtcctccagagcacaaacctgtggcagatacacactggtccagccttaaccttaccagttcaaagtttgaggaatttatgactaggcatcaggtacatgaaaaagaagaattcaaggctttgaaaacgttaagtattttctaccaagctgggacttccaaagctgggaatcctattttttattatgttgcacggaggttcaaaactggtcaaatcaatggtgatttgctgatataccatgtcttactgactttaaagccatattatgcaaagccatatgaaattgtagtggaccttacccataccgggcctagcaatcgctttaaaacagactttctctctaagtggtttgttgtttttcctggctttgcttacgacaacgtctccgcagtctatatctataactgtaactcctgggtcagggagtacaccaagtatcatgagcggctgctgactggcctcaaaggtagcaaaaggcttgttttcatagactgtcctgggaaactggctgagcacatagagcatgaacaacagaaactacctgctgccaccttggctttagaagaggacctgaaggtattccacaatgctctcaagctagctcacaaagacaccaaagtttctattaaagttggttctactgctgtccaagtaacttcagcagagcgaacaaaagtcctagggcaatcagtctttctaaatgacatttattatgcttcggaaattgaagaaatctgcctagtagatgagaaccagttcaccttaaccattgcaaaccagggcacgccgctcaccttcatgcaccaggagtgtgaagccattgtccagtctatcattcatatccggacccgctgggaactgtcacagcccgactctatcccccaacacaccaagattcggccaaaagatgtccctgggacactgctcaatatcgcattacttaatttaggcagttctgacccgagtttacggtcagctgcctataatcttctgtgtgccttaacttgtacctttaatttaaaaatcgagggccagttactagagacatcaggtttatgtatccctgccaacaacaccctctttattgtctctattagtaagacactggcagccaatgagccacacctcacgttagaatttttggaagagtgtatttctggatttagcaaatctagtattgaattgaaacacctttgtttggaatacatgactccatggctgtcaaatctagttcgtttttgcaagcataatgatgatgccaaacgacaaagagttactgctattcttgacaagctgataacaatgaccatcaatgaaaaacagatgtacccatctattcaagcaaaaatatggggaagccttgggcagattacagatctgcttgatgttgtactagacagtttcatcaaaaccagtgcaacaggtggcttgggatcaataaaagctgaggtgatggcagatactgctgtagctttggcttctggaaatgtgaaattggtttcaagcaaggttattggaaggatgtgcaaaataattgacaagacatgcttatctccaactcctactttagaacaacatcttatgtgggatgatattgctattttagcacgctacatgctgatgctgtccttcaacaattcccttgatgtggcagctcatcttccctacctcttccacgttgttactttcttagtagccacaggtccgctctcccttagagcttccacacatggactggtcattaatatcattcactctctgtgtacttgttcacagcttcattttagtgaagagaccaagcaagttttgagactcagtctgacagagttctcattacccaaattttacttgctgtttggcattagcaaagtcaagtcagctgctgtcattgccttccgttccagttaccgggacaggtcattctctcctggctcctatgagagagagacttttgctttgacatccttggaaacagtcacagaagctttgttggagatcatggaggcatgcatgagagatattccaacgtgcaagtggctggaccagtggacagaactagctcaaagatttgcattccaatataatccatccctgcaaccaagagctcttgttgtctttgggtgtattagcaaacgagtgtctcatgggcagataaagcagataatccgtattcttagcaaggcacttgagagttgcttaaaaggacctgacacttacaacagtcaagttctgatagaagctacagtaatagcactaaccaaattacagccacttcttaataaggactcgcctctgcacaaagccctcttttgggtagctgtggctgtgctgcagcttgatgaggtcaacttgtattcagcaggtaccgcacttcttgaacaaaacctgcatactttagatagtctccgtatattcaatgacaagagtccagaggaagtatttatggcaatccggaatcctctggagtggcactgcaagcaaatggatcattttgttggactcaatttcaactctaactttaactttgcattggttggacaccttttaaaagggtacaggcatccttcacctgctattgttgcaagaacagtcagaattttacatacactactaactctggttaacaaacacagaaattgtgacaaatttgaagtgaatacacagagcgtggcctacttagcagctttacttacagtgtctgaagaagttcgaagtcgctgcagcctaaaacatagaaagtcacttcttcttactgatatttcaatggaaaatgttcctatggatacatatcccattcatcatggtgacccttcctataggacactaaaggagactcagccatggtcctctcccaaaggttctgaaggataccttgcagccacctatccaactgtcggccagaccagtccccgagccaggaaatccatgagcctggacatggggcaaccttctcaggccaacactaagaagttgcttggaacaaggaaaagttttgatcacttgatatcagacacaaaggctcctaaaaggcaagaaatggaatcagggatcacaacaccccccaaaatgaggagagtagcagaaactgattatgaaatggaaactcagaggatttcctcatcacaacagcacccacatttacgtaaagtttcagtgtctgaatcaaatgttctcttggatgaagaagtacttactgatccgaagatccaggcgctgcttcttactgttctagctacactggtaaaatataccacagatgagtttgatcaacgaattctttatgaatacttagcagaggccagtgttgtgtttcccaaagtctttcctgttgtgcataatttgttggactctaagatcaacaccctgttatcattgtgccaagatccaaatttgttaaatccaatccatggaattgtgcagagtgtggtgtaccatgaagaatccccaccacaataccaaacatcttacctgcaaagttttggttttaatggcttgtggcggtttgcaggaccgttttcaaagcaaacacaaattccagactatgctgagcttattgttaagtttcttgatgccttgattgacacgtacctgcctggaattgatgaagaaaccagtgaagaatccctcctgactcccacatctccttaccctcctgcactgcagagccagcttagtatcactgccaaccttaacctttctaattccatgacctcacttgcaacttcccagcattccccaggaatcgacaaggagaacgttgaactctcccctaccactggccactgtaacagtggacgaactcgccacggatccgcaagccaagtgcagaagcaaagaagcgctggcagtttcaaacgtaatagcattaagaagatcgtgtgaagcttgcttgctttcttttttaaaatcaacttaacatgggctcttcactagtgaccccttccctgtccttgccctttccccccatgttgtaatgctgcacttcctgttttataatgaacccatccggtttgccatgttgccagatgatcaactcttcgaagccttgcctaaatttaatgctgccttttctttaactttttttcttctacttttggcgtgtatctggtatatgtaagtgttcagaacaactgcaaagaaagtgggaggtcaggaaacttttaactgagaaatctcaattgtaagagaggatgaattcttgaatactgctactactggccagtgatgaaagccatttgcacagagctctgccttctgtggttttcccttcttcatcctacagagtaaagtgttagtcctatttatacatttttcaagatacaagtttatgagagaaatagtattataaccccagtatgtttaatcttttagctgtggactttttttttaaccgtacaaaactgaaagaaccatagaggtcaagcctcagtgacttgacaccataaagccacagacaaggtacttgggggggagggcagggaaatttcatattttatagtggattcttaagaaatactaacacttgagtattagcaataattacaggaaaataagtgcgaccacatatatcttaacattactgaattaaaactatggcttctaagtccttatccaaactcagtcatccaaactagtttatttttttctccagttgattatcttttaatttttaattttgctaaaggtggtttttttgtgttttgttttttgtaaaccaaaactatactaagtatagtaattatatatatatatatattttttcccctccccctcttctttcctaactaattctgagcagggtaatcagtgaacaaagtgttgaaaattgttcccagaaggtaattttcatagatgtttgcattagctccatagcaaaatggaatggtacgtgacatttagggtagctgatatttttattttgttaaataatttccaagaatagagtatggtgtatattataaatttctttgataagatgtattttgaatgtcttttaatcttcctcctcctctccaaaaaaatcagaaacctctttaagaaaacatgtaggttatatatgctagaattgcatttaatcactgtgaaaagactggtcagcctgcattagtatgacagtaggggggctgttagaattgctgctatactggtggtatggattatcatggcattggaattttcatagtaatgcagatccaatttctttgtggtacctgcagtttacaaaataatttgacttcagtgagcatattggtatctggatgttccaatttagaactaaaccatatttattacaaaaagatattaatccctctactcccaggttccctttatatgttaagatataatggctttgaggggggaaaaaataaacctaggggagaggggagtttcctgtagtgctgtttcattagaggatttcagtaaattaaattccacagtatcataatatgtctttaacaaaaaaagggggcgttaagatcctgaggccagttaacgtcccgtttgtacagggcctagggtaattaagagaaggcggtacattgatggaaggcggacttgagcactctcgggggatgcaaccacataccggaaatagtctgagctcgtttgtcttttctgtacatcgaaaaacattaactagcc

SEQ ID NO: 381159 - DNA, 12415 bp, Homo sapiens
  misc_feature (8717)..(8717): n is a, c, g, or t
aatctctagctcgctcgcgctccctctccccgggccgtggaaaggatcccacttccggtggggtgtcatggcggcgtctcggactgtgatggctgtggggagacggcgctagtggggagagcgaccaagaggccccctcccctccccgggtccccttcccctatccccctccccccagcctccttgccaacgccccctttccctctccccctcccgctcggcgctgaccccccatccccacccccgtgggaacactgggagcctgcactccacagaccctctccttgcctcttccctcacctcagcctccgctccccgccctcttcccggcccagggcgccggcccacccttccctccgccgccccccggccgcggggaggacatggccgcgcacaggccggtggaatgggtccaggccgtggtcagccgcttcgacgagcagcttccaataaaaacaggacagcagaacacacataccaaagtcagtactgagcacaacaaggaatgtctaatcaatatttccaaatacaagttttctttggttataagcggcctcactactattttaaagaatgttaacaatatgagaatatttggagaagctgctgaaaaaaatttatatctctctcagttgattatattggatacactggaaaaatgtcttgctgggcaaccaaaggacacaatgagattagatgaaacgatgctggtcaaacagttgctgccagaaatctgccattttcttcacacctgtcgtgaaggaaaccagcatgcagctgaacttcggaattctgcctctggggttttattttctctcagctgcaacaacttcaatgcagtctttagtcgcatttctaccaggttacaggaattaactgtttgttcagaagacaatgttgatgttcatgatatagaattgttacagtatatcaatgtggattgtgcaaaattaaaacgactcctgaaggaaacagcatttaaatttaaagccctaaagaaggttgcgcagttagcagttataaatagcctggaaaaggcattttggaactgggtagaaaattatccagatgaatttacaaaactataccagatcccacagactgatatggctgaatgtgcagaaaagctatttgacttggtggatggttttgctgaaagcaccaaacgtaaagcagcagtttggccactacaaatcattctccttatcttgtgtccagaaataatccaggatatatccaaagacgtggttgatgaaaacaacatgaataagaagttatttctggacagtctacgaaaagctcttgctggccatggaggaagtaggcagctgacagaaagtgctgcaattgcctgtgtcaaactgtgtaaagcaagtacttacatcaattgggaagataactctgtcattttcctacttgttcagtccatggtggttgatcttaagaacctgctttttaatccaagtaagccattctcaagaggcagtcagcctgcagatgtggatctaatgattgactgccttgtttcttgctttcgtataagccctcacaacaaccaacactttaagatctgcctggctcagaattcaccttctacatttcactatgtgctggtaaattcactccatcgaatcatcaccaattccgcattggattggtggcctaagattgatgctgtgtattgtcactcggttgaacttcgaaatatgtttggtgaaacacttcataaagcagtgcaaggttgtggagcacacccagcaatacgaatggcaccgagtcttacatttaaagaaaaagtaacaagccttaaatttaaagaaaaacctacagacctggagacaagaagctataagtatcttctcttgtccatggtgaaactaattcatgcagatccaaagctcttgctttgtaatccaagaaaacaggggcccgaaacccaaggcagtacagcagaattaattacagggctcgtccaactggtccctcagtcacacatgccagagattgctcaggaagcaatggaggctctgctggttcttcatcagttagatagcattgatttgtggaatcctgatgctcctgtagaaacattttgggagattagctcacaaatgcttttttacatctgcaagaaattaactagtcatcaaatgcttagtagcacagaaattctcaagtggttgcgggaaatattgatctgcaggaataaatttcttcttaaaaataagcaggcagatagaagttcctgtcactttctccttttttacggggtaggatgtgatattccttctagtggaaataccagtcaaatgtccatggatcatgaagaattactacgtactcctggagcctctctccggaagggaaaagggaactcctctatggatagtgcagcaggatgcagcggaacccccccgatttgccgacaagcccagaccaaactagaagtggccctgtacatgtttctgtggaaccctgacactgaagctgttctggttgccatgtcctgtttccgccacctctgtgaggaagcagatatccggtgtggggtggatgaagtgtcagtgcataacctcttgcccaactataacacattcatggagtttgcctctgtcagcaatatgatgtcaacaggaagagcagcacttcagaaaagagtgatggcactgctgaggcgcattgagcatcccactgcaggaaacactgaggcttgggaagatacacatgcaaaatgggaacaagcaacaaagctaatccttaactatccaaaagccaaaatggaagatggccaggctgctgaaagccttcacaagaccattgttaagaggcgaatgtcccatgtgagtggaggaggatccatagatttgtctgacacagactccctacaggaatggatcaacatgactggcttcctttgtgcccttggaggagtgtgcctccagcagagaagcaattctggcctggcaacctatagcccacccatgggtccagtcagtgaacgtaagggttctatgatttcagtgatgtcttcagagggaaacgcagatacacctgtcagcaaatttatggatcggctgttgtccttaatggtgtgtaaccatgagaaagtgggacttcaaatacggaccaatgttaaggatctggtgggtctagaattgagtcctgctctgtatccaatgctatttaacaaattgaagaataccatcagcaagttttttgactcccaaggacaggttttattgactgataccaatactcaatttgtagaacaaaccatagctataatgaagaacttgctagataatcatactgaaggcagctctgaacatctagggcaagctagcattgaaacaatgatgttaaatctggtcaggtatgttcgtgtgcttgggaatatggtccatgcaattcaaataaaaacgaaactgtgtcaattagttgaagtaatgatggcaaggagagatgacctctcattttgccaagagatgaaatttaggaataagatggtagaatacctgacagactgggttatgggaacatcaaaccaagcagcagatgatgatgtaaaatgtcttacaagagatttggaccaggcaagcatggaagcagtagtttcacttctagctggtctccctctgcagcctgaagaaggagatggtgtggaattgatggaagccaaatcacagttatttcttaaatacttcacattatttatgaaccttttgaatgactgcagtgaagttgaagatgaaagtgcgcaaacaggtggcaggaaacgtggcatgtctcggaggctggcatcactgaggcactgtacggtccttgcaatgtcaaacttactcaatgccaacgtagacagtggtctcatgcactccataggcttaggttaccacaaggatctccagacaagagctacatttatggaagttctgacaaaaatccttcaacaaggcacagaatttgacacacttgcagaaacagtattggctgatcggtttgagagattggtggaactggtcacaatgatgggtgatcaaggagaactccctatagcgatggctctggccaatgtggttccttgttctcagtgggatgaactagctcgagttctggttactctgtttgattctcggcatttactctaccaactgctctggaacatgttttctaaagaagtagaattggcagactccatgcagactctcttccgaggcaacagcttggccagtaaaataatgacattctgtttcaaggtatatggtgctacctatctacaaaaactcctggatcctttattacgaattgtgatcacatcctctgattggcaacatgttagctttgaagtggatcctaccaggttagaaccatcagagagccttgaggaaaaccagcggaacctccttcagatgactgaaaagttcttccatgccatcatcagttcctcctcagaattcccccctcaacttcgaagtgtgtgccactgtttataccaggtggttagccagcgtttccctcagaacagcatcggtgcagtaggaagtgccatgttcctcagatttatcaatcctgccattgtctcaccgtatgaagcagggattttagataaaaagccaccacctagaatcgaaaggggcttgaagttaatgtcaaagatacttcagagtattgccaatcatgttctcttcacaaaagaagaacatatgcggcctttcaatgattttgtgaaaagcaactttgatgcagcacgcaggtttttccttgatatagcatctgattgtcctacaagtgatgcagtaaatcatagtctttccttcataagtgacggcaatgtgcttgctttacatcgtctactctggaacaatcaggagaaaattgggcagtatctttccagcaacagggatcataaagctgttggaagacgaccttttgataagatggcaacacttcttgcatacctgggtcctccagagcacaaacctgtggcagatacacactggtccagccttaaccttaccagttcaaagtttgaggaatttatgactaggcatcaggtacatgaaaaagaagaattcaaggctttgaaaacgttaagtattttctaccaagctgggacttccaaagctgggaatcctattttttattatgttgcacggaggttcaaaactggtcaaatcaatggtgatttgctgatataccatgtcttactgactttaaagccatattatgcaaagccatatgaaattgtagtggaccttacccataccgggcctagcaatcgctttaaaacagactttctctctaagtggtttgttgtttttcctggctttgcttacgacaacgtctccgcagtctatatctataactgtaactcctgggtcagggagtacaccaagtatcatgagcggctgctgactggcctcaaaggtagcaaaaggcttgttttcatagactgtcctgggaaactggctgagcacatagagcatgaacaacagaaactacctgctgccaccttggctttagaagaggacctgaaggtattccacaatgctctcaagctagctcacaaagacaccaaagtttctattaaagttggttctactgctgtccaagtaacttcagcagagcgaacaaaagtcctagggcaatcagtctttctaaatgacatttattatgcttcggaaattgaagaaatctgcctagtagatgagaaccagttcaccttaaccattgcaaaccagggcacgccgctcaccttcatgcaccaggagtgtgaagccattgtccagtctatcattcatatccggacccgctgggaactgtcacagcccgactctatcccccaacacaccaagattcggccaaaagatgtccctgggacactgctcaatatcgcattacttaatttaggcagttctgacccgagtttacggtcagctgcctataatcttctgtgtgccttaacttgtacctttaatttaaaaatcgagggccagttactagagacatcaggtttatgtatccctgccaacaacaccctctttattgtctctattagtaagacactggcagccaatgagccacacctcacgttagaatttttggaagagtgtatttctggatttagcaaatctagtattgaattgaaacacctttgtttggaatacatgactccatggctgtcaaatctagttcgtttttgcaagcataatgatgatgccaaacgacaaagagttactgctattcttgacaagctgataacaatgaccatcaatgaaaaacagatgtacccatctattcaagcaaaaatatggggaagccttgggcagattacagatctgcttgatgttgtactagacagtttcatcaaaaccagtgcaacaggtggcttgggatcaataaaagctgaggtgatggcagatactgctgtagctttggcttctggaaatgtgaaattggtttcaagcaaggttattggaaggatgtgcaaaataattgacaagacatgcttatctccaactcctactttagaacaacatcttatgtgggatgatattgctattttagcacgctacatgctgatgctgtccttcaacaattcccttgatgtggcagctcatcttccctacctcttccacgttgttactttcttagtagccacaggtccgctctcccttagagcttccacacatggactggtcattaatatcattcactctctgtgtacttgttcacagcttcattttagtgaagagaccaagcaagttttgagactcagtctgacagagttctcattacccaaattttacttgctgtttggcattagcaaagtcaagtcagctgctgtcattgccttccgttccagttaccgggacaggtcattctctcctggctcctatgagagagagacttttgctttgacatccttggaaacagtcacagaagctttgttggagatcatggaggcatgcatgagagatattccaacgtgcaagtggctggaccagtggacagaactagctcaaagatttgcattccaatataatccatccctgcaaccaagagctcttgttgtctttgggtgtattagcaaacgagtgtctcatgggcagataaagcagataatccgtattcttagcaaggcacttgagagttgcttaaaaggacctgacacttacaacagtcaagttctgatagaagctacagtaatagcactaaccaaattacagccacttcttaataaggactcgcctctgcacaaagccctcttttgggtagctgtggctgtgctgcagcttgatgaggtcaacttgtattcagcaggtaccgcacttcttgaacaaaacctgcatactttagatagtctccgtatattcaatgacaagagtccagaggaagtatttatggcaatccggaatcctctggagtggcactgcaagcaaatggatcattttgttggactcaatttcaactctaactttaactttgcattggttggacaccttttaaaagggtacaggcatccttcacctgctattgttgcaagaacagtcagaattttacatacactactaactctggttaacaaacacagaaattgtgacaaatttgaagtgaatacacagagcgtggcctacttagcagctttacttacagtgtctgaagaagttcgaagtcgctgcagcctaaaacatagaaagtcacttcttcttactgatatttcaatggaaaatgttcctatggatacatatcccattcatcatggtgacccttcctataggacactaaaggagactcagccatggtcctctcccaaaggttctgaaggataccttgcagccacctatccaactgtcggccagaccagtccccgagccaggaaatccatgagcctggacatggggcaaccttctcaggccaacactaagaagttgcttggaacaaggaaaagttttgatcacttgatatcagacacaaaggctcctaaaaggcaagaaatggaatcagggatcacaacaccccccaaaatgaggagagtagcagaaactgattatgaaatggaaactcagaggatttcctcatcacaacagcacccacatttacgtaaagtttcagtgtctgaatcaaatgttctcttggatgaagaagtacttactgatccgaagatccaggcgctgcttcttactgttctagctacactggtaaaatataccacagatgagtttgatcaacgaattctttatgaatacttagcagaggccagtgttgtgtttcccaaagtctttcctgttgtgcataatttgttggactctaagatcaacaccctgttatcattgtgccaagatccaaatttgttaaatccaatccatggaattgtgcagagtgtggtgtaccatgaagaatccccaccacaataccaaacatcttacctgcaaagttttggttttaatggcttgtggcggtttgcaggaccgttttcaaagcaaacacaaattccagactatgctgagcttattgttaagtttcttgatgccttgattgacacgtacctgcctggaattgatgaagaaaccagtgaagaatccctcctgactcccacatctccttaccctcctgcactgcagagccagcttagtatcactgccaaccttaacctttctaattccatgacctcacttgcaacttcccagcattccccagcttctctgccttgctctaantcagcagttttcatgcagctgttccctcatcaaggaatcgacaaggagaacgttgaactctcccctaccactggccactgtaacagtggacgaactcgccacggatccgcaagccaagtgcagaagcaaagaagcgctggcagtttcaaacgtaatagcattaagaagatcgtgtgaagcttgcttgctttcttttttaaaatcaacttaacatgggctcttcactagtgaccccttccctgtccttgccctttccccccatgttgtaatgctgcacttcctgttttataatgaacccatccggtttgccatgttgccagatgatcaactcttcgaagccttgcctaaatttaatgctgccttttctttaactttttttcttctacttttggcgtgtatctggtatatgtaagtgttcagaacaactgcaaagaaagtgggaggtcaggaaacttttaactgagaaatctcaattgtaagagaggatgaattcttgaatactgctactactggccagtgatgaaagccatttgcacagagctctgccttctgtggttttcccttcttcatcctacagagtaaagtgttagtcctatttatacatttttcaagatacaagtttatgagagaaatagtattataaccccagtatgtttaatcttttagctgtggactttttttttaaccgtacaaaactgaaagaaccatagaggtcaagcctcagtgacttgacaccataaagccacagacaaggtacttgggggggagggcagggaaatttcatattttatagtggattcttaagaaatactaacacttgagtattagcaataattacaggaaaataagtgcgaccacatatatcttaacattactgaattaaaactatggcttctaagtccttatccaaactcagtcatccaaactagtttatttttttctccagttgattatcttttaatttttaattttgctaaaggtggtttttttgtgttttgttttttgtaaaccaaaactatactaagtatagtaattatatatatatatatattttttcccctccccctcttctttcctaactaattctgagcagggtaatcagtgaacaaagtgttgaaaattgttcccagaaggtaattttcatagatgtttgcattagctccatagcaaaatggaatggtacgtgacatttagggtagctgatatttttattttgttaaataatttccaagaatagagtatggtgtatattataaatttctttgataagatgtattttgaatgtcttttaatcttcctcctcctctccaaaaaaatcagaaacctctttaagaaaacatgtaggttatatatgctagaattgcatttaatcactgtgaaaagactggtcagcctgcattagtatgacagtaggggggctgttagaattgctgctatactggtggtatggattatcatggcattggaattttcatagtaatgcagatccaatttctttgtggtacctgcagtttacaaaataatttgacttcagtgagcatattggtatctggatgttccaatttagaactaaaccatatttattacaaaaagatattaatccctctactcccaggttccctttatatgttaagatataatggctttgaggggggaaaaaataaacctaggggagaggggagtttcctgtagtgctgtttcattagaggatttcagtaaattaaattccacagctaattcaataaataatggtacatttaagtgttctgattttaataatatatttcacatttatccacacagtaacaatgtaatatgttaatgtaaataaaattggttttgatactcagaaataacaagaatttaattttttaaatttgtttacagtcctgggaaaagtaagaattatttgccaaaataagaggaaagaaaaccttagtattattaatgagtttaccatagaattgttggaaatactgaagacaggtgcaatttactaaacttttgtttttaaactattgtagaggctgcattagaagaaaatgtttataatgacagagcaactatgactatataaaaaagctgaaattagaactgtgtttagaaatagatcagtaacccagtgccaaggatgccaagctgccaccatggtcttggctctcccacaacccagtgtttctggggtaagtttcacagtttctaggccctggaatagcaggcagtgtaagcctttgataactttagttcgatgtttttcttgtttttgtttgttggtttggtgcatatgatagtgggtgttatgctattttgctcttcccatcaaaataaagaaacttccagaggtttactgttaaaaatactgatatttccataaacgggtttaccaagggtgtagtatttcataccgcctgaaatgatcagcattggcacaaatcaaaattcagccgcctttgaaatgcaaaaatacctttgactagtaagtacatcctaggagtttgaaaacttaactaaggtttaaaatttaccttgtttaaagaacttctgacttttgaggaaaatctagctttccaagtaactaaaatgtacatgagataaacctctcaccactatgtgtcccttgagaaatgcaacacttttttagtcttcatacttgtaatctataaaagaaattctgaagtttagaccaagttgcccatttctgcgtaattgacataagttctgttaaaaatattataagtaattcgtttcggtttgtagatgtttcccctgacttgttaaagaggaaaccaggaactcagtcatgtttttgtcctggataatctacctgttatgccagtactcccatccgaggggcatgcccttagttgcccagatggagatgcagttcagtagatttggggcaaagtggctacagctctgtcttccattcactcaacacctgttcatgactgagccaggtgcccaggacacatcctaaacagtcagcttctatcctgtgtcctagtcggggagacagagtgccagccagcaaccctcccaggtttgtaggttttaggggttttcagttttgtttgggttttttgttttttgtttttgtttctacatccttccccgactcccaggcataatgaggcatgtcttactcaatgttatgcaatggatttaggcaaaaattcattcttagtgtcagccacacaattttttttaatgcagtatattcacctgtaaatagtttgtgtaaaatttgacaaaaaaagtatatttactatactgtaaatatatgtgatgatatattgtattattttgcttttttgtaaagcagttagttgctgcacatggataacaacaaaaatttgattattctcgtgttagtattgttaacttctttttgcgactgcgttacatcatttaaagaaaatgctgtgtattgtaaacttaaattgtatatgataacttactgtcctttccatccgggcctaaactttggcagttcctttgtctacaaccttgttaatactgtaaacagttgtacgccagcaggaaaaatactgcccaacagacaaaatcgatcattgtaggggaaaatcatagaaatccatttcagatctttattgttcctcaccccattttcctccttgtgtatgtacttcccccacccccctttttttaagtaaaatgtaaattcaatctgctctaag

SEQ ID NO: 381160 - DNA, 5846 bp, Homo sapiens
agcagcaagagattaccatactggttaagagtgacaagaagttgaaaagacagtttaaaataaagttaaagggaaacataggagttaatgtaggtagagagaaagggagagagctgcacaagaatgccaggacaatggagggaaggtgggtagaacattctagttgtaatggagaagcttttcaaaggaatcgagagagggaaagttgtgaggactggatagacctcatctcacattcagcattgttcaaaagagtttggaaatgtacagtttttaagcagacaagtcatacgatgaaagcaggacttagctcctggtggtagtgtgcacagtggattggagtagggagaaactgaagtaaaaagaatccacctttataataaagaaggttggcatgtggtaatgtcattagcaataagaaagaaatgacaaaagatacaaaagagactactctagaagaatcaacaaaccttggtgactggatttagaaatcaaagaacagggagaagtcaaaggaggtgctaagtaacgttctcagtccagctaacagtgtctttagttatacatatggaaaagtgaagagcttactcatatctttatcttccccaaaagagaaaacatgggtaatttaggaagataagctgctttatttttaactgcagtgtgttttgaaagagactatgtcatgattcatcttactagcctcaaacatatcttctttgccaggactcgcctctgcacaaagccctcttttgggtagctgtggctgtgctgcagcttgatgaggtcaacttgtattcagcaggtaccgcacttcttgaacaaaacctgcatactttagatagtctccgtatattcaatgacaagagtccagaggaagtatttatggcaatccggaatcctctggagtggcactgcaagcaaatggatcattttgttggactcaatttcaactctaactttaactttgcattggttggacaccttttaaaagggtacaggcatccttcacctgctattgttgcaagaacagtcagaattttacatacactactaactctggttaacaaacacagaaattgtgacaaatttgaagtgaatacacagagcgtggcctacttagcagctttacttacagtgtctgaagaagttcgaagtcgctgcagcctaaaacatagaaagtcacttcttcttactgatatttcaatggaaaatgttcctatggatacatatcccattcatcatggtgacccttcctataggacactaaaggagactcagccatggtcctctcccaaaggttctgaaggataccttgcagccacctatccaactgtcggccagaccagtccccgagccaggaaatccatgagcctggacatggggcaaccttctcaggccaacactaagaagttgcttggaacaaggaaaagttttgatcacttgatatcagacacaaaggctcctaaaaggcaagaaatggaatcagggatcacaacaccccccaaaatgaggagagtagcagaaactgattatgaaatggaaactcagaggatttcctcatcacaacagcacccacatttacgtaaagtttcagtgtctgaatcaaatgttctcttggatgaagaagtacttactgatccgaagatccaggcgctgcttcttactgttctagctacactggtaaaatataccacagatgagtttgatcaacgaattctttatgaatacttagcagaggccagtgttgtgtttcccaaagtctttcctgttgtgcataatttgttggactctaagatcaacaccctgttatcattgtgccaagatccaaatttgttaaatccaatccatggaattgtgcagagtgtggtgtaccatgaagaatccccaccacaataccaaacatcttacctgcaaagttttggttttaatggcttgtggcggtttgcaggaccgttttcaaagcaaacacaaattccagactatgctgagcttattgttaagtttcttgatgccttgattgacacgtacctgcctggaattgatgaagaaaccagtgaagaatccctcctgactcccacatctccttaccctcctgcactgcagagccagcttagtatcactgccaaccttaacctttctaattccatgacctcacttgcaacttcccagcattccccaggaatcgacaaggagaacgttgaactctcccctaccactggccactgtaacagtggacgaactcgccacggatccgcaagccaagtgcagaagcaaagaagcgctggcagtttcaaacgtaatagcattaagaagatcgtgtgaagcttgcttgctttcttttttaaaatcaacttaacatgggctcttcactagtgaccccttccctgtccttgccctttccccccatgttgtaatgctgcacttcctgttttataatgaacccatccggtttgccatgttgccagatgatcaactcttcgaagccttgcctaaatttaatgctgccttttctttaactttttttcttctacttttggcgtgtatctggtatatgtaagtgttcagaacaactgcaaagaaagtgggaggtcaggaaacttttaactgagaaatctcaattgtaagagaggatgaattcttgaatactgctactactggccagtgatgaaagccatttgcacagagctctgccttctgtggttttcccttcttcatcctacagagtaaagtgttagtcctatttatacatttttcaagatacaagtttatgagagaaatagtattataaccccagtatgtttaatcttttagctgtggactttttttttaaccgtacaaaactgaaagaaccatagaggtcaagcctcagtgacttgacaccataaagccacagacaaggtacttgggggggagggcagggaaatttcatattttatagtggattcttaagaaatactaacacttgagtattagcaataattacaggaaaataagtgcgaccacatatatcttaacattactgaattaaaactatggcttctaagtccttatccaaactcagtcatccaaactagtttatttttttctccagttgattatcttttaatttttaattttgctaaaggtggtttttttgtgttttgttttttgtaaaccaaaactatactaagtatagtaattatatatatatatatattttttcccctccccctcttctttcctaactaattctgagcagggtaatcagtgaacaaagtgttgaaaattgttcccagaaggtaattttcatagatgtttgcattagctccatagcaaaatggaatggtacgtgacatttagggtagctgatatttttattttgttaaataatttccaagaatagagtatggtgtatattataaatttctttgataagatgtattttgaatgtcttttaatcttcctcctcctctccaaaaaaatcagaaacctctttaagaaaacatgtaggttatatatgctagaattgcatttaatcactgtgaaaagactggtcagcctgcattagtatgacagtaggggggctgttagaattgctgctatactggtggtatggattatcatggcattggaattttcatagtaatgcagatccaatttctttgtggtacctgcagtttacaaaataatttgacttcagtgagcatattggtatctggatgttccaatttagaactaaaccatatttattacaaaaagatattaatccctctactcccaggttccctttatatgttaagatataatggctttgaggggggaaaaaataaacctaggggagaggggagtttcctgtagtgctgtttcattagaggatttcagtaaattaaattccacagctaattcaataaataatggtacatttaagtgttctgattttaataatatatttcacatttatccacacagtaacaatgtaatatgttaatgtaaataaaattggttttgatactcagaaataacaagaatttaattttttaaatttgtttacagtcctgggaaaagtaagaattatttgccaaaataagaggaaagaaaaccttagtattattaatgagtttaccatagaattgttggaaatactgaagacaggtgcaatttactaaacttttgtttttaaactattgtagaggctgcattagaagaaaatgtttataatgacagagcaactatgactatataaaaaagctgaaattagaactgtgtttagaaatagatcagtaacccagtgccaaggatgccaagctgccaccatggtcttggctctcccacaacccagtgtttctggggtaagtttcacagtttctaggccctggaatagcaggcagtgtaagcctttgataactttagttcgatgtttttcttgtttttgtttgttggtttggtgcatatgatagtgggtgttatgctattttgctcttcccatcaaaataaagaaacttccagaggtttactgttaaaaatactgatatttccataaacgggtttaccaagggtgtagtatttcataccgcctgaaatgatcagcattggcacaaatcaaaattcagccgcctttgaaatgcaaaaatacctttgactagtaagtacatcctaggagtttgaaaacttaactaaggtttaaaatttaccttgtttaaagaacttctgacttttgaggaaaatctagctttccaagtaactaaaatgtacatgagataaacctctcaccactatgtgtcccttgagaaatgcaacacttttttagtcttcatacttgtaatctataaaagaaattctgaagtttagaccaagttgcccatttctgcgtaattgacataagttctgttaaaaatattataagtaattcgtttcggtttgtagatgtttcccctgacttgttaaagaggaaaccaggaactcagtcatgtttttgtcctggataatctacctgttatgccagtactcccatccgaggggcatgcccttagttgcccagatggagatgcagttcagtagatttggggcaaagtggctacagctctgtcttccattcactcaacacctgttcatgactgagccaggtgcccaggacacatcctaaacagtcagcttctatcctgtgtcctagtcggggagacagagtgccagccagcaaccctcccaggtttgtaggttttaggggttttcagttttgtttgggttttttgttttttgtttttgtttctacatccttccccgactcccaggcataatgaggcatgtcttactcaatgttatgcaatggatttaggcaaaaattcattcttagtgtcagccacacaattttttttaatgcagtatattcacctgtaaatagtttgtgtaaaatttgacaaaaaaagtatatttactatactgtaaatatatgtgatgatatattgtattattttgcttttttgtaaagcagttagttgctgcacatggataacaacaaaaatttgattattctcgtgttagtattgttaacttctttttgcgactgcgttacatcatttaaagaaaatgctgtgtattgtaaacttaaattgtatatgataacttactgtcctttccatccgggcctaaactttggcagttcctttgtctacaaccttgttaatactgtaaacagttgtacgccagcaggaaaaatactgcccaacagacaaaatcgatcattgtaggggaaaatcatagaaatccatttcagatctttattgttcctcaccccattttcctccttgtgtatgtacttcccccacccccctttttttaagtaaaatgtaaattcaatctgctctaag

SEQ ID NO: 381161 - DNA, 9148 bp, Homo sapiens
aatctctagctcgctcgcgctccctctccccgggccgtggaaaggatcccacttccggtggggtgtcatggcggcgtctcggactgtgatggctgtggggagacggcgctagtggggagagcgaccaagaggccccctcccctccccgggtccccttcccctatccccctccccccagcctccttgccaacgccccctttccctctccccctcccgctcggcgctgaccccccatccccacccccgtgggaacactgggagcctgcactccacagaccctctccttgcctcttccctcacctcagcctccgctccccgccctcttcccggcccagggcgccggcccacccttccctccgccgccccccggccgcggggaggacatggccgcgcacaggccggtggaatgggtccaggccgtggtcagccgcttcgacgagcagcttccaataaaaacaggacagcagaacacacataccaaagtcagtactgagcacaacaaggaatgtctaatcaatatttccaaatacaagttttctttggttataagcggcctcactactattttaaagaatgttaacaatatgagaatatttggagaagctgctgaaaaaaatttatatctctctcagttgattatattggatacactggaaaaatgtcttgctgggcaaccaaaggacacaatgagattagatgaaacgatgctggtcaaacagttgctgccagaaatctgccattttcttcacacctgtcgtgaaggaaaccagcatgcagctgaacttcggaattctgcctctggggttttattttctctcagctgcaacaacttcaatgcagtctttagtcgcatttctaccaggttacaggaattaactgtttgttcagaagacaatgttgatgttcatgatatagaattgttacagtatatcaatgtggattgtgcaaaattaaaacgactcctgaaggaaacagcatttaaatttaaagccctaaagaaggttgcgcagttagcagttataaatagcctggaaaaggcattttggaactgggtagaaaattatccagatgaatttacaaaactataccagatcccacagactgatatggctgaatgtgcagaaaagctatttgacttggtggatggttttgctgaaagcaccaaacgtaaagcagcagtttggccactacaaatcattctccttatcttgtgtccagaaataatccaggatatatccaaagacgtggttgatgaaaacaacatgaataagaagttatttctggacagtctacgaaaagctcttgctggccatggaggaagtaggcagctgacagaaagtgctgcaattgcctgtgtcaaactgtgtaaagcaagtacttacatcaattgggaagataactctgtcattttcctacttgttcagtccatggtggttgatcttaagaacctgctttttaatccaagtaagccattctcaagaggcagtcagcctgcagatgtggatctaatgattgactgccttgtttcttgctttcgtataagccctcacaacaaccaacactttaagatctgcctggctcagaattcaccttctacatttcactatgtgctggtaaattcactccatcgaatcatcaccaattccgcattggattggtggcctaagattgatgctgtgtattgtcactcggttgaacttcgaaatatgtttggtgaaacacttcataaagcagtgcaaggttgtggagcacacccagcaatacgaatggcaccgagtcttacatttaaagaaaaagtaacaagccttaaatttaaagaaaaacctacagacctggagacaagaagctataagtatcttctcttgtccatggtgaaactaattcatgcagatccaaagctcttgctttgtaatccaagaaaacaggggcccgaaacccaaggcagtacagcagaattaattacagggctcgtccaactggtccctcagtcacacatgccagagattgctcaggaagcaatggaggctctgctggttcttcatcagttagatagcattgatttgtggaatcctgatgctcctgtagaaacattttgggagattagctcacaaatgcttttttacatctgcaagaaattaactagtcatcaaatgcttagtagcacagaaattctcaagtggttgcgggaaatattgatctgcaggaataaatttcttcttaaaaataagcaggcagatagaagttcctgtcactttctccttttttacggggtaggatgtgatattccttctagtggaaataccagtcaaatgtccatggatcatgaagaattactacgtactcctggagcctctctccggaagggaaaagggaactcctctatggatagtgcagcaggatgcagcggaacccccccgatttgccgacaagcccagaccaaactagaagtggccctgtacatgtttctgtggaaccctgacactgaagctgttctggttgccatgtcctgtttccgccacctctgtgaggaagcagatatccggtgtggggtggatgaagtgtcagtgcataacctcttgcccaactataacacattcatggagtttgcctctgtcagcaatatgatgtcaacaggaagagcagcacttcagaaaagagtgatggcactgctgaggcgcattgagcatcccactgcaggaaacactgaggcttgggaagatacacatgcaaaatgggaacaagcaacaaagctaatccttaactatccaaaagccaaaatggaagatggccaggctgctgaaagccttcacaagaccattgttaagaggcgaatgtcccatgtgagtggaggaggatccatagatttgtctgacacagactccctacaggaatggatcaacatgactggcttcctttgtgcccttggaggagtgtgcctccagcagagaagcaattctggcctggcaacctatagcccacccatgggtccagtcagtgaacgtaagggttctatgatttcagtgatgtcttcagagggaaacgcagatacacctgtcagcaaatttatggatcggctgttgtccttaatggtgtgtaaccatgagaaagtgggacttcaaatacggaccaatgttaaggatctggtgggtctagaattgagtcctgctctgtatccaatgctatttaacaaattgaagaataccatcagcaagttttttgactcccaaggacaggttttattgactgataccaatactcaatttgtagaacaaaccatagctataatgaagaacttgctagataatcatactgaaggcagctctgaacatctagggcaagctagcattgaaacaatgatgttaaatctggtcaggtatgttcgtgtgcttgggaatatggtccatgcaattcaaataaaaacgaaactgtgtcaattagttgaagtaatgatggcaaggagagatgacctctcattttgccaagagatgaaatttaggaataagatggtagaatacctgacagactgggttatgggaacatcaaaccaagcagcagatgatgatgtaaaatgtcttacaagagatttggaccaggcaagcatggaagcagtagtttcacttctagctggtctccctctgcagcctgaagaaggagatggtgtggaattgatggaagccaaatcacagttatttcttaaatacttcacattatttatgaaccttttgaatgactgcagtgaagttgaagatgaaagtgcgcaaacaggtggcaggaaacgtggcatgtctcggaggctggcatcactgaggcactgtacggtccttgcaatgtcaaacttactcaatgccaacgtagacagtggtctcatgcactccataggcttaggttaccacaaggatctccagacaagagctacatttatggaagttctgacaaaaatccttcaacaaggcacagaatttgacacacttgcagaaacagtattggctgatcggtttgagagattggtggaactggtcacaatgatgggtgatcaaggagaactccctatagcgatggctctggccaatgtggttccttgttctcagtgggatgaactagctcgagttctggttactctgtttgattctcggcatttactctaccaactgctctggaacatgttttctaaagaagtagaattggcagactccatgcagactctcttccgaggcaacagcttggccagtaaaataatgacattctgtttcaaggtatatggtgctacctatctacaaaaactcctggatcctttattacgaattgtgatcacatcctctgattggcaacatgttagctttgaagtggatcctaccaggttagaaccatcagagagccttgaggaaaaccagcggaacctccttcagatgactgaaaagttcttccatgccatcatcagttcctcctcagaattcccccctcaacttcgaagtgtgtgccactgtttataccaggcaacttgccactccctactgaataaagctacagtaaaagaaaaaaaggaaaacaaaaaatcagtggttagccagcgtttccctcagaacagcatcggtgcagtaggaagtgccatgttcctcagatttatcaatcctgccattgtctcaccgtatgaagcagggattttagataaaaagccaccacctagaatcgaaaggggcttgaagttaatgtcaaagatacttcagagtattgccaatcatgttctcttcacaaaagaagaacatatgcggcctttcaatgattttgtgaaaagcaactttgatgcagcacgcaggtttttccttgatatagcatctgattgtcctacaagtgatgcagtaaatcatagtctttccttcataagtgacggcaatgtgcttgctttacatcgtctactctggaacaatcaggagaaaattgggcagtatctttccagcaacagggatcataaagctgttggaagacgaccttttgataagatggcaacacttcttgcatacctgggtcctccagagcacaaacctgtggcagatacacactggtccagccttaaccttaccagttcaaagtttgaggaatttatgactaggcatcaggtacatgaaaaagaagaattcaaggctttgaaaacgttaagtattttctaccaagctgggacttccaaagctgggaatcctattttttattatgttgcacggaggttcaaaactggtcaaatcaatggtgatttgctgatataccatgtcttactgactttaaagccatattatgcaaagccatatgaaattgtagtggaccttacccataccgggcctagcaatcgctttaaaacagactttctctctaagtggtttgttgtttttcctggctttgcttacgacaacgtctccgcagtctatatctataactgtaactcctgggtcagggagtacaccaagtatcatgagcggctgctgactggcctcaaaggtagcaaaaggcttgttttcatagactgtcctgggaaactggctgagcacatagagcatgaacaacagaaactacctgctgccaccttggctttagaagaggacctgaaggtattccacaatgctctcaagctagctcacaaagacaccaaagtttctattaaagttggttctactgctgtccaagtaacttcagcagagcgaacaaaagtcctagggcaatcagtctttctaaatgacatttattatgcttcggaaattgaagaaatctgcctagtagatgagaaccagttcaccttaaccattgcaaaccagggcacgccgctcaccttcatgcaccaggagtgtgaagccattgtccagtctatcattcatatccggacccgctgggaactgtcacagcccgactctatcccccaacacaccaagattcggccaaaagatgtccctgggacactgctcaatatcgcattacttaatttaggcagttctgacccgagtttacggtcagctgcctataatcttctgtgtgccttaacttgtacctttaatttaaaaatcgagggccagttactagagacatcaggtttatgtatccctgccaacaacaccctctttattgtctctattagtaagacactggcagccaatgagccacacctcacgttagaatttttggaagagtgtatttctggatttagcaaatctagtattgaattgaaacacctttgtttggaatacatgactccatggctgtcaaatctagttcgtttttgcaagcataatgatgatgccaaacgacaaagagttactgctattcttgacaagctgataacaatgaccatcaatgaaaaacagatgtacccatctattcaagcaaaaatatggggaagccttgggcagattacagatctgcttgatgttgtactagacagtttcatcaaaaccagtgcaacaggtggcttgggatcaataaaagctgaggtgatggcagatactgctgtagctttggcttctggaaatgtgaaattggtttcaagcaaggttattggaaggatgtgcaaaataattgacaagacatgcttatctccaactcctactttagaacaacatcttatgtgggatgatattgctattttagcacgctacatgctgatgctgtccttcaacaattcccttgatgtggcagctcatcttccctacctcttccacgttgttactttcttagtagccacaggtccgctctcccttagagcttccacacatggactggtcattaatatcattcactctctgtgtacttgttcacagcttcattttagtgaagagaccaagcaagttttgagactcagtctgacagagttctcattacccaaattttacttgctgtttggcattagcaaagtcaagtcagctgctgtcattgccttccgttccagttaccgggacaggtcattctctcctggctcctatgagagagagacttttgctttgacatccttggaaacagtcacagaagctttgttggagatcatggaggcatgcatgagagatattccaacgtgcaagtggctggaccagtggacagaactagctcaaagatttgcattccaatataatccatccctgcaaccaagagctcttgttgtctttgggtgtattagcaaacgagtgtctcatgggcagataaagcagataatccgtattcttagcaaggcacttgagagttgcttaaaaggacctgacacttacaacagtcaagttctgatagaagctacagtaatagcactaaccaaattacagccacttcttaataaggactcgcctctgcacaaagccctcttttgggtagctgtggctgtgctgcagcttgatgaggtcaacttgtattcagcaggtaccgcacttcttgaacaaaacctgcatactttagatagtctccgtatattcaatgacaagagtccagaggaagtatttatggcaatccggaatcctctggagtggcactgcaagcaaatggatcattttgttggactcaatttcaactctaactttaactttgcattggttggacaccttttaaaagggtacaggcatccttcacctgctattgttgcaagaacagtcagaattttacatacactactaactctggttaacaaacacagaaattgtgacaaatttgaagtgaatacacagagcgtggcctacttagcagctttacttacagtgtctgaagaagttcgaagtcgctgcagcctaaaacatagaaagtcacttcttcttactgatatttcaatggaaaatgttcctatggatacatatcccattcatcatggtgacccttcctataggacactaaaggagactcagccatggtcctctcccaaaggttctgaaggataccttgcagccacctatccaactgtcggccagaccagtccccgagccaggaaatccatgagcctggacatggggcaaccttctcaggccaacactaagaagttgcttggaacaaggaaaagttttgatcacttgatatcagacacaaaggctcctaaaaggcaagaaatggaatcagggatcacaacaccccccaaaatgaggagagtagcagaaactgattatgaaatggaaactcagaggatttcctcatcacaacagcacccacatttacgtaaagtttcagtgtctgaatcaaatgttctcttggatgaagaagtacttactgatccgaagatccaggcgctgcttcttactgttctagctacactggtaaaatataccacagatgagtttgatcaacgaattctttatgaatacttagcagaggccagtgttgtgtttcccaaagtctttcctgttgtgcataatttgttggactctaagatcaacaccctgttatcattgtgccaagatccaaatttgttaaatccaatccatggaattgtgcagagtgtggtgtaccatgaagaatccccaccacaataccaaacatcttacctgcaaagttttggttttaatggcttgtggcggtttgcaggaccgttttcaaagcaaacacaaattccagactatgctgagcttattgttaagtttcttgatgccttgattgacacgtacctgcctggaattgatgaagaaaccagtgaagaatccctcctgactcccacatctccttaccctcctgcactgcagagccagcttagtatcactgccaaccttaacctttctaattccatgacctcacttgcaacttcccagcattccccaggtcagtaaatgtgatctttatatgactttgagcaacaatataagacaccaacattaggaattcccttgtgatcagtttatagcaaattttgctcctttttcttatgagattcaccttacatttcttctttaccttgtaactgacttgacttttgttattctatgaagctttctactttcaaacaagttgtacataagacagtaaaatgttaaaatgtccacatgatattccaaggttgacaagtttgtagagtttgggcaggaagaggaacttaaaacacattattctgtaagtgaacagaactataatttatttactagatatactaacattgccctaagggcctctttctctgtctctgatacagcatactatatcaaaaaaaaaa

SEQ ID NO: 381162 - DNA, 7648 bp, Homo sapiens
aatctctagctcgctcgcgctccctctccccgggccgtggaaaggatcccacttccggtggggtgtcatggcggcgtctcggactgtgatggctgtggggagacggcgctagtggggagagcgaccaagaggccccctcccctccccgggtccccttcccctatccccctccccccagcctccttgccaacgccccctttccctctccccctcccgctcggcgctgaccccccatccccacccccgtgggaacactgggagcctgcactccacagaccctctccttgcctcttccctcacctcagcctccgctccccgccctcttcccggcccagggcgccggcccacccttccctccgccgccccccggccgcggggaggacatggccgcgcacaggccggtggaatgggtccaggccgtggtcagccgcttcgacgagcagcttccaataaaaacaggacagcagaacacacataccaaagtcagtactgagcacaacaaggaatgtctaatcaatatttccaaatacaagttttctttggttataagcggcctcactactattttaaagaatgttaacaatatgagaatatttggagaagctgctgaaaaaaatttatatctctctcagttgattatattggatacactggaaaaatgtcttgctgggcaaccaaaggacacaatgagattagatgaaacgatgctggtcaaacagttgctgccagaaatctgccattttcttcacacctgtcgtgaaggaaaccagcatgcagctgaacttcggaattctgcctctggggttttattttctctcagctgcaacaacttcaatgcagtctttagtcgcatttctaccaggttacaggaattaactgtttgttcagaagacaatgttgatgttcatgatatagaattgttacagtatatcaatgtggattgtgcaaaattaaaacgactcctgaaggaaacagcatttaaatttaaagccctaaagaaggttgcgcagttagcagttataaatagcctggaaaaggcattttggaactgggtagaaaattatccagatgaatttacaaaactataccagatcccacagactgatatggctgaatgtgcagaaaagctatttgacttggtggatggttttgctgaaagcaccaaacgtaaagcagcagtttggccactacaaatcattctccttatcttgtgtccagaaataatccaggatatatccaaagacgtggttgatgaaaacaacatgaataagaagttatttctggacagtctacgaaaagctcttgctggccatggaggaagtaggcagctgacagaaagtgctgcaattgcctgtgtcaaactgtgtaaagcaagtacttacatcaattgggaagataactctgtcattttcctacttgttcagtccatggtggttgatcttaagaacctgctttttaatccaagtaagccattctcaagaggcagtcagcctgcagatgtggatctaatgattgactgccttgtttcttgctttcgtataagccctcacaacaaccaacactttaagatctgcctggctcagaattcaccttctacatttcactatgtgctggtaaattcactccatcgaatcatcaccaattccgcattggattggtggcctaagattgatgctgtgtattgtcactcggttgaacttcgaaatatgtttggtgaaacacttcataaagcagtgcaaggttgtggagcacacccagcaatacgaatggcaccgagtcttacatttaaagaaaaagtaacaagccttaaatttaaagaaaaacctacagacctggagacaagaagctataagtatcttctcttgtccatggtgaaactaattcatgcagatccaaagctcttgctttgtaatccaagaaaacaggggcccgaaacccaaggcagtacagcagaattaattacagggctcgtccaactggtccctcagtcacacatgccagagattgctcaggaagcaatggaggctctgctggttcttcatcagttagatagcattgatttgtggaatcctgatgctcctgtagaaacattttgggagattagctcacaaatgcttttttacatctgcaagaaattaactagtcatcaaatgcttagtagcacagaaattctcaagtggttgcgggaaatattgatctgcaggaataaatttcttcttaaaaataagcaggcagatagaagttcctgtcactttctccttttttacggggtaggatgtgatattccttctagtggaaataccagtcaaatgtccatggatcatgaagaattactacgtactcctggagcctctctccggaagggaaaagggaactcctctatggatagtgcagcaggatgcagcggaacccccccgatttgccgacaagcccagaccaaactagaagtggccctgtacatgtttctgtggaaccctgacactgaagctgttctggttgccatgtcctgtttccgccacctctgtgaggaagcagatatccggtgtggggtggatgaagtgtcagtgcataacctcttgcccaactataacacattcatggagtttgcctctgtcagcaatatgatgtcaacaggaagagcagcacttcagaaaagagtgatggcactgctgaggcgcattgagcatcccactgcaggaaacactgaggcttgggaagatacacatgcaaaatgggaacaagcaacaaagctaatccttaactatccaaaagccaaaatggaagatggccaggctgctgaaagccttcacaagaccattgttaagaggcgaatgtcccatgtgagtggaggaggatccatagatttgtctgacacagactccctacaggaatggatcaacatgactggcttcctttgtgcccttggaggagtgtgcctccagcagagaagcaattctggcctggcaacctatagcccacccatgggtccagtcagtgaacgtaagggttctatgatttcagtgatgtcttcagagggaaacgcagatacacctgtcagcaaatttatggatcggctgttgtccttaatggtgtgtaaccatgagaaagtgggacttcaaatacggaccaatgttaaggatctggtgggtctagaattgagtcctgctctgtatccaatgctatttaacaaattgaagaataccatcagcaagttttttgactcccaaggacaggttttattgactgataccaatactcaatttgtagaacaaaccatagctataatgaagaacttgctagataatcatactgaaggcagctctgaacatctagggcaagctagcattgaaacaatgatgttaaatctggtcaggtatgttcgtgtgcttgggaatatggtccatgcaattcaaataaaaacgaaactgtgtcaattagttgaagtaatgatggcaaggagagatgacctctcattttgccaagagatgaaatttaggaataagatggtagaatacctgacagactgggttatgggaacatcaaaccaagcagcagatgatgatgtaaaatgtcttacaagagatttggaccaggcaagcatggaagcagtagtttcacttctagctggtctccctctgcagcctgaagaaggagatggtgtggaattgatggaagccaaatcacagttatttcttaaatacttcacattatttatgaaccttttgaatgactgcagtgaagttgaagatgaaagtgcgcaaacaggtggcaggaaacgtggcatgtctcggaggctggcatcactgaggcactgtacggtccttgcaatgtcaaacttactcaatgccaacgtagacagtggtctcatgcactccataggcttaggttaccacaaggatctccagacaagagctacatttatggaagttctgacaaaaatccttcaacaaggcacagaatttgacacacttgcagaaacagtattggctgatcggtttgagagattggtggaactggtcacaatgatgggtgatcaaggagaactccctatagcgatggctctggccaatgtggttccttgttctcagtgggatgaactagctcgagttctggttactctgtttgattctcggcatttactctaccaactgctctggaacatgttttctaaagaagtagaattggcagactccatgcagactctcttccgaggcaacagcttggccagtaaaataatgacattctgtttcaaggtatatggtgctacctatctacaaaaactcctggatcctttattacgaattgtgatcacatcctctgattggcaacatgttagctttgaagtggatcctaccaggttagaaccatcagagagccttgaggaaaaccagcggaacctccttcagatgactgaaaagttcttccatgccatcatcagttcctcctcagaattcccccctcaacttcgaagtgtgtgccactgtttataccaggcaacttgccactccctactgaataaagctacagtaaaagaaaaaaaggaaaacaaaaaatcagtggttagccagcgtttccctcagaacagcatcggtgcagtaggaagtgccatgttcctcagatttatcaatcctgccattgtctcaccgtatgaagcagggattttagataaaaagccaccacctagaatcgaaaggggcttgaagttaatgtcaaagatacttcagagtattgccaatcatgttctcttcacaaaagaagaacatatgcggcctttcaatgattttgtgaaaagcaactttgatgcagcacgcaggtttttccttgatatagcatctgattgtcctacaagtgatgcagtaaatcatagtctttccttcataagtgacggcaatgtgcttgctttacatcgtctactctggaacaatcaggagaaaattgggcagtatctttccagcaacagggatcataaagctgttggaagacgaccttttgataagatggcaacacttcttgcatacctgggtcctccagagcacaaacctgtggcagatacacactggtccagccttaaccttaccagttcaaagtttgaggaatttatgactaggcatcaggtacatgaaaaagaagaattcaaggctttgaaaacgttaagtattttctaccaagctgggacttccaaagctgggaatcctattttttattatgttgcacggaggttcaaaactggtcaaatcaatggtgatttgctgatataccatgtcttactgactttaaagccatattatgcaaagccatatgaaattgtagtggaccttacccataccgggcctagcaatcgctttaaaacagactttctctctaagtggtttgttgtttttcctggctttgcttacgacaacgtctccgcagtctatatctataactgtaactcctgggtcagggagtacaccaagtatcatgagcggctgctgactggcctcaaaggtagcaaaaggcttgttttcatagactgtcctgggaaactggctgagcacatagagcatgaacaacagaaactacctgctgccaccttggctttagaagaggacctgaaggtattccacaatgctctcaagctagctcacaaagacaccaaagtttctattaaagttggttctactgctgtccaagtaacttcagcagagcgaacaaaagtcctagggcaatcagtctttctaaatgacatttattatgcttcggaaattgaagaaatctgcctagtagatgagaaccagttcaccttaaccattgcaaaccagggcacgccgctcaccttcatgcaccaggagtgtgaagccattgtccagtctatcattcatatccggacccgctgggaactgtcacagcccgactctatcccccaacacaccaagattcggccaaaagatgtccctgggacactgctcaatatcgcattacttaatttaggcagttctgacccgagtttacggtcagctgcctataatcttctgtgtgccttaacttgtacctttaatttaaaaatcgagggccagttactagagacatcaggtttatgtatccctgccaacaacaccctctttattgtctctattagtaagacactggcagccaatgagccacacctcacgttagaatttttggaagagtgtatttctggatttagcaaatctagtattgaattgaaacacctttgtttggaatacatgactccatggctgtcaaatctagttcgtttttgcaagcataatgatgatgccaaacgacaaagagttactgctattcttgacaagctgataacaatgaccatcaatgaaaaacagatgtacccatctattcaagcaaaaatatggggaagccttgggcagattacagatctgcttgatgttgtactagacagtttcatcaaaaccagtgcaacaggtggcttgggatcaataaaagctgaggtgatggcagatactgctgtagctttggcttctggaaatgtgaaattggtttcaagcaaggttattggaaggatgtgcaaaataattgacaagacatgcttatctccaactcctactttagaacaacatcttatgtgggatgatattgctattttagcacgctacatgctgatgctgtccttcaacaattcccttgatgtggcagctcatcttccctacctcttccacgttgttactttcttagtagccacaggtccgctctcccttagagcttccacacatggactggtcattaatatcattcactctctgtgtacttgttcacagcttcattttagtgaagagaccaagcaagttttgagactcagtctgacagagttctcattacccaaattttacttgctgtttggcattagcaaagtcaagtcagctgctgtcattgccttccgttccagttaccgggacaggtcattctctcctggctcctatgagagagagacttttgctttgacatccttggaaacagtcacagaagctttgttggagatcatggaggcatgcatgagagatattccaacgtgcaagtggctggaccagtggacagaactagctcaaagatttgcattccaatataatccatccctgcaaccaagagctcttgttgtctttgggtgtattagcaaacgagtgtctcatgggcagataaagcagataatccgtattcttagcaaggcacttgagagttgcttaaaaggacctgacacttacaacagtcaagttctgatagaagctacagtaatagcactaaccaaattacagccacttcttaataaggactcgcctctgcacaaagccctcttttgggtagctgtggctgtgctgcagcttgatgaggtcaacttgtattcagcaggtaccgcacttcttgaacaaaacctgcatactttagatagtctccgtatattcaatgacaaggtaagcaaactttgccttgaggttcctagattactcaaatttagtactcttccatcttttcttgttgctattcttttaaaatcacaagaagtccataacttaagtaggaatttgtataatgtaacttattgtgagtatatttccttaccagctcataaagaactatgtaaacttgaatgcatattttttacataaaaatagca

SEQ ID NO: 381163 - DNA, 5854 bp, Homo sapiens
aatctctagctcgctcgcgctccctctccccgggccgtggaaaggatcccacttccggtggggtgtcatggcggcgtctcggactgtgatggctgtggggagacggcgctagtggggagagcgaccaagaggccccctcccctccccgggtccccttcccctatccccctccccccagcctccttgccaacgccccctttccctctccccctcccgctcggcgctgaccccccatccccacccccgtgggaacactgggagcctgcactccacagaccctctccttgcctcttccctcacctcagcctccgctccccgccctcttcccggcccagggcgccggcccacccttccctccgccgccccccggccgcggggaggacatggccgcgcacaggccggtggaatgggtccaggccgtggtcagccgcttcgacgagcagcttccaataaaaacaggacagcagaacacacataccaaagtcagtactgagcacaacaaggaatgtctaatcaatatttccaaatacaagttttctttggttataagcggcctcactactattttaaagaatgttaacaatatgagaatatttggagaagctgctgaaaaaaatttatatctctctcagttgattatattggatacactggaaaaatgtcttgctgggcaaccaaaggacacaatgagattagatgaaacgatgctggtcaaacagttgctgccagaaatctgccattttcttcacacctgtcgtgaaggaaaccagcatgcagctgaacttcggaattctgcctctggggttttattttctctcagctgcaacaacttcaatgcagtctttagtcgcatttctaccaggttacaggaattaactgtttgttcagaagacaatgttgatgttcatgatatagaattgttacagtatatcaatgtggattgtgcaaaattaaaacgactcctgaaggaaacagcatttaaatttaaagccctaaagaaggttgcgcagttagcagttataaatagcctggaaaaggcattttggaactgggtagaaaattatccagatgaatttacaaaactataccagatcccacagactgatatggctgaatgtgcagaaaagctatttgacttggtggatggttttgctgaaagcaccaaacgtaaagcagcagtttggccactacaaatcattctccttatcttgtgtccagaaataatccaggatatatccaaagacgtggttgatgaaaacaacatgaataagaagttatttctggacagtctacgaaaagctcttgctggccatggaggaagtaggcagctgacagaaagtgctgcaattgcctgtgtcaaactgtgtaaagcaagtacttacatcaattgggaagataactctgtcattttcctacttgttcagtccatggtggttgatcttaagaacctgctttttaatccaagtaagccattctcaagaggcagtcagcctgcagatgtggatctaatgattgactgccttgtttcttgctttcgtataagccctcacaacaaccaacactttaagatctgcctggctcagaattcaccttctacatttcactatgtgctggtaaattcactccatcgaatcatcaccaattccgcattggattggtggcctaagattgatgctgtgtattgtcactcggttgaacttcgaaatatgtttggtgaaacacttcataaagcagtgcaaggttgtggagcacacccagcaatacgaatggcaccgagtcttacatttaaagaaaaagtaacaagccttaaatttaaagaaaaacctacagacctggagacaagaagctataagtatcttctcttgtccatggtgaaactaattcatgcagatccaaagctcttgctttgtaatccaagaaaacaggggcccgaaacccaaggcagtacagcagaattaattacagggctcgtccaactggtccctcagtcacacatgccagagattgctcaggaagcaatggaggctctgctggttcttcatcagttagatagcattgatttgtggaatcctgatgctcctgtagaaacattttgggagattagctcacaaatgcttttttacatctgcaagaaattaactagtcatcaaatgcttagtagcacagaaattctcaagtggttgcgggaaatattgatctgcaggaataaatttcttcttaaaaataagcaggcagatagaagttcctgtcactttctccttttttacggggtaggatgtgatattccttctagtggaaataccagtcaaatgtccatggatcatgaagaattactacgtactcctggagcctctctccggaagggaaaagggaactcctctatggatagtgcagcaggatgcagcggaacccccccgatttgccgacaagcccagaccaaactagaagtggccctgtacatgtttctgtggaaccctgacactgaagctgttctggttgccatgtcctgtttccgccacctctgtgaggaagcagatatccggtgtggggtggatgaagtgtcagtgcataacctcttgcccaactataacacattcatggagtttgcctctgtcagcaatatgatgtcaacaggaagagcagcacttcagaaaagagtgatggcactgctgaggcgcattgagcatcccactgcaggaaacactgaggcttgggaagatacacatgcaaaatgggaacaagcaacaaagctaatccttaactatccaaaagccaaaatggaagatggccaggctgctgaaagccttcacaagaccattgttaagaggcgaatgtcccatgtgagtggaggaggatccatagatttgtctgacacagactccctacaggaatggatcaacatgactggcttcctttgtgcccttggaggagtgtgcctccagcagagaagcaattctggcctggcaacctatagcccacccatgggtccagtcagtgaacgtaagggttctatgatttcagtgatgtcttcagagggaaacgcagatacacctgtcagcaaatttatggatcggctgttgtccttaatggtgtgtaaccatgagaaagtgggacttcaaatacggaccaatgttaaggatctggtgggtctagaattgagtcctgctctgtatccaatgctatttaacaaattgaagaataccatcagcaagttttttgactcccaaggacaggttttattgactgataccaatactcaatttgtagaacaaaccatagctataatgaagaacttgctagataatcatactgaaggcagctctgaacatctagggcaagctagcattgaaacaatgatgttaaatctggtcaggtatgttcgtgtgcttgggaatatggtccatgcaattcaaataaaaacgaaactgtgtcaattagttgaagtaatgatggcaaggagagatgacctctcattttgccaagagatgaaatttaggaataagatggtagaatacctgacagactgggttatgggaacatcaaaccaagcagcagatgatgatgtaaaatgtcttacaagagatttggaccaggcaagcatggaagcagtagtttcacttctagctggtctccctctgcagcctgaagaaggagatggtgtggaattgatggaagccaaatcacagttatttcttaaatacttcacattatttatgaaccttttgaatgactgcagtgaagttgaagatgaaagtgcgcaaacaggtggcaggaaacgtggcatgtctcggaggctggcatcactgaggcactgtacggtccttgcaatgtcaaacttactcaatgccaacgtagacagtggtctcatgcactccataggcttaggttaccacaaggatctccagacaagagctacatttatggaagttctgacaaaaatccttcaacaaggcacagaatttgacacacttgcagaaacagtattggctgatcggtttgagagattggtggaactggtcacaatgatgggtgatcaaggagaactccctatagcgatggctctggccaatgtggttccttgttctcagtgggatgaactagctcgagttctggttactctgtttgattctcggcatttactctaccaactgctctggaacatgttttctaaagaagtagaattggcagactccatgcagactctcttccgaggcaacagcttggccagtaaaataatgacattctgtttcaaggtatatggtgctacctatctacaaaaactcctggatcctttattacgaattgtgatcacatcctctgattggcaacatgttagctttgaagtggatcctaccaggttagaaccatcagagagccttgaggaaaaccagcggaacctccttcagatgactgaaaagttcttccatgccatcatcagttcctcctcagaattcccccctcaacttcgaagtgtgtgccactgtttataccaggcaacttgccactccctactgaataaagctacagtaaaagaaaaaaaggaaaacaaaaaatcagtaagtttggagaactttttattagctgtttctttcaaagcaaaacaaaaatcttttgctgtttgttaagaatatcttcacttcagcctatttgaccttcactgtaaaatcattctactaattctggcacaaaatagctttcatttcaattaaccctggaattaagttacattgaaacattctctgtgttcctttggtttgatttatcccaaaggcaatttgtgggcatttgttgcattggatatccttggtctaattttattattgttactttttaaattataaatgaatgcaaagaaacttaatttcaaggccttaggaaacgctgactgtcttcattcttgcttcttgtttgaaggtaatgtgagtggtttcttttcccagagatgacagtgtttcttaattgttagaagtatatggtgggaaagagtcactttctaaatcttacctaaaagttgctaaattttatttttttactcttcatatttttatctaggcagtctcaggcataatttagatatttgtgcatagattatagaaattttaatggtaaaactacttttacctcaaaaaaataagaggtaaatgataagatagtacttttgagataaaagaaaactgagttcatatttgtagaaaaacacatcattctgcaaacataatgtgaatatactatctgcttctatgaacttgccttgatttatttaaaaggaagaaaattatgagagtcgtaattattttcttccagtgaatggaatttgtccaaaatataatatgcattcattttacatttgccattatctgtcacagtgacttatcaggctgagccctgtctttgttcatataatccaaatgattgtagagtaagatgtaaagaaaactaagtaggtagttttcttaaaagggtgtaatttagaatacagtgttcatctggtttcatctttcatgccttatctaaactttacatataataaaagctttatggctgggcacagtggctcatacctgtaatccgggcactttgggagaccaaggtgggagtatctcttgagcccaagagttaaagaccagcttgggcaacatagcgagtcgtctctacaaataatttttttttttttttaattagccaggcgtggtggtgtactcctgtagtcccagctactcgggaggctgaggcaggaggattgcttgagcccaggtggttgaggctgcagtgagctgtgattgtatcactgtactccaccatgagtgacagagtaagaccctgtctcacaaaaaaaaaaaaaaaaaaagaaaac

SEQ ID NO: 381164 - DNA, 378 bp, Homo sapiens
ctcagatccggggacttcccttgggagatcaatcccctgtcctcctgctctttgctctgtgaaaaagatccacctacgacctcaggtcctcagaccaagcagcccaaggaacatctcaccaattttaaatcgggccctgcactccatgggatcagctgacaccacacagaccagtcatctggcccaaccagttctgccatctcacccaggaacagaagacattaagaaaatctaacttcgaccctctatgattccatctccaacctgagcaatcagcactccccacttcccaagcccctacctgccaaattatctttaaaaactctgatccacgaaggctcaaggatttaagtaataataaaactccagtctcccaca

SEQ ID NO: 381165 - DNA, 3154 bp, Homo sapiens
aggggcggggcgtcgggccagctgagctatcccgtcagaccgcgccagtttgaatgaaagctctacaagatggcggcggtcggggccgaggcgcgaggaggtgaggctggagcgcggcccctcgccttccctgttcccaggcaagctcccaaggcccgggcggcggggccgtcccgcgggccagccagatggcgacgtggcggttccccgcccgccgcgaccccaactccgggacgcacgctgcggacgcctatcctcccccaggccgctgacccgcctccctgcccggccggctcccgccgcggaggatatggaatattatcttgtaaaatggaaaggatggccagattctacaaatacttgggaacctttgcaaaatctgaagtgcccgttactgcttcagcaattctctaatgacaagcataattatttatctcaggtaaagaaaggcaaagcaataactccaaaagacaataacaaaactttgaaacctgccattgctgagtacattgtgaagaaggctaaacaaaggatagctctgcagagatggcaagatgaactcaacagaagaaagaatcataaaggaatgatatttgttgaaaatactgttgatttagagggcccaccttcagacttctattacattaacgaatacaaaccagctcctggaatcagcttagtcaatgaagctacctttggttgttcatgcacagattgcttctttcaaaaatgttgtcctgctgaagctggagttcttttggcttataataaaaaccaacaaattaaaatcccacctggtactcccatctatgaatgcaactcaaggtgtcagtgtggtcctgattgtcccaataggattgtacaaaaaggcacacagtattcgctttgcatctttcgaactagcaatggacgtggctggggtgtaaagacccttgtgaagattaaaagaatgagttttgtcatggaatatgttggagaggtaatcacaagtgaagaagctgaaagacgaggacagttctatgacaacaagggaatcacgtatctctttgatctggactatgagtctgatgaattcacagtggatgcggctcgatacggcaatgtgtctcattttgtgaatcacagctgtgacccaaatcttcaggtgttcaatgttttcattgataacctcgatactcgtcttccccgaatagcattgttttccacaagaaccataaatgctggagaagagctgacttttgattatcaaatgaaaggttctggagatatatcttcagattctattgaccacagcccagccaaaaagagggtcagaacagtatgtaaatgtggagctgtgacttgcagaggttacctcaactgaactttttcaggaaatagagctgatgattataatatttttttcctaatgttaacatttttaaaaatacatatttgggactcttattatcaaggttctacctatgttaatttacaattcatgtttcaagacatttgccaaatgtattaccgatgcctctgaaaagggggtcactgggtctcatagactgatatgaagtcgacatatttatagtgcttagagaccaaactaatggaaggcagactatttacagcttagtatatgtgtacttaagtctatgtgaacagagaaatgcctcccgtagtgtttgaaagcgttaagctgataatgtaattaacaactgctgagagatcaaagattcaacttgccatacacctcaaattcggagaaacagttaatttgggcaaatctacagttctgtttttgctactctattgtcattcctgtttaatactcactgtacttgtatttgagacaaataggtgatactgaattttatactgttttctacttttccattaaaacattggcacctcaatgataaagaaatttaaggtataaaattaaatgtaaaaattaatttcagcttcatttcgtatttcgaagcaatctagactgttgtgatgagtgtatgtctgaacctgtaattcttaaaagacttcttaatcttctagaagaaaaatctccgaagagctctctctagaagtccaaaatggctagccattatgcttctttgaaaggacatgataatgggaccaggatggttttttggagtaccaagcaaggggaatggagcactttaagggcgcctgttagtaacatgaattggaaatctgtgtcgagtacctctgatctaaacggtaaaacaagctgcctggagagcagctgtacctaacaatactgtaatgtacattaacattacagcctctcaatttcaggcaggtgtaacagttcctttccaccagatttaatatttttatacttcctgcaggttcttcttaaaaagtaatctatatttttgaactgatacttgttttatacataaattttttttagatgtgataaagctaaacttggccaaagtgtgtgcctgaattattagacctttttattagtcaacctacgaagactaaaatagaatatattagttttcaagggagtgggaggcttccaacatagtattgaatctcaggaaaaactattctttcatgtctgattctgagatttctaattgtgttgtgaaaatgataaatgcagcaaatctagctttcagtattcctaatttttacctaagctcattgctccaggctttgattacctaaaataagcttggataaaattgaaccaacttcaagaatgcagcacttcttaatctttagctctttcttgggagaagctagactttattcattatattgctatgacaacttcactctttcataatatataggataaattgtttacatgattggaccctcagattctgttaaccaaaattgcagaatggggggccaggcctgtgtggtggctcacacctgtgatcccagcactttgggaggctgaggtaggaggatcacgtgaggtcgggagttcaagaccagcctggccatcatggtgaaaccctgtctctactgaaaatacaaaaattagccgggcgtggtggcacacgcctgtagtcccagctactcaggaggctgaggcaggagaatcacttgaattcaggaggcggaggttgcagtgagccaagatcataccactgcactgcagcctgagtgacacagtaagactgtctcc

SEQ ID NO: 381166 - DNA, 2553 bp, Homo sapiens
aggggcggggcgtcgggccagctgagctatcccgtcagaccgcgccagtttgaatgaaagctctacaagatggcggcggtcggggccgaggcgcgaggagcttggtgtgtgccttgcctagtttcacttgatactcttcaggaattatgtagaaaagaaaagctcacatgtaaatcgattggaatcaccaaaaggaatctaaacaattatgaggtggaatacttgtgtgactacaaggtagtaaaggatatggaatattatcttgtaaaatggaaaggatggccagattctacaaatacttgggaacctttgcaaaatctgaagtgcccgttactgcttcagcaattctctaatgacaagcataattatttatctcaggtaatcacaagtgaagaagctgaaagacgaggacagttctatgacaacaagggaatcacgtatctctttgatctggactatgagtctgatgaattcacagtggatgcggctcgatacggcaatgtgtctcattttgtgaatcacagctgtgacccaaatcttcaggtgttcaatgttttcattgataacctcgatactcgtcttccccgaatagcattgttttccacaagaaccataaatgctggagaagagctgacttttgattatcaaatgaaaggttctggagatatatcttcagattctattgaccacagcccagccaaaaagagggtcagaacagtatgtaaatgtggagctgtgacttgcagaggttacctcaactgaactttttcaggaaatagagctgatgattataatatttttttcctaatgttaacatttttaaaaatacatatttgggactcttattatcaaggttctacctatgttaatttacaattcatgtttcaagacatttgccaaatgtattaccgatgcctctgaaaagggggtcactgggtctcatagactgatatgaagtcgacatatttatagtgcttagagaccaaactaatggaaggcagactatttacagcttagtatatgtgtacttaagtctatgtgaacagagaaatgcctcccgtagtgtttgaaagcgttaagctgataatgtaattaacaactgctgagagatcaaagattcaacttgccatacacctcaaattcggagaaacagttaatttgggcaaatctacagttctgtttttgctactctattgtcattcctgtttaatactcactgtacttgtatttgagacaaataggtgatactgaattttatactgttttctacttttccattaaaacattggcacctcaatgataaagaaatttaaggtataaaattaaatgtaaaaattaatttcagcttcatttcgtatttcgaagcaatctagactgttgtgatgagtgtatgtctgaacctgtaattcttaaaagacttcttaatcttctagaagaaaaatctccgaagagctctctctagaagtccaaaatggctagccattatgcttctttgaaaggacatgataatgggaccaggatggttttttggagtaccaagcaaggggaatggagcactttaagggcgcctgttagtaacatgaattggaaatctgtgtcgagtacctctgatctaaacggtaaaacaagctgcctggagagcagctgtacctaacaatactgtaatgtacattaacattacagcctctcaatttcaggcaggtgtaacagttcctttccaccagatttaatatttttatacttcctgcaggttcttcttaaaaagtaatctatatttttgaactgatacttgttttatacataaattttttttagatgtgataaagctaaacttggccaaagtgtgtgcctgaattattagacctttttattagtcaacctacgaagactaaaatagaatatattagttttcaagggagtgggaggcttccaacatagtattgaatctcaggaaaaactattctttcatgtctgattctgagatttctaattgtgttgtgaaaatgataaatgcagcaaatctagctttcagtattcctaatttttacctaagctcattgctccaggctttgattacctaaaataagcttggataaaattgaaccaacttcaagaatgcagcacttcttaatctttagctctttcttgggagaagctagactttattcattatattgctatgacaacttcactctttcataatatataggataaattgtttacatgattggaccctcagattctgttaaccaaaattgcagaatggggggccaggcctgtgtggtggctcacacctgtgatcccagcactttgggaggctgaggtaggaggatcacgtgaggtcgggagttcaagaccagcctggccatcatggtgaaaccctgtctctactgaaaatacaaaaattagccgggcgtggtggcacacgcctgtagtcccagctactcaggaggctgaggcaggagaatcacttgaattcaggaggcggaggttgcagtgagccaagatcataccactgcactgcagcctgagtgacacagtaagactgtctcc

SEQ ID NO: 381167 - DNA, 5176 bp, Homo sapiens
aggggcggggcgtcgggccagctgagctatcccgtcagaccgcgccagtttgaatgaaagctctacaagatggcggcggtcggggccgaggcgcgaggaggtgaggctggagcgcggcccctcgccttccctgttcccaggcaagctcccaaggcccgggcggcggggccgtcccgcgggccagccagatggcgacgtggcggttccccgcccgccgcgaccccaactccgggacgcacgctgcggacgcctatcctcccccaggccgctgacccgcctccctgcccggccggctcccgccgcggaggatatggaatattatcttgtaaaatggaaaggatggccagattctacaaatacttgggaacctttgcaaaatctgaagtgcccgttactgcttcagcaattctctaatgacaagcataattatttatctcaggtaaagaaaggcaaagcaataactccaaaagacaataacaaaactttgaaacctgccattgctgagtacattgtgaagaaggctaaacaaaggatagctctgcagagatggcaagatgaactcaacagaagaaagaatcataaaggaatgatatttgttgaaaatactgttgatttagagggcccaccttcagacttctattacattaacgaatacaaaccagctcctggaatcagcttagtcaatgaagctacctttggttgttcatgcacagattgcttctttcaaaaatgttgtcctgctgaagctggagttcttttggcttataataaaaaccaacaaattaaaatcccacctggtactcccatctatgaatgcaactcaaggtgtcagtgtggtcctgattgtcccaataggattgtacaaaaaggcacacagtattcgctttgcatctttcgaactagcaatggacgtggctggggtgtaaagacccttgtgaagattaaaagaatgagttttgtcatggaatatgttggagaggtatgtttcatttgccacgtagtaaatgatggacatgcaaggtttatacttttggaaaattacctttttatctctttaagagatacttggtacattttgatattttcatttgcagatatgtagaaatttattcagatttaggagaagagttcactggcatatttagaaataaaaaacttttatatgaataaaaaatatacgttaaaacaaattgatatagtcatctttcaacaaatacacattcctactagtcaaacctaggatttgtaaaatttaaaatatgacaactgtttttacccaaaagtcctaagaagaaactcagatgtaacacatgctgctttgaaacttgaaagttttaatttacttcatctatttgaccaaatatgattaaatgtagttggcagaactctattttggatcaacatgaaagatactatatttatgagttttgtaaaatatacacaagcatttattgcatccataatctgtaacttacttttgaactgtgaagaccattctcaaaactaccatacaaatactagcaaatttatttgtatacaaatcatatatatgtatatatatatataaatgtaaaaagtatttgccgtgtgtcacatactattctaagcacttgatgtattaattcactaatcctctccaaaactcagtgaggtagtactgtttcttttttttttttttttttttttttttttgagaagtagtactgttatgtccattattgtagagaaattgagtaccttgcccaaggtcacacaggtcacatagtaataagaaccgagattcaaagctctaaaatcagtagtcttcaccatggcaccacactgcttcaaactgaagggtaggttgagctgtgactagaaagacacaagcatggctacatatctggagttgtcaactctggattttttagttggaattgggtcacctataattatctgtattcatctataattctgaaactaaattagatggctgttttgattcttacacttttagacagtggtagattattataaattattcagtatacaagatcttgtataatcaaattactctttttgttaaccaaaattttttaagttgcattcttaatgagtgcagcagccaaatttggttggtaacataaagtactttagacacttttggtttcttaagccgagcgtgtcataaaacttgtgttcttaagagcagaactgtagatgacgatcttagacttacagaattgcatgaaaataacatattctaccaaaaacaaaaccttccattccaaagttaacatagcttctcccctgtatttttaacaattttccatttgtaactgcatatatataagttataggaaaaatgtgcctggatcatatttagagcatatacttgcagatttagtccttaacattcagttgtgtcctgtagagagctatagttgtatagctttttgaacatcctaattataatgaaagtaatgcagtgttccaatgtactgctcaaatcctgtttaaaaagtcataaatcaaccagttacagttaatcccagcacttggggaggtcaaggctggaggctcacttgagcccaggagttccagaccagtgtgggcaacatagtgagaccccacatctctataaaaactaaatcattagctgggcatggcggtatgcacctgtgatccagctagtcaggaggctgaggcaggaagatcgcttgatcccaggagttaaaggatacagggagtcatgatggcaccaccgcattctagcctgagtgacagagtgagaccctgtttaaaaaaaaaaggtcatcagtcttttgcattatcatttttcttcccctcattttcccacctctttgcatctgagtcttagtttgtgtgaatgtttgctttgatgacacctgaatttcttactttttaaatatttgtaggtattcgcatattagtagataggtagatgaatgcttctttggttcagtagctacgtaatatacttacagttttttctgtttaggtaatcacaagtgaagaagctgaaagacgaggacagttctatgacaacaagggaatcacgtatctctttgatctggactatgagtctgatgaattcacagtggatgcggctcgatacggcaatgtgtctcattttgtgaatcacagctgtgacccaaatcttcaggtgttcaatgttttcattgataacctcgatactcgtcttccccgaatagcattgttttccacaagaaccataaatgctggagaagagctgacttttgattatcaaatgaaaggttctggagatatatcttcagattctattgaccacagcccagccaaaaagagggtcagaacagtatgtaaatgtggagctgtgacttgcagaggttacctcaactgaactttttcaggaaatagagctgatgattataatatttttttcctaatgttaacatttttaaaaatacatatttgggactcttattatcaaggttctacctatgttaatttacaattcatgtttcaagacatttgccaaatgtattaccgatgcctctgaaaagggggtcactgggtctcatagactgatatgaagtcgacatatttatagtgcttagagaccaaactaatggaaggcagactatttacagcttagtatatgtgtacttaagtctatgtgaacagagaaatgcctcccgtagtgtttgaaagcgttaagctgataatgtaattaacaactgctgagagatcaaagattcaacttgccatacacctcaaattcggagaaacagttaatttgggcaaatctacagttctgtttttgctactctattgtcattcctgtttaatactcactgtacttgtatttgagacaaataggtgatactgaattttatactgttttctacttttccattaaaacattggcacctcaatgataaagaaatttaaggtataaaattaaatgtaaaaattaatttcagcttcatttcgtatttcgaagcaatctagactgttgtgatgagtgtatgtctgaacctgtaattcttaaaagacttcttaatcttctagaagaaaaatctccgaagagctctctctagaagtccaaaatggctagccattatgcttctttgaaaggacatgataatgggaccaggatggttttttggagtaccaagcaaggggaatggagcactttaagggcgcctgttagtaacatgaattggaaatctgtgtcgagtacctctgatctaaacggtaaaacaagctgcctggagagcagctgtacctaacaatactgtaatgtacattaacattacagcctctcaatttcaggcaggtgtaacagttcctttccaccagatttaatatttttatacttcctgcaggttcttcttaaaaagtaatctatatttttgaactgatacttgttttatacataaattttttttagatgtgataaagctaaacttggccaaagtgtgtgcctgaattattagacctttttattagtcaacctacgaagactaaaatagaatatattagttttcaagggagtgggaggcttccaacatagtattgaatctcaggaaaaactattctttcatgtctgattctgagatttctaattgtgttgtgaaaatgataaatgcagcaaatctagctttcagtattcctaatttttacctaagctcattgctccaggctttgattacctaaaataagcttggataaaattgaaccaacttcaagaatgcagcacttcttaatctttagctctttcttgggagaagctagactttattcattatattgctatgacaacttcactctttcataatatataggataaattgtttacatgattggaccctcagattctgttaaccaaaattgcagaatggggggccaggcctgtgtggtggctcacacctgtgatcccagcactttgggaggctgaggtaggaggatcacgtgaggtcgggagttcaagaccagcctggccatcatggtgaaaccctgtctctactgaaaatacaaaaattagccgggcgtggtggcacacgcctgtagtcccagctactcaggaggctgaggcaggagaatcacttgaattcaggaggcggaggttgcagtgagccaagatcataccactgcactgcagcctgagtgacacagtaagactgtctcc

SEQ ID NO: 381168 - DNA, 5267 bp, Homo sapiens
tgaactatttaattttgtcagtgaaatctttttctgcattactggagactgtcgagagattgtctttctttttttaaccacgtgtttgcagtttttcatgttcactttttttttttttttaattttcaaagagcatttcctttgcgggttgtgttttgaatcctcaactagataaaaatgtttaggaaaagcacacaaacacaccttgagtagataagaggaacctcctttatacgtgattcccttaatgagcttggtgtgtgccttgcctagtttcacttgatactcttcaggaattatgtagaaaagaaaagctcacatgtaaatcgattggaatcaccaaaaggaatctaaacaattatgaggtggaatacttgtgtgactacaaggtagtaaaggatatggaatattatcttgtaaaatggaaaggatggccagattctacaaatacttgggaacctttgcaaaatctgaagtgcccgttactgcttcagcaattctctaatgacaagcataattatttatctcaggtaaagaaaggcaaagcaataactccaaaagacaataacaaaactttgaaacctgccattgctgagtacattgtgaagaaggctaaacaaaggatagctctgcagagatggcaagatgaactcaacagaagaaagaatcataaaggaatgatatttgttgaaaatactgttgatttagagggcccaccttcagacttctattacattaacgaatacaaaccagctcctggaatcagcttagtcaatgaagctacctttggttgttcatgcacagattgcttctttcaaaaatgttgtcctgctgaagctggagttcttttggcttataataaaaaccaacaaattaaaatcccacctggtactcccatctatgaatgcaactcaaggtgtcagtgtggtcctgattgtcccaataggattgtacaaaaaggcacacagtattcgctttgcatctttcgaactagcaatggacgtggctggggtgtaaagacccttgtgaagattaaaagaatgagttttgtcatggaatatgttggagaggtatgtttcatttgccacgtagtaaatgatggacatgcaaggtttatacttttggaaaattacctttttatctctttaagagatacttggtacattttgatattttcatttgcagatatgtagaaatttattcagatttaggagaagagttcactggcatatttagaaataaaaaacttttatatgaataaaaaatatacgttaaaacaaattgatatagtcatctttcaacaaatacacattcctactagtcaaacctaggatttgtaaaatttaaaatatgacaactgtttttacccaaaagtcctaagaagaaactcagatgtaacacatgctgctttgaaacttgaaagttttaatttacttcatctatttgaccaaatatgattaaatgtagttggcagaactctattttggatcaacatgaaagatactatatttatgagttttgtaaaatatacacaagcatttattgcatccataatctgtaacttacttttgaactgtgaagaccattctcaaaactaccatacaaatactagcaaatttatttgtatacaaatcatatatatgtatatatatatataaatgtaaaaagtatttgccgtgtgtcacatactattctaagcacttgatgtattaattcactaatcctctccaaaactcagtgaggtagtactgtttcttttttttttttttttttttttttttttgagaagtagtactgttatgtccattattgtagagaaattgagtaccttgcccaaggtcacacaggtcacatagtaataagaaccgagattcaaagctctaaaatcagtagtcttcaccatggcaccacactgcttcaaactgaagggtaggttgagctgtgactagaaagacacaagcatggctacatatctggagttgtcaactctggattttttagttggaattgggtcacctataattatctgtattcatctataattctgaaactaaattagatggctgttttgattcttacacttttagacagtggtagattattataaattattcagtatacaagatcttgtataatcaaattactctttttgttaaccaaaattttttaagttgcattcttaatgagtgcagcagccaaatttggttggtaacataaagtactttagacacttttggtttcttaagccgagcgtgtcataaaacttgtgttcttaagagcagaactgtagatgacgatcttagacttacagaattgcatgaaaataacatattctaccaaaaacaaaaccttccattccaaagttaacatagcttctcccctgtatttttaacaattttccatttgtaactgcatatatataagttataggaaaaatgtgcctggatcatatttagagcatatacttgcagatttagtccttaacattcagttgtgtcctgtagagagctatagttgtatagctttttgaacatcctaattataatgaaagtaatgcagtgttccaatgtactgctcaaatcctgtttaaaaagtcataaatcaaccagttacagttaatcccagcacttggggaggtcaaggctggaggctcacttgagcccaggagttccagaccagtgtgggcaacatagtgagaccccacatctctataaaaactaaatcattagctgggcatggcggtatgcacctgtgatccagctagtcaggaggctgaggcaggaagatcgcttgatcccaggagttaaaggatacagggagtcatgatggcaccaccgcattctagcctgagtgacagagtgagaccctgtttaaaaaaaaaaggtcatcagtcttttgcattatcatttttcttcccctcattttcccacctctttgcatctgagtcttagtttgtgtgaatgtttgctttgatgacacctgaatttcttactttttaaatatttgtaggtattcgcatattagtagataggtagatgaatgcttctttggttcagtagctacgtaatatacttacagttttttctgtttaggtaatcacaagtgaagaagctgaaagacgaggacagttctatgacaacaagggaatcacgtatctctttgatctggactatgagtctgatgaattcacagtggatgcggctcgatacggcaatgtgtctcattttgtgaatcacagctgtgacccaaatcttcaggtgttcaatgttttcattgataacctcgatactcgtcttccccgaatagcattgttttccacaagaaccataaatgctggagaagagctgacttttgattatcaaatgaaaggttctggagatatatcttcagattctattgaccacagcccagccaaaaagagggtcagaacagtatgtaaatgtggagctgtgacttgcagaggttacctcaactgaactttttcaggaaatagagctgatgattataatatttttttcctaatgttaacatttttaaaaatacatatttgggactcttattatcaaggttctacctatgttaatttacaattcatgtttcaagacatttgccaaatgtattaccgatgcctctgaaaagggggtcactgggtctcatagactgatatgaagtcgacatatttatagtgcttagagaccaaactaatggaaggcagactatttacagcttagtatatgtgtacttaagtctatgtgaacagagaaatgcctcccgtagtgtttgaaagcgttaagctgataatgtaattaacaactgctgagagatcaaagattcaacttgccatacacctcaaattcggagaaacagttaatttgggcaaatctacagttctgtttttgctactctattgtcattcctgtttaatactcactgtacttgtatttgagacaaataggtgatactgaattttatactgttttctacttttccattaaaacattggcacctcaatgataaagaaatttaaggtataaaattaaatgtaaaaattaatttcagcttcatttcgtatttcgaagcaatctagactgttgtgatgagtgtatgtctgaacctgtaattcttaaaagacttcttaatcttctagaagaaaaatctccgaagagctctctctagaagtccaaaatggctagccattatgcttctttgaaaggacatgataatgggaccaggatggttttttggagtaccaagcaaggggaatggagcactttaagggcgcctgttagtaacatgaattggaaatctgtgtcgagtacctctgatctaaacggtaaaacaagctgcctggagagcagctgtacctaacaatactgtaatgtacattaacattacagcctctcaatttcaggcaggtgtaacagttcctttccaccagatttaatatttttatacttcctgcaggttcttcttaaaaagtaatctatatttttgaactgatacttgttttatacataaattttttttagatgtgataaagctaaacttggccaaagtgtgtgcctgaattattagacctttttattagtcaacctacgaagactaaaatagaatatattagttttcaagggagtgggaggcttccaacatagtattgaatctcaggaaaaactattctttcatgtctgattctgagatttctaattgtgttgtgaaaatgataaatgcagcaaatctagctttcagtattcctaatttttacctaagctcattgctccaggctttgattacctaaaataagcttggataaaattgaaccaacttcaagaatgcagcacttcttaatctttagctctttcttgggagaagctagactttattcattatattgctatgacaacttcactctttcataatatataggataaattgtttacatgattggaccctcagattctgttaaccaaaattgcagaatggggggccaggcctgtgtggtggctcacacctgtgatcccagcactttgggaggctgaggtaggaggatcacgtgaggtcgggagttcaagaccagcctggccatcatggtgaaaccctgtctctactgaaaatacaaaaattagccgggcgtggtggcacacgcctgtagtcccagctactcaggaggctgaggcaggagaatcacttgaattcaggaggcggaggttgcagtgagccaagatcataccactgcactgcagcctgagtgacacagtaagactgtctcc

SEQ ID NO: 381169 - DNA, 5155 bp, Homo sapiens
aggggcggggcgtcgggccagctgagctatcccgtcagaccgcgccagtttgaatgaaagctctacaagatggcggcggtcggggccgaggcgcgaggaggtgaggctggagcgcggcccctcgccttccctgttcccagcttggtgtgtgccttgcctagtttcacttgatactcttcaggaattatgtagaaaagaaaagctcacatgtaaatcgattggaatcaccaaaaggaatctaaacaattatgaggtggaatacttgtgtgactacaaggtagtaaaggatatggaatattatcttgtaaaatggaaaggatggccagattctacaaatacttgggaacctttgcaaaatctgaagtgcccgttactgcttcagcaattctctaatgacaagcataattatttatctcaggtaaagaaaggcaaagcaataactccaaaagacaataacaaaactttgaaacctgccattgctgagtacattgtgaagaaggctaaacaaaggatagctctgcagagatggcaagatgaactcaacagaagaaagaatcataaaggaatgatatttgttgaaaatactgttgatttagagggcccaccttcagacttctattacattaacgaatacaaaccagctcctggaatcagcttagtcaatgaagctacctttggttgttcatgcacagattgcttctttcaaaaatgttgtcctgctgaagctggagttcttttggcttataataaaaaccaacaaattaaaatcccacctggtactcccatctatgaatgcaactcaaggtgtcagtgtggtcctgattgtcccaataggattgtacaaaaaggcacacagtattcgctttgcatctttcgaactagcaatggacgtggctggggtgtaaagacccttgtgaagattaaaagaatgagttttgtcatggaatatgttggagaggtatgtttcatttgccacgtagtaaatgatggacatgcaaggtttatacttttggaaaattacctttttatctctttaagagatacttggtacattttgatattttcatttgcagatatgtagaaatttattcagatttaggagaagagttcactggcatatttagaaataaaaaacttttatatgaataaaaaatatacgttaaaacaaattgatatagtcatctttcaacaaatacacattcctactagtcaaacctaggatttgtaaaatttaaaatatgacaactgtttttacccaaaagtcctaagaagaaactcagatgtaacacatgctgctttgaaacttgaaagttttaatttacttcatctatttgaccaaatatgattaaatgtagttggcagaactctattttggatcaacatgaaagatactatatttatgagttttgtaaaatatacacaagcatttattgcatccataatctgtaacttacttttgaactgtgaagaccattctcaaaactaccatacaaatactagcaaatttatttgtatacaaatcatatatatgtatatatatatataaatgtaaaaagtatttgccgtgtgtcacatactattctaagcacttgatgtattaattcactaatcctctccaaaactcagtgaggtagtactgtttcttttttttttttttttttttttttttttgagaagtagtactgttatgtccattattgtagagaaattgagtaccttgcccaaggtcacacaggtcacatagtaataagaaccgagattcaaagctctaaaatcagtagtcttcaccatggcaccacactgcttcaaactgaagggtaggttgagctgtgactagaaagacacaagcatggctacatatctggagttgtcaactctggattttttagttggaattgggtcacctataattatctgtattcatctataattctgaaactaaattagatggctgttttgattcttacacttttagacagtggtagattattataaattattcagtatacaagatcttgtataatcaaattactctttttgttaaccaaaattttttaagttgcattcttaatgagtgcagcagccaaatttggttggtaacataaagtactttagacacttttggtttcttaagccgagcgtgtcataaaacttgtgttcttaagagcagaactgtagatgacgatcttagacttacagaattgcatgaaaataacatattctaccaaaaacaaaaccttccattccaaagttaacatagcttctcccctgtatttttaacaattttccatttgtaactgcatatatataagttataggaaaaatgtgcctggatcatatttagagcatatacttgcagatttagtccttaacattcagttgtgtcctgtagagagctatagttgtatagctttttgaacatcctaattataatgaaagtaatgcagtgttccaatgtactgctcaaatcctgtttaaaaagtcataaatcaaccagttacagttaatcccagcacttggggaggtcaaggctggaggctcacttgagcccaggagttccagaccagtgtgggcaacatagtgagaccccacatctctataaaaactaaatcattagctgggcatggcggtatgcacctgtgatccagctagtcaggaggctgaggcaggaagatcgcttgatcccaggagttaaaggatacagggagtcatgatggcaccaccgcattctagcctgagtgacagagtgagaccctgtttaaaaaaaaaaggtcatcagtcttttgcattatcatttttcttcccctcattttcccacctctttgcatctgagtcttagtttgtgtgaatgtttgctttgatgacacctgaatttcttactttttaaatatttgtaggtattcgcatattagtagataggtagatgaatgcttctttggttcagtagctacgtaatatacttacagttttttctgtttaggtaatcacaagtgaagaagctgaaagacgaggacagttctatgacaacaagggaatcacgtatctctttgatctggactatgagtctgatgaattcacagtggatgcggctcgatacggcaatgtgtctcattttgtgaatcacagctgtgacccaaatcttcaggtgttcaatgttttcattgataacctcgatactcgtcttccccgaatagcattgttttccacaagaaccataaatgctggagaagagctgacttttgattatcaaatgaaaggttctggagatatatcttcagattctattgaccacagcccagccaaaaagagggtcagaacagtatgtaaatgtggagctgtgacttgcagaggttacctcaactgaactttttcaggaaatagagctgatgattataatatttttttcctaatgttaacatttttaaaaatacatatttgggactcttattatcaaggttctacctatgttaatttacaattcatgtttcaagacatttgccaaatgtattaccgatgcctctgaaaagggggtcactgggtctcatagactgatatgaagtcgacatatttatagtgcttagagaccaaactaatggaaggcagactatttacagcttagtatatgtgtacttaagtctatgtgaacagagaaatgcctcccgtagtgtttgaaagcgttaagctgataatgtaattaacaactgctgagagatcaaagattcaacttgccatacacctcaaattcggagaaacagttaatttgggcaaatctacagttctgtttttgctactctattgtcattcctgtttaatactcactgtacttgtatttgagacaaataggtgatactgaattttatactgttttctacttttccattaaaacattggcacctcaatgataaagaaatttaaggtataaaattaaatgtaaaaattaatttcagcttcatttcgtatttcgaagcaatctagactgttgtgatgagtgtatgtctgaacctgtaattcttaaaagacttcttaatcttctagaagaaaaatctccgaagagctctctctagaagtccaaaatggctagccattatgcttctttgaaaggacatgataatgggaccaggatggttttttggagtaccaagcaaggggaatggagcactttaagggcgcctgttagtaacatgaattggaaatctgtgtcgagtacctctgatctaaacggtaaaacaagctgcctggagagcagctgtacctaacaatactgtaatgtacattaacattacagcctctcaatttcaggcaggtgtaacagttcctttccaccagatttaatatttttatacttcctgcaggttcttcttaaaaagtaatctatatttttgaactgatacttgttttatacataaattttttttagatgtgataaagctaaacttggccaaagtgtgtgcctgaattattagacctttttattagtcaacctacgaagactaaaatagaatatattagttttcaagggagtgggaggcttccaacatagtattgaatctcaggaaaaactattctttcatgtctgattctgagatttctaattgtgttgtgaaaatgataaatgcagcaaatctagctttcagtattcctaatttttacctaagctcattgctccaggctttgattacctaaaataagcttggataaaattgaaccaacttcaagaatgcagcacttcttaatctttagctctttcttgggagaagctagactttattcattatattgctatgacaacttcactctttcataatatataggataaattgtttacatgattggaccctcagattctgttaaccaaaattgcagaatggggggccaggcctgtgtggtggctcacacctgtgatcccagcactttgggaggctgaggtaggaggatcacgtgaggtcgggagttcaagaccagcctggccatcatggtgaaaccctgtctctactgaaaatacaaaaattagccgggcgtggtggcacacgcctgtagtcccagctactcaggaggctgaggcaggagaatcacttgaattcaggaggcggaggttgcagtgagccaagatcataccactgcactgcagcctgagtgacacagtaagactgtctcc

SEQ ID NO: 381170 - DNA, 3503 bp, Homo sapiens
aggggcggggcgtcgggccagctgagctatcccgtcagaccgcgccagtttgaatgaaagctctacaagatggcggcggtcggggccgaggcgcgaggaggtgaggctggagcgcggcccctcgccttccctgttcccaggcaagctcccaaggcccgggcggcggggccgtcccgcgggccagccagatggcgacgtggcggttccccgcccgccgcgaccccaactccgggacgcacgctgcggacgcctatcctcccccaggccgctgacccgcctccctgcccggccggctcccgccgcggaggatatggaatattatcttgtaaaatggaaaggatggccagattctacaaatacttgggaacctttgcaaaatctgaagtgcccgttactgcttcagcaattctctaatgacaagcataattatttatctcaggtaaagaaaggcaaagcaataactccaaaagacaataacaaaactttgaaacctgccattgctgagtacattgtgaagaaggctaaacaaaggatagctctgcagagatggcaagatgaactcaacagaagaaagaatcataaaggaatgatatttgttgaaaatactgttgatttagagggcccaccttcagacttctattacattaacgaatacaaaccagctcctggaatcagcttagtcaatgaagctacctttggttgttcatgcacagattgcttctttcaaaaatgttgtcctgctgaagctggagttcttttggcttataataaaaaccaacaaattaaaatcccacctggtactcccatctatgaatgcaactcaaggtgtcagtgtggtcctgattgtcccaataggattgtacaaaaaggcacacagtattcgctttgcatctttcgaactagcaatggacgtggctggggtgtaaagacccttgtgaagattaaaagaatgagttttgtcatggaatatgttggagaggtatgtttcatttgccacgtagtaaatgatggacatgcaaggtttatacttttggaaaattacctttttatctctttaagagatacttggtacattttgatattttcatttgcagatatgtagaaatttattcagatttaggagaagagttcactggcatatttagaaataaaaaacttttatatgaataaaaaatatacgttaaaacaaattgatatagtcatctttcaacaaatacacattcctactagtcaaacctaggatttgtaaaatttaaaatatgacaactgtttttacccaaaagtcctaagaagaaactcagatgtaacacatgctgctttgaaacttgaaagttttaatttacttcatctatttgaccaaatatgattaaatgtagttggcagaactctattttggatcaacatgaaagatactatatttatgagttttgtaaaatatacacaagcatttattgcatccataatctgtaacttacttttgaactgtgaagaccattctcaaaactaccatacaaatactagcaaatttatttgtatacaaatcatatatatgtatatatatatataaatgtaaaaagtatttgccgtgtgtcacatactattctaagcacttgatgtattaattcactaatcctctccaaaactcagtgaggtagtactgtttcttttttttttttttttttttttttttttgagaagtagtactgttatgtccattattgtagagaaattgagtaccttgcccaaggtcacacaggtcacatagtaataagaaccgagattcaaagctctaaaatcagtagtcttcaccatggcaccacactgcttcaaactgaagggtaggttgagctgtgactagaaagacacaagcatggctacatatctggagttgtcaactctggattttttagttggaattgggtcacctataattatctgtattcatctataattctgaaactaaattagatggctgttttgattcttacacttttagacagtggtagattattataaattattcagtatacaagatcttgtataatcaaattactctttttgttaaccaaaattttttaagttgcattcttaatgagtgcagcagccaaatttggttggtaacataaagtactttagacacttttggtttcttaagccgagcgtgtcataaaacttgtgttcttaagagcagaactgtagatgacgatcttagacttacagaattgcatgaaaataacatattctaccaaaaacaaaaccttccattccaaagttaacatagcttctcccctgtatttttaacaattttccatttgtaactgcatatatataagttataggaaaaatgtgcctggatcatatttagagcatatacttgcagatttagtccttaacattcagttgtgtcctgtagagagctatagttgtatagctttttgaacatcctaattataatgaaagtaatgcagtgttccaatgtactgctcaaatcctgtttaaaaagtcataaatcaaccagttacagttaatcccagcacttggggaggtcaaggctggaggctcacttgagcccaggagttccagaccagtgtgggcaacatagtgagaccccacatctctataaaaactaaatcattagctgggcatggcggtatgcacctgtgatccagctagtcaggaggctgaggcaggaagatcgcttgatcccaggagttaaaggatacagggagtcatgatggcaccaccgcattctagcctgagtgacagagtgagaccctgtttaaaaaaaaaaggtcatcagtcttttgcattatcatttttcttcccctcattttcccacctctttgcatctgagtcttagtttgtgtgaatgtttgctttgatgacacctgaatttcttactttttaaatatttgtaggtattcgcatattagtagataggtagatgaatgcttctttggttcagtagctacgtaatatacttacagttttttctgtttaggtaatcacaagtgaagaagctgaaagacgaggacagttctatgacaacaagggaatcacgtatctctttgatctggactatgagtctgatgaattcacagtggatgcggctcgatacggcaatgtgtctcattttgtgaatcacagcgtaagaagacatacgtaaattttagacacgactaacaattcaacctagtactagtttccatagctaaagaataattccctttaaactacatatccttttaacatttccaaaatatgtattttataaggagggcagcttctgttaagttatggtattattgctgtattaggaaaattaaacattgaggtgcctaccaaatattaatagggtgtattttacaagagtctttacatatgttacttcatttaaactttctagtaactttgtacggtaggtattactttcatattacaatgagcagagcaattaagaggtaaaatgtccaagaattacacagaactgtatcttaatggaa

SEQ ID NO: 381171 - DNA, 419 bp, Homo sapiens
ctattttatacttgtctgaagtttttataagggaaaaaaatctttttaaatgtgcatgcctcaaagacctctaagcaataagcaacttaatttccagtggaacttaaactaaatctctaggaaagtaaacattttatatggcatgtagaagggcttgtttacaccgtttgtacttaaatgggttctaatgttcctttttagtgtgacccaaatcttcaggtgttcaatgttttcattgataacctcgatactcgtcttccccgaatagcattgttttccacaagaaccataaatgctggagaagagctgacttttgattatcaaatgaaaggtatgcttttcaagtacagtttcattggtgtcagtttcaatatgaagaatcaaatcagactaggaacagaccttagatatttgaacca

SEQ ID NO: 381172 - DNA, 2947 bp, Homo sapiens
aggggcggggcgtcgggccagctgagctatcccgtcagaccgcgccagtttgaatgaaagctctacaagatggcggcggtcggggccgaggcgcgaggaggatatggaatattatcttgtaaaatggaaaggatggccagattctacaaatacttgggaacctttgcaaaatctgaagtgcccgttactgcttcagcaattctctaatgacaagcataattatttatctcaggtaaagaaaggcaaagcaataactccaaaagacaataacaaaactttgaaacctgccattgctgagtacattgtgaagaaggctaaacaaaggatagctctgcagagatggcaagatgaactcaacagaagaaagaatcataaaggaatgatatttgttgaaaatactgttgatttagagggcccaccttcagacttctattacattaacgaatacaaaccagctcctggaatcagcttagtcaatgaagctacctttggttgttcatgcacagattgcttctttcaaaaatgttgtcctgctgaagctggagttcttttggcttataataaaaaccaacaaattaaaatcccacctggtactcccatctatgaatgcaactcaaggtgtcagtgtggtcctgattgtcccaataggattgtacaaaaaggcacacagtattcgctttgcatctttcgaactagcaatggacgtggctggggtgtaaagacccttgtgaagattaaaagaatgagttttgtcatggaatatgttggagaggtaatcacaagtgaagaagctgaaagacgaggacagttctatgacaacaagggaatcacgtatctctttgatctggactatgagtctgatgaattcacagtggatgcggctcgatacggcaatgtgtctcattttgtgaatcacagctgtgacccaaatcttcaggtgttcaatgttttcattgataacctcgatactcgtcttccccgaatagcattgttttccacaagaaccataaatgctggagaagagctgacttttgattatcaaatgaaaggttctggagatatatcttcagattctattgaccacagcccagccaaaaagagggtcagaacagtatgtaaatgtggagctgtgacttgcagaggttacctcaactgaactttttcaggaaatagagctgatgattataatatttttttcctaatgttaacatttttaaaaatacatatttgggactcttattatcaaggttctacctatgttaatttacaattcatgtttcaagacatttgccaaatgtattaccgatgcctctgaaaagggggtcactgggtctcatagactgatatgaagtcgacatatttatagtgcttagagaccaaactaatggaaggcagactatttacagcttagtatatgtgtacttaagtctatgtgaacagagaaatgcctcccgtagtgtttgaaagcgttaagctgataatgtaattaacaactgctgagagatcaaagattcaacttgccatacacctcaaattcggagaaacagttaatttgggcaaatctacagttctgtttttgctactctattgtcattcctgtttaatactcactgtacttgtatttgagacaaataggtgatactgaattttatactgttttctacttttccattaaaacattggcacctcaatgataaagaaatttaaggtataaaattaaatgtaaaaattaatttcagcttcatttcgtatttcgaagcaatctagactgttgtgatgagtgtatgtctgaacctgtaattcttaaaagacttcttaatcttctagaagaaaaatctccgaagagctctctctagaagtccaaaatggctagccattatgcttctttgaaaggacatgataatgggaccaggatggttttttggagtaccaagcaaggggaatggagcactttaagggcgcctgttagtaacatgaattggaaatctgtgtcgagtacctctgatctaaacggtaaaacaagctgcctggagagcagctgtacctaacaatactgtaatgtacattaacattacagcctctcaatttcaggcaggtgtaacagttcctttccaccagatttaatatttttatacttcctgcaggttcttcttaaaaagtaatctatatttttgaactgatacttgttttatacataaattttttttagatgtgataaagctaaacttggccaaagtgtgtgcctgaattattagacctttttattagtcaacctacgaagactaaaatagaatatattagttttcaagggagtgggaggcttccaacatagtattgaatctcaggaaaaactattctttcatgtctgattctgagatttctaattgtgttgtgaaaatgataaatgcagcaaatctagctttcagtattcctaatttttacctaagctcattgctccaggctttgattacctaaaataagcttggataaaattgaaccaacttcaagaatgcagcacttcttaatctttagctctttcttgggagaagctagactttattcattatattgctatgacaacttcactctttcataatatataggataaattgtttacatgattggaccctcagattctgttaaccaaaattgcagaatggggggccaggcctgtgtggtggctcacacctgtgatcccagcactttgggaggctgaggtaggaggatcacgtgaggtcgggagttcaagaccagcctggccatcatggtgaaaccctgtctctactgaaaatacaaaaattagccgggcgtggtggcacacgcctgtagtcccagctactcaggaggctgaggcaggagaatcacttgaattcaggaggcggaggttgcagtgagccaagatcataccactgcactgcagcctgagtgacacagtaagactgtctcc

SEQ ID NO: 381173 - DNA, 2393 bp, Homo sapiens
gtcctgattgtcccaataggaccacactgacaccttgagtggcattcatagatgggagtaccaggtgtcagtgtggtcctgattgtcccaataggattgtacaaaaaggcacacagtattcgctttgcatctttcgaactagcaatggacgtggctggggtgtaaagacccttgtgaagattaaaagaatgagttttgtcatggaatatgttggagaggtaatcacaagtgaagaagctgaaagacgaggacagttctatgacaacaagggaatcacgtatctctttgatctggactatgagtctgatgaattcacagtggatgcggctcgatacggcaatgtgtctcattttgtgaatcacagctgtgacccaaatcttcaggtgttcaatgttttcattgataacctcgatactcgtcttccccgaatagcattgttttccacaagaaccataaatgctggagaagagctgacttttgattatcaaatgaaaggttctggagatatatcttcagattctattgaccacagcccagccaaaaagagggtcagaacagtatgtaaatgtggagctgtgacttgcagaggttacctcaactgaactttttcaggaaatagagctgatgattataatatttttttcctaatgttaacatttttaaaaatacatatttgggactcttattatcaaggttctacctatgttaatttacaattcatgtttcaagacatttgccaaatgtattaccgatgcctctgaaaagggggtcactgggtctcatagactgatatgaagtcgacatatttatagtgcttagagaccaaactaatggaaggcagactatttacagcttagtatatgtgtacttaagtctatgtgaacagagaaatgcctcccgtagtgtttgaaagcgttaagctgataatgtaattaacaactgctgagagatcaaagattcaacttgccatacacctcaaattcggagaaacagttaatttgggcaaatctacagttctgtttttgctactctattgtcattcctgtttaatactcactgtacttgtatttgagacaaataggtgatactgaattttatactgttttctacttttccattaaaacattggcacctcaatgataaagaaatttaaggtataaaattaaatgtaaaaattaatttcagcttcatttcgtatttcgaagcaatctagactgttgtgatgagtgtatgtctgaacctgtaattcttaaaagacttcttaatcttctagaagaaaaatctccgaagagctctctctagaagtccaaaatggctagccattatgcttctttgaaaggacatgataatgggaccaggatggttttttggagtaccaagcaaggggaatggagcactttaagggcgcctgttagtaacatgaattggaaatctgtgtcgagtacctctgatctaaacggtaaaacaagctgcctggagagcagctgtacctaacaatactgtaatgtacattaacattacagcctctcaatttcaggcaggtgtaacagttcctttccaccagatttaatatttttatacttcctgcaggttcttcttaaaaagtaatctatatttttgaactgatacttgttttatacataaattttttttagatgtgataaagctaaacttggccaaagtgtgtgcctgaattattagacctttttattagtcaacctacgaagactaaaatagaatatattagttttcaagggagtgggaggcttccaacatagtattgaatctcaggaaaaactattctttcatgtctgattctgagatttctaattgtgttgtgaaaatgataaatgcagcaaatctagctttcagtattcctaatttttacctaagctcattgctccaggctttgattacctaaaataagcttggataaaattgaaccaacttcaagaatgcagcacttcttaatctttagctctttcttgggagaagctagactttattcattatattgctatgacaacttcactctttcataatatataggataaattgtttacatgattggaccctcagattctgttaaccaaaattgcagaatggggggccaggcctgtgtggtggctcacacctgtgatcccagcactttgggaggctgaggtaggaggatcacgtgaggtcgggagttcaagaccagcctggccatcatggtgaaaccctgtctctactgaaaatacaaaaattagccgggcgtggtggcacacgcctgtagtcccagctactcaggaggctgaggcaggagaatcacttgaattcaggaggcggaggttgcagtgagccaagatcataccactgcactgcagcctgagtgacacagtaagactgtctcc

SEQ ID NO: 381174 - DNA, 5115 bp, Homo sapiens
aggggcggggcgtcgggccagctgagctatcccgtcagaccgcgccagtttgaatgaaagctctacaagatggcggcggtcggggccgaggcgcgaggagcttggtgtgtgccttgcctagtttcacttgatactcttcaggaattatgtagaaaagaaaagctcacatgtaaatcgattggaatcaccaaaaggaatctaaacaattatgaggtggaatacttgtgtgactacaaggtagtaaaggatatggaatattatcttgtaaaatggaaaggatggccagattctacaaatacttgggaacctttgcaaaatctgaagtgcccgttactgcttcagcaattctctaatgacaagcataattatttatctcaggtaaagaaaggcaaagcaataactccaaaagacaataacaaaactttgaaacctgccattgctgagtacattgtgaagaaggctaaacaaaggatagctctgcagagatggcaagatgaactcaacagaagaaagaatcataaaggaatgatatttgttgaaaatactgttgatttagagggcccaccttcagacttctattacattaacgaatacaaaccagctcctggaatcagcttagtcaatgaagctacctttggttgttcatgcacagattgcttctttcaaaaatgttgtcctgctgaagctggagttcttttggcttataataaaaaccaacaaattaaaatcccacctggtactcccatctatgaatgcaactcaaggtgtcagtgtggtcctgattgtcccaataggattgtacaaaaaggcacacagtattcgctttgcatctttcgaactagcaatggacgtggctggggtgtaaagacccttgtgaagattaaaagaatgagttttgtcatggaatatgttggagaggtatgtttcatttgccacgtagtaaatgatggacatgcaaggtttatacttttggaaaattacctttttatctctttaagagatacttggtacattttgatattttcatttgcagatatgtagaaatttattcagatttaggagaagagttcactggcatatttagaaataaaaaacttttatatgaataaaaaatatacgttaaaacaaattgatatagtcatctttcaacaaatacacattcctactagtcaaacctaggatttgtaaaatttaaaatatgacaactgtttttacccaaaagtcctaagaagaaactcagatgtaacacatgctgctttgaaacttgaaagttttaatttacttcatctatttgaccaaatatgattaaatgtagttggcagaactctattttggatcaacatgaaagatactatatttatgagttttgtaaaatatacacaagcatttattgcatccataatctgtaacttacttttgaactgtgaagaccattctcaaaactaccatacaaatactagcaaatttatttgtatacaaatcatatatatgtatatatatatataaatgtaaaaagtatttgccgtgtgtcacatactattctaagcacttgatgtattaattcactaatcctctccaaaactcagtgaggtagtactgtttcttttttttttttttttttttttttttttgagaagtagtactgttatgtccattattgtagagaaattgagtaccttgcccaaggtcacacaggtcacatagtaataagaaccgagattcaaagctctaaaatcagtagtcttcaccatggcaccacactgcttcaaactgaagggtaggttgagctgtgactagaaagacacaagcatggctacatatctggagttgtcaactctggattttttagttggaattgggtcacctataattatctgtattcatctataattctgaaactaaattagatggctgttttgattcttacacttttagacagtggtagattattataaattattcagtatacaagatcttgtataatcaaattactctttttgttaaccaaaattttttaagttgcattcttaatgagtgcagcagccaaatttggttggtaacataaagtactttagacacttttggtttcttaagccgagcgtgtcataaaacttgtgttcttaagagcagaactgtagatgacgatcttagacttacagaattgcatgaaaataacatattctaccaaaaacaaaaccttccattccaaagttaacatagcttctcccctgtatttttaacaattttccatttgtaactgcatatatataagttataggaaaaatgtgcctggatcatatttagagcatatacttgcagatttagtccttaacattcagttgtgtcctgtagagagctatagttgtatagctttttgaacatcctaattataatgaaagtaatgcagtgttccaatgtactgctcaaatcctgtttaaaaagtcataaatcaaccagttacagttaatcccagcacttggggaggtcaaggctggaggctcacttgagcccaggagttccagaccagtgtgggcaacatagtgagaccccacatctctataaaaactaaatcattagctgggcatggcggtatgcacctgtgatccagctagtcaggaggctgaggcaggaagatcgcttgatcccaggagttaaaggatacagggagtcatgatggcaccaccgcattctagcctgagtgacagagtgagaccctgtttaaaaaaaaaaggtcatcagtcttttgcattatcatttttcttcccctcattttcccacctctttgcatctgagtcttagtttgtgtgaatgtttgctttgatgacacctgaatttcttactttttaaatatttgtaggtattcgcatattagtagataggtagatgaatgcttctttggttcagtagctacgtaatatacttacagttttttctgtttaggtaatcacaagtgaagaagctgaaagacgaggacagttctatgacaacaagggaatcacgtatctctttgatctggactatgagtctgatgaattcacagtggatgcggctcgatacggcaatgtgtctcattttgtgaatcacagctgtgacccaaatcttcaggtgttcaatgttttcattgataacctcgatactcgtcttccccgaatagcattgttttccacaagaaccataaatgctggagaagagctgacttttgattatcaaatgaaaggttctggagatatatcttcagattctattgaccacagcccagccaaaaagagggtcagaacagtatgtaaatgtggagctgtgacttgcagaggttacctcaactgaactttttcaggaaatagagctgatgattataatatttttttcctaatgttaacatttttaaaaatacatatttgggactcttattatcaaggttctacctatgttaatttacaattcatgtttcaagacatttgccaaatgtattaccgatgcctctgaaaagggggtcactgggtctcatagactgatatgaagtcgacatatttatagtgcttagagaccaaactaatggaaggcagactatttacagcttagtatatgtgtacttaagtctatgtgaacagagaaatgcctcccgtagtgtttgaaagcgttaagctgataatgtaattaacaactgctgagagatcaaagattcaacttgccatacacctcaaattcggagaaacagttaatttgggcaaatctacagttctgtttttgctactctattgtcattcctgtttaatactcactgtacttgtatttgagacaaataggtgatactgaattttatactgttttctacttttccattaaaacattggcacctcaatgataaagaaatttaaggtataaaattaaatgtaaaaattaatttcagcttcatttcgtatttcgaagcaatctagactgttgtgatgagtgtatgtctgaacctgtaattcttaaaagacttcttaatcttctagaagaaaaatctccgaagagctctctctagaagtccaaaatggctagccattatgcttctttgaaaggacatgataatgggaccaggatggttttttggagtaccaagcaaggggaatggagcactttaagggcgcctgttagtaacatgaattggaaatctgtgtcgagtacctctgatctaaacggtaaaacaagctgcctggagagcagctgtacctaacaatactgtaatgtacattaacattacagcctctcaatttcaggcaggtgtaacagttcctttccaccagatttaatatttttatacttcctgcaggttcttcttaaaaagtaatctatatttttgaactgatacttgttttatacataaattttttttagatgtgataaagctaaacttggccaaagtgtgtgcctgaattattagacctttttattagtcaacctacgaagactaaaatagaatatattagttttcaagggagtgggaggcttccaacatagtattgaatctcaggaaaaactattctttcatgtctgattctgagatttctaattgtgttgtgaaaatgataaatgcagcaaatctagctttcagtattcctaatttttacctaagctcattgctccaggctttgattacctaaaataagcttggataaaattgaaccaacttcaagaatgcagcacttcttaatctttagctctttcttgggagaagctagactttattcattatattgctatgacaacttcactctttcataatatataggataaattgtttacatgattggaccctcagattctgttaaccaaaattgcagaatggggggccaggcctgtgtggtggctcacacctgtgatcccagcactttgggaggctgaggtaggaggatcacgtgaggtcgggagttcaagaccagcctggccatcatggtgaaaccctgtctctactgaaaatacaaaaattagccgggcgtggtggcacacgcctgtagtcccagctactcaggaggctgaggcaggagaatcacttgaattcaggaggcggaggttgcagtgagccaagatcataccactgcactgcagcctgagtgacacagtaagactgtctcc

SEQ ID NO: 381175 - DNA, 5265 bp, Homo sapiens
gctggccaagtaagccactaacctaggtcataaagagttagctttgggaccatttatttccatgatcaaaataaatacatctgggtttaacctgaatcaccatttagtaacatagtcatcagtttcagtacctttgtctttttccaggtaaaactctttagcctcttatcaaacatgttatgccacatctaaattccatattttatgtaatataaggaaaaatagttttatttgtatgatttatacttcatgtgttaggaacctgtgactacatgttctgaactgttagtaagaaaaatggtattggataccttactctttaagatttttaattatttttggtaaaactgggaaatagccgtctgatttgcattttattttcttttgtattttaaggatatggaatattatcttgtaaaatggaaaggatggccagattctacaaatacttgggaacctttgcaaaatctgaagtgcccgttactgcttcagcaattctctaatgacaagcataattatttatctcaggtaaagaaaggcaaagcaataactccaaaagacaataacaaaactttgaaacctgccattgctgagtacattgtgaagaaggctaaacaaaggatagctctgcagagatggcaagatgaactcaacagaagaaagaatcataaaggaatgatatttgttgaaaatactgttgatttagagggcccaccttcagacttctattacattaacgaatacaaaccagctcctggaatcagcttagtcaatgaagctacctttggttgttcatgcacagattgcttctttcaaaaatgttgtcctgctgaagctggagttcttttggcttataataaaaaccaacaaattaaaatcccacctggtactcccatctatgaatgcaactcaaggtgtcagtgtggtcctgattgtcccaataggattgtacaaaaaggcacacagtattcgctttgcatctttcgaactagcaatggacgtggctggggtgtaaagacccttgtgaagattaaaagaatgagttttgtcatggaatatgttggagaggtatgtttcatttgccacgtagtaaatgatggacatgcaaggtttatacttttggaaaattacctttttatctctttaagagatacttggtacattttgatattttcatttgcagatatgtagaaatttattcagatttaggagaagagttcactggcatatttagaaataaaaaacttttatatgaataaaaaatatacgttaaaacaaattgatatagtcatctttcaacaaatacacattcctactagtcaaacctaggatttgtaaaatttaaaatatgacaactgtttttacccaaaagtcctaagaagaaactcagatgtaacacatgctgctttgaaacttgaaagttttaatttacttcatctatttgaccaaatatgattaaatgtagttggcagaactctattttggatcaacatgaaagatactatatttatgagttttgtaaaatatacacaagcatttattgcatccataatctgtaacttacttttgaactgtgaagaccattctcaaaactaccatacaaatactagcaaatttatttgtatacaaatcatatatatgtatatatatatataaatgtaaaaagtatttgccgtgtgtcacatactattctaagcacttgatgtattaattcactaatcctctccaaaactcagtgaggtagtactgtttcttttttttttttttttttttttttttttgagaagtagtactgttatgtccattattgtagagaaattgagtaccttgcccaaggtcacacaggtcacatagtaataagaaccgagattcaaagctctaaaatcagtagtcttcaccatggcaccacactgcttcaaactgaagggtaggttgagctgtgactagaaagacacaagcatggctacatatctggagttgtcaactctggattttttagttggaattgggtcacctataattatctgtattcatctataattctgaaactaaattagatggctgttttgattcttacacttttagacagtggtagattattataaattattcagtatacaagatcttgtataatcaaattactctttttgttaaccaaaattttttaagttgcattcttaatgagtgcagcagccaaatttggttggtaacataaagtactttagacacttttggtttcttaagccgagcgtgtcataaaacttgtgttcttaagagcagaactgtagatgacgatcttagacttacagaattgcatgaaaataacatattctaccaaaaacaaaaccttccattccaaagttaacatagcttctcccctgtatttttaacaattttccatttgtaactgcatatatataagttataggaaaaatgtgcctggatcatatttagagcatatacttgcagatttagtccttaacattcagttgtgtcctgtagagagctatagttgtatagctttttgaacatcctaattataatgaaagtaatgcagtgttccaatgtactgctcaaatcctgtttaaaaagtcataaatcaaccagttacagttaatcccagcacttggggaggtcaaggctggaggctcacttgagcccaggagttccagaccagtgtgggcaacatagtgagaccccacatctctataaaaactaaatcattagctgggcatggcggtatgcacctgtgatccagctagtcaggaggctgaggcaggaagatcgcttgatcccaggagttaaaggatacagggagtcatgatggcaccaccgcattctagcctgagtgacagagtgagaccctgtttaaaaaaaaaaggtcatcagtcttttgcattatcatttttcttcccctcattttcccacctctttgcatctgagtcttagtttgtgtgaatgtttgctttgatgacacctgaatttcttactttttaaatatttgtaggtattcgcatattagtagataggtagatgaatgcttctttggttcagtagctacgtaatatacttacagttttttctgtttaggtaatcacaagtgaagaagctgaaagacgaggacagttctatgacaacaagggaatcacgtatctctttgatctggactatgagtctgatgaattcacagtggatgcggctcgatacggcaatgtgtctcattttgtgaatcacagctgtgacccaaatcttcaggtgttcaatgttttcattgataacctcgatactcgtcttccccgaatagcattgttttccacaagaaccataaatgctggagaagagctgacttttgattatcaaatgaaaggttctggagatatatcttcagattctattgaccacagcccagccaaaaagagggtcagaacagtatgtaaatgtggagctgtgacttgcagaggttacctcaactgaactttttcaggaaatagagctgatgattataatatttttttcctaatgttaacatttttaaaaatacatatttgggactcttattatcaaggttctacctatgttaatttacaattcatgtttcaagacatttgccaaatgtattaccgatgcctctgaaaagggggtcactgggtctcatagactgatatgaagtcgacatatttatagtgcttagagaccaaactaatggaaggcagactatttacagcttagtatatgtgtacttaagtctatgtgaacagagaaatgcctcccgtagtgtttgaaagcgttaagctgataatgtaattaacaactgctgagagatcaaagattcaacttgccatacacctcaaattcggagaaacagttaatttgggcaaatctacagttctgtttttgctactctattgtcattcctgtttaatactcactgtacttgtatttgagacaaataggtgatactgaattttatactgttttctacttttccattaaaacattggcacctcaatgataaagaaatttaaggtataaaattaaatgtaaaaattaatttcagcttcatttcgtatttcgaagcaatctagactgttgtgatgagtgtatgtctgaacctgtaattcttaaaagacttcttaatcttctagaagaaaaatctccgaagagctctctctagaagtccaaaatggctagccattatgcttctttgaaaggacatgataatgggaccaggatggttttttggagtaccaagcaaggggaatggagcactttaagggcgcctgttagtaacatgaattggaaatctgtgtcgagtacctctgatctaaacggtaaaacaagctgcctggagagcagctgtacctaacaatactgtaatgtacattaacattacagcctctcaatttcaggcaggtgtaacagttcctttccaccagatttaatatttttatacttcctgcaggttcttcttaaaaagtaatctatatttttgaactgatacttgttttatacataaattttttttagatgtgataaagctaaacttggccaaagtgtgtgcctgaattattagacctttttattagtcaacctacgaagactaaaatagaatatattagttttcaagggagtgggaggcttccaacatagtattgaatctcaggaaaaactattctttcatgtctgattctgagatttctaattgtgttgtgaaaatgataaatgcagcaaatctagctttcagtattcctaatttttacctaagctcattgctccaggctttgattacctaaaataagcttggataaaattgaaccaacttcaagaatgcagcacttcttaatctttagctctttcttgggagaagctagactttattcattatattgctatgacaacttcactctttcataatatataggataaattgtttacatgattggaccctcagattctgttaaccaaaattgcagaatggggggccaggcctgtgtggtggctcacacctgtgatcccagcactttgggaggctgaggtaggaggatcacgtgaggtcgggagttcaagaccagcctggccatcatggtgaaaccctgtctctactgaaaatacaaaaattagccgggcgtggtggcacacgcctgtagtcccagctactcaggaggctgaggcaggagaatcacttgaattcaggaggcggaggttgcagtgagccaagatcataccactgcactgcagcctgagtgacacagtaagactgtctcc

SEQ ID NO: 381176 - DNA, 1246 bp, Homo sapiens
gattacaggcacgcgctaatttttgtatttttagtacagacgggatttcaccatattggccaggctggtctcgaactcctgacctcgtgatccaccctccttggcctcccaaagtgctgggattacaggtgtgagccaccacgcccagcctctttttttttttttttttctcaccagtatgatgatgaccattttaagaaagcttgtgtggctctctcctatcattacagacctccagagctggaaaatttgatgcatttactgaactcttcctgaaagtttaatatggagtgggaatcagtttttgtcctaatttattagagaaggcttcctcttctctactccttgtgcaaacccatctctggatagctagaaaaggaacttcagaatggactatatgtgatgaccacctgtatgcactctaggctcttatctgtctctattttatgtggtgactatatctcagaagtactaccccttctgagtagtactattatttcctatgccaattttttttaagtctctgatgctgccctttttaaatttttgtcttattttttagcctctttagtattagggggtgaggtgacattcctagactctacagtagcagtttggcatgttagtgacaggaaattgtgattccctatctccccctcctcctaccttttctgcttttgtgattccattgttcctatctcattgaggctttcccaggcattcgaatttagttagtaggtcatttctaatctctgggccttgtcttttctctctccgttcccctccttccctaccacatattttttgtttattctgaggtggtttgtttctgaaagttaatctaggtcaccttctatatcctgtgctttctagttggctttagacatcttgttctagcaacaatgatggtagcagctctctccctgaccttgccccatgtgctctccttctgtcaaggccatttgtgtgtgtactgcggcaggtgtgtgtgtggggggatgcgcccagactgttctcacaatgtcctcagtttttcaggttgtctgacagctttatgtacagcgtatttttagaaaaacttaaatatacttctttatttagggttttattctgatgagcaagtttgtgtgtatatgtgtgtatgagcatttgtatgtatatatacttatacagatctatattatatatacagtttttgtactatcatttaaaataaaaatgtttctcaataaaatgtcaaagccga

SEQ ID NO: 381177 - DNA, 1618 bp, Homo sapiens
gattacaggcacgcgctaatttttgtatttttagtacagacgggatttcaccatattggccaggctggtctcgaactcctgacctcgtgatccaccctccttggcctcccaaagtgctgggattacaggtgtgagccaccacgcccagcctctttttttttttttttttctcaccagtatgatgatgaccattttaagaaagcttgtgtggctctctcctatcattacagacctccagagctggaaaatttgatgcatttactgaactcttcctgaaagtttaatatggagtgggaatcagtttttgtcctaatttattagagaaggcttcctcttctctactccttgtgcaaacccatctctggatagctagaaaaggaacttcagaatggactatatgtgatgaccacctgtatgcactctaggctcttatctgtctctattttatgtggtgactatatctcagaagtactaccccttctgagtagtactattatttcctatgccaattttttttaagtctctgatgctgccctttttaaatttttgtcttattttttagcctctttagtattagggggtgaggtgacattcctagactctacagtagcagtttggcatgttagtgacaggaaattgtgattccctatctccccctcctcctaccttttctgcttttgtgattccattgttcctatctcattgaggctttcccaggcattcgaatttagttagtaggtcatttctaatctctgggccttgtcttttctctctccgttcccctccttccctaccacatattttttgtttattctgaggtggtttgtttctgaaagttaatctaggtcaccttctatatcctgtgctttctagttggctttagacatcttgttctagcaacaatgatggtagcagctctctccctgaccttgccccatgtgctctccttctgtcaaggccatttgtgtgtgtactgcggcaggtgtgtgtgtggggggatgcgcccagactgttctcacaatgtcctcagtttttcaggttgtctgacagctttatgtacagcgtatttttagaaaaacttaaatatacttctttatttagggttttattctgatgagcaagtttgtgtgtatatgtgtgtatgagcatttgtatgtatatatacttatacagatctatattatatatacagtttttgtactatcatttaaaataaaaatgtttctcaataaaatgtcaaagccgaatcaacacaacacagaacacacagcagcgcacaagcacacgatgtggggggcacaccatgacgcccctggagaaagcgccttcctaagcccaactcggttttgacaccggggcccccagaataggtggagcgtgacgccggtggtccaacaagcggactgccccaaggagagatccgcggggacaaacaacacggggcgggcgaattccccgcccaacaataaaaaacacgccgccggggaggaaacaccgcagaggcttttctagaaacaacaacccgccatagtggaggactacgacgacgccaccacagcggcggagcatccaccacagcagggggaagcccaaggcgacgcctcgaaatataaatact

SEQ ID NO: 381178 - DNA, 689 bp, Homo sapiens
gattacaggcacgcgctaatttttgtatttttagtacagacgggatttcaccatattggccaggctggtctcgaactcctgacctcgtgatccaccctccttggcctcccaaagtgctgggattacaggtgtgagccaccacgcccagcctctttttttttttttttttctcaccagtatgatgatgaccattttaagaaagcttgtgtggctctctccgttcccctccttccctaccacatattttttgtttattctgaggtggtttgtttctgaaagttaatctaggtcaccttctatatcctgtgctttctagttggctttagacatcttgttctagcaacaatgatggtagcagctctctccctgaccttgccccatgtgctctccttctgtcaaggccatttgtgtgtgtactgcggcaggtgtgtgtgtggggggatgcgcccagactgttctcacaatgtcctcagtttttcaggttgtctgacagctttatgtacagcgtatttttagaaaaacttaaatatacttctttatttagggttttattctgatgagcaagtttgtgtgtatatgtgtgtatgagcatttgtatgtatatatacttatacagatctatattatatatacagtttttgtactatcatttaaaataaaaatgtttctcaataaaatgtcaaagccga

SEQ ID NO: 381179 - DNA, 297 bp, Homo sapiens
ttcatggttaaactcataatgctgctaacaccgaaaaaaaatggcggggggaggctgaggcatgagaattacttgaacccgggaggcggatgttgcagtgagccgagatagtgccactgcactccagcttgggtgaccgtgagactctgaaagacagcggtccataccttccttacctcagaaatccctgatcttgctcagctgacccttacctgatatggccccagatggccttgcataccccacagcatggggaactcactacttggctgaactccctctccatgtcacgtctcc

SEQ ID NO: 381180 - DNA, 205 bp, Homo sapiens
atatatatatatgcatgatatatgcacacacacatatccaaaatattggatatattatataaatataatataatatatttgtatgatatatataatatatatgtatggatttttatacatatgaatacatctatattttatatgtggatatgcaatattatggatgtatttctctttccccagatgtaataaacaactattaaat

SEQ ID NO: 381181 - DNA, 566 bp, Homo sapiens
  misc_feature (38)..(38): n is a, c, g, or t
  misc_feature (75)..(75): n is a, c, g, or t
  misc_feature (80)..(80): n is a, c, g, or t
  misc_feature (101)..(101): n is a, c, g, or t
  misc_feature (106)..(106): n is a, c, g, or t
  misc_feature (121)..(121): n is a, c, g, or t
ccaaaagccaaacaacctgcccccaacccggaaaaacnaaaaacccaaaaaaaaggggcaaaaatcccccatggngaaanccctttaaaagccttcccttngggtnacccccaatgggccncctttccaagtggttaaaaaaaatgtggtttgtcatatgttaatttgccatgatggggtaaggagatgggagggcaaaggttattcacatgcttgctggcttgctctcatttcctgtggttctcactttccctgaagcagttataacctatcagatttgcaaagtcaactcagtacaaatcaatcgtgctctgtattgaaattctggagggtttagagtcctgcaaaccacgatgcaagtcagtgatccaagtgacagccctggcaatttacttgcactcattccttacttaattctttagaggagtaactgctctatgctcattgaagaatgcatgaattagaattgggagagtataggccacacaaaaggcatctgggtaactgcttcttaaaactgggtaattttctccttcaacaatcaaggctactgaggaaaaaaaaaa

SEQ ID NO: 381182 - DNA, 493 bp, Homo sapiens
aatgtcacattctaactggctacagctaatcagcttgcctactctgaatatcaaataactaaataatgggcaaatttccatttgtgaagctttttaatgcttttcttttgttacccatttggctcttttcagttgtttatataatgtggtttgtcatatgttaatttgccatgatggggtaaggagatgggagggcaaaggttattcacatgcttgctggcttgctctcatttcctgtggttctcactttccctgaagcagttataacctatcagatttgcaaagtcaactcagtacaaatcaatcgtgctctgtattgaaattctggagggtttagagtcctgcaaaccacgatgcaagtcagtgatccaagtgacagccctggcaatttacttgcactcattccttacttaattctttagaggagtaactgctttcttaaaactgggtaattttctccttcaacaatcaaggctactgaggaaaaaaaaaa

SEQ ID NO: 381183 - DNA, 438 bp, Homo sapiens
ttgatctcatcaagagtctcttggccctgcacctcagtaggagcctgggtgggagtcaagggtcttgggtggaagggctcgtagaagctgtctggcccgagacacagattcctaaagcctggtctgaggggggtggggctcagggcgcaggtgctggggtttcacccacctggatccccactggttgagtcaaagcctcctctaggcctcagtggccacgtctgtgacatgggcataatggataatggtgattctttctagagtggataacaaggtcagagagatcaagcacgtacaggtgccacaaagctcctggcacttactgtgggctcagctaaagacccttcccttcctctgggcatatgtgtccttggaaccagcagggacagtggctgttttcctcagctctgttctttcggctgccaggctggctccctg

SEQ ID NO: 381184 - DNA, 331 bp, Homo sapiens
ctaatgttaaatgggtgtcttagtccattcaaactgctataaaaatataccttagattggataattcatgaacaaaatttatttatcttggctgggaagttcaagatcaaggccccagcagattcagtgtctggagagggcccaccctgctccacagatggtgccttgttgctgtgctctcacatggaagaaggggcaaggcaattcctttcaacctcttttataaggccactaatcccatttatgaaggcaaagatctcaaaacttaatcattttccaatgtggctgcccccctcttaatacttcaccaataaattctaataaactgtcc

SEQ ID NO: 381185 - DNA, 294 bp, Homo sapiens
tttaaaaggggggttctcaggacacagcctagcagagcacagaatgtcttcacatctccatttttcacaaaaataaagcacacgggccttaattgaagatgagcttcatgaaagcatatctgaggttggtggcagattgtggaaaactgacaaagcatggctttctttattataaacaaataatcaacaaatacaaatagtggattatgaattagaaatggcttgtgttagattgtccagaatatcaaacactacatggatgctgtgctcctgaaacatcactcttaagataag

SEQ ID NO: 381186 - DNA, 653 bp, Homo sapiens
acgcttgaggtgtcgttatcgctggggaaaggaaaatggttcttactggaaaattaggggacgttacgaaagagtcggtgcaggcagcatttagttatgttcgttccagaaatggaacgatatcgacgtcgtgatccagaagtccagagctgaggactgcctgtttgcagggcccgcctggcaggacgactgagcaagttcttggaaaaccagagatattagagcggtgaatcgcgctggtcacgttggacacctgcgcgttaggagattctggagccagagggagagaccccagaaacgccccggtcggcgacccagcccgagacgcctggggtcccaagggaagctgaacgcagaatggggaaatggagagagaacctgaaagagccccaaactcgaggacctattgctccccaagaataacatcttccagaactagacagaaaactaggcgtctgggaaccctgaaatccttggaggagtagatcatcatgaccctctgtgttccttttggcaaatgacttgcttccattgtttgtttgttcaatttcgaaatggaacgaacaaatagaagccggcgtacagagtgttttagatcaccccctccccaataaagctaatactcacctgagttgtaaaaaactccgggggga

SEQ ID NO: 381187 - DNA, 554 bp, Homo sapiens
atgaatcttaaatatctcttgttttattttgaaaaattgttttcataagatacaattgagcaattgagatttgttctcccagtatctgaagatttttttggtcttgttttgttttttgggtttttggccctaaaattaggtgaattcagctttgggtctatttcatccattctggaaggttccttgggtcactgatctgaggcattcttgatgtggttaggacttcccagcattattttttttagatcggtttgactgcaatgcagtgtgaatatcgcacatgggaccatttgtcatactgtcagatggcaatacatagatggatagaattttgctgtttgatcaaagctgtgccatcggaaacttgttttcccaagtatgggtacattctcctcttttcctgagtggagaaacctagatctgagcaaaaagcatgaatcaatacaccttgggaggcagggtgtgaaatatttgatgccatttcctttgcttgtaaattgttcatttcatttgaatataaatataaaaggacttctaccaagaacatgaaacta

SEQ ID NO: 381188 - DNA, 594 bp, Homo sapiens
cctgactccaccaaatggagcgcccaagtcctgatcggggttaaaacaaatccactccaggggtagcttttgacaggactttctgtttcagatttcaggtactcagactccacctttacttttacctatgttggcggccccagaaggtatttatgggtgtagagttgcttcatttcctgttcacactcttgtgtttcctttgttcttagcgtgttccgtgttcgggtattttggttgcttgtttgattactgtggcttttctttacctacaacccaagcctgacgtccctcggttttaaatagcagggggaggggaatcaatgtttgattcaggtgtttcgaagaccacgccacaggcgatgagcagaactcttcatgttgaaacggttctgctacagtactagattgctctcaggcgatttggggttgatacaggcaagccggtgcaaaactggaatactggatatgaagtgaaatgtataaaagacataaaatgtcacaaaatagtttgatcacaagtgttgattttcctggtgagttggggctgcgtgtttccatgttttctgaaggttcacataaacatgcagcctgcca

SEQ ID NO: 381189 - DNA, 537 bp, Homo sapiens
  misc_feature (418)..(418): n is a, c, g, or t
ctctggatgcaaagtgtctcatttaatgtgatcatgtgtttgttgcatggataaatgaaataagaagggattcctggctgcttcttccaggcctgtatccctttgtctttaagccctggaggagtcgaccctacattggcaaaaaacatttagcatgtcccttcctctctctgagtactgctacctatcctatatcccaaggctattgaatgcatattttaaactttacagaaaataccatgttatttagtattttaccatttttagggtaggacataggaatgtgttcctatctctcctatattttttctaaccaatgttttctctaatttttaaaccctttcatggagacgttttgtattttaggtgctgtcattcagagtccacaggatggatgaatggatatgaaaatgaacanacgtgtgacacaacactgcatgatttaccggcaatgactttctgatcaagcctgaagtgggttgtagcctctgtatttactttttattgacactttgcatcaagaggggaccgagctcg

SEQ ID NO: 381190 - DNA, 1586 bp, Homo sapiens
aagatttgtttttttattatttttttaatttttaaagattttcttttccccccttttccccctcccggccactccggtttgtgtttgccacaagactcataattcctttagaaagtggagtcgaattcataaaagtgatggggggagagcgcggagagggaaggctgggagccccagggagtcttcactacctacactgccgctcagctcccggcgcgagtggaggtcggggtggggagacgcgactcctgcccgggatggctgacactctgcgagccccggcggcccgcggccgggccgggtgactaggcggagggcgcggagggtccgcggcgggcgggtggcgctgcagcagcctgggcacggctgccgccgcccgcgggcgagagtgtgcacgggtgtggaaggccggagtgcgggccgtgaggggtgtgcgcgcttgagccggagcggggctcgcccctcgtcggctcccgccgcccagccggtgatcgctctccggccgtccccggcaccctcggccccccacggcggttggtccgggcgggggaaggagaaagtgagactcggtttcatcaccaatccatcgccagaaggggaggaaattggaatccagcagcggcgagcagcagctgggaggtcacatctggaaatggaaagccgacctcccccttctcctccacctccgtcctcctcctcctcctcctcctcctcctcctctcacccaggatcacttccgaaaccacttggccttcagcccctgcctcggccagaggtttcatttttaactgaatatttacgaaagctgaaagcgtgcgaggggggtggggtggaaatagcggctgcttcttttccaaggatttatttaatggggatgtgttcaaggcaagaccgaattcagaaggatatcgacgtcgtgatccagaagtccagagctgaggactgcctgtttgcaggtgagttcttgcttttccagaacctcggacccagcgcccccttctcagttctctgaccgcgacgtgtgtggctgggggtggggtggagggtttgcacgtccgcattccggggttcatttggcaacagctgctgcaacgaacgcgggagccaaaagcgggagggggcgccagcctcgccccttcccctccccccacccccaagtctggggcagctaccagctttgagggcagaacccgcgtggcccgagcgggggtctaggcgaaggggcagtgcgtggtatttccagccccgcgtagtgcccgaagcctgcaagcacgcctcctgggttccagcagcggcggcagagcggggttggttggacccgccaggtttgcgtaatgggctgagcggcggcggccgggaatggagcctgctgcgctgcgctcgtaagctgcgcccggcgccgaggacccccggggggcagcgctcggcccatctccggccccttcggctccatctagtcccctccgactggcaaagagaagggattcctcggattcccaaggcacccagcgcccctgcctggggggtcgcctttcgtccattttgctcccccgggagagagatcggattttgctttcgctgccgcg

SEQ ID NO: 381191 - DNA, 1981 bp, Homo sapiens
aagatttgtttttttattatttttttaatttttaaagattttcttttccccccttttccccctcccggccactccggtttgtgtttgccacaagactcataattcctttagaaagtggagtcgaattcataaaagtgatggggggagagcgcggagagggaaggctgggagccccagggagtcttcactacctacactgccgctcagctcccggcgcgagtggaggtcggggtggggagacgcgactcctgcccgggatggctgacactctgcgagccccggcggcccgcggccgggccgggtgactaggcggagggcgcggagggtccgcggcgggcgggtggcgctgcagcagcctgggcacggctgccgccgcccgcgggcgagagtgtgcacgggtgtggaaggccggagtgcgggccgtgaggggtgtgcgcgcttgagccggagcggggctcgcccctcgtcggctcccgccgcccagccggtgatcgctctccggccgtccccggcaccctcggccccccacggcggttggtccgggcgggggaaggagaaagtgagactcggtttcatcaccaatccatcgccagaaggggaggaaattggaatccagcagcggcgagcagcagctgggaggtcacatctggaaatggaaagccgacctcccccttctcctccacctccgtcctcctcctcctcctcctcctcctcctcctctcacccaggatcacttccgaaaccacttggccttcagcccctgcctcggccagaggtttcatttttaactgaatatttacgaaagctgaaagcgtgcgaggggggtggggtggaaatagcggctgcttcttttccaaggatttatttaatggggatgtgttcaaggcaagaccgaattcagaaggatatcgacgtcgtgatccagaagtccagagctgaggactgcctgtttgcagggcccgcctggcaggacgactgagcaagttcttggaaaaccagagatattagagcggtgaatcgcgctggtcacgttggacacctgcgcgttaggagattctggagccagagggagagaccccagaaacgccccggtcggcgacccagcccgagacgcctggggtcccaagggaagctgaacgcccggtgggctcccgggatggttcttccggttctttgtgccgccttcacccagtgaaggagcctgtatccaccctgcccagtcgctgttgggctgctgcggagcttccgctgccatcttcggatcctgtgttccgcccggggctccaccagggcagggatggtggtgagggtcgctcgtgggtcccctggcagggagcagggtctggcactcacaagggcgcacgactaggacttgtcgaatgaatcctttgtcgcctttagcttttagtcctttgaagagaggtgagagtggaaatcaagagatttttttccacggggaagttctttttacaaagcgttgatttcttggcaccccgcggggcgggcaactgacacgacctccggtgcaccttctgcgctgtggagcctctggggctcagctgggcggtggtcgggtcgtggggcggtagggcgggagcgggggaagggaaagcaaaagctggaaaagaagcaggggagttgtgaaccagacatccagacctcctgaagggctcgtgcagacgtacaggcgggatcttctggaagtgagaattgtttttgtttgtttatctattgtagcagaatggggaaatggagagagaacctgaaagagccccaaactcgaggacctattgctccccaagaataacatcttccagaactagacagaaaactaggcgtctgggaaccctgaaatccttggaggagtagatcatcatgaccctctgtgttccttttggcaaatgacttgcttccattgtttgtttgttcaattgtctgtttgttaaataaataaaacccttttcatgtatctttaaaatta

SEQ ID NO: 381192 - DNA, 2976 bp, Homo sapiens
aagatttgtttttttattatttttttaatttttaaagattttcttttccccccttttccccctcccggccactccggtttgtgtttgccacaagactcataattcctttagaaagtggagtcgaattcataaaagtgatggggggagagcgcggagagggaaggctgggagccccagggagtcttcactacctacactgccgctcagctcccggcgcgagtggaggtcggggtggggagacgcgactcctgcccgggatggctgacactctgcgagccccggcggcccgcggccgggccgggtgactaggcggagggcgcggagggtccgcggcgggcgggtggcgctgcagcagcctgggcacggctgccgccgcccgcgggcgagagtgtgcacgggtgtggaaggccggagtgcgggccgtgaggggtgtgcgcgcttgagccggagcggggctcgcccctcgtcggctcccgccgcccagccggtgatcgctctccggccgtccccggcaccctcggccccccacggcggttggtccgggcgggggaaggagaaagtgagactcggtttcatcaccaatccatcgccagaaggggaggaaattggaatccagcagcggcgagcagcagctgggaggtcacatctggaaatggaaagccgacctcccccttctcctccacctccgtcctcctcctcctcctcctcctcctcctcctctcacccaggatcacttccgaaaccacttggccttcagcccctgcctcggccagaggtttcatttttaactgaatatttacgaaagctgaaagcgtgcgaggggggtggggtggaaatagcggctgcttcttttccaaggatttatttaatggggatgtgttcaaggcaagaccgaattcagaaggatatcgacgtcgtgatccagaagtccagagctgaggactgcctgtttgcagggcccgcctggcaggacgactgagcaagttcttggaaaaccagagatattagagcggtgaatcgcgctggtcacgttggacacctgcgcgttaggagattctggagccagagggagagaccccagaaacgccccggtcggcgacccagcccgagacgcctggggtcccaagggaagctgaacgcccggtgggctcccgggatggttcttccggttctttgtgccgccttcacccagtgaaggagcctgtatccaccctgcccagtcgctgttgggctgctgcggagcttccgctgccatcttcggatcctgtgttccgcccggggctccaccagggcagggatggtggtgagggtcgctcgtgggtcccctggcagggagcagggtctggcactcacaagggcgcacgactaggacttgtcgaatgaatcctttgtcgcctttagcttttagtcctttgaagagaggtgagagtggaaatcaagagatttttttccacggggaagttctttttacaaagcgttgatttcttggcaccccgcggggcgggcaactgacacgacctccggtgcaccttctgcgctgtggagcctctggggctcagctgggcggtggtcgggtcgtggggcggtagggcgggagcgggggaagggaaagcaaaagctggaaaagaagcaggggagttgtgaaccagacatccagacctcctgaagggctcgtgcagacgtacaggcgggatcttctggaagtgagaattgtttttgtttgtttatctattgtagcagaatggggaaatggagagagaacctgaaagagccccaaactcgaggacctattgctccccaagaataacatcttccagaactagacagaaaactaggcgtctgggaaccctgaaatccttggaggagtagatcatcatgaccctctgtgttccttttggcaaatgacttgcttccattgtttgtttgttcaattgtctgtttgttaaataaataaaacccttttcatgtatctttaaaattaaaaaaaaaaaaaaaaaaaacaaaacaaaaaaaaaaaaaaaaaaaaaaaaaaaaaaaaaaaaaaaaacaacaaaaaaaaacaaaaaaaaagaaacaaaaaaagaaaaaagaaaaaaaaaaagagggggggcgccggcggcgaacaaaaacacccagagaggaggagagcgaaaacaaagaaagacacgacgaaatatacaaccaaagggaggagaccaaaagaggaggggagcaaacagaacagacggggggaggggagaaaaaacacaaaaacgagccaagagaaaaaaacacaaaaagagaggacaaaagagaacaagagcaaaacaagaggagaggaaaacaaaaggggaacacacatcaccaacaggaaaacaacaccacagaagaaacaacaacaaaaaaacaagagaaaaaaagggaaacaaaacaaacacaacaaaacagacgagaagagaaacactagagacacaagagaaaaaaaagaaaacaaaaaaacacaagcggaaaacgtaaacaaaagcggaggaagagaaacagagaaagaggaagacacacaaaagaaaaaagaaggacagaaccagagaggaaaaagagcaaacgaagggagaagaacacagagacgagaagaagaggaaaacaaaacagagccaacagagaggaaagaaaagaaagacaagcgcgagaggagaggaagcaacgaaagagaaagaggagcagccaacaagaggagacagagcaaggagaagaaggaaaccaaaaaaagggcaggggagtgaaaaggagacaaagaacagacagaaaagagaagaagaggccagacaagaacgacgcacaaagaccagagaacaagcgagaagacggacagagaacacagaagcgaaagaagagcaggagcagaagagacagacgacaagaagcaaagaacgaaacgagaagcgagaaagcaaggaaaagaccgtcagagagagagcagaagagcaaaggaagagaaag

SEQ ID NO: 381193 - DNA, 1666 bp, Homo sapiens
aagatttgtttttttattatttttttaatttttaaagattttcttttccccccttttccccctcccggccactccggtttgtgtttgccacaagactcataattcctttagaaagtggagtcgaattcataaaagtgatggggggagagcgcggagagggaaggctgggagccccagggagtcttcactacctacactgccgctcagctcccggcgcgagtggaggtcggggtggggagacgcgactcctgcccgggatggctgacactctgcgagccccggcggcccgcggccgggccgggtgactaggcggagggcgcggagggtccgcggcgggcgggtggcgctgcagcagcctgggcacggctgccgccgcccgcgggcgagagtgtgcacgggtgtggaaggccggagtgcgggccgtgaggggtgtgcgcgcttgagccggagcggggctcgcccctcgtcggctcccgccgcccagccggtgatcgctctccggccgtccccggcaccctcggccccccacggcggttggtccgggcgggggaaggagaaagtgagactcggtttcatcaccaatccatcgccagaaggggaggaaattggaatccagcagcggcgagcagcagctgggaggtcacatctggaaatggaaagccgacctcccccttctcctccacctccgtcctcctcctcctcctcctcctcctcctcctctcacccaggatcacttccgaaaccacttggccttcagcccctgcctcggccagaggtttcatttttaactgaatatttacgaaagctgaaagcgtgcgaggggggtggggtggaaatagcggctgcttcttttccaaggatttatttaatggggatgtgttcaaggcaagaccgaattcagaaggatatcgacgtcgtgatccagaagtccagagctgaggactgcctgtttgcagggcccgcctggcaggacgactgagcaagttcttggaaaaccagagatattagagcggtgaatcgcgctggtcacgttggacacctgcgcgttaggagattctggagccagagggagagaccccagaaacgccccggtcggcgacccagcccgagacgcctggggtcccaagggaagctgaacgcccggtgggctcccgggatggttcttccggttctttgtgccgccttcacccagtgaaggagcctgtatccaccctgcccagtcgctgttgggctgctgcggagcttccgctgccatcttcggatcctgtgttccgcccggggctccaccagggcagggatggtggtgagggtcgctcgtgggtcccctggcagggagcagggtctggcactcacaagggcgcacgactaggacttgtcgaatgaatcctttgtcgcctttagcttttagtcctttgaagagagcagaatggggaaatggagagagaacctgaaagagccccaaactcgaggacctattgctccccaagaataacatcttccagaactagacagaaaactaggcgtctgggaaccctgaaatccttggaggagtagatcatcatgaccctctgtgttccttttggcaaatgacttgcttccattgtttgtttgttcaattgtctgtttgttaaataaataaaacccttttcatgtatctttaaaatta

SEQ ID NO: 381194 - DNA, 1547 bp, Homo sapiens
aagatttgtttttttattatttttttaatttttaaagattttcttttccccccttttccccctcccggccactccggtttgtgtttgccacaagactcataattcctttagaaagtggagtcgaattcataaaagtgatggggggagagcgcggagagggaaggctgggagccccagggagtcttcactacctacactgccgctcagctcccggcgcgagtggaggtcggggtggggagacgcgactcctgcccgggatggctgacactctgcgagccccggcggcccgcggccgggccgggtgactaggcggagggcgcggagggtccgcggcgggcgggtggcgctgcagcagcctgggcacggctgccgccgcccgcgggcgagagtgtgcacgggtgtggaaggccggagtgcgggccgtgaggggtgtgcgcgcttgagccggagcggggctcgcccctcgtcggctcccgccgcccagccggtgatcgctctccggccgtccccggcaccctcggccccccacggcggttggtccgggcgggggaaggagaaagtgagactcggtttcatcaccaatccatcgccagaaggggaggaaattggaatccagcagcggcgagcagcagctgggaggtcacatctggaaatggaaagccgacctcccccttctcctccacctccgtcctcctcctcctcctcctcctcctcctcctctcacccaggatcacttccgaaaccacttggccttcagcccctgcctcggccagaggtttcatttttaactgaatatttacgaaagctgaaagcgtgcgaggggggtggggtggaaatagcggctgcttcttttccaaggatttatttaatggggatgtgttcaaggcaagaccgaattcagaaggatatcgacgtcgtgatccagaagtccagagctgaggactgcctgtttgcagggcccgcctggcaggacgactgagcaagttcttggaaaaccagagatattagagcggtgaatcgcgctggtcacgttggacacctgcgcgttaggagattctggagccagagggagagaccccagaaacgccccggtcggcgacccagcccgagacgcctggggtcccaagggaagctgaacgcccggtgggctcccgggatggttcttccggttctttgtgccgccttcacccagtgaaggagcctgtatccaccctgcccagtcgctgttgggctgctgcggagcttccgctgccatcttcggatcctgtgttccgcccggggctccaccagggcagggatggtgcagaatggggaaatggagagagaacctgaaagagccccaaactcgaggacctattgctccccaagaataacatcttccagaactagacagaaaactaggcgtctgggaaccctgaaatccttggaggagtagatcatcatgaccctctgtgttccttttggcaaatgacttgcttccattgtttgtttgttcaattgtctgtttgttaaataaataaaacccttttcatgtatctttaaaatta

SEQ ID NO: 381195 - DNA, 1356 bp, Homo sapiens
aagatttgtttttttattatttttttaatttttaaagattttcttttccccccttttccccctcccggccactccggtttgtgtttgccacaagactcataattcctttagaaagtggagtcgaattcataaaagtgatggggggagagcgcggagagggaaggctgggagccccagggagtcttcactacctacactgccgctcagctcccggcgcgagtggaggtcggggtggggagacgcgactcctgcccgggatggctgacactctgcgagccccggcggcccgcggccgggccgggtgactaggcggagggcgcggagggtccgcggcgggcgggtggcgctgcagcagcctgggcacggctgccgccgcccgcgggcgagagtgtgcacgggtgtggaaggccggagtgcgggccgtgaggggtgtgcgcgcttgagccggagcggggctcgcccctcgtcggctcccgccgcccagccggtgatcgctctccggccgtccccggcaccctcggccccccacggcggttggtccgggcgggggaaggagaaagtgagactcggtttcatcaccaatccatcgccagaaggggaggaaattggaatccagcagcggcgagcagcagctgggaggtcacatctggaaatggaaagccgacctcccccttctcctccacctccgtcctcctcctcctcctcctcctcctcctcctctcacccaggatcacttccgaaaccacttggccttcagcccctgcctcggccagaggtttcatttttaactgaatatttacgaaagctgaaagcgtgcgaggggggtggggtggaaatagcggctgcttcttttccaaggatttatttaatggggatgtgttcaaggcaagaccgaattcagaaggatatcgacgtcgtgatccagaagtccagagctgaggactgcctgtttgcagggcccgcctggcaggacgactgagcaagttcttggaaaaccagagatattagagcggtgaatcgcgctggtcacgttggacacctgcgcgttaggagattctggagccagagggagagaccccagaaacgccccggtcggcgacccagcccgagacgcctggggtcccaagggaagctgaacgcccggtgggctcccgggatggttcttccggttctttgtgccgccttcacccagtgaaggagcctgtatccaccctgcccaccgctatttccaccccacccccctcgcacgctttcagctttcgtaaatattcagttaaaaatgaaacctctggccgaggcaggggctgaaggccaagtggtttcggaagtgatcctgggtgagaggaggagaaggag

SEQ ID NO: 381196 - DNA, 1375 bp, Homo sapiens
aagatttgtttttttattatttttttaatttttaaagattttcttttccccccttttccccctcccggccactccggtttgtgtttgccacaagactcataattcctttagaaagtggagtcgaattcataaaagtgatggggggagagcgcggagagggaaggctgggagccccagggagtcttcactacctacactgccgctcagctcccggcgcgagtggaggtcggggtggggagacgcgactcctgcccgggatggctgacactctgcgagccccggcggcccgcggccgggccgggtgactaggcggagggcgcggagggtccgcggcgggcgggtggcgctgcagcagcctgggcacggctgccgccgcccgcgggcgagagtgtgcacgggtgtggaaggccggagtgcgggccgtgaggggtgtgcgcgcttgagccggagcggggctcgcccctcgtcggctcccgccgcccagccggtgatcgctctccggccgtccccggcaccctcggccccccacggcggttggtccgggcgggggaaggagaaagtgagactcggtttcatcaccaatccatcgccagaaggggaggaaattggaatccagcagcggcgagcagcagctgggaggtcacatctggaaatggaaagccgacctcccccttctcctccacctccgtcctcctcctcctcctcctcctcctcctcctctcacccaggatcacttccgaaaccacttggccttcagcccctgcctcggccagaggtttcatttttaactgaatatttacgaaagctgaaagcgtgcgaggggggtggggtggaaatagcggctgcttcttttccaaggatttatttaatggggatgtgttcaaggcaagaccgaattcagaaggatatcgacgtcgtgatccagaagtccagagctgaggactgcctgtttgcagggcggtggtcgggtcgtggggcggtagggcgggagcgggggaagggaaagcaaaagctggaaaagaagcaggggagttgtgaaccagacatccagacctcctgaagggctcgtgcagacgtacaggcgggatcttctggaagtgagaattgtttttgtttgtttatctattgtagcagaatggggaaatggagagagaacctgaaagagccccaaactcgaggacctattgctccccaagaataacatcttccagaactagacagaaaactaggcgtctgggaaccctgaaatccttggaggagtagatcatcatgaccctctgtgttccttttggcaaatgacttgcttccattgtttgtttgttcaattgtctgtttgttaaataaataaaacccttttcatgtatctttaaaatta

SEQ ID NO: 381197 - DNA, 1163 bp, Homo sapiens
aagatttgtttttttattatttttttaatttttaaagattttcttttccccccttttccccctcccggccactccggtttgtgtttgccacaagactcataattcctttagaaagtggagtcgaattcataaaagtgatggggggagagcgcggagagggaaggctgggagccccagggagtcttcactacctacactgccgctcagctcccggcgcgagtggaggtcggggtggggagacgcgactcctgcccgggatggctgacactctgcgagccccggcggcccgcggccgggccgggtgactaggcggagggcgcggagggtccgcggcgggcgggtggcgctgcagcagcctgggcacggctgccgccgcccgcgggcgagagtgtgcacgggtgtggaaggccggagtgcgggccgtgaggggtgtgcgcgcttgagccggagcggggctcgcccctcgtcggctcccgccgcccagccggtgatcgctctccggccgtccccggcaccctcggccccccacggcggttggtccgggcgggggaaggagaaagtgagactcggtttcatcaccaatccatcgccagaaggggaggaaattggaatccagcagcggcgagcagcagctgggaggtcacatctggaaatggaaagccgacctcccccttctcctccacctccgtcctcctcctcctcctcctcctcctcctcctctcacccaggatcacttccgaaaccacttggccttcagcccctgcctcggccagaggtttcatttttaactgaatatttacgaaagctgaaagcgtgcgaggggggtggggtggaaatagcggctgcttcttttccaaggatttatttaatggggatcttctggaagtgagaattgtttttgtttgtttatctattgtagcagaatggggaaatggagagagaacctgaaagagccccaaactcgaggacctattgctccccaagaataacatcttccagaactagacagaaaactaggcgtctgggaaccctgaaatccttggaggagtagatcatcatgaccctctgtgttccttttggcaaatgacttgcttccattgtttgtttgttcaattgtctgtttgttaaataaataaaacccttttcatgtatctttaaaatta

SEQ ID NO: 381198 - DNA, 1477 bp, Homo sapiens
aagatttgtttttttattatttttttaatttttaaagattttcttttccccccttttccccctcccggccactccggtttgtgtttgccacaagactcataattcctttagaaagtggagtcgaattcataaaagtgatggggggagagcgcggagagggaaggctgggagccccagggagtcttcactacctacactgccgctcagctcccggcgcgagtggaggtcggggtggggagacgcgactcctgcccgggatggctgacactctgcgagccccggcggcccgcggccgggccgggtgactaggcggagggcgcggagggtccgcggcgggcgggtggcgctgcagcagcctgggcacggctgccgccgcccgcgggcgagagtgtgcacgggtgtggaaggccggagtgcgggccgtgaggggtgtgcgcgcttgagccggagcggggctcgcccctcgtcggctcccgccgcccagccggtgatcgctctccggccgtccccggcaccctcggccccccacggcggttggtccgggcgggggaaggagaaagtgagactcggtttcatcaccaatccatcgccagaaggggaggaaattggaatccagcagcggcgagcagcagctgggaggtcacatctggaaatggaaagccgacctcccccttctcctccacctccgtcctcctcctcctcctcctcctcctcctcctctcacccaggatcacttccgaaaccacttggccttcagcccctgcctcggccagaggtttcatttttaactgaatatttacgaaagctgaaagcgtgcgaggggggtggggtggaaatagcggctgcttcttttccaaggatttatttaatggggatgtgttcaaggcaagaccgaattcagaaggatatcgacgtcgtgatccagaagtccagagctgaggactgcctgtttgcagatttcaggtactcagactccacctttacttttacctatgttggcggccccagaagctttaaatcatctaggaacttcatataaaatttaattccagtttcaactagttgtggagcatttgatccaaaataaaatgaaagtcctctctgaagctgtagaggaggctcaagaatcagaacaacctgaagttctttaagctgtcagttgaaggactagggtttgactgcaatgcagtgtgaatatcgcacatgggaccatttgtcatactgtcagatggcaatacatagatggatagaattttgctgtttgatcaaagctgtgccatcggaaacttgttttcccaagtatgggtacattctcctcttttcctgagtggagaaacctagatctgagcaaaaagcatgaatcaatacaccttgggaggcagggtgtgaaatatttgatgccatttcctttgcttgtaaattgttcatttcatttgaatataaatataaaaggacttctaccaagaacatgaaacta

SEQ ID NO: 381199 - DNA, 1500 bp, Homo sapiens
aagatttgtttttttattatttttttaatttttaaagattttcttttccccccttttccccctcccggccactccggtttgtgtttgccacaagactcataattcctttagaaagtggagtcgaattcataaaagtgatggggggagagcgcggagagggaaggctgggagccccagggagtcttcactacctacactgccgctcagctcccggcgcgagtggaggtcggggtggggagacgcgactcctgcccgggatggctgacactctgcgagccccggcggcccgcggccgggccgggtgactaggcggagggcgcggagggtccgcggcgggcgggtggcgctgcagcagcctgggcacggctgccgccgcccgcgggcgagagtgtgcacgggtgtggaaggccggagtgcgggccgtgaggggtgtgcgcgcttgagccggagcggggctcgcccctcgtcggctcccgccgcccagccggtgatcgctctccggccgtccccggcaccctcggccccccacggcggttggtccgggcgggggaaggagaaagtgagactcggtttcatcaccaatccatcgccagaaggggaggaaattggaatccagcagcggcgagcagcagctgggaggtcacatctggaaatggaaagccgacctcccccttctcctccacctccgtcctcctcctcctcctcctcctcctcctcctctcacccaggatcacttccgaaaccacttggccttcagcccctgcctcggccagaggtttcatttttaactgaatatttacgaaagctgaaagcgtgcgaggggggtggggtggaaatagcggctgcttcttttccaaggatttatttaatggggatgtgttcaaggcaagaccgaattcagaaggatatcgacgtcgtgatccagaagtccagagctgaggactgcctgtttgcagatttcaggtactcagactccacctttacttttacctatgttggcggccccagaagctttaaatcatctaggaacttcatataaaatttaattccagtttcaactagttgtggagcatttgatccaaaataaaatgaaagtcctctctgaagctgtagaggaggctcaagaatcagaacaacctgaagttctttaagctgtcagttgaaggactaggtaaaaaacaaatatcatttagtgtgatcattaatgcacatgagtcattattccatgtggttgctgtcgactggtcaggggcacttcaagccctaatctgtactttgtcctgtctctctacaccccgttctactttttcagcttgttgcctgtaatatgtgaatggaaataaaataatcaagcttgttagaattgtgttcataatgacacaaaagacctgagagaatgtaagaacatatagaacatccaaaataagacatatttttggttggtttaaaacctttttgtttgtttcattttcttctgtgcttaatgtatagttactatta

SEQ ID NO: 381200 - DNA, 1152 bp, Homo sapiens
  misc_feature (1005)..(1005): n is a, c, g, or t
aagatttgtttttttattatttttttaatttttaaagattttcttttccccccttttccccctcccggccactccggtttgtgtttgccacaagactcataattcctttagaaagtggagtcgaattcataaaagtgatggggggagagcgcggagagggaaggctgggagccccagggagtcttcactacctacactgccgctcagctcccggcgcgagtggaggtcggggtggggagacgcgactcctgcccgggatggctgacactctgcgagccccggcggcccgcggccgggccgggtgactaggcggagggcgcggagggtccgcggcgggcgggtggcgctgcagcagcctgggcacggctgccgccgcccgcgggcgagagtgtgcacgggtgtggaaggccggagtgcgggccgtgaggggtgtgcgcgcttgagccggagcggggctcgcccctcgtcggctcccgccgcccagccggtgatcgctctccggccgtccccggcaccctcggccccccacggcggttggtccgggcgggggaaggagaaagtgagactcggtttcatcaccaatccatcgccagaaggggaggaaattggaatccagcagcggcgagcagcagctgggaggtcacatctggaaatggaaagccgacctcccccttctcctccacctccgtcctcctcctcctcctcctcctcctcctcctctcacccaggatcacttccgaaaccacttggccttcagcccctgcctcggccagaggtttcatttttaactgaatatttacgaaagctgaaagcgtgcgaggggggtggggtggaaatagcggctgcttcttttccaaggatttatttaatggggatgtgttcaaggcaagaccgaattcagaaggatatcgacgtcgtgatccagaagtccagagctgaggactgcctgtttgcagctgtcattcagagtccacaggatggatgaatggatatgaaaatgaacanacgtgtgacacaacactgcatgatttaccggcaatgactttctgatcaagcctgaacatcccaagacaaccatgctgtgaagaagttggtctaccccactggagaaggaaaggctgttcagggaagtgaagatgccccagctgacag

SEQ ID NO: 381201 - DNA, 730 bp, Homo sapiens
cgcaggggctgctgcttcgccacctgctgcttcgccacgaaagagttcccgtgccgtgggagcaagtctgggacctctggtcggaacggagagtcgcagctgtgtgttagggctaggatggctcctggatgcgcgtgagggcccgcctggcaggacgactgagcaagttcttggaaaaccagagatattagagcggtgaatcgcgctggtcacgttggacacctgcgcgttaggagattctggagccagagggagagaccccagaaacgccccggtcggcgacccagcccgagacgcctggggtcccaagggaagctgaacgcccggtgggctcccgggatggttcttccggttctttgtgccgccttcacccagtgaaggagcctgtatccaccctgcccagtcgctgttgggctgctgcggagcttccgctgccatcttcggatcctgtgttccgcccggggctccaccagggcagggatggtgcagaatggggaaatggagagagaacctgaaagagccccaaactcgaggacctattgctccccaagaataacatcttccagaactagacagaaaactaggcgtctgggaaccctgaaatccttggaggagtagatcatcatgaccctctgtgttccttttggcaaatgacttgcttccattgtttgtttgttcaattgtctgtttgttaaataaataaaacccttttcatgtatctttaaaatta

SEQ ID NO: 381202 - DNA, 753 bp, Homo sapiens
cgcaggggctgctgcttcgccacctgctgcttcgccacgaaagagttcccgtgccgtgggagcaagtctgggacctctggtcggaacggagagtcgcagctgtgtgttagggctaggatggctcctggatgcgcgtgaggcaagtgaccttgcgtgtaaaggggcccgcctggcaggacgactgagcaagttcttggaaaaccagagatattagagcggtgaatcgcgctggtcacgttggacacctgcgcgttaggagattctggagccagagggagagaccccagaaacgccccggtcggcgacccagcccgagacgcctggggtcccaagggaagctgaacgcccggtgggctcccgggatggttcttccggttctttgtgccgccttcacccagtgaaggagcctgtatccaccctgcccagtcgctgttgggctgctgcggagcttccgctgccatcttcggatcctgtgttccgcccggggctccaccagggcagggatggtgcagaatggggaaatggagagagaacctgaaagagccccaaactcgaggacctattgctccccaagaataacatcttccagaactagacagaaaactaggcgtctgggaaccctgaaatccttggaggagtagatcatcatgaccctctgtgttccttttggcaaatgacttgcttccattgtttgtttgttcaattgtctgtttgttaaataaataaaacccttttcatgtatctttaaaatta

SEQ ID NO: 381203 - DNA, 841 bp, Homo sapiens
atgaatcttaaatatctcttgttttattttgaaaaattgttttcataagatacaattgagcaattgagatttgttctcccagtatctgaagatttttttggtcttgttttgttttttgggtttttggccctaaaattaggtgaattcagctttgggtctatttcatccattctggaaggttccttgggtcactgatctgaggcattcttgatgtggttaggacttcccagcattattttttttagatcctgtttatttaaaatgaaaaggattagcatgagggatggtaacattcctttttgatatctgtagcagcaagttttcttatgattcattattcttcttcttacagctttaaatcatctaggaacttcatataaaatttaattccagtttcaactagttgtggagcatttgatccaaaataaaatgaaagtcctctctgaagctgtagaggaggctcaagaatcagaacaacctgaagttctttaagctgtcagttgaaggactaggtaaaaaacaaatatcatttagtgtgatcattaatgcacatgagtcattattccatgtggttgctgtcgactggtcaggggcacttcaagccctaatctgtactttgtcctgtctctctacaccccgttctactttttcagcttgttgcctgtaatatgtgaatggaaataaaataatcaagcttgttagaattgtgttcataatgacacaaaagacctgagagaatgtaagaacatatagaacatccaaaataagacatatttttggttggtttaaaacctttttgtttgtttcattttcttctgtgcttaatgtatagttactatta

SEQ ID NO: 381204 - DNA, 589 bp, Homo sapiens
cgcaggggctgctgcttcgccacctgctgcttcgccacgaaagagttcccgtgccgtgggagcaagtctgggacctctggtcggaacggagagtcgcagctgtgtgttagggctaggatggctcctggatgcgcgtgaggcaagtgaccttgcgtgtaaaggggcccgcctggcaggacgactgagcaagttcttggaaaaccagagatattagagcggtgaatcgcgctggtcacgttggacacctgcgcgttaggagattctggagccagagggagagaccccagaaacgccccggtcggcgacccagcccgagacgcctggggtcccaagggaagctgaacgcagaatggggaaatggagagagaacctgaaagagccccaaactcgaggacctattgctccccaagaataacatcttccagaactagacagaaaactaggcgtctgggaaccctgaaatccttggaggagtagatcatcatgaccctctgtgttccttttggcaaatgacttgcttccattgtttgtttgttcaattgtctgtttgttaaataaataaaacccttttcatgtatctttaaaatta

SEQ ID NO: 381205 - DNA, 1305 bp, Homo sapiens
aagatttgtttttttattatttttttaatttttaaagattttcttttccccccttttccccctcccggccactccggtttgtgtttgccacaagactcataattcctttagaaagtggagtcgaattcataaaagtgatggggggagagcgcggagagggaagccggagcggggctcgcccctcgtcggctcccgccgcccagccggtgatcgctctccggccgtccccggcaccctcggccccccacggcggttggtccgggcgggggaaggagaaagtgagactcggtttcatcaccaatccatcgccagaaggggaggaaattggaatccagcagcggcgagcagcagctgggaggtcacatctggaaatggaaagccgacctcccccttctcctccacctccgtcctcctcctcctcctcctcctcctcctcctctcacccaggatcacttccgaaaccacttggccttcagcccctgcctcggccagaggtttcatttttaactgaatatttacgaaagctgaaagcgtgcgaggggggtggggtggaaatagcggctgcttcttttccaaggatttatttaatggggatgtgttcaaggcaagaccgaattcagaaggatatcgacgtcgtgatccagaagtccagagctgaggactgcctgtttgcaggtgagttcttgcttttccagaacctcggacccagcgcccccttctcagttctctgaccgcgacgtgtgtggctgggggtggggtggagggtttgcacgtccgcattccggggttcatttggcaacagctgctgcaacgaacgcgggagccaaaagcgggagggggcgccagcctcgccccttcccctccccccacccccaagtctggggcagctaccagctttgagggcagaacccgcgtggcccgagcgggggtctaggcgaaggggcagtgcgtggtatttccagccccgcgtagtgcccgaagcctgcaagcacgcctcctgggttccagcagcggcggcagagcggggttggttggacccgccaggtttgcgtaatgggctgagcggcggcggccgggaatggagcctgctgcgctgcgctcgtaagctgcgcccggcgccgaggacccccggggggcagcgctcggcccatctccggccccttcggctccatctagtcccctccgactggcaaagagaagggattcctcggattcccaaggcacccagcgcccctgcctggggggtcgcctttcgtccattttgctcccccgggagagagatcggattttgctttcgctgccgcg

SEQ ID NO: 381206 - DNA, 980 bp, Homo sapiens
caggaaacacggtaaaaatggtgtaaccccattcatggtttttttaaagaaggactaaaaaatgtagagttgttaacaaatggggaaaattacctcctcctcctcctcctcctctcacccaggatcacttccgaaaccacttggccttcagcccctgcctcggccagaggtttcatttttaactgaatatttacgaaagctgaaagcgtgcgaggggggtggggtggaaatagcggctgcttcttttccaaggatttatttaatggggatgtgttcaaggcaagaccgaattcagaaggatatcgacgtcgtgatccagaagtccagagctgaggactgcctgtttgcaggtgagttcttgcttttccagaacctcggacccagcgcccccttctcagttctctgaccgcgacgtgtgtggctgggggtggggtggagggtttgcacgtccgcattccggggttcatttggcaacagctgctgcaacgaacgcgggagccaaaagcgggagggggcgccagcctcgccccttcccctccccccacccccaagtctggggcagctaccagctttgagggcagaacccgcgtggcccgagcgggggtctaggcgaaggggcagtgcgtggtatttccagccccgcgtagtgcccgaagcctgcaagcacgcctcctgggttccagcagcggcggcagagcggggttggttggacccgccaggtttgcgtaatgggctgagcggcggcggccgggaatggagcctgctgcgctgcgctcgtaagctgcgcccggcgccgaggacccccggggggcagcgctcggcccatctccggccccttcggctccatctagtcccctccgactggcaaagagaagggattcctcggattcccaaggcacccagcgcccctgcctggggggtcgcctttcgtccattttgctcccccgggagagagatcggattttgctttcgctgccgcg

SEQ ID NO: 381207 - DNA, 1383 bp, Homo sapiens
aagatttgtttttttattatttttttaatttttaaagattttcttttccccccttttccccctcccggccactccggtttgtgtttgccacaagactcataattcctttagaaagtggagtcgaattcataaaagtgatggggggagagcgcggagagggaaggctgggagccccagggagtcttcactacctacactgccgctcagctcccggcgcgagtggaggtcggggtggggagacgcgactcctgcccgggatggctgacactctgcgagccccggcggcccgcggccgggccgggtgactaggcggagggcgcggagggtccgcggcgggcgggtggcgctgcagcagcctgggcacggctgccgccgcccgcgggcgagagtgtgcacgggtgtggaaggccggagtgcgggccgtgaggggtgtgcgcgcttgagccggagcggggctcgcccctcgtcggctcccgccgcccagccggtgatcgctctccggccgtccccggcaccctcggccccccacggcggttggtccgggcgggggaaggagaaagtgagactcggtttcatcaccaatccatcgccagaaggggaggaaattggaatccagcagcggcgagcagcagctgggaggtcacatctggaaatggaaagccgacctcccccttctcctccacctccgtcctcctcctcctcctcctcctcctcctcctctcacccaggatcacttccgaaaccacttggccttcagcccctgcctcggccagaggtttcatttttaactgaatatttacgaaagctgaaagcgtgcgaggggggtggggtggaaatagcggctgcttcttttccaaggatttatttaatggggatgtgttcaaggcaagaccgaattcagaaggatatcgacgtcgtgatccagaagtccagagctgaggactgcctgtttgcagggcccgcctggcaggacgactgagcaagttcttggaaaaccagagatattagagcggtgaatcgcgctggtcacgttggacacctgcgcgttaggagattctggagccagagggagagaccccagaaacgccccggtcggcgacccagcccgagacgcctggggtcccaagggaagctgaacgcagaatggggaaatggagagagaacctgaaagagccccaaactcgaggacctattgctccccaagaataacatcttccagaactagacagaaaactaggcgtctgggaaccctgaaatccttggaggagtagatcatcatgaccctctgtgttccttttggcaaatgacttgcttccattgtttgtttgttcaattgtctgtttgttaaataaataaaacccttttcatgtatctttaaaatta

SEQ ID NO: 381208 - DNA, 1601 bp, Homo sapiens
aagatttgtttttttattatttttttaatttttaaagattttcttttccccccttttccccctcccggccactccggtttgtgtttgccacaagactcataattcctttagaaagtggagtcgaattcataaaagtgatggggggagagcgcggagagggaaggctgggagccccagggagtcttcactacctacactgccgctcagctcccggcgcgagtggaggtcggggtggggagacgcgactcctgcccgggatggctgacactctgcgagccccggcggcccgcggccgggccgggtgactaggcggagggcgcggagggtccgcggcgggcgggtggcgctgcagcagcctgggcacggctgccgccgcccgcgggcgagagtgtgcacgggtgtggaaggccggagtgcgggccgtgaggggtgtgcgcgcttgagccggagcggggctcgcccctcgtcggctcccgccgcccagccggtgatcgctctccggccgtccccggcaccctcggccccccacggcggttggtccgggcgggggaaggagaaagtgagactcggtttcatcaccaatccatcgccagaaggggaggaaattggaatccagcagcggcgagcagcagctgggaggtcacatctggaaatggaaagccgacctcccccttctcctccacctccgtcctcctcctcctcctcctcctcctcctcctctcacccaggatcacttccgaaaccacttggccttcagcccctgcctcggccagagggttacatgcaagcgtgacagtatttacgcaggcagctgtgaagccgtgcgcacgtgcgcggctgggcgctggaacatagtcgtgctggcttcctttatccgaaggcactttactttcaagtggcggcatgctggttcagacggcaagcacccgacattcaggaacggatactcgaccgtcgatgcatcccagagagggtccaggagcatgcgggacgtggcatgtgaggcgaggggcccgcctggcaggacgactgagcaagttcttggaaaaccagagatattagagcggtgaatcgcgctggtcacgttggacacctgcgcgttaggagattctggagccagagggagagaccccagaaacgccccggtcggcgacccagcccgagacgcctggggtcccaagggaagctgaacgcccggtgggctcccgggatggttcttccggttctttgtgccgccttcacccagtgaaggagcctgtatccaccctgcccagtcgctgttgggctgctgcggagcttccgctgccatcttcggatcctgtgttccgcccggggctccaccagggcagggatggtgcagaatggggaaatggagagagaacctgaaagagccccaaactcgaggacctattgctccccaagaataacatcttccagaactagacagaaaactaggcgtctgggaaccctgaaatccttggaggagtagatcatcatgaccctctgtgttccttttggcaaatgacttgcttccattgtttgtttgttcaattgtctgtttgttaaataaataaaacccttttcatgtatctttaaaatta

SEQ ID NO: 381209 - DNA, 1493 bp, Homo sapiens
aagatttgtttttttattatttttttaatttttaaagattttcttttccccccttttccccctcccggccactccggtttgtgtttgccacaagactcataattcctttagaaagtggagtcgaattcataaaagtgatggggggagagcgcggagagggaaggctgggagccccagggagtcttcactacctacactgccgctcagctcccggcgcgagtggaggtcggggtggggagacgcgactcctgcccgggatggctgacactctgcgagccccggcggcccgcggccgggccgggtgactaggcggagggcgcggagggtccgcggcgggcgggtggcgctgcagcagcctgggcacggctgccgccgcccgcgggcgagagtgtgcacgggtgtggaaggccggagtgcgggccgtgaggggtgtgcgcgcttgagccggagcggggctcgcccctcgtcggctcccgccgcccagccggtgatcgctctccggccgtccccggcaccctcggccccccacggcggttggtccgggcgggggaaggagaaagtgagactcggtttcatcaccaatccatcgccagaaggggaggaaattggaatccagcagcggcgagcagcagctgggaggtcacatctggaaatggaaagccgacctcccccttctcctccacctccgtcctcctcctcctcctcctcctcctcctcctctcacccaggatcacttccgaaaccacttggccttcagcccctgcctcggccagaggtttcatttttaactgaatatttacgaaagctgaaagcgtgcgaggggggtggggtggaaatagcggctgcttcttttccaaggatttatttaatggggatgtgttcaaggcaagaccgaattcagaaggatatcgacgtcgtgatccagaagtccagagctgaggactgcctgtttgcagggcccgcctggcaggacgactgagcaagttcttggaaaaccagagatattagagcggtgaatcgcgctggtcacgttggacacctgcgcgttaggagattctggagccagagggagagaccccagaaacgccccggtcggcgacccagcccgagacgcctggggtcccaagggaagctgaacgcccggtgggctcccgggatggttcttccggttctttgtgccgccttcacccagtgaaggagcctgtatccaccctgcccagtcgctgttgggctgctgcggagcttccgctgccatcttcggatcctgtgttccgcccggggctccaccagggcagggatggtgcagaatggggaaatggagagagaacctgaaagagccccaaactcgaggacctattgctccccaagaataacatcttccagaactagacagaaaactaggcgtctgggcaaatgacttgcttccattgtttgtttgttcaattgtctgtttgttaaataaataaaacccttttcatgtatctttaaaatta

SEQ ID NO: 381210 - DNA, 1213 bp, Homo sapiens
aagatttgtttttttattatttttttaatttttaaagattttcttttccccccttttccccctcccggccactccggtttgtgtttgccacaagactcataattcctttagaaagtggagtcgaattcataaaagtgatggggggagagcgcggagagggaaggctgggagccccagggagtcttcactacctacactgccgctcagctcccggcgcgagtggaggtcggggtggggagacgcgactcctgcccgggatggctgacactctgcgagccccggcggcccgcggccgggccgggtgactaggcggagggcgcggagggtccgcggcgggcgggtggcgctgcagcagcctgggcacggctgccgccgcccgcgggcgagagtgtgcacgggtgtggaaggccggagtgcgggccgtgaggggtgtgcgcgcttgagccggagcggggctcgcccctcgtcggctcccgccgcccagccggtgatcgctctccggccgtccccggcaccctcggccccccacggcggttggtccgggcgggggaaggagaaagtgagactcggtttcatcaccaatccatcgccagaaggggaggaaattggaatccagcagcggcgagcagcagctgggaggtcacatctggaaatggaaagccgacctcccccttctcctccacctccgtcctcctcctcctcctcctcctcctcctcctctcacccaggatcacttccgaaaccacttggccttcagcccctgcctcggccagaggtttcatttttaactgaatatttacgaaagcccggtgggctcccgggatggttcttccggttctttgtgccgccttcacccagtgaaggagcctgtatccaccctgcccagtcgctgttgggctgctgcggagcttccgctgccatcttcggatcctgtgttccgcccggggctccaccagggcagggatggtgcagaatggggaaatggagagagaacctgaaagagccccaaactcgaggacctattgctccccaagaataacatcttccagaactagacagaaaactaggcgtctgggaaccctgaaatccttggaggagtagatcatcatgaccctctgtgttccttttggcaaatgacttgcttccattgtttgtttgttcaattgtctgtttgttaaataaataaaacccttttcatgtatctttaaaatta

SEQ ID NO: 381211 - DNA, 1200 bp, Homo sapiens
aagatttgtttttttattatttttttaatttttaaagattttcttttccccccttttccccctcccggccactccggtttgtgtttgccacaagactcataattcctttagaaagtggagtcgaattcataaaagtgatggggggagagcgcggagagggaaggctgggagccccagggagtcttcactacctacactgccgctcagctcccggcgcgagtggaggtcggggtggggagacgcgactcctgcccgggatggctgacactctgcgagccccggcggcccgcggccgggccgggtgactaggcggagggcgcggagggtccgcggcgggcgggtggcgctgcagcagcctgggcacggctgccgccgcccgcgggcgagagtgtgcacgggtgtggaaggccggagtgcgggccgtgaggggtgtgcgcgcttgagccggagcggggctcgcccctcgtcggctcccgccgcccagccggtgatcgctctccggccgtccccggcaccctcggccccccacggcggttggtccgggcgggggaaggagaaagtgagactcggtttcatcaccaatccatcgccagaaggggaggaaattggaatccagcagcggcgagcagcagctgggaggtcacatctggaaatggaaagccgacctcccccttctcctccacctccgtcctcctcctcctcctcctcctcctcctcctctcacccaggatcacttccgaaaccacttggccttcagcccctgcctcggccagaggtttcatttttaactgaatatttacgaaagctgaaagcgtgcgaggggggtggggtggaaatagcggctgcttcttttccaaggatttatttaatggggatgtgttcaaggcaagaccgaattcagaaggatatcgacgtcgtgatccagaagtccagagctgaggactgcctgtttgcagcagaatggggaaatggagagagaacctgaaagagccccaaactcgaggacctattgctccccaagaataacatcttccagaactagacagaaaactaggcgtctgggaaccctgaaatccttggaggagtagatcatcatgaccctctgtgttccttttggcaaatgacttgcttccattgtttgtttgttcaattgtctgtttgttaaataaataaaacccttttcatgtatctttaaaatta

SEQ ID NO: 381212 - DNA, 1459 bp, Homo sapiens
aagatttgtttttttattatttttttaatttttaaagattttcttttccccccttttccccctcccggccactccggtttgtgtttgccacaagactcataattcctttagaaagtggagtcgaattcataaaagtgatggggggagagcgcggagagggaaggctgggagccccagggagtcttcactacctacactgccgctcagctcccggcgcgagtggaggtcggggtggggagacgcgactcctgcccgggatggctgacactctgcgagccccggcggcccgcggccgggccgggtgactaggcggagggcgcggagggtccgcggcgggcgggtggcgctgcagcagcctgggcacggctgccgccgcccgcgggcgagagtgtgcacgggtgtggaaggccggagtgcgggccgtgaggggtgtgcgcgcttgagccggagcggggctcgcccctcgtcggctcccgccgcccagccggtgatcgctctccggccgtccccggcaccctcggccccccacggcggttggtccgggcgggggaaggagaaagtgagactcggtttcatcaccaatccatcgccagaaggggaggaaattggaatccagcagcggcgagcagcagctgggaggtcacatctggaaatggaaagccgacctcccccttctcctccacctccgtcctcctcctcctcctcctcctcctcctcctctcacccaggatcacttccgaaaccacttggccttcagcccctgcctcggccagaggtttcatttttaactgaatatttacgaaagctgaaagcgtgcgaggggggtggggtggaaatagcggctgcttcttttccaaggatttatttaatggggatgtgttcaaggcaagaccgaattcagaaggatatcgacgtcgtgatccagaagtccagagctgaggactgcctgtttgcagatttcaggtactcagactccacctttacttttacctatgttggcggccccagaaggtatttatgggtgtagagttgcttcatttcctgttcacactcttgtgtttcctttgttcttagcgtgttccgtgttcgggtattttggttgcttgtttgattactgtggcttttctttacctacaacccaagcctgacgtccctcggttttaaatagcagggggaggggaatcaatgtttgattcaggtgtttcgaagaccacgccacaggcgatgagcagaactcttcatgttgaaacggttctgctacagtactagattgctctcaggcgatttggggttgatacaggcaagccggtgcaaaactggaatactggatatgaagtgaaatgtataaaagacataaaatgtcacaaaatagtttgatcacaagtgttgattttcctggtgagttggggctgcgtgtttccatgttttctgaaggttcacataaacatgcagcctgcca

SEQ ID NO: 381213 - DNA, 476 bp, Homo sapiens
aaaataaacagcaaacttaaagcagaaatccactaatccatgggcctgtaatcatcctcaatatttactaatagcattacattagctttaaggctgtacacagccagagttctgtgagcaaggatatacctgctcataaagagactaactggtttccctttcatgtctttaattcttttcactttccatgcgaattgtcctaagcatttatgctttttataggcttctgatgatctagcctctgatctattcactttcccacttttgctaactaatcccttcctgcctttatcagctgatttttaaatgtcaggctgggtaggttgatttcagaggctatatttaaaaggagatctgagtatttgactcttgattgagacagcatacttagatatttgatgaaggtccaggaggccatttcttattttttcaatcacattttgggagcagaggtatagcggttcacatggcactct

SEQ ID NO: 381214 - DNA, 377 bp, Homo sapiens
tcagacggagtctgactgtgttgcccagatcttggctcactgcaacctctgcctcccaggttcaagcgattctcctgcctcagccaaccaagtagctgggactataggcatgcgccaccacgtccagctaatttttgtatttttagtagagacggggtttcaccatgttggtcaggctggtcttgaactcctgaccttgtgatccgcccgccttggcctcccaaagtgctgggattacaggcatgagccaccgcacccaggcacacctggatttcttatctgcctcctggaccccacccagaaagaacagggtcatcttccacctttgctattccattccaccattactccagcccaattccctgcctctccagggg

SEQ ID NO: 381215 - DNA, 250 bp, Homo sapiens
gcaaagctgcctcttcattgactgcaaacaccaatttctttcacccaggattataagttggtggtcacgggctcactactgccattacagtgataaacagtttaaaccacaacaggatctgacatgtagatcaattctgggtccataaagaatctacacaagaggttgcaggacaggaatttacagccaccagtttttattctctcttgctgcaaaaattacttctgtcaaacacttagaagagtgggaa

SEQ ID NO: 381216 - DNA, 5738 bp, Homo sapiens
agcggagcggcggcggcggcgcggctactgctggggctgctgggctgcggggctgcggggctgcgggtcggggaggccgggccgggccgggccgggccccgctgaccgccatgctgaccttcttcctcgtgtcggggggctccctctggctattcgtagagtttgtcctctcacttctggagaagatgcagacacaggagatcctgaggatactgcgactgcctgagctaggtgacttgggacagtttttccgcagcctctcggccaccaccctcgtgagtatgggtgccctggctgccatccttgcctactggttcactcaccggccaaaggccttgcagccgccatgcaacctcctgatgcagtcagaagaagtagaggacagtggcggggcacggcgatctgtgattgggtctggccctcagctacttacccactactatgatgatgcccggaccatgtaccaggtgttccgccgtgggcttagcatctcagggaatgggccctgtcttggtttcaggaagcctaagcagccttaccagtggctgtcctaccaggaggtggccgacagggctgaatttctggggtccggacttctccagcacaattgtaaagcatgcactgatcagtttattggtgtttttgcacaaaatcggccagagtggatcattgtggagctggcctgctacacatattccatggtggtggtcccgctctatgacaccctgggccctggggctatccgctacatcatcaatacagcggacatcagcaccgtgattgtggacaaacctcagaaggctgtgcttctgctagagcatgtggagaggaaggagactccaggcctcaagctgatcatcctcatggacccattcgaagaagccctgaaagagagagggcagaagtgcggggtggtcattaagtccatgcaggccgtggaggactgtggccaagagaatcaccaggctcctgtgcccccgcagcctgatgacctctccattgtgtgtttcacaagcggcacgacagggaacccaaaaggtgcgatgctcacccatgggaacgtggtggctgatttctcaggctttctgaaagtgacagagaaagtgatctttccgagacaggacgatgtgctcatctccttcctgcctctggctcacatgtttgagagagtaatccagtctgtcgtctattgccacggagggcgtgttggcttcttccagggagatatccgccttctctcagatgacatgaaggctctatgccccaccatcttccctgtggtcccacgactgctgaaccggatgtacgacaagatcttcagccaggcaaacacaccattaaagcgctggctcctggagtttgcagcaaagcgtaagcaagccgaggtccggagtggaatcatcaggaatgatagtatctgggatgaactcttctttaataagattcaggccagtcttggtgggtgtgtgcggatgattgttactggagcagccccagcatcaccaacagttctgggatttctccgggcagctctagggtgccaggtttatgaaggttatggccaaactgagtgcacagctggatgtaccttcaccactcctggcgactggacctcagggcacgtaggggcgccacttccctgcaatcatatcaagctcgttgatgttgaggaactgaactactgggcctgcaaaggagagggagagatatgtgtgagaggaccaaatgtgttcaaaggctacttgaaagatccagacaggacgaaggaggccctggacagcgatggctggcttcacactggagacatcggaaaatggctgccggcaggaactcttaaaattattgatcggaaaaagcatatatttaaacttgctcagggagaatatgttgcacccgagaagattgagaacatctacatccggagccaacctgtggcgcaaatctatgtccatggggacagcttaaaggcctttttggtaggcattgttgtgcctgaccctgaagttatgccctcctgggcccagaagagaggaattgaaggaacatatgcagatctctgcacaaataaggatctgaagaaagccattttggaagatatggtgaggttaggaaaagaaagtggactccattcttttgagcaggttaaagccattcacatccattctgacatgttctcagttcaaaatggcttgctgacaccaacactaaaagctaagagacctgagctgagagagtacttcaaaaaacaaatagaagagctttactcaatctccatgtgaagttcaaggaaagttcttctcagtgtaatgaactgtctagcaatattatagttattcttgaaagtaatgagtcaaaatgacacagctgaaaatgaataagcatctgattttatgactgagccttttcctgtcccaagaggtctttaacaatattttctctatcatcaatgagtatattttatttttattataaaaatgatattgtggtggactgctaaaaatatcacaaatggcaatgtaaaaatcaagacattttctcaagaactgtgtaccactaaaagtaatatattgtcaatgttcacagaactattaaacataaaggaaaaacataagtgatatattctacttaattatttgtgaatcagtaaccagatgcagcaaatatctaggcaatgtggactacctcattcagtaactgattgtcaaaatcacaattaaatcagacttcaaaaattaaagctaggtgtatagaatcatgctaaaagaaaacatgataactcatagtctacgtaacttcagagtctttaaacatgacaatccacattgtcatatgtgaaaattttctctctgatttttactttcattcatgaaaaatgaaaattcagaaattctttttttcctttttgttttgagacagggtctgctctgtcacctaggctggagtgcagtggcttaatcatggctcattgcagtctccatctcctgggctcgagtgatcctcctgtctcacctcccaagtagctgagactacagtacaggcacatgccaccacacctgggctaataggaaattttttttttaggggttttggctcaggctggtctcaaactcctgagctcaagggatcctcccgccttggcctccctaagtgctaggattacaggcatgagccattgttcccagccaaattcagatattattaaaacacatgtcatatttatatagtaacttacaaagacctttcaatacattttctcatttattaagctcattaaagtattcaggaactacctagaaaaaatataatgtaaaactattcaaggatagtgtgtgtatgttcatggacttcttattataatgaattctaaaagacatctgttgactctacaatgaatggatccttgaggaatacttgggagaagaaactcagagttatttctcagggtaggcagcaattaatgtacctacattccttgctggggtcttctagtcttccattcccaatgtgcccatgctatgcctggaaaccctatatggttgtaattctgaacaatttcactttttttccagtaagaatatcaaggcagaaggtgggaaggaggggacattatttccagggaaaatagtttttcaacaatataactttgataaacctctttaaaatgccccaagaaaactttttaagtccatagacaaagaaatactgcctaatggcataattacattcctaaaatctttaagcgtgccgaagtttaaccactaaaacctcctttcttgcattatgtatttagatgcaccctgtattggggtgtcaacaatttcttataattaaaggccagataccatggacagcaattaagttccaagctatagattgtgcctctgaaaaaggcatggaccccaggaacgtgtttttcttctgtagagacaagactctaaaagcatatcaacaatccatatgcaattccatgtgttaatttaaaatgtatgtgctcagtgtttgtagtctagaagctcctttcccttggaggaatgccaagcagtttgcaaaaataaatgctgttagttaaaaaccacataatcacatgggcctactgaataaatatgcatcagtgattatatacttatatttcagtcttgtcaaaagtgaatcactgtttcatttgatgtatttacccagtctttttatccagtttttcttgggcatattctctctgaagacccactgttgcacttctaaatttgacagttaagaaatgagctagttctatacacactgatttttaaaggcgtttctgaataaactaatacttaaaatgtcaaaagtcacatctgtacagcattagatttttatatttaatatatatttgactaattaaaagtgaaagttgttacctgaactggatattcatactattttaagggcaagttgcttacatttcaataacaacaaaaaaagaatctgtttcccattgtcctcctactcaactaaaattcatagttggctttaagcccaaaagaattttgaacaatgtgacagaaacaagtaatgtaaaacttattttgttttatttatactttataatagttagatataacagattatggacaacttaatatttcttctttttggctgggcgcggtggctcatgcctgtagtcccagcactttgggaggccgaggcgggcagatcacgaagtcaggagatcgagaccatcctggctaacacagtgaaaccccgtctctactaaaaaaatacaaaaaattagccgggcgttgtggcgggcgcctgtagtcccagctactcgggaggctgaggcaggagaatggcatgagcctgggaggcggagcttgcagtgagccgagatcccgccactgtactccagcctgggcaacagaacgagactccgtctcaaaaagaaagaaaaaaaaaaaacaaaaacaaggtttcttctttttgccacttaaaatatcttatatttctagatttccaggtctatgtggaaatcatcacacttgggccaataaatgggttagttcagatgtgctgagaaaagtaaatagtgtaccctaaatatcttgcatgtacatttatctatttctctgtttaatgccacttaattttgtaagaaatgagaaatgaaaccctatgtatcagtggaaaaatccttcttgcttcagatttcccaactttattctggaggagaaaaaaatctgtatttctcattaacagagatagaaaaaggtgatgtacttacgatggtcacattcatattgggcattggatctatttaagcctagaagtataacagataatcagttccttaagtgtaaatatgttcttaaatgtttggcctttttatctgttattcaaatgtattagtaattctcatattttgcaaacagatccttttgtgtatattataaaatatataccaaatctgtttttccttttgctgtggaagatgtctttatataatattgagacttcccttgcaaatgagagacgggactctggtcaggtatagtgtgtaggcctagccccatgtattaggaactcataaactcagaaatccaaggattaaacattttatgtctccttcatttatgcaagtcatgctttcattctacatgtagttaaaactacaagtatgagaaaaaatagaactttccattggaattttttccaatcaggtaatgttttagcaacttgaaatcagcacttaatttgattgtatt

SEQ ID NO: 381217 - DNA, 3149 bp, Homo sapiens
gccttatctgactcttgttttcaacaagtttgtcctctcacttctggagaagatgcagacacaggagatcctgaggatactgcgactgcctgagctaggtgacttgggacagtttttccgcagcctctcggccaccaccctcgtgagtatgggtgccctggctgccatccttgcctactggttcactcaccggccaaaggccttgcagccgccatgcaacctcctgatgcagtcagaagaagtagaggacagtggcggggcacggcgatctgtgattgggtctggccctcagctacttacccactactatgatgatgcccggaccatgtaccaggtgttccgccgtgggcttagcatctcagggaatgggccctgtcttggtttcaggaagcctaagcagccttaccagtggctgtcctaccaggaggtggccgacagggctgaatttctggggtccggacttctccagcacaattgtaaagcatgcactgatcagtttattggtgtttttgcacaaaatcggccagagtggatcattgtggagctggcctgctacacatattccatggtggtggtcccgctctatgacaccctgggccctggggctatccgctacatcatcaatacagcggacatcagcaccgtgattgtggacaaacctcagaaggctgtgcttctgctagagcatgtggagaggaaggagactccaggcctcaagctgatcatcctcatggacccattcgaagaagccctgaaagagagagggcagaagtgcggggtggtcattaagtccatgcaggccgtggaggactgtggccaagagaatcaccaggctcctgtgcccccgcagcctgatgacctctccattgtgtgtttcacaagcggcacgacagggaacccaaaaggtgcgatgctcacccatgggaacgtggtggctgatttctcaggctttctgaaagtgacagagagtcagtgggctcccacttgtgcggatgtgcacatttcctatttgcctttagcacacatgtttgagcgaatggtgcagtctgtcgtctattgccacggagggcgtgttggcttcttccagggagatatccgccttctctcagatgacatgaaggctctatgccccaccatcttccctgtggtcccacgactgctgaaccggatgtacgacaagatcttcagccaggcaaacacaccattaaagcgctggctcctggagtttgcagcaaagcgtaagcaagccgaggtccggagtggaatcatcaggaatgatagtatctgggatgaactcttctttaataagattcaggccagtcttggtgggtgtgtgcggatgattgttactggagcagccccagcatcaccaacagttctgggatttctccgggcagctctagggtgccaggtttatgaaggttatggccaaactgagtgcacagctggatgtaccttcaccactcctggcgactggacctcagggcacgtaggggcgccacttccctgcaatcatatcaagctcgttgatgttgaggaactgaactactgggcctgcaaaggagagggagagatatgtgtgagaggaccaaatgtgttcaaaggctacttgaaagatccagacaggacgaaggaggccctggacagcgatggctggcttcacactggagacatcggaaaatggctgccggcaggaactcttaaaattattgatcggaaaaagcatatatttaaacttgctcagggagaatatgttgcacccgagaagattgagaacatctacatccggagccaacctgtggcgcaaatctatgtccatggggacagcttaaaggcctttttggtaggcattgttgtgcctgaccctgaagttatgccctcctgggcccagaagagaggaattgaaggaacatatgcagatctctgcacaaataaggatctgaagaaagccattttggaagatatggtgaggttaggaaaagaaagtggactccattcttttgagcaggacctaccacagtgcttaatacagattaaggtgttcagtaaatattgattcaatgactcaaaacccgaggtaaaaccaggttcgaagagaaaaggcaaagtgcacggcttgtcgaagattgcagagaaagcagagcggagcaggcagggaggtagcggctctgggccgttcagccctcgcttaggagttacaggagagaaaagcctgcaagaaaataggtctagtgaagacacccaggatgagaagattgcatcgttgcgtgaatcagttactgatgacctccaggttgatagtagttcatcaaatagtgaactagtatcaggattaagtttgcaccatggtatggccagttctcttctgagctattcagtcacagactcttatgcagaatacaagagttttgaagagagctttccatcacctgaactgttcagaaaatcagattatttagactgggagtgtcccaacttggaagaacacatgcagtggaagaattctactcttctggataccagtaaagcagtagcgatagagaaggcaccacagttttcaaatgtctcagcaattttcagtacctcttcagaagactatcagaaatgccatagaaaaacagtgatgacagtagcagatcaaaatgtttctccaaaagcaaagtgtgcttcaaattcagaatcagaaaacaaattccagtactcctggtaagaaaaacagaggccttttaacaagtactccatcttcagagacagctggttttgtgattgatttgtcctcagtgcaaaaagcatcttttgaagaactatttccaaatgtcagcaattatgttaattcaaatgaaattgttcctgtgtcaagtttgcaggaaaattcttcaaatgagtttcctgcaaatgcatcagaaatatgttgtattattagaacatcaccaggaactagacaagtgaaaaataaaggtgttattgtaaagaagaagaaatattctcttcctaaggatacccctcaagatatcataataaaaatggcatgaaaaaacagctgtggctgaattttcaccactttgaagacaggagtgtgaagtcaaagtctataaagcagaatgtctgcctgaaattatatgaaattaaaaattaaaaattctccagtt

SEQ ID NO: 381218 - DNA, 567 bp, Homo sapiens
ggcctttgctttctccagcactttgttttattaccaacacttgcagtaacaaatgcccctttaaagatgtgttactttccatccataattccccactttggccactcagagattttaaggggcttggaacatcttcagtgctaaaacagatctgaacactaacaaatgccatcttgctccggtgttccagggcacgtaggggcgccacttccctgcaatcatatcaagctcgttgatgttgaggaactgaactactgggcttgccagatgagaggtggtaattggagtgttgccagggagtatcagcctcagttgcgggctgtgggttagcacatgttggcacaatcatcagttgtactttacccaaaagtgttgtttcctctacctccattttgaaatgtgttcttgtcttgtaatttttctcatatggtttgattcagatgtgtctttagacagggccttgaatttctgacttgggtagattcatagtcatgcatttttgtttttctctttctcttgacacgtttttggagaaacgtccataattggtgaattttctgtatgaca

SEQ ID NO: 381219 - DNA, 315 bp, Homo sapiens
ttgttgtggtgattgatactcaagagaagtgagccccgcctcgtctgtttgtttcctgcaaatgcatcagaaatatgttgtattattagaacatcaccaggaactagacaagtgaaaaataaaggtgttattgtaaagaagaagaaatattctcttcctaaggatacccctcaagatatcataataaaaatggcatgaaaaaacagctgtggctgaattttcaccactttgaagacaggagtgtgaagtcaaagtctataaagcagaatgtctgcctgaaattatatgaaattaaaaattaaaaattctccagtt

SEQ ID NO: 381220 - DNA, 498 bp, Homo sapiens
atgactacgatctattatttatagatatcctgttaaggaaattggagaagaaaaaaacctttattgtacaccctttcctgcaaatgcatcagaaatatgttgtattattagaacatcaccaggaactagacaagtgaaaaataaaggtgttattgtaaagaagaagaaatattctcttcctaaggatacccctcaagatatcataataaaaatggcatgaaaaaacagctgtggctgaattttcaccactttgaagacaggagtgtgaagtcaaagtctataaagcagaatgtctgcctgaaattatatgaaattaaaaattaaaaattctccagttatttgtgatatatctctatgttgaaattctactgaggttcttgtcatttacttttaatcagttaagaaaaaaaattattccatatgcttcttaaatatatgtatttatattaaaagataaagaaccaaaaaagaaaaaacaaaatggcctcgctggcctca

SEQ ID NO: 381221 - DNA, 5680 bp, Homo sapiens
cgcgtgttgatggggtgggtggcggcggggtgggctcaatgtcacgctctggcgctcgtcgcccgtgctcccccttccagccggtttccgcagaatgccagagtttgtcctctcacttctggagaagatgcagacacaggagatcctgaggatactgcgactgcctgagctaggtgacttgggacagtttttccgcagcctctcggccaccaccctcgtgagtatgggtgccctggctgccatccttgcctactggttcactcaccggccaaaggccttgcagccgccatgcaacctcctgatgcagtcagaagaagtagaggacagtggcggggcacggcgatctgtgattgggtctggccctcagctacttacccactactatgatgatgcccggaccatgtaccaggtgttccgccgtgggcttagcatctcagggaatgggccctgtcttggtttcaggaagcctaagcagccttaccagtggctgtcctaccaggaggtggccgacagggctgaatttctggggtccggacttctccagcacaattgtaaagcatgcactgatcagtttattggtgtttttgcacaaaatcggccagagtggatcattgtggagctggcctgctacacatattccatggtggtggtcccgctctatgacaccctgggccctggggctatccgctacatcatcaatacagcggacatcagcaccgtgattgtggacaaacctcagaaggctgtgcttctgctagagcatgtggagaggaaggagactccaggcctcaagctgatcatcctcatggacccattcgaagaagccctgaaagagagagggcagaagtgcggggtggtcattaagtccatgcaggccgtggaggactgtggccaagagaatcaccaggctcctgtgcccccgcagcctgatgacctctccattgtgtgtttcacaagcggcacgacagggaacccaaaaggtgcgatgctcacccatgggaacgtggtggctgatttctcaggctttctgaaagtgacagagaaagtgatctttccgagacaggacgatgtgctcatctccttcctgcctctggctcacatgtttgagagagtaatccagtctgtcgtctattgccacggagggcgtgttggcttcttccagggagatatccgccttctctcagatgacatgaaggctctatgccccaccatcttccctgtggtcccacgactgctgaaccggatgtacgacaagatcttcagccaggcaaacacaccattaaagcgctggctcctggagtttgcagcaaagcgtaagcaagccgaggtccggagtggaatcatcaggaatgatagtatctgggatgaactcttctttaataagattcaggccagtcttggtgggtgtgtgcggatgattgttactggagcagccccagcatcaccaacagttctgggatttctccgggcagctctagggtgccaggtttatgaaggttatggccaaactgagtgcacagctggatgtaccttcaccactcctggcgactggacctcagggcacgtaggggcgccacttccctgcaatcatatcaagctcgttgatgttgaggaactgaactactgggcctgcaaaggagagggagagatatgtgtgagaggaccaaatgtgttcaaaggctacttgaaagatccagacaggacgaaggaggccctggacagcgatggctggcttcacactggagacatcggaaaatggctgccggcaggaactcttaaaattattgatcggaaaaagcatatatttaaacttgctcagggagaatatgttgcacccgagaagattgagaacatctacatccggagccaacctgtggcgcaaatctatgtccatggggacagcttaaaggcctttttggtaggcattgttgtgcctgaccctgaagttatgccctcctgggcccagaagagaggaattgaaggaacatatgcagatctctgcacaaataaggatctgaagaaagccattttggaagatatggtgaggttaggaaaagaaagtggactccattcttttgagcaggttaaagccattcacatccattctgacatgttctcagttcaaaatggcttgctgacaccaacactaaaagctaagagacctgagctgagagagtacttcaaaaaacaaatagaagagctttactcaatctccatgtgaagttcaaggaaagttcttctcagtgtaatgaactgtctagcaatattatagttattcttgaaagtaatgagtcaaaatgacacagctgaaaatgaataagcatctgattttatgactgagccttttcctgtcccaagaggtctttaacaatattttctctatcatcaatgagtatattttatttttattataaaaatgatattgtggtggactgctaaaaatatcacaaatggcaatgtaaaaatcaagacattttctcaagaactgtgtaccactaaaagtaatatattgtcaatgttcacagaactattaaacataaaggaaaaacataagtgatatattctacttaattatttgtgaatcagtaaccagatgcagcaaatatctaggcaatgtggactacctcattcagtaactgattgtcaaaatcacaattaaatcagacttcaaaaattaaagctaggtgtatagaatcatgctaaaagaaaacatgataactcatagtctacgtaacttcagagtctttaaacatgacaatccacattgtcatatgtgaaaattttctctctgatttttactttcattcatgaaaaatgaaaattcagaaattctttttttcctttttgttttgagacagggtctgctctgtcacctaggctggagtgcagtggcttaatcatggctcattgcagtctccatctcctgggctcgagtgatcctcctgtctcacctcccaagtagctgagactacagtacaggcacatgccaccacacctgggctaataggaaattttttttttaggggttttggctcaggctggtctcaaactcctgagctcaagggatcctcccgccttggcctccctaagtgctaggattacaggcatgagccattgttcccagccaaattcagatattattaaaacacatgtcatatttatatagtaacttacaaagacctttcaatacattttctcatttattaagctcattaaagtattcaggaactacctagaaaaaatataatgtaaaactattcaaggatagtgtgtgtatgttcatggacttcttattataatgaattctaaaagacatctgttgactctacaatgaatggatccttgaggaatacttgggagaagaaactcagagttatttctcagggtaggcagcaattaatgtacctacattccttgctggggtcttctagtcttccattcccaatgtgcccatgctatgcctggaaaccctatatggttgtaattctgaacaatttcactttttttccagtaagaatatcaaggcagaaggtgggaaggaggggacattatttccagggaaaatagtttttcaacaatataactttgataaacctctttaaaatgccccaagaaaactttttaagtccatagacaaagaaatactgcctaatggcataattacattcctaaaatctttaagcgtgccgaagtttaaccactaaaacctcctttcttgcattatgtatttagatgcaccctgtattggggtgtcaacaatttcttataattaaaggccagataccatggacagcaattaagttccaagctatagattgtgcctctgaaaaaggcatggaccccaggaacgtgtttttcttctgtagagacaagactctaaaagcatatcaacaatccatatgcaattccatgtgttaatttaaaatgtatgtgctcagtgtttgtagtctagaagctcctttcccttggaggaatgccaagcagtttgcaaaaataaatgctgttagttaaaaaccacataatcacatgggcctactgaataaatatgcatcagtgattatatacttatatttcagtcttgtcaaaagtgaatcactgtttcatttgatgtatttacccagtctttttatccagtttttcttgggcatattctctctgaagacccactgttgcacttctaaatttgacagttaagaaatgagctagttctatacacactgatttttaaaggcgtttctgaataaactaatacttaaaatgtcaaaagtcacatctgtacagcattagatttttatatttaatatatatttgactaattaaaagtgaaagttgttacctgaactggatattcatactattttaagggcaagttgcttacatttcaataacaacaaaaaaagaatctgtttcccattgtcctcctactcaactaaaattcatagttggctttaagcccaaaagaattttgaacaatgtgacagaaacaagtaatgtaaaacttattttgttttatttatactttataatagttagatataacagattatggacaacttaatatttcttctttttggctgggcgcggtggctcatgcctgtagtcccagcactttgggaggccgaggcgggcagatcacgaagtcaggagatcgagaccatcctggctaacacagtgaaaccccgtctctactaaaaaaatacaaaaaattagccgggcgttgtggcgggcgcctgtagtcccagctactcgggaggctgaggcaggagaatggcatgagcctgggaggcggagcttgcagtgagccgagatcccgccactgtactccagcctgggcaacagaacgagactccgtctcaaaaagaaagaaaaaaaaaaaacaaaaacaaggtttcttctttttgccacttaaaatatcttatatttctagatttccaggtctatgtggaaatcatcacacttgggccaataaatgggttagttcagatgtgctgagaaaagtaaatagtgtaccctaaatatcttgcatgtacatttatctatttctctgtttaatgccacttaattttgtaagaaatgagaaatgaaaccctatgtatcagtggaaaaatccttcttgcttcagatttcccaactttattctggaggagaaaaaaatctgtatttctcattaacagagatagaaaaaggtgatgtacttacgatggtcacattcatattgggcattggatctatttaagcctagaagtataacagataatcagttccttaagtgtaaatatgttcttaaatgtttggcctttttatctgttattcaaatgtattagtaattctcatattttgcaaacagatccttttgtgtatattataaaatatataccaaatctgtttttccttttgctgtggaagatgtctttatataatattgagacttcccttgcaaatgagagacgggactctggtcaggtatagtgtgtaggcctagccccatgtattaggaactcataaactcagaaatccaaggattaaacattttatgtctccttcatttatgcaagtcatgctttcattctacatgtagttaaaactacaagtatgagaaaaaatagaactttccattggaattttttccaatcaggtaatgttttagcaacttgaaatcagcacttaatttgattgtatt

SEQ ID NO: 381222 - DNA, 5697 bp, Homo sapiens
atcattcccagagctgccagagcagtggccctggaaaatatggaagcagctgtcagccatggcccagggcctgagcgtatgattctcaggaaaagtgggcaggacatctgactgtcagagtttgtcctctcacttctggagaagatgcagacacaggagatcctgaggatactgcgactgcctgagctaggtgacttgggacagtttttccgcagcctctcggccaccaccctcgtgagtatgggtgccctggctgccatccttgcctactggttcactcaccggccaaaggccttgcagccgccatgcaacctcctgatgcagtcagaagaagtagaggacagtggcggggcacggcgatctgtgattgggtctggccctcagctacttacccactactatgatgatgcccggaccatgtaccaggtgttccgccgtgggcttagcatctcagggaatgggccctgtcttggtttcaggaagcctaagcagccttaccagtggctgtcctaccaggaggtggccgacagggctgaatttctggggtccggacttctccagcacaattgtaaagcatgcactgatcagtttattggtgtttttgcacaaaatcggccagagtggatcattgtggagctggcctgctacacatattccatggtggtggtcccgctctatgacaccctgggccctggggctatccgctacatcatcaatacagcggacatcagcaccgtgattgtggacaaacctcagaaggctgtgcttctgctagagcatgtggagaggaaggagactccaggcctcaagctgatcatcctcatggacccattcgaagaagccctgaaagagagagggcagaagtgcggggtggtcattaagtccatgcaggccgtggaggactgtggccaagagaatcaccaggctcctgtgcccccgcagcctgatgacctctccattgtgtgtttcacaagcggcacgacagggaacccaaaaggtgcgatgctcacccatgggaacgtggtggctgatttctcaggctttctgaaagtgacagagaaagtgatctttccgagacaggacgatgtgctcatctccttcctgcctctggctcacatgtttgagagagtaatccagtctgtcgtctattgccacggagggcgtgttggcttcttccagggagatatccgccttctctcagatgacatgaaggctctatgccccaccatcttccctgtggtcccacgactgctgaaccggatgtacgacaagatcttcagccaggcaaacacaccattaaagcgctggctcctggagtttgcagcaaagcgtaagcaagccgaggtccggagtggaatcatcaggaatgatagtatctgggatgaactcttctttaataagattcaggccagtcttggtgggtgtgtgcggatgattgttactggagcagccccagcatcaccaacagttctgggatttctccgggcagctctagggtgccaggtttatgaaggttatggccaaactgagtgcacagctggatgtaccttcaccactcctggcgactggacctcagggcacgtaggggcgccacttccctgcaatcatatcaagctcgttgatgttgaggaactgaactactgggcctgcaaaggagagggagagatatgtgtgagaggaccaaatgtgttcaaaggctacttgaaagatccagacaggacgaaggaggccctggacagcgatggctggcttcacactggagacatcggaaaatggctgccggcaggaactcttaaaattattgatcggaaaaagcatatatttaaacttgctcagggagaatatgttgcacccgagaagattgagaacatctacatccggagccaacctgtggcgcaaatctatgtccatggggacagcttaaaggcctttttggtaggcattgttgtgcctgaccctgaagttatgccctcctgggcccagaagagaggaattgaaggaacatatgcagatctctgcacaaataaggatctgaagaaagccattttggaagatatggtgaggttaggaaaagaaagtggactccattcttttgagcaggttaaagccattcacatccattctgacatgttctcagttcaaaatggcttgctgacaccaacactaaaagctaagagacctgagctgagagagtacttcaaaaaacaaatagaagagctttactcaatctccatgtgaagttcaaggaaagttcttctcagtgtaatgaactgtctagcaatattatagttattcttgaaagtaatgagtcaaaatgacacagctgaaaatgaataagcatctgattttatgactgagccttttcctgtcccaagaggtctttaacaatattttctctatcatcaatgagtatattttatttttattataaaaatgatattgtggtggactgctaaaaatatcacaaatggcaatgtaaaaatcaagacattttctcaagaactgtgtaccactaaaagtaatatattgtcaatgttcacagaactattaaacataaaggaaaaacataagtgatatattctacttaattatttgtgaatcagtaaccagatgcagcaaatatctaggcaatgtggactacctcattcagtaactgattgtcaaaatcacaattaaatcagacttcaaaaattaaagctaggtgtatagaatcatgctaaaagaaaacatgataactcatagtctacgtaacttcagagtctttaaacatgacaatccacattgtcatatgtgaaaattttctctctgatttttactttcattcatgaaaaatgaaaattcagaaattctttttttcctttttgttttgagacagggtctgctctgtcacctaggctggagtgcagtggcttaatcatggctcattgcagtctccatctcctgggctcgagtgatcctcctgtctcacctcccaagtagctgagactacagtacaggcacatgccaccacacctgggctaataggaaattttttttttaggggttttggctcaggctggtctcaaactcctgagctcaagggatcctcccgccttggcctccctaagtgctaggattacaggcatgagccattgttcccagccaaattcagatattattaaaacacatgtcatatttatatagtaacttacaaagacctttcaatacattttctcatttattaagctcattaaagtattcaggaactacctagaaaaaatataatgtaaaactattcaaggatagtgtgtgtatgttcatggacttcttattataatgaattctaaaagacatctgttgactctacaatgaatggatccttgaggaatacttgggagaagaaactcagagttatttctcagggtaggcagcaattaatgtacctacattccttgctggggtcttctagtcttccattcccaatgtgcccatgctatgcctggaaaccctatatggttgtaattctgaacaatttcactttttttccagtaagaatatcaaggcagaaggtgggaaggaggggacattatttccagggaaaatagtttttcaacaatataactttgataaacctctttaaaatgccccaagaaaactttttaagtccatagacaaagaaatactgcctaatggcataattacattcctaaaatctttaagcgtgccgaagtttaaccactaaaacctcctttcttgcattatgtatttagatgcaccctgtattggggtgtcaacaatttcttataattaaaggccagataccatggacagcaattaagttccaagctatagattgtgcctctgaaaaaggcatggaccccaggaacgtgtttttcttctgtagagacaagactctaaaagcatatcaacaatccatatgcaattccatgtgttaatttaaaatgtatgtgctcagtgtttgtagtctagaagctcctttcccttggaggaatgccaagcagtttgcaaaaataaatgctgttagttaaaaaccacataatcacatgggcctactgaataaatatgcatcagtgattatatacttatatttcagtcttgtcaaaagtgaatcactgtttcatttgatgtatttacccagtctttttatccagtttttcttgggcatattctctctgaagacccactgttgcacttctaaatttgacagttaagaaatgagctagttctatacacactgatttttaaaggcgtttctgaataaactaatacttaaaatgtcaaaagtcacatctgtacagcattagatttttatatttaatatatatttgactaattaaaagtgaaagttgttacctgaactggatattcatactattttaagggcaagttgcttacatttcaataacaacaaaaaaagaatctgtttcccattgtcctcctactcaactaaaattcatagttggctttaagcccaaaagaattttgaacaatgtgacagaaacaagtaatgtaaaacttattttgttttatttatactttataatagttagatataacagattatggacaacttaatatttcttctttttggctgggcgcggtggctcatgcctgtagtcccagcactttgggaggccgaggcgggcagatcacgaagtcaggagatcgagaccatcctggctaacacagtgaaaccccgtctctactaaaaaaatacaaaaaattagccgggcgttgtggcgggcgcctgtagtcccagctactcgggaggctgaggcaggagaatggcatgagcctgggaggcggagcttgcagtgagccgagatcccgccactgtactccagcctgggcaacagaacgagactccgtctcaaaaagaaagaaaaaaaaaaaacaaaaacaaggtttcttctttttgccacttaaaatatcttatatttctagatttccaggtctatgtggaaatcatcacacttgggccaataaatgggttagttcagatgtgctgagaaaagtaaatagtgtaccctaaatatcttgcatgtacatttatctatttctctgtttaatgccacttaattttgtaagaaatgagaaatgaaaccctatgtatcagtggaaaaatccttcttgcttcagatttcccaactttattctggaggagaaaaaaatctgtatttctcattaacagagatagaaaaaggtgatgtacttacgatggtcacattcatattgggcattggatctatttaagcctagaagtataacagataatcagttccttaagtgtaaatatgttcttaaatgtttggcctttttatctgttattcaaatgtattagtaattctcatattttgcaaacagatccttttgtgtatattataaaatatataccaaatctgtttttccttttgctgtggaagatgtctttatataatattgagacttcccttgcaaatgagagacgggactctggtcaggtatagtgtgtaggcctagccccatgtattaggaactcataaactcagaaatccaaggattaaacattttatgtctccttcatttatgcaagtcatgctttcattctacatgtagttaaaactacaagtatgagaaaaaatagaactttccattggaattttttccaatcaggtaatgttttagcaacttgaaatcagcacttaatttgattgtatt

SEQ ID NO: 381223 - DNA, 5561 bp, Homo sapiens
acgttggagagcggggccggagagggctggttcgctctgcggccgggcccctcccccgcccgggagcttggcggttccgacaccgcgagtttgtcctctcacttctggagaagatgcagacacaggagatcctgaggatactgcgactgcctgagctaggtgacttgggacagtttttccgcagcctctcggccaccaccctcgacagtggcggggcacggcgatctgtgattgggtctggccctcagctacttacccactactatgatgatgcccggaccatgtaccaggtgttccgccgtgggcttagcatctcagggaatgggccctgtcttggtttcaggaagcctaagcagccttaccagtggctgtcctaccaggaggtggccgacagggctgaatttctggggtccggacttctccagcacaattgtaaagcatgcactgatcagtttattggtgtttttgcacaaaatcggccagagtggatcattgtggagctggcctgctacacatattccatggtggtggtcccgctctatgacaccctgggccctggggctatccgctacatcatcaatacagcggacatcagcaccgtgattgtggacaaacctcagaaggctgtgcttctgctagagcatgtggagaggaaggagactccaggcctcaagctgatcatcctcatggacccattcgaagaagccctgaaagagagagggcagaagtgcggggtggtcattaagtccatgcaggccgtggaggactgtggccaagagaatcaccaggctcctgtgcccccgcagcctgatgacctctccattgtgtgtttcacaagcggcacgacagggaacccaaaaggtgcgatgctcacccatgggaacgtggtggctgatttctcaggctttctgaaagtgacagagaaagtgatctttccgagacaggacgatgtgctcatctccttcctgcctctggctcacatgtttgagagagtaatccagtctgtcgtctattgccacggagggcgtgttggcttcttccagggagatatccgccttctctcagatgacatgaaggctctatgccccaccatcttccctgtggtcccacgactgctgaaccggatgtacgacaagatcttcagccaggcaaacacaccattaaagcgctggctcctggagtttgcagcaaagcgtaagcaagccgaggtccggagtggaatcatcaggaatgatagtatctgggatgaactcttctttaataagattcaggccagtcttggtgggtgtgtgcggatgattgttactggagcagccccagcatcaccaacagttctgggatttctccgggcagctctagggtgccaggtttatgaaggttatggccaaactgagtgcacagctggatgtaccttcaccactcctggcgactggacctcagggcacgtaggggcgccacttccctgcaatcatatcaagctcgttgatgttgaggaactgaactactgggcctgcaaaggagagggagagatatgtgtgagaggaccaaatgtgttcaaaggctacttgaaagatccagacaggacgaaggaggccctggacagcgatggctggcttcacactggagacatcggaaaatggctgccggcaggaactcttaaaattattgatcggaaaaagcatatatttaaacttgctcagggagaatatgttgcacccgagaagattgagaacatctacatccggagccaacctgtggcgcaaatctatgtccatggggacagcttaaaggcctttttggtaggcattgttgtgcctgaccctgaagttatgccctcctgggcccagaagagaggaattgaaggaacatatgcagatctctgcacaaataaggatctgaagaaagccattttggaagatatggtgaggttaggaaaagaaagtggactccattcttttgagcaggttaaagccattcacatccattctgacatgttctcagttcaaaatggcttgctgacaccaacactaaaagctaagagacctgagctgagagagtacttcaaaaaacaaatagaagagctttactcaatctccatgtgaagttcaaggaaagttcttctcagtgtaatgaactgtctagcaatattatagttattcttgaaagtaatgagtcaaaatgacacagctgaaaatgaataagcatctgattttatgactgagccttttcctgtcccaagaggtctttaacaatattttctctatcatcaatgagtatattttatttttattataaaaatgatattgtggtggactgctaaaaatatcacaaatggcaatgtaaaaatcaagacattttctcaagaactgtgtaccactaaaagtaatatattgtcaatgttcacagaactattaaacataaaggaaaaacataagtgatatattctacttaattatttgtgaatcagtaaccagatgcagcaaatatctaggcaatgtggactacctcattcagtaactgattgtcaaaatcacaattaaatcagacttcaaaaattaaagctaggtgtatagaatcatgctaaaagaaaacatgataactcatagtctacgtaacttcagagtctttaaacatgacaatccacattgtcatatgtgaaaattttctctctgatttttactttcattcatgaaaaatgaaaattcagaaattctttttttcctttttgttttgagacagggtctgctctgtcacctaggctggagtgcagtggcttaatcatggctcattgcagtctccatctcctgggctcgagtgatcctcctgtctcacctcccaagtagctgagactacagtacaggcacatgccaccacacctgggctaataggaaattttttttttaggggttttggctcaggctggtctcaaactcctgagctcaagggatcctcccgccttggcctccctaagtgctaggattacaggcatgagccattgttcccagccaaattcagatattattaaaacacatgtcatatttatatagtaacttacaaagacctttcaatacattttctcatttattaagctcattaaagtattcaggaactacctagaaaaaatataatgtaaaactattcaaggatagtgtgtgtatgttcatggacttcttattataatgaattctaaaagacatctgttgactctacaatgaatggatccttgaggaatacttgggagaagaaactcagagttatttctcagggtaggcagcaattaatgtacctacattccttgctggggtcttctagtcttccattcccaatgtgcccatgctatgcctggaaaccctatatggttgtaattctgaacaatttcactttttttccagtaagaatatcaaggcagaaggtgggaaggaggggacattatttccagggaaaatagtttttcaacaatataactttgataaacctctttaaaatgccccaagaaaactttttaagtccatagacaaagaaatactgcctaatggcataattacattcctaaaatctttaagcgtgccgaagtttaaccactaaaacctcctttcttgcattatgtatttagatgcaccctgtattggggtgtcaacaatttcttataattaaaggccagataccatggacagcaattaagttccaagctatagattgtgcctctgaaaaaggcatggaccccaggaacgtgtttttcttctgtagagacaagactctaaaagcatatcaacaatccatatgcaattccatgtgttaatttaaaatgtatgtgctcagtgtttgtagtctagaagctcctttcccttggaggaatgccaagcagtttgcaaaaataaatgctgttagttaaaaaccacataatcacatgggcctactgaataaatatgcatcagtgattatatacttatatttcagtcttgtcaaaagtgaatcactgtttcatttgatgtatttacccagtctttttatccagtttttcttgggcatattctctctgaagacccactgttgcacttctaaatttgacagttaagaaatgagctagttctatacacactgatttttaaaggcgtttctgaataaactaatacttaaaatgtcaaaagtcacatctgtacagcattagatttttatatttaatatatatttgactaattaaaagtgaaagttgttacctgaactggatattcatactattttaagggcaagttgcttacatttcaataacaacaaaaaaagaatctgtttcccattgtcctcctactcaactaaaattcatagttggctttaagcccaaaagaattttgaacaatgtgacagaaacaagtaatgtaaaacttattttgttttatttatactttataatagttagatataacagattatggacaacttaatatttcttctttttggctgggcgcggtggctcatgcctgtagtcccagcactttgggaggccgaggcgggcagatcacgaagtcaggagatcgagaccatcctggctaacacagtgaaaccccgtctctactaaaaaaatacaaaaaattagccgggcgttgtggcgggcgcctgtagtcccagctactcgggaggctgaggcaggagaatggcatgagcctgggaggcggagcttgcagtgagccgagatcccgccactgtactccagcctgggcaacagaacgagactccgtctcaaaaagaaagaaaaaaaaaaaacaaaaacaaggtttcttctttttgccacttaaaatatcttatatttctagatttccaggtctatgtggaaatcatcacacttgggccaataaatgggttagttcagatgtgctgagaaaagtaaatagtgtaccctaaatatcttgcatgtacatttatctatttctctgtttaatgccacttaattttgtaagaaatgagaaatgaaaccctatgtatcagtggaaaaatccttcttgcttcagatttcccaactttattctggaggagaaaaaaatctgtatttctcattaacagagatagaaaaaggtgatgtacttacgatggtcacattcatattgggcattggatctatttaagcctagaagtataacagataatcagttccttaagtgtaaatatgttcttaaatgtttggcctttttatctgttattcaaatgtattagtaattctcatattttgcaaacagatccttttgtgtatattataaaatatataccaaatctgtttttccttttgctgtggaagatgtctttatataatattgagacttcccttgcaaatgagagacgggactctggtcaggtatagtgtgtaggcctagccccatgtattaggaactcataaactcagaaatccaaggattaaacattttatgtctccttcatttatgcaagtcatgctttcattctacatgtagttaaaactacaagtatgagaaaaaatagaactttccattggaattttttccaatcaggtaatgttttagcaacttgaaatcagcacttaatttgattgtatt

SEQ ID NO: 381224 - DNA, 4311 bp, Homo sapiens
ggcctttgctttctccagcactttgttttattaccaacacttgcagtaacaaatgcccctttaaagatgtgttactttccatccataattccccactttggccactcagagattttaaggggcttggaacatcttcagtgctaaaacagatctgaacactaacaaatgccatcttgctccggtgttccagggcacgtaggggcgccacttccctgcaatcatatcaagctcgttgatgttgaggaactgaactactgggcctgcaaaggagagggagagatatgtgtgagaggaccaaatgtgttcaaaggctacttgaaagatccagacaggacgaaggaggccctggacagcgatggctggcttcacactggagacatcggaaaatggctgccggcaggaactcttaaaattattgatcggaaaaagcatatatttaaacttgctcagggagaatatgttgcacccgagaagattgagaacatctacatccggagccaacctgtggcgcaaatctatgtccatggggacagcttaaaggcctttttggtaggcattgttgtgcctgaccctgaagttatgccctcctgggcccagaagagaggaattgaaggaacatatgcagatctctgcacaaataaggatctgaagaaagccattttggaagatatggtgaggttaggaaaagaaagtggactccattcttttgagcaggttaaagccattcacatccattctgacatgttctcagttcaaaatggcttgctgacaccaacactaaaagctaagagacctgagctgagagagtacttcaaaaaacaaatagaagagctttactcaatctccatgtgaagttcaaggaaagttcttctcagtgtaatgaactgtctagcaatattatagttattcttgaaagtaatgagtcaaaatgacacagctgaaaatgaataagcatctgattttatgactgagccttttcctgtcccaagaggtctttaacaatattttctctatcatcaatgagtatattttatttttattataaaaatgatattgtggtggactgctaaaaatatcacaaatggcaatgtaaaaatcaagacattttctcaagaactgtgtaccactaaaagtaatatattgtcaatgttcacagaactattaaacataaaggaaaaacataagtgatatattctacttaattatttgtgaatcagtaaccagatgcagcaaatatctaggcaatgtggactacctcattcagtaactgattgtcaaaatcacaattaaatcagacttcaaaaattaaagctaggtgtatagaatcatgctaaaagaaaacatgataactcatagtctacgtaacttcagagtctttaaacatgacaatccacattgtcatatgtgaaaattttctctctgatttttactttcattcatgaaaaatgaaaattcagaaattctttttttcctttttgttttgagacagggtctgctctgtcacctaggctggagtgcagtggcttaatcatggctcattgcagtctccatctcctgggctcgagtgatcctcctgtctcacctcccaagtagctgagactacagtacaggcacatgccaccacacctgggctaataggaaattttttttttaggggttttggctcaggctggtctcaaactcctgagctcaagggatcctcccgccttggcctccctaagtgctaggattacaggcatgagccattgttcccagccaaattcagatattattaaaacacatgtcatatttatatagtaacttacaaagacctttcaatacattttctcatttattaagctcattaaagtattcaggaactacctagaaaaaatataatgtaaaactattcaaggatagtgtgtgtatgttcatggacttcttattataatgaattctaaaagacatctgttgactctacaatgaatggatccttgaggaatacttgggagaagaaactcagagttatttctcagggtaggcagcaattaatgtacctacattccttgctggggtcttctagtcttccattcccaatgtgcccatgctatgcctggaaaccctatatggttgtaattctgaacaatttcactttttttccagtaagaatatcaaggcagaaggtgggaaggaggggacattatttccagggaaaatagtttttcaacaatataactttgataaacctctttaaaatgccccaagaaaactttttaagtccatagacaaagaaatactgcctaatggcataattacattcctaaaatctttaagcgtgccgaagtttaaccactaaaacctcctttcttgcattatgtatttagatgcaccctgtattggggtgtcaacaatttcttataattaaaggccagataccatggacagcaattaagttccaagctatagattgtgcctctgaaaaaggcatggaccccaggaacgtgtttttcttctgtagagacaagactctaaaagcatatcaacaatccatatgcaattccatgtgttaatttaaaatgtatgtgctcagtgtttgtagtctagaagctcctttcccttggaggaatgccaagcagtttgcaaaaataaatgctgttagttaaaaaccacataatcacatgggcctactgaataaatatgcatcagtgattatatacttatatttcagtcttgtcaaaagtgaatcactgtttcatttgatgtatttacccagtctttttatccagtttttcttgggcatattctctctgaagacccactgttgcacttctaaatttgacagttaagaaatgagctagttctatacacactgatttttaaaggcgtttctgaataaactaatacttaaaatgtcaaaagtcacatctgtacagcattagatttttatatttaatatatatttgactaattaaaagtgaaagttgttacctgaactggatattcatactattttaagggcaagttgcttacatttcaataacaacaaaaaaagaatctgtttcccattgtcctcctactcaactaaaattcatagttggctttaagcccaaaagaattttgaacaatgtgacagaaacaagtaatgtaaaacttattttgttttatttatactttataatagttagatataacagattatggacaacttaatatttcttctttttggctgggcgcggtggctcatgcctgtagtcccagcactttgggaggccgaggcgggcagatcacgaagtcaggagatcgagaccatcctggctaacacagtgaaaccccgtctctactaaaaaaatacaaaaaattagccgggcgttgtggcgggcgcctgtagtcccagctactcgggaggctgaggcaggagaatggcatgagcctgggaggcggagcttgcagtgagccgagatcccgccactgtactccagcctgggcaacagaacgagactccgtctcaaaaagaaagaaaaaaaaaaaacaaaaacaaggtttcttctttttgccacttaaaatatcttatatttctagatttccaggtctatgtggaaatcatcacacttgggccaataaatgggttagttcagatgtgctgagaaaagtaaatagtgtaccctaaatatcttgcatgtacatttatctatttctctgtttaatgccacttaattttgtaagaaatgagaaatgaaaccctatgtatcagtggaaaaatccttcttgcttcagatttcccaactttattctggaggagaaaaaaatctgtatttctcattaacagagatagaaaaaggtgatgtacttacgatggtcacattcatattgggcattggatctatttaagcctagaagtataacagataatcagttccttaagtgtaaatatgttcttaaatgtttggcctttttatctgttattcaaatgtattagtaattctcatattttgcaaacagatccttttgtgtatattataaaatatataccaaatctgtttttccttttgctgtggaagatgtctttatataatattgagacttcccttgcaaatgagagacgggactctggtcaggtatagtgtgtaggcctagccccatgtattaggaactcataaactcagaaatccaaggattaaacattttatgtctccttcatttatgcaagtcatgctttcattctacatgtagttaaaactacaagtatgagaaaaaatagaactttccattggaattttttccaatcaggtaatgttttagcaacttgaaatcagcacttaatttgattgtatt

SEQ ID NO: 381225 - DNA, 4111 bp, Homo sapiens
ggcctttgctttctccagcactttgttttattaccaacacttgcagtaacaaatgcccctttaaagatgtgttactttccatccataattccccactttggccactcagagattttaaggggcttggaacatcttcagtgctaaaacagatctgaacactaacaaatgccatcttgctccggtgttccagggcacgtaggggcgccacttccctgcaatcatatcaagctcgttgatgttgaggaactgaactactgggcttgccagatgagaggtggtaattggagtgttgccagggagtatcagcctcagttgcgggctgtgggttagcacatgttggcacaatcatcagttgtactttacccaaaagtgttgtttcctctacctccattttgaaatgtgttcttgtcttgtaatttttctcatatggtttgattcagatgatctgaagaaagccattttggaagatatggtgaggttaggaaaagaaagtggactccattcttttgagcaggttaaagccattcacatccattctgacatgttctcagttcaaaatggcttgctgacaccaacactaaaagctaagagacctgagctgagagagtacttcaaaaaacaaatagaagagctttactcaatctccatgtgaagttcaaggaaagttcttctcagtgtaatgaactgtctagcaatattatagttattcttgaaagtaatgagtcaaaatgacacagctgaaaatgaataagcatctgattttatgactgagccttttcctgtcccaagaggtctttaacaatattttctctatcatcaatgagtatattttatttttattataaaaatgatattgtggtggactgctaaaaatatcacaaatggcaatgtaaaaatcaagacattttctcaagaactgtgtaccactaaaagtaatatattgtcaatgttcacagaactattaaacataaaggaaaaacataagtgatatattctacttaattatttgtgaatcagtaaccagatgcagcaaatatctaggcaatgtggactacctcattcagtaactgattgtcaaaatcacaattaaatcagacttcaaaaattaaagctaggtgtatagaatcatgctaaaagaaaacatgataactcatagtctacgtaacttcagagtctttaaacatgacaatccacattgtcatatgtgaaaattttctctctgatttttactttcattcatgaaaaatgaaaattcagaaattctttttttcctttttgttttgagacagggtctgctctgtcacctaggctggagtgcagtggcttaatcatggctcattgcagtctccatctcctgggctcgagtgatcctcctgtctcacctcccaagtagctgagactacagtacaggcacatgccaccacacctgggctaataggaaattttttttttaggggttttggctcaggctggtctcaaactcctgagctcaagggatcctcccgccttggcctccctaagtgctaggattacaggcatgagccattgttcccagccaaattcagatattattaaaacacatgtcatatttatatagtaacttacaaagacctttcaatacattttctcatttattaagctcattaaagtattcaggaactacctagaaaaaatataatgtaaaactattcaaggatagtgtgtgtatgttcatggacttcttattataatgaattctaaaagacatctgttgactctacaatgaatggatccttgaggaatacttgggagaagaaactcagagttatttctcagggtaggcagcaattaatgtacctacattccttgctggggtcttctagtcttccattcccaatgtgcccatgctatgcctggaaaccctatatggttgtaattctgaacaatttcactttttttccagtaagaatatcaaggcagaaggtgggaaggaggggacattatttccagggaaaatagtttttcaacaatataactttgataaacctctttaaaatgccccaagaaaactttttaagtccatagacaaagaaatactgcctaatggcataattacattcctaaaatctttaagcgtgccgaagtttaaccactaaaacctcctttcttgcattatgtatttagatgcaccctgtattggggtgtcaacaatttcttataattaaaggccagataccatggacagcaattaagttccaagctatagattgtgcctctgaaaaaggcatggaccccaggaacgtgtttttcttctgtagagacaagactctaaaagcatatcaacaatccatatgcaattccatgtgttaatttaaaatgtatgtgctcagtgtttgtagtctagaagctcctttcccttggaggaatgccaagcagtttgcaaaaataaatgctgttagttaaaaaccacataatcacatgggcctactgaataaatatgcatcagtgattatatacttatatttcagtcttgtcaaaagtgaatcactgtttcatttgatgtatttacccagtctttttatccagtttttcttgggcatattctctctgaagacccactgttgcacttctaaatttgacagttaagaaatgagctagttctatacacactgatttttaaaggcgtttctgaataaactaatacttaaaatgtcaaaagtcacatctgtacagcattagatttttatatttaatatatatttgactaattaaaagtgaaagttgttacctgaactggatattcatactattttaagggcaagttgcttacatttcaataacaacaaaaaaagaatctgtttcccattgtcctcctactcaactaaaattcatagttggctttaagcccaaaagaattttgaacaatgtgacagaaacaagtaatgtaaaacttattttgttttatttatactttataatagttagatataacagattatggacaacttaatatttcttctttttggctgggcgcggtggctcatgcctgtagtcccagcactttgggaggccgaggcgggcagatcacgaagtcaggagatcgagaccatcctggctaacacagtgaaaccccgtctctactaaaaaaatacaaaaaattagccgggcgttgtggcgggcgcctgtagtcccagctactcgggaggctgaggcaggagaatggcatgagcctgggaggcggagcttgcagtgagccgagatcccgccactgtactccagcctgggcaacagaacgagactccgtctcaaaaagaaagaaaaaaaaaaaacaaaaacaaggtttcttctttttgccacttaaaatatcttatatttctagatttccaggtctatgtggaaatcatcacacttgggccaataaatgggttagttcagatgtgctgagaaaagtaaatagtgtaccctaaatatcttgcatgtacatttatctatttctctgtttaatgccacttaattttgtaagaaatgagaaatgaaaccctatgtatcagtggaaaaatccttcttgcttcagatttcccaactttattctggaggagaaaaaaatctgtatttctcattaacagagatagaaaaaggtgatgtacttacgatggtcacattcatattgggcattggatctatttaagcctagaagtataacagataatcagttccttaagtgtaaatatgttcttaaatgtttggcctttttatctgttattcaaatgtattagtaattctcatattttgcaaacagatccttttgtgtatattataaaatatataccaaatctgtttttccttttgctgtggaagatgtctttatataatattgagacttcccttgcaaatgagagacgggactctggtcaggtatagtgtgtaggcctagccccatgtattaggaactcataaactcagaaatccaaggattaaacattttatgtctccttcatttatgcaagtcatgctttcattctacatgtagttaaaactacaagtatgagaaaaaatagaactttccattggaattttttccaatcaggtaatgttttagcaacttgaaatcagcacttaatttgattgtatt

SEQ ID NO: 381226 - DNA, 3050 bp, Homo sapiens
gtgagacatgtctgagactcctgctcagtgtagcattaagtttgtcctctcacttctggagaagatgcagacacaggagatcctgaggatactgcgactgcctgagctaggtgacttgggacagtttttccgcagcctctcggccaccaccctcgacagtggcggggcacggcgatctgtgattgggtctggccctcagctacttacccactactatgatgatgcccggaccatgtaccaggtgttccgccgtgggcttagcatctcagggaatgggccctgtcttggtttcaggaagcctaagcagccttaccagtggctgtcctaccaggaggtggccgacagggctgaatttctggggtccggacttctccagcacaattgtaaagcatgcactgatcagtttattggtgtttttgcacaaaatcggccagagtggatcattgtggagctggcctgctacacatattccatggtggtggtcccgctctatgacaccctgggccctggggctatccgctacatcatcaatacagcggacatcagcaccgtgattgtggacaaacctcagaaggctgtgcttctgctagagcatgtggagaggaaggagactccaggcctcaagctgatcatcctcatggacccattcgaagaagccctgaaagagagagggcagaagtgcggggtggtcattaagtccatgcaggccgtggaggactgtggccaagagaatcaccaggctcctgtgcccccgcagcctgatgacctctccattgtgtgtttcacaagcggcacgacagggaacccaaaaggtgcgatgctcacccatgggaacgtggtggctgatttctcaggctttctgaaagtgacagagagtcagtgggctcccacttgtgcggatgtgcacatttcctatttgcctttagcacacatgtttgagcgaatggtgcagtctgtcgtctattgccacggagggcgtgttggcttcttccagggagatatccgccttctctcagatgacatgaaggctctatgccccaccatcttccctgtggtcccacgactgctgaaccggatgtacgacaagatcttcagccaggcaaacacaccattaaagcgctggctcctggagtttgcagcaaagcgtaagcaagccgaggtccggagtggaatcatcaggaatgatagtatctgggatgaactcttctttaataagattcaggccagtcttggtgggtgtgtgcggatgattgttactggagcagccccagcatcaccaacagttctgggatttctccgggcagctctagggtgccaggtttatgaaggttatggccaaactgagtgcacagctggatgtaccttcaccactcctggcgactggacctcagggcacgtaggggcgccacttccctgcaatcatatcaagctcgttgatgttgaggaactgaactactgggcctgcaaaggagagggagagatatgtgtgagaggaccaaatgtgttcaaaggctacttgaaagatccagacaggacgaaggaggccctggacagcgatggctggcttcacactggagacatcggaaaatggctgccggcaggaactcttaaaattattgatcggaaaaagcatatatttaaacttgctcagggagaatatgttgcacccgagaagattgagaacatctacatccggagccaacctgtggcgcaaatctatgtccatggggacagcttaaaggcctttttggtaggcattgttgtgcctgaccctgaagttatgccctcctgggcccagaagagaggaattgaaggaacatatgcagatctctgcacaaataaggatctgaagaaagccattttggaagatatggtgaggttaggaaaagaaagtggactccattcttttgagcaggacctaccacagtgcttaatacagattaaggtgttcagtaaatattgattcaatgactcaaaacccgaggtaaaaccaggttcgaagagaaaaggcaaagtgcacggcttgtcgaagattgcagagaaagcagagcggagcaggcagggaggtagcggctctgggccgttcagccctcgcttaggagttacaggagagaaaagcctgcaagaaaataggtctagtgaagacacccaggatgagaagattgcatcgttgcgtgaatcagttactgatgacctccaggttgatagtagttcatcaaatagtgaactagtatcaggattaagtttgcaccatggtatggccagttctcttctgagctattcagtcacagactcttatgcagaatacaagagttttgaagagagctttccatcacctgaactgttcagaaaatcagattatttagactgggagtgtcccaacttggaagaacacatgcagtggaagaattctactcttctggataccagtaaagcagtagcgatagagaaggcaccacagttttcaaatgtctcagcaattttcagtacctcttcagaagactatcagaaatgccatagaaaaacagtgatgacagtagcagatcaaaatgtttctccaaaagcaaagtgtgcttcaaattcagaatcagataatgcagcttgtgagattttacttgctgagaaaacttgcccttcaacccctgaaaaaacaaagaaaaaagcaaattgatttgtcctcagtgcaaaaagcatcttttgaagaactatttccaaatgtcagcaattatgttaattcaaatgaaattgttcctgtgtcaagtttgcaggaaaattcttcaaatgagtttcctgcaaatgcatcagaaatatgttgtattattagaacatcaccaggaactagacaagtgaaaaataaaggtgttattgtaaagaagaagaaatattctcttcctaaggatacccctcaagatatcataataaaaatggcatgaaaaaacagctgtggctgaattttcaccactttgaagacaggagtgtgaagtcaaagtctataaagcagaatgtctgcctgaaattatatgaaattaaaaattaaaaattctccagtt

SEQ ID NO: 381227 - DNA, 3217 bp, Homo sapiens
gtgagacatgtctgagactcctgctcagtgtagcattaagtttgtcctctcacttctggagaagatgcagacacaggagatcctgaggatactgcgactgcctgagctaggtgacttgggacagtttttccgcagcctctcggccaccaccctcgacagtggcggggcacggcgatctgtgattgggtctggccctcagctacttacccactactatgatgatgcccggaccatgtaccaggtgttccgccgtgggcttagcatctcagggaatgggccctgtcttggtttcaggaagcctaagcagccttaccagtggctgtcctaccaggaggtggccgacagggctgaatttctggggtccggacttctccagcacaattgtaaagcatgcactgatcagtttattggtgtttttgcacaaaatcggccagagtggatcattgtggagctggcctgctacacatattccatggtggtggtcccgctctatgacaccctgggccctggggctatccgctacatcatcaatacagcggacatcagcaccgtgattgtggacaaacctcagaaggctgtgcttctgctagagcatgtggagaggaaggagactccaggcctcaagctgatcatcctcatggacccattcgaagaagccctgaaagagagagggcagaagtgcggggtggtcattaagtccatgcaggccgtggaggactgtggccaagagaatcaccaggctcctgtgcccccgcagcctgatgacctctccattgtgtgtttcacaagcggcacgacagggaacccaaaaggtgcgatgctcacccatgggaacgtggtggctgatttctcaggctttctgaaagtgacagagagtcagtgggctcccacttgtgcggatgtgcacatttcctatttgcctttagcacacatgtttgagcgaatggtgcagtctgtcgtctattgccacggagggcgtgttggcttcttccagggagatatccgccttctctcagatgacatgaaggctctatgccccaccatcttccctgtggtcccacgactgctgaaccggatgtacgacaagatcttcagccaggcaaacacaccattaaagcgctggctcctggagtttgcagcaaagcgtaagcaagccgaggtccggagtggaatcatcaggaatgatagtatctgggatgaactcttctttaataagattcaggccagtcttggtgggtgtgtgcggatgattgttactggagcagccccagcatcaccaacagttctgggatttctccgggcagctctagggtgccaggtttatgaaggttatggccaaactgagtgcacagctggatgtaccttcaccactcctggcgactggacctcagggcacgtaggggcgccacttccctgcaatcatatcaagctcgttgatgttgaggaactgaactactgggcctgcaaaggagagggagagatatgtgtgagaggaccaaatgtgttcaaaggctacttgaaagatccagacaggacgaaggaggccctggacagcgatggctggcttcacactggagacatcggaaaatggctgccggcaggaactcttaaaattattgatcggaaaaagcatatatttaaacttgctcagggagaatatgttgcacccgagaagattgagaacatctacatccggagccaacctgtggcgcaaatctatgtccatggggacagcttaaaggcctttttggtaggcattgttgtgcctgaccctgaagttatgccctcctgggcccagaagagaggaattgaaggaacatatgcagatctctgcacaaataaggatctgaagaaagccattttggaagatatggtgaggttaggaaaagaaagtggactccattcttttgagcaggacctaccacagtgcttaatacagattaaggtgttcagtaaatattgattcaatgactcaaaacccgaggtaaaaccaggttcgaagagaaaaggcaaagtgcacggcttgtcgaagattgcagagaaagcagagcggagcaggcagggaggtagcggctctgggccgttcagccctcgcttaggagttacaggagagaaaagcctgcaagaaaataggtctagtgaagacacccaggatgagaagattgcatcgttgcgtgaatcagttactgatgacctccaggttgatagtagttcatcaaatagtgaactagtatcaggattaagtttgcaccatggtatggccagttctcttctgagctattcagtcacagactcttatgcagaatacaagagttttgaagagagctttccatcacctgaactgttcagaaaatcagattatttagactgggagtgtcccaacttggaagaacacatgcagtggaagaattctactcttctggataccagtaaagcagtagcgatagagaaggcaccacagttttcaaatgtctcagcaattttcagtacctcttcagaagactatcagaaatgccatagaaaaacagtgatgacagtagcagatcaaaatgtttctccaaaagcaaagtgtgcttcaaattcagaatcagaaaacaaattccagtactcctggtaagaaaaacagaggccttttaacaagtactccatcttcagagacagctggttttgtgattgatttgtcctcagtgcaaaaagcatcttttgaagaactatttccaaatgtcagcaattatgttaattcaaatgaaattgttcctgtgtcaagtttgcaggaaaattcttcaaatgagtttcctgcaaatgcatcagaaatatgttgtattattagaacatcaccaggaactagacaagtgaaaaataaaggtgttattgtaaagaagaagaaatattctcttcctaaggatacccctcaagatatcataataaaaatggcatgaaaaaacagctgtggctgaattttcaccactttgaagacaggagtgtgaagtcaaagtctataaagcagaatgtctgcctgaaattatatgaaattaaaaattaaaaattctccagttatttgtgatatatctctatgttgaaattctactgaggttcttgtcatttacttttaatcagttaagaaaaaaaattattccatatgcttcttaaatatatgtatttatattaaaagataaagaaccaaaaaagaaaaaacaaaatggcctcgctggcctca

SEQ ID NO: 381228 - DNA, 1008 bp, Homo sapiens
atccagatggtgcaaactaattgcgttgtctctttgttagccctcgcttaggagttacaggagagaaaagcctgcaagaaaataggtctagtgaagacacccaggatgagaagattgcatcgttgcgtgaatcagttactgatgacctccaggttgatagtagttcatcaaatagtgaactagtatcaggattaagtttgcaccatggtatggccagttctcttctgagctattcagtcacagactcttatgcagaatacaagagttttgaagagagctttccatcacctgaactgttcagaaaatcagattatttagactgggagtgtcccaacttggaagaacacatgcagtggaagaattctactcttctggataccagtaaagcagtagcgatagagaaggcaccacagttttcaaatgtctcagcaattttcagtacctcttcagaagactatcagaaatgccatagaaaaacagtgatgacagtagcagatcaaaatgtttctccaaaagcaaagtgtgcttcaaattcagaatcagaaaacaaattccagtactcctggtaagaaaaacagaggccttttaacaagtactccatcttcagagacagctggttttgtgattgatttgtcctcagtgcaaaaagcatcttttgaagaactatttccaaatgtcagcaattatgttaattcaaatgaaattgttcctgtgtcaagtttgcaggaaaattcttcaaatgagtttcctgcaaatgcatcagaaatatgttgtattattagaacatcaccaggaactagacaagtgaaaaataaaggtgttattgtaaagaagaagaaatattctcttcctaaggatacccctcaagatatcataataaaaatggcatgaaaaaacagctgtggctgaattttcaccactttgaagacaggagtgtgaagtcaaagtctataaagcagaatgtctgcctgaaattatatgaaattaaaaattaaaaattctccagtt

SEQ ID NO: 381229 - DNA, 353 bp, Homo sapiens
  misc_feature (24)..(24): n is a, c, g, or t
  misc_feature (82)..(82): n is a, c, g, or t
gagaataggataaaggaaatgagnaaagatatatttttttataggtggggagttttttattattttatgattggttgtcgtnctgtttttttcctgcaaatgcatcagaaatatgttgtattattagaacatcaccaggaactagacaagtgaaaaataaaggtgttattgtaaagaagaagaaatattctcttcctaaggatacccctcaagatatcataataaaaatggcatgaaaaaacagctgtggctgaattttcaccactttgaagacaggagtgtgaagtcaaagtctataaagcagaatgtctgcctgaaattatatgaaattaaaaattaaaaattctccagtt

SEQ ID NO: 381230 - DNA, 525 bp, Homo sapiens
aggacaaccgtctcagatcatttttcttcattttgaaattcaccatttaggccaggcgcagtgactcatgcctataatgccagcactttgggaggccaagtttcctgcaaatgcatcagaaatatgttgtattattagaacatcaccaggaactagacaagtgaaaaataaaggtgttattgtaaagaagaagaaatattctcttcctaaggatacccctcaagatatcataataaaaatggcatgaaaaaacagctgtggctgaattttcaccactttgaagacaggagtgtgaagtcaaagtctataaagcagaatgtctgcctgaaattatatgaaattaaaaattaaaaattctccagttatttgtgatatatctctatgttgaaattctactgaggttcttgtcatttacttttaatcagttaagaaaaaaaattattccatatgcttcttaaatatatgtatttatattaaaagataaagaaccaaaaaagaaaaaacaaaatggcctcgctggcctca

SEQ ID NO: 381231 - DNA, 257 bp, Homo sapiens
ggagtgtcccaacttggaagaacacatgcagtggaagaattctactcttctggataccagtaaagcagtagcgatagagaaggcaccacagttttcaaatgtctcagcaattttcagtgagttgcacacacaggggaacatttctcatctatgttggaaaagcaaagtattttttctcttgaatgatttctaagctaagtctatcagttggattgcctttggctacagataatatctaataatagcataagtatgta

SEQ ID NO: 381232 - DNA, 2529 bp, Homo sapiens
ctctgagcggcacttgcaccgggcagtgccccgctgctgaccaccatgctgatcgcttcttcctctgtgtcggggggcttctgggtagtttgtcctctcacttctggagaagatgcagacacaggagatcctgaggatactgcgactgcctgagctaggtgacttgggacagtttttccgcagcctctcggccaccaccctcgtgagtatgggtgccctggctgccatccttgcctactggttcactcaccggccaaaggccttgcagccgccatgcaacctcctgatgcagtcagaagaagtagaggacagtggcggggcacggcgatctgtgattgggtctggccctcagctacttacccactactatgatgatgcccggaccatgtaccaggtgttccgccgtgggcttagcatctcagggaatgggccctgtcttggtttcaggaagcctaagcagccttaccagtggctgtcctaccaggaggtggccgacagggctgaatttctggggtccggacttctccagcacaattgtaaagcatgcactgatcagtttattggtgtttttgcacaaaatcggccagagtggatcattgtggagctggcctgctacacatattccatggtggtggtcccgctctatgacaccctgggccctggggctatccgctacatcatcaatacagcggacatcagcaccgtgattgtggacaaacctcagaaggctgtgcttctgctagagcatgtggagaggaaggagactccaggcctcaagctgatcatcctcatggacccattcgaagaagccctgaaagagagagggcagaagtgcggggtggtcattaagtccatgcaggccgtggaggactgtggccaagagaatcaccaggctcctgtgcccccgcagcctgatgacctctccattgtgtgtttcacaagcggcacgacagggaacccaaaaggtgcgatgctcacccatgggaacgtggtggctgatttctcaggctttctgaaagtgacagagagtcagtgggctcccacttgtgcggatgtgcacatttcctatttgcctttagcacacatgtttgagcgaatggtgcagtctgtcgtctattgccacggagggcgtgttggcttcttccagggagatatccgccttctctcagatgacatgaaggctctatgccccaccatcttccctgtggtcccacgactgctgaaccggatgtacgacaagatcttcagccaggcaaacacaccattaaagcgctggctcctggagtttgcagcaaagcgtaagcaagccgaggtccggagtggaatcatcaggaatgatagtatctgggatgaactcttctttaataagattcaggccagtcttggtgggtgtgtgcggatgattgttactggagcagccccagcatcaccaacagttctgggatttctccgggcagctctagggtgccaggtttatgaaggttatggccaaactgagtgcacagctggatgtaccttcaccactcctggcgactggacctcagggcacgtaggggcgccacttccctgcaatcatatcaagctcgttgatgttgaggaactgaactactgggcctgcaaaggagagggagagatatgtgtgagaggaccaaatgtgttcaaaggctacttgaaagatccagacaggacgaaggaggccctggacagcgatggctggcttcacactggagacatcggaaaatggctgccggcaggaactcttaaaattattgatcggaaaaagcatatatttaaacttgctcagggagaatatgttgcacccgagaagattgagaacatctacatccggagccaacctgtggcgcaaatctatgtccatggggacagcttaaaggcctttttggtaggcattgttgtgcctgaccctgaagttatgccctcctgggcccagaagagaggaattgaaggaacatatgcagatctctgcacaaataaggatctgaagaaagccattttggaagatatggtgaggttaggaaaagaaagtggactccattcttttgagcaggttaaagccattcacatccattctgacatgttctcagttcaaaatggcttgctgacaccaacactaaaagctaagagacctgagctgagagagtacttcaaaaaacaaatagaagagctttactcaatctccatgtgaagttcaaggaaagttcttctcagtgtaatgaactgtctagcaatattatagttattcttgaaagtaatgagtcaaaatgacacagctgaaaatgaataagcatctgattttatgactgagccttttcctgtcccaagaggtctttaacaatattttctctatcatcaatgagtatattttatttttattataaaaatgatattgtggtggactgctaaaaatatcacaaatggcaatgtaaaaatcaagacattttctcaagaactgtgtaccactaaaagtaatatattgtcaatgttcacagaactattaaacataaagga

SEQ ID NO: 381233 - DNA, 5512 bp, Homo sapiens
gtgagacatgtctgagactcctgctcagtgtagcattaagtttgtcctctcacttctggagaagatgcagacacaggagatcctgaggatactgcgactgcctgagctaggtgacttgggacagtttttccgcagcctctcggccaccaccctcgacagtggcggggcacggcgatctgtgattgggtctggccctcagctacttacccactactatgatgatgcccggaccatgtaccaggtgttccgccgtgggcttagcatctcagggaatgggccctgtcttggtttcaggaagcctaagcagccttaccagtggctgtcctaccaggaggtggccgacagggctgaatttctggggtccggacttctccagcacaattgtaaagcatgcactgatcagtttattggtgtttttgcacaaaatcggccagagtggatcattgtggagctggcctgctacacatattccatggtggtggtcccgctctatgacaccctgggccctggggctatccgctacatcatcaatacagcggacatcagcaccgtgattgtggacaaacctcagaaggctgtgcttctgctagagcatgtggagaggaaggagactccaggcctcaagctgatcatcctcatggacccattcgaagaagccctgaaagagagagggcagaagtgcggggtggtcattaagtccatgcaggccgtggaggactgtggccaagagaatcaccaggctcctgtgcccccgcagcctgatgacctctccattgtgtgtttcacaagcggcacgacagggaacccaaaaggtgcgatgctcacccatgggaacgtggtggctgatttctcaggctttctgaaagtgacagagagtcagtgggctcccacttgtgcggatgtgcacatttcctatttgcctttagcacacatgtttgagcgaatggtgcagtctgtcgtctattgccacggagggcgtgttggcttcttccagggagatatccgccttctctcagatgacatgaaggctctatgccccaccatcttccctgtggtcccacgactgctgaaccggatgtacgacaagatcttcagccaggcaaacacaccattaaagcgctggctcctggagtttgcagcaaagcgtaagcaagccgaggtccggagtggaatcatcaggaatgatagtatctgggatgaactcttctttaataagattcaggccagtcttggtgggtgtgtgcggatgattgttactggagcagccccagcatcaccaacagttctgggatttctccgggcagctctagggtgccaggtttatgaaggttatggccaaactgagtgcacagctggatgtaccttcaccactcctggcgactggacctcagggcacgtaggggcgccacttccctgcaatcatatcaagctcgttgatgttgaggaactgaactactgggcctgcaaaggagagggagagatatgtgtgagaggaccaaatgtgttcaaaggctacttgaaagatccagacaggacgaaggaggccctggacagcgatggctggcttcacactggagacatcggaaaatggctgccggcaggaactcttaaaattattgatcggaaaaagcatatatttaaacttgctcagggagaatatgttgcacccgagaagattgagaacatctacatccggagccaacctgtggcgcaaatctatgtccatggggacagcttaaaggcctttttggtaggcattgttgtgcctgaccctgaagttatgccctcctgggcccagaagagaggaattgaaggaacatatgcagatctctgcacaaataaggatctgaagaaagccattttggaagatatggtgaggttaggaaaagaaagtggactccattcttttgagcaggttaaagccattcacatccattctgacatgttctcagttcaaaatggcttgctgacaccaacactaaaagctaagagacctgagctgagagagtacttcaaaaaacaaatagaagagctttactcaatctccatgtgaagttcaaggaaagttcttctcagtgtaatgaactgtctagcaatattatagttattcttgaaagtaatgagtcaaaatgacacagctgaaaatgaataagcatctgattttatgactgagccttttcctgtcccaagaggtctttaacaatattttctctatcatcaatgagtatattttatttttattataaaaatgatattgtggtggactgctaaaaatatcacaaatggcaatgtaaaaatcaagacattttctcaagaactgtgtaccactaaaagtaatatattgtcaatgttcacagaactattaaacataaaggaaaaacataagtgatatattctacttaattatttgtgaatcagtaaccagatgcagcaaatatctaggcaatgtggactacctcattcagtaactgattgtcaaaatcacaattaaatcagacttcaaaaattaaagctaggtgtatagaatcatgctaaaagaaaacatgataactcatagtctacgtaacttcagagtctttaaacatgacaatccacattgtcatatgtgaaaattttctctctgatttttactttcattcatgaaaaatgaaaattcagaaattctttttttcctttttgttttgagacagggtctgctctgtcacctaggctggagtgcagtggcttaatcatggctcattgcagtctccatctcctgggctcgagtgatcctcctgtctcacctcccaagtagctgagactacagtacaggcacatgccaccacacctgggctaataggaaattttttttttaggggttttggctcaggctggtctcaaactcctgagctcaagggatcctcccgccttggcctccctaagtgctaggattacaggcatgagccattgttcccagccaaattcagatattattaaaacacatgtcatatttatatagtaacttacaaagacctttcaatacattttctcatttattaagctcattaaagtattcaggaactacctagaaaaaatataatgtaaaactattcaaggatagtgtgtgtatgttcatggacttcttattataatgaattctaaaagacatctgttgactctacaatgaatggatccttgaggaatacttgggagaagaaactcagagttatttctcagggtaggcagcaattaatgtacctacattccttgctggggtcttctagtcttccattcccaatgtgcccatgctatgcctggaaaccctatatggttgtaattctgaacaatttcactttttttccagtaagaatatcaaggcagaaggtgggaaggaggggacattatttccagggaaaatagtttttcaacaatataactttgataaacctctttaaaatgccccaagaaaactttttaagtccatagacaaagaaatactgcctaatggcataattacattcctaaaatctttaagcgtgccgaagtttaaccactaaaacctcctttcttgcattatgtatttagatgcaccctgtattggggtgtcaacaatttcttataattaaaggccagataccatggacagcaattaagttccaagctatagattgtgcctctgaaaaaggcatggaccccaggaacgtgtttttcttctgtagagacaagactctaaaagcatatcaacaatccatatgcaattccatgtgttaatttaaaatgtatgtgctcagtgtttgtagtctagaagctcctttcccttggaggaatgccaagcagtttgcaaaaataaatgctgttagttaaaaaccacataatcacatgggcctactgaataaatatgcatcagtgattatatacttatatttcagtcttgtcaaaagtgaatcactgtttcatttgatgtatttacccagtctttttatccagtttttcttgggcatattctctctgaagacccactgttgcacttctaaatttgacagttaagaaatgagctagttctatacacactgatttttaaaggcgtttctgaataaactaatacttaaaatgtcaaaagtcacatctgtacagcattagatttttatatttaatatatatttgactaattaaaagtgaaagttgttacctgaactggatattcatactattttaagggcaagttgcttacatttcaataacaacaaaaaaagaatctgtttcccattgtcctcctactcaactaaaattcatagttggctttaagcccaaaagaattttgaacaatgtgacagaaacaagtaatgtaaaacttattttgttttatttatactttataatagttagatataacagattatggacaacttaatatttcttctttttggctgggcgcggtggctcatgcctgtagtcccagcactttgggaggccgaggcgggcagatcacgaagtcaggagatcgagaccatcctggctaacacagtgaaaccccgtctctactaaaaaaatacaaaaaattagccgggcgttgtggcgggcgcctgtagtcccagctactcgggaggctgaggcaggagaatggcatgagcctgggaggcggagcttgcagtgagccgagatcccgccactgtactccagcctgggcaacagaacgagactccgtctcaaaaagaaagaaaaaaaaaaaacaaaaacaaggtttcttctttttgccacttaaaatatcttatatttctagatttccaggtctatgtggaaatcatcacacttgggccaataaatgggttagttcagatgtgctgagaaaagtaaatagtgtaccctaaatatcttgcatgtacatttatctatttctctgtttaatgccacttaattttgtaagaaatgagaaatgaaaccctatgtatcagtggaaaaatccttcttgcttcagatttcccaactttattctggaggagaaaaaaatctgtatttctcattaacagagatagaaaaaggtgatgtacttacgatggtcacattcatattgggcattggatctatttaagcctagaagtataacagataatcagttccttaagtgtaaatatgttcttaaatgtttggcctttttatctgttattcaaatgtattagtaattctcatattttgcaaacagatccttttgtgtatattataaaatatataccaaatctgtttttccttttgctgtggaagatgtctttatataatattgagacttcccttgcaaatgagagacgggactctggtcaggtatagtgtgtaggcctagccccatgtattaggaactcataaactcagaaatccaaggattaaacattttatgtctccttcatttatgcaagtcatgctttcattctacatgtagttaaaactacaagtatgagaaaaaatagaactttccattggaattttttccaatcaggtaatgttttagcaacttgaaatcagcacttaatttgattgtatt

SEQ ID NO: 381234 - DNA, 5717 bp, Homo sapiens
acgttggagagcggggccggagagggctggttcgctctgcggccgggcccctcccccgcccgggagcttggcggttccgacaccgcggtcagtgcggggcaagccccagacccggccggccaggctgcagggcagggaagtttgtcctctcacttctggagaagatgcagacacaggagatcctgaggatactgcgactgcctgagctaggtgacttgggacagtttttccgcagcctctcggccaccaccctcgtgagtatgggtgccctggctgccatccttgcctactggttcactcaccggccaaaggccttgcagccgccatgcaacctcctgatgcagtcagaagaagtagaggacagtggcggggcacggcgatctgtgattgggtctggccctcagctacttacccactactatgatgatgcccggaccatgtaccaggtgttccgccgtgggcttagcatctcagggaatgggccctgtcttggtttcaggaagcctaagcagccttaccagtggctgtcctaccaggaggtggccgacagggctgaatttctggggtccggacttctccagcacaattgtaaagcatgcactgatcagtttattggtgtttttgcacaaaatcggccagagtggatcattgtggagctggcctgctacacatattccatggtggtggtcccgctctatgacaccctgggccctggggctatccgctacatcatcaatacagcggacatcagcaccgtgattgtggacaaacctcagaaggctgtgcttctgctagagcatgtggagaggaaggagactccaggcctcaagctgatcatcctcatggacccattcgaagaagccctgaaagagagagggcagaagtgcggggtggtcattaagtccatgcaggccgtggaggactgtggccaagagaatcaccaggctcctgtgcccccgcagcctgatgacctctccattgtgtgtttcacaagcggcacgacagggaacccaaaaggtgcgatgctcacccatgggaacgtggtggctgatttctcaggctttctgaaagtgacagagaaagtgatctttccgagacaggacgatgtgctcatctccttcctgcctctggctcacatgtttgagagagtaatccagtctgtcgtctattgccacggagggcgtgttggcttcttccagggagatatccgccttctctcagatgacatgaaggctctatgccccaccatcttccctgtggtcccacgactgctgaaccggatgtacgacaagatcttcagccaggcaaacacaccattaaagcgctggctcctggagtttgcagcaaagcgtaagcaagccgaggtccggagtggaatcatcaggaatgatagtatctgggatgaactcttctttaataagattcaggccagtcttggtgggtgtgtgcggatgattgttactggagcagccccagcatcaccaacagttctgggatttctccgggcagctctagggtgccaggtttatgaaggttatggccaaactgagtgcacagctggatgtaccttcaccactcctggcgactggacctcagggcacgtaggggcgccacttccctgcaatcatatcaagctcgttgatgttgaggaactgaactactgggcctgcaaaggagagggagagatatgtgtgagaggaccaaatgtgttcaaaggctacttgaaagatccagacaggacgaaggaggccctggacagcgatggctggcttcacactggagacatcggaaaatggctgccggcaggaactcttaaaattattgatcggaaaaagcatatatttaaacttgctcagggagaatatgttgcacccgagaagattgagaacatctacatccggagccaacctgtggcgcaaatctatgtccatggggacagcttaaaggcctttttggtaggcattgttgtgcctgaccctgaagttatgccctcctgggcccagaagagaggaattgaaggaacatatgcagatctctgcacaaataaggatctgaagaaagccattttggaagatatggtgaggttaggaaaagaaagtggactccattcttttgagcaggttaaagccattcacatccattctgacatgttctcagttcaaaatggcttgctgacaccaacactaaaagctaagagacctgagctgagagagtacttcaaaaaacaaatagaagagctttactcaatctccatgtgaagttcaaggaaagttcttctcagtgtaatgaactgtctagcaatattatagttattcttgaaagtaatgagtcaaaatgacacagctgaaaatgaataagcatctgattttatgactgagccttttcctgtcccaagaggtctttaacaatattttctctatcatcaatgagtatattttatttttattataaaaatgatattgtggtggactgctaaaaatatcacaaatggcaatgtaaaaatcaagacattttctcaagaactgtgtaccactaaaagtaatatattgtcaatgttcacagaactattaaacataaaggaaaaacataagtgatatattctacttaattatttgtgaatcagtaaccagatgcagcaaatatctaggcaatgtggactacctcattcagtaactgattgtcaaaatcacaattaaatcagacttcaaaaattaaagctaggtgtatagaatcatgctaaaagaaaacatgataactcatagtctacgtaacttcagagtctttaaacatgacaatccacattgtcatatgtgaaaattttctctctgatttttactttcattcatgaaaaatgaaaattcagaaattctttttttcctttttgttttgagacagggtctgctctgtcacctaggctggagtgcagtggcttaatcatggctcattgcagtctccatctcctgggctcgagtgatcctcctgtctcacctcccaagtagctgagactacagtacaggcacatgccaccacacctgggctaataggaaattttttttttaggggttttggctcaggctggtctcaaactcctgagctcaagggatcctcccgccttggcctccctaagtgctaggattacaggcatgagccattgttcccagccaaattcagatattattaaaacacatgtcatatttatatagtaacttacaaagacctttcaatacattttctcatttattaagctcattaaagtattcaggaactacctagaaaaaatataatgtaaaactattcaaggatagtgtgtgtatgttcatggacttcttattataatgaattctaaaagacatctgttgactctacaatgaatggatccttgaggaatacttgggagaagaaactcagagttatttctcagggtaggcagcaattaatgtacctacattccttgctggggtcttctagtcttccattcccaatgtgcccatgctatgcctggaaaccctatatggttgtaattctgaacaatttcactttttttccagtaagaatatcaaggcagaaggtgggaaggaggggacattatttccagggaaaatagtttttcaacaatataactttgataaacctctttaaaatgccccaagaaaactttttaagtccatagacaaagaaatactgcctaatggcataattacattcctaaaatctttaagcgtgccgaagtttaaccactaaaacctcctttcttgcattatgtatttagatgcaccctgtattggggtgtcaacaatttcttataattaaaggccagataccatggacagcaattaagttccaagctatagattgtgcctctgaaaaaggcatggaccccaggaacgtgtttttcttctgtagagacaagactctaaaagcatatcaacaatccatatgcaattccatgtgttaatttaaaatgtatgtgctcagtgtttgtagtctagaagctcctttcccttggaggaatgccaagcagtttgcaaaaataaatgctgttagttaaaaaccacataatcacatgggcctactgaataaatatgcatcagtgattatatacttatatttcagtcttgtcaaaagtgaatcactgtttcatttgatgtatttacccagtctttttatccagtttttcttgggcatattctctctgaagacccactgttgcacttctaaatttgacagttaagaaatgagctagttctatacacactgatttttaaaggcgtttctgaataaactaatacttaaaatgtcaaaagtcacatctgtacagcattagatttttatatttaatatatatttgactaattaaaagtgaaagttgttacctgaactggatattcatactattttaagggcaagttgcttacatttcaataacaacaaaaaaagaatctgtttcccattgtcctcctactcaactaaaattcatagttggctttaagcccaaaagaattttgaacaatgtgacagaaacaagtaatgtaaaacttattttgttttatttatactttataatagttagatataacagattatggacaacttaatatttcttctttttggctgggcgcggtggctcatgcctgtagtcccagcactttgggaggccgaggcgggcagatcacgaagtcaggagatcgagaccatcctggctaacacagtgaaaccccgtctctactaaaaaaatacaaaaaattagccgggcgttgtggcgggcgcctgtagtcccagctactcgggaggctgaggcaggagaatggcatgagcctgggaggcggagcttgcagtgagccgagatcccgccactgtactccagcctgggcaacagaacgagactccgtctcaaaaagaaagaaaaaaaaaaaacaaaaacaaggtttcttctttttgccacttaaaatatcttatatttctagatttccaggtctatgtggaaatcatcacacttgggccaataaatgggttagttcagatgtgctgagaaaagtaaatagtgtaccctaaatatcttgcatgtacatttatctatttctctgtttaatgccacttaattttgtaagaaatgagaaatgaaaccctatgtatcagtggaaaaatccttcttgcttcagatttcccaactttattctggaggagaaaaaaatctgtatttctcattaacagagatagaaaaaggtgatgtacttacgatggtcacattcatattgggcattggatctatttaagcctagaagtataacagataatcagttccttaagtgtaaatatgttcttaaatgtttggcctttttatctgttattcaaatgtattagtaattctcatattttgcaaacagatccttttgtgtatattataaaatatataccaaatctgtttttccttttgctgtggaagatgtctttatataatattgagacttcccttgcaaatgagagacgggactctggtcaggtatagtgtgtaggcctagccccatgtattaggaactcataaactcagaaatccaaggattaaacattttatgtctccttcatttatgcaagtcatgctttcattctacatgtagttaaaactacaagtatgagaaaaaatagaactttccattggaattttttccaatcaggtaatgttttagcaacttgaaatcagcacttaatttgattgtatt

SEQ ID NO: 381235 - DNA, 5195 bp, Homo sapiens
ggatcccctgattactctggccgattttgtgcaaaaacaccaataaactgatcagtgcatgctttacaattgtgctggagaagtccggaccccagaaattcagccctgtcggccactagtggatcattgtggagctggcctgctacacatattccatggtggtggtcccgctctatgacaccctgggccctggggctatccgctacatcatcaatacagcggacatcagcaccgtgattgtggacaaacctcagaaggctgtgcttctgctagagcatgtggagaggaaggagactccaggcctcaagctgatcatcctcatggacccattcgaagaagccctgaaagagagagggcagaagtgcggggtggtcattaagtccatgcaggccgtggaggactgtggccaagagaatcaccaggctcctgtgcccccgcagcctgatgacctctccattgtgtgtttcacaagcggcacgacagggaacccaaaaggtgcgatgctcacccatgggaacgtggtggctgatttctcaggctttctgaaagtgacagagaaagtgatctttccgagacaggacgatgtgctcatctccttcctgcctctggctcacatgtttgagagagtaatccagtctgtcgtctattgccacggagggcgtgttggcttcttccagggagatatccgccttctctcagatgacatgaaggctctatgccccaccatcttccctgtggtcccacgactgctgaaccggatgtacgacaagatcttcagccaggcaaacacaccattaaagcgctggctcctggagtttgcagcaaagcgtaagcaagccgaggtccggagtggaatcatcaggaatgatagtatctgggatgaactcttctttaataagattcaggccagtcttggtgggtgtgtgcggatgattgttactggagcagccccagcatcaccaacagttctgggatttctccgggcagctctagggtgccaggtttatgaaggttatggccaaactgagtgcacagctggatgtaccttcaccactcctggcgactggacctcagggcacgtaggggcgccacttccctgcaatcatatcaagctcgttgatgttgaggaactgaactactgggcctgcaaaggagagggagagatatgtgtgagaggaccaaatgtgttcaaaggctacttgaaagatccagacaggacgaaggaggccctggacagcgatggctggcttcacactggagacatcggaaaatggctgccggcaggaactcttaaaattattgatcggaaaaagcatatatttaaacttgctcagggagaatatgttgcacccgagaagattgagaacatctacatccggagccaacctgtggcgcaaatctatgtccatggggacagcttaaaggcctttttggtaggcattgttgtgcctgaccctgaagttatgccctcctgggcccagaagagaggaattgaaggaacatatgcagatctctgcacaaataaggatctgaagaaagccattttggaagatatggtgaggttaggaaaagaaagtggactccattcttttgagcaggttaaagccattcacatccattctgacatgttctcagttcaaaatggcttgctgacaccaacactaaaagctaagagacctgagctgagagagtacttcaaaaaacaaatagaagagctttactcaatctccatgtgaagttcaaggaaagttcttctcagtgtaatgaactgtctagcaatattatagttattcttgaaagtaatgagtcaaaatgacacagctgaaaatgaataagcatctgattttatgactgagccttttcctgtcccaagaggtctttaacaatattttctctatcatcaatgagtatattttatttttattataaaaatgatattgtggtggactgctaaaaatatcacaaatggcaatgtaaaaatcaagacattttctcaagaactgtgtaccactaaaagtaatatattgtcaatgttcacagaactattaaacataaaggaaaaacataagtgatatattctacttaattatttgtgaatcagtaaccagatgcagcaaatatctaggcaatgtggactacctcattcagtaactgattgtcaaaatcacaattaaatcagacttcaaaaattaaagctaggtgtatagaatcatgctaaaagaaaacatgataactcatagtctacgtaacttcagagtctttaaacatgacaatccacattgtcatatgtgaaaattttctctctgatttttactttcattcatgaaaaatgaaaattcagaaattctttttttcctttttgttttgagacagggtctgctctgtcacctaggctggagtgcagtggcttaatcatggctcattgcagtctccatctcctgggctcgagtgatcctcctgtctcacctcccaagtagctgagactacagtacaggcacatgccaccacacctgggctaataggaaattttttttttaggggttttggctcaggctggtctcaaactcctgagctcaagggatcctcccgccttggcctccctaagtgctaggattacaggcatgagccattgttcccagccaaattcagatattattaaaacacatgtcatatttatatagtaacttacaaagacctttcaatacattttctcatttattaagctcattaaagtattcaggaactacctagaaaaaatataatgtaaaactattcaaggatagtgtgtgtatgttcatggacttcttattataatgaattctaaaagacatctgttgactctacaatgaatggatccttgaggaatacttgggagaagaaactcagagttatttctcagggtaggcagcaattaatgtacctacattccttgctggggtcttctagtcttccattcccaatgtgcccatgctatgcctggaaaccctatatggttgtaattctgaacaatttcactttttttccagtaagaatatcaaggcagaaggtgggaaggaggggacattatttccagggaaaatagtttttcaacaatataactttgataaacctctttaaaatgccccaagaaaactttttaagtccatagacaaagaaatactgcctaatggcataattacattcctaaaatctttaagcgtgccgaagtttaaccactaaaacctcctttcttgcattatgtatttagatgcaccctgtattggggtgtcaacaatttcttataattaaaggccagataccatggacagcaattaagttccaagctatagattgtgcctctgaaaaaggcatggaccccaggaacgtgtttttcttctgtagagacaagactctaaaagcatatcaacaatccatatgcaattccatgtgttaatttaaaatgtatgtgctcagtgtttgtagtctagaagctcctttcccttggaggaatgccaagcagtttgcaaaaataaatgctgttagttaaaaaccacataatcacatgggcctactgaataaatatgcatcagtgattatatacttatatttcagtcttgtcaaaagtgaatcactgtttcatttgatgtatttacccagtctttttatccagtttttcttgggcatattctctctgaagacccactgttgcacttctaaatttgacagttaagaaatgagctagttctatacacactgatttttaaaggcgtttctgaataaactaatacttaaaatgtcaaaagtcacatctgtacagcattagatttttatatttaatatatatttgactaattaaaagtgaaagttgttacctgaactggatattcatactattttaagggcaagttgcttacatttcaataacaacaaaaaaagaatctgtttcccattgtcctcctactcaactaaaattcatagttggctttaagcccaaaagaattttgaacaatgtgacagaaacaagtaatgtaaaacttattttgttttatttatactttataatagttagatataacagattatggacaacttaatatttcttctttttggctgggcgcggtggctcatgcctgtagtcccagcactttgggaggccgaggcgggcagatcacgaagtcaggagatcgagaccatcctggctaacacagtgaaaccccgtctctactaaaaaaatacaaaaaattagccgggcgttgtggcgggcgcctgtagtcccagctactcgggaggctgaggcaggagaatggcatgagcctgggaggcggagcttgcagtgagccgagatcccgccactgtactccagcctgggcaacagaacgagactccgtctcaaaaagaaagaaaaaaaaaaaacaaaaacaaggtttcttctttttgccacttaaaatatcttatatttctagatttccaggtctatgtggaaatcatcacacttgggccaataaatgggttagttcagatgtgctgagaaaagtaaatagtgtaccctaaatatcttgcatgtacatttatctatttctctgtttaatgccacttaattttgtaagaaatgagaaatgaaaccctatgtatcagtggaaaaatccttcttgcttcagatttcccaactttattctggaggagaaaaaaatctgtatttctcattaacagagatagaaaaaggtgatgtacttacgatggtcacattcatattgggcattggatctatttaagcctagaagtataacagataatcagttccttaagtgtaaatatgttcttaaatgtttggcctttttatctgttattcaaatgtattagtaattctcatattttgcaaacagatccttttgtgtatattataaaatatataccaaatctgtttttccttttgctgtggaagatgtctttatataatattgagacttcccttgcaaatgagagacgggactctggtcaggtatagtgtgtaggcctagccccatgtattaggaactcataaactcagaaatccaaggattaaacattttatgtctccttcatttatgcaagtcatgctttcattctacatgtagttaaaactacaagtatgagaaaaaatagaactttccattggaattttttccaatcaggtaatgttttagcaacttgaaatcagcacttaatttgattgtatt

SEQ ID NO: 381236 - DNA, 4500 bp, Homo sapiens
  misc_feature (1061)..(1061): n is a, c, g, or t
  misc_feature (3771)..(3771): n is a, c, g, or t
  misc_feature (4500)..(4500): n is a, c, g, or t
cgcgtgttgatggggtgggtggcggcggggtgggctcaatgtcacgctctggcgctcgtcgcccgtgctcccccttccagccggtttccgcagaatgccagagtttgtcctctcacttctggagaagatgcagacacaggagatcctgaggatactgcgactgcctgagctaggtgacttgggacagtttttccgcagcctctcggccaccaccctcgtgagtatgggtgccctggctgccatccttgcctactggttcactcaccggccaaaggccttgcagccgccatgcaacctcctgatgcagtcagaagaagtagaggacagtggcggggcacggcgatctgtgattgggtctggccctcagctacttacccactactatgatgatgcccggaccatgtaccaggtgttccgccgtgggcttagcatctcagggaatgggccctgtcttggtttcaggaagcctaagcagccttaccagtggctgtcctaccaggaggtggccgacagggctgaatttctggggtccggacttctccagcacaattgtaaagcatgcactgatcagtttattggtgtttttgcacaaaatcggccagagtggatcattgtggagctggcctgctacacatattccatggtggtggtcccgctctatgacaccctgggccctggggctatccgctacatcatcaatacagcggacatcagcaccgtgattgtggacaaacctcagaaggctgtgcttctgctagagcatgtggagaggaaggagactccaggcctcaagctgatcatcctcatggacccattcgaagaagccctgaaagagagagggcagaagtgcggggtggtcattaagtccatgcaggccgtggaggactgtggccaagagaatcaccaggctcctgtgcccccgcagcctgatgacctctccattgtgtgtttcacaagcggcacgacaggtaagcagaggcacgcagatccccagccatggctacctgcacccttccctggtggcctagcaggtgactgctggagtctttgataccctgttngaaatgggctgagccttgtcttgttcctggctccagacactgggtgacctcctgcacctcccagtgccctgcataagagtggccagatgcagatggatagtgtgcattgggaggtccagtgtgagggcttggcacctcccagagctgagtcagcagagtcatgggcagctggatcatgtgctgagggaaggtcctttctcactggcatcatttctctctggtaaacagctctcactcccctgctttctgcccctgcctggcctttgtgttggagactggggaaagagtgtgaggtttggcgtctgagagccttggtttgagtcctacctccactgcttgctgggggactgtgagccactcatttaacttctctgccaccagtgtccccagtttctcatctgccatgagggtggctaaaggtgccaagtgggagatgggacagtgtgtgaaagggcaatgcagatgctctgcaggctggggctggtgtgccatgagcaaggctgtcaggcaaagcacacaagcagaaatgatatcctctgtgcttggagctgacagaggagcacacacatcaacagtggcaggaataatcaaggaaggcttcctgggggaggcagaaagcacaagaggacacacacagcacaggcacaaccctctgcatttctatagcatgctgtccaccctctctctgcaccactggggcctcagcacagcctgtgaggtgagcaggattgtcaccaagcctgcttgctccaaagggacaccatcagcaagtagaagcaccagggcctgtgccctgctgtcataattcccaggccagagcctttcccagtgctgcctttccatctcatctgatgacgtggatgtcacttgtcttgccctgaatgggcaggaagtctccagccttctttttccaaactgaggattggcccatcttgatgacagctctcagtgggcagtgaactggggctctgcatgccttctgcagatgcagcctctaaggcatttgacagacctgtgaccagccctacaaccaggattattcatgtcagtggatcatgataaacatgctttattgaatatagatagatttttaccattaactcacatgggttcaaggatttccaccatattctactaaactttgtcagaaaaataacaacacagcccttcctctccaggagctgacatccagagccaacccagaattcaaaaatgcccttcaggtttatgttgctttttaaagagcactttccaatgtctttttgtcttgagttttacaatgtgaatttttggtgacatggttttggggagcaggtcactgctatggccttacctttggacctgccttcaaagtgtgccttcagccttttaacaggtcacttggtcacagacattgcccttggatctggagaaaaacttcatgatgcagaaatgtgctattgcctggctggggagggcagacatcatgtccagtgcttttccagactgtaggaagctgagccatcctgctcaagctctgtgtggtggaagcagaatgtatagggcttgaaacataggctgtgatttactatcccagacctcccactccaaagctatggctgttgcctgggcagagctgggggagtgagcagggctctggcctgatatcaccccatctggctgtgcacttggatttccttggctttaggctaagcccatgctgtgcctcttgtactcatcctcttgtcgggcacatcagccttgtgtgtcctcagcgtcacagcccagatacagcttcccttaaatgtaagctaaatgtcctggctcccagcctcatcaagggccacattgttcttttcatggggaaagatggaaaatatgatctgaacctgacatttggcccatgattctggtggaatcattccaggaagatttcattcttagcatgtggtggaaaaaatctgtggagattcctagaataagtcagtactttgaagtccctattcaggccaagaaggcctgggaggtggtgagagcttgtggtctgtctgtacccagtgatggctgaggggtgggcatgtggtttgctgttcatttcaaaataacagttagctggactggaatctgaacccattcccacctctgaaaaaaagataatatgtgggtgtaacatagcccagtttgggaaattgggtctcttgaatgatagttaggatgttttatccttgtgagttcatatgccttgtcttcccagcaaagaaaatacagtgcttttaaaaaacataactttcagtctatgtgtttttagcactctttttctaattcatctatattcactcattcagctcatttttgtgagtacccactatgcatcagacctagcattaggtgctgagggcatagggatggagaagacataggtctgcacccgtgagctcccagcttgtgtcatcaggcagttacaatatgatgcggtcactgccttgaggtctgcatccctggtgcatgggttacccggccactgagagatcagtacagcaggacagaaaggattcccagaggaagtcagtctaagcagagtcctgaaagatctgtagctgcagaagccagggaaaggcattccctgcaggagaaagagcatatgtggaggcctgatggtagcacagaacacgctgctttgagggagttttgagaggaaaagagagggcccgaggcagggcttgagggcacnagcatgagggagatgatgggacaggagttcccaatagaggtcaggcaggaggggctggagaggctagaggagaacaggatttgtcagtgtcgtctgtggttaagttgtaactggaggatgtcaccatgaaatgacctgctggtgctcttgacaaagactggtcccgggcgcggtggctcacgcctgtaatcccagcactttgggaggccgaggcgggcggatcacgaggtcaggagatcgagaccatcccggctaaaacggtgaaaccccgtctctactaaaaatacaaaaaattagccgggcgtagtggcgggcgcctgtagtcccagctacttgggaggctgaggcaggagaatggcgtgaacccgggaggcagagcttgcagtgagccgagatcccgccactgcactccagcctgggcgacagagcgagactccgtctcaaaaaaaaaaaaaaaaaaaaaaaaagactggtcttcccagcactttgggaggccgaggtgggtagatcacaaggtcaggagatcgagcccatcctggctaacatggtgaaaccctgtctgtactaaaaatacaaacaattagctgagtgtggtggcgcatgcctgtagtcctagctacttgggagcagaggcaggagaatcgcttgaacctgggaggcagaggttgcagtgagccgaaattgtgccacttcactccagtctgggcaacagagcgagactccatcacn

SEQ ID NO: 381237 - DNA, 2737 bp, Homo sapiens
gtgagacatgtctgagactcctgctcagtgtagcattaagtttgtcctctcacttctggagaagatgcagacacaggagatcctgaggatactgcgactgcctgagctaggtgacttgggacagtttttccgcagcctctcggccaccaccctcgacagtggcggggcacggcgatctgtgattgggtctggccctcagctacttacccactactatgatgatgcccggaccatgtaccaggtgttccgccgtgggcttagcatctcagggaatgggccctgtcttggtttcaggaagcctaagcagccttaccagtggctgtcctaccaggaggtggccgacagggctgaatttctggggtccggacttctccagcacaattgtaaagcatgcactgatcagtttattggtgtttttgcacaaaatcggccagagtggatcattgtggagctggcctgctacacatattccatggtggtggtcccgctctatgacaccctgggccctggggctatccgctacatcatcaatacagcggacatcagcaccgtgattgtggacaaacctcagaaggctgtgcttctgctagagcatgtggagaggaaggagactccaggcctcaagctgatcatcctcatggacccattcgaagaagccctgaaagagagagggcagaagtgcggggtggtcattaagtccatgcaggccgtggaggactgtggccaagagaatcaccaggctcctgtgcccccgcagcctgatgacctctccattgtgtgtttcacaagcggcacgacagggaacccaaaaggtgcgatgctcacccatgggaacgtggtggctgatttctcaggctttctgaaagtgacagagagtcagtgggctcccacttgtgcggatgtgcacatttcctatttgcctttagcacacatgtttgagcgaatggtgcagtctgtcgtctattgccacggagggcgtgttggcttcttccagggagatatccgccttctctcagatgacatgaaggctctatgccccaccatcttccctgtggtcccacgactgctgaaccggatgtacgacaagatcttcagccaggcaaacacaccattaaagcgctggctcctggagtttgcagcaaagcgtaagcaagccgaggtccggagtggaatcatcaggaatgatagtatctgggatgaactcttctttaataagattcaggccagtcttggtgggtgtgtgcggatgattgttactggagcagccccagcatcaccaacagttctgggatttctccgggcagctctagggtgccaggtttatgaaggttatggccaaactgagtgcacagctggatgtaccttcaccactcctggcgactggacctcagggcacgtaggggcgccacttccctgcaatcatatcaagctcgttgatgttgaggaactgaactactgggcctgcaaaggagagggagagatatgtgtgagaggaccaaatgtgttcaaaggctacttgaaagatccagacaggacgaaggaggccctggacagcgatggctggcttcacactggagacatcggaaaatggctgccggcaggaactcttaaaattattgatcggaaaaagcatatatttaaacttgctcagggagaatatgttgcacccgagaagattgagaacatctacatccggagccaacctgtggcgcaaatctatgtccatggggacagcttaaaggcctttttggtaggcattgttgtgcctgaccctgaagttatgccctcctgggcccagaagagaggaattgaaggaacatatgcagatctctgcacaaataaggatctgaagaaagccattttggaagatatggtgaggttaggaaaagaaagtggactccattcttttgagcaggacctaccacagtgcttaatacagattaaggtgttcagtaaatattgattcaatgactcaaaacccgaggtaaaaccaggttcgaagagaaaaggcaaagtgcacggcttgtcgaagattgcagagaaagcagagcggagcaggcagggaggtagcggctctgggccgttcagccctcgcttaggagttacaggagagaaaagcctgcaagaaaataggtctagtgaagacacccaggatgagaagattgcatcgttgcgtgaatcagttactgatgacctccaggttgatagtagttcatcaaatagtgaactagtatcaggattaagtttgcaccatggtatggccagttctcttctgagctattcagtcacagactcttatgcagaatacaagagttttgaagagagctttccatcacctgaactgttcagaaaatcagattatttagactgggagtgtcccaacttggaagaacacatgcagtggaagaattctactcttctggataccagtaaagcagtagcgatagagaaggcaccacagttttcaaatgtctcagcaattttcagtacctcttcagaagactatcagaaatgccatagaaaaacagtgatgacagtagcagatcaaaatgtttctccaaaagcaaagtgtgcttcaaattcagaatcagataatgcagcttgtgagattttacttgctgagaaaacttgcccttcaacccctgaaaaaacaaagaaaaaagcaagtattgaagcagaataactacataaatcataatacatttcattaataaagaatatacttttaactaacagt

SEQ ID NO: 381238 - DNA, 377 bp, Homo sapiens
ttttttttttcgagatggagagtcgctgtatcacccaggctggagtgcagtggcgcgatctcagctcactgcaacctctgcctcccaggttcaagcaattctcctgcctcagcctcccgagtagctgggattacaggcatgcaccaccatgcccggctaattttgtatttgtagtagagacggggtttctccatgttgaggctggtctcgaactcctgacctcaggcgatccgcggcctcggcactcaaagtgctaggattacaggcatgagccaccacacccagccgtcattgtctattcatgcccaaacttgattgattgttaatcctggtggcatgactggaaaactgaaactcatagccctttcagtttgttc

SEQ ID NO: 381239 - DNA, 585 bp, Homo sapiens
  misc_feature (39)..(39): n is a, c, g, or t
  misc_feature (42)..(42): n is a, c, g, or t
attcgcggccgcgtcgaccccaaatgccatcccctaagntgncggtctatgggcctgggcacagcactttagaacttggacaaaccagagtgcttccagcttggtagtggaggggacggggtggggaccaagatgcagaggggggttgatgctatgtcaccatccaaaacacattgtaaggccctggcactgtttctgctggagaagagaaagaggttagaagagggaaaagcattaatcttatgtctgtaatcttatgtaaaggacagaacaaaaataaaataggaatatccatgaataaagttctggagactgaggcaggagaatcgcttgaacccaggaggtggaggctgcggtgaggcgagatcgtgtcattgcgctccagcctgggcaacaagagtgaaactccgtctcaaaaataaataaataaataaagatgaaaatgctagggtttggggtagtttcccaattttcccaaggtgcatagccatgatcagttggctgaaggtgtatatgcgtctgcgtgtgtgtgtgtgtgtgtgtgtatgtacctgtacacacacatatatggtatacgtgtatata

SEQ ID NO: 381240 - DNA, 434 bp, Homo sapiens
gccatacttaatattctaccttaatgggaaaaaaaatcatcatatttttaggtgcaggatattctcaggttccttcaaagtttacatattagggaagttaatggctaagttaaacctctctggggcattcagagtatagaaagcaagggatgagagttgaaacagatggtggtagtgggctgcaaataggcaatattaaaatacaaccatctttccactgtacaaatgtacatgtagaaattttttagaaaagcatgaagaagcaaaaagtcatctataatctcattactgaaagaaattgttaacgtttggattaatatctcaccaggcatggtggctcatgcctataatcccagcacactgggaggccaaggtgggcgatcacttgacgtcagaagttcaagaccagcctggccaacgtgatgaaacctcgt

SEQ ID NO: 381241 - DNA, 454 bp, Homo sapiens
gagcaactagtacagtgcctcacacagggcaggtgctcagtaaatatttgctgaattgtacttgtagcttttagaaaactagaatctacaatgattcaattcgatagtatgaatttctaatgttagagatttcaaagaagtcagtgtggagaataatctttaacactgtaataatgaagaataagggaacaataaaggcaactcaattgtttttaggcaacaggtcaaattaaggatctatgatgatagttcattagattcaaatgtaagattaggaactggtggggactaagaataatggactaacttggttgttttagaattctcaatgttttctacaaagtcttaatatgatggataaagcaattaactaaatgaaataactaagataaaagagaagctttagaaactgtgagaagcttctaaaacttacttttaaaaagaagggtaatat

SEQ ID NO: 381242 - DNA, 335 bp, Homo sapiens
tatccaatggggaaataacttttgagtttggagaacattgtatctaaggaacagttgccaaagcagatattacagtgaaaggtgagatcaatagacttaacgtgacctgatcttattagttgataagaaaaagttttggaagtacataaatacaaacacacattttttaagggtgaaacagaaattatatttttcatgttactttaggtaaaactgttttgttgggctgtactactatgatgatcaaatataaccttaattgaaaatttttatagagcttattttttcagaaatattttatcccagtacatttaggaaattacaaaaaaaaatac

SEQ ID NO: 381243 - DNA, 1601 bp, Homo sapiens
gagatgcaacccaaaggagtaaggcagtgccgggagcggcagaagcggagcgggggcgagggcaaggtagccgcggccacgctggctgcggcatggagacacgggaggaacgggacccgcgggcggcacgggaaagggctgcggctcagaccactgcggcgggacgggcggatcagcggggatctaagtctcctgaggcaagggcgccccgaccgcagcgactcctgacacacccaggccgcaggacgaagcgctaccgcctggggctgccagctcccgcctcccgcccgcagagcccgggccccacgtagaggatccggcgccgccgacactcgcacactcaccgcgcgcgcgccacccttgcgcggcagcccgccgccctcggcgcgacctccgccccaccccgcgcgccgcggcgcctgggctacgtcacgggcgcgtgcgctctccgcgcgccgtcagcggcgcgggtggggcattgccagctcggcgtcccggttcccttggagacagagctggccaggcggccgcggctgggcaactacgacagcggagcccctggggaagccaagatgccgtcgaagggaaaggacaaaaagaaaggcaagagcaaaggcaaagacacgaaattgaaaaactgaaacagcaattaaatgaaacaaaggaaaaagcccaagaggagaaggataaattggaacaaaagtataccaggcaaattaatgaactagagggacagttccatcaaaaagccaaagaaattggcatgattcacacagagctgaaagcagtaagacaattccagaagagaaaaatccaagtggagagagagttagatgatctgaaagagaatttaagaaacacagagcggatacatcaggagactcttagaagactggaaagcagattttttgaagaaaaggcaattgaacgatgctggaagaaatgtttttaaagagaatgattatcttcagaaagctctggcatatcacctgaaggaaactgacgctctacaaaaaaactcccagaagttgcaagagagtcatactttacttttacatcaaaaggttccctctcatttagacttggtgtccttcttttctttatttaaggattgggttggtaaataccaaaaattgggtataataatgatatataaggacaatgagaccattttcatctgtctggatgatgcactttttttatctgaaaaggttaaatactcaatcttataatgcttataagaagcattaaactcaacttataaagaatatatcagaaacataaatatgacccttatcctctactaccttagaatattcatttttctttgcttagagttggtccctgagtcacttaggaatacatttagcggtgagtaacagtcctgacatcagtggcatcaccacacaagggtttattctttcacctaaaggaggcctggaggtaagcaatccacagcaggaatggtagtgccacaaagttaatagacactcagcttccttaactttgctctgcaacacttggcttacatcctcaaactcacctcacagcctggggggcgctgctggagctctaaccattcctttaaatagcaggaagga

SEQ ID NO: 381244 - DNA, 1901 bp, Homo sapiens
gagatgcaacccaaaggagtaaggcagtgccgggagcggcagaagcggagcgggggcgagggcaaggtagccgcggccacgctggctgcggcatggagacacgggaggaacgggacccgcgggcggcacgggaaagggctgcggctcagaccactgcggcgggacgggcggatcagcggggatctaagtctcctgaggcaagggcgccccgaccgcagcgactcctgacacacccaggccgcaggacgaagcgctaccgcctggggctgccagctcccgcctcccgcccgcagagcccgggccccacgtagaggatccggcgccgccgacactcgcacactcaccgcgcgcgcgccacccttgcgcggcagcccgccgccctcggcgcgacctccgccccaccccgcgcgccgcggcgcctgggctacgtcacgggcgcgtgcgctctccgcgcgccgtcagcggcgcgggtggggcattgccagctcggcgtcccggttcccttggagacagagctggccaggcggccgcggctgggcaactacgacagcggagcccctggggaagccaagatgccgtcgaagggaaaggacaaaaagaaaggcaagagcaaaggcaaagacacgaagaagttaataaaaacagatgaatctgtggtggacagagccaaggccaatgcctccctttgggaggccaggttggaagtcacagaactctctaggattaagtatcgtgatacttcacggatactggcaaaaagtaatgaggacttaaagaaaaagcaatgtaaaatggagaaagacataatgtcagtattaagttacctgaagaagcaggatcaggagaaagataatatgattgaaaaactgaaacagcaattaaatgaaacaaaggaaaaagcccaagaggagaaggataaattggaacaaaagtataccaggcaaattaatgaactagagggacagttccatcaaaaagccaaagaaattggcatgattcacacagagctgaaagcagtaagacaattccagaagagaaaaatccaagtggagagagagttagatgatctgaaagagaatttaagaaacacagagcggatacatcaggagactcttagaagactggaaagcagattttttgaagaaaagcaccgactagaacaagaggctgaaaagaagataataatgctagcagagagagcccaccatgaggctattgtgcaattgaacgatgctggaagaaatgtttttaaagagaatgattatcttcagaaagctctggcatatcacctgaaggaaactgacgctctacaaaaaaactcccagaagttgcaagagagtcatactttacttttacatcaaaaggttccctctcatttagacttggtgtccttcttttctttatttaaggattgggttggtaaataccaaaaattgggtataataatgatatataaggacaatgagaccattttcatctgtctggatgatgcactttttttatctgaaaaggttaaatactcaatcttataatgcttataagaagcattaaactcaacttataaagaatatatcagaaacataaatatgacccttatcctctactaccttagaatattcatttttctttgcttagagttggtccctgagtcacttaggaatacatttagcggtgagtaacagtcctgacatcagtggcatcaccacacaagggtttattctttcacctaaaggaggcctggaggtaagcaatccacagcaggaatggtagtgccacaaagttaatagacactcagcttccttaactttgctctgcaacacttggcttacatcctcaaactcacctcacagcctggggggcgctgctggagctctaaccattcctttaaatagcaggaagga

SEQ ID NO: 381245 - DNA, 1045 bp, Homo sapiens
gagatgcaacccaaaggagtaaggcagtgccgggagcggcagaagcggagcgggggcgagggcaaggtagccgcggccacgctggctgcggcatggagacacgggaggaacgggacccgcgggcggcacgggaaagggctgcggctcagaccactgcggcgggacgggcggatcagcggggatctaagtctcctgaggcaagggcgccccgaccgcagcgactcctgacacacccaggccgcaggacgaagcgctaccgcctggggctgccagctcccgcctcccgcccgcagagcccgggccccacgtagaggatccggcgccgccgacactcgcacactcaccgcgcgcgcgccacccttgcgcggcagcccgccgccctcggcgcgacctccgccccaccccgcgcgccgcggcgcctgggctacgtcacgggcgcgtgcgctctccgcgcgccgtcagcggcgcgggtggggcattgccagctcggcgtcccggttcccttggagacagagctggccaggcggccgcggctgggcaactacgacagcggagcccctggggaagccaagatgccgtcgaagggaaaggacaaaaagaaaggcaagagcaaaggcaaagacacgaaattgaaaaactgaaacagcaattaaatgaaacaaaggaaaaagcccaagaggagaaggataaattggaacaaaagtataccaggcaaattaatgaactagagggacagttccatcaaaaagccaaagaaattggcatgattcacacagagctgaaagcagtaagacaattccagaagagaaaaatccaagtggagagagagttagatgatctgaaagagaatttaagaaacacagagcggatacatcaggagactcttagaagactggaaagcagattttttgaagaaaaggtacagattattagggttaatttaaaatgttttgtttactagaacataagtgtatttatatgcattctgaaacatcagccttccatttggtatcttaatagaagattagaagattgttaccaaatt

SEQ ID NO: 381246 - DNA, 164 bp, Homo sapiens
tggaaggtactgccaaaaaaggttttctgcttttacgccagcactttcctggtgttttggctaggagaacagaccttttttggagcttttcagtcaataacagatagtacatccaagatggagccttcttcagctccctgtgaagaatatgcaggaaataatca

SEQ ID NO: 381247 - DNA, 441 bp, Homo sapiens
gagcttgcagtgagccgagatcgcgccactgcactccagcctgggagaccgagcgagactccgtctcaaaaaaaaaaaaaaaattagccggacgtggtggcgggcgcctgtagtcccagctacatgaagaggctgaggcaggagaatggcttgaacccggcaggcagaggttgcagtgagccgagatcgcaccactgcactacagcctgggcgacaagagcgagactccgtctcaaaaaaaaaaaaaagttacatgaattgatttatatagaacttctagtttcctccctccaggcacgcggggtgtctttatcaccagttcagcccagcacccgccacatttagtctcttctatcccaagccctcacactgcagctcagtcttccctcagttctttccgcccctgcactcagtcctcattctaggcagctctcaacgcac

SEQ ID NO: 381248 - DNA, 697 bp, Homo sapiens
aagaaaaaaaaaagaaaaggaaagaagaaagaaaaagtatcccagtcggtcagagaagcctgccagtggcagcggaccagcgaactctgttgggaagaaaggccaactttgagcagttcctcgcgattttttcctcctttatcttctagctggggtcctcctcccagtcaaagccgaagggtcctagcagaagaaagtgatttgttcattcccagcctcctttctcccgaagttctcccctcctaaaaggtcctgtcagtcaaggtttctgattaaaatcactctcaaatggtcgccactgaggtctagctgggaacgaagagatctgtctactcttcacccacgagtttcattcacagatttttcatcttattaactgtctgccaaaggtccccgaaactcctgttgattcagttgcttttcgtgttgttttgtcttccaaaattgaatgaaaatttattgattatccattttaattatagtatttcattaaatgttgtagtctaagataacttatcctttcaaatgttctaaaaataactttaaaatggtgatttaaagttacctctgaaaatgcatagaaattaatttttggtcttattgcagtgctagaatagttcttgtctctgtgcttttggaatgttcctagagagacctgacccgtcaaaaacataaataaataaaacttttttatgta

SEQ ID NO: 381249 - DNA, 468 bp, Homo sapiens
  misc_feature (436)..(436): n is a, c, g, or t
tccagactgccttcagactccaggagacatcgtcgcaaagttatgtggaggaacagaaacagctcaaggaaagcttccgggcatttgtggaggacagtgaggacgaggacggcgctggggagggcggctccagtttgctgcagaaacgtgccaaaaccaggcaggagaaggcccaggaggaggccgactacatcgagtggctgaagggacagaaagagattcggaacccagattccctgaaggaactgaagaaagtgcggcccatgtacctgaaggactacgagaggaaggttatcttggagaaggcaggcaaatatgttgatgaggagaactcagacggggagacttccaatcacagactccaggagacatcgtcgcaaagttatgtggaggaacctgactaggacagagaagcagtctggagagtgctgaagcngtctggaggtatcaccgttctaatcatgtcaa

SEQ ID NO: 381250 - DNA, 707 bp, Homo sapiens
tggctgctgggggccaataaagctgtgtaacttgatcgtgggtgtggggtgcaaactacagtacgtgagtcaggccctgaggggggtgcccggggtcctccttccctaccctgccaggagggccccgctggtgggagacaggtgtatgggctctgtgggctctgtccctggctgaatggccccagactggttgcagctgggcttgaggggctgacaacaggaagtaccatcatcactgccagagctcaagatcccacacccgacatgacataaataaaaaaataaatagtgttgtaaaaaaaaaaaaaaaaaaaaaaaaaaaaaaaaaaaaaaaaaaaaaaaaaaaaaaaaaaaaaaaaaaaaaaaaaaaaaaaaaaaaaaaaaaaaaaaaaacaaaagaaaaaagacaccaaagaagaagcaaaaaaacagaaaaaaaacaaaaagaagggaggggcgcgcggcggatcaaagaacaggtgcgcggcggggggggccagacaccgtcacacagaccgccggcccatatgtggtgaaagggaagcgccgcgaccaagagaggggcccataaatagagacagagcgccagcagcgtgatcaaaacctccgcgggggagagaacacccgggcggggtcttacgacgacacccaccccctcgggggggccgaagaaagcgaccccgcgaagaggcgcgggcgaaaacaag

SEQ ID NO: 381251 - DNA, 381 bp, Homo sapiens
acgcttctgtggggggactctccggccccatcaagctgccatcaagggctggcagctgcctctgtgggccggcttcatctctctgtggcttccctgtggctttggcctcagcactgaggagatcctcgctgctgacgataaggagctgaaccggtggtgctccctaaagaagacctgcatgtacaggtcagagcaggaggagctgcgggacaagcgggcgtacagccagaaggcccagaactcatggaaaaagcggcaggtcttcaagtcactctgccgagaagaggcagagacacctgcagctaacttgctgctgctgttgtcctggaagcctcagaggtggctgcagctgcagagagctgggctgaggctggggctggg

SEQ ID NO: 381252 - DNA, 3049 bp, Homo sapiens
gcaatgggccacagaaccgccatgccggaaccgcgcgggtcgtcgcagctgcgggtgaacgcggcgtttgccgcgcggtacaaccgctaccgggagcgcgaggaactgcagcggctgaaggatcgctacggggaccgagacagcagcagcgactccagttccgagtcggactcaagcgacgagcgcgtggaatttgatccccagcaggagcgggacttttacaaaacgctctccttgttgaagaagaaggacccccgcatttatcagaaagatgccaccttctataacagaacagcatcgtcatcagacagtgaggaggacccagaagccttggagaagcagaagaaagtgcggcccatgtacctgaaggactacgagaggaaggttatcttggagaaggcaggcaaatatgttgatgaggagaactcagacagggagacttccaatcacagactccaggagacatcgtcgcaaagttatgtggaggaacagaaacagctcaaggaaagcttccgggcatttgtggaggacagtgaggacgaggacggcgctggggagggcggctccagtttgctgcagaaacgtgccaaaaccaggcaggagaaggcccaggaggaggccgactacatcgagtggctgaagggacagaaagagattcggaacccagattccctgaaggaactgacgcatctcaaggaatactggaacgaccctgagttggatgaaggggagcggttcctgcgggattacatcctcaacaaacgctatgaggaggaggaagaggaggaggaagatgaagaggaaatggaggaagagaagggggtccacggtcccccagtccagctggctgtggacgactcctcagacgaaggggagctgtttctgaagaaacaggaggactttgaacagaagtacaatttccgtttcgaggagccggactcagcatcggtcaagacctacccacgcagcatcgcgtcctccgtgcgccgtaaggatgagcgcagaaaggagaagagggaagagactcgggagcgaaagaagagggagaaagcaaagaagcaggaagagctcaagcagctgaagaacctgaagaggaaggagattctggccaagctggagaagctgcggaaagtaacaggcaacgagatgctgggcctcgaggagggggaccttgaagacgacttcgaccctgcccagcacgaccagctcatgcagaagtgctttggggacgagtactacggggccgtggaggaggagaagccacaatttgaggaagaagaagggcttgaagacgactggaactgggacacgtgggacgggcctgagcaggagggagactggagccagcaggagctgcactgtgaggaccccaacttcaacatggacgccgactacgaccccagccagccgaggaagaaaaagcgcgaggcccccttgacgggcaagaagaagcgcaagtcgcccttcgccgcggccgtggggcaggagaagcccgtgttcgaacccggggacaagacgttcgaggagtacctggatgagtattaccggctggactacgaggacatcatcgacgacctgccctgtcgcttcaagtaccgcacagtggtgccctgtgactttggcctcagcactgaggagatcctcgctgctgacgataaggagctgaaccggtggtgctccctaaagaagacctgcatgtacaggtcagagcaggaggagctgcgggacaagcgggcgtacagccagaaggcccagaactcatggaaaaagcggcaggtcttcaagtcactctgccgagaagaggcagagacacctgcggaagccacagggaagccacagagagatgaagccggcccacagaggcagctgccagcccttgatggcagcttgatggggccggagagtcccccagcacaggaagaggaagcccctgtatcaccccacaagaagccagccccccagaagcggaggagggccaagaaggcacggctgctgggccccactgtgatgcttggtggatgcgagttcagccgccagagactgcaggcctttggcctcaaccccaaacggctgcacttccgccagctgggccggcagcggaggaaacaacaggggcccaagaacagctcctgagcaccagggagcaggcaggggcctcaggctcctctcctcaaatcaagccctggacaggtctcgcacccacaagtactatctgctgcagagatcctctcatctgtggccaggcacgcctgtaatcccagcactttgggaggccgaggtgaaaggatcacttgagcccaggaattggagaccagcgtgggcaacttagcgagactccatctctacaaaatgtggtgacacatgcctgtagtcccagctactcaggaggctggggaaggaagatcacttaaggccatgagtttgaggctacagagagctatgattgcaccactgcactccagcctgggcaacaaagcaagaccctgtctcttgaaaaaaaaaaaaaaaaaattaaaaaacacgtgtagctgtgggtaaggaagtcgtcccattttatggatgtggaaactgaggctgacttaaacttcccgtgacttggagctctcacctcgagacacctcccagaccccacatcccctcagaacgctgcgcccagccacacccacgatcaagttacacagctttattggcccccagcagccacagttcccccaagggggctttgggacagggagggcccgggcgtccagtgcaaactacagtacgtgagtcaggccctgaggggggtgcccggggtcctccttccctaccctgccaggagggccccgctggtgggagacaggtgtatgggctctgtgggctctgtccctggctgaatggccccagactggttgcagctgggcttgaggggctgacaacaggaagtaccatcatcactgccagagctcaagatcccacacccgacatgacataaataaaaaaataaatagtgttgtatctttcccctcatcccctccctttataaaaacacaaagtcctcagagctggg

SEQ ID NO: 381253 - DNA, 3080 bp, Homo sapiens
  misc_feature (1569)..(1569): n is a, c, g, or t
gcaatgggccacagaaccgccatgccggaaccgcgcgggtcgtcgcagctgcgggtgaacgcggcgtttgccgcgcggtacaaccgctaccgggagcgcgaggaactgcagcggctgaaggatcgctacggggaccgagacagcagcagcgactccagttccgagtcggactcaagcgacgagcgcgtggaatttgatccccagcaggagcgggacttttacaaaacgctctccttgttgaagaagaaggacccccgcatttatcagaaagatgccaccttctataacagaacagcatcgtcatcagacagtgaggaggacccagaagccttggagaagcagaagaaagtgcggcccatgtacctgaaggactacgagaggaaggttatcttggagaaggcaggcaaatatgttgatgaggagaactcagacagggagacttccaatcacagactccaggagacatcgtcgcaaagttatgtggaggaacagaaacagctcaaggaaagcttccgggcatttgtggaggacagtgaggacgaggacggcgctggggagggcggctccagtttgctgcagaaacgtgccaaaaccaggcaggagaaggcccaggaggaggccgactacatcgagtggctgaagggacagaaagagattcggaacccagattccctgaaggaactgacgcatctcaaggaatactggaacgaccctgagttggatgaaggggagcggttcctgcgggattacatcctcaacaaacgctatgaggaggaggaagaggaggaggaagatgaagaggaaatggaggaagagaagggggtccacggtcccccagtccagctggctgtggacgactcctcagacgaaggggagctgtttctgaagaaacaggaggactttgaacagaagtacaatttccgtttcgaggagccggactcagcatcggtcaagacctacccacgcagcatcgcgtcctccgtgcgccgtaaggatgagcgcagaaaggagaagagggaagagactcgggagcgaaagaagagggagaaagcaaagaagcaggaagagctcaagcagctgaagaacctgaagaggaaggagattctggccaagctggagaagctgcggaaagtaacaggcaacgagatgctgggcctcgaggagggggaccttgaagacgacttcgaccctgcccagcacgaccagctcatgcagaagtgctttggggacgagtactacggggccgtggaggaggagaagccacaatttgaggaagaagaagggcttgaagacgactggaactgggacacgtgggacgggcctgagcaggagggagactggagccagcaggagctgcactgtgaggaccccaacttcaacatggacgccgactacgaccccagccagccgaggaagaaaaagcgcgaggcccccttgacgggcaagaagaagcgcaagtcgcccttcgccgcggccgtggggcaggagaagcccgtgttcgaacccggtgaggcccaggtgggcaggccgtgggtaggcagggggcaccgcggggcctggcatagcccngcagcctggctctgtctcgaggggacaagacgttcgaggagtacctggatgagtattaccggctggactacgaggacatcatcgacgacctgccctgtcgcttcaagtaccgcacagtggtgccctgtgactttggcctcagcactgaggagatcctcgctgctgacgataaggagctgaaccggtggtgctccctaaagaagacctgcatgtacaggtcagagcaggaggagctgcgggacaagcgggcgtacagccagaaggcccagaactcatggaaaaagcggcaggtcttcaagtcactctgccgagaagaggcagagacacctgcggaagccacagggaagccacagagagatgaagccggcccacagaggcagctgccagcccttgatggcagcttgatggggccggagagtcccccagcacaggaagaggaagcccctgtatcaccccacaagaagccagccccccagaagcggaggagggccaagaaggcacggctgctgggccccactgtgatgcttggtggatgcgagttcagccgccagagactgcaggcctttggcctcaaccccaaacggctgcacttccgccagctgggccggcagcggaggaaacaacaggggcccaagaacagctcctgagcaccagggagcaggcaggggcctcaggctcctctcctcaaatcaagccctggacaggtctcgcacccacaagtactatctgctgcagagatcctctcatctgtggccaggcacgcctgtaatcccagcactttgggaggccgaggtgaaaggatcacttgagcccaggaattggagaccagcgtgggcaacttagcgagactccatctctacaaaatgtggtgacacatgcctgtagtcccagctactcaggaggctggggaaggaagatcacttaaggccatgagtttgaggctacagagagctatgattgcaccactgcactccagcctgggcaacaaagcaagaccctgtctcttgaaaaaaaaaaaaaaaaaattaaaaaacacgtgtagctgtgggtaaggaagtcgtcccattttatggatgtggaaactgaggctgacttaaacttcccgtgacttggagctctcacctcgagacacctcccagaccccacatcccctcagaacgctgcgcccagccacacccacgatcaagttacacagctttattggcccccagcagccacagttcccccaagggggctttgggacagggagggcccgggcgtccagtgcaaactacagtacgtgagtcaggccctgaggggggtgcccggggtcctccttccctaccctgccaggagggccccgctggtgggagacaggtgtatgggctctgtgggctctgtccctggctgaatggccccagactggttgcagctgggcttgaggggctgacaacaggaagtaccatcatcactgccagagctcaagatcccacacccgacatgacataaataaaaaaataaatagtgttgta

SEQ ID NO: 381254 - DNA, 3083 bp, Homo sapiens
gcaatgggccacagaaccgccatgccggaaccgcgcgggtcgtcgcagctgcgggtgaacgcggcgtttgccgcgcggtacaaccgctaccgggagcgcgaggaactgcagcggctgaaggatcgctacggggaccgagacagcagcagcgactccagttccgagtcggactcaagcgacgagcgcgtggaatttgatccccagcaggagcgggacttttacaaaacgctctccttgttgaagaagaaggacccccgcatttatcagaaagatgccaccttctataacagaacagcatcgtcatcagacagtgaggaggacccagaagccttggagaagcagaagaaagtgcggcccatgtacctgaaggactacgagaggaaggttatcttggagaaggcaggcaaatatgttgatgaggagaactcagacagggagacttccaatcacagactccaggagacatcgtcgcaaagttatgtggaggaacagaaacagctcaaggaaagcttccgggcatttgtggaggacagtgaggacgaggacggcgctggggagggcggctccagtttgctgcagaaacgtgccaaaaccaggcaggagaaggggtactggggcctgactggactgctgggggacagggtggcgggtggctgggcatctgcggatgctcagtgctagctttcccccaggcccaggaggaggccgactacatcgagtggctgaagggacagaaagagattcggaacccagattccctgaaggaactgacgcatctcaaggaatactggaacgaccctgagttggatgaaggggagcggttcctgcgggattacatcctcaacaaacgctatgaggaggaggaagaggaggaggaagatgaagaggaaatggaggaagagaagggggtccacggtcccccagtccagctggctgtggacgactcctcagacgaaggggagctgtttctgaagaaacaggaggactttgaacagaagtacaatttccgtttcgaggagccggactcagcatcggtcaagacctacccacgcagcatcgcgtcctccgtgcgccgtaaggatgagcgcagaaaggagaagagggaagagactcgggagcgaaagaagagggagaaagcaaagaagcaggaagagctcaagcagctgaagaacctgaagaggaaggagattctggccaagctggagaagctgcggaaagtaacaggcaacgagatgctgggcctcgaggagggggaccttgaagacgacttcgaccctgcccagcacgaccagctcatgcagaagtgctttggggacgagtactacggggccgtggaggaggagaagccacaatttgaggaagaagaagggcttgaagacgactggaactgggacacgtgggacgggcctgagcaggagggagactggagccagcaggagctgcactgtgaggaccccaacttcaacatggacgccgactacgaccccagccagccgaggaagaaaaagcgcgaggcccccttgacgggcaagaagaagcgcaagtcgcccttcgccgcggccgtggggcaggagaagcccgtgttcgaacccggggacaagacgttcgaggagtacctggatgagtattaccggctggactacgaggacatcatcgacgacctgccctgtcgcttcaagtaccgcacagtggtgccctgtgactttggcctcagcactgaggagatcctcgctgctgacgataaggagctgaaccggtggtgctccctaaagaagacctgcatgtacaggtcagagcaggaggagctgcgggacaagcgggcgtacagccagaaggcccagaactcatggaaaaagcggcaggtcttcaagtcactctgccgagaagaggcagagacacctgcggaagccacagggaagccacagagagatgaagccggcccacagaggcagctgccagcccttgatggcagcttgatggggccggagagtcccccagcacaggaagaggaagcccctgtatcaccccacaagaagccagccccccagaagcggaggagggccaagaaggcacggctgctgggccccactgtgatgcttggtggatgcgagttcagccgccagagactgcaggcctttggcctcaaccccaaacggctgcacttccgccagctgggccggcagcggaggaaacaacaggggcccaagaacagctcctgagcaccagggagcaggcaggggcctcaggctcctctcctcaaatcaagccctggacaggtctcgcacccacaagtactatctgctgcagagatcctctcatctgtggccaggcacgcctgtaatcccagcactttgggaggccgaggtgaaaggatcacttgagcccaggaattggagaccagcgtgggcaacttagcgagactccatctctacaaaatgtggtgacacatgcctgtagtcccagctactcaggaggctggggaaggaagatcacttaaggccatgagtttgaggctacagagagctatgattgcaccactgcactccagcctgggcaacaaagcaagaccctgtctcttgaaaaaaaaaaaaaaaaaattaaaaaacacgtgtagctgtgggtaaggaagtcgtcccattttatggatgtggaaactgaggctgacttaaacttcccgtgacttggagctctcacctcgagacacctcccagaccccacatcccctcagaacgctgcgcccagccacacccacgatcaagttacacagctttattggcccccagcagccacagttcccccaagggggctttgggacagggagggcccgggcgtccagtgcaaactacagtacgtgagtcaggccctgaggggggtgcccggggtcctccttccctaccctgccaggagggccccgctggtgggagacaggtgtatgggctctgtgggctctgtccctggctgaatggccccagactggttgcagctgggcttgaggggctgacaacaggaagtaccatcatcactgccagagctcaagatcccacacccgacatgacataaataaaaaaataaatagtgttgta

SEQ ID NO: 381255 - DNA, 2648 bp, Homo sapiens
gcaatgggccacagaaccgccatgccggaaccgcgcgggtcgtcgcagctgcgggtgaacgcggcgtttgccgcgcggtacaaccgctaccgggagcgcgaggaactgcagcggctgaaggatcgctacggggaccgagacagcagcagcgactccagttccgagtcggactcaagcgacgagcgcgtggaatttgatccccagcaggagcgggacttttacaaaacgctctccttgttgaagaagaaggacccccgcatttatcagaaagatgccaccttctataacagaacagcatcgtcatcagacagtgaggaggacccagaagccttggagaagcagaagaaagtgcggcccatgtacctgaaggactacgagaggaaggttatcttggagaaggcaggcaaatatgttgatgaggagaactcagacagggagacttccaatcacagactccaggagacatcgtcgcaaagttatgtggaggaacagaaacagctcaaggaaagcttccgggcatttgtggaggacagtgaggacgaggacggcgctggggagggcggctccagtttgctgcagaaacgtgccaaaaccaggcaggagaaggcccaggaggaggccgactacatcgagtggctgaagggacagaaagagattcggaacccagattccctgaaggaactgacgcatctcaaggaatactggaacgaccctgagttggatgaaggggagcggttcctgcgggattacatcctcaacaaacgctatgaggaggaggaagaggaggaggaagatgaagaggaaatggaggaagagaagggggtccacggtcccccagtccagctggctgtggacgactcctcagacgaaggggagctgtttctgaagaaacaggaggactttgaacagaagtacaatttccgtttcgaggagccggactcagcatcggtcaagacctacccacgcagcatcgcgtcctccgtgcgccgtaaggatgagcgcagaaaggagaagagggaagagactcgggagcgaaagaagagggagaaagcaaagaagcaggaagagctcaagcagctgaagaacctgaagaggaaggagattctggccaagctggagaagctgcggaaagtaacaggcaacgagatgctgggcctcgaggagggggaccttgaagacgacttcgaccctgcccagcacgaccagctcatgcagaagtgctttggggacgagtactacggggccgtggaggaggagaagccacaatttgaggaagaagaagggcttgaagacgactggaactgggacacgtgggacgggcctgagcaggagggagactggagccagcaggagctgcactgtgaggaccccaacttcaacatggacgccgactacgaccccagccagccgaggaagaaaaagcgcgaggcccccttgacgggcaagaagaagcgcaagtcgcccttcgccgcggccgtggggcaggagaagcccgtgttcgaacccggggacaagacgttcgaggagtacctggatgagtattaccggctggactacgaggacatcatcgacgacctgccctgtcgcttcaagtaccgcacagtggtgccctgtgactttggcctcagcactgaggagatcctcgctgctgacgataaggagctgaaccggtggtgctccctaaagaagacctgcatgtacaggtcagagcaggaggagctgcgggacaagcgggcgtacagccagaaggcccagaactcatggaaaaagcggcaggtcttcaagtcactctgccgagaagaggcagagacacctgcggaagccacagggaagccacagagagatgaagccggcccacagaggcagctgccagcccttgatggcagcttgatggggccggagagtcccccagcactttgggaggccgaggtgaaaggatcacttgagcccaggaattggagaccagcgtgggcaacttagcgagactccatctctacaaaatgtggtgacacatgcctgtagtcccagctactcaggaggctggggaaggaagatcacttaaggccatgagtttgaggctacagagagctatgattgcaccactgcactccagcctgggcaacaaagcaagaccctgtctcttgaaaaaaaaaaaaaaaaaattaaaaaacacgtgtagctgtgggtaaggaagtcgtcccattttatggatgtggaaactgaggctgacttaaacttcccgtgacttggagctctcacctcgagacacctcccagaccccacatcccctcagaacgctgcgcccagccacacccacgatcaagttacacagctttattggcccccagcagccacagttcccccaagggggctttgggacagggagggcccgggcgtccagtgcaaactacagtacgtgagtcaggccctgaggggggtgcccggggtcctccttccctaccctgccaggagggccccgctggtgggagacaggtgtatgggctctgtgggctctgtccctggctgaatggccccagactggttgcagctgggcttgaggggctgacaacaggaagtaccatcatcactgccagagctcaagatcccacacccgacatgacataaataaaaaaataaatagtgttgta

SEQ ID NO: 381256 - DNA, 2213 bp, Homo sapiens
  misc_feature (13)..(13): n is a, c, g, or t
  misc_feature (25)..(26): n is a, c, g, or t
attaggctaggtngaggctgggtgnnaatcggccgagggtccacggtcccccagtccagctggctgtggacgactcctcagacgaaggggagctgtttctgaagaaacaggaggactttgaacagaagtacaatttccgtttcgaggagccggactcagcatcggtcaagacctacccacgcagcatcgcgtcctccgtgcgccgtaaggatgagcgcagaaaggagaagagggaagagactcgggagcgaaagaagagggagaaagcaaagaagcaggaagagctcaagcagctgaagaacctgaagaggaaggagattctggccaagctggagaagctgcggaaagtaacaggcaacgagatgctgggcctcgaggagggggaccttgaagacgacttcgaccctgcccagcacgaccagctcatgcagaagtgctttggggacgagtactacggggccgtggaggaggagaagccacaatttgaggaagaagaagggcttgaagacgactggaactgggacacgtgggacgggcctgagcaggagggagactggagccagcaggagctgcactgtgaggaccccaacttcaacatggacgccgactacgaccccagccagccgaggaagaaaaagcgcgaggcccccttgacgggcaagaagaagcgcaagtcgcccttcgccgcggccgtggggcaggagaagcccgtgttcgaacccggggacaagacgttcgaggagtacctggatgagtattaccggctggactacgaggacatcatcgacgacctgccctgtcgcttcaagtaccgcacagtggtgccctgtgactttggcctcagcactgaggagatcctcgctgctgacgataaggagctgaaccggtggtgctccctaaagaagacctgcatgtacaggtcagagcaggaggagctgcgggacaagcgggcgtacagccagaaggcccagaactcatggaaaaagcggcaggtcttcaagtcactctgccgagaagaggcagagacacctgcggaagccacagggaagccacagagagatgaagccggcccacagaggcagctgccagcccttgatggcagcttgatggggccggagagtcccccagcacaggaagaggaagcccctgtatcaccccacaagaagccagccccccagaagcggaggagggccaagaaggcacggctgctgggccccactgtgatgcttggtggatgcgagttcagccgccagagactgcaggcctttggcctcaaccccaaacggctgcacttccgccagctgggccggcagcggaggaaacaacaggggcccaagaacagctcctgagcaccagggagcaggcaggggcctcaggctcctctcctcaaatcaagccctggacaggtctcgcacccacaagtactatctgctgcagagatcctctcatctgtggccaggcacgcctgtaatcccagcactttgggaggccgaggtgaaaggatcacttgagcccaggaattggagaccagcgtgggcaacttagcgagactccatctctacaaaatgtggtgacacatgcctgtagtcccagctactcaggaggctggggaaggaagatcacttaaggccatgagtttgaggctacagagagctatgattgcaccactgcactccagcctgggcaacaaagcaagaccctgtctcttgaaaaaaaaaaaaaaaaaattaaaaaacacgtgtagctgtgggtaaggaagtcgtcccattttatggatgtggaaactgaggctgacttaaacttcccgtgacttggagctctcacctcgagacacctcccagaccccacatcccctcagaacgctgcgcccagccacacccacgatcaagttacacagctttattggcccccagcagccacagttcccccaagggggctttgggacagggagggcccgggcgtccagtgcaaactacagtacgtgagtcaggccctgaggggggtgcccggggtcctccttccctaccctgccaggagggccccgctggtgggagacaggtgtatgggctctgtgggctctgtccctggctgaatggccccagactggttgcagctgggcttgaggggctgacaacaggaagtaccatcatcactgccagagctcaagatcccacacccgacatgacataaataaaaaaataaatagtgttgta

SEQ ID NO: 381257 - DNA, 2346 bp, Homo sapiens
tccagactgccttcagactccaggagacatcgtcgcaaagttatgtggaggaacagaaacagctcaaggaaagcttccgggcatttgtggaggacagtgaggacgaggacggcgctggggagggcggctccagtttgctgcagaaacgtgccaaaaccaggcaggagaagggtccacggtcccccagtccagctggctgtggacgactcctcagacgaaggggagctgtttctgaagaaacaggaggactttgaacagaagtacaatttccgtttcgaggagccggactcagcatcggtcaagacctacccacgcagcatcgcgtcctccgtgcgccgtaaggatgagcgcagaaaggagaagagggaagagactcgggagcgaaagaagagggagaaagcaaagaagcaggaagagctcaagcagctgaagaacctgaagaggaaggagattctggccaagctggagaagctgcggaaagtaacaggcaacgagatgctgggcctcgaggagggggaccttgaagacgacttcgaccctgcccagcacgaccagctcatgcagaagtgctttggggacgagtactacggggccgtggaggaggagaagccacaatttgaggaagaagaagggcttgaagacgactggaactgggacacgtgggacgggcctgagcaggagggagactggagccagcaggagctgcactgtgaggaccccaacttcaacatggacgccgactacgaccccagccagccgaggaagaaaaagcgcgaggcccccttgacgggcaagaagaagcgcaagtcgcccttcgccgcggccgtggggcaggagaagcccgtgttcgaacccggggacaagacgttcgaggagtacctggatgagtattaccggctggactacgaggacatcatcgacgacctgccctgtcgcttcaagtaccgcacagtggtgccctgtgactttggcctcagcactgaggagatcctcgctgctgacgataaggagctgaaccggtggtgctccctaaagaagacctgcatgtacaggtcagagcaggaggagctgcgggacaagcgggcgtacagccagaaggcccagaactcatggaaaaagcggcaggtcttcaagtcactctgccgagaagaggcagagacacctgcggaagccacagggaagccacagagagatgaagccggcccacagaggcagctgccagcccttgatggcagcttgatggggccggagagtcccccagcacaggaagaggaagcccctgtatcaccccacaagaagccagccccccagaagcggaggagggccaagaaggcacggctgctgggccccactgtgatgcttggtggatgcgagttcagccgccagagactgcaggcctttggcctcaaccccaaacggctgcacttccgccagctgggccggcagcggaggaaacaacaggggcccaagaacagctcctgagcaccagggagcaggcaggggcctcaggctcctctcctcaaatcaagccctggacaggtctcgcacccacaagtactatctgctgcagagatcctctcatctgtggccaggcacgcctgtaatcccagcactttgggaggccgaggtgaaaggatcacttgagcccaggaattggagaccagcgtgggcaacttagcgagactccatctctacaaaatgtggtgacacatgcctgtagtcccagctactcaggaggctggggaaggaagatcacttaaggccatgagtttgaggctacagagagctatgattgcaccactgcactccagcctgggcaacaaagcaagaccctgtctcttgaaaaaaaaaaaaaaaaaattaaaaaacacgtgtagctgtgggtaaggaagtcgtcccattttatggatgtggaaactgaggctgacttaaacttcccgtgacttggagctctcacctcgagacacctcccagaccccacatcccctcagaacgctgcgcccagccacacccacgatcaagttacacagctttattggcccccagcagccacagttcccccaagggggctttgggacagggagggcccgggcgtccagtgcaaactacagtacgtgagtcaggccctgaggggggtgcccggggtcctccttccctaccctgccaggagggccccgctggtgggagacaggtgtatgggctctgtgggctctgtccctggctgaatggccccagactggttgcagctgggcttgaggggctgacaacaggaagtaccatcatcactgccagagctcaagatcccacacccgacatgacataaataaaaaaataaatagtgttgta

SEQ ID NO: 381258 - DNA, 2514 bp, Homo sapiens
gcaatgggccacagaaccgccatgccggaaccgcgcgggtcgtcgcagctgcgggtgaacgcggcgtttgccgcgcggtacaaccgctaccgggagcgcgaggaactgcagcggctgaaggatcgctacggggaccgagacagcagcagcgactccagttccgagtcggactcaagcgacgagcgcgtggaatttgatccccagcaggagcgggacttttacaaaacgctctccttgttgaagaagaaggacccccgcatttatcagaaagatgccaccttctataacagaacagcatcgtcatcagacagtgaggaggacccagaagccttggagaagcagaagaaagtgcggcccatgtacctgaaggactacgagaggaaggttatcttggagaaggcaggcaaatatgttgatgaggagaactcagacagggagacttccaatcacagactccaggagacatcgtcgcaaagttatgtggaggaacagaaacagctcaaggaaagggtccacggtcccccagtccagctggctgtggacgactcctcagacgaaggggagctgtttctgaagaaacaggaggactttgaacagaagtacaatttccgtttcgaggagccggactcagcatcggtcaagacctacccacgcagcatcgcgtcctccgtgcgccgtaaggatgagcgcagaaaggagaagagggaagagactcgggagcgaaagaagaggaagtgctttggggacgagtactacggggccgtggaggaggagaagccacaatttgaggaagaagaagggcttgaagacgactggaactgggacacgtgggacgggcctgagcaggagggagactggagccagcaggagctgcactgtgaggaccccaacttcaacatggacgccgactacgaccccagccagccgaggaagaaaaagcgcgaggcccccttgacgggcaagaagaagcgcaagtcgcccttcgccgcggccgtggggcaggagaagcccgtgttcgaacccggggacaagacgttcgaggagtacctggatgagtattaccggctggactacgaggacatcatcgacgacctgccctgtcgcttcaagtaccgcacagtggtgccctgtgactttggcctcagcactgaggagatcctcgctgctgacgataaggagctgaaccggtggtgctccctaaagaagacctgcatgtacaggtcagagcaggaggagctgcgggacaagcgggcgtacagccagaaggcccagaactcatggaaaaagcggcaggtcttcaagtcactctgccgagaagaggcagagacacctgcggaagccacagggaagccacagagagatgaagccggcccacagaggcagctgccagcccttgatggcagcttgatggggccggagagtcccccagcacaggaagaggaagcccctgtatcaccccacaagaagccagccccccagaagcggaggagggccaagaaggcacggctgctgggccccactgtgatgcttggtggatgcgagttcagccgccagagactgcaggcctttggcctcaaccccaaacggctgcacttccgccagctgggccggcagcggaggaaacaacaggggcccaagaacagctcctgagcaccagggagcaggcaggggcctcaggctcctctcctcaaatcaagccctggacaggtctcgcacccacaagtactatctgctgcagagatcctctcatctgtggccaggcacgcctgtaatcccagcactttgggaggccgaggtgaaaggatcacttgagcccaggaattggagaccagcgtgggcaacttagcgagactccatctctacaaaatgtggtgacacatgcctgtagtcccagctactcaggaggctggggaaggaagatcacttaaggccatgagtttgaggctacagagagctatgattgcaccactgcactccagcctgggcaacaaagcaagaccctgtctcttgaaaaaaaaaaaaaaaaaattaaaaaacacgtgtagctgtgggtaaggaagtcgtcccattttatggatgtggaaactgaggctgacttaaacttcccgtgacttggagctctcacctcgagacacctcccagaccccacatcccctcagaacgctgcgcccagccacacccacgatcaagttacacagctttattggcccccagcagccacagttcccccaagggggctttgggacagggagggcccgggcgtccagtgcaaactacagtacgtgagtcaggccctgaggggggtgcccggggtcctccttccctaccctgccaggagggccccgctggtgggagacaggtgtatgggctctgtgggctctgtccctggctgaatggccccagactggttgcagctgggcttgaggggctgacaacaggaagtaccatcatcactgccagagctcaagatcccacacccgacatgacataaataaaaaaataaatagtgttgta

SEQ ID NO: 381259 - DNA, 1404 bp, Homo sapiens
gcaatgggccacagaaccgccatgccggaaccgcgcgggtcgtcgcagctgcgggtgaacgcggcgtttgccgcgcggtacaaccgctaccgggagcgcgaggaactgcagcggctgaaggatcgctacggggaccgagacagcagcagcgactccagttccgagtcggactcaagcgacgagcgcgtggaatttgatccccagcaggagcgggacttttacaaaacgctctccttgttgaagaagaaggacccccgcatttatcagaaagatgccaccttctataacagaacagcatcgtcatcagacagtgaggaggacccagaagccttggagaagcagaagaaagtgcggcccatgtacctgaaggactacgagaggaaggttatcttggagaaggcaggcaaatatgttgatgaggagaactcagacagggagacttccaatcacagactccaggagacatcgtcgcaaagttatgtggaggaacagaaacagctcaaggaaagcttccgggcatttgtggaggacagtgaggacgaggacggcgctggggagggcggctccagtttgctgcagaaacgtgccaaaaccaggcaggagaaggggtactggggcctgactggactgctgggggacagggtggcgggtggctgggcatctgcggatgctcagtgctagctttcccccaggcccaggaggaggccgactacatcgagtggctgaagggacagaaagagattcggaacccagattccctgaaggaactgacgcatctcaaggaatactggaacgaccctgagttggatgaaggggagcggttcctgcgggattacatcctcaacaaacgctatgaggaggaggaagaggaggaggaagatgaagaggaaatggaggaagagaagggggtccacggtcccccagtccagctggctgtggacgactcctcagacgaaggggagctgtttctgaagaaacaggaggactttgaacagaagtacaatttccgtttcgaggagccggactcagcatcggtcaagacctacccacgcagcatcgcgtcctccgtgcgccgtaaggatgagcgcagaaaggagaagagggaagagactcgggagcgaaagaagaggagaaagacaaagaacgacaggaagagcataaagcagatgaagaacacgaaaaggcaaggagaatacctgaggccaaagactgagaaaaagactgacagaaaagaaaacagggcaaacggagaatgacagaaaccacggaaggaaggggagaacctatgaaagaacgaacaagggaaagacagaaacacgaagaacgaaccagctacatgacagaaggagacaaacgggaaacaaagtaactaaagggagaccgcgggagggagagaaaagacag

SEQ ID NO: 381260 - DNA, 272 bp, Homo sapiens
tggctgctgggggccaataaagctgtgcaaactacagtacgtgagtcaggccctgaggggggtgcccggggtcctccttccctaccctgccaggagggccccgctggtgggagacaggtgtatgggctctgtgggctctgtccctggctgaatggccccagactggttgcagctgggcttgaggggctgacaacaggaagtaccatcatcactgccagagctcaagatcccacacccgacatgacataaataaaaaaataaatagtgttgta

SEQ ID NO: 381261 - DNA, 843 bp, Homo sapiens
gcaatgggccacagaaccgccatgccggaaccgcgcgggtcgtcgcagctgcgggtgaacgcggcgtttgccgcgcggtacaaccgctaccgggagcgcgaggaactgcagcggctgaaggatcgctacggggaccgagacagcagcagcgactccagttccgagtcggactcaagcgacgagcgcgtggaatttgatccccagcaggagcgggacttttacaaaacgctctccttgttgaagaagaaggacccccgcatttatcagaaagatgccaccttctataacagaacagcatcgtcatcagacagtgaggaggacccagaagccttggagaagcagaagaaagtgcggcccatgtacctgaaggactacgagaggaaggttatcttggagaaggcaggcaaatatgttgatgaggagaactcagacagggagacttccaatcacagactccaggggacaagacgttcgaggagtacctggatgagtattaccggctggactacgaggacatcatcgacgacctgccctgtcgcttcaagtaccgcacagtggtgccctgtgactttggcctcagcactgaggagatcctcgctgctgacgataaggagctgaaccggtggtgctccctaaagaagacctgcatgtacaggtcagagcaggaggagctgcgggacaagcgggcgtacagccagaaggcccagaactcatggaaaaagcggcaggtcttcaagtcactctgccgagaagaggcagagacacctgcggaagccacggtcaacccacaagccacggtcaacccacaagccacggtcaacccacaagccacggtcaacccac

SEQ ID NO: 381262 - DNA, 2997 bp, Homo sapiens
gcaatgggccacagaaccgccatgccggaaccgcgcgggtcgtcgcagctgcgggtgaacgcggcgtttgccgcgcggtacaaccgctaccgggagcgcgaggaactgcagcggctgaaggatcgctacggggaccgagacagcagcagcgactccagttccgagtcggactcaagcgacgagcgcgtggaatttgatccccagcaggagcgggacttttacaaaacgctctccttgttgaagaagaaggacccccgcatttatcagaaagatgccaccttctataacagaacagcatcgtcatcagacagtgaggaggacccagaagccttggagaagcagaagaaagtgcggcccatgtacctgaaggactacgagaggaaggttatcttggagaaggcaggcaaatatgttgatgaggagaactcagacagggagacttccaatcacagactccaggagacatcgtcgcaaagttatgtggaggaacagaaacagctcaaggaaagcttccgggcatttgtggaggacagtgaggacgaggacggcgctggggagggcggctccagtttgctgcagaaacgtgccaaaaccaggcaggagaaggcccaggaggaggccgactacatcgagtggctgaagggacagaaagagattcggaacccagattccctgaaggaactgacgcatctcaaggaatactggaacgaccctgagttggatgaaggggagcggttcctgcgggattacatcctcaacaaacgctatgaggaggaggaagaggaggaggaagatgaagaggaaatggaggaagagaagggggtccacggtcccccagtccagctggctgtggacgactcctcagacgaaggggagctgtttctgaagaaacaggaggactttgaacagaagtacaatttccgtttcgaggagccggactcagcatcggtcaagacctacccacgcagcatcgcgtcctccgtgcgccgtaaggatgagcgcagaaaggagaagagggaagagactcgggagcgaaagaagagggagaaagcaaagaagcaggaagagctcaagcagctgaagaacctgaagaggaaggagattctggccaagctggagaagctgcggaaagtaacaggcaacgagatgctgggcctcgaggagggggaccttgaagacgacttcgaccctgcccagcacgaccagctcatgcagaagtgctttggggacgagtactacggggccgtggaggaggagaagccacaatttgaggaagaagaagggcttgaagacgactggaactgggacacgtgggacgggcctgagcaggagggagactggagccagcaggagctgcactgtgaggaccccaacttcaacatggacgccgactacgaccccagccagccgaggaagaaaaagcgcgaggcccccttgacgggcaagaagaagcgcaagtcgcccttcgccgcggccgtggggcaggagaagcccgtgttcgaacccggggacaagacgttcgaggagtacctggatgagtattaccggctggactacgaggacatcatcgacgacctgccctgtcgcttcaagtaccgcacagtggtgccctgtgactttggcctcagcactgaggagatcctcgctgctgacgataaggagctgaaccggtggtgctccctaaagaagacctgcatgtacaggtcagagcaggaggagctgcgggacaagcgggcgtacagccagaaggcccagaactcatggaaaaagcggcaggtcttcaagtcactctgccgagaagaggcagagacacctgcggaagccacagggaagccacagagagatgaagccggcccacagaggcagctgccagcccttgatggcagcttgatggggccggagagtcccccagcacaggaagaggaagcccctgtatcaccccacaagaagccagccccccagaagcggaggagggccaagaaggcacggctgctgggccccactgtgatgcttggtggatgcgagttcagccgccagagactgcaggcctttggcctcaaccccaaacggctgcacttccgccagctgggccggcagcggaggaaacaacaggggcccaagaacagctcctgagcaccagggagcaggcaggggcctcaggctcctctcctcaaatcaagccctggacaggtctcgcacccacaagtactatctgctgcagagatcctctcatctgtggccaggcacgcctgtaatcccagcactttgggaggccgaggtgaaaggatcacttgagcccaggaattggagaccagcgtgggcaacttagcgagactccatctctacaaaatgtggtgacacatgcctgtagtcccagctactcaggaggctggggaaggaagatcacttaaggccatgagtttgaggctacagagagctatgattgcaccactgcactccagcctgggcaacaaagcaagaccctgtctcttgaaaaaaaaaaaaaaaaaattaaaaaacacgtgtagctgtgggtaaggaagtcgtcccattttatggatgtggaaactgaggctgacttaaacttcccgtgacttggagctctcacctcgagacacctcccagaccccacatcccctcagaacgctgcgcccagccacacccacgatcaagttacacagctttattggcccccagcagccacagttcccccaagggggctttgggacagggagggcccgggcgtccagtgcaaactacagtacgtgagtcaggccctgaggggggtgcccggggtcctccttccctaccctgccaggagggccccgctggtgggagacaggtgtatgggctctgtgggctctgtccctggctgaatggccccagactggttgcagctgggcttgaggggctgacaacaggaagtaccatcatcactgccagagctcaagatcccacacccgacatgacataaataaaaaaataaatagtgttgta

SEQ ID NO: 381263 - DNA, 2706 bp, Homo sapiens
  misc_feature (13)..(13): n is a, c, g, or t
  misc_feature (25)..(26): n is a, c, g, or t
attaggctaggtngaggctgggtgnnaatcggccgagccttggagaagcagaagaaagtgcggcccatgtacctgaaggactacgagaggaaggttatcttggagaaggcaggcaaatatgttgatgaggagaactcagacagggagacttccaatcacagactccaggagacatcgtcgcaaagttatgtggaggaacagaaacagctcaaggaaagcttccgggcatttgtggaggacagtgaggacgaggacggcgctggggagggcggctccagtttgctgcagaaacgtgccaaaaccaggcaggagaaggcccaggaggaggccgactacatcgagtggctgaagggacagaaagagattcggaacccagattccctgaaggaactgacgcatctcaaggaatactggaacgaccctgagttggatgaaggggagcggttcctgcgggattacatcctcaacaaacgctatgaggaggaggaagaggaggaggaagatgaagaggaaatggaggaagagaagggggtccacggtcccccagtccagctggctgtggacgactcctcagacgaaggggagctgtttctgaagaaacaggaggactttgaacagaagtacaatttccgtttcgaggagccggactcagcatcggtcaagacctacccacgcagcatcgcgtcctccgtgcgccgtaaggatgagcgcagaaaggagaagagggaagagactcgggagcgaaagaagagggagaaagcaaagaagcaggaagagctcaagcagctgaagaacctgaagaggaaggagattctggccaagctggagaagctgcggaaagtaacaggcaacgagatgctgggcctcgaggagggggaccttgaagacgacttcgaccctgcccagcacgaccagctcatgcagaagtgctttggggacgagtactacggggccgtggaggaggagaagccacaatttgaggaagaagaagggcttgaagacgactggaactgggacacgtgggacgggcctgagcaggagggagactggagccagcaggagctgcactgtgaggaccccaacttcaacatggacgccgactacgaccccagccagccgaggaagaaaaagcgcgaggcccccttgacgggcaagaagaagcgcaagtcgcccttcgccgcggccgtggggcaggagaagcccgtgttcgaacccggggacaagacgttcgaggagtacctggatgagtattaccggctggactacgaggacatcatcgacgacctgccctgtcgcttcaagtaccgcacagtggtgccctgtgactttggcctcagcactgaggagatcctcgctgctgacgataaggagctgaaccggtggtgctccctaaagaagacctgcatgtacaggtcagagcaggaggagctgcgggacaagcgggcgtacagccagaaggcccagaactcatggaaaaagcggcaggtcttcaagtcactctgccgagaagaggcagagacacctgcggaagccacagggaagccacagagagatgaagccggcccacagaggcagctgccagcccttgatggcagcttgatggggccggagagtcccccagcacaggaagaggaagcccctgtatcaccccacaagaagccagccccccagaagcggaggagggccaagaaggcacggctgctgggccccactgtgatgcttggtggatgcgagttcagccgccagagactgcaggcctttggcctcaaccccaaacggctgcacttccgccagctgggccggcagcggaggaaacaacaggggcccaagaacagctcctgagcaccagggagcaggcaggggcctcaggctcctctcctcaaatcaagccctggacaggtctcgcacccacaagtactatctgctgcagagatcctctcatctgtggccaggcacgcctgtaatcccagcactttgggaggccgaggtgaaaggatcacttgagcccaggaattggagaccagcgtgggcaacttagcgagactccatctctacaaaatgtggtgacacatgcctgtagtcccagctactcaggaggctggggaaggaagatcacttaaggccatgagtttgaggctacagagagctatgattgcaccactgcactccagcctgggcaacaaagcaagaccctgtctcttgaaaaaaaaaaaaaaaaaattaaaaaacacgtgtagctgtgggtaaggaagtcgtcccattttatggatgtggaaactgaggctgacttaaacttcccgtgacttggagctctcacctcgagacacctcccagaccccacatcccctcagaacgctgcgcccagccacacccacgatcaagttacacagctttattggcccccagcagccacagttcccccaagggggctttgggacagggagggcccgggcgtccagtgcaaactacagtacgtgagtcaggccctgaggggggtgcccggggtcctccttccctaccctgccaggagggccccgctggtgggagacaggtgtatgggctctgtgggctctgtccctggctgaatggccccagactggttgcagctgggcttgaggggctgacaacaggaagtaccatcatcactgccagagctcaagatcccacacccgacatgacataaataaaaaaataaatagtgttgta

SEQ ID NO: 381264 - DNA, 2354 bp, Homo sapiens
  misc_feature (2285)..(2285): n is a, c, g, or t
gcaatgggccacagaaccgccatgccggaaccgcgcgggtcgtcgcagctgcgggtgaacgcggcgtttgccgcgcggtacaaccgctaccgggagcgcgaggaactgcagcggctgaaggatcgctacggggaccgagacagcagcagcgactccagttccgagtcggactcaagcgacgagcgcgtggaatttgatccccagcaggagcgggacttttacaaaacgctctccttgttgaagaagaaggacccccgcatttatcagaaagatgccaccttctataacagaacagcatcgtcatcagacagtgaggaggacccagaagccttggagaagcagaagaaagtgcggcccatgtacctgaaggactacgagaggaaggttatcttggagaaggcaggcaaatatgttgatgaggagaactcagacagggagacttccaatcacagactccaggagacatcgtcgcaaagttatgtggaggaacagaaacagctcaaggaaagcttccgggcatttgtggaggacagtgaggacgaggacggcgctggggagggcggctccagtttgctgcagaaacgtgccaaaaccaggcaggagaaggcccaggaggaggccgactacatcgagtggctgaagggacagaaagagattcggaacccagattccctgaaggaactgacgcatctcaaggaatactggaacgaccctgagttggatgaaggggagcggttcctgcgggattacatcctcaacaaacgctatgaggaggaggaagaggaggaggaagatgaagaggaaatggaggaagagaagggggtccacggtcccccagtccagctggctgtggacgactcctcagacgaaggggagctgtttctgaagaaacaggaggactttgaacagaagtacaatttccgtttcgaggagccggactcagcatcggtcaagacctacccacgcagcatcgcgtcctccgtgcgccgtaaggatgagcgcagaaaggagaagagggaagagactcgggagcgaaagaagagggagaaagcaaagaagcaggaagagctcaagcagctgaagaacctgaagaggaaggagattctggccaagctggagaagctgcggaaagtaacaggcaacgagatgctgggcctcgaggagggggaccttgaagacgacttcgaccctgcccagcacgaccagctcatgcagaagtgctttggggacgagtactacggggccgtggaggaggagaagccacaatttgaggaagaagaagggcttgaagacgactggaactgggacacgtgggacgggcctgagcaggagggagactggagccagcaggagctgcactgtgaggaccccaacttcaacatggacgccgactacgaccccagccagccgaggaagaaaaagcgcgaggcccccttgacgggcaagaagaagcgcaagtcgcccttcgccgcggccgtggggcaggagaagcccgtgttcgaacccggggacaagacgttcgaggagtacctggatgagtattaccggctggactacgaggacatcatcgacgacctgccctgtcgcttcaagtaccgcacagtggtgccctgtgactttggcctcagcactgaggagatcctcgctgctgacgataaggagctgaaccggtggtgctccctaaagaagacctgcatgtacaggtcagagcaggaggagctgcgggacaagcgggcgtacagccagaaggcccagaactcatggaaaaagcggcaggtcttcaagtcactctgccgagaagaggcagagacacctgcggaagccacagggaagccacagagagatgaagccggcccacagaggcagctgccagcccttgatggcagcttgatggggccggagagtcccccagcacaggaagaggaagcccctgtatcaccccacaagaagccagccccccagaagcggaggagggccaagaaggcacggctgctgggccccactgtgatgcttggtggatgcgagttcagccgccagagactgcaggcctttggcctcaaccccaaacggctgcacttccgccagctgggccggcagcggaggaaacaacaggggcccaagaacagctcctgagcaccagggagcaggcaggggcctcaggctcctctcctcaaatcaagccctggacaggtctcgcacccacaagtactatctgctgcagagatcctctcatctgtggccaggcacgcctgtaatcccagcacttggagccagtgaagatcctnacccgaatgtgaccctggcacttagagactcctctcaaagtgtgcacatccttgtccacttcgagggag

SEQ ID NO: 381265 - DNA, 1891 bp, Homo sapiens
gcaatgggccacagaaccgccatgccggaaccgcgcgggtcgtcgcagctgcgggtgaacgcggcgtttgccgcgcggtacaaccgctaccgggagcgcgaggaactgcagcggctgaaggatcgctacggggaccgagacagcagcagcgactccagttccgagtcggactcaagcgacgagcgcgtggaatttgatccccagcaggagcgggacttttacaaaacgctctccttgttgaagaagaaggacccccgcatttatcagaaagatgccaccttctataacagaacagcatcgtcatcagacagtgaggaggacccagaagccttggagaagcagaagaaagtgcggcccatgtacctgaaggactacgagaggaaggttatcttggagaaggcaggcaaatatgttgatgaggagaactcagacagggagacttccaatcacagactccaggagacatcgtcgcaaagttatgtggaggaacagaaacagctcaaggaaagcttccgggcatttgtggaggacagtgaggacgaggacggcgctggggagggcggctccagtttgctgcagaaacgtgccaaaaccaggcaggagaaggcccaggaggaggccgactacatcgagtggctgaagggacagaaagagattcggaacccagattccctgaaggaactgacgcatctcaaggaatactggaacgaccctgagttggatgaaggggagcggttcctgcgggattacatcctcaacaaacgctatgaggaggaggaagaggaggaggaagatgaagaggaaatggaggaagagaagggggtccacggtcccccagtccagctggctgtggacgactcctcagacgaaggggagctgtttctgaagaaacaggaggactttgaacagaagtacaatttccgtttcgaggagccggactcagcatcggtcaagacctacccacgcagcatcgcgtcctccgtgcgccgtaaggatgagcgcagaaaggagaagagggaagagactcgggagcgaaagaagagggagaaagcaaagaagcaggaagagctcaagcagctgaagaacctgaagaggaaggagattctggccaagctggagaagctgcggaaagtaacaggcaacgagatgctgggcctcgaggagggggaccttgaagacgacttcgaccctgcccagcacgaccagctcatgcagaagtgctttggggacgagtactacggggccgtggaggaggagaagccacaatttgaggaagaagaagggcttgaagacgactggaactgggacacgtgggacgggcctgagcaggagggagactggagccagcaggagctgcactgtgaggaccccaacttcaacatggacgccgactacgaccccagccagccgaggaagaaaaagcgcgaggcccccttgacgggcaagaagaagcgcaagtcgcccttcgccgcggccgtggggcaggagaagcccgtgttcgaacccggggacaagacgttcgaggagtacctggatgagtattaccggctggactacgaggacatcatcgacgacctgccctgtcgcttcaagtaccgcacagtggtgccctgtgactttggcctcagcactgaggagatcctcgctgctgacgataaggagctgaaccggtggtgctccctaaagaagacctgcatgtacaggtcagagcaggaggagctgcgggacaagcgggcgtacagccagaaggcccagaactcatggaaaaagcggcaggtcttcaagtcactctgccgagaagaggcagagacacctgcggaagccacggtcaacccacaagccacggtcaacccacaagccacggtcaacccacaagccacggtcaacccac

SEQ ID NO: 381266 - DNA, 1093 bp, Homo sapiens
  misc_feature (1061)..(1061): n is a, c, g, or t
gcaatgggccacagaaccgccatgccggaaccgcgcgggtcgtcgcagctgcgggtgaacgcggcgtttgccgcgcggtacaaccgctaccgggagcgcgaggaactgcagcggctgaaggatcgctacggggaccgagacagcagcagcgactccagttccgagtcggactcaagcgacgagcgcgtggaatttgatccccagcaggagcgggacttttacaaaacgctctccttgttgaagaagaaggacccccgcatttatcagaaagatgccaccttctataacagaacagcatcgtcatcagacagtgaggaggacccagaagccttggagaagcagaagaaagtgcggcccatgtacctgaaggactacgagaggaaggttatcttggagaaggcaggcaaatatgttgatgaggagaactcagacagggagacttccaatcacagactccaggagacatcgtcgcaaagttatgtggaggaacagaaacagctcaaggaaagcttccgggcatttgtggaggacagtgaggacgaggacggcgctggggagggcggctccagtttgctgcagaaacgtgccaaaaccaggcaggagaaggcccaggaggaggccgactacatcgagtggctgaagggacagaaagagattcggaacccagattccctgaaggaactgacgcatctcaaggaatactggaacgaccctgagttggatgaaggggagcggttcctgcgggacttttacaaaacgctctccttgttgaagaagaaggacccccgcatttatcagaaagatgccaccttctataacagaacagcatcgtcatcagacagtgaggaggacccagaagccttggagaagcagaagaaagtgcggcccatgtacctgaaggactacgagaggaaggttatcttggagaaggcaggcaaatatgttgatgaggagaactcagacggggagacttccaatcacagactccaggagacatcgtcgcaaagttatgtggaggaacctgactaggacagagaagcagtctggagagtgctgaagcngtctggaggtatcaccgttctaatcatgtcaa

SEQ ID NO: 381267 - DNA, 693 bp, Homo sapiens
cctgcgagtggctggagggtacctgggatccaggctccctcaacaccccgtgggctcccagtgctcatctgagagacggaggggcattcagacacgtggtccttcacggggctgctgggcactgggcagcagtcagcgggcacctgctgcctgaccgtctgtctgcgggccctgttccctcatctgtatatgggaattacagtagagtgtgtgtcacaggctgtagtacatagtatgtgctcaattaatgttggctcttattacttttgctatttattatttcccttctgttcctccgttctcactgttctggagagctgtcacctagacctcaaaaacacagggacctagacccttttagtccaggtgaatcaggagggctactttttaggtcaggttatgggaaagagctaggggaggccaggcacagtggctcccagcactttgggaggctaaggcaggaggatcacttgaggccgggagttaaagactagcctgggcaacatagcaagacgccatctctacaaaaaaattaaaaattagccagacgtggtggcatgccctatagttccagatacgggggaggctgaggcaggaggattacttgagccgaggagttcaaggctgcagtgagctatgatcacaccactgcactccagcctgggtgttagagtgggaccttatctctatctt

SEQ ID NO: 381268 - DNA, 555 bp, Homo sapiens
ggcaaacactctatatcaagacccccctccccgagagctggttgttaaacatttgtcagcacaccactgctgctgggagacagagagaagaaactgatacacgtgagcactgaaacatcttagttccagggaggtagcatttgtgttgtatttctcagaagcaagtgtcctagtgtaatgtgcacaagtggcatgaagtttaacacctaaaagactgcttctctgcttgttctgtctaatttctgtgatttcaacacttgagaaagatgtttactttgctactaaacttattggagtgatttgtaaagttcactgtcacctgtgggcagtagttcagctaaattccctccaggaaagtggactgtagcttttcctgcctaactggcaaaatgaaaatatgctgaaaagaatacatcttaactaggcaccagaatagctcatttccaagtggtttatacagcaataacagtgttaacttctccaacagagacgaaatcatttataaatgattgttttgctgtttttgctttttattaaaattattactatggaaca

SEQ ID NO: 381269 - DNA, 390 bp, Homo sapiens
tgatacataaagttcacatttttttttttataacttcatggtcaagagcttgggaagaaagcccaagtctcacttgaggacctgatgtaattgcttctctttgagctccgaagaaaagattgaggagctgctcttttgatttggggagtgagcaggttaagtgctcttactttactttgccaccctcgtacagacaaagtccggttacaaaggcgggtaactccaatgtgctattctttttttcttaccagctttactgggataatgcacatactgtacaattcacccacttaaagtgtacaattcagtggttttagtttattcatggagttgtgcaaccatcaccataatctatttttaggacactttcatcatctcaagaagaaacct

SEQ ID NO: 381270 - DNA, 265 bp, Homo sapiens
attctgcatcaacagtgaagagagtcctgccggaatacggaggagaagcggcacataaacctcaatgggtgactgccaccacacacagttctgtccacgcccaggtgacactggacacggacatcaggacatgaaaacgcttgctctattggaggggtgagaaatgggggaatgattttgtcttttctctggatttctctgagtgtttctgtataattattgcacgtgtggctgatggataagtaaacagacatttgcagcttgg

SEQ ID NO: 381271 - DNA, 381 bp, Homo sapiens
actctgtggctcttcacagaaaaaaaaaatgtttgccagatcctgacttaaaagattcatgacatggttttcataaagaaacctactaggggaaaaacagtgctatataagtacaaaagtgttacaactatttcatttctaaatatgttgctattatttctgagctatttgcttgtgggccttataatggtaacaggtgctaatgcgcaagaataggatggtaactcctaccataattgtccacattcatagaaaactgcaggtatagctgcagccagatgtttaaagaatggaaattgaaatgaaaatgtaaaatctttactgaaaaaagggtagaaatgacacaggaattgcaccaatgacctgttaagaagcataggc

SEQ ID NO: 381272 - DNA, 708 bp, Homo sapiens
gcagcctcaattattgcctcctcagacgaaagaatctgaccaaaggccataaggcagaagaagagactgaggcaagttttagaacaggagtggaagttcattacaaagctctagagcagaaacaaaaggaaggaaagtgcacttggaagaggccaagtgggcaactcgagaggcaagtgccccatccggcctctgatgtagggttctaggtgttggcatacttcagggcctcgcgtcccttctcccaattcctcccttggggtgggctgcctgcacacacactggcctgctagcacttgggagggagcatgcgtagtgtgtttactggagcatgcgcatgctcacctgaggcgatcttcccttcccggtgtaaagtacctggaaggtcacacaccagttaaactccaccattctgtgccttagtgcacatgcttgagcccacttgcccaattcctgagatcttatcgggaagctgctgatcaccagcttcagtttccctggtgctggctatgaccaattattattttagagaggcagtgtgacaactgcctaaccatcacctgatggtcacctgacatccctggtggatggaggaggccctcccctgccctgctcacacctgactagctacccactgtaacaaactgagaatgcgccactgcactacggcctggacggacagaaccagactttgtgctcccaccaaaa

SEQ ID NO: 381273 - DNA, 387 bp, Homo sapiens
cagatatcaaaatagctcatgaaacatgctttttggttctaacataggagaaaaatattaagagttgtgaaaagtgtgagttaagtgatctctctcattcttccagccaaaattatttttcctttgtttttttcactgagtatatgaagaactattgtgaaattctcaaactatgtttacttttctttttcttttttctttttttttttttttgagacagagtctcactctgtcgctcaggctggagtgcagtggcgcaatctcagctcattgcaacctctgcctcccggagaatggcgtcaacccgggaggcggaggttgcagtgagccaggattgtgcgactgcactccagcctgggtgacagggtgaaacgccatctcaaaaat

SEQ ID NO: 381274 - DNA, 358 bp, Homo sapiens
tagtagagacggggtttcaccatgtttgccaggctggtctcgaacccctggcctcaagtgatccacccgccgcagactcccagagtgctgggatttcaggtgtgagccactatgcccggcctaatacgtggatttttaaagcttcaggttctggttcagaagtttcctgggtctcattaaaataatgaggcactcagaattggtctaataaaaataacgaccatttctttctactccagtctctttcacaaacttcttagtgaaaatgacaagtgaggcccttcagtaggggcattttcagtggagataatagcggcagacctgagaccttgggctaggtagtttattctcatttctg

SEQ ID NO: 381275 - DNA, 1588 bp, Homo sapiens
tacttacggctaggtacgaggctgggtgttgaatccctctcttggtccagcgagcgttgccgggccagggtcaagcggagggctccgacggcgcggacggagcgaagcgccgagccatggcgcaccaaacgggcatccacgccacggaagagctgaaggaattctttgccaaggcacgggctggctctgtgcggctcatcaaggttgtgattgaggacgagcagctcgtgctgggtgcctcgcaggagccagtaggccgctgggatcaggactatgacagggccgtgctgccactgctggacgcccagcagccctgctacctgctctaccgcctcgactcacagaatgctcagggcttcgaatggctcttcctcgcctggtcgcctgataactcccccgtgcggctgaagatgctgtacgcggccacgcgggccacagtgaaaaaggagtttggaggtggccacatcaaggatgagctcttcgggactgtgaaggatgacctctcttttgctgggtaccagaaacacctgtcgtcctgtgcggcacctgccccgctgacctcggctgagagagagctccagcagatccgcattaacgaggtgaagacagagatcagtgtggaaagcaagcaccagaccctgcagggcctcgccttccccctgcagcctgaggcccagcgggcactccagcagctcaagcagaaaatggtcaactacatccagatgaagctggacctagagcgggaaaccattgagctggtgcacacagagcccacggatgtggcccagctgccctcccgggtgccccgagatgctgcccgctaccacttcttcctctacaagcacacccatgagggcgacccccttgagtctgtagtgttcatctactccatgccggggtacaagtgcagcatcaaggagcgaatgctctactccagctgcaagagccgcctcctcgactccgtggagcaggacttccatctggagatcgccaagaaaattgagattggcgatggggcagagctgacggcagagttcctctacgacgaggtgcaccccaagcaacacgccttcaagcaggccttcgccaagcccaagggcccagggggcaagcggggccataagcgcctcatccgcggcccgggtgaaaatggggatgacagctaggaggctggagcagggccggccacgtgtggactgtggggctgcccaccttccgctccctgccaccatcctccttcctgggctccaggaaagtgtttctgggaggtcaggagggctggcagctgaacgcacttgcagcgtccgagggccaccgggctggcattttgtgacccttccctgttgctgtccctgcatctcgtctgtgtgcccagggtgtccggggaccctgcctggctggcttaagggggctgggtcaggggcctggcatgaacctggcctcccggggagctgagactagggtcccagcacagcccagaaacctttggccacaagaagtggggtcagtcagggctggggcaggggtcactgcagtttgggatggttgaatgctgtattttctaaagaataaaatatttttaaatcaa

SEQ ID NO: 381276 - DNA, 1130 bp, Homo sapiens
tacttacggctaggtacgaggctgggtgttgaatccgatgacctctcttttgctgggtaccagaaacacctgtcgtcctgtgcggcacctgccccgctgacctcggctgagagagagctccagcagatccgcattaacgaggtgaagacagagatcagtgtggaaagcaagcaccagaccctgcagggcctcgccttccccctgcagcctgaggcccagcgggcactccagcagctcaagcagaaaatggtcaactacatccagatgaagctggacctagagcgggaaaccattgagctggtgcacacagagcccacggatgtggcccagctgccctcccgggtgccccgagatgctgcccgctaccacttcttcctctacaagcacacccatgagggcgacccccttgagtctgtagtgttcatctactccatgccggggtacaagtgcagcatcaaggagcgaatgctctactccagctgcaagagccgcctcctcgactccgtggagcaggacttccatctggagatcgccaagaaaattgagattggcgatggggcagagctgacggcagagttcctctacgacgaggtgcaccccaagcaacacgccttcaagcaggccttcgccaagcccaagggcccagggggcaagcggggccataagcgcctcatccgcggcccgggtgaaaatggggatgacagctaggaggctggagcagggccggccacgtgtggactgtggggctgcccaccttccgctccctgccaccatcctccttcctgggctccaggaaagtgtttctgggaggtcaggagggctggcagctgaacgcacttgcagcgtccgagggccaccgggctggcattttgtgacccttccctgttgctgtccctgcatctcgtctgtgtgcccagggtgtccggggaccctgcctggctggcttaagggggctgggtcaggggcctggcatgaacctggcctcccggggagctgagactagggtcccagcacagcccagaaacctttggccacaagaagtggggtcagtcagggctggggcaggggtcactgcagtttgggatggttgaatgctgtattttctaaagaataaaatatttttaaatcaa

SEQ ID NO: 381277 - DNA, 1034 bp, Homo sapiens
atcatccttagacccacccggaccgaggcgcaggctgcgcgcacgcgcggccccgagtccccgcctccctgccgcgcctgtcgggggcggggcgccgctgggggcgggtcctgcggcaccgcccgggaagctgcgcgagggtcgacagcctccgccacatcctccacctctcttggtccagcgagcgttgccgggccagggtcaagcggagggctccgacggcgcggacggagcgaagcgccgagccatggcgcaccaaacgggcatccacgccacggaagagctgaaggaattctttgccaaggcacgggctggctctgtgcggctcatcaaggttgtgattgaggacgagcagctcgtgctgggtgcctcgcaggagccagtaggccgctgggatcaggactatgacagggccgtgctgccactgctggacgcccagcagccctgctacctgctctaccgcctcgactcacagaatgctcagggcttcgaatggctcttcctcgcctggtcgcctgataactcccccgtgcggctgaagatgctgtacgcggccacgcgggccacagtgaaaaaggagtttggaggtggccacatcaaggatgagctcttcgggactgtgaaggatgacctctcttttgctgggtaccagaaacacctgtcgtcctgtgcggcacctgccccgctgacctcggctgagagagagctccagcagatccgcattaacgaggtgaagacagagatcagtgtggaaagcaagcaccagaccctgcagggcctcgccttccccctgcagcctgaggcccagcgggcactccagcagctcaagcagaaaatggtcaactacatccagatgaagctggacctagagcgggaaaccattgagctggtgcacacagagcccacggatgtggcccagctgccctcccgggtgccccgagatgctgccggtacaccttttcgtctaagggacccatgtgggggcccctttgtctgtgtgtgccctatccagccggggccactgcggccaacgg

SEQ ID NO: 381278 - DNA, 885 bp, Homo sapiens
ggtgccctgttgcccggcacaccggatgccgcacccggcgtcggacggagcccatgcgcggagcggaaccgcgcgtggccgaccaaacggggatccaggccacggaagagctgaaggaattctttgccaaggcacgggctggctctgtgcggctcatcaaggttgtgattgaggacgagcagctcgtgctgggtgcctcgcaggagccagtaggccgctgggatcaggactatgacagggccgtgctgccactgctggacgcccagcagccctgctacctgctctaccgcctcgactcacagaatgctcagggcttcgaatggctcttcctcgcctggtcgcctgataactcccccgtgcggctgaagatgctgtacgcggccacgcgggccacagtgaaaaaggagtttggaggtggccacatcaaggatgagctcttcgggactgtgaaggatgacctctcttttgctgggtaccagaaacacctgtcgtcctgtgcggcacctgccccgctgacctcggctgagagagagctccagcagatccgcattaacgaggtgaagacagagatcagtgtggaaagcaagcaccagaccctgcagggcctcgccttccccctgcagcctgaggcccagcgggcactccagcagctcaagcagaaaatggtcaactacatccagatgaccctgcctggctggcttaagggggctgggtcaggggcctggcatgaacctggcctcccggggagctgagactagggtcccagcacagcccagaaacctttggccacaagaagtggggtcagtcagggctggggcaggggtcactgcagtttgggatggttgaatgctgtattttctaaagaataaaatatttttaaatcaa

SEQ ID NO: 381279 - DNA, 319 bp, Homo sapiens
agcgaatgctctactccagctgcaagagccgcctcctcgactccgtggagcaggacttccatctggagatcgccaagaaagtaggcgccctccccagggcctcacctccccaggccctatcactccaatctccatgtggggcgctggggtcctgagatgacggcagagcaggaatcgttgctgtcgtgttgatcatagggcatctgaggcccaaggagcaacacgcatggcccaaggctgcccagctgatcggtggctcagaaaagtccaagtcctggctaccatgtcatgtcctttccctgggcctggagacagggag

SEQ ID NO: 381280 - DNA, 1719 bp, Homo sapiens
atcatccttagacccacccggaccgaggcgcaggctgcgcgcacgcgcggccccgagtccccgcctccctgccgcgcctgtcgggggcggggcgccgctgggggcgggtcctgcggcaccgcccgggaagctgcgcgagggtcgacagcctccgccacatcctccacctctcttggtccagcgagcgttgccgggccagggtcaagcggagggctccgacggcgcggacggagcgaagcgccgagccatggcgcaccaaacgggcatccacgccacggaagagctgaaggaattctttgccaaggcacgggctggctctgtgcggctcatcaaggttgtgattgaggacgagcagctcgtgctgggtgcctcgcaggagccagtaggccgctgggatcaggactatgacagggccgtgctgccactgctggacgcccagcagccctgctacctgctctaccgcctcgactcacagaatgctcagggcttcgaatggctcttcctcgcctggtcgcctgataactcccccgtgcggctgaagatgctgtacgcggccacgcgggccacagtgaaaaaggagtttggaggtggccacatcaaggatgagctcttcgggactgtgaaggatgacctctcttttgctgggtaccagaaacacctgtcgtcctgtgcggcacctgccccgctgacctcggctgagagagagctccagcagatccgcattaacgaggtgaagacagagatcagtgtggaaagcaagcaccagaccctgcagggcctcgccttccccctgcagcctgaggcccagcgggcactccagcagctcaagcagaaaatggtcaactacatccagatgaagctggacctagagcgggaaaccattgagctggtgcacacagagcccacggatgtggcccagctgccctcccgggtgccccgagatgctgcccgctaccacttcttcctctacaagcacacccatgagggcgacccccttgagtctgtagtgttcatctactccatgccggggtacaagtgcagcatcaaggagcgaatgctctactccagctgcaagagccgcctcctcgactccgtggagcaggacttccatctggagatcgccaagaaaattgagattggcgatggggcagagctgacggcagagttcctctacgacgaggtgcaccccaagcaacacgccttcaagcaggccttcgccaagcccaagggcccagggggcaagcggggccataagcgcctcatccgcggcccgggtgaaaatggggatgacagctaggaggctggagcagggccggccacgtgtggactgtggggctgcccaccttccgctccctgccaccatcctccttcctgggctccaggaaagtgtttctgggaggtcaggagggctggcagctgaacgcacttgcagcgtccgagggccaccgggctggcattttgtgacccttccctgttgctgtccctgcatctcgtctgtgtgcccagggtgtccggggaccctgcctggctggcttaagggggctgggtcaggggcctggcatgaacctggcctcccggggagctgagactagggtcccagcacagcccagaaacctttggccacaagaagtggggtcagtcagggctggggcaggggtcactgcagtttgggatggttgaatgctgtattttctaaagaataaaatatttttaaatcaa

SEQ ID NO: 381281 - DNA, 903 bp, Homo sapiens
tacttacggctaggtacgaggctgggtgttgaatccctctcttggtccagcgagcgttgccgggccagggtcaagcggagggctccgacggcgcggacggagcgaagcgccgagccatggcgcaccaaacgggcatccacgccacggaagagctgaaggaattctttgccaaggcacgggctggctctgtgcggctcatcaaggttgtgattgaggacgagcagctcgtgctgggtgcctcgcaggagccagtaggccgctgggatcaggactatgacagggccgtgctgccactgctggacgcccagcagccctgctacctgctctaccgcctcgactcacagaatgctcagggcttcgaatggctcttcctcgcctggtcgcctgataactcccccgtgcggctgaagatgctgtacgcggccacgcgggccacagtgaaaaaggagtttggaggtggccacatcaaggatgagctcttcgggactgtgaaggatgacctctcttttgctgggtaccagaaacacctgtcgtcctgtgcggcacctgccccgctgacctcggctgagagagagctccagcagatccgcattaacgaggtgaagacagagatcagtgtggaaagcaagcaccagaccctgcagggcctcgccttccccctgcagcctgaggcccagcgggcactccagcagctcaagcagaaaatggtcaactacatccagatgaagctggacctagagcgggaaaccattgagctggtgcacacagagcccacggatgtggcccagctgccctcccgggtgccccgagatgctgccggtacaccttttcgtctaagggacccatgtgggggcccctttgtctgtgtgtgccctatccagccggggccactgcggccaacgg

SEQ ID NO: 381282 - DNA, 2307 bp, Homo sapiens
atcatccttagacccacccggaccgaggcgcaggctgcgcgcacgcgcggccccgagtccccgcctccctgccgcgcctgtcgggggcggggcgccgctgggggcgggtcctgcggcaccgcccgggaagctgcgcgagggtcgacagcctccgccacatcctccacctctcttggtccagcgagcgttgccgggccagggtcaagcggagggctccgacggcgcggacggagcgaagcgccgagccatggcgcaccaaacgggcatccacgccacggaagagctgaaggaattctttgccaaggcacgggctggctctgtgcggctcatcaaggttgtgattgaggacgagcagctcgtgctgggtgcctcgcaggagccagtaggccgctgggatcaggactatgacagggccgtgctgccactgctggacgcccagcagccctgctacctgctctaccgcctcgactcacagaatgctcagggcttcgaatggctcttcctcgcctggtcgcctgataactcccccgtgcggctgaagatgctgtacgcggccacgcgggccacagtgaaaaaggagtttggaggtggccacatcaaggatgagctcttcgggactgtgaaggatgacctctcttttgctgggtaccagaaacacctgtcgtcctgtgcggcacctgccccgctgacctcggctgagagagagctccagcagatccgcattaacgaggtgaagacagagatcagtgtggaaagcaagcaccagaccctgcagggcctcgccttccccctgcagcctgaggcccagcgggcactccagcagctcaagcagaaaatggtcaactacatccagatgaagctggacctagagcgggaaaccattgagctggtgcacacagagcccacggatgtggcccagctgccctcccgggtgccccgagatgctgcccgctaccacttcttcctctacaagcacacccatgagggcgacccccttgagtctgtagtgttcatctactccatgccggggtacaagtgcagcatcaaggagcgaatgctctactccagctgcaagagccgcctcctcgactccgtggagcaggacttccatctggagatcgccaagaaaattgagattggcgatggggcagagctgacggcagagttcctctacgacgaggtgcaccccaagcaacacgccttcaagcaggccttcgccaagcccaagggcccagggggcaagcggggccataagcgcctcatccgcggcccgggtgaaaatggggatgacagctaggaggctggagcagggccggccacgtgtggactgtggggctgcccaccttccgctccctgccaccatcctccttcctgggctccaggaaagtgtttctgggaggtcaggagggctggcagctgaacgcacttgcagcgtccgagggccaccgggctggcattttgtgacccttccctgttgctgtccctgcatctcgtctgtgtgcccagggtgtccggggaccctgcctggctggcttaagggggctgggtcaggggcctggcatgaacctggcctcccggggagctgagactagggtcccagcacagcccagaaacctttggccacaagaagtggggtcagtcagggctggggcaggggtcactgcagtttgggatggttgaatgctgtattttctaaagaataaaatatttttaaatcaaaaaaaaaaacaaaaaaaacaaaaaaaaaaaaaaaaaaaaaaaaaaaaaaaaagaggggggggcgcgcgcgcaaaagagaagactcccccgcggggggcgcccacaatgtcgcgcgcgcgacccccgggttttctggtaaacaagaagggggccaccacataagagagaggagcgcggaatataaaaagccgaaagagagcacagcgagcgcggcgcgcggagttataacaacagacacgcgcggagcaaggggggaaaaagcgggcaaacagcggggacaaactgtgggggaagaggagaaccctcataactcgcggggggggagagagcatcaattatgtgtggggggaagaaaaaataaaacacatcataaagaagagattataatagaaggcggtcaagaggaggagggaaaaatatataaaaaatcttctgaaaaagggggttaataataggggggggttgtataaaaccacaagggctggaataattattagtgaggggggatatagtgaaaaaattgttggggcaaaaagaagagagatagtagtattttgaaagaaaaaaaattatattataaccgggggg

SEQ ID NO: 381283 - DNA, 1058 bp, Homo sapiens
atcatccttagacccacccggaccgaggcgcaggctgcgcgcacgcgcggccccgagtccccgcctccctgccgcgcctgtcgggggcggggcgccgctgggggcgggtcctgcggcaccgcccgggaagctgcgcgagggtcgacagcctccgccacatcctccacctctcttggtccagcgagcgttgccgggccagggtcaagcggagggctccgacggcgcggacggagcgaagcgccgagccatggcgcaccaaacgggcatccacgccacggaagagctgaaggaattctttgccaaggcacgggctggctctgtgcggctcatcaaggttgtgattgaggacgagcagctcgtgctgggtgcctcgcaggagccagtaggccgctgggatcaggactatgacagggccgtgctgccactgctggacgcccagcagccctgctacctgctctaccgcctcgactcacagaatgctcagggcttcgaatggctcttcctcgcctggtcgcctgataactcccccgtgcggctgaagatgctgtacgcggccacgcgggccacagtgaaaaaggagtttggaggtggccacatcaaggatgagctcttcgggactgtgaaggatgacctctcttttgctgggtaccagaaacacctgtcgtcctgtgcggcacctgccccgctgacctcggctgagagagagctccagcagatccgcattaacgaggtgaagacagagatcagtgtggaaagcaagcaccagaccctgcagggcctcgccttccccctgcagcctgaggcccagcgggcactccagcagctcaagcagaaaatggtcaactacatccagatgaccctgcctggctggcttaagggggctgggtcaggggcctggcatgaacctggcctcccggggagctgagactagggtcccagcacagcccagaaacctttggccacaagaagtggggtcagtcagggctggggcaggggtcactgcagtttgggatggttgaatgctgtattttctaaagaataaaatatttttaaatcaa

SEQ ID NO: 381284 - DNA, 655 bp, Homo sapiens
atcatccttagacccacccggaccgaggcgcaggctgcgcgcacgcgcggccccgagtccccgcctccctgccgcgcctgtcgggggcggggcgccgctgggggcgggtcctgcggcaccgcccgggaagctgcgcgagggtcgacagcctccgccacatcctccacctctcttggtccagcgagcgttgccgggccagggtcaagcggagggctccgacggcgcggacggagcgaagcgccgagccatggcgcaccaaacgggcatccacgccacggaagagctgaaggaattctttgccaaggcacgggctggctctgtgcggctcatcaaggttgtgattgaggacgagcagctcgtgctgggtgcctcgcaggagccagtaggccgctgggatcaggactatgacagggccgtgctgccactgctggacgcccagcagccctgctacctgctctaccgcctcgactcacagaatgctcagggcttcgaatggctcttcctcgcctggtcgcctgataactcccccggtgctgtgcttgtcatgagtgcctggtttctgctggctccactgctgtgtgtcacatgttggaattcaatggcagttttggatggtgggccactagttcatggattgagctcttcgggactgttc

SEQ ID NO: 381285 - DNA, 408 bp, Homo sapiens
tgttctagtaacacataataatcatgtttattcttttgcatggttactgatacgctaggattatcataagccaaaaataaaacttctgaacaaatggaaagaaaactgtcaatatccagtcccctctaaacatgaaaagatcagtttcaactggaattaagaccacatctctgaaacctttcccaagtaaatagagattgaagaagttggtgttataattgactacaccataacatttcccctttcccacaaggatcttaaatattaatgctcagttgctgaaaatctctctctcttatttctatttttgaacatcacaatctcatagactagaaacacacccagcctttgcacagcagaacatagggactggaatgccagataagaaatccagaaacttggctcctt

SEQ ID NO: 381286 - DNA, 904 bp, Homo sapiens
gacgactaactcaaaagagtgtgaactcccggctgcagacagttgtgctatcatggaaggagaagataatgaagaggaagttgtatattccaataaacagtcactactaggaaaactcaaatctttggcaaccaaggaaaaagaagaccattttgaatctgttcaactgaaaacctcaagatccccaaatatatgaagagacagtgctgtagccttgagactaatgaacaaagaaacctgctctagttttacaggaccatattttagggtctgtcctcatacctgtcacattggtgatctcacagaggagggccatgccgctgaaaagggaaggagattgaaacatttgattgccttatcacatggtcaagtaccttgccaaataaaggaaagcaaatgatttgggtctcaactgaagatgaagctcaactcaggaagagatttatctgtatatacacataactgaaaaccaagtttaagcccaccaatgcactgctgatgcatgccatataattaatgggtaacttttattctttatgatgtctacataacaagtgtgatttggaaggcacatgtgagcatatgcattatgatccaatttatgttttttctttgtttatattttggggaaaattaaaatttttttaaggtatatttttcccattatttattttcctgaccttaaaacagcttttctactaaaaaatggtgagcaatgaagacataattctcatttccataaaaaaaagaagggggggctagagatctggagggccaagttagggtccgttttgtaaggggccaagggggtttaaagaagggggggtaaagtggggaaaggggactggagacttcggggggcatggacccaataggcgaaaatggatggagatgggaaggatac

SEQ ID NO: 381287 - DNA, 746 bp, Homo sapiens
gacgactaactcaaaagagtgtgaactcccggctgcagacagttgtgctatcatggaaggagaagataatgaagaggaagttgtatattccaataaacagtcactactaggaaaactcaaatctttggcaaccaaggaaaaagaagaccattttgaatctgttcaactgaaaacctcaagatccccaaatatatgaagagacagtgctgtagccttgagactaatgaacaaagaaacctgctctagttttacaggaccatattttagggtctgtcctcatacctgtcacattggtgatctcacagaggagggccatgccgctgaaaagggaaggagattgaaacatttgattgccttatcacatggtcaagtaccttgccaaataaaggaaagcaaatgatttgggtctcaactgaagatgaagctcaactcaggaagagatttatctgtatatacacataactgaaaaccaagtttaagcccaccaatgcactgctgatgcatgccatataattaatgggtaacttttattctttatgatgtctacataacaagtgtgatttggaaggcacatgtgagcatatgcattatgatccaatttatgttttttctttgtttatattttggggaaaattaaaatttttttaaggtatatttttcccattatttattttcctgaccttaaaacagcttttctactaaaaaatggtgagcaatgaagacaataaatttttcatttttccata

SEQ ID NO: 381288 - DNA, 399 bp, Homo sapiens
cagagctcaggtgatcctctcctcagctacctgagtagctgggactacaggtgcacatggaatttcagtgttggtatatatttttctagtcagtgtatcgctgactctcccatcaacattgttggagaatgccctttaccaacgctggttattctgttgtaactgacttttatatgaagtttgagaatacagcctcttcagttgagatccatgtgtttgctgaatctcaacgtttttcccatgccagtctcctgatgttaatgctaatctaaaagatcaagtagctgaggccaggtgtggtggttcacacctgtaatctcagcactttgggaatccgaggcaggtggatcacctgaggtcaggagtttgagtccagcctggccaacatggtgaaaccca

SEQ ID NO: 381289 - DNA, 363 bp, Homo sapiens
tcttgttgaagggtttgctttattgaacggaagaaacagttctccctctcccctccacgctaggtataaccagccttccggatgtgccgcctttggtatcacccaagatctcgggatgggtacccatccctgcctccactgcctggtttgctggttaccctgctctttggttctgtttctccatgtgtgtttctgcaagctgcctcaatgtcccccttcctcggcagttgtcctactctgtgtcccttggtccccggtccgccgcggtgacacgagcccgcgccgccgctgccgctgccgccgtgccgccgcctcctcagcccccgccgccgccttccccgcaccatggagttctccgagagg

SEQ ID NO: 381290 - DNA, 495 bp, Homo sapiens
gggatggaaggggagggccaaggacgctacatggatgccgtgggacagctcggagagcaggctcagggcggattcacccaccacccccaggagggaggcctaggctggagctggagtctgtggaccctggggctgggaagggtggagtctgtagaccctggggcagcggggatccaagccccagggatggatcttgctctctcagcggggctcagtggggctgggggcagagaaaagtccccgtagcccgcacctgctccatcgactggagtggaggtgggctggggtagactgcagtcctccatcctagcctttcggtcacacccctcaggactccccagggctgaagctgggatcccggccagccaggtgacccccacgctctggatgtctctgctctgttccttccccgagcccctgccccggctccccgccaaagcacccctgcccactcgggcttcatcctgcacaataaactccggaagcaagtcagta

SEQ ID NO: 381291 - DNA, 709 bp, Homo sapiens
  misc_feature (1)..(1): n is a, c, g, or t
  misc_feature (20)..(20): n is a, c, g, or t
nggccctgcacggaatggtngatcaacctgacttccaccttcctcaggaaaaaccagtgtgagacccgaaccaaatggctactcatcacacgctgtggatgggactggccctgctgggggtgctgggcgacctgcaggcagcaccggaggcccaggtctccgtgcagcccaacttccagcaggacaagttcctggggcgctggttcagcgcgggcctcgcctccaactcgagctggctccgggagaagaaggcggcgttgtccatgtgcaagtccctcggctcctacagctaccggagtccccactggggcagcacctactccgtgtcagtggtggagaccgactacgaccagtacgcgctgctgtacagccagggcagcaagggccctggcgaggacttccgcatggccaccctctacagccgaacccagacccccagggctgagttaaaggagaaattcaccgccttctgcaaggcccagggcttcacagaggataccattgtcttcctgccccaaaccgataagtgcatgacggaacaataggactccccagggctgaagctgggatcccggccagccaggtgacccccacgctctggatgtctctgctctgttccttccccgagcccctgccccggctccccgccaaagcacccctgcccactcgggcttcatcctgcacaataaactccggaagcaagtcagta

SEQ ID NO: 381292 - DNA, 948 bp, Homo sapiens
cgacaaagaagccattctgcgtcctcttctccaagtcctagtagggtgacgtcgagaacaactccacggcgacaaggatcagtatctccctgctccaatgtggaatccagattgttgccaagatacagtcattctggctcctcctgcacacctccctcgctctcccacaccactggcaccaggccccggacacccgctctgctgcaggagaatggctactcatcacacgctgtggatgggactggccctgctgggggtgctgggcgacctgcaggcagcaccggaggcccaggtctccgtgcagcccaacttccagcaggacaagttcctggggcgctggttcagcgcgggcctcgcctccaactcgagctggctccgggagaagaaggcggcgttgtccatgtgcaagtctgtggtggcccctgccacggatggtggcctcaacctgacctccaccttcctcaggaaaaaccagtgtgagacccgaaccatgctgctgcagcccgcggggtccctcggctcctacagctaccggagtccccactggggcagcacctactccgtgtcagtggtggagaccgactacgaccagtacgcgctgctgtacagccagggcagcaagggccctggcgaggacttccgcatggccaccctctacagccgaacccagacccccagggctgagttaaaggagaaattcaccgccttctgcaaggcccagggcttcacagaggataccattgtcttcctgccccaaaccgataagtgcatgacggaacaataggactccccagggctgaagctgggatcccggccagccaggtgacccccacgctctggatgtctctgctctgttccttccccgagcccctgccccggctccccgccaaagcacccctgcccactcgggcttcatcctgcacaataaactccggaagcaagtcagta

SEQ ID NO: 381293 - DNA, 806 bp, Homo sapiens
ggctggtaccggtcggagtgtatggatccactggcaccaggccccggacacccgctctgctgcaggagaatggctactcatcacacgctgtggatgggactggccctgctgggggtgctgggcgacctgcaggcagcaccggaggcccaggtctccgtgcagcccaacttccagcaggacaagttcctggggcgctggttcagcgcgggcctcgcctccaactcgagctggctccgggagaagaaggcggcgttgtccatgtgcaagtctgtggtggcccctgccacggatggtggcctcaacctgacctccaccttcctcaggaaaaaccagtgtgagacccgaaccatgctgctgcagcccgcggggtccctcggctcctacagctaccggagtccccactggggcagcacctactccgtgtcagtggtggagaccgactacgaccagtacgcgctgctgtacagccagggcagcaagggccctggcgaggacttccgcatggccaccctctacagccgaacccagacccccagggctgagttaaaggagaaattcaccgccttctgcaaggcccagggcttcacagaggataccattgtcttcctgccccaaaccgataagtgcatgacggaacaataggactccccagggctgaagctgggatcccggccagccaggtgacccccacgctctggatgtctctgctctgttccttccccgagcccctgccccggctccccgccaaagcacccctgcccactcgggcttcatcctgcacaataaactccggaagcaagtcagta

SEQ ID NO: 381294 - DNA, 1372 bp, Homo sapiens
gcggggatgtgaggggcggggtcatctcctggggcggggatgtgaggggcgtggtcagctcctggggcggagatgtgaggggcggggtcatctcctggggcggggattgaggggcgggggtcagttcctggggcggggcgtgaggggcgtggctgctcgggggattgggcgtgggggcggggccgggttggagaccggaggagtagacggcagaggcgcccccgcaggtaggcgcaggtgggtccggagggtcctggccgacgcgggtgggggtcgctcgccgcagttcctggggcgctggttcagcgcgggcctcgcctccaactcgagctggctccgggagaagaaggcggcgttgtccatgtgcaagtctgtggtggcccctgccacggatggtggcctcaacctgacctccaccttcctcaggaaaaaccagtgtgagacccgaaccatgctgctgcagcccgcggggtccctcggctcctacagctaccggagtccccactggggcagcacctactccgtgtcagtggtggagaccgactacgaccagtacgcgctgctgtacagccagggcagcaagggccctggcgaggacttccgcatggccaccctctacagccgaacccagacccccagggctgagttaaaggagaaattcaccgccttctgcaaggcccagggcttcacagaggataccattgtcttcctgccccaaaccgataagtgcatgacggaacaataggactccccagggctgaagctgggatcccggccagccaggtgacccccacgctctggatgtctctgctctgttccttccccgagcccctgccccggctccccgccaaagcacccctgcccactcgggcttcatcctgcacaataaactccggaagcaagtcagtaaaaaaacaaaaaaaaaaaaaaaaaaaaaaaaaaaaaaaaaaaaaaaaaaaaaaaaaaaaaaaaaaaaaaaaaaaaaaaaaaaagagagaggggggcgccgcgcgccccaaccccccccgggggggcccccaactatcagcccaccccccccgcatttttttattaaaaagaaggcggcccaccactaagaggagggcgttactattattataataagcacgagaagaggcggcccgcgcttttataacacaacactgctaacagagcaggagaacaaagccggcggatcacgctgtcgagcaaaccttcttgtagatacagagcacccccactccctcattcgcgtcagggggggtggacacacatcaatgggggcgaccacccaccctcctcgacggataatataaaacgtcacctacagtggggcctaattataacacaattctcgaggtagtatagtgag

SEQ ID NO: 381295 - DNA, 332 bp, Homo sapiens
tcagctcgtactgactacatacttccgcatggcaccctctacagccgaacccagacccccagggctgagttaaaggagaaattcaccgccttctgcaaggcccagggcttcacagaggataccattgtcttcctgccccaaaccgataagtgcatgacggaacaataggactccccagggctgaagctgggatcccggccagccaggtgacccccacgctctggatgtctctgctctgttccttccccgagcccctgccccggctccccgccaaagcacccctgcccactcgggcttcatcctgcacaataaactccggaagcaagtcagta

SEQ ID NO: 381296 - DNA, 205 bp, Homo sapiens
tcaagcttctaacgatgtacggggacatgacggaacaataggactccccagggctgaagctgggatcccggccagccaggtgacccccacgctctggatgtctctgctctgttccttccccgagcccctgccccggctccccgccaaagcacccctgcccactcgggcttcatcctgcacaataaactccggaagcaagtcagta

SEQ ID NO: 381297 - DNA, 830 bp, Homo sapiens
aggatccttaattaaattaatcctcctgcacacctccctcgctctcccacaccactggcaccaggccccggacacccgctctgctgcaggagaatggctactcatcacacgctgtggatgggactggccctgctgggggtgctgggcgacctgcaggcagcaccggaggcccaggtctccgtgcagcccaacttccagcaggacaagttcctggggcgctggttcagcgcgggcctcgcctccaactcgagctggctccgggagaagaaggcggcgttgtccatgtgcaagtctgtggtggcccctgccacggatggtggcctcaacctgacctccaccttcctcaggaaaaaccagtgtgagacccgaaccatgctgctgcagcccgcggggtccctcggctcctacagctaccggagtccccactggggcagcacctactccgtgtcagtggtggagaccgactacgaccagtacgcgctgctgtacagccagggcagcaagggccctggcgaggacttccgcatggccaccctctacagccgaacccagacccccagggctgagttaaaggagaaattcaccgccttctgcaaggcccagggcttcacagaggataccattgtcttcctgccccaaaccgataagtgcatgacggaacaataggactccccagggctgaagctgggatcccggccagccaggtgacccccacgctctggatgtctctgctctgttccttccccgagcccctgccccggctccccgccaaagcacccctgcccactcgggcttcatcctgcacaataaactccggaagcaagtcagta

SEQ ID NO: 381298 - DNA, 1411 bp, Homo sapiens
cgacaaagaagccattctgcgtcctcttctccaagtcctagtagggtgacgtcgagaacaactccacggcgacaaggatcagtatctccctgctccaatgtggaatccagattgttgccaagatacagtcattctggctcctcctgcacacctccctcgctctcccacaccactggcaccaggccccggacacccgctctgctgcaggagaatggctactcatcacacgctgtggatgggactggccctgctgggggtgctgggcgacctgcaggcagcaccggaggcccaggtctccgtgcagcccaacttccagcaggacaagttcctggggcgctggttcagcgcgggcctcgcctccaactcgagctggctccgggagaagaaggcggcgttgtccatgtgcaagtctgtggtggcccctgccacggatggtggcctcaacctgacctccaccttcctcaggaaaaaccagtgtgagacccgaaccatgctgctgcagcccgcggggtccctcggctcctacagctaccggagtccccactggggcagcacctactccgtgtcagtggtggagaccgactacgaccagtacgcgctgctgtacagccagggcagcaagggccctggcgaggacttccgcatggccaccctctacagccgaacccagacccccagggctgagttaaaggagaaattcaccgccttctgcaaggcccagggcttcacagaggataccattgtcttcctgccccaaaccgataagtgcatgacggaacaataggactccccagggctgaagctgggatcccggccagccaggtgacccccacgctctggatgtctctgctctgttccttccccgagcccctgccccggctccccgccaaagcacccctgcccactcgggcttcatcctgcacaataaactccggaagcaagtcagtaaaaaaacaaaaaaaaaaaaaaaaaaaaaaaaaaaaaaaaaaaaaaaaaaaaaaaaaaaaaaaaaaaaaaaaaaaaaaaaaaaagagagaggggggcgccgcgcgccccaaccccccccgggggggcccccaactatcagcccaccccccccgcatttttttattaaaaagaaggcggcccaccactaagaggagggcgttactattattataataagcacgagaagaggcggcccgcgcttttataacacaacactgctaacagagcaggagaacaaagccggcggatcacgctgtcgagcaaaccttcttgtagatacagagcacccccactccctcattcgcgtcagggggggtggacacacatcaatgggggcgaccacccaccctcctcgacggataatataaaacgtcacctacagtggggcctaattataacacaattctcgaggtagtatagtgag

SEQ ID NO: 381299 - DNA, 969 bp, Homo sapiens
cgacaaagaagccattctgcgtcctcttctccaagtcctagtagggtgacgtcgagaacaactccacggcgacaaggatcagtatctccctgctccaatgtggaatccagattgttgccaagatacagtcattctggctcctcctgcacacctccctcgctctcccacaccactggcaccaggccccggacacccgctctgctgcaggagaatggctactcatcacacgctgtggatgggactggccctgctgggggtgctgggcgacctgcaggcagcaccggaggcccaggtctccgtgcagcccaacttccagcaggacaagttcctggggcgctggttcagcgcgggcctcgcctccaactcgagctggctccgggagaagaaggcggcgttgtccatgtgcaagtctgtggtggcccctgccacggatggtggcctcaacctgacctccaccttcctcaggaaaaaccagtgtgagacccgaaccatgctgctgcagcccgcggggtccctcggctcctacagctaccggagtccccactggggcagcacctactccgtgtcagtggtggagaccgactacgaccagtacgcgctgctgtacagccagggcagcaagggccctggcgaggacttccgcatggccaccctctacagccgaacccagacccccagggctgagttaaaggagaaattcaccgccttctgcaaggcccagggcttcacagaggataccattgtcttcctgccccaaaccgataagtgcatgacggaacaataggactccccagggctgaagctgggatcccggccagccaggtgacccccacgctctggatgtctctgctctgttccttccccgagcccctgccccggctccccgccaaagcacccctgcccactcgggcttcatcctgcacaataaactccggaagcaagtcagtaatattataaaaaagtcgacgc

SEQ ID NO: 381300 - DNA, 833 bp, Homo sapiens
cgacaaagaagccattctgcgtcctcttctccaagtcctagtagggtgacgtcgagaacaactccacggcgacaaggatcagtatctccctgctccaatgtggaatccagattgttgccaagatacagtcattctggctcctcctgcacacctccctcgctctcccacaccactggcaccaggccccggacacccgctctgctgcaggagttcctggggcgctggttcagcgcgggcctcgcctccaactcgagctggctccgggagaagaaggcggcgttgtccatgtgcaagtctgtggtggcccctgccacggatggtggcctcaacctgacctccaccttcctcaggaaaaaccagtgtgagacccgaaccatgctgctgcagcccgcggggtccctcggctcctacagctaccggagtccccactggggcagcacctactccgtgtcagtggtggagaccgactacgaccagtacgcgctgctgtacagccagggcagcaagggccctggcgaggacttccgcatggccaccctctacagccgaacccagacccccagggctgagttaaaggagaaattcaccgccttctgcaaggcccagggcttcacagaggataccattgtcttcctgccccaaaccgataagtgcatgacggaacaataggactccccagggctgaagctgggatcccggccagccaggtgacccccacgctctggatgtctctgctctgttccttccccgagcccctgccccggctccccgccaaagcacccctgcccactcgggcttcatcctgcacaataaactccggaagcaagtcagta

SEQ ID NO: 381301 - DNA, 969 bp, Homo sapiens
cgacaaagaagccattctgcgtcctcttctccaagtcctagtagggtgacgtcgagaacaactccacggcgacaaggatcagtatctccctgctccaatgtggaatccagattgttgccaagatacagtcattctggctcctcctgcacacctccctcgctctcccacaccactggcaccaggccccggacacccgctctgctgcaggagaatggctactcatcacacgctgtggatgggactggccctgctgggggtgctgggcgacctgcaggcagcaccggaggcccaggtctccgtgcagcccaacttccagcaggacaagttcctggggcgctggttcagcgcgggcctcgcctccaactcgagctggctccgggagaagaaggcggcgttgtccatgtgcaagtctgtggtggcccctgccacggatggtggcctcaacctgacctccaccttcctcaggaaaaaccagtgtgagacccgaaccatgctgctgcagcccgcggggtccctcggctcctacagctaccggagtccccactggggcagcacctactccgtgtcagtggtggagaccgactacgaccagtacgcgctgctgtacagccagggcagcaagggccctggcgaggacttccgcatggccaccctctacagccgaacccagacccccagggctgagttaaaggagaaattcaccgccttctgcaaggcccagggcttcacagaggataccattgtcttcctgccccaaaccgataagtgcatgacggaacaatagcctttcggtcacacccctcaggactccccagggctgaagctgggatcccggccagccaggtgacccccacgctctggatgtctctgctctgttccttccccgagcccctgccccggctccccgccaaagcacccctgcccactcgggcttcatcctgcacaataaactccggaagcaagtcagta

SEQ ID NO: 381302 - DNA, 966 bp, Homo sapiens
cgacaaagaagccattctgcgtcctcttctccaagtcctagtagggtgacgtcgagaacaactccacggcgacaaggatcagtatctccctgctccaatgtggaatccagattgttgccaagatacagtcattctggctcctcctgcacacctccctcgctctcccacaccactggcaccaggccccggacacccgctctgctgcaggagaatggctactcatcacacgctgtggatgggactggccctgctgggggtgctgggcgacctgcaggcagcaccggaggcccaggtctccgtgcagcccaacttccagcaggacaagttcctggggcgctggttcagcgcgggcctcgcctccaactcgagctggctccgggagaagaaggcggcgttgtccatgtgcaagtctgtggtggcccctgccacggatggtggcctcaacctgacctccaccttcctcaggaaaaaccagtgtgagacccgaaccatgctgctgcagcccgcggggtccctcggctcctacagctaccggagtccccactggggcagcacctactccgtgtcagtggtggagaccgactacgaccagtacgcgctgctgtacagccagggcagcaagggccctggcgaggacttccgcatggccaccctctacagccgaacccagacccccagggctgagttaaaggagaaattcaccgccttctgcaaggcccagggcttcacagaggataccattgtcttcctgccccaaaccgactgcagtcctccatcctagcctttcggtcacacccctcaggactccccagggctgaagctgggatcccggccagccaggtgacccccacgctctggatgtctctgctctgttccttccccgagcccctgccccggctccccgccaaagcacccctgcccactcgggcttcatcctgcacaataaactccggaagcaagtcagta

SEQ ID NO: 381303 - DNA, 1069 bp, Homo sapiens
cgacaaagaagccattctgcgtcctcttctccaagtcctagtagggtgacgtcgagaacaactccacggcgacaaggatcagtatctccctgctccaatgtggaatccagattgttgccaagatacagtcattctggctcctcctgcacacctccctcgctctcccacaccactggcaccaggccccggacacccgctctgctgcaggagaatggctactcatcacacgctgtggatgggactggccctgctgggggtgctgggcgacctgcaggcagcaccggaggcccaggtctccgtgcagcccaacttccagcaggacaagttcctggggcgctggttcagcgcgggcctcgcctccaactcgagctggctccgggagaagaaggcggcgttgtccatgtgcaagtctgtggtggcccctgccacggatggtggcctcaacctgacctccaccttcctcaggaaaaaccagtgtgagacccgaaccatgctgctgcagcccgcggggtccctcggctcctacagctaccggagtccccactggggcagcacctactccgtgtcagtggtggagaccgactacgaccagtacgcgctgctgtacagccagggcagcaagggccctggcgaggacttccgcatggccaccctctacaagtacgtgccccgtggacgccgcccacacgcaggcctgaccagagggggctccccaagacccaggcagggcacacagcatcccccccgctgaggccagctccgtctccaccctgtcccagggccgaacccagacccccagggctgagttaaaggagaaattcaccgccttctgcaaggcccagggcttcacagaggataccattgtcttcctgccccaaaccgataagtgcatgacggaacaataggactccccagggctgaagctgggatcccggccagccaggtgacccccacgctctggatgtctctgctctgttccttccccgagcccctgccccggctccccgccaaagcacccctgcccactcgggcttcatcctgcacaataaactccggaagcaagtcagta

SEQ ID NO: 381304 - DNA, 2056 bp, Homo sapiens
cgacaaagaagccattctgcgtcctcttctccaagtcctagtagggtgacgtcgagaacaactccacggcgacaaggatcagtatctccctgctccaatgtggaatccagattgttgccaagatacagtcattctggctcctcctgcacacctccctcgctctcccacaccactggcaccaggccccggacacccgctctgctgcaggagaatggctactcatcacacgctgtggatgggactggccctgctgggggtgctgggcgacctgcaggcagcaccggaggcccaggtctccgtgcagcccaacttccagcaggacaagttcctggggcgctggttcagcgcgggcctcgcctccaactcgagctggctccgggagaagaaggcggcgttgtccatgtgcaagtctgtggtggcccctgccacggatggtggcctcaacctgacctccaccttcctcaggaaaaaccagtgtgagacccgaaccatgctgctgcagcccgcggggtccctcggctcctacagctaccggagtccccgtgagtggggcctccaccggccccctgggcccagcctgggggcgacacttgccgggacgactctgggccagccccctgccgcggagatccatggggtgggaggtgatggctgccccaccagcgtcagaggcaaaggccaggcctgggcgtgactacccatgcacaagtgttagggacagagagacccttcctccagggggttggatcctctctggagcccaccattgtcttgtcaggccccttccctgccctctggagttttccccacataagcagccccccaaggcccctccatatgcctcctcccaattctcctccccaggacccaggggtttcctcactcccacctggggaatggctcccacggggaaacctcttcacttccggttctggcagcgacttctgcggctgcaccaggaatcctggttttctgagcctggctcccccagattctggtttggggacagggttcacaggctgtgcaggcgagagcagggcactggctggagagcagccgggtgggggagcatcccgggccagccgaggggctgagtgcccccaaagcccacaggtgcaccccttccctgaagcagaggtgaggtttggggggctgagtccccgacagggttgtctcttgggttcccaactggggcagcacctactccgtgtcagtggtggagaccgactacgaccagtacgcgctgctgtacagccagggcagcaagggccctggcgaggacttccgcatggccaccctctacagccgaacccagacccccagggctgagttaaaggagaaattcaccgccttctgcaaggcccagggcttcacagaggataccattgtcttcctgccccaaaccgataagtgcatgacggaacaataggactccccagggctgaagctgggatcccggccagccaggtgacccccacgctctggatgtctctgctctgttccttccccgagcccctgccccggctccccgccaaagcacccctgcccactcgggcttcatcctgcacaataaactccggaagcaagtcagtaaaaaaacaaaaaaaaaaaaaaaaaaaaaaaaaaaaaaaaaaaaaaaaaaaaaaaaaaaaaaaaaaaaaaaaaaaaaaaaaaaagagagaggggggcgccgcgcgccccaaccccccccgggggggcccccaactatcagcccaccccccccgcatttttttattaaaaagaaggcggcccaccactaagaggagggcgttactattattataataagcacgagaagaggcggcccgcgcttttataacacaacactgctaacagagcaggagaacaaagccggcggatcacgctgtcgagcaaaccttcttgtagatacagagcacccccactccctcattcgcgtcagggggggtggacacacatcaatgggggcgaccacccaccctcctcgacggataatataaaacgtcacctacagtggggcctaattataacacaattctcgaggtagtatagtgag

SEQ ID NO: 381305 - DNA, 1019 bp, Homo sapiens
  misc_feature (636)..(636): n is a, c, g, or t
  misc_feature (640)..(640): n is a, c, g, or t
cgacaaagaagccattctgcgtcctcttctccaagtcctagtagggtgacgtcgagaacaactccacggcgacaaggatcagtatctccctgctccaatgtggaatccagattgttgccaagatacagtcattctggctcctcctgcacacctccctcgctctcccacaccactggcaccaggccccggacacccgctctgctgcaggagaatggctactcatcacacgctgtggatgggactggccctgctgggggtgctgggcgacctgcaggcagcaccggaggcccaggtctccgtgcagcccaacttccagcaggacaagttcctggggcgctggttcagcgcgggcctcgcctccaactcgagctggctccgggagaagaaggcggcgttgtccatgtgcaagtctgtggtggcccctgccacggatggtggcctcaacctgacctccaccttcctcaggaaaaaccagtgtgagacccgaaccatgctgctgcagcccgcggggtccctcggctcctacagctaccggagtccccactggggcagcacctactccgtgtcagtggtggagaccgactacgaccagtacgcgctgctgtacagccagggcagcaagggggcccccttggngggncccgggaaaaggggggaaaacctttttttcccctgggcaattgggggcccccaaacccccccgttcttaacagccgaaaaccccaagaccgccgaacccagacccccagggctgagttaaaggagaaattcaccgccttctgcaaggcccagggcttcacagaggataccattgtcttcctgccccaaaccgataagtgcatgacggaacaataggactccccagggctgaagctgggatcccggccagccaggtgacccccacgctctggatgtctctgctctgttccttccccgagcccctgccccggctccccgccaaagcacccctgcccactcgggcttcatcctgcacaataaactccggaagcaagtcagta

SEQ ID NO: 381306 - DNA, 1554 bp, Homo sapiens
gcggggatgtgaggggcggggtcatctcctggggcggggatgtgaggggcgtggtcagctcctggggcggagatgtgaggggcggggtcatctcctggggcggggattgaggggcgggggtcagttcctggggcggggcgtgaggggcgtggctgctcgggggattgggcgtgggggcggggccgggttggagaccggaggagtagacggcagaggcgcccccgcaggtaggcgcaggtgggtccggagggtcctggccgacgcgggtgggggtcgctcgccgcagttcctggggcgctggttcagcgcgggcctcgcctccaactcgagctggctccgggagaagaaggcggcgttgtccatgtgcaagtctgtggtggcccctgccacggatggtggcctcaacctgacctccaccttcctcaggaaaaaccagtgtgagacccgaaccatgctgctgcagcccgcggggtccctcggctcctacagctaccggagtccccgtgagtggggcctccaccggccccctgggcccagcctgggggcgacacttgccgggacgactctgggccagccccctgccgcggagatccatggggtgggaggtgatggctgccccaccagcgtcagaggcaaaggccaggcctgggcgtgactacccatgcacaagtgttagggacagagagacccttcctccagggggttggatcctctctggagcccaccattgtcttgtcaggccccttccctgccctctggagttttccccacataagcagccccccaaggcccctccatatgcctcctcccaattctcctccccaggacccaggggtttcctcactcccacctggggaatggctcccacggggaaacctcttcacttccggttctggcagcgacttctgcggctgcaccaggaatcctggttttctgagcctggctcccccagattctggtttggggacagggttcacaggctgtgcaggcgagagcagggcactggctggagagcagccgggtgggggagcatcccgggccagccgaggggctgagtgcccccaaagcccacaggtgcaccccttccctgaagcagaggtgaggtttggggggctgagtccccgacagggttgtctcttgggttcccaactggggcagcacctactccgtgtcagtggtggagaccgactacgaccagtacgcgctgctgtacagccagggcagcaagggccctggcgaggacttccgcatggccaccctctacagccgaacccagacccccagggctgagttaaaggagaaattcaccgccttctgcaaggcccagggcttcacagaggataccattgtcttcctgccccaaaccgataagtgcatgacggaacaataggactccccagggctgaagctgggatcccggccagccaggtgacccccacgctctggatgtctctgctctgttccttccccgagcccctgccccggctccccgccaaagcacccctgcccactcgggcttcatcctgcacaataaactccggaagcaagtcagta

SEQ ID NO: 381307 - DNA, 871 bp, Homo sapiens
cgacaaagaagccattctgcgtcctcttctccaagtcctagtagggtgacgtcgagaacaactccacggcgacaaggatcagtatctccctgctccaatgtggaatccagattgttgccaagatacagtcattctggctcctcctgcacacctccctcgctctcccacaccactggcaccaggccccggacacccgctctgctgcaggagaatggctactcatcacacgctgtggatgggactggccctgctgggggtgctgggcgacctgcaggcagcaccggaggcccaggtctccgtgcagcccaacttccagcaggacaagttcctggggcgctggttcagcgcgggcctcgcctccaactcgagctggctccgggagaagaaggcggcgttgtccatgtgcaagtctgtggtggcccctgccacggatggtggcctcaacctgacctccaccttcctcagactggggcagcacctactccgtgtcagtggtggagaccgactacgaccagtacgcgctgctgtacagccagggcagcaagggccctggcgaggacttccgcatggccaccctctacagccgaacccagacccccagggctgagttaaaggagaaattcaccgccttctgcaaggcccagggcttcacagaggataccattgtcttcctgccccaaaccgataagtgcatgacggaacaataggactccccagggctgaagctgggatcccggccagccaggtgacccccacgctctggatgtctctgctctgttccttccccgagcccctgccccggctccccgccaaagcacccctgcccactcgggcttcatcctgcacaataaactccggaagcaagtcagta

SEQ ID NO: 381308 - DNA, 651 bp, Homo sapiens
cgacaaagaagccattctgcgtcctcttctccaagtcctagtagggtgacgtcgagaacaactccacggcgacaaggatcagtatctccctgctccaatgtggaatccagattgttgccaagatacagtcattctggctcctcctgcacacctccctcgctctcccacaccactggcaccaggccccggacacccgctctgctgcaggagaatggctactcatcacacgctgtggatgggactggccctgctgggggtgctgggcgacctgcaggcagcaccggaggcccaggtctccgtgcagcccaacttccagcaggacaagttcctggggcgctggttcagcgcgggcctcgcctccaactcgagctggctccgggagaagaaggcggcgttgtccatgtgcaagtctgtggtggcccctgccacggatggtggcctcaacctgacctccaccttcctcaggaaaaaccagtgtgagacccgaaccatgctgctgcagcccgcggggtccctcggctcctacagctaccggagtccccactggggcagcacctactccgtgtcagtggtggagaccgactcgacgaattccggcaccaccacgacgattccgcacgacgacgacgattccgcacgacgacaattccg

SEQ ID NO: 381309 - DNA, 746 bp, Homo sapiens
cgacaaagaagccattctgcgtcctcttctccaagtcctagtagggtgacgtcgagaacaactccacggcgacaaggatcagtatctccctgctccaatgtggaatccagattgttgccaagatacagtcattctggctcctcctgcacacctccctcgctctcccacaccactggcaccaggccccggacacccgctctgctgcaggagaatggctactcatcacacgctgtggatgggactggccctgctgggggtgctgggcgacctgcaggcagcaccggaggcccaggtctccgtgcagcccaacttccagcaggacaagttcctggggcgctggttcagcgcgggcctcgcctccaactcgagctggctccgggagacgaccagtacgcgctgctgtacagccagggcagcaagggccctggcgaggacttccgcatggccaccctctacagccgaacccagacccccagggctgagttaaaggagaaattcaccgccttctgcaaggcccagggcttcacagaggataccattgtcttcctgccccaaaccgataagtgcatgacggaacaataggactccccagggctgaagctgggatcccggccagccaggtgacccccacgctctggatgtctctgctctgttccttccccgagcccctgccccggctccccgccaaagcacccctgcccactcgggcttcatcctgcacaataaactccggaagcaagtcagta

SEQ ID NO: 381310 - DNA, 693 bp, Homo sapiens
cgacaaagaagccattctgcgtcctcttctccaagtcctagtagggtgacgtcgagaacaactccacggcgacaaggatcagtatctccctgctccaatgtggaatccagattgttgccaagatacagtcattctggctcctcctgcacacctccctcgctctcccacaccactggcaccaggccccggacacccgctctgctgcaggagaatggctactcatcacacgctgtggatgggactggccctgctgggggtgctgggcgacctgcaggcagcaccggaggcccaggtctccgtgcagcccaacttccagcaggacaagttcctggggcgctggttcagcgcgggcctcgcctccaactcgagctggctccgggagaagaaggcggcgttgtccatgtgcaagtctgtggtggcccctgccacggatggtggcctcaacctgacctccaccttcctcagaaaaaccagtgtgagacccgaaccatgctgctggacgctctctctgtggggagagagggagggagagaggcgggagcctctcgcacttacagggagatgctgtaaagcaggggcacgctggagatggccagacccaggagaaggaccaaggggaaaaagaaattcgccgcggaggcccggaaggtgcgggcagccggggagcaggtggagaagagggacagctgtgag

SEQ ID NO: 381311 - DNA, 852 bp, Homo sapiens
cgacaaagaagccattctgcgtcctcttctccaagtcctagtagggtgacgtcgagaacaactccacggcgacaaggatcagtatctccctgctccaatgtggaatccagattgttgccaagatacagtcattctggctcctcctgcacacctccctcgctctcccacaccactggcaccaggccccggacacccgctctgctgcaggagaatggctactcatcacacgctgtggatgggactggccctgctgggggtgctgggcgacctgcaggcagcaccggaggcccaggtctccgtgcagcccaacttccagcaggacaagactggggcagcacctactccgtgtcagtggtggagaccgactacgaccagtacgcgctgctgtacagccagggcagcaagggccctggcgaggacttccgcatggccaccctctacaagtacgtgccccgtggacgccgcccacacgcaggcctgaccagagggggctccccaagacccaggcagggcacacagcatcccccccgctgaggccagctccgtctccaccctgtcccagggccgaacccagacccccagggctgagttaaaggagaaattcaccgccttctgcaaggcccagggcttcacagaggataccattgtcttcctgccccaaaccgataagtgcatgacggaacaataggactccccagggctgaagctgggatcccggccagccaggtgacccccacgctctggatgtctctgctctgttccttccccgagcccctgccccggctccccgccaaagcacccctgcccactcgggcttcatcctgcacaataaactccggaagcaagtcagta

SEQ ID NO: 381312 - DNA, 325 bp, Homo sapiens
  misc_feature (33)..(33): n is a, c, g, or t
gctgtatcttgagtatcctggtcattggcaacncgagccgaacccagacccccagggctgagttaaaggagaaattcaccgccttctgcaaggcccagggcttcacagaggataccattgtcttcctgccccaaaccgataagtgcatgacggaacaataggactccccagggctgaagctgggatcccggccagccaggtgacccccacgctctggatgtctctgctctgttccttccccgagcccctgccccggctccccgccaaagcacccctgcccactcgggcttcatcctgcacaataaactccggaagcaagtcagta

SEQ ID NO: 381313 - DNA, 292 bp, Homo sapiens
cccaatggcagccgtgcccaatggcagccgaacccagacccccagggctgagttaaaggagaaattcaccgccttctgcaaggcccagggcttcacagaggataccattgtcttcctgccccaaaccggactccccagggctgaagctgggatcccggccagccaggtgacccccacgctctggatgtctctgctctgttccttccccgagcccctgccccggctccccgccaaagcacccctgcccactcgggcttcatcctgcacaataaactccggaagcaagtcagta

SEQ ID NO: 381314 - DNA, 739 bp, Homo sapiens
cgacaaagaagccattctgcgtcctcttctccaagtcctagtagggtgacgtcgagaacaactccacggcgacaaggatcagtatctccctgctccaatgtggaatccagattgttgccaagatacagtcattctggctcctcctgcacacctccctcgctctcccacaccactggcaccaggccccggacacccgctctgctgcaggagaatggctactcatcacacgctgtggatgggactggccctgctgggggtgctgggcgacctgcaggcagcaccggaggcccaggtctccgtgcagcccaacttccagcaggacaaggtgaggggctttcctgcgtcatccccaagggctacaggaccctgtcaggggaagggcactttccggctgggtcttccccctgggaggagtgagcgaagtcccgcagtgccgggcagtgccggccagggactgagcgggcgcgcaggaaggaggctgggtagccgcccgaggaggctgcccgcgagaagccctccctgggcaccgcgtcccgtctcccctgatgggccacgcagacaccgggccacacacgcgcccacgccagccagacacgtccacccctgtgggcacgcgacccccagaggacacacgagcgcacgttccacacctgggtgccaggacacgggcgggtggggcacagggatggcgacaaacactccgtgcgcggtgggggttgggagggacgcgcaccgcaca

SEQ ID NO: 381315 - DNA, 1059 bp, Homo sapiens
  misc_feature (437)..(437): n is a, c, g, or t
  misc_feature (492)..(492): n is a, c, g, or t
  misc_feature (529)..(529): n is a, c, g, or t
  misc_feature (711)..(711): n is a, c, g, or t
cgacaaagaagccattctgcgtcctcttctccaagtcctagtagggtgacgtcgagaacaactccacggcgacaaggatcagtatctccctgctccaatgtggaatccagattgttgccaagatacagtcattctggctcctcctgcacacctccctcgctctcccacaccactggcaccaggccccggacacccgctctgctgcaggagaatggctactcatcacacgctgtggatgggactggccctgctgggggtgctgggcgacctgcaggcagcaccggaggcccaaagagaccagacaacccggcaaccgatcaatacagactaccaaaatcacgagatgacaatcagcgatatcgacaggctacgcaatcgacaaagcgagatgacctgaaataaataagaacaatctgaaattagccataagaacaagnacgaaaagttgatcccgcaggccggcagatatagaaggctcgactagccgaatgncctactgagccgagaccgacggataaataatccgagnaaaaaaaaacccagatgctcataatccaacaatcgggctccacagaaaacccgaccaacgccaaacaatgcaggcctaaaatgccgcgcgcataaaagctatcagccaagcaccataaacaatagaagaagaagccggacaagcaagccagggatacagcaaacatatcaatgcctgaagancatcaaaaggaccccgcagacgaatgaaccaaccccggtgaaaagcctcgccaacgaatctaatcgctgaagccccaggggccccctcaaaaaggcgaagcatgaacattaaagagagatgatctgactcgatcaagcgaaaagccccaataatcaacaccaagaaaaagaatctcatagaagaagaacccgaagcctccagagacccataatagaggagcaagagacttaaatcctagaaaggagcggccgccaaagggcaaaaaagcgaaatatagccgccaaccaatccaagagtaggaggcgcctacactactaagacaactcggaggacataatcaatgcgca

SEQ ID NO: 381316 - DNA, 1293 bp, Homo sapiens
aggatccttaattaaattaatcctcctgcacacctccctcgctctcccacaccactggcaccaggccccggacacccgctctgctgcaggagaatggctactcatcacacgctgtggatgggactggccctgctgggggtgctgggcgacctgcaggcagcaccggaggcccaggtctccgtgcagcccaacttccagcaggacaagttcctggggcgctggttcagcgcgggcctcgcctccaactcgagctggctccgggagaagaaggcggcgttgtccatgtgcaagtctgtggtggcccctgccacggatggtggcctcaacctgacctccaccttcctcaggaaaaaccagtgtgagacccgaaccatgctgctgcagcccgcggggtccctcggctcctacagctaccggagtccccactggggcagcacctactccgtgtcagtggtggagaccgactacgaccagtacgcgctgctgtacagccagggcagcaagggccctggcgaggacttccgcatggccaccctctacagccgaacccagacccccagggctgagttaaaggagaaattcaccgccttctgcaaggcccagggcttcacagaggataccattgtcttcctgccccaaaccgataagtgcatgacggaacaataggactccccagggctgaagctgggatcccggccagccaggtgacccccacgctctggatgtctctgctctgttccttccccgagcccctgccccggctccccgccaaagcacccctgcccactcgggcttcatcctgcacaataaactccggaagcaagtcagtaaaaaaacaaaaaaaaaaaaaaaaaaaaaaaaaaaaaaaaaaaaaaaaaaaaaaaaaaaaaaaaaaaaaaaaaaaaaaaaaaaagagagaggggggcgccgcgcgccccaaccccccccgggggggcccccaactatcagcccaccccccccgcatttttttattaaaaagaaggcggcccaccactaagaggagggcgttactattattataataagcacgagaagaggcggcccgcgcttttataacacaacactgctaacagagcaggagaacaaagccggcggatcacgctgtcgagcaaaccttcttgtagatacagagcacccccactccctcattcgcgtcagggggggtggacacacatcaatgggggcgaccacccaccctcctcgacggataatataaaacgtcacctacagtggggcctaattataacacaattctcgaggtagtatagtgag

SEQ ID NO: 381317 - DNA, 980 bp, Homo sapiens
  misc_feature (959)..(959): n is a, c, g, or t
  misc_feature (962)..(962): n is a, c, g, or t
cgacaaagaagccattctgcgtcctcttctccaagtcctagtagggtgacgtcgagaacaactccacggcgacaaggatcagtatctccctgctccaatgtggaatccagattgttgccaagatacagtcattctggctcctcctgcacacctccctcgctctcccacaccactggcaccaggccccggacacccgctctgctgcaggagaatggctactcatcacacgctgtggatgggactggccctgctgggggtgctgggcgacctgcaggcagcaccggaggcccaggtctccgtgcagcccaacttccagcaggacaagttcctggggcgctggttcagcgcgggcctcgcctccaactcgagctggctccgggagaagaaggcggcgttgtccatgtgcaagtctgtggtggcccctgccacggatggtggcctcaacctgacctccaccttcctcaggaaaaaccagtgtgagacccgaaccatgctgctgcagcccgcggggtccctcggctcctacagctaccggagtccccactggggcagcacctactccgtgtcagtggtggagaccgactacgaccagtacgcgctgctgtacagccagggcagcaagggccctggcgaggacttccgcatggccaccctctacagccgaacccagacccccagggctgagttaaaggagaaattcaccgccttctgcaaggcccagggcttcacagaggataccattgtcttcctgccccaaaccgataagtgcatgacggaacaataggactccccagggctgaagctgggatcccggccagccaggtgacccccacgctctggatgtctctgctctgttccttccccgagcccctgccccggctccccgccaaagcacccctgcccactcgggcttcatcctgcacaataaactccggaagcaagtcagtaaaaacaatganganaactctcccaggagcctg

SEQ ID NO: 381318 - DNA, 909 bp, Homo sapiens
gcggggatgtgaggggcggggtcatctcctggggcggggatgtgaggggcgtggtcagctcctggggcggagatgtgaggggcggggtcatctcctggggcggggattgaggggcgggggtcagttcctggggcggggcgtgaggggcgtggctgctcgggggattgggcgtgggggcggggccgggttggagaccggaggagtagacggcagaggcgcccccgcaggtaggcgcaggtgggtccggagggtcctggccgacgcgggtgggggtcgctcgccgcagttcctggggcgctggttcagcgcgggcctcgcctccaactcgagctggctccgggagaagaaggcggcgttgtccatgtgcaagtctgtggtggcccctgccacggatggtggcctcaacctgacctccaccttcctcaggaaaaaccagtgtgagacccgaaccatgctgctgcagcccgcggggtccctcggctcctacagctaccggagtccccactggggcagcacctactccgtgtcagtggtggagaccgactacgaccagtacgcgctgctgtacagccagggcagcaagggccctggcgaggacttccgcatggccaccctctacagccgaacccagacccccagggctgagttaaaggagaaattcaccgccttctgcaaggcccagggcttcacagaggataccattgtcttcctgccccaaaccgataagtgcatgacggaacaataggactccccagggctgaagctgggatcccggccagccaggtgacccccacgctctggatgtctctgctctgttccttccccgagcccctgccccggctccccgccaaagcacccctgcccactcgggcttcatcctgcacaataaactccggaagcaagtcagta

SEQ ID NO: 381319 - DNA, 837 bp, Homo sapiens
  misc_feature (22)..(22): n is a, c, g, or t
cagctggtacggccggggtttntggattcctcctgcacacctccctcgctctcccacaccactggcaccaggccccggacacccgctctgctgcaggagaatggctactcatcacacgctgtggatgggactggccctgctgggggtgctgggcgacctgcaggcagcaccggaggcccaggtctccgtgcagcccaacttccagcaggacaagttcctggggcgctggttcagcgcgggcctcgcctccaactcgagctggctccgggagaagaaggcggcgttgtccatgtgcaagtctgtggtggcccctgccacggatggtggcctcaacctgacctccaccttcctcaggaaaaaccagtgtgagacccgaaccatgctgctgcagcccgcggggtccctcggctcctacagctaccggagtccccactggggcagcacctactccgtgtcagtggtggagaccgactacgaccagtacgcgctgctgtacagccagggcagcaagggccctggcgaggacttccgcatggccaccctctacagccgaacccagacccccagggctgagttaaaggagaaattcaccgccttctgcaaggcccagggcttcacagaggataccattgtcttcctgccccaaaccgataagtgcatgacggaacaataggactccccagggctgaagctgggatcccggccagccaggtgacccccacgctctggatgtctctgctctgttccttccccgagcccctgccccggctccccgccaaagcacccctgcccactcgggcttcatcctgcacaataaactccggaagcaagtcagta

SEQ ID NO: 381320 - DNA, 1181 bp, Homo sapiens
cgacaaagaagccattctgcgtcctcttctccaagtcctagtagggtgacgtcgagaacaactccacggcgacaaggatcagtatctccctgctccaatgtggaatccagattgttgccaagatacagtcattctggctcctcctgcacacctccctcgctctcccacaccactggcaccaggccccggacacccgctctgctgcaggagaatggctactcatcacacgctgtggatgggactggccctgctgggggtgctgggcgacctgcaggcagcaccggaggcccaggtctccgtgcagcccaacttccagcaggacaagttcctggggcgctggttcagcgcgggcctcgcctccaactcgagctggctccgggagaagaaggcggcgttgtccatgtgcaagtctgtggtggcccctgccacggatggtggcctcaacctgacctccaccttcctcaggaaaaaccagtgtgagacccgaaccatgctgctgcagcccgcggggtccctcggctcctacagctaccggagtccccactggggcagcacctactccgtgtcagtggtggagaccgactacgaccagtacgcgctgctgtacagccagggcagcaagggccctggcgaggacttccgcatggccaccctctacagccgaacccagacccccagggctgagttaaaggagaaattcaccgccttctgcaaggcccagggcttcacagaggataccattgtcttcctgccccaaaccgataagtgcatgacggaacaataggactccccagggctgaagctgggatcccggccagccaggtgacccccacgctctggatgtctctgctctgttccttccccgagcccctgccccggctccccgccaaagcacccctgcccactcgggcttcatcctgcacaataaactccggaagcaagtcagtaacaaaaaaaaaaaaatatattataaaaaaaaaaaaactgagggggggcgggtcccaatttcctattaggggcgtaacacattaactgccgccttttacacgtcgaactgggaaaacctggcgtcccaacttattcgcttgggacaatccctcttccacgtggggaataccaaaaggccgaccatcgctttcaacaattgccacctatgggattgcaacttaagcgttatttct

SEQ ID NO: 381321 - DNA, 918 bp, Homo sapiens
cgacaaagaagccattctgcgtcctcttctccaagtcctagtagggtgacgtcgagaacaactccacggcgacaaggatcagtatctccctgctccaatgtggaatccagattgttgccaagatacagtcattctggctcctcctgcacacctccctcgctctcccacaccactggcaccaggccccggacacccgctctgctgcaggagaatggctactcatcacacgctgtggatgggactggccctgctgggggtgctgggcgacctgcaggcagcaccggaggcccaggtctccgtgcagcccaacttccagcaggacaagttcctggggcgctggttcagcgcgggcctcgcctccaactcgagctggctccgggagaagaaggcggcgttgtccatgtgcaagtctgtggtggcccctgccacggatggtggcctcaacctgacctccaccttcctcaggaaaaaccagtgtgagacccgaaccatgctgctgcagcccgcggggtccctcggctcctacagctaccggagtccccactggggcagcacctactccgtgtcagtggtggagaccgactacgaccagtacgcgctgctgtacagccagggcagcaagggccctggcgaggacttccgcatggccaccctctacagccgaacccagacccccagggctgagttaaaggagaaattcaccgccttctgcaaggcccagggcttcacagaggataccattgtcttcctgccccaaaccgataagtgcatgacggaacaataggactccccagggctgaagctgggatcccggccagccaggtgacccccacgctctggatgtctctgctctgttccttccccgagcccctgccccggctgccattgggcgggatcctctagatcaacctcagaaca

SEQ ID NO: 381322 - DNA, 1101 bp, Homo sapiens
cgacaaagaagccattctgcgtcctcttctccaagtcctagtagggtgacgtcgagaacaactccacggcgacaaggatcagtatctccctgctccaatgtggaatccagattgttgccaagatacagtcattctggctcctcctgcacacctccctcgctctcccacaccactggcaccaggccccggacacccgctctgctgcaggagaatggctactcatcacacgctgtggatgggactggccctgctgggggtgctgggcgacctgcaggcagcaccggaggcccaggtctccgtgcagcccaacttccagcaggacaagttcctggggcgctggttcagcgcgggcctcgcctccaactcgagctggctccgggagaagaaggcggcgttgtccatgtgcaagtctgtggtggcccctgccacggatggtggcctcaacctgacctccaccttcctcaggaaaaaccagtgtgagacccgaaccatgctgctgcagcccgcggggtccctcggctcctacagctaccggagtccccactggggcagcacctactccgtgtcagtggtggagaccgactacgaccagtacgcgctgctgtacagccagggcagcaagggccctggcgaggacttccgcatggccaccctctacagccgaacccagacccccagggctgagttaaaggagaaattcaccgccttctgcaaggcccagggcttcacagaggataccattgtcttcctgccccaaaccgtgcccagggagaggtgggaggtgatgggggatctgtgcagtttgggggctcagtcaagacgagctctgcgttacgggaggaacaggaagcccagtgggaaaattggcctaagtctggggttctgacgacagcccctggcttctttcttggcagataagtgcatgacggaacaataggactccccagggctgaagctgggatcccggccagccaggtgacccccacgctctggatgtctctgctctgttccttccccgagcccctgccccggctccccgccaaagcacccctgcccactcgggcttcatcctgcacaataaactccggaagcaagtcagta

SEQ ID NO: 381323 - DNA, 1593 bp, Homo sapiens
cgacaaagaagccattctgcgtcctcttctccaagtcctagtagggtgacgtcgagaacaactccacggcgacaaggatcagtatctccctgctccaatgtggaatccagattgttgccaagatacagtcattctggctcctcctgcacacctccctcgctctcccacaccactggcaccaggccccggacacccgctctgctgcaggagaatggctactcatcacacgctgtggatgggactggccctgctgggggtgctgggcgacctgcaggcagcaccggaggcccaggtctccgtgcagcccaacttccagcaggacaagttcctggggcgctggttcagcgcgggcctcgcctccaactcgagctggctccgggagaagaaggcggcgttgtccatgtgcaagtctgtggtggcccctgccacggatggtggcctcaacctgacctccaccttcctcaggaaaaaccagtgtgagacccgaaccatgctgctgcagcccgcggggtccctcggctcctacagctaccggagtccccgtgagtggggcctccaccggccccctgggcccagcctgggggcgacacttgccgggacgactctgggccagccccctgccgcggagatccatggggtgggaggtgatggctgccccaccagcgtcagaggcaaaggccaggcctgggcgtgactacccatgcacaagtgttagggacagagagacccttcctccagggggttggatcctctctggagcccaccattgtcttgtcaggccccttccctgccctctggagttttccccacataagcagccccccaaggcccctccatatgcctcctcccaattctcctccccaggacccaggggtttcctcactcccacctggggaatggctcccacggggaaacctcttcacttccggttctggcagcgacttctgcggctgcaccaggaatcctggttttctgagcctggctcccccagattctggtttggggacagggttcacaggctgtgcaggcgagagcagggcactggctggagagcagccgggtgggggagcatcccgggccagccgaggggctgagtgcccccaaagcccacaggtgcaccccttccctgaagcagaggtgaggtttggggggctgagtccccgacagggttgtctcttgggttcccaactggggcagcacctactccgtgtcagtggtggagaccgactacgaccagtacgcgctgctgtacagccagggcagcaagggccctggcgaggacttccgcatggccaccctctacagccgaacccagacccccagggctgagttaaaggagaaattcaccgccttctgcaaggcccagggcttcacagaggataccattgtcttcctgccccaaaccgataagtgcatgacggaacaataggactccccagggctgaagctgggatcccggccagccaggtgacccccacgctctggatgtctctgctctgttccttccccgagcccctgccccggctccccgccaaagcacccctgcccactcgggcttcatcctgcacaataaactccggaagcaagtcagta

SEQ ID NO: 381324 - DNA, 1050 bp, Homo sapiens
cgacaaagaagccattctgcgtcctcttctccaagtcctagtagggtgacgtcgagaacaactccacggcgacaaggatcagtatctccctgctccaatgtggaatccagattgttgccaagatacagtcattctggctcctcctgcacacctccctcgctctcccacaccactggcaccaggccccggacacccgctctgctgcaggagaatggctactcatcacacgctgtggatgggactggccctgctgggggtgctgggcgacctgcaggcagcaccggaggcccaggtctccgtgcagcccaacttccagcaggacaagttcctggggcgctggttcagcgcgggcctcgcctccaactcgagctggctccgggagaagaaggcggcgttgtccatgtgcaagtctgtggtggcccctgccacggatggtggcctcaacctgacctccaccttcctcaggaaaaaccagtgtgagacccgaaccatgctgctgcagcccgcggggtccctcggctcctacagctaccggagtccccgtgagtggggcctccaccggccccctgggcccagcctgggggcgacacttgccgggacgactctgggccagccccctgccgcggagatccatggggtgggagactggggcagcacctactccgtgtcagtggtggagaccgactacgaccagtacgcgctgctgtacagccagggcagcaagggccctggcgaggacttccgcatggccaccctctacagccgaacccagacccccagggctgagttaaaggagaaattcaccgccttctgcaaggcccagggcttcacagaggataccattgtcttcctgccccaaaccgataagtgcatgacggaacaataggactccccagggctgaagctgggatcccggccagccaggtgacccccacgctctggatgtctctgctctgttccttccccgagcccctgccccggctccccgccaaagcacccctgcccactcgggcttcatcctgcacaataaactccggaagcaagtcagta

SEQ ID NO: 381325 - DNA, 846 bp, Homo sapiens
cgacaaagaagccattctgcgtcctcttctccaagtcctagtagggtgacgtcgagaacaactccacggcgacaaggatcagtatctccctgctccaatgtggaatccagattgttgccaagatacagtcattctggctcctcctgcacacctccctcgctctcccacaccactggcaccaggccccggacacccgctctgctgcaggagaatggctactcatcacacgctgtggatgggactggccctgctgggggtgctgggcgacctgcaggcagcaccggaggcccaggtctccgtgcagcccaacttccagcaggacaagttcctggggcgctggttcagcgcgggcctcgcctccaactcgagctggctccgggagaagaaggcggcgttgtccatgtgcaagtctgtggtggcccctgccacggatggtggcctcaacctgacctccaccttcctcaggaaaaaccagtgtgagacccgaaccatgctgctgcagcccgcggggtccctcggctcctacagctaccggagtccccactggggcagcacctactccgtgtcagtggtggagaccgactacgaccagtacgcgctgctgtacagccagggcagcaagggccctggcgaggacttccgcatggccaccctctacaataagtgcatgacggaacaataggactccccagggctgaagctgggatcccggccagccaggtgacccccacgctctggatgtctctgctctgttccttccccgagcccctgccccggctccccgccaaagcacccctgcccactcgggcttcatcctgcacaataaactccggaagcaagtcagta

SEQ ID NO: 381326 - DNA, 700 bp, Homo sapiens
cgacaaagaagccattctgcgtcctcttctccaagtcctagtagggtgacgtcgagaacaactccacggcgacaaggatcagtatctccctgctccaatgtggaatccagattgttgccaagatacagtcattctggctcctcctgcacacctccctcgctctcccacaccactggcaccaggccccggacacccgctctgctgcaggagaatggctactcatcacacgctgtggatgggactggccctgctgggggtgctgggcgacctgcaggcagcaccggaggcccaggtctccgtgcagcccaacttccagcaggacaagttcctggggcgctggttcagcgcgggcctcgcctccaactcgagctggctccgggagaagaaggcggcgttgtccatgtgcaagtctgtggtggcccctgccacggatggtggcctcaacctgacctccaccttcctcaggaaaaaccagtgtgagacccgaaccatgctgctgcagcccgcggggtccctcggctcctacagctaccggagtccccactggggcagcacctactccgtgtcagtggtggagaccgactacgaccagtacgcgctgctgtacagccagggcagcaagggccctggcgaggacttccgcatggccaccctctacatatccgaagcccgatccgaagcagtggccagagatcctcta

SEQ ID NO: 381327 - DNA, 1491 bp, Homo sapiens
cgacaaagaagccattctgcgtcctcttctccaagtcctagtagggtgacgtcgagaacaactccacggcgacaaggatcagtatctccctgctccaatgtggaatccagattgttgccaagatacagtcattctggctcctcctgcacacctccctcgctctcccacaccactggcaccaggccccggacacccgctctgctgcaggagaatggctactcatcacacgctgtggatgggactggccctgctgggggtgctgggcgacctgcaggcagcaccggaggcccaggtctccgtgcagcccaacttccagcaggacaagttcctggggcgctggttcagcgcgggcctcgcctccaactcgagctggctccgggagaagaaggcggcgttgtccatgtgcaagtctgtggtggcccctgccacggatggtggcctcaacctgacctccaccttcctcaggaaaaaccagtgtgagacccgaaccatgctgctgcagcccgcggggtccctcggctcctacagctaccggagtccccgtgagtggggcctccaccggccccctgggcccagcctgggggcgacacttgccgggacgactctgggccagccccctgccgcggagatccatggggtgggaggtgatggctgccccaccagcgtcagaggcaaaggccaggcctgggcgtgactacccatgcacaagtgttagggacagagagacccttcctccagggggttggatcctctctggagcccaccattgtcttgtcaggccccttccctgccctctggagttttccccacataagcagccccccaaggcccctccatatgcctcctcccaattctcctccccaggacccaggggtttcctcactcccacctggggaatggctcccacggggaaacctcttcacttccggttctggcagcgacttctgcggctgcaccaggaatcctggttttctgagcctggctcccccagattctggtttggggacagggttcacaggctgtgcaggcgagagcagggcactggctggagagcagccgggtgggggagcatcccgggccagccgaggggctgagtgcccccaaagcccacaggtgcaccccttccctgaagcagaggtgaggtttggggggctgagtccccgacagggttgtctcttgggttcccaactggggcagcacctactccgtgtcagtggtggagaccgactacgaccagtacgcgctgctgtacagccagggcagcaagggccctggcgaggacttccgcatggccaccctctacaataagtgcatgacggaacaataggactccccagggctgaagctgggatcccggccagccaggtgacccccacgctctggatgtctctgctctgttccttccccgagcccctgccccggctccccgccaaagcacccctgcccactcgggcttcatcctgcacaataaactccggaagcaagtcagta

SEQ ID NO: 381328 - DNA, 931 bp, Homo sapiens
cgacaaagaagccattctgcgtcctcttctccaagtcctagtagggtgacgtcgagaacaactccacggcgacaaggatcagtatctccctgctccaatgtggaatccagattgttgccaagatacagtcattctggctcctcctgcacacctccctcgctctcccacaccactggcaccaggccccggacacccgctctgctgcaggagaatggctactcatcacacgctgtggatgggactggccctgctgggggtgctgggcgacctgcaggcagcaccggaggcccaggtctccgtgcagcccaacttccagcaggacaagttcctggggcgctggttcagcgcgggcctcgcctccaactcgagctggctccgggagaagaaggcggcgttgtccatgtgcaagtctgtggtggcccctgccacggatggtggcctcaacctgacctccaccttcctcaggaaaaaccagtgtgagacccgaaccatgctgctgcagcccgcggggtccctcggctcctacagctaccggagtccccgtgagtggggcctccaccggccccctgggcccagcctgggggcgacacttgccgggacgactctgggccagccccctgccgcggagatccatggggtgggaggtgatggctgccccaccagcgtcagaggcaaaggccaggcctgggcgtgactacccatgcacaagtgttagggacagagagacccttcctccagggggttggatcctctctggagcccaccattgtcttgtcaggccccttccctgccctctggagttttccccacataagcagccccccaaggcccctccatatgcctcctcccaattctcctccccaggacccaggggtttcctcactcccacctggggaatggctccggggatcctcaagtagctagaaaacct

SEQ ID NO: 381329 - DNA, 851 bp, Homo sapiens
cgacaaagaagccattctgcgtcctcttctccaagtcctagtagggtgacgtcgagaacaactccacggcgacaaggatcagtatctccctgctccaatgtggaatccagattgttgccaagatacagtcattctggctcctcctgcacacctccctcgctctcccacaccactggcaccaggccccggacacccgctctgctgcaggagttcctggggcgctggttcagcgcgggcctcgcctccaactcgagctggctccgggagaagaaggcggcgttgtccatgtgcaagtctgtggtggcccctgccacggatggtggcctcaacctgacctccaccttcctcaggaaaaaccagtgtgagacccgaaccatgctgctgcagcccgcggggtccctcggctcctacagctaccggagtccccactggggcagcacctactccgtgtcagtggtggagaccgactacgaccagtacgcgctgctgtacagccagggcagcaagggccctggcgaggacttccgcatggccaccctctacagccgaacccagacccccagggctgagttaaaggagaaattcaccgccttctgcaaggcccagggcttcacagaggataccattgtcttcctgccccaaaccgactgcagtcctccatcctagcctttcggtcacacccctcaggactccccagggctgaagctgggatcccggccagccaggtgacccccacgctctggatgtctctgctctgttccttccccgagcccctgccccggctccccgccaaagcacccctgcccactcgggcttcatcctgcacaataaactccggaagcaagtcagta

SEQ ID NO: 381330 - DNA, 578 bp, Homo sapiens
cccaatggcagccgtgcccaatggcagccgtagccgtgcgggccgcacgcgttagtcgccctggccggcctcgtcacagggatacccacccaccatcccagggtctacaacatccacagccggaccgtcacccgctatcctgccaactctatcgtggtcgtaggaggctgtcctgtctgcagggttggggtgctggaggactgcttcaccttcctgggcatcttcctggccatcatcctcttccgcattgggccggctgccattgggcaatggcagccgcccaatggcagccgaacccagacccccagggctgagttaaaggagaaattcaccgccttctgcaaggcccagggcttcacagaggataccattgtcttcctgccccaaaccgataagtgcatgacggaacaataggactccccagggctgaagctgggatcccggccagccaggtgacccccacgctctggatgtctctgctctgttccttccccgagcccctgccccggctccccgccaaagcacccctgcccactcgggcttcatcctgcacaataaactccggaagcaagtcagta

SEQ ID NO: 381331 - DNA, 491 bp, Homo sapiens
ggggtgagtgttcaagtcagaacctccctcccgcagccccttcatgaggagccccctccatgggggacatggagaccaggcgcccactctgtgccaggccccagcagctcccaggatgtggggcttcagcctggtggggggcatagggtagagggtgcccatgggggatacaggggaaccaaccatactgggctcaggcacagcctcctaggggtggacagcctgctcttggcagaggtggagaaagaccctctctttgtttccagtgcccagggagaggtgggaggtgatgggggatctgtgcagtttgggggctcagtcaagacgagctctgcgttacgggaggaacaggaagcccagtgggaaaattggcctaagtctggggttctgacgacagcccctggcttctttcttggcagataagtgcatgacggaacaataggtgagccactccattcattcattcattcattcattcattcattcattca

SEQ ID NO: 381332 - DNA, 390 bp, Homo sapiens
aaaatatcattagtacagcaaatttttaatgaggctaagtctctgtttcctcacctgttacactggaaaacaataataatgatatcctgtgaaattcagagggttgctggtcaaaccatttaaaaagtgcacatgaaagcatgttggggagtctaatgctctgaattggtgtcagtattgattttgttaccgatggaaagaagacatgcagataacccaaaagaagcaattatcaaggctgattctgacagccattaagttaaaactctagatggagctttactaagttgtcttgacattaaaaagaaatgaaaacttaaaaaaaaatctgagatatattcataggtcagtctaataggaaaaagacagtggacattttccatcccatcg

SEQ ID NO: 381333 - DNA, 472 bp, Homo sapiens
tcatctgagtggtttggggaacttcaagcattagcctttgaaataggattagttgaagtcatgcagtgcttaggtcagtatcctggctcctaattgggaactgtttccaacaccccacctgctacatcttgcagtgtggcaccggacaggatgaaacaacaatcctctctggagaaggatcccccatcttcttaggcctcaagctatttctacagattactttttaagtgcaatgtccagcacaatcagagatcaccaggctaccaggagacaagacatgacgtgtgagaactaacaaaaggagtagaagatgccctatgtgattaaatgagataggacacatgatcatgctttctaaagcttttaaaaatactataaggttgaatggtagaaaatctcaaagacgaagatttagtgtttttgttctgcactgtgattcactgtgagaatttttatcttaaatagagaacta

SEQ ID NO: 381334 - DNA, 344 bp, Homo sapiens
gattcagcacttgaaccagccactttctaaccatgggcacttggcaagtgaactgattctctgagattcaacttcctcatctgtaaaatacaggtaatacctacttatataattatcatgacaataagagagaagcctactgactggtggataatagttcatttgcaaaaagatttaaatgccaactatgtgttgtgaagtagaatagatgctagatataaaaaattaaaagatatcgaagccattggggggtggtcaatgccctcatgtagttcatgttgtcctgggagtggggatacaacaagaaataaacaactcaataaaaagaaatcattaaaaatgtt

SEQ ID NO: 381335 - DNA, 214 bp, Homo sapiens
ctcaatttcttctcatcttttttatgctattattgtcatataagttacattcctatacattgtgtgtccaacacaaatttaaaattatgccattgtctcttaagtcatagaacaaaagagatacaaacaaaacatacatttatcctgtcttttatatttgcctatgcagttacctttaccagtgttccttatttcttcatgtggatctgagtta

SEQ ID NO: 381336 - DNA, 833 bp, Homo sapiens
tcagacaacatagtttctgttttcaaagttagaaggaaatgctgtaagctaatgcctggtaataatagttttgattctgactaaaaatctaaagtaaattattatagaggaagattatgaatacttaaatttaaaaagcagtaattactataatctgtcattgataggattcccaaatacaaatgatacttaacattgtttattgaagcaaattgttattatgattgttcttagggattaaatggggaaatataagcttaagtaaacctaaaaaataatggccagtagggcattggctacctatggggagtctgttagtattagatatcttctcagctttgccctgttcaatatttttattgaactggataaggagttaaaatacatactaatgaaatgtgtcagtgacaaaaagctaggaattctgtaagacttgtggatggtagaattagaatccaagaagatttcaaaagattgtagaaaattgactgattcaagaaattgtgaaaaaataaatgcatgtcccacccatgcgtttaaaaattcaactatataagtaaaagatgagagagacacagttttgaagcagcataagtaagacagattataatcaataaacccagcgtgagtcagcagtgtcacttgagtaacagaaaacaggtacatgggagtttctcctagtatgtgtgtgctattttgagtaagaatggcatatttggtgataatacccacagattagaccttcctgggaatattgcatttaattttcggtgtaagcatattaagtggagagtgtcttaagatagtatgggaaagagaagatgtaaaaaaaa

SEQ ID NO: 381337 - DNA, 415 bp, Homo sapiens
ccagtgtttcctggaatcaactctaaatcaaccacttgccctggaatccctgtcgcagggtctagttctgggagcaaaaactaagggggtaacaggtcctacttattatgggctgaattatgtcccccaccaaattcccatgttgaaatcctaactcccagtgcctcagaatgtatttagaaataaggcctttaaagaggttactaagttaaaatgaagctgttaggatgggccctactccaatatgacagatgtccttataagaggaaatttggatacacagagataccagggttgtgcgcacacagaggaaaggccatgtgaggacacagtgaggacagctgtctgcaaaccaccaaagaaaccaaacctgctgacaccttgaccttggaccgccagcctccagaattgtgag

SEQ ID NO: 381338 - DNA, 640 bp, Homo sapiens
gaaccttcactgcaatatgcctgtgagggcgcccccagtgacgtggcataataacacccttcaagttggccctgaagcggggtgaggtttccggacccagacctgcaaattgtgtcagcaccttggagcctccgaatctctcagcaggcagtggcatgtgtgcgtcttcatgggtgcgtgcatgtacatgcagcaagtttcgctgaagattcaagttagtgaagggcatttatgtcacagcactgtgaaaaatttaaaattaaatatgacatttcagttcataaaaattctttggcccatctggcccctggaatttctccctggcctcacttcccttcaggtcccagtcacctgtcagtctgctcagagccctcttcctcctcccccctccactctgcatgttcatcccccatgctcaaatttcccacaagttctgatgctgaacagattagccatcaaccagacagtctttgtgcttcctgtattctctggatacatttcgcctttgttctcatatattatatacatactacaatatctgtttttcaaagtcccagtgggaatagagcaagtcaaaggagggctgacacttgtaccagaatattaaagaccaggcaaccccatctccaggcccccatgg

SEQ ID NO: 381339 - DNA, 505 bp, Homo sapiens
ctggtaagtatgtaaggtaatgcatatgttaactagctcaatttagccattccacaatgtattaaagatccagagctgcctggagaaatggctcaatccaggtctcgaggaaaaaaactgttcaaaatgaacctggagtgtcatatccaagaagatagcagagaaggtcatgtcaaaaggactcaaggtgaacttaaagatggaacattttagccaggtgcagtggctcatgtctgcagttgcaacacttaaggatgccaaggcaagaggatcacttcaagccaggagtttgagaccagcctgagcaacatagcaagacctcatctctacacaaaatacaaaatttgccaggtgtggtggtgtgcacctgcccagctacttgggagggtggggtgggaggattgcttgagcccagggggttaaggttgcagtaagccatgatcttaccattgtactctctagcctgggcaacagagtgaaactctgtatttaaaaaaaaaaaaag

SEQ ID NO: 381340 - DNA, 419 bp, Homo sapiens
cattgcatgggcaatgaacagaatatgtgtcatgcagataagaataagtaaggagataactaaatgatttggtcaatgtctgcgtgaagaaacaaacaaacaaaaaagaactatttgggagccctgtttaagaagggggatatttacagactattgtgattctggggctgagaaagacactattcttgtgtttatacccctagagcctttgattgaactcgaaagctcctgtctgctttttgttttcattcagagtagtaaatacctttgtttccctttacaaataagaaaatagggagaggggcaaaagaaatagaaatgttctatctatctaagtttttaggatgtcaagaattttcctgacattaggagaaacttccaccctgtatggcaaacacctgtcaatgatggcactagca

SEQ ID NO: 381341 - DNA, 434 bp, Homo sapiens
tatgcgcctggcacaagtgtacactttaaccctgtgcagtcagcaaccattctaagaagcaagtctggactgccagccagccaggacctaggatgtgtccttggggttgctgccagcatcatcattgtcattgtcaccatcactgacatttattgagtgctcactgggaaccagccacggctccaagtgtttttgcctgtgaaccctccccagtctcacaattgcatgaggttggggccgtaactatcctcattaaataaccttgggaggtggtatcatgcccagggtcacagaaccccagaactgggttcacggcctttttatgatgctgctggcaatgtggagacacaggcctgcctcagggcagaaacagcccctgctttgaaggtgagtttgatcctgagaagaaagtgatagaggaggagagagagagg

SEQ ID NO: 381342 - DNA, 395 bp, Homo sapiens
tgggtaaatctgaaacagactatgagcagagaaatacaacagagactgaaaacttctgggaagaagcagggatgagcctcttagggaaaatcagaaatccaagaagagctgtatagacattaataatggtacttccacaagccagaagaaacacatccccagaaaaggactgagtgttcccacatgtaggaagctgaaggcccaagagatgtgaccagctcaacattccactggaggctttatgatcaaacaacaaactatcatgaatgcaggatgtgggcaaactcacgactgcgcctgacaccagaaggtttgctgaaggtaatcactccctggtgccatgctcattgaaattatctactgggacatctacagtctattgttcaaagaatgca

SEQ ID NO: 381343 - DNA, 257 bp, Homo sapiens
cctcacaccccaacctgcagccacacttggttcaatcccactgtctagcccgtctgactcagtagcccctcccgagggagcagggctaagcaaagctggtttccccactgcaaggcactgcaggccattctattctgggccttctcatccttcataaagtgaggaggcctgaacagggctccccactagccccgagagcacgcaattcctgaagatttccaggattttcttaatatcagttatggcttacggttatg

SEQ ID NO: 381344 - DNA, 352 bp, Homo sapiens
tacaatagtgtagtcactgtggaaaagtttgtcattgcctcacaagcaaaaagttaaacatagtttctatattgcccagcaattccattcataggtatatacccaattgaaaatctatgtccacacaaaaacttgtactcaagtgttcattgtagcttattcataataacaaagaagtggaaatccacaaaatatctatacaatgaaatatcgttcagccataaaaaggaatgaagtactataacagggataaacctagaaaacattatgctaagtgaaagaaaccacacacataaggccacataattgtttgattccatttatatgaaatgccaaagatagccaaatccat

SEQ ID NO: 381345 - DNA, 783 bp, Homo sapiens
cgagtggatacctgaggtcaggagttcgagaccagcctggccaacatggtgaaacccccatcttacttaaaacacaaaaattagctgggcgtggtggcaggcgcctgtagttccagccacccacgaggctgaggcaggagaatcgcttgaaccaggtaggcggagattgcagtgagccgagattgcgccactgcactccagcctgggtgacagggagactccatctcaaagaaaaaaaaagtgaccttttgcagcacatagctgatttgactgctttgtggagtacaccaagcaggttgtcaaactggtggtccctttactgaaattttatttccacaatggtgttggaggggcagcagcagaatccgtgccttttcttctggagtgtgtgagagtccgtggtcctgagtatctcacacagatgtggcaatttatgtgatgttctgattaagaccattggtacagaaacagtttcagatgtcctcagaaataatgcattgtttagcaaagtgcattgaagttatgggagatggatgccttaataatgaacactttgaagaacacctttgccacatgtcctcaggaccttctgagggctgtgtcatggggcatggtcactcatatttgactcaataaatttcttcaaatattttacaaaaacaaacaccgacataaaaaccaaaaacccaaaacgcaacaaaacaaaaaaggggggggcgcccaaaaaaaacccccggggggggccacactacaacaccccctttttttaaaaaaggcccccaa

SEQ ID NO: 381346 - DNA, 2491 bp, Homo sapiens
  misc_feature (818)..(818): n is a, c, g, or t
atctcactcccgccacagcttgggatcggtctctgctgttttacgtcctccacctcgggagcccccggtgactgtcacagcctcttgccctgtgatctgcaggttctgggagacgcacagctaagatgccaggacatcctggaagctgggaaaagatggagtttcactcttgttgcccaggctggagtgcattatcccaatctcggcttactacaacctccgcctcccaggttctgacaacaaaggagattgtgacatattgctgggcctaacactaaggtgatgttagttatatgctttggctgtgcccttggaaggcattgagacatactgctgtgcccagcaccaagatgatgtaacgtgactcttctgcttcaggcctgccaaaagaaaagattgtgacagatcactggacccagcacctaggtaggattgtgacatatatctggccaagcgtacagatgtaatgatgactgtcataccttgaagaagccaatagcagagagaatgttgctctcaggcttaggaaaatgaggaagtctttctgtacaaaagtcataaagaattactactctctcacatatattacgccctagtgtgttacagagaatgtcataacagggcccagcacacaagtgagattgtgtttgtcctatgcacactacaccaacctttacagttgtcaccctgacccattgacagagtctgctagtgaggttctgaattacatgtgaacacagtccgcagttggaattgtgactgtcatatgtgaacatctggctacagttgggatggtgactcatttctaaatccagctnataggaaggtgaagactctcctatctggactcagttggtgagagagatgttgactctcatatctgggcttagaaccacaggaaagattctggagctccttgtgcaaaggtcatagaggattatcaatcttgcatattgtataaagtcctcaggtgacacagagtgtctctcgaatgcacacccaggcaacagtaaagattgtcattctcccacataaacacatcccactgttgaagttctgaatttcacagaggctgtcaaaagttggataattgcctctcatgtgtggatctggtccacaggtgggttagtgacttccagaccaaggttcagcgcacatgtaaggctgtgactacactaagaagatacagtctgcagaagaaactgtggctcttttgcacacattctgtcaatcattgtgattgcgactcatgtacttagacccaacatacaggaggtgttgactttcatacctttagaacctggacatgtttggaatttctaatctaatccctggactttcctgcaggtgtgattgtgtgcattgcaaagcaccttagtgatttgactctcctgccttggccaagcacacaaatgagattgtgacatatggcttgactctgaacctccaagatgtgactcttttttccagccttggagctgcccacatgttgcattgtgacatattcctaagccctgcactcaggttatgtgactctccttttttgcttaggccctgaatatttttcatgttaagacatattactaggtccaacacctataaaatgggagactaccacctgggctctttctacagagggccttgtgacatacctctgcatcaataacctaggagatgtgatgctccatttttgcctgtacgtgccccacagaaaaaattgtggctggcccaggtaccaggtgatgtgtctctgctgcctgggcctggaccacagagagcattgttactgattgctgggctcagcacccaggtgatgtgactctgctgcctgtgtgctgctttcaggagaatcgcttgaaccaggtaggcggagattgcagtgagccgagattgcgccactgcactccagcctgggtgacagggagactccatctcaaagaaaaaaaaagtgaccttttgcagcacatagctgatttgactgctttgtggagtacaccaagcaggttgtcaaactggtggtccctttactgaaattttatttccacaatggtgttggaggggcagcagcagaatccgtgccttttcttctggagtgtgtgagagtccgtggtcctgagtatctcacacagatgtggcaatttatgtgatgttctgattaagaccattggtacagaaacagtttcagatgtcctcagaaataatgcattgtttagcaaagtgcattgaagttatgggagatggatgccttaataatgaacactttgaagaacacctttgccacatgtcctcaggaccttctgagggctgtgtcatggggcatggtcactcatatttgactcaataaatttcttcaaatattttacaaaaacaaacaccgacataaaaaccaaaaacccaaaacgcaacaaaacaaaaaaggggggggcgcccaaaaaaaacccccggggggggccacactacaacaccccctttttttaaaaaaggcccccaa

SEQ ID NO: 381347 - DNA, 2633 bp, Homo sapiens
  misc_feature (676)..(676): n is a, c, g, or t
catgggtccaaagcagcgcaaagttctcagagtaggttgcaactcatacagtcctcaagagagtgcccttacagggccaagcacacaggttctgacaacaaaggagattgtgacatattgctgggcctaacactaaggtgatgttagttatatgctttggctgtgcccttggaaggcattgagacatactgctgtgcccagcaccaagatgatgtaacgtgactcttctgcttcaggcctgccaaaagaaaagattgtgacagatcactggacccagcacctaggtaggattgtgacatatatctggccaagcgtacagatgtaatgatgactgtcataccttgaagaagccaatagcagagagaatgttgctctcaggcttaggaaaatgaggaagtctttctgtacaaaagtcataaagaattactactctctcacatatattacgccctagtgtgttacagagaatgtcataacagggcccagcacacaagtgagattgtgtttgtcctatgcacactacaccaacctttacagttgtcaccctgacccattgacagagtctgctagtgaggttctgaattacatgtgaacacagtccgcagttggaattgtgactgtcatatgtgaacatctggctacagttgggatggtgactcatttctaaatccagctnataggaaggtgaagactctcctatctggactcagttggtgagagagatgttgactctcatatctgggcttagaaccacaggaaagattctggagctccttgtgcaaaggtcatagaggattatcaatcttgcatattgtataaagtcctcaggtgacacagagtgtctctcgaatgcacacccaggcaacagtaaagattgtcattctcccacataaacacatcccactgttgaagttctgaatttcacagaggctgtcaaaagttggataattgcctctcatgtgtggatctggtccacaggtgggttagtgacttccagaccaaggttcagcgcacatgtaaggctgtgactacactaagaagatacagtctgcagaagaaactgtggctcttttgcacacattctgtcaatcattgtgattgcgactcatgtacttagacccaacatacaggaggtgttgactttcatacctttagaacctggacatgtttggaatttctaatctaatccctggactttcctgcaggtgtgattgtgtgcattgcaaagcaccttagtgatttgactctcctgccttggccaagcacacaaatgagattgtgacatatggcttgactctgaacctccaagatgtgactcttttttccagccttggagctgcccacatgttgcattgtgacatattcctaagccctgcactcaggttatgtgactctccttttttgcttaggccctgaatatttttcatgttaagacatattactaggtccaacacctataaaatgggagactaccacctgggctctttctacagagggccttgtgacatacctctgcatcaataacctaggagatgtgatgctccatttttgcctgtacgtgccccacagaaaaaattgtggctggcccaggtaccaggtgatgtgtctctgctgcctgggcctggaccacagagagcattgttactgattgctgggctcagcacccaggtgatgtgactctgctgcctgtgtgctgctttcaggagaaggttgtaacttattcctggctgagtatgcagtcacactcctgactgatctctgccctcagaaaaggttgtgtcaagccgggcccggtggctcatgccagtaatccccagcacttggggagaccgaggtgggtggatcgcctgaggagtttgggaccagatggccaacatggtgaaaccccgtctctactaaaaatacaaaaattaatcgggtgtggtggcgggcacctgtaaactcacaattctcttgcctcagcctccttagtagctagccaccacacctggctaatttttgtatttctattagagattgcagtgagccgagattgcgccactgcactccagcctgggtgacagggagactccatctcaaagaaaaaaaaagtgaccttttgcagcacatagctgatttgactgctttgtggagtacaccaagcaggttgtcaaactggtggtccctttactgaaattttatttccacaatggtgttggaggggcagcagcagaatccgtgccttttcttctggagtgtgtgagagtccgtggtcctgagtatctcacacagatgtggcaatttatgtgatgttctgattaagaccattggtacagaaacagtttcagatgtcctcagaaataatgcattgtttagcaaagtgcattgaagttatgggagatggatgccttaataatgaacactttgaagaacacctttgccacatgtcctcaggaccttctgagggctgtgtcatggggcatggtcactcatatttgactcaataaatttcttcaaatattttacaaaaacaaacaccgacataaaaaccaaaaacccaaaacgcaacaaaacaaaaaaggggggggcgcccaaaaaaaacccccggggggggccacactacaacaccccctttttttaaaaaaggcccccaa

SEQ ID NO: 381348 - DNA, 2707 bp, Homo sapiens
  misc_feature (750)..(750): n is a, c, g, or t
cagggtgcagcgcaatcagatgttgttagttgatgagaaaaagcacgaaatgatttctagttgattcattgaaataaaattttttccaaaggacaagaagctcccatcccagtaaggcaatgcaagaacctgaagcaaaatgcacctgaggcttacagtggggttctgacaacaaaggagattgtgacatattgctgggcctaacactaaggtgatgttagttatatgctttggctgtgcccttggaaggcattgagacatactgctgtgcccagcaccaagatgatgtaacgtgactcttctgcttcaggcctgccaaaagaaaagattgtgacagatcactggacccagcacctaggtaggattgtgacatatatctggccaagcgtacagatgtaatgatgactgtcataccttgaagaagccaatagcagagagaatgttgctctcaggcttaggaaaatgaggaagtctttctgtacaaaagtcataaagaattactactctctcacatatattacgccctagtgtgttacagagaatgtcataacagggcccagcacacaagtgagattgtgtttgtcctatgcacactacaccaacctttacagttgtcaccctgacccattgacagagtctgctagtgaggttctgaattacatgtgaacacagtccgcagttggaattgtgactgtcatatgtgaacatctggctacagttgggatggtgactcatttctaaatccagctnataggaaggtgaagactctcctatctggactcagttggtgagagagatgttgactctcatatctgggcttagaaccacaggaaagattctggagctccttgtgcaaaggtcatagaggattatcaatcttgcatattgtataaagtcctcaggtgacacagagtgtctctcgaatgcacacccaggcaacagtaaagattgtcattctcccacataaacacatcccactgttgaagttctgaatttcacagaggctgtcaaaagttggataattgcctctcatgtgtggatctggtccacaggtgggttagtgacttccagaccaaggttcagcgcacatgtaaggctgtgactacactaagaagatacagtctgcagaagaaactgtggctcttttgcacacattctgtcaatcattgtgattgcgactcatgtacttagacccaacatacaggaggtgttgactttcatacctttagaacctggacatgtttggaatttctaatctaatccctggactttcctgcaggtgtgattgtgtgcattgcaaagcaccttagtgatttgactctcctgccttggccaagcacacaaatgagattgtgacatatggcttgactctgaacctccaagatgtgactcttttttccagccttggagctgcccacatgttgcattgtgacatattcctaagccctgcactcaggttatgtgactctccttttttgcttaggccctgaatatttttcatgttaagacatattactaggtccaacacctataaaatgggagactaccacctgggctctttctacagagggccttgtgacatacctctgcatcaataacctaggagatgtgatgctccatttttgcctgtacgtgccccacagaaaaaattgtggctggcccaggtaccaggtgatgtgtctctgctgcctgggcctggaccacagagagcattgttactgattgctgggctcagcacccaggtgatgtgactctgctgcctgtgtgctgctttcaggagaaggttgtaacttattcctggctgagtatgcagtcacactcctgactgatctctgccctcagaaaaggttgtgtcaagccgggcccggtggctcatgccagtaatccccagcacttggggagaccgaggtgggtggatcgcctgaggagtttgggaccagatggccaacatggtgaaaccccgtctctactaaaaatacaaaaattaatcgggtgtggtggcgggcacctgtaaactcacaattctcttgcctcagcctccttagtagctagccaccacacctggctaatttttgtatttctattagagattgcagtgagccgagattgcgccactgcactccagcctgggtgacagggagactccatctcaaagaaaaaaaaagtgaccttttgcagcacatagctgatttgactgctttgtggagtacaccaagcaggttgtcaaactggtggtccctttactgaaattttatttccacaatggtgttggaggggcagcagcagaatccgtgccttttcttctggagtgtgtgagagtccgtggtcctgagtatctcacacagatgtggcaatttatgtgatgttctgattaagaccattggtacagaaacagtttcagatgtcctcagaaataatgcattgtttagcaaagtgcattgaagttatgggagatggatgccttaataatgaacactttgaagaacacctttgccacatgtcctcaggaccttctgagggctgtgtcatggggcatggtcactcatatttgactcaataaatttcttcaaatattttacaaaaacaaacaccgacataaaaaccaaaaacccaaaacgcaacaaaacaaaaaaggggggggcgcccaaaaaaaacccccggggggggccacactacaacaccccctttttttaaaaaaggcccccaa

SEQ ID NO: 381349 - DNA, 2864 bp, Homo sapiens
  misc_feature (676)..(676): n is a, c, g, or t
catgggtccaaagcagcgcaaagttctcagagtaggttgcaactcatacagtcctcaagagagtgcccttacagggccaagcacacaggttctgacaacaaaggagattgtgacatattgctgggcctaacactaaggtgatgttagttatatgctttggctgtgcccttggaaggcattgagacatactgctgtgcccagcaccaagatgatgtaacgtgactcttctgcttcaggcctgccaaaagaaaagattgtgacagatcactggacccagcacctaggtaggattgtgacatatatctggccaagcgtacagatgtaatgatgactgtcataccttgaagaagccaatagcagagagaatgttgctctcaggcttaggaaaatgaggaagtctttctgtacaaaagtcataaagaattactactctctcacatatattacgccctagtgtgttacagagaatgtcataacagggcccagcacacaagtgagattgtgtttgtcctatgcacactacaccaacctttacagttgtcaccctgacccattgacagagtctgctagtgaggttctgaattacatgtgaacacagtccgcagttggaattgtgactgtcatatgtgaacatctggctacagttgggatggtgactcatttctaaatccagctnataggaaggtgaagactctcctatctggactcagttggtgagagagatgttgactctcatatctgggcttagaaccacaggaaagattctggagctccttgtgcaaaggtcatagaggattatcaatcttgcatattgtataaagtcctcaggtgacacagagtgtctctcgaatgcacacccaggcaacagtaaagattgtcattctcccacataaacacatcccactgttgaagttctgaatttcacagaggctgtcaaaagttggataattgcctctcatgtgtggatctggtccacaggtgggttagtgacttccagaccaaggttcagcgcacatgtaaggctgtgactacactaagaagatacagtctgcagaagaaactgtggctcttttgcacacattctgtcaatcattgtgattgcgactcatgtacttagacccaacatacaggaggtgttgactttcatacctttagaacctggacatgtttggaatttctaatctaatccctggactttcctgcaggtgtgattgtgtgcattgcaaagcaccttagtgatttgactctcctgccttggccaagcacacaaatgagattgtgacatatggcttgactctgaacctccaagatgtgactcttttttccagccttggagctgcccacatgttgcattgtgacatattcctaagccctgcactcaggttatgtgactctccttttttgcttaggccctgaatatttttcatgttaagacatattactaggtccaacacctataaaatgggagactaccacctgggctctttctacagagggccttgtgacatacctctgcatcaataacctaggagatgtgatgctccatttttgcctgtacgtgccccacagaaaaaattgtggctggcccaggtaccaggtgatgtgtctctgctgcctgggcctggaccacagagagcattgttactgattgctgggctcagcacccaggtgatgtgactctgctgcctgtgtgctgctttcaggagaaggttgtaacttattcctggctgagtatgcagtcacactcctgactgatctctgccctcagaaaaggttgtgtcaagccgggcccggtggctcatgccagtaatccccagcacttggggagaccgaggtgggtggatcgcctgaggagtttgggaccagatggccaacatggtgaaaccccgtctctactaaaaatacaaaaattaatcgggtgtggtggcgggcacctgtaaactcacaattctcttgcctcagcctccttagtagctagccaccacacctggctaatttttgtatttctattagagatagggtttcccaatgttggtgaggctgatctcaaactcttgacctcaggtgatgcacctgcctcagcctcccaaagtgctgggattacaggtgtgagtgactgcgcctggcctgtaaaatatatcttgacctagatcacagatgcaatgattactctcatacctcacagtatttaataggagagatgctctctcttgctctcgctctcttttttctttttttttttttttgagacagttttgttcttgttacccactgcactccagcctgggtgacagggagactccatctcaaagaaaaaaaaagtgaccttttgcagcacatagctgatttgactgctttgtggagtacaccaagcaggttgtcaaactggtggtccctttactgaaattttatttccacaatggtgttggaggggcagcagcagaatccgtgccttttcttctggagtgtgtgagagtccgtggtcctgagtatctcacacagatgtggcaatttatgtgatgttctgattaagaccattggtacagaaacagtttcagatgtcctcagaaataatgcattgtttagcaaagtgcattgaagttatgggagatggatgccttaataatgaacactttgaagaacacctttgccacatgtcctcaggaccttctgagggctgtgtcatggggcatggtcactcatatttgactcaataaatttcttcaaatattttacaaaaacaaacaccgacataaaaaccaaaaacccaaaacgcaacaaaacaaaaaaggggggggcgcccaaaaaaaacccccggggggggccacactacaacaccccctttttttaaaaaaggcccccaa

SEQ ID NO: 381350 - DNA, 2013 bp, Homo sapiens
cagggtgcagcgcaatcagatgttgttagttgatgagaaaaagcacgaaatgatttctagttgattcattgaaataaaattttttccaaaggacaagaagctcccatcccagtaaggcaatgcaagaacctgaagcaaaatgcacctgaggcttacagtggggttctgacaacaaaggagattgtgacatattgctgggcctaacactaaggtgatgttagttatatgctttggctgtgcccttggaaggcattgagacatactgctgtgcccagcaccaagatgatgtaacgtgactcttctgcttcaggcctgccaaaagaaaagattgtgacagatcactggacccagcacctaggtgggttagtgacttccagaccaaggttcagcgcacatgtaaggctgtgactacactaagaagatacagtctgcagaagaaactgtggctcttttgcacacattctgtcaatcattgtgattgcgactcatgtacttagacccaacatacaggaggtgttgactttcatacctttagaacctggacatgtttggaatttctaatctaatccctggactttcctgcaggtgtgattgtgtgcattgcaaagcaccttagtgatttgactctcctgccttggccaagcacacaaatgagattgtgacatatggcttgactctgaacctccaagatgtgactcttttttccagccttggagctgcccacatgttgcattgtgacatattcctaagccctgcactcaggttatgtgactctccttttttgcttaggccctgaatatttttcatgttaagacatattactaggtccaacacctataaaatgggagactaccacctgggctctttctacagagggccttgtgacatacctctgcatcaataacctaggagatgtgatgctccatttttgcctgtacgtgccccacagaaaaaattgtggctggcccaggtaccaggtgatgtgtctctgctgcctgggcctggaccacagagagcattgttactgattgctgggctcagcacccaggtgatgtgactctgctgcctgtgtgctgctttcaggagaaggttgtaacttattcctggctgagtatgcagtcacactcctgactgatctctgccctcagaaaaggttgtgtcaagccgggcccggtggctcatgccagtaatccccagcacttggggagaccgaggtgggtggatcgcctgaggagtttgggaccagatggccaacatggtgaaaccccgtctctactaaaaatacaaaaattaatcgggtgtggtggcgggcacctgtaaactcacaattctcttgcctcagcctccttagtagctagccaccacacctggctaatttttgtatttctattagagattgcagtgagccgagattgcgccactgcactccagcctgggtgacagggagactccatctcaaagaaaaaaaaagtgaccttttgcagcacatagctgatttgactgctttgtggagtacaccaagcaggttgtcaaactggtggtccctttactgaaattttatttccacaatggtgttggaggggcagcagcagaatccgtgccttttcttctggagtgtgtgagagtccgtggtcctgagtatctcacacagatgtggcaatttatgtgatgttctgattaagaccattggtacagaaacagtttcagatgtcctcagaaataatgcattgtttagcaaagtgcattgaagttatgggagatggatgccttaataatgaacactttgaagaacacctttgccacatgtcctcaggaccttctgagggctgtgtcatggggcatggtcactcatatttgactcaataaatttcttcaaatattttacaaaaacaaacaccgacataaaaaccaaaaacccaaaacgcaacaaaacaaaaaaggggggggcgcccaaaaaaaacccccggggggggccacactacaacaccccctttttttaaaaaaggcccccaa

SEQ ID NO: 381351 - DNA, 866 bp, Homo sapiens
aaaaaaaggttgtgtcatattcctggctaaaaacccagatgatgtgactctcctctctccctattcataggcaggattgtaaaatttctttttttttttgaacatttcttttgtcacccaggctggagtgcagtggcatgatcttggctcactgcaacctccgcttcctgggttcaagcaattctcttgcctcagcctccttagtagctagccaccacacctggctaatttttgtatttctattagagattgcagtgagccgagattgcgccactgcactccagcctgggtgacagggagactccatctcaaagaaaaaaaaagtgaccttttgcagcacatagctgatttgactgctttgtggagtacaccaagcaggttgtcaaactggtggtccctttactgaaattttatttccacaatggtgttggaggggcagcagcagaatccgtgccttttcttctggagtgtgtgagagtccgtggtcctgagtatctcacacagatgtggcaatttatgtgatgttctgattaagaccattggtacagaaacagtttcagatgtcctcagaaataatgcattgtttagcaaagtgcattgaagttatgggagatggatgccttaataatgaacactttgaagaacacctttgccacatgtcctcaggaccttctgagggctgtgtcatggggcatggtcactcatatttgactcaataaatttcttcaaatattttacaaaaacaaacaccgacataaaaaccaaaaacccaaaacgcaacaaaacaaaaaaggggggggcgcccaaaaaaaacccccggggggggccacactacaacaccccctttttttaaaaaaggcccccaa

SEQ ID NO: 381352 - DNA, 2810 bp, Homo sapiens
  misc_feature (676)..(676): n is a, c, g, or t
catgggtccaaagcagcgcaaagttctcagagtaggttgcaactcatacagtcctcaagagagtgcccttacagggccaagcacacaggttctgacaacaaaggagattgtgacatattgctgggcctaacactaaggtgatgttagttatatgctttggctgtgcccttggaaggcattgagacatactgctgtgcccagcaccaagatgatgtaacgtgactcttctgcttcaggcctgccaaaagaaaagattgtgacagatcactggacccagcacctaggtaggattgtgacatatatctggccaagcgtacagatgtaatgatgactgtcataccttgaagaagccaatagcagagagaatgttgctctcaggcttaggaaaatgaggaagtctttctgtacaaaagtcataaagaattactactctctcacatatattacgccctagtgtgttacagagaatgtcataacagggcccagcacacaagtgagattgtgtttgtcctatgcacactacaccaacctttacagttgtcaccctgacccattgacagagtctgctagtgaggttctgaattacatgtgaacacagtccgcagttggaattgtgactgtcatatgtgaacatctggctacagttgggatggtgactcatttctaaatccagctnataggaaggtgaagactctcctatctggactcagttggtgagagagatgttgactctcatatctgggcttagaaccacaggaaagattctggagctccttgtgcaaaggtcatagaggattatcaatcttgcatattgtataaagtcctcaggtgacacagagtgtctctcgaatgcacacccaggcaacagtaaagattgtcattctcccacataaacacatcccactgttgaagttctgaatttcacagaggctgtcaaaagttggataattgcctctcatgtgtggatctggtccacaggtgggttagtgacttccagaccaaggttcagcgcacatgtaaggctgtgactacactaagaagatacagtctgcagaagaaactgtggctcttttgcacacattctgtcaatcattgtgattgcgactcatgtacttagacccaacatacaggaggtgttgactttcatacctttagaacctggacatgtttggaatttctaatctaatccctggactttcctgcaggtgtgattgtgtgcattgcaaagcaccttagtgatttgactctcctgccttggccaagcacacaaatgagattgtgacatatggcttgactctgaacctccaagatgtgactcttttttccagccttggagctgcccacatgttgcattgtgacatattcctaagccctgcactcaggttatgtgactctccttttttgcttaggccctgaatatttttcatgttaagacatattactaggtccaacacctataaaatgggagactaccacctgggctctttctacagagggccttgtgacatacctctgcatcaataacctaggagatgtgatgctccatttttgcctgtacgtgccccacagaaaaaattgtggctggcccaggtaccaggtgatgtgtctctgctgcctgggcctggaccacagagagcattgttactgattgctgggctcagcacccaggtgatgtgactctgctgcctgtgtgctgctttcaggagaaggttgtaacttattcctggctgagtatgcagtcacactcctgactgatctctgccctcagaaaaggttgtgtcaagccgggcccggtggctcatgccagtaatccccagcacttggggagaccgaggtgggtggatcgcctgaggagtttgggaccagatggccaacatggtgaaaccccgtctctactaaaaatacaaaaattaatcgggtgtggtggcgggcacctgtaaactcacaattctcttgcctcagcctccttagtagctagccaccacacctggctaatttttgtatttctattagagatagggtttcccaatgttggtgaggctgatctcaaactcttgacctcaggtgatgcacctgcctcagcctcccaaagtgctgggattacaggtgtgagtgactgcgcctggcctgtaaaatatatcttgacctagatcacagatgcaatgattactctcatacctcacagtatttaataggagagatgctctctcttgctctcgctctcttttttctttttttttttttttgagacagttttgttcttgttacccactgcactccagcctgggtgacagggagactccatctcaaagaaaaaaacaggttgtcaaactggtggtccctttactgaaattttatttccacaatggtgttggaggggcagcagcagaatccgtgccttttcttctggagtgtgtgagagtccgtggtcctgagtatctcacacagatgtggcaatttatgtgatgttctgattaagaccattggtacagaaacagtttcagatgtcctcagaaataatgcattgtttagcaaagtgcattgaagttatgggagatggatgccttaataatgaacactttgaagaacacctttgccacatgtcctcaggaccttctgagggctgtgtcatggggcatggtcactcatatttgactcaataaatttcttcaaatattttacaaaaacaaacaccgacataaaaaccaaaaacccaaaacgcaacaaaacaaaaaaggggggggcgcccaaaaaaaacccccggggggggccacactacaacaccccctttttttaaaaaaggcccccaa

SEQ ID NO: 381353 - DNA, 2270 bp, Homo sapiens
  misc_feature (676)..(676): n is a, c, g, or t
catgggtccaaagcagcgcaaagttctcagagtaggttgcaactcatacagtcctcaagagagtgcccttacagggccaagcacacaggttctgacaacaaaggagattgtgacatattgctgggcctaacactaaggtgatgttagttatatgctttggctgtgcccttggaaggcattgagacatactgctgtgcccagcaccaagatgatgtaacgtgactcttctgcttcaggcctgccaaaagaaaagattgtgacagatcactggacccagcacctaggtaggattgtgacatatatctggccaagcgtacagatgtaatgatgactgtcataccttgaagaagccaatagcagagagaatgttgctctcaggcttaggaaaatgaggaagtctttctgtacaaaagtcataaagaattactactctctcacatatattacgccctagtgtgttacagagaatgtcataacagggcccagcacacaagtgagattgtgtttgtcctatgcacactacaccaacctttacagttgtcaccctgacccattgacagagtctgctagtgaggttctgaattacatgtgaacacagtccgcagttggaattgtgactgtcatatgtgaacatctggctacagttgggatggtgactcatttctaaatccagctnataggaaggtgaagactctcctatctggactcagttggtgagagagatgttgactctcatatctgggcttagaaccacaggaaagattctggagctccttgtgcaaaggtcatagaggattatcaatcttgcatattgtataaagtcctcaggtgacacagagtgtctctcgaatgcacacccaggcaacagtaaagattgtcattctcccacataaacacatcccactgttgaagttctgaatttcacagaggctgtcaaaagttggataattgcctctcatgtgtggatctggtccacaggtgggttagtgacttccagaccaaggttcagcgcacatgtaaggctgtgactacactaagaagatacagtctgcagaagaaactgtggctcttttgcacacattctgtcaatcattgtgattgcgactcatgtacttagacccaacatacaggaggtgttgactttcatacctttagaacctggacatgtttggaatttctaatctaatccctggactttcctgcaggtgtgattgtgtgcattgcaaagcaccttagtgatttgactctcctgccttggccaagcacacaaatgagattgtgacatatggcttgactctgaacctccaagatgtgactcttttttccagccttggagctgcccacatgttgcattgtgacatattcctaagccctgcactcaggttatgtgactctccttttttgcttaggccctgaatatttttcatgttaagacatattactaggtccaacacctataaaatgggagactaccacctgggctctttctacagagggccttgtgacatacctctgcatcaataacctaggagatgtgatgctccatttttgcctgtacgtgccccacagaaaaaattgtggctggcccaggtaccaggtgatgtgtctctgctgcctgggcctggaccacagagagcattgttactgattgctgggctcagcacccaggtgatgtgactctgctgcctgtgtgctgctttcaggagaaggttgtaacttattcctggctgagtatgcagtcacactcctgactgatctctgccctcagaaaaggttgtgtcaagccgggcccggtggctcatgccagtaatccccagcacttggggagaccgaggtgggtggatcgcctgaggagtttgggaccagatggccaacatggtgaaaccccgtctctactaaaaatacaaaaattaatcgggtgtggtggcgggcacctgtaaactcacaattctcttgcctcagcctccttagtagctagccaccacacctggctaatttttgtatttctattagagatagggtttcccaatgttggtgaggctgatctcaaactcttgacctcaggtgatgcacctgcctcagcctcccaaagtgctgggattacaggtgtgagtgactgcgcctggcctgtaaaatatatcttgaccagcctgaccaacatggagaaattctgtccctactgaaaatacaaaattagccggatgtggtggtgcatgcctgtaatcccagctacttgggaggctgaggcaagagaattgcttgaacccagg

SEQ ID NO: 381354 - DNA, 418 bp, Homo sapiens
agagcatgtcatcataggacccagcaaacaggttaaatcatgtttcatgtaagcgctccctgacaatttttagaattgtcatcgtcacacatggtgaaagtccactgatgaggtcataattctcatgcacagatgcagtccacagttaaaattgtaactatcatatgtaaacgtggccacagttgagatggtgactcatttctaaacccagctcataggtgagtgaggactctcctctctggacccagccaattgaagagatgttgacccatacctagacttaggaccacataagatcatgggtccaaagcagcgcaaagttctcagagtaggttgcaactcatacagtcctcaagagagtgcccttacagggccaagcacacaggtgagattgtcaaacttacattcacacccagtc

SEQ ID NO: 381355 - DNA, 3305 bp, Homo sapiens
agggttctcttggagccacctctcagcctgcctctgcagctttgtcggttaactgttcctacaaatgaaagacacaagccaataaagccagtgagaaaggagcttaccaaaggcagtgtacgaagaaggttcctgggagactgtcagaaatgagtttttcactgaacttcaccctgccggcgaacacaacgtcctctcctgtcacaggtgggaaagaaacggactgtgggccctctcttggattagcggcgggcataccattgctggtggccacagccctgctggtggctttactatttactttgattcaccgaagaagaagcagcattgaggccatggaggaaagtgacagaccatgtgaaatttcagaaattgatgacaatcccaagatatctgagaatcctaggagatcacccacacatgagaagaatacgatgggagcacaagaggcccacatatatgtgaagactgtagcaggaagcgaggaacctgtgcatgaccgttaccgtcctactatagaaatggaaagaaggaggggattgtggtggcttgtgcccagactgagcctggaatgatgcagctcagtcaaggagcagcagacctggcactggaacagggttgaaaacccagggttttgtacttggagaggaaagatgccaagctgcttcttaatcaatccaaatttcatttacagctctggaacactttggggctgatttgtctctttaggggacatccccaacatggttaattccaactctcagatcttgtgctttagttagtacatgtgactcaccagatggggtccttagatcctattcctgctcccagtgggaatttgcttttctttgtcattttgggaaaggggcttggtttctgagtgtcttgccttctcatctttttttttcatatcctttttctcaaaaaagccatcagatctgactttcatggaagtgttgctgaggtcagcctggtgcaagttgggatacaaatgaaacttatgcaggatgtgtgagaggaagcagttaattgtttctgaatatctcagggtaggaaccatgtggagccacacattccctgaccacagggaagcacctggctcaatcatgtcacacagcagtggaaagaatacggactcttaagtcacacctaccactgagcagctgtacgactttggagaagttgtttaacattttcaagcctcagtttttgcttttttaaaggaggggaaatatttgcctcatgtcataattgaaaagattaaataagaaataaagggaagtgtctgctacttagttgccagtcaaaatgttagttctctctctctaccaccttcctcctacctcttcccatattgcttgcctgataaaacagctaatcaccagcatttgttccccatagtcacagggccacacaagggaacatttaggacaaactttctccatggcctatgatccaaattgttatctaaagatgattctaggtgttgctggtagtatgtgaatcttccaatctaggtgtgatcgtgtcctcatatgaatcaggaaaaggcagtttcttacaagttccgaattccaaatacagagactggtggtgttacatttaaccttaaagatgttaatgttgatggaaattcatgtttcatattaaaacaacactttgtctttacaatgaaacattttgcttaatttttaaagtaagacattatgatacctctgatggcagttcctcaaataactttaacttttgtgctttagggatagttgttaaagttacaacttcttttattttattttttaaaggcttcagattaaacaagagcccttaagcccacgcatagcattgccgcttcagcttgctgaggactgtctccaaggaggccaaatggaaaaggagaggctacttcaagtggtgttggcccattgagcctattgggcaaactataaccaggttgccttattttgggtggattactccaggagaggccaccctccagctttctcttatcccagtaactcctcttcccattttccaatccatccccagccattttttttttttcttctgtactcttcttttgccttcaatatgagtttcatttcctctgtgtctttgggcagacttccttctaacatgtgtcagctaccctaccacacacctggcctaggagacacatcattcattgctcctacttgtgtctgtaatcagagagtatttaaggagggcagttctgcgacggactgtgtgtgtgttgaaagtaaagatggggggccgcggggaaggcaagagtttttccaaaagattattagaaatgagggctgtatctactctgtggagtagaaccaagtctacttggagaaaagaaccaagtccttgggatatctaggggaaagctgtttggcagaaagaaaaatcaagaggacccaaggggatggagacaggaccacaggaatgggccaaggagcaacgtgcctgccattcagccagcttgggacaggctttcactttcactcccatgaggaggcttccaggcagcctggttcccccatgtatagccattgccctctagcaggccaggcctcccagtgggaaggcctgggtccagggcatcttaagttcatccagcagctccatgagccacacagatatcctagaaaatattcctttctcacacagggcttctgattactcagaaacatgcccctcttccctgaataaccaagaacatgttctatgaacccaatctctgccacatgtcaatacctgctcttcaaagccccttttgaaactcagttttgtgccaagtcctctggatctaattaccttaaacaagcagatttagccatttttaaacagacattcccagtcatcctggtgcttgtacttctcctacatgtcatgaaggaccttggatttactgagaactcagccgtggccttggctttgatacttataggtgtcagcccttgggccgattgttgatcatccagagcctcagttctgtacttgtaaagtggagacagcagttctcatcctccatccttttagcccatggggtggttgtaaggctggattgaaatatgcatgtgactaagccatgtagctataaagtgagggatgacttgtgttttggatcacttattttaattctacttataatccacggcttagaatatttaaacattgtttctattaaactagaaaggttcagcatttctgtcatttacttctgctatgatacacaagaacttatgttggaatgaagtgaaaagtaaaatggccattcttatgaacctacaaaaaaa

SEQ ID NO: 381356 - DNA, 1728 bp, Homo sapiens
agaagggagcgagagcccctgagcgcggcggcagcggcggcctggcccttccagagggccagagccagggacatgcgggcgcccgggactccgcgttccgcgcggcccggcgcctgagcgcctccgttccccgtcccggagctgccggcggcatgatccgacacgccggggcgcccgcgcgcggggaccccacgggtccggttccagttgttggcaaaggagaggaagaggaagaggaagatggcatgcggctttgtctgccagccaacccgaaaaactgccttcctcaccgccggggcatcagcatcctggagaagctcatcaaaacatgcccggtgtggctgcagctgagtctgggccaggcagaggtggccaggatcctgcaccgggtggtggctgggatgttcctggttcgccgggacagcagctcgaagcagctggtgctctgtgtccactttccttctctgaacgaaagctcggccgaggtgctcgaatacaccattaaggaagaaaagtcgatattgtacctggaaggctcggctcttgtgtttgaggacatcttcagattgattgcgttctactgtgtcagtagagacttactgcccttcacactgcggctaccccaggccatccttgaggccagcagcttcacgggccattcacacaggcggtgaaagtcagcctgaggatttagcccagaggtgatggagcccctgaagggtgtgtgtggagggcagaggagaggggacaagacagggggacggctcaggaggctgcggcggggcaaggccagtacccggtggccttcagcagagcaaaggaggtggagcacaagctggacctctgctggaaacagcaggaatgacttcagccttggggcagctggctggcaggatgcagacacaccatgggtcctgttaaggccaaatctgcttcgggcaccaagatgtcaagaggtgctagacttggagtttgtcctggcaggtgatatggcaaagtgtcaccagagcctgccgtgggcacgaatgtgtggggcagagaggtttccaggcagtgagaggtggcagctgagctgagccaccaaggatgggaagggctggagctacagagatggagagaagggcccttcagcctttgggaacagggtcagcatccacggcaatggtgccattccagacactgcatgtgtcagcctcatgactacaaaccagaccagatgggcttggctattgtcatgcccaagaagccacagctcagagaggtttggtgacctggccatgaggacagagctggtagtagagctgggcttcagacccaggcagcccagccctttccatgagctgagtctctgcctctgcctctcccttccaagctctgcccatgtgtgtggccagtcagatggtgaaggaacttaaaccacataaaaaggccagacagggcggggtgtggtggctcacacctgtaatcccagcactttgggaggccgaggagggcagatcacttgagatcaggagttcaagaccagcctggccaacatggtgaaacccccctctctacaaacaatacaaaaattagccaggcatggtggtgggtacctgtaatcccagctactcaggaggctgaggcaggagaattgcttgaaacccgggaagtggaggttgcagtgagccaagatcacactactgcactccagcctgggcaacagaacaagattctgtctcaaaaaac

SEQ ID NO: 381357 - DNA, 645 bp, Homo sapiens
gttgtcctcctcaccttcacccaaatctttaattcacggagctgcatccccttctttggtttcagatgttcctggttcgccgggacagcagctcgaagcagctggtgctctgtgtccactttccttctctgaacgaaagctcggccgaggtgctcgaatacaccattaaggaagaaaagtcgacattccccttttcagcctccaacactggagttgggccaggaaaaaaatacatcatgagataatttaactccaagaactttattgtaaaacttcagtggtgaatttcttttaaaaaaaatagatcttgaatcatagtggtgtattcttagcctcctttttttttcacttagacattttattatgagctttctctgtgttattgaacatttcaaagactttgcaaccaattaaatatgtgttggatggcttctgaaggaagacagtatgacaggcttgaagacagggttcttggcattgaaccagtgggagagacaggctcatgcatacataaccagaaatacaagtcgttcgaactgtcctaaatgttagaatgtaagcatgtactctgggtcatcaaaaccaatgacactcagggaaatccacccaggcctactttgggccttggacgatggaaaatatttg

SEQ ID NO: 381358 - DNA, 3696 bp, Homo sapiens
agaagggagcgagagcccctgagcgcggcggcagcggcggcctggcccttccagagggccagagccagggacatgcgggcgcccgggactccgcgttccgcgcggcccggcgcctgagcgcctccgttccccgtcccggagctgccggcggcatgatccgacacgccggggcgcccgcgcgcggggaccccacgggtccggttccagttgttggcaaaggagaggaagaggaagaggaagatggcatgcggctttgtctgccagccaacccgaaaaactgccttcctcaccgccggggcatcagcatcctggagaagctcatcaaaacatgcccggtgtggctgcagctgagtctgggccaggcagaggtggccaggatcctgcaccgggtggtggctgggatgttcctggttcgccgggacagcagctcgaagcagctggtgctctgtgtccactttccttctctgaacgaaagctcggccgaggtgctcgaatacaccattaaggaagaaaagtcgatattgtacctggaaggctcggctcttgtgtttgaggacatcttcagattgattgcgttctactgtgtcagtagagacttactgcccttcacactgcggctaccccaggccatccttgaggccagcagcttcacggaccttgagaccatcgccaacctgggtctgggtttctgggactcctcgctgaatcctccacaagaaagagggaagccagcagagcccccaagagaccgggcccccggattccccctagtctccagcctcaggcccacagcccatgacgcaaactgtgcctgtgaaatcgagctgtcggtaggaaatgaccgcctgtggtttgtgaatcctattttcatcgaggactgcagcagcgccctgcccaccgaccagccacctcttggaaattgccctgcacgccctttgccgcccacctctgatgccacctcacccacctccaggtcccccagaccatccgaaccagccgcccatgatgacctgcgagagactcccatgccccactgcaggcctgggccccctcagggaggaagcgatgaagccaggggcagcctccagtcccttgcagcaggtccccgccccgccactgcctgcgaagaagaaccttcccactgcccctcccagacgccgcgtttccgagagggtgtccttagaagaccaaagtccggggatggcggcagagggggaccagctcagcctgcctccccaagggacctcagacggccctgaggacacgccccgggagagcacggagcaaggccaggacacagaggtgaaagccagcgatcctcacagcatgccagagctgcccaggacagccaaacaacccccagtcccgccccccaggaaaaaacggatctctcgacaactggcctcgaccctcccagctcccttagagaacgctgagctctgcacacaggcgatggccttggagacacccacgccgggtccacccagagagggccaaagccctgcttctcaggctgggactcagcaccctcctgcccaggccactgcccattcccagagctctccagagttcaagggctccctggcctccctctcagacagcttgggggtgtctgtcatggccaccgaccaggactcctactccaccagcagcacggaggaggagctggagcagttcagcagccccagcgtgaagaagaagccctccatgatcctgggcaaggctcggcaccggctgagctttgccagtttcagcagcatgttccacgctttcctctccaacaaccgcaagctgtacaagaaggtggtggagctggcgcaggacaagggctcgtactttggcagcctggtgcaggactacaaggtgtacagcctggagatgatggcgcgccagacctccagcacggagatgctgcaggagattcgcaccatgatgacccagctcaagagctacctgctgcagagcaccgagctcaaggccctggtggaccccgccctgcactccgaggaggagctcgaagcaattgtagagtctgccttgtacaaatgtgtcctgaagcccctgaaggaagccatcaactcatgcctgcatcagatccacagcaaggatggttcgctgcagcagctcaaggagaaccagttagtgatcctggccaccaccaccactgacctaggtgtgaccaccagcgtgccggaggtgcccatgatggagaagatcctgcagaagttcaccagcatgcacaaggcctactcacctgagaagaagatctccatcctgctcaagacctgcaaactcatctacgactccatggccctcggcaacccagggaagccctatggggcggatgacttcctgcctgtgctcatgtatgtgctggcccgcagcaacctcacggagatgcttctcaatgtggagtacatgatggagctcatggaccccgccctgcagctgggggagggttcctactatctgaccaccacctacggggccctggagcacatcaagagctacgacaagatcacggtgacccggcagctgagtgtggaggtgcaggactccatccaccgctgggagcgccggcgtactctcaacaaggcccgggcctcccgctcctccgtacaggacttcatctgcgtgtcgtacctggagcccgagcagcaggcgcggacgctggcgtcgcgggcggacacccaggcccaggcgctgtgcgcgcagtgcgcggagaagttcgcggtggagcggccgcaggcgcaccggctgttcgtgctggtggacgggcgctgcttccagctggcggacgacgcgctgccgcactgcatcaagggctacctgctgcgcagcgagcccaagcgcgacttccactttgtctaccggcccctggacggtggtggcggcggcggcggcgggagcccgccctgcctggtggtgcgggagcccaacttcctgtgaggccctcccggggcgcctcccctcacccccaggcgcacgtctggccccgcctctggctgcgcactcccgaccgcgacgtccacgcagcagagggacatgggccattccatgacgtgcccaggccaacgtcgcaggacagttgtgaaaataacatgacgctcgtccaaggccacttcctgagggcaagtcctaatagccctgagacaccgagacggcatgttcttcattagacggaaagggaaactgaggctcaggagagaggcgctccaggccgctgcagccaacaaaccggcgccctcttcacacgtagctcctcaggccattccccatgagtcccccacacccaccccatcctcggtctttgcaaagaagggcccgagcttagtttccccaggactggcctaggaaggagcaccggccacagctgctccccgtgccactcagggtggacccagcatctcaggagcacctcagggtgtcggttaagagacaggcctccacccctgcaccagagcctgctcttagctcccggtgcccccagaccccgcagctctgtgcccggcaagaagcagctagacacacgccagggcgccaagcacggccagctccgcggacccatggacaagcccagccccgcctcagggaaaacagggcctttccctacaggacacgccccagagctgtggcagattgcaggagccatcgtgtggggagaatttaataaaagcccttttgaaaatgaaaaat

SEQ ID NO: 381359 - DNA, 3878 bp, Homo sapiens
agaagggagcgagagcccctgagcgcggcggcagcggcggcctggcccttccagagggccagagccagggacatgcgggcgcccgggactccgcgttccgcgcggcccggcgcctgagcgcctccgttccccgtcccggagctgccggcggcatgatccgacacgccggggcgcccgcgcgcggggaccccacgggtccggttccagttgttggcaaaggagaggaagaggaagaggaagatggcatgcggctttgtctgccagccaacccgaaaaactgccttcctcaccgccggggcatcagcatcctggagaagctcatcaaaacatgcccggtgtggctgcagctgagtctgggccaggcagaggtggccaggatcctgcaccgggtggtggctgggatgttcctggttcgccgggacagcagctcgaagcagctggtgctctgtgtccactttccttctctgaacgaaagctcggccgaggtgctcgaatacaccattaaggaagaaaagtcgatattgtacctggaaggctcggctcttgtgtttgaggacatcttcagattgattgcgttctactgtgtcagtagagacttactgcccttcacactgcggctaccccaggccatccttgaggccagcagcttcacggaccttgagaccatcgccaacctgggtctgggtttctgggactcctcgctgaatcctccacaagaaagagggaagccagcagagcccccaagagaccgggcccccggattccccctagtctccagcctcaggcccacagcccatgacgcaaactgtgcctgtgaaatcgagctgtcggtaggaaatgaccgcctgtggtttgtgaatcctattttcatcgaggactgcagcagcgccctgcccaccgaccagccacctcttggaaattgccctgcacgccctttgccgcccacctctgatgccacctcacccacctccaggtcccccagaccatccgaaccagccgcccatgatgacctgcgagagactcccatgccccactgcaggcctgggccccctcagggaggaagcgatgaagccaggggcagcctccagtcccttgcagcaggtccccgccccgccactgcctgcgaagaagaaccttcccactgcccctcccagacgccgcgtttccgagagggtgtccttagaagaccaaagtccggggatggcggcagagggggaccagctcagcctgcctccccaagggacctcagacggccctgaggacacgccccgggagagcacggagcaaggccaggacacagaggtgaaagccagcgatcctcacagcatgccagagctgcccaggacagccaaacaacccccagtcccgccccccaggaaaaaacggatctctcgacaactggcctcgaccctcccagctcccttagagaacgctgagctctgcacacaggcgatggccttggagacacccacgccgggtccacccagagagggccaaagccctgcttctcaggctgggactcagcaccctcctgcccaggccactgcccattcccagagctctccagagttcaagggctccctggcctccctctcagacagcttgggggtgtctgtcatggccaccgaccaggactcctactccaccagcagcacggaggaggagctggagcagttcagcagccccagcgtgaagaagaagccctccatgatcctgggcaaggctcggcaccggctgagctttgccagtttcagcagcatgttccacgctttcctctccaacaaccgcaagctgtacaagaaggtggtggagctggcgcaggacaagggctcgtactttggcagcctggtgcaggactacaaggtgtacagcctggagatgatggcgcgccagacctccagcacggagatgctgcaggagattcgcaccatgatgacccagctcaagagctacctgctgcagagcaccgagctcaaggccctggtggaccccgccctgcactccgaggaggagctcgaagcaattgtagagtctgccttgtacaaatgtgtcctgaagcccctgaaggaagccatcaactcatgcctgcatcagatccacagcaaggatggttcgctgcagcagctcaaggagaaccagttagtgatcctggccaccaccaccactgacctaggtgtgaccaccagcgtgccggaggtgcccatgatggagaagatcctgcagaagttcaccagcatgcacaaggcctactcacctgagaagaagatctccatcctgctcaagacctgcaaactcatctacgactccatggccctcggcaacccagcaacctcacggagatgcttctcaatgtggagtacatgatggagctcatggaccccgccctgcagctgggggagggttcctactatctgaccaccacctacggggccctggagcacatcaagagctacgacaagatcacggtgacccggcagctgagtgtggaggtgcaggactccatccaccgctgggagcgccggcgtactctcaacaaggcccgggcctcccgctcctccgtacagggactccgagacgcgccttaattcatctcccagaactgtcggcccagctgggaagccaggcagggagggggacgggccccccgcaggctcgcggcagagacgggaaaggcgcaggtgccggactcgcagacagcttggcgcccgccacccgctatccatccagggaggggcctgggccgggagagggcgcctgaggagacagggccccgccgtgaccacaggcccctcgcgtctccgcaggacttcatctgcgtgtcgtacctggagcccgagcagcaggcgcggacgctggcgtcgcgggcggacacccaggcccaggcgctgtgcgcgcagtgcgcggagaagttcgcggtggagcggccgcaggcgcaccggctgttcgtgctggtggacgggcgctgcttccagctggcggacgacgcgctgccgcactgcatcaagggctacctgctgcgcagcgagcccaagcgcgacttccactttgtctaccggcccctggacggtggtggcggcggcggcggcgggagcccgccctgcctggtggtgcgggagcccaacttcctgtgaggccctcccggggcgcctcccctcacccccaggcgcacgtctggccccgcctctggctgcgcactcccgaccgcgacgtccacgcagcagagggacatgggccattccatgacgtgcccaggccaacgtcgcaggacagttgtgaaaataacatgacgctcgtccaaggccacttcctgagggcaagtcctaatagccctgagacaccgagacggcatgttcttcattagacggaaagggaaactgaggctcaggagagaggcgctccaggccgctgcagccaacaaaccggcgccctcttcacacgtagctcctcaggccattccccatgagtcccccacacccaccccatcctcggtctttgcaaagaagggcccgagcttagtttccccaggactggcctaggaaggagcaccggccacagctgctccccgtgccactcagggtggacccagcatctcaggagcacctcagggtgtcggttaagagacaggcctccacccctgcaccagagcctgctcttagctcccggtgcccccagaccccgcagctctgtgcccggcaagaagcagctagacacacgccagggcgccaagcacggccagctccgcggacccatggacaagcccagccccgcctcagggaaaacagggcctttccctacaggacacgccccagagctgtggcagattgcaggagccatcgtgtggggagaatttaataaaagcccttttgaaaatgaaaaat

SEQ ID NO: 381360 - DNA, 2193 bp, Homo sapiens
gcccagagctggacagtcactagcaggtggatagtgccctgggaggcctaatggaggacaaggagccctgaggcagccactaagacggagggagtgggccgggcttttcccctcctggaagaaatgggcggtccccgtgaagctcttgacaggagcccggcctcgcctaagccctagccaccagttgccatcacggtctccgccgagccgggatcctcagccgcttcccgcgcaggcctgctgttcccaatccggccacaaaggggcagccccgcgcgcagcctctctgcctgcagccctgagccccggggaaggcgaggccgctccgggccggagcttccagcgcctgctcgcccatttatgggaggcgggcgctatccccactttacagccggggctcgacgaatcaaggccacacaggcagtgggagcaaaggcaaagcccggcaggtgtggggctgggtccctaggggtggaggacggcgggcgggcgccctgctcgtgctgcgagtgcccagccccagcccgcaggcgtcgcctcgccttgcccgccctgctcatgccgggccttccccaccgactgcgcccagcctccttcacccggtcccctcccgctttaccaatccctgccccacgcagctcctcagagccccagggctcttgcagccctaaggggctggactgtgttgcccgcccgcactatgggatgcccgggcgggctcgcacctcccttcttatctgtgctgccctccgtgcccagcattgcgcctggggtgcagggaactcacctggagggagggagggagggaatgaatgaatgaatgaatgatggggagcctgtggaccagcagccaggggacgcgccggctcctctttgcagggactccgagacgcgccttaattcatctcccagaactgtcggcccagctgggaagccaggcagggagggggacgggccccccgcaggctcgcggcagagacgggaaaggcgcaggtgccggactcgcagacagcttggcgcccgccacccgctatccatccagggaggggcctgggccgggagagggcgcctgaggagacagggccccgccgtgaccacaggcccctcgcgtctccgcaggacttcatctgcgtgtcgtacctggagcccgagcagcaggcgcggacgctggcgtcgcgggcggacacccaggcccaggcgctgtgcgcgcagtgcgcggagaagttcgcggtggagcggccgcaggcgcaccggctgttcgtgctggtggacgggcgctgcttccagctggcggacgacgcgctgccgcactgcatcaagggctacctgctgcgcagcgagcccaagcgcgacttccactttgtctaccggcccctggacggtggtggcggcggcggcggcgggagcccgccctgcctggtggtgcgggagcccaacttcctgtgaggccctcccggggcgcctcccctcacccccaggcgcacgtctggccccgcctctggctgcgcactcccgaccgcgacgtccacgcagcagagggacatgggccattccatgacgtgcccaggccaacgtcgcaggacagttgtgaaaataacatgacgctcgtccaaggccacttcctgagggcaagtcctaatagccctgagacaccgagacggcatgttcttcattagacggaaagggaaactgaggctcaggagagaggcgctccaggccgctgcagccaacaaaccggcgccctcttcacacgtagctcctcaggccattccccatgagtcccccacacccaccccatcctcggtctttgcaaagaagggcccgagcttagtttccccaggactggcctaggaaggagcaccggccacagctgctccccgtgccactcagggtggacccagcatctcaggagcacctcagggtgtcggttaagagacaggcctccacccctgcaccagagcctgctcttagctcccggtgcccccagaccccgcagctctgtgcccggcaagaagcagctagacacacgccagggcgccaagcacggccagctccgcggacccatggacaagcccagccccgcctcagggaaaacagggcctttccctacaggacacgccccagagctgtggcagattgcaggagccatcgtgtggggagaatttaataaaagcccttttgaaaatgaaaaat

SEQ ID NO: 381361 - DNA, 981 bp, Homo sapiens
agaagggagcgagagcccctgagcgcggcggcagcggcggcctggcccttccagagggccagagccagggacatgcgggcgcccgggactccgcgttccgcgcggcccggcgcctgagcgcctccgttccccgtcccggagctgccggcggcatgatccgacacgccggggcgcccgcgcgcggggaccccacgggtccggttccagttgttggcaaaggagaggaagaggaagaggaagatggcatgcggctttgtctgccagccaacccgaaaaactgccttcctcaccgccggggcatcagcatcctggagaagctcatcaaaacatgcccggtgtggctgcagctgagtctgggccaggcagaggtggccaggatcctgcaccgggtggtggctgggatgttcctggttcgccgggacagcagctcgaagcagctggtgctctgtgtccactttccttctctgaacgaaagctcggccgaggtgctcgaatacaccattaaggaagaaaagtcgacattccccttttcagcctccaacactggagttgggccaggaaaaaaatacatcatgagataatttaactccaagaactttattgtaaaacttcagtggtgaatttcttttaaaaaaaatagatcttgaatcatagtggtgtattcttagcctcctttttttttcacttagacattttattatgagctttctctgtgttattgaacatttcaaagactttgcaaccaattaaatatgtgttggatggcttctgaaggaagacagtatgacaggcttgaagacagggttcttggcattgaaccagtgggagagacaggctcatgcatacataaccagaaatacaagtcgttcgaactgtcctaaatgttagaatgtaagcatgtactctgggtcatcaaaaccaatgacactcagggaaatccacccaggcctactttgggccttggacgatggaaaatatttg

SEQ ID NO: 381362 - DNA, 781 bp, Homo sapiens
catgcttgagcccacgggcacagtttgtgagatgtaatcgagaagatgctgatcaccagttttcagcagagtttgtgaaaggcagcagaatcccgctccccatgcttgccttcgggaccctcactggagcagaaccattgcttagagcgtgagaaggagaagcgagtgtccgtcaacatgctggctctgggtgagacctcgatgttcctggttcgccgggacagcagctcgaagcagctggtgctctgtgtccactttccttctctgaacgaaagctcggccgaggtgctcgaatacaccattaaggaagaaaagtcgacattccccttttcagcctccaacactggagttgggccaggaaaaaaatacatcatgagataatttaactccaagaactttattgtaaaacttcagtggtgaatttcttttaaaaaaaatagatcttgaatcatagtggtgtattcttagcctcctttttttttcacttagacattttattatgagctttctctgtgttattgaacatttcaaagactttgcaaccaattaaatatgtgttggatggcttctgaaggaagacagtatgacaggcttgaagacagggttcttggcattgaaccagtgggagagacaggctcatgcatacataaccagaaatacaagtcgttcgaactgtcctaaatgttagaatgtaagcatgtactctgggtcatcaaaaccaatgacactcagggaaatccacccaggcctactttgggccttggacgatggaaaatatttg

SEQ ID NO: 381363 - DNA, 3063 bp, Homo sapiens
cacctagtccctggcacagactgaccccctgcccctctcttgcttccacaggtttctgggactcctcgctgaatcctccacaagaaagagggaagccagcagagcccccaagagaccgggcccccggattccccctagtctccagcctcaggcccacagcccatgacgcaaactgtgcctgtgaaatcgagctgtcggtaggaaatgaccgcctgtggtttgtgaatcctattttcatcgaggactgcagcagcgccctgcccaccgaccagccacctcttggaaattgccctgcacgccctttgccgcccacctctgatgccacctcacccacctccaggtcccccagaccatccgaaccagccgcccatgatgacctgcgagagactcccatgccccactgcaggcctgggccccctcagggaggaagcgatgaagccaggggcagcctccagtcccttgcagcaggtccccgccccgccactgcctgcgaagaagaaccttcccactgcccctcccagacgccgcgtttccgagagggtgtccttagaagaccaaagtccggggatggcggcagagggggaccagctcagcctgcctccccaagggacctcagacggccctgaggacacgccccgggagagcacggagcaaggccaggacacagaggtgaaagccagcgatcctcacagcatgccagagctgcccaggacagccaaacaacccccagtcccgccccccaggaaaaaacggatctctcgacaactggcctcgaccctcccagctcccttagagaacgctgagctctgcacacaggcgatggccttggagacacccacgccgggtccacccagagagggccaaagccctgcttctcaggctgggactcagcaccctcctgcccaggccactgcccattcccagagctctccagagttcaagggctccctggcctccctctcagacagcttgggggtgtctgtcatggccaccgaccaggactcctactccaccagcagcacggaggaggagctggagcagttcagcagccccagcgtgaagaagaagccctccatgatcctgggcaaggctcggcaccggctgagctttgccagtttcagcagcatgttccacgctttcctctccaacaaccgcaagctgtacaagaaggtggtggagctggcgcaggacaagggctcgtactttggcagcctggtgcaggactacaaggtgtacagcctggagatgatggcgcgccagacctccagcacggagatgctgcaggagattcgcaccatgatgacccagctcaagagctacctgctgcagagcaccgagctcaaggccctggtggaccccgccctgcactccgaggaggagctcgaagcaattgtagagtctgccttgtacaaatgtgtcctgaagcccctgaaggaagccatcaactcatgcctgcatcagatccacagcaaggatggttcgctgcagcagctcaaggagaaccagttagtgatcctggccaccaccaccactgacctaggtgtgaccaccagcgtgccggaggtgcccatgatggagaagatcctgcagaagttcaccagcatgcacaaggcctactcacctgagaagaagatctccatcctgctcaagacctgcaaactcatctacgactccatggccctcggcaacccagggaagccctatggggcggatgacttcctgcctgtgctcatgtatgtgctggcccgcagcaacctcacggagatgcttctcaatgtggagtacatgatggagctcatggaccccgccctgcagctgggggagggttcctactatctgaccaccacctacggggccctggagcacatcaagagctacgacaagatcacggtgacccggcagctgagtgtggaggtgcaggactccatccaccgctgggagcgccggcgtactctcaacaaggcccgggcctcccgctcctccgtacaggacttcatctgcgtgtcgtacctggagcccgagcagcaggcgcggacgctggcgtcgcgggcggacacccaggcccaggcgctgtgcgcgcagtgcgcggagaagttcgcggtggagcggccgcaggcgcaccggctgttcgtgctggtggacgggcgctgcttccagctggcggacgacgcgctgccgcactgcatcaagggctacctgctgcgcagcgagcccaagcgcgacttccactttgtctaccggcccctggacggtggtggcggcggcggcggcgggagcccgccctgcctggtggtgcgggagcccaacttcctgtgaggccctcccggggcgcctcccctcacccccaggcgcacgtctggccccgcctctggctgcgcactcccgaccgcgacgtccacgcagcagagggacatgggccattccatgacgtgcccaggccaacgtcgcaggacagttgtgaaaataacatgacgctcgtccaaggccacttcctgagggcaagtcctaatagccctgagacaccgagacggcatgttcttcattagacggaaagggaaactgaggctcaggagagaggcgctccaggccgctgcagccaacaaaccggcgccctcttcacacgtagctcctcaggccattccccatgagtcccccacacccaccccatcctcggtctttgcaaagaagggcccgagcttagtttccccaggactggcctaggaaggagcaccggccacagctgctccccgtgccactcagggtggacccagcatctcaggagcacctcagggtgtcggttaagagacaggcctccacccctgcaccagagcctgctcttagctcccggtgcccccagaccccgcagctctgtgcccggcaagaagcagctagacacacgccagggcgccaagcacggccagctccgcggacccatggacaagcccagccccgcctcagggaaaacagggcctttccctacaggacacgccccagagctgtggcagattgcaggagccatcgtgtggggagaatttaataaaagcccttttgaaaatgaaaaat

SEQ ID NO: 381364 - DNA, 2275 bp, Homo sapiens
agaagggagcgagagcccctgagcgcggcggcagcggcggcctggcccttccagagggccagagccagggacatgcgggcgcccgggactccgcgttccgcgcggcccggcgcctgagcgcctccgttccccgtcccggagctgccggcggcatgatccgacacgccggggcgcccgcgcgcggggaccccacgggtccggttccagttgttggcaaaggagaggaagaggaagaggaagatggcatgcggctttgtctgccagccaacccgaaaaactgccttcctcaccgccggggcatcagcatcctggagaagctcatcaaaacatgcccggtgtggctgcagctgagtctgggccaggcagaggtggccaggatcctgcaccgggtggtggctgggatgttcctggttcgccgggacagcagctcgaagcagctggtgctctgtgtccactttccttctctgaacgaaagctcggccgaggtgctcgaatacaccattaaggaagaaaagtcgatattgtacctggaaggctcggctcttgtgtttgaggacatcttcagattgattgcgttctactgtgtcagtagagacttactgcccttcacactgcggctaccccaggccatccttgaggccagcagcttcacggaccttgagaccatcgccaacctgggtctgggtttctgggactcctcgctgaatcctccacaagaaagagggaagccagcagagcccccaagagaccgggcccccggattccccctagtctccagcctcaggcccacagcccatgacgcaaactgtgcctgtgaaatcgagctgtcggtaggaaatgaccgcctgtggtttgtgaatcctattttcatcgaggactgcagcagcgccctgcccaccgaccagccacctcttggaaattgccctgcacgccctttgccgcccacctctgatgccacctcacccacctccaggtcccccagaccatccgaaccagccgcccatgatgacctgcgagagactcccatgccccactgcaggcctgggccccctcagggaggaagcgatgaagccaggggcagcctccagtcccttgcagcaggtccccgccccgccactgcctgcgaagaagaaccttcccactgcccctcccagacgccgcgtttccgagagggtgtccttagaagaccaaagtccggggatggcggcagagggggaccagctcagcctgcctccccaagggacctcagacggccctgaggacacgccccgggagagcacggagcaaggccaggacacagaggtgaaagccagcgatcctcacagcatgccagagctgcccaggacagccaaacaacccccagtcccgccccccaggaaaaaacggatctctcgacaactggcctcgaccctcccagctcccttagagaacgctgagctctgcacacaggcgatggccttggagacacccacgccgggtccacccagagagggccaaagccctgcttctcaggctgggactcagcaccctcctgcccaggccacttggcccaatttcccccaagaggcttctccaggaagtttcaaaggggcttccccttgggcctacccctcttccaagaaccagctttggcggggttggtcttgttcatgggccacacgaaccaagggaacttcctaagattccaaaccaggcaaggcacgggaagggacggagctggaagcaagtttcaggcaggccccccaggccggtgaaacgcaacgaagccccctcccatgatccttgggccaagggctcgggccaccaggcttgagcctttggccaggtttccacggcaggcgagtgttccacagcttttccgtcctccaaacaaccgtcaaggctgttacaagaaagggtgggtggagccatgggcggcaagggacaaaggggccctcggtaccttttgtggcgaggcctgggtgccagtgacttacccaggcatgtacaagccctggaagatgaattggcccgcggcccatgaacccatcccaagccactggggaggaaattgctttggcaaggggagcgaattttcggcacccagtcgatggaaccgccaggctttccaagaaagcttaacctagagtgtgcacgaaaacaacgcggagacgctctacagggcccctggtcgtgtaaaccccgcggcccttgggacttcccgtagtgagagagagctgcgaaaagcagactgtgtaagaggcccgtgcctgggcaccccgaagtggtacccgtg

SEQ ID NO: 381365 - DNA, 485 bp, Homo sapiens
ggaagccctatggggcggatgacttcctgcctgtgctcatgtatgtgctggcccgcagcaacctcacggagatgcttctcaatgtggagtacatgatggagctcatggaccccgccctgcagctgggggagggtgagtcaccaccccctgcccatcaggtgcattgcacacccccaactcagccacgccacgggcactctaggtggcccaacaagcacctcctggatgccagactctggctgagctctggacccatggatgcaaatgtgaatcctacacaggtcctgtcctgcaggagctcacagattagggggagagatgagccagtcaagagactgtgccacctccacgtaacaagtgctggaatagttggaatcccagaaggcataggagcatgttacccagactgtgcagtcagggaaggcttcctggaggaggtgacatctgagctgagcaatgaaggataaataggagccagctgatta

SEQ ID NO: 381366 - DNA, 1016 bp, Homo sapiens
tggtacaaaatagtatgtattttgtattctttaaaaaaaattgagcatttctaatctcttcattttccttaaccatttagaagtcaaaagttgaattatttgtgataagtgtatatgctctattaatatattattgctatagataagcatataataaagtttatatttattactaacatacatggaaattttgggctactgagatacctggcacagtcagtgactttgtctattcctacaggatctaattgaaaggtgttaggaaaggcatagcaaagagcctttttcctgttgttacaagcagtaaatggcccttaagaaacttcaaaaagaatgaatgcttgcttgagaaagaagggagtaagagaaaagcttttcagtaatgagcaggagaaaaaagaaaacctggtctgagagataaaagaggtgactattaaaacggaaggacacagtctaccagaaactcgtgaggctttacaaatcaaaatctagactcactttaccatggaaactgaagacaattagaaagtatatgtttacaattttgtaatattttactttatttttaattatccaaagcaaatataagactattcatgataggaattgatagtttggttatgactacaccgatattgaagccatgtgtaaatttgaaatacttaattttttaaagctgtttcatggaatctatagatgtgacaaaaagctaataatgtattctgtccactttacttccctgtcaccctaagactgtgtttctccttccagtaataggatacgaggtacttgtctgagaacatgtaactggagtagacttttatgtagtgatctgaggcccttactagatctctttctttctaagggaaatcaccaaattttgagcctataggtaaatcatttgtaaaccgggggttggctgggcgtggtggctcatgcctgtaatcccagcattttgggaggccgaggcaggcagatcacctgaggtcaggagttggaaaccaggctggcaaaca

SEQ ID NO: 381367 - DNA, 613 bp, Homo sapiens
aggccccagctcagcccatgccttttcagagcactgcctttccttgggcattagcagaccagtagaaatagaaacacacgtagtaaggaacacggctgtaggcagcaacagagacgtcatggaagatgcagacggaggctgtgggacccacatactctgcaccctcagccgagcctgtttctgaaaacaaacatgatctacttccttcaagccggaatccaggtgtgtcattaattttctgttaaacaaagagaatggtggctttttttgagtggagcacacctgtccccacttgtggagttgcagaatgtgggcactgccaggattccctctcagctctcacctctgtagaaatcacggcacaatacaaacaatggaaagctcctctattaaaatgtctgggtgccaccgcgaggcttgcagcagaacaattttggcctctctccagaggcaggtgtgaccggagccaacctgtctggagtgacttttttactatgaaactatcagcagcatggacgagtgaaacaatgttgcattatttggagcccctgggaatgtgcacaccccttataaatggactgtgtttacgctcctgtcccttcacagctgggat

SEQ ID NO: 381368 - DNA, 829 bp, Homo sapiens
atccttaattaaattaatccccccccccccggaagaggagatggcggagtcgttgaggtctccgcgccgctccctgtacaaactggtgggctcgccgccttggaaagaggctttccggcagagatgcctggagagaatgagaaacagccgggacaggctcctaaacaggtaccgccaggctggaagcagtgggccagggaattctcagaacagctttctagttcaagaggtgatggaagaagagtggaatgctttgcagtcagtggagaattgtccagaagacttggctcagctggaggagctgatagacatggctgtgctggaggaaattcaacaggagctgatcaaccaaggcctgtgatacttgggctgtgatcctctagagccagcttggactcacatcattctatggggttgaagacaactcattccctctgaggagccttgtacatacaagccttttatttataacttattttgtattgaaacttttaaacaatactgaagaaaaaaaaacttttccgacatctgttcttggtcttttgtgacgcaggttgaagggggaggaatagaaaaagacaaactgccttggaggagataaaccaattttatgtctatcatgttatacaaaaatctagaaataatagatttgtacagaaaaaaatgataataaatgagaacacaaaacataaaaaaatttggtattttttcccccatgatattaggatgataatcatttcaaagcacatgtctagcttcagagtaggatttgttcactggccaaagcctgccatgaaactatggctttcagcatctgtctgctctactg

SEQ ID NO: 381369 - DNA, 606 bp, Homo sapiens
gcacaatttctcagctctgcagttctagtggaaaagcagttatagacactacataaacaaataagcgtgactgtagttttttgaccccttccctaaggtgctagaccttgtgctaagaacttctcatttaatgatgctgttttctccatgtgactgccctgtaagatagtagtattagaacagaaggtggttggtgttctcgtgcaggtcatacagctagtaagtggaggagatgggaagcaaaatcagttgtatgaatccagttcccatgtttcttctaccatcctgcctctctattaatgggttaatagttcactgagggtggtggcttatgcctgtaatcccagcattttgagaggctgaggcaggagtattgcttgaggccagttcaagaccagcatgggcaacataacaagatcctgtctctacagaagtaaaaaaaaaaaaaaaaaaattatctgggtgtggtagcaaatacttgtagcctccctcagccagaaggcttaggcaggaggatcacttgaacccaagagtttaaggttacagtgagctataattttaccacctcactccagcctggctgacagagggagaccctgtcacttt

SEQ ID NO: 381370 - DNA, 1948 bp, Homo sapiens
ggcgggctcttcgccgccgccgctggggccccgaaggcgaacgactaagaaggagctgtcttctccgtcccacaggaaaagctctccgccgaggccaaagaccacgtttctcgtcagcaactgcggcggcggcgacgaaggcaacgacgaagaagctggtttctcagcttcggttggactctggtttttcagtccctcccggagccgcaagaacacgacgtggttaggaagccaggtctgccacagctcgccgtcgcccaccggtccctcggcggccgccatcttggcccaactgctcccctcactccagttgctcagcccgccgctgagcacagccaatccgcggccgtccactcactgtttcggccaatcaccgagcagacggcccggaagctcgagaggctcgtgccaggtcggggggcgaaggcgaggccagcccaccaagcaggggcgtcaccaagggaaagccaatcaccattatttctgaagcccaagggggcgggacgagaagtcaacagaatggtggtgctgctggaaatctagcacctggggagagcctgagacttgtgtatctaattgcttattggacacctccatctgggtaaacccaggcatccagaactttccctcaagacttacctccctcagtgcaggtcgggctggcctcacgcatttcgcttggatgcctaaatctgtctccacgtggggccggtcgataaaacaacacttcccagaatacgctgcgatccattcgcggtctgcacccggaaagtacacctcccaggggtctgtgcgcgcctccagggaacgggtcttgtggctttgtctcccgcgaagaggagatggcggagtcgttgaggtctccgcgccgctccctgtacaaactggtgggctcgccgccttggaaagaggctttccggcagagatgcctggagagaatgagaaacagccgggacaggctcctaaacaggtaccgccaggctggaagcagtgggccagggaattctcagaacagctttctagttcaagaggtgatggaagaagagtggaatgctttgcagtcagtggagaattgtccagaagacttggctcagctggaggagctgatagacatggctgtgctggaggaaattcaacaggagctgatcaaccaagagcagtccatcatcagcgagtatgagaagagcttgcagtttgatgaaaagtgtctcagcatcatgctggctgagtgggaggcaaacccactcatctgtcctgtatgtacaaagtacaacctgagaatcacaagcggtgtggtggtgtgtcagtgtggcctgtccatcccatctcattcttctgagttgacagagcagaagcttcgtgcctgtttagagggtagtataaatgagcacagtgcacattgtccccacacacctgaattttcagtcactggaggaacagaagaaaagtccagtcttctcatgagctgtctggcctgtgatacttgggctgtgatcctctagagccagcttggactcacatcattctatggggttgaagacaactcattccctctgaggagccttgtacatacaagccttttatttataacttattttgtattgaaacttttaaacaatactgaagaaaaaaaaacttttccgacatctgttcttggtcttttgtgacgcaggttgaagggggaggaatagaaaaagacaaactgccttggaggagataaaccaattttatgtctatcatgttatacaaaaatctagaaataatagatttgtacagaaaaaaatgataataaatgagaacacaaaacataaaaaaatttggtattttttcccccatgatattaggatgataatcatttcaaagcacatgtctagcttcagagtaggatttgttcactggccaaagcctgccatgaaactatggctttcagcatctgtctgctctactg

SEQ ID NO: 381371 - DNA, 1807 bp, Homo sapiens
ggcgggctcttcgccgccgccgctggggccccgaaggcgaacgactaagaaggagctgtcttctccgtcccacaggaaaagctctccgccgaggccaaagaccacgtttctcgtcagcaactgcggcggcggcgacgaaggcaacgacgaagaagctggtttctcagcttcggttggactctggtttttcagtccctcccggagccgcaagaacacgacgtggttaggaagccaggtctgccacagctcgccgtcgcccaccggtccctcggcggccgccatcttggcccaactgctcccctcactccagttgctcagcccgccgctgagcacagccaatccgcggccgtccactcactgtttcggccaatcaccgagcagacggcccggaagctcgagaggctcgtgccaggtcggggggcgaaggcgaggccagcccaccaagcaggggcgtcaccaagggaaagccaatcaccattatttctgaagcccaagggggcgggacgagaagtcaacagaatggtggtgctgctggaaatctagcacctggggagagcctgagacttgtgtatctaattgcttattggacacctccatctgggtaaacccaggcatccagaactttccctcaagacttacctccctcagtgcaggtcgggctggcctcacgcatttcgcttggatgcctaaatctgtctccacgtggggccggtcgataaaacaacacttcccagaatacgctgcgatccattcgcggtctgcacccggaaagtacacctcccaggggtctgtgcgcgcctccagggaacgggtcttgtggctttgtctcccgcgaagaggagatggcggagtcgttgaggtctccgcgccgctccctgtacaaactggtgggctcgccgccttggaaagaggctttccggcagagatgcctggagagaatgagaaacagccgggacaggctcctaaacaggtaccgccaggctggaagcagtgggccagggaattctcagaacagctttctagttcaagaggtgatggaagaagagtggaatgctttgcagtcagtggagaattgtccagaagacttggctcagctggaggagctgatagacatggctgtgctggaggaaattcaacaggagctgatcaaccaagagcagtccatcatcagcgagtatgagaagagcttgcagtttgatgaaaagtgtctcagcatcatgctggctgagtgggaggcaaacccactcatctgtcctgtatgtacaaagtacaacctgagaatcacaagcggtgtggtggtgtgtcagtgtggcctgtccatcccatctcattcttctgagttgacagagcagaagcttcgtgcctgtttagagggtagtataaatgagcacagtgcacattgtccccacacacctgaattttcagtcactggaggaacagaagaaaagtccagtcttctcatgagctgtctggcctgtgatacttgggctgtgatcctctagagccagcttggactcacatcattctatggggttgaagacaactcattccctctgaggagccttgtacatacaagccttttatttataacttattttgtattgaaacttttaaacaatactgaagaaaaaaaaacttttccgacatctgttcttggtcttttgtgacgcaggttgaagggggaggaatagaaaaagacaaactgccttggaggagataaaccaattttatgtctatcatgttatacaaaaatctagaaataatagatttgtacagaaaaaaatgataataaatgagaacacaaaac

SEQ ID NO: 381372 - DNA, 2101 bp, Homo sapiens
ggcgggctcttcgccgccgccgctggggccccgaaggcgaacgactaagaaggagctgtcttctccgtcccacaggaaaagctctccgccgaggccaaagaccacgtttctcgtcagcaactgcggcggcggcgacgaaggcaacgacgaagaagctggtttctcagcttcggttggactctggtttttcagtccctcccggagccgcaagaacacgacgtggttaggaagccaggtctgccacagctcgccgtcgcccaccggtccctcggcggccgccatcttggcccaactgctcccctcactccagttgctcagcccgccgctgagcacagccaatccgcggccgtccactcactgtttcggccaatcaccgagcagacggcccggaagctcgagaggctcgtgccaggtcggggggcgaaggcgaggccagcccaccaagcaggggcgtcaccaagggaaagccaatcaccattatttctgaagcccaagggggcgggacgagaagtcaacagaatggtggtgctgctggaaatctagcacctggggagagcctgagacttgtgtatctaattgcttattggacacctccatctgggtaaacccaggcatccagaactttccctcaagacttacctccctcagtgcaggtcgggctggcctcacgcatttcgcttggatgcctaaatctgtctccacgtggggccggtcgataaaacaacacttcccagaatacgctgcgatccattcgcggtctgcacccggaaagtacacctcccaggggtctgtgcgcgcctccagggaacgggtcttgtggctttgtctcccgcgaagaggagatggcggagtcgttgaggtctccgcgccgctccctgtacaaactggtgggctcgccgccttggaaagaggctttccggcagagatgcctggagagaatgagaaacagccgggacaggctcctaaacaggtaccgccaggctggaagcagtgggccagggaattctcagaacagctttctagttcaagaggtgatggaagaagagtggaatgctttgcagtcagtggagaattgtccagaagacttggctcagctggaggagctgatagacatggctgtgctggaggaaattcaacaggagctgatcaaccaagagcagtccatcatcagcgagtatgagaagagcttgcagtttgatgaaaagtgtctcagcatcatgctggctgagtgggaggcaaacccactcatctgtcctgtatgtacaaagtaagagtttttaaaaccttttcagcattattcgttcccattccccactccaaggtgagtggaatctccccccagatttgttgcctgaaattcaaggtttggagatccaggtctggtggccatgatgctctgggatcctaattctgcttctaggtacaacctgagaatcacaagcggtgtggtggtgtgtcagtgtggcctgtccatcccatctcattcttctgagttgacagagcagaagcttcgtgcctgtttagagggtagtataaatgagcacagtgcacattgtccccacacacctgaattttcagtcactggaggaacagaagaaaagtccagtcttctcatgagctgtctggcctgtgatacttgggctgtgatcctctagagccagcttggactcacatcattctatggggttgaagacaactcattccctctgaggagccttgtacatacaagccttttatttataacttattttgtattgaaacttttaaacaatactgaagaaaaaaaaacttttccgacatctgttcttggtcttttgtgacgcaggttgaagggggaggaatagaaaaagacaaactgccttggaggagataaaccaattttatgtctatcatgttatacaaaaatctagaaataatagatttgtacagaaaaaaatgataataaatgagaacacaaaacataaaaaaatttggtattttttcccccatgatattaggatgataatcatttcaaagcacatgtctagcttcagagtaggatttgttcactggccaaagcctgccatgaaactatggctttcagcatctgtctgctctactg

SEQ ID NO: 381373 - DNA, 1227 bp, Homo sapiens
tgttggccaggctggtttcgaactcctgacctcgagtgatctgcctgcctcagcctcccaaagtgttgggattacaggtgtgagtcaccgtgcccggccagcaatcagttctctttgtcaactttatttagttgcctgtgggaccctgacattctgtatctgtgctcctatggcctctggagatgtgtgtgaaaattgtctcctcggcccttagcctacttcacctcttgtgctcacaaaaaggggacagagaggagggagaggaatccagcaagatgaagccagcctgagagagcataaaaaccagtcattggtattgtggtcttgcccaaatctttccctcgtgtgaaggaagcctttgacagtgaagtttagaattaaatacagggccagctgaagcatggtgaagccctccaactgcctttgccttgcagagcagtccatcatcagcgagtatgagaagagcttgcagtttgatgaaaagtgtctcagcatcatgctggctgagtgggaggcaaacccactcatctgtcctgtatgtacaaagtacaacctgagaatcacaagcggtgtggtggtgtgtcagtgtggcctgtccatcccatctcattcttctgagttgacagagcagaagcttcgtgcctgtttagagggtagtataaatgagcacagtgcacattgtccccacacacctgaattttcagtcactggaggaacagaagaaaagtccagtcttctcatgagctgtctggcctgtgatacttgggctgtgatcctctagagccagcttggactcacatcattctatggggttgaagacaactcattccctctgaggagccttgtacatacaagccttttatttataacttattttgtattgaaacttttaaacaatactgaagaaaaaaaaacttttccgacatctgttcttggtcttttgtgacgcaggttgaagggggaggaatagaaaaagacaaactgccttggaggagataaaccaattttatgtctatcatgttatacaaaaatctagaaataatagatttgtacagaaaaaaatgataataaatgagaacacaaaacataaaaaaatttggtattttttcccccatgatattaggatgataatcatttcaaagcacatgtctagcttcagagtaggatttgttcactggccaaagcctgccatgaaactatggctttcagcatctgtctgctctactg

SEQ ID NO: 381374 - DNA, 1666 bp, Homo sapiens
ggcgggctcttcgccgccgccgctggggccccgaaggcgaacgactaagaaggagctgtcttctccgtcccacaggaaaagctctccgccgaggccaaagaccacgtttctcgtcagcaactgcggcggcggcgacgaaggcaacgacgaagaagctggtttctcagcttcggttggactctggtttttcagtccctcccggagccgcaagaacacgacgtggttaggaagccaggtctgccacagctcgccgtcgcccaccggtccctcggcggccgccatcttggcccaactgctcccctcactccagttgctcagcccgccgctgagcacagccaatccgcggccgtccactcactgtttcggccaatcaccgagcagacggcccggaagctcgagaggctcgtgccaggtcggggggcgaaggcgaggccagcccaccaagcaggggcgtcaccaagggaaagccaatcaccattatttctgaagcccaagggggcgggacgagaagtcaacagaatggtggtgctgctggaaatctagcacctggggagagcctgagacttgtgtatctaattgcttattggacacctccatctgggtaaacccaggcatccagaactttccctcaagacttacctccctcagtgcaggtcgggctggcctcacgcatttcgcttggatgcctaaatctgtctccacgtggggccggtcgataaaacaacacttcccagaatacgctgcgatccattcgcggtctgcacccggaaagtacacctcccaggggtctgtgcgcgcctccagggaacgggtcttgtggctttgtctcccgcgaagaggagatggcggagtcgttgaggtctccgcgccgctccctgtacaaactggtgggctcgccgccttggaaagaggctttccggcagagatgcctggagagaatgagaaacagccgggacaggctcctaaacaggtaccgccaggctggaagcagtgggccagggaattctcagaacagctttctagttcaagaggtgatggaagaagagtggaatgctttgcagtcagtggagaattgtccagaagacttggctcagctggaggagctgatagacatggctgtgctggaggaaattcaacaggagctgatcaaccaagagcagtccatcatcagcgagtatgagaagagcttgcagtttgatgaaaagtgtctcagcatcatgctggctgagtgggaggcaaacccactcatctgtcctgtatgtacaaagtacaacctgagaatcacaagcggtgtggtggtgtgtcagtgtggcctgtccatcccatctcatgcctgtgatacttgggctgtgatcctctagagccagcttggactcacatcattctatggggttgaagacaactcattccctctgaggagccttgtacatacaagccttttatttataacttattttgtattgaaacttttaaacaatactgaagaaaaaaaaacttttccgacatctgttcttggtcttttgtgacgcaggttgaagggggaggaatagaaaaagacaaactgccttggaggagataaaccaattttatgtctatcatgttatacaaaaatctagaaataatagatttgtacagaaaaaaatgataataaatgagaacacaaaac

SEQ ID NO: 381375 - DNA, 1807 bp, Homo sapiens
ggcgggctcttcgccgccgccgctggggccccgaaggcgaacgactaagaaggagctgtcttctccgtcccacaggaaaagctctccgccgaggccaaagaccacgtttctcgtcagcaactgcggcggcggcgacgaaggcaacgacgaagaagctggtttctcagcttcggttggactctggtttttcagtccctcccggagccgcaagaacacgacgtggttaggaagccaggtctgccacagctcgccgtcgcccaccggtccctcggcggccgccatcttggcccaactgctcccctcactccagttgctcagcccgccgctgagcacagccaatccgcggccgtccactcactgtttcggccaatcaccgagcagacggcccggaagctcgagaggctcgtgccaggtcggggggcgaaggcgaggccagcccaccaagcaggggcgtcaccaagggaaagccaatcaccattatttctgaagcccaagggggcgggacgagaagtcaacagaatggtggtgctgctggaaatctagcacctggggagagcctgagacttgtgtatctaattgcttattggacacctccatctgggtaaacccaggcatccagaactttccctcaagacttacctccctcagtgcaggtcgggctggcctcacgcatttcgcttggatgcctaaatctgtctccacgtggggccggtcgataaaacaacacttcccagaatacgctgcgatccattcgcggtctgcacccggaaagtacacctcccaggggtctgtgcgcgcctccagggaacgggtcttgtggctttgtctcccgcgaagaggagatggcggagtcgttgaggtctccgcgccgctccctgtacaaactggtgggctcgccgccttggaaagaggctttccggcagagatgcctggagagaatgagaaacagccgggacaggctcctaaacaggtaccgccaggctggaagcagtgggccagggaattctcagaacagctttctagttcaagaggtgatggaagaagagtggaatgctttgcagtcagtggagaattgtccagaagacttggctcagctggaggagctgatagacatggctgtgctggaggaaattcaacaggagctgatcaaccaagagcagtccatcatcagcgagtatgagaagagcttgcagtttgatgaaaagtgtctcagcatcatgctggctgagtgggaggcaaacccactcatctgtcctgtatgtacaaagtacaacctgagaatcacaagcggtgtggtggtgtgtcagtgtggcctgtccatcccatctcatgcctgtgatacttgggctgtgatcctctagagccagcttggactcacatcattctatggggttgaagacaactcattccctctgaggagccttgtacatacaagccttttatttataacttattttgtattgaaacttttaaacaatactgaagaaaaaaaaacttttccgacatctgttcttggtcttttgtgacgcaggttgaagggggaggaatagaaaaagacaaactgccttggaggagataaaccaattttatgtctatcatgttatacaaaaatctagaaataatagatttgtacagaaaaaaatgataataaatgagaacacaaaacataaaaaaatttggtattttttcccccatgatattaggatgataatcatttcaaagcacatgtctagcttcagagtaggatttgttcactggccaaagcctgccatgaaactatggctttcagcatctgtctgctctactg

SEQ ID NO: 381376 - DNA, 1380 bp, Homo sapiens
tgttggccaggctggtttcgaactcctgacctcgagtgatctgcctgcctcagcctcccaaagtgttgggattacaggtgtgagtcaccgtgcccggccagcaatcagttctctttgtcaactttatttagttgcctgtgggaccctgacattctgtatctgtgctcctatggcctctggagatgtgtgtgaaaattgtctcctcggcccttagcctacttcacctcttgtgctcacaaaaaggggacagagaggagggagaggaatccagcaagatgaagccagcctgagagagcataaaaaccagtcattggtattgtggtcttgcccaaatctttccctcgtgtgaaggaagcctttgacagtgaagtttagaattaaatacagggccagctgaagcatggtgaagccctccaactgcctttgccttgcagagcagtccatcatcagcgagtatgagaagagcttgcagtttgatgaaaagtgtctcagcatcatgctggctgagtgggaggcaaacccactcatctgtcctgtatgtacaaagtaagagtttttaaaaccttttcagcattattcgttcccattccccactccaaggtgagtggaatctccccccagatttgttgcctgaaattcaaggtttggagatccaggtctggtggccatgatgctctgggatcctaattctgcttctaggtacaacctgagaatcacaagcggtgtggtggtgtgtcagtgtggcctgtccatcccatctcattcttctgagttgacagagcagaagcttcgtgcctgtttagagggtagtataaatgagcacagtgcacattgtccccacacacctgaattttcagtcactggaggaacagaagaaaagtccagtcttctcatgagctgtctggcctgtgatacttgggctgtgatcctctagagccagcttggactcacatcattctatggggttgaagacaactcattccctctgaggagccttgtacatacaagccttttatttataacttattttgtattgaaacttttaaacaatactgaagaaaaaaaaacttttccgacatctgttcttggtcttttgtgacgcaggttgaagggggaggaatagaaaaagacaaactgccttggaggagataaaccaattttatgtctatcatgttatacaaaaatctagaaataatagatttgtacagaaaaaaatgataataaatgagaacacaaaacataaaaaaatttggtattttttcccccatgatattaggatgataatcatttcaaagcacatgtctagcttcagagtaggatttgttcactggccaaagcctgccatgaaactatggctttcagcatctgtctgctctactg

SEQ ID NO: 381377 - DNA, 1743 bp, Homo sapiens
ggcgggctcttcgccgccgccgctggggccccgaaggcgaacgactaagaaggagctgtcttctccgtcccacaggaaaagctctccgccgaggccaaagaccacgtttctcgtcagcaactgcggcggcggcgacgaaggcaacgacgaagaagctggtttctcagcttcggttggactctggtttttcagtccctcccggagccgcaagaacacgacgtggttaggaagccaggtctgccacagctcgccgtcgcccaccggtccctcggcggccgccatcttggcccaactgctcccctcactccagttgctcagcccgccgctgagcacagccaatccgcggccgtccactcactgtttcggccaatcaccgagcagacggcccggaagctcgagaggctcgtgccaggtcggggggcgaaggcgaggccagcccaccaagcaggggcgtcaccaagggaaagccaatcaccattatttctgaagcccaagggggcgggacgagaagtcaacagaatggtggtgctgctggaaatctagcacctggggagagcctgagacttgtgtatctaattgcttattggacacctccatctgggtaaacccaggcatccagaactttccctcaagacttacctccctcagtgcaggtcgggctggcctcacgcatttcgcttggatgcctaaatctgtctccacgtggggccggtcgataaaacaacacttcccagaatacgctgcgatccattcgcggtctgcacccggaaagtacacctcccaggggtctgtgcgcgcctccagggaacgggtcttgtggctttgtctcccgcgaagaggagatggcggagtcgttgaggtctccgcgccgctccctgtacaaactggtgggctcgccgccttggaaagaggctttccggcagagatgcctggagagaatgagaaacagccgggacaggctcctaaacaggtaccgccaggctggaagcagtgggccagggaattctcagaacagctttctagttcaagaggtgatggaagaagagtggaatgctttgcagtcagtggagaattgtccagaagacttggctcagctggaggagctgatagacatggctgtgctggaggaaattcaacaggagctgatcaaccaagagcagtccatcatcagcgagtatgagaagagcttgcagtttgatgaaaagtgtctcagcatcatgctggctgagtgggaggcaaacccactcatctgtcctgtatgtacaaagcctgtgatacttgggctgtgatcctctagagccagcttggactcacatcattctatggggttgaagacaactcattccctctgaggagccttgtacatacaagccttttatttataacttattttgtattgaaacttttaaacaatactgaagaaaaaaaaacttttccgacatctgttcttggtcttttgtgacgcaggttgaagggggaggaatagaaaaagacaaactgccttggaggagataaaccaattttatgtctatcatgttatacaaaaatctagaaataatagatttgtacagaaaaaaatgataataaatgagaacacaaaacataaaaaaatttggtattttttcccccatgatattaggatgataatcatttcaaagcacatgtctagcttcagagtaggatttgttcactggccaaagcctgccatgaaactatggctttcagcatctgtctgctctactg

SEQ ID NO: 381378 - DNA, 1512 bp, Homo sapiens
ggcgggctcttcgccgccgccgctggggccccgaaggcgaacgactaagaaggagctgtcttctccgtcccacaggaaaagctctccgccgaggccaaagaccacgtttctcgtcagcaactgcggcggcggcgacgaaggcaacgacgaagaagctggtttctcagcttcggttggactctggtttttcagtccctcccggagccgcaagaacacgacgtggttaggaagccaggtctgccacagctcgccgtcgcccaccggtccctcggcggccgccatcttggcccaactgctcccctcactccagttgctcagcccgccgctgagcacagccaatccgcggccgtccactcactgtttcggccaatcaccgagcagacggcccggaagctcgagaggctcgtgccaggtcggggggcgaaggcgaggccagcccaccaagcaggggcgtcaccaagggaaagccaatcaccattatttctgaagcccaagggggcgggacgagaagtcaacagaatggtggtgctgctggaaatctagcacctggggagagcctgagacttgtgtatctaattgcttattggacacctccatctgggtaaacccaggcatccagaactttccctcaagacttacctccctcagtgcaggtcgggctggcctcacgcatttcgcttggatgcctaaatctgtctccacgtggggccggtcgataaaacaacacttcccagaatacgctgcgatccattcgcggtctgcacccggaaagtacacctcccaggggtctgtgcgcgcctccagggaacgggtcttgtggctttgtctcccgcgaagaggagatggcggagtcgttgaggtctccgcgccgctccctgtacaaactggtgggctcgccgccttggaaagaggctttccggcagagatgcctggagagaatgagaaacagccgggacaggctcctaaacaggtaccgccaggctggaagcagtgggccagggaattctcagaacagctttctagttcaagaggtgatggaagaagagtggaatgctttgcagtcagtggagaattgtccagaagacttggctcagctggaggagctgatagacatggctgtgctggaggaaattcaacaggagctgatcaaccaagagcagtccatcatcagcgagtatgagaagagcttgcagtttgatgaaaagtgtctcagcatcatgctggctgagtgggaggcaaacccactcatctgtcctgtatgtacaaagtaagagtttttaaaaccttttcagcattattcgttcccattccccactccaaggtgagtggaatctccccccagatttgttgcctgaaattcaaggtttggagatccaggtctggtggccatgatgctctgggatcctaattctgcttctaggtacaacctgagaatcacaagcggtgtggtggtgtgtcagtgtggcctgtccatcccatctcatgtgagtgttccacacacagatttcatga

SEQ ID NO: 381379 - DNA, 1848 bp, Homo sapiens
ggcgggctcttcgccgccgccgctggggccccgaaggcgaacgactaagaaggagctgtcttctccgtcccacaggaaaagctctccgccgaggccaaagaccacgtttctcgtcagcaactgcggcggcggcgacgaaggcaacgacgaagaagctggtttctcagcttcggttggactctggtttttcagtccctcccggagccgcaagaacacgacgtggttaggaagccaggtctgccacagctcgccgtcgcccaccggtccctcggcggccgccatcttggcccaactgctcccctcactccagttgctcagcccgccgctgagcacagccaatccgcggccgtccactcactgtttcggccaatcaccgagcagacggcccggaagctcgagaggctcgtgccaggtcggggggcgaaggcgaggccagcccaccaagcaggggcgtcaccaagggaaagccaatcaccattatttctgaagcccaagggggcgggacgagaagtcaacagaatggtggtgctgctggaaatctagcacctggggagagcctgagacttgtgtatctaattgcttattggacacctccatctgggtaaacccaggcatccagaactttccctcaagacttacctccctcagtgcaggtcgggctggcctcacgcatttcgcttggatgcctaaatctgtctccacgtggggccggtcgataaaacaacacttcccagaatacgctgcgatccattcgcggtctgcacccggaaagtacacctcccaggggtctgtgcgcgcctccagggaacgggtcttgtggctttgtctcccgcgaagaggagatggcggagtcgttgaggtctccgcgccgctccctgtacaaactggtgggctcgccgccttggaaagaggctttccggcagagatgcctggagagaatgagaaacagccgggacaggctcctaaacaggtaccgccaggctggaagcagtgggccagggaattctcagaacagctttctagttcaagaggtgatggaagaagagtggaatgctttgcagtcagtggagaattgtccagaagacttggctcagctggaggagctgatagacatggctgtgctggaggaaattcaacaggagctgatcaaccaagaggtaacccctagtagtagtccttccttacctgtatttagctactggaatactgtgacctttcctccaatcaggattagtttataagtcccctttgtctacctccatcagtcaagtgtccaaaagactccttttgtactctgacatcttggctgtctagcttctcaataataagggtctccagggtgctagaccttgtgctaagaacttctcatttaatgatgctgttttctccatgtgactgccctgtaagatagtagtattagaacagaaggtggttggtgttctcgtgcaggtcatacagctagtaagtggaggagatgggaagcaaaatcagttgtatgaatccagttcccatgtttcttctaccatcctgcctctctattaatgggttaatagttcactgagggtggtggcttatgcctgtaatcccagcattttgagaggctgaggcaggagtattgcttgaggccagttcaagaccagcatgggcaacataacaagatcctgtctctacagaagtaaaaaaaaaaaaaaaaaaattatctgggtgtggtagcaaatacttgtagcctccctcagccagaaggcttaggcaggaggatcacttgaacccaagagtttaaggttacagtgagctataattttaccacctcactccagcctggctgacagagggagaccctgtcacttt

SEQ ID NO: 381380 - DNA, 1631 bp, Homo sapiens
ggcgggctcttcgccgccgccgctggggccccgaaggcgaacgactaagaaggagctgtcttctccgtcccacaggaaaagctctccgccgaggccaaagaccacgtttctcgtcagcaactgcggcggcggcgacgaaggcaacgacgaagaagctggtttctcagcttcggttggactctggtttttcagtccctcccggagccgcaagaacacgacgtggttaggaagccaggtctgccacagctcgccgtcgcccaccggtccctcggcggccgccatcttggcccaactgctcccctcactccagttgctcagcccgccgctgagcacagccaatccgcggccgtccactcactgtttcggccaatcaccgagcagacggcccggaagctcgagaggctcgtgccaggtcggggggcgaaggcgaggccagcccaccaagcaggggcgtcaccaagggaaagccaatcaccattatttctgaagcccaagggggcgggacgagaagtcaacagaatggtggtgctgctggaaatctagcacctggggagagcctgagacttgtgtatctaattgcttattggacacctccatctgggtaaacccaggcatccagaactttccctcaagacttacctccctcagtgcaggtcgggctggcctcacgcatttcgcttggatgcctaaatctgtctccacgtggggccggtcgataaaacaacacttcccagaatacgctgcgatccattcgcggtctgcacccggaaagtacacctcccaggggtctgtgcgcgcctccagggaacgggtcttgtggctttgtctcccgcgaagaggagatggcggagtcgttgaggtctccgcgccgctccctgtacaaactggtgggctcgccgccttggaaagaggctttccggcagagatgcctggagagaatgagaaacagccgggacaggctcctaaacaggtaccgccaggctggaagcagtgggccagggaattctcagaacagctttctagttcaagaggtgatggaagaagagtggaatgctttgcagtcagtggagaattgtccagaagacttggctcagctggaggagctgatagacatggctgtgctggaggaaattcaacaggagctgatcaaccaaggcctgtgatacttgggctgtgatcctctagagccagcttggactcacatcattctatggggttgaagacaactcattccctctgaggagccttgtacatacaagccttttatttataacttattttgtattgaaacttttaaacaatactgaagaaaaaaaaacttttccgacatctgttcttggtcttttgtgacgcaggttgaagggggaggaatagaaaaagacaaactgccttggaggagataaaccaattttatgtctatcatgttatacaaaaatctagaaataatagatttgtacagaaaaaaatgataataaatgagaacacaaaacataaaaaaatttggtattttttcccccatgatattaggatgataatcatttcaaagcacatgtctagcttcagagtaggatttgttcactggccaaagcctgccatgaaactatggctttcagcatctgtctgctctactg

SEQ ID NO: 381381 - DNA, 1743 bp, Homo sapiens
ggcgggctcttcgccgccgccgctggggccccgaaggcgaacgactaagaaggagctgtcttctccgtcccacaggaaaagctctccgccgaggccaaagaccacgtttctcgtcagcaactgcggcggcggcgacgaaggcaacgacgaagaagctggtttctcagcttcggttggactctggtttttcagtccctcccggagccgcaagaacacgacgtggttaggaagccaggtctgccacagctcgccgtcgcccaccggtccctcggcggccgccatcttggcccaactgctcccctcactccagttgctcagcccgccgctgagcacagccaatccgcggccgtccactcactgtttcggccaatcaccgagcagacggcccggaagctcgagaggctcgtgccaggtcggggggcgaaggcgaggccagcccaccaagcaggggcgtcaccaagggaaagccaatcaccattatttctgaagcccaagggggcgggacgagaagtcaacagaatggtggtgctgctggaaatctagcacctggggagagcctgagacttgtgtatctaattgcttattggacacctccatctgggtaaacccaggcatccagaactttccctcaagacttacctccctcagtgcaggtcgggctggcctcacgcatttcgcttggatgcctaaatctgtctccacgtggggccggtcgataaaacaacacttcccagaatacgctgcgatccattcgcggtctgcacccggaaagtacacctcccaggggtctgtgcgcgcctccagggaacgggtcttgtggctttgtctcccgcgaagaggagatggcggagtcgttgaggtctccgcgccgctccctgtacaaactggtgggctcgccgccttggaaagaggctttccggcagagatgcctggagagaatgagaaacagccgggacaggctcctaaacaggtaccgccaggctggaagcagtgggccagggaattctcagaacagctttctagttcaagaggtgatggaagaagagtggaatgctttgcagtcagtggagaattgtccagaagacttggctcagctggaggagctgatagacatggctgtgctggaggaaattcaacaggagctgatcaaccaagagcagtccatcatcagcgagtatgagaagagcttgcagtttgatgaaaagtgtctcagcatcatgctggctgagtgggaggcaaacccactcatctgtcctgtatgtacaaatcttctgagttgacagagcagaagcttcgtgcctgtttagagggtagtataaatgagcacagtgcacattgtccccacacacctgaattttcagtcactggaggaacagaagaaaagtccagtcttctcatgagctgtctggcctgtgatacttgggctgtgatcctctagagccagcttggactcacatcattctatggggttgaagacaactcattccctctgaggagccttgtacatacaagccttttatttataacttattttgtattgaaacttttaaacaatactgaagaaaaaaaaacttttccgacatctgttcttggtcttttgtgacgcaggttgaagggggaggaatagaaaaagacaaactgccttggaggagataaaccaattttatgtctatcatgttatacaaaaatctagaaataatagatttgtacagaaaaaaatgataataaatgagaacacaaaac

SEQ ID NO: 381382 - DNA, 1836 bp, Homo sapiens
ggcgggctcttcgccgccgccgctggggccccgaaggcgaacgactaagaaggagctgtcttctccgtcccacaggaaaagctctccgccgaggccaaagaccacgtttctcgtcagcaactgcggcggcggcgacgaaggcaacgacgaagaagctggtttctcagcttcggttggactctggtttttcagtccctcccggagccgcaagaacacgacgtggttaggaagccaggtctgccacagctcgccgtcgcccaccggtccctcggcggccgccatcttggcccaactgctcccctcactccagttgctcagcccgccgctgagcacagccaatccgcggccgtccactcactgtttcggccaatcaccgagcagacggcccggaagctcgagaggctcgtgccaggtcggggggcgaaggcgaggccagcccaccaagcaggggcgtcaccaagggaaagccaatcaccattatttctgaagcccaagggggcgggacgagaagtcaacagaatggtggtgctgctggaaatctagcacctggggagagcctgagacttgtgtatctaattgcttattggacacctccatctgggtaaacccaggcatccagaactttccctcaagacttacctccctcagtgcaggtcgggctggcctcacgcatttcgcttggatgcctaaatctgtctccacgtggggccggtcgataaaacaacacttcccagaatacgctgcgatccattcgcggtctgcacccggaaagtacacctcccaggggtctgtgcgcgcctccagggaacgggtcttgtggctttgtctcccgcgaagaggagatggcggagtcgttgaggtctccgcgccgctccctgtacaaactggtgggctcgccgccttggaaagaggctttccggcagagatgcctggagagaatgagaaacagccgggacaggctcctaaacaggtaccgccaggctggaagcagtgggccagggaattctcagaacagctttctagttcaagaggtgatggaagaagagtggaatgctttgcagtcagtggagaattgtccagaagacttggctcagctggaggagctgatagacatggctgtgctggaggaaattcaacaggagctgatcaaccaaggtacaacctgagaatcacaagcggtgtggtggtgtgtcagtgtggcctgtccatcccatctcattcttctgagttgacagagcagaagcttcgtgcctgtttagagggtagtataaatgagcacagtgcacattgtccccacacacctgaattttcagtcactggaggaacagaagaaaagtccagtcttctcatgagctgtctggcctgtgatacttgggctgtgatcctctagagccagcttggactcacatcattctatggggttgaagacaactcattccctctgaggagccttgtacatacaagccttttatttataacttattttgtattgaaacttttaaacaatactgaagaaaaaaaaacttttccgacatctgttcttggtcttttgtgacgcaggttgaagggggaggaatagaaaaagacaaactgccttggaggagataaaccaattttatgtctatcatgttatacaaaaatctagaaataatagatttgtacagaaaaaaatgataataaatgagaacacaaaacataaaaaaatttggtattttttcccccatgatattaggatgataatcatttcaaagcacatgtctagcttcagagtaggatttgttcactggccaaagcctgccatgaaactatggctttcagcatctgtctgctctactg

SEQ ID NO: 381383 - DNA, 1819 bp, Homo sapiens
ggcgggctcttcgccgccgccgctggggccccgaaggcgaacgactaagaaggagctgtcttctccgtcccacaggaaaagctctccgccgaggccaaagaccacgtttctcgtcagcaactgcggcggcggcgacgaaggcaacgacgaagaagctggtttctcagcttcggttggactctggtttttcagtccctcccggagccgcaagaacacgacgtggttaggaagccaggtctgccacagctcgccgtcgcccaccggtccctcggcggccgccatcttggcccaactgctcccctcactccagttgctcagcccgccgctgagcacagccaatccgcggccgtccactcactgtttcggccaatcaccgagcagacggcccggaagctcgagaggctcgtgccaggtcggggggcgaaggcgaggccagcccaccaagcaggggcgtcaccaagggaaagccaatcaccattatttctgaagcccaagggggcgggacgagaagtcaacagaatggtggtgctgctggaaatctagcacctggggagagcctgagacttgtgtatctaattgcttattggacacctccatctgggtaaacccaggcatccagaactttccctcaagacttacctccctcagtgcaggtcgggctggcctcacgcatttcgcttggatgcctaaatctgtctccacgtggggccggtcgataaaacaacacttcccagaatacgctgcgatccattcgcggtctgcacccggaaagtacacctcccaggggtctgtgcgcgcctccagggaacgggtcttgtggctttgtctcccgcgaagaggagatggcggagtcgttgaggtctccgcgccgctccctgtacaaactggtgggctcgccgccttggaaagaggctttccggcagagatgcctggagagaatgagaaacagccgggacaggctcctaaacaggtaccgccaggctggaagcagtgggccagggaattctcagaacagctttctagttcaagaggtgtgctttgcagtcagtggagaattgtccagaagacttggctcagctggaggagctgatagacatggctgtgctggaggaaattcaacaggagctgatcaaccaaggtacaacctgagaatcacaagcggtgtggtggtgtgtcagtgtggcctgtccatcccatctcattcttctgagttgacagagcagaagcttcgtgcctgtttagagggtagtataaatgagcacagtgcacattgtccccacacacctgaattttcagtcactggaggaacagaagaaaagtccagtcttctcatgagctgtctggcctgtgatacttgggctgtgatcctctagagccagcttggactcacatcattctatggggttgaagacaactcattccctctgaggagccttgtacatacaagccttttatttataacttattttgtattgaaacttttaaacaatactgaagaaaaaaaaacttttccgacatctgttcttggtcttttgtgacgcaggttgaagggggaggaatagaaaaagacaaactgccttggaggagataaaccaattttatgtctatcatgttatacaaaaatctagaaataatagatttgtacagaaaaaaatgataataaatgagaacacaaaacataaaaaaatttggtattttttcccccatgatattaggatgataatcatttcaaagcacatgtctagcttcagagtaggatttgttcactggccaaagcctgccatgaaactatggctttcagcatctgtctgctctactg

SEQ ID NO: 381384 - DNA, 1602 bp, Homo sapiens
ggcgggctcttcgccgccgccgctggggccccgaaggcgaacgactaagaaggagctgtcttctccgtcccacaggaaaagctctccgccgaggccaaagaccacgtttctcgtcagcaactgcggcggcggcgacgaaggcaacgacgaagaagctggtttctcagcttcggttggactctggtttttcagtccctcccggagccgcaagaacacgacgtggttaggaagccaggtctgccacagctcgccgtcgcccaccggtccctcggcggccgccatcttggcccaactgctcccctcactccagttgctcagcccgccgctgagcacagccaatccgcggccgtccactcactgtttcggccaatcaccgagcagacggcccggaagctcgagaggctcgtgccaggtcggggggcgaaggcgaggccagcccaccaagcaggggcgtcaccaagggaaagccaatcaccattatttctgaagcccaagggggcgggacgagaagtcaacagaatggtggtgctgctggaaatctagcacctggggagagcctgagacttgtgtatctaattgcttattggacacctccatctgggtaaacccaggcatccagaactttccctcaagacttacctccctcagtgcaggtcgggctggcctcacgcatttcgcttggatgcctaaatctgtctccacgtggggccggtcgataaaacaacacttcccagaatacgctgcgatccattcgcggtctgcacccggaaagtacacctcccaggggtctgtgcgcgcctccagggaacgggtcttgtggctttgtctcccgcgaagaggagatggcggagtcgttgaggtctccgcgccgctccctgtacaaactggtgggctcgccgccttggaaagaggctttccggcagagatgcctggagagaatgagaaacagccgggacaggctcctaaacaggtaccgccaggctggaagcagtgggccagggaattctcagaacagctttctagttcaagaggtgatggaagaagagtggaatgctttgcagtcagtggagaattgtccagaagacttggctcagctggaggagctgatagacatggctgtgctggaggaaattcaacaggagctgatcaaccaagagcagtccatcatcagcgagtatgagaagagcttgcagtttgatgaaaagtgtctcagcatcatgctggctgagtgggaggcaaacccactcatctgtcctgtatgtacaaagcctgtgatacttgggctgtgatcctctagagccagcttggactcacatcattctatggggttgaagacaactcattccctctgaggagccttgtacatacaagccttttatttataacttattttgtattgaaacttttaaacaatactgaagaaaaaaaaacttttccgacatctgttcttggtcttttgtgacgcaggttgaagggggaggaatagaaaaagacaaactgccttggaggagataaaccaattttatgtctatcatgttatacaaaaatctagaaataatagatttgtacagaaaaaaatgataataaatgagaacacaaaac

SEQ ID NO: 381385 - DNA, 1547 bp, Homo sapiens
ggcgggctcttcgccgccgccgctggggccccgaaggcgaacgactaagaaggagctgtcttctccgtcccacaggaaaagctctccgccgaggccaaagaccacgtttctcgtcagcaactgcggcggcggcgacgaaggcaacgacgaagaagctggtttctcagcttcggttggactctggtttttcagtccctcccggagccgcaagaacacgacgtggttaggaagccaggtctgccacagctcgccgtcgcccaccggtccctcggcggccgccatcttggcccaactgctcccctcactccagttgctcagcccgccgctgagcacagccaatccgcggccgtccactcactgtttcggccaatcaccgagcagacggcccggaagctcgagaggctcgtgccaggtcggggggcgaaggcgaggccagcccaccaagcaggggcgtcaccaagggaaagccaatcaccattatttctgaagcccaagggggcgggacgagaagtcaacagaatggtggtgctgctggaaatctagcacctggggagagcctgagacttgtgtatctaattgcttattggacacctccatctgggtaaacccaggcatccagaactttccctcaagacttacctccctcagtgcaggtcgggctggcctcacgcatttcgcttggatgcctaaatctgtctccacgtggggccggtcgataaaacaacacttcccagaatacgctgcgatccattcgcggtctgcacccggaaagtacacctcccaggggtctgtgcgcgcctccagggaacgggtcttgtggctttgtctcccgcgaagaggagatggcggagtcgttgaggtctccgcgccgctccctgtacaaactggtgggctcgccgccttggaaagaggctttccggcagagatgcctggagagaatgagaaacagccgggacaggctcctaaacaggtaccgccaggctggaagcagtgggccagggaattctcagaacagctttctagttcaagaggtgatggaagaagagtggaatgctttgcagtcagtggagaattgtccagaagacttggctcagctggaggagctgatagacatggctgtgctggaggaaattcaacaggagctgatcaaccaagagcagtccatcatcagcgagtatgagaagagcttgcagtttgatgaaaagtgtctcagcatcatgctggctgagtgggaggcaaacccactcatctgtcctgtatgtacaaagtaagagtttttaaaaccttttcagcattattcgttcccattccccactccaaggtgagtggaatctccccccagatttgttgcctgaaattcaaggtttggagatccaggtcctcgagcccccacctctgccgaccctctgctctagctacaccctccccaccacagctccctcatgccgcccctcccctccccccaccccccccttccatgccacccaccccgcccccccaccagccacccccttctccctccctcccctgccggaccccgccctccg

SEQ ID NO: 381386 - DNA, 521 bp, Homo sapiens
aaagttcattacaggaagtaatgaaggtatccaggagtagcacagatgaattatcacatcgtgaacacacccatgtagccagcaccatgcccagctagtttttgtattttcagtagagacgggattacaccatgttggccaggatggtctcgagctcctgacctcgtgatccgcccgccttggcatcccaaagtgctgggattataggcgtgacacacacgcctaagtaagttgtaaacataagttgttcagccgcatctcccaaagccagtaaattctcctatatagctgcaatcatcacactttaagacagtgaacactaattgcacaaaatctaacccagttcatgttcagatttcccctgagggaactccagggatggtttcggggatgagggaagatacttaggtttcaggtttcccagggttcctaggaacatcagcccacccttccaattttacagaagagacagatccacagagcagaacagcctccccaagccacagagttggtgacccagc

SEQ ID NO: 381387 - DNA, 3124 bp, Homo sapiens
gaagctccacaccagccattacaaccctgccaatctcaagcacctgcctctacagttggtacagatggcattgtcccagtctgttcccttctcggccacagagcttctcctggcctctgccatcttctgcctggtattctgggtgctcaagggtttgaggcctcgggtccccaaaggcctgaaaagtccaccagagccatggggctggcccttgctcgggcatgtgctgaccctggggaagaacccgcacctggcactgtcaaggatgagccagcgctacggggacgtcctgcagatccgcattggctccacgcccgtgctggtgctgagccgcctggacaccatccggcaggccctggtgcggcagggcgacgatttcaagggccggcctgacctctacacctccaccctcatcactgatggccagagcttgaccttcagcacagactctggaccggtgtgggctgcccgccggcgcctggcccagaatgccctcaacaccttctccatcgcctctgacccagcttcctcatcctcctgctacctggaggagcatgtgagcaaggaggctaaggccctgatcagcaggttgcaggagctgatggcagggcctgggcacttcgacccttacaatcaggtggtggtgtcagtggccaacgtcattggtgccatgtgcttcggacagcacttccctgagagtagcgatgagatgctcagcctcgtgaagaacactcatgagttcgtggagactgcctcctccgggaaccccctggacttcttccccatccttcgctacctgcctaaccctgccctgcagaggttcaaggccttcaaccagaggttcctgtggttcctgcagaaaacagtccaggagcactatcaggactttgacaagaacagtgtccgggacatcacgggtgccctgttcaagcacagcaagaaggggcctagagccagcggcaacctcatcccacaggagaagattgtcaaccttgtcaatgacatctttggagcaggatttgacacagtcaccacagccatctcctggagcctcatgtaccttgtgaccaagcctgagatacagaggaagatccagaaggagctggacactgtgattggcagggagcggcggccccggctctctgacagaccccagctgccctacttggaggccttcatcctggagaccttccgacactcctccttcttgcccttcaccatcccccacagcacaacaagggacacaacgctgaatggcttctacatccccaagaaatgctgtgtcttcgtaaaccagtggcaggtcaaccatgacccagagctgtgggaggacccctctgagttccggcctgagcggttcctcaccgccgatggcactgccattaacaagcccttgagtgagaagatgatgctgtttggcatgggcaagcgccggtgtatcggggaagtcctggccaagtgggagatcttcctcttcctggccatcctgctacagcaactggagttcagcgtgccgccgggcgtgaaagtcgacctgacccccatctacgggctgaccatgaagcacgcccgctgtgaacatgtccaggcgcggctgcgcttctccatcaattgaagaagacaccaccattctgaggccagggagcgagtgggggccagccacggggactcagcccttgtttctcttcctttctttttttaaaaaatagcagctttagccaagtgcagggcctgtaatcccagcattttgggaggccggggttggaggatcatttgagcccaggaattggaaagcagcctggccaacatagtgggaccctgtctctacaaaaaaaaaatttgccaagagcctgagtgacagagcaagaccccatctcaaaaaaaaaacaaacaaacaaaaaaaaaaccatatatatacatatatatatagcagctttatggagatataattcttatgccatataattcaccttcttttttttttttgtctgagacagaatctcagtctgtcacccaggttggagtgcagtggcgtgatctcagctcactgcaacctccacctcgcaggttcaagcaatcctcccacttcagcctcccaagcacctgggattacaagcatgagtcactacgcctggctgatttttgtagttttagtggagatggggtttcaccatgttggccaggcttgtctcgaactcctgaccccaagttatccacctgccttggcttcccaaagtcctgggattacaggtgtgagccaccacatccagcctaacttacattcttaaagtgtcgaatgacttctagtgtagaattgtgcaaccatcaccagaattaattttattattcttattatttttgagacagagtcttactctgttgccaggctggagtgcagtggcgcgatctcagctcactacaacctccgcctcccatgttcaagcgattctcctgcctcagcctcccgagtagctgggactataggcatgcgccaccatggccagctaatttttgtatttttagtagagacgaggtttcactgtgttggccaggatggtctccatctcttgacctcgtgatccacccgcctcagcctcccaaagtgctgggattaacaggtatgaaccaccgcgcccagcctttttgtttttttttttttgagacagagtcttcctctgtctcctaagctggagtgcagtggcatcatctcagctcactgcaacctctgcctcccaggttcaagtgcttctccagcctcggcctcccaagtagctgagactacaggcacacaccaccacgcctggctaatttttgtatttttggtagagacgggtttcaccatgttggtcagactagtctcaaactcctgacctcaagtgatctgcccgcctcgacctctctcaaaatgctggcattacaggtgtgagccacggtgcccggcccacaattaattttagaacattttcatcacccctaaaagaaaccctgcacccattagcagtccctccacatttccccctagcctgcctcccctgcctcaccagccctggcaactgctaatctactttctgtgtctatggatttgccttctctaaacatttcatataaatggaattacacaatg

SEQ ID NO: 381388 - DNA, 2004 bp, Homo sapiens
gagtgcagtgagctgagatcgcaccactgtactccagcctgggtgataggagccggagggtgtctcaaaaaaaaaaaaagaaagaactttcaaagtgccctcacacttgtgttctcaacagaagtctccctcccccaggcacctcctcccagggcctctccagccctgaggtcccatctcctctgttcctcttgcagagagctgtgggaggacccctctgagttccggcctgagcggttcctcaccgccgatggcactgccattaacaagcccttgagtgagaagatgatgctgtttggcatgggcaagcgccggtgtatcggggaagtcctggccaagtgggagatcttcctcttcctggccatcctgctacagcaactggagttcagcgtgccgccgggcgtgaaagtcgacctgacccccatctacgggctgaccatgaagcacgcccgctgtgaacatgtccaggcgcggctgcgcttctccatcaattgaagaagacaccaccattctgaggccagggagcgagtgggggccagccacggggactcagcccttgtttctcttcctttctttttttaaaaaatagcagctttagccaagtgcagggcctgtaatcccagcattttgggaggccggggttggaggatcatttgagcccaggaattggaaagcagcctggccaacatagtgggaccctgtctctacaaaaaaaaaatttgccaagagcctgagtgacagagcaagaccccatctcaaaaaaaaaacaaacaaacaaaaaaaaaaccatatatatacatatatatatagcagctttatggagatataattcttatgccatataattcaccttcttttttttttttgtctgagacagaatctcagtctgtcacccaggttggagtgcagtggcgtgatctcagctcactgcaacctccacctcgcaggttcaagcaatcctcccacttcagcctcccaagcacctgggattacaagcatgagtcactacgcctggctgatttttgtagttttagtggagatggggtttcaccatgttggccaggcttgtctcgaactcctgaccccaagttatccacctgccttggcttcccaaagtcctgggattacaggtgtgagccaccacatccagcctaacttacattcttaaagtgtcgaatgacttctagtgtagaattgtgcaaccatcaccagaattaattttattattcttattatttttgagacagagtcttactctgttgccaggctggagtgcagtggcgcgatctcagctcactacaacctccgcctcccatgttcaagcgattctcctgcctcagcctcccgagtagctgggactataggcatgcgccaccatggccagctaatttttgtatttttagtagagacgaggtttcactgtgttggccaggatggtctccatctcttgacctcgtgatccacccgcctcagcctcccaaagtgctgggattaacaggtatgaaccaccgcgcccagcctttttgtttttttttttttgagacagagtcttcctctgtctcctaagctggagtgcagtggcatcatctcagctcactgcaacctctgcctcccaggttcaagtgcttctccagcctcggcctcccaagtagctgagactacaggcacacaccaccacgcctggctaatttttgtatttttggtagagacgggtttcaccatgttggtcagactagtctcaaactcctgacctcaagtgatctgcccgcctcgacctctctcaaaatgctggcattacaggtgtgagccacggtgcccggcccacaattaattttagaacattttcatcacccctaaaagaaaccctgcacccattagcagtccctccacatttccccctagcctgcctcccctgcctcaccagccctggcaactgctaatctactttctgtgtctatggatttgccttctctaaacatttcatataaatggaattacacaatg

SEQ ID NO: 381389 - DNA, 621 bp, Homo sapiens
acttaagctataaaatagaggctatagtaataatctccacctgtttcatagctcaagaaatagcatctttatttagcggtgcctacatcttttatgtttaaaattccttaagacaagacatctgtacacaatgtagctatagtgtgatttacaataactttgtgtttttgttatcagcaagagatcacttacaaagagacaatacaccctttgtacttgctagtaaaacactacatagttttacatgtcaagcatatgtaaggcatggtggaagtcaggaaggataaattcattacatgcctgtcatcacatcagaaatccacctcaatcagaagtggtgtgggagttgaaacatatctgccactcaggtgatatattaatcagatttgccctttgaattgtacagtaagagctgtaatggcattacatatttatggccaaaattggctcattagtggatagctttgatttggaggttaaaaaaaaaaaatctaactatgttttattttccaaacccagttttactaacatgttgtagcttctcataaaatattttgaactagtaacattaagttttgacaaaagcttgtaacctgaggggaaaaaaaattggtcagatac

SEQ ID NO: 381390 - DNA, 437 bp, Homo sapiens
tctgagacagggtctcactctattgtctgggccagagtgcagtggtgtgattatgcctcactgcagtccttgacctcctgggctcaggggatccccccacctcagcctcccaagtagctgggactaaaggcatgcaccaatcatgcccagccaattttttaattttttgtagagatgggggtctcactatattgcccaggctggtctcaaattcctgggcccaagttatcctccaatctcagtctcccaaagtattggaattacgggcctgtgagccatggcgcccagcctgctcactgctcttaaagcatcaagttgcagatgcttatttcagctgtcactcacatctacatgtgtgattattccatgaaagttaatttcccctctagtctagactattgctctttgagaacatcagccacgtctgcctttgcttt

SEQ ID NO: 381391 - DNA, 379 bp, Homo sapiens
agacaaaaagagggctgaactattttgtttttattcacactgtcatgaaatccatttaggagttgaggtcagcattagaaaagcgttattaatgaatctggatagaggatttaaaagcattcaaaatcaaaactaaaataaactaatatcatatttatataacaccaaggcactctaagcatgaaaagcttatggttaactacatgatatctgtatacttcttctccaaactaattgagttacatgcttacaagagtcaatttgcatttgtactccaaagtatttatgcctattatacttatagaatatatttaaatatgtaaactaatgaaatacaaatagaaagttattttctataaaaactaaattgataaacatg

SEQ ID NO: 381392 - DNA, 354 bp, Homo sapiens
cagagaagcaacgtagctttctgatagaaacagaggcaagggtagaacccaggtctcctgtccctaaacaactatcctttgtttcagttccagcatacgttcatattctttgcctgatcatatgtttacacaagcttgtatattactgtcattttctaaaataacaaaccttacatttttattgcttttaatcaatctgttttatttttttctattttcctacacatctaaaatcttgataataatcctgtttaatcattaggatgataataaaaataaaataatagcagtcccttatgaagtacaattattgcattctaatagatttacagggtgaatattatagtcctgatt

SEQ ID NO: 381393 - DNA, 234 bp, Homo sapiens
  misc_feature (39)..(39): n is a, c, g, or t
cttccctgcatcaaccacattgtgtgataatactatttncttataattttagtgtaaatacttataaattttaagatgcacaccttacttctgaagcttcaagagctctagaaagaaactgtttatcctcattttacagaaggaatgtgtttcacaagaagttacatatctagaaaggattatggctagaattcaaacccacatttttaatcccatataactacagaaaataca

SEQ ID NO: 381394 - DNA, 488 bp, Homo sapiens
cagaacctacatgtgtcatttcactgctttaaaacctcttgcctcctacatgcctacagagaccctttgtaaatagtctctgagatccttcctttaacccattccccttccctgcacatacaaacgctgcttctctttactccctggactgcaggcctcttgataaatttgagtctctgaacacactgttctttctgtttggaatgtcctttcacccccattttgttgcccagaaaattcctactcatctataagccccgttcacgtggcaccttttttgatgaggcatccctagttcccctgtcccattttcttatagcatctagtagacctctgtgttctcacactcatcctcagtaccacggttgtcccctgaaaggtgttgtgtccctcaccagactgggagcacctcaagggcagaacccatgtcatgttcctttttgtatttccagacctgaaactgccagtaaataaaccctaaaagtaga

SEQ ID NO: 381395 - DNA, 509 bp, Homo sapiens
cagaacctacatgtgtcatttcactgctttaaaacctcttgcctcctacatgcctacagagaccctttgtaaatagtctctgagatccttcctttaacccattccccttccctgcacatacaaacgctgcttctctttactccctggactgcaggcctcttgataaatttgagtctctgaacacactgttctttctgtttggaatgtcctttcacccccattttgttgcccagaaaattcctactcatctataagccccgttcacgtggcaccttttttgatgaggcatccctagttcccctgtcccattttcttatagcatctagtagacctctgtgttctcacactcatcctcagtaccacggttgtcccctgaaaggtgttgtgtccctcaccagactgggagcacctcaagggcagaacccatgtcatgttcctttttgtatttccagactgtgaaagaacagtgtgttcagacactcaaatttatcaagaggcctgcagtcgac

SEQ ID NO: 381396 - DNA, 488 bp, Homo sapiens
gggaatatatattcctccctcaaaggactgtgaggattagacacaactgagatgacacacgagaagtgtagggcacaaagtcggtattcagaagatgatttttaaaatatcaccacttcattcctgcataaggaatgctgttggtggtgatattgccattcctgtgaggcactgaggaaaagctctcttaggagataagggctgtagtagttggaagaattacaggcttccttaattccagaggcctcagtgcccttcagaggatatcattcatatgaagaggtctgtatttaaaaattggagatagcagatcatctgtgatccattctcatgagtgcagagaagcactttcatagattcttgtttcttcctctgtgtgtgtgtgtgtgtgtgtgtgtgtatgtatgtgtgcaccgagcacctgtgcttgtgcttgaattcctcctggtgtttccccctggaaagttccttaaaaattgttagttaaa

SEQ ID NO: 381397 - DNA, 293 bp, Homo sapiens
tgaagcacagagcttacatatcttatatcatccacactcaacacatgctactgtagttgtctgataatgggtctctgtcttcctatgactgggctccttgacctcagaggtgagtctaactcagcttggtgtctccatcacccccagcatagggccagctccatcactggcaccagataaccaccttctgagggagtagatggaagatgattcagcagatagttctgaaagtctgtggctctttatgtgtcttgactggatatgtgggtttcttgctgcatgtatagtggaag

SEQ ID NO: 381398 - DNA, 1506 bp, Homo sapiens
ccgcctcgcgccgagactagaagcgctgcgggaagcagggacagtggagagggcgctgcgctcgggctacccaatgcgtggactatctgccgccgctgttcgtgcaatatgctggagctccagaacagctaaacggagtcgccacaccactgtttgtgctggatcgcagcgctgcctttccttatgaagaagacacaaacttggattctcacttgcatttatcttcagctgctcctatttaatcctctcgtcaaaactgaagggatctgcaggaatcgtgtgactaataatgtaaaagacgtcactaaattggtggcaaatcttccaaaagactacatgataaccctcaaatatgtccccgggatggatgttttgccaagtcattgttggataagcgagatggtagtacaattgtcagacagcttgactgatcttctggacaagttttcaaatatttctgaaggcttgagtaattattccatcatagacaaacttgtgaatatagtcgatgaccttgtggagtgcgtcaaagaaaactcatctaaggatctaaaaaaatcattcaagagcccagaacccaggctctttactcctgaagaattctttagaatttttaatagatccattgatgccttcaaggactttgtagtggcatctgaaactagtgattgtgtggtttcttcaacattaagtcctgagaaagattccagagtcagtgtcacaaaaccatttatgttaccccctgttgcagccagctcccttaggaatgacagcagtagcagtaataggaaggccaaaaatccccctggagactccagcctacactgggcagccatggcattgccagcattgttttctcttataattggctttgcttttggagccttatactggaagaagagacagccaagtcttacaagggcagttgaaaatatacaaattaatgaagaggataatgagataagtatgttgcaagagaaagagagagagtttcaagaagtgtaattgtggcttgtatcaacactgttactttcgtacattggctggtaacagttcatgtttgcttcataaatgaagcagctttaaacaaattcatattctgtctggagtgacagaccacatctttatctgttcttgctacccatgactttatatggatgattcagaaattggaacagaatgttttactgtgaaactggcactgaattaatcatctataaagaagaacttgcatggagcaggactctattttaaggactgcgggacttgggtctcatttagaacttgcagctgatgttggaagagaaagcacgtgtctcagactgcatgtaccatttgcatggctccagaaatgtctaaatgctgaaaaaacacctagctttattcttcagatacaaactgcagcctgtagttatcctggtctctgcaagtagatttcagcttggatagtgagggtaacaatttttctcaaagggatctggaaaaaatgtttaaaactcagtagtg

SEQ ID NO: 381399 - DNA, 1422 bp, Homo sapiens
ccgcctcgcgccgagactagaagcgctgcgggaagcagggacagtggagagggcgctgcgctcgggctacccaatgcgtggactatctgccgccgctgttcgtgcaatatgctggagctccagaacagctaaacggagtcgccacaccactgtttgtgctggatcgcagcgctgcctttccttatgaagaagacacaaacttggattctcacttgcatttatcttcagctgctcctatttaatcctctcgtcaaaactgaagggatctgcaggaatcgtgtgactaataatgtaaaagacgtcactaaattggtggcaaatcttccaaaagactacatgataaccctcaaatatgtccccgggatggatgttttgccaagtcattgttggataagcgagatggtagtacaattgtcagacagcttgactgatcttctggacaagttttcaaatatttctgaaggcttgagtaattattccatcatagacaaacttgtgaatatagtcgatgaccttgtggagtgcgtcaaagaaaactcatctaaggatctaaaaaaatcattcaagagcccagaacccaggctctttactcctgaagaattctttagaatttttaatagatccattgatgccttcaaggactttgtagtggcatctgaaactagtgattgtgtggtttcttcaacattaagtcctgagaaagggaaggccaaaaatccccctggagactccagcctacactgggcagccatggcattgccagcattgttttctcttataattggctttgcttttggagccttatactggaagaagagacagccaagtcttacaagggcagttgaaaatatacaaattaatgaagaggataatgagataagtatgttgcaagagaaagagagagagtttcaagaagtgtaattgtggcttgtatcaacactgttactttcgtacattggctggtaacagttcatgtttgcttcataaatgaagcagctttaaacaaattcatattctgtctggagtgacagaccacatctttatctgttcttgctacccatgactttatatggatgattcagaaattggaacagaatgttttactgtgaaactggcactgaattaatcatctataaagaagaacttgcatggagcaggactctattttaaggactgcgggacttgggtctcatttagaacttgcagctgatgttggaagagaaagcacgtgtctcagactgcatgtaccatttgcatggctccagaaatgtctaaatgctgaaaaaacacctagctttattcttcagatacaaactgcagcctgtagttatcctggtctctgcaagtagatttcagcttggatagtgagggtaacaatttttctcaaagggatctggaaaaaatgtttaaaactcagtagtg

SEQ ID NO: 381400 - DNA, 617 bp, Homo sapiens
  misc_feature (28)..(28): n is a, c, g, or t
  misc_feature (587)..(587): n is a, c, g, or t
ctactactactaaattcgcggccgcgtngacgttgccttctctcatgtcatgcctgtatgtatacacagacacatatgaaatgcatataggcatgcttggtatgtgtatatgcatatacagagaaagaaatgttttaactacttggaaagactaccttaagacaaatgaagtcttccctcttccctatagtaataagaaggtaggctccccattcaattttgcaatcttctgctactatatttacagaaaagctgccttttacaatgccgagatcatggtgtacctcagaatctctgaccaagagcaaataagcattttttcttattgtttttcagtatgttgcaagagaaagagagagagtttcaagaagtgtaattgtggcttgtatcaacactgttactttcgtacattggtaagtttttttcttctttcctttttttttcttttttttattatactttaagttctagggtacatgtgcacaatgtgcaggtttgttacgtatgtttacatgtgccgtgttggtgtgctgcacccattaactcgtcatttacattaggtatatctcctaatgctatcccttgtngacgcggccgcgaatttagtagtagtaggc

SEQ ID NO: 381401 - DNA, 1002 bp, Homo sapiens
  misc_feature (1002)..(1002): n is a, c, g, or t
ccgcctcgcgccgagactagaagcgctgcgggaagcagggacagtggagagggcgctgcgctcgggctacccaatgcgtggactatctgccgccgctgttcgtgcaatatgctggagctccagaacagctaaacggagtcgccacaccactgtttgtgctggatcgcagcgctgcctttccttatgaagaagacacaaacttggattctcacttgcatttatcttcagctgctcctatttaatcctctcgtcaaaactgaagggatctgcaggaatcgtgtgactaataatgtaaaagacgtcactaaattggtggcaaatcttccaaaagactacatgataaccctcaaatatgtccccgggatggatgttttgccaagtcattgttggataagcgagatggtagtacaattgtcagacagcttgactgatcttctggacaagttttcaaatatttctgaaggcttgagtaattattccatcatagacaaacttgtgaatatagtcgatgaccttgtggagtgcgtcaaagaaaactcatctaaggatctaaaaaaatcattcaagagcccagaacccaggctctttactcctgaagaattctttagaatttttaatagatccattgatgccttcaaggactttgtagtggcatctgaaactagtgattgtgtggtttcttcaacattaagtcctgagaaagggaaggccaaaaatccccctggagactccagcctacactgggcagccatggcattgccagcattgttttctcttataattggctttgcttttggagccttatactggaagaagagacagccaagtcttacaagggcagttgaaaatatacaaattaatgaagaggataatgagataagtatgttgcaagagaaagagagagagtttcaagaagtgtaattgtggcttgtatcaacactgttactttcgtacattggaggctgaggcaggagaatcgcttgaacctggcgctgagtgcan

SEQ ID NO: 381402 - DNA, 432 bp, Homo sapiens
catactgaaagggtgggtgtggtactggtcacatggcatagagcctttaactcagcttttaagtgttttgtttgcttgaacatgcactttgaaaggacctcacaaaactggttctccatgacaatgtgtggttacctgctaactctggctatggacagatgagaaacatacatggtcaaaagtcaacctttgtttaaagtttctaagattaaaaataaacccctgccagccctgggagtctctgtaaggctaaacacaccctcccttgatagcagggtgttctcagatttctgcagtaataattatgccaggccagttgtggtggctcatgcctataatcccaacacttcgagaggctgacatgggaggatcacgtgaggctaggagtttgagatcagcctgggcaacacagcaggaccctgtctcttttta

SEQ ID NO: 381403 - DNA, 3435 bp, Homo sapiens
gaggaggaggggacccgccgccgggggctggctgcttcgctccgagccgacttttcgccaatggtccaaagggacatgtccaagtcgcctcccacagcggcggcggcggtggcgcaggagatccagatggaactgctagagaacgtggctcccgcgggggcgctcggagccgccgcacagtcatatggaaaaggagccagaaggaaaaacagatttaaaggatctgatggaagcacgtcatctgatactacctcaaatggttcggcagactcctacactagccgtccatccgattccgatgtatctctggaggaggaccgggaggcagtgcgcagagaagcggagcggcaggcccaggcacagttggaaaaagcaaagacaaagcccgttgcatttgcggttcggacaaatgtcagctacagtgcggcccatgaagatgatgttccagtgcctggcatggccatctcattcgaagcaaaagattttctgcatgttaaggaaaaatttaacaatgactggtggatagggcgattggtaaaagaaggctgtgaaatcggattcattccaagcccagtcaaactagaaaacatgaggctgcagcatgaacagagagccaagcaagggaaattctactccagtaaatcaggaggaaattcatcatccagtttgggtgacatagtacctagttccagaaaatcaacacctccatcatctgctatagacatagatgctactggcttagatgcagaagaaaatgatattccagcaaaccaccgctcccctaaacccagtgcaaacagtgtaacgtcaccccactccaaagagaaaagaatgcccttctttaagaagacagagcacactcctccgtatgatgtggtaccttccatgcgaccagtggtcctagtgggcccttctctgaagggctacgaggtcacagatatgatgcaaaaagcgctgtttgattttttaaaacacagatttgaagggcggatatccatcacaagggtcaccgctgacatctcgcttgccaaacgctcggtattaaacaatcccagtaagcacgcaataatagaaagatccaacacaaggtcaagcttagcggaagttcagagtgaaatcgaaaggatttttgaacttgcaagaacattgcagttggtggtccttgacgcggatacaattaatcatccagctcaactcagtaaaacctccttggcccctattatagtatatgtaaagatttcttctcctaaggttttacaaaggttaataaaatctcgagggaaatctcaagctaaacacctcaacgtccagatggtagcagctgataaactggctcagtgtcctccagagctgttcgatgtgatcttggatgagaaccagcttgaggatgcctgtgagcaccttgccgactatctggaggcctactggaaggccacccatcctcccagcagtagcctccccaaccctctccttagccgtacattagccacttcaagtctgcctcttagccccaccctagcctctaattcacagggttctcaaggtgatcagaggactgatcgctccgctcctatccgttctgcttcccaagctgaagaagaacctagtgtggaaccagtcaagaaatcccagcaccgctcttcctcctcagccccacaccacaaccatcgcagtgggacaagtcgcggcctctccaggcaagagacatttgactcggaaacccaggagagtcgagactctgcctacgtagagccaaaggaagattattcccatgaccacgtggaccactatgcctcacaccgtgaccacaaccacagagacgagacccacgggagcagtgaccacagacacagggagtcccggcaccgttcccgggacgtggatcgagagcaggaccacaacgagtgcaacaagcagcgcagccgtcataaatccaaggatcgctactgtgaaaaggatggagaagtgatatcaaaaaaacggaatgaggctggggagtggaacagggatgtttacatccgccaatgagttttgcccttttgtgtttttttttttttttttttgaagtcttgtataactaacagcatccccaaaacaaaaagtctttggggtctacactgcaatcatatgtgatctgtcttgtaatattttgtattattgctgttgcttgaatagcaatagcatggatagagtattgagatactttttcttttgtaagtgctacataaattggcctggtatggctgcagtcctccggttgcatactggactcttcaaaaactgttttgggtagctgccacttgaacaaaatctgttgccacccaggtgatgttagtgttttaagaaatgtagttgatgtatccaacaagccagaatcagcacagataaaaagtggaatttcttgtttctccagatttttaatacgttaatacgcaggcatctgatttgcatattcattcatggaccactgtttcttgcttgtacctctggctgactaaatttggggacagattcagtcttgccttacacaaaggggatcataaagttagaatctattttctatgtactagtactgtgtactgtatagacagtttgtaaatgttatttctgcaaacaaacaccttcttattatatataatatatatatatatatcagtttgatcacactattttagagtcttaatgccaagtcagcagatttgctttatgaattacagggactagaaatgcccacattcaggaaatttgtaataacattgtctagacacctatcctcattctagtagaaagtgtgtacatactgtaaatatgtgtgattgcttgacttgaaaaggtttgaattctgaatgttataccatccttgtaagtaagtttgtaatttccaccataaattatggtaaatataaaactccagaggttgttctactccatacagttcacactgattgtgacacattcttagtagctagtgtctgttctagtcactgcactggagtctacgagccggaactcgctatatgcacgtgtgtgtgtccgtatgtaagaaagtgtgcaccgagtgactgaatggttgagatgaattggaatgctgaagactaacgaagaaactagagactgatatcgagcattctgcccacctcgctctgtatttaattaattgtgctatatgttgctttaacaacccattgagcagtcagggaatgtgagtaagcttgctgccaaaggtaactaggaaagcattcatctgctgcctccttgtttttgctcctagagagtgaaaatacaggcaattttactgtgagtgtttcactggaaatgtacaatctttgtgtgttagagtatttgttttagtaagaaatgtttgtttacacagcttgtggaattatttcgtgggaaaataaatttttataacttctcccacttcaatttctaacc

SEQ ID NO: 381404 - DNA, 384 bp, Homo sapiens
catgtacacagaaggggaaccttgaagacattatctccatgcctcaaccgtgtctcaagtgtatattttgtccagttataactggatggtaagacagtattaagagtgcaagtacctggcacttgaagtttgtcccaggaaaatgcctgtgtataattacctaacttcagatctgcacattaacttatttaacaaaataaatcagccgggcgcagtggctcatgcctgtaatcccagcaatttgggaggctgaggagggtggatcacctgaggtcaggagttcaagaccagcctggccaacgtggcgaaaccctgtctctactaaaaagataaaaaattagccaggtgtggtggtgcacacctgcaatcccagctacttgggag

SEQ ID NO: 381405 - DNA, 712 bp, Homo sapiens
ccacttgcgtttgttaattgactttgatgagctcctctgctctgcctaagtggttctggaacagagagctgttgtgatccgacgaactttagaaagtcacactaactaagactacacaccccaagccagcaagaaaaaggaaagcagttgctatgctgttcagcaaagcaagacttggctgccttttagctagtcctgaattcttgctcctgtgaagaaaattcctgctggagtgctgggcgcacttggaattggtctagcatgcttgacagacgccttatagctcctcaaactaaatacattattcctggggtaagcatacgggagagaagccggccagatgcacggtgcggtttaaagaaaacaggaatgcatagaactgttgccgagcttgagctaaaatcatactagttacttaactttttagactttcttatcttgccagaaatgttgccattcacagtgttattactttaatgctgtggtgatttaagcaagtgaaactgtaactctggttttaaactgtatgttactgagcttcatttagtagcttagggagagagtcccggtgcagacaaatttagtggaaaatgaaaatgctttttccagctatagaccagcacttgtcttgagtatcactctgacagcctagccactgacttcttgtgtgtctgagacctatctgtgtaaatcaggatggtctgacttgctg

SEQ ID NO: 381406 - DNA, 737 bp, Homo sapiens
atttataaaactgtttgcacaaaggtaaattgtcctgtgacatgaaatatttaaggtacacttcaatatttatctctttctctcaataattccaattggtctgattatataaggggaagatttctgtaacagtacttcctaaagatctcttggtaggatgggctgttattctttgaacccagagagcttatccctactcatggtgacagcagctgctgcaagggaattcagcctggtcctacggcagcaccaggacagacaaggaacgcagagcctttgatagattgctgaggacgctaaatgcatttcttacatgtgaaacccatgagccgaagggtttcttgaatgataatatttaaggcatagttaatggtcattgccatatttctctaatgcttttgattttgtgtttagaaatttaacaatgactggtggatagggcgattggtaaaagaaggctgtgaaatcggattcattccaagcccagtcaaactagaaaacatgaggctgcagcatgaacagagagccaagcaagggaaattctactccaggtatgagacagatgtcaagtgtttgcataaaacttagattataccactatctgtgtactgttgtctgctgtattctgtatcctttattatgtattaacaaggaggctggtaatatggtttattgatagcatcacaaatcttgcattttcctgcatttaaaaaacttcagtccagcacctgattttc

SEQ ID NO: 381407 - DNA, 684 bp, Homo sapiens
gggaagagaatgtttagggttatgagatgcattaagtttagaacgagttgatgctcggcttttgaatgcacttgtcttctttatttttaaagcaatataaagcactcgagtgtgtgttttcagcccctcctggaatgggaaaataagaatctccctggatgggagtcctctggggcagggagtgaaagccccggaggcagaaagggacggagaacaggggcttgcccagagcatggataggaaaggagctggggttctccggggctcagcgcgcactgagaacctgtgcccggggctgcagctgcggacgataaaggcgctgtctggctcatgaaggccacctggatcaggcttctgaaaagagccaagggaggaaggctgaagaattctgatatctgtggttcggcagactcctacactagccgtccatccgattccgatgtatctctggaggaggaccgggaggcagtgcgcagagaagcggagcggcaggcccaggcacagttggaaaaagcaaaggtaaaatcgtttcctccctgccaagatctttgcaagttgtgctgtgcccctgatagaccacctgtgggagtttcccctaaaggttgtttgatctattagagaatttcattgtctggttttagaaaggtacaaaaaatggagcctagtttcttcccttggtagaaa

SEQ ID NO: 381408 - DNA, 3943 bp, Homo sapiens
tcgtcttttgataggtggaggatgtttctgtagtcctaggaatccacagtgaattcgagtctagactcagtcatttttcagggtcaggggaggagggagaagtagcaaatcagatatgcccaaaacgttacaggggtaacagtgaatccaggatgctgctatcagcctgtgcattgtgaagaaggcaatcataggcgagcagccgcgggagcaggaacagcagcgtgctaagaagcagtcacataaacagcagcaggagtaggcctcctgcttttcaaaagcagagtactgcagggtcgcgaaatgcaagacactcagatgtttgaaaatctcccgagttgagaatggctactgtaaaagcgtcaccaagaaactctgacgatctggacagtcctaactctgtgttagcaatacttacttccggaaaattaatgctacttcttgtagatttttgcaaataggaaacccccttgaagaagatctcaaattacgccccccacccccaaaaaaagacaaacaggggagaacaaagttttggcatgcctgcaggaacggtggcttttttagaaactacctaggaggcagaagctaagtgatttgctcatgcctcttacctgggagtagaaggtgggaagaaatggaccgaggctgtgacgagaagacaaggcacagtgcagcttggtgaagccacacgctgactgcgttctgccccctcttcatgcagtgctgcgggctggtgcatcgccggcgagtacgggtgtcctatggttcggcagactcctacactagccgtccatccgattccgatgtatctctggaggaggaccgggaggcagtgcgcagagaagcggagcggcaggcccaggcacagttggaaaaagcaaagacaaagcccgttgcatttgcggttcggacaaatgtcagctacagtgcggcccatgaagatgatgttccagtgcctggcatggccatctcattcgaagcaaaagattttctgcatgttaaggaaaaatttaacaatgactggtggatagggcgattggtaaaagaaggctgtgaaatcggattcattccaagcccagtcaaactagaaaacatgaggctgcagcatgaacagagagccaagcaagggaaattctactccagtaaatcaggaggaaattcatcatccagtttgggtgacatagtacctagttccagaaaatcaacacctccatcatctgctatagacatagatgctactggcttagatgcagaagaaaatgatattccagcaaaccaccgctcccctaaacccagtgcaaacagtgtaacgtcaccccactccaaagagaaaagaatgcccttctttaagaagacagagcacactcctccgtatgatgtggtaccttccatgcgaccagtggtcctagtgggcccttctctgaagggctacgaggtcacagatatgatgcaaaaagcgctgtttgattttttaaaacacagatttgaagggcggatatccatcacaagggtcaccgctgacatctcgcttgccaaacgctcggtattaaacaatcccagtaagcacgcaataatagaaagatccaacacaaggtcaagcttagcggaagttcagagtgaaatcgaaaggatttttgaacttgcaagaacattgcagttggtggtccttgacgcggatacaattaatcatccagctcaactcagtaaaacctccttggcccctattatagtatatgtaaagatttcttctcctaaggttttacaaaggttaataaaatctcgagggaaatctcaagctaaacacctcaacgtccagatggtagcagctgataaactggctcagtgtcctccagagctgttcgatgtgatcttggatgagaaccagcttgaggatgcctgtgagcaccttgccgactatctggaggcctactggaaggccacccatcctcccagcagtagcctccccaaccctctccttagccgtacattagccacttcaagtctgcctcttagccccaccctagcctctaattcacagggttctcaaggtgatcagaggactgatcgctccgctcctatccgttctgcttcccaagctgaagaagaacctagtgtggaaccagtcaagaaatcccagcaccgctcttcctcctcagccccacaccacaaccatcgcagtgggacaagtcgcggcctctccaggcaagagacatttgactcggaaacccaggagagtcgagactctgcctacgtagagccaaaggaagattattcccatgaccacgtggaccactatgcctcacaccgtgaccacaaccacagagacgagacccacgggagcagtgaccacagacacagggagtcccggcaccgttcccgggacgtggatcgagagcaggaccacaacgagtgcaacaagcagcgcagccgtcataaatccaaggatcgctactgtgaaaaggatggagaagtgatatcaaaaaaacggaatgaggctggggagtggaacagggatgtttacatccgccaatgagttttgcccttttgtgtttttttttttttttttttgaagtcttgtataactaacagcatccccaaaacaaaaagtctttggggtctacactgcaatcatatgtgatctgtcttgtaatattttgtattattgctgttgcttgaatagcaatagcatggatagagtattgagatactttttcttttgtaagtgctacataaattggcctggtatggctgcagtcctccggttgcatactggactcttcaaaaactgttttgggtagctgccacttgaacaaaatctgttgccacccaggtgatgttagtgttttaagaaatgtagttgatgtatccaacaagccagaatcagcacagataaaaagtggaatttcttgtttctccagatttttaatacgttaatacgcaggcatctgatttgcatattcattcatggaccactgtttcttgcttgtacctctggctgactaaatttggggacagattcagtcttgccttacacaaaggggatcataaagttagaatctattttctatgtactagtactgtgtactgtatagacagtttgtaaatgttatttctgcaaacaaacaccttcttattatatataatatatatatatatatcagtttgatcacactattttagagtcttaatgccaagtcagcagatttgctttatgaattacagggactagaaatgcccacattcaggaaatttgtaataacattgtctagacacctatcctcattctagtagaaagtgtgtacatactgtaaatatgtgtgattgcttgacttgaaaaggtttgaattctgaatgttataccatccttgtaagtaagtttgtaatttccaccataaattatggtaaatataaaactccagaggttgttctactccatacagttcacactgattgtgacacattcttagtagctagtgtctgttctagtcactgcactggagtctacgagccggaactcgctatatgcacgtgtgtgtgtccgtatgtaagaaagtgtgcaccgagtgactgaatggttgagatgaattggaatgctgaagactaacgaagaaactagagactgatatcgagcattctgcccacctcgctctgtatttaattaattgtgctatatgttgctttaacaacccattgagcagtcagggaatgtgagtaagcttgctgccaaaggtaactaggaaagcattcatctgctgcctccttgtttttgctcctagagagtgaaaatacaggcaattttactgtgagtgtttcactggaaatgtacaatctttgtgtgttagagtatttgttttagtaagaaatgtttgtttacacagcttgtggaattatttcgtgggaaaataaatttttataacttctcccacttcaatttctaacc

SEQ ID NO: 381409 - DNA, 3423 bp, Homo sapiens
tcgtcttttgataggtggaggatgtttctgtagtcctaggaatccacagtgaattcgagtctagactcagtcatttttcagggtcaggggaggagggagaagtagcaaatcagatatgcccaaaacgttacaggggtaacagtgaatccaggatgctgctatcagcctgtgcattgtgaagaaggcaatcataggcgagcagccgcgggagcaggaacagcagcgtgctaagaagcagtcacataaacagcagcaggagtaggcctcctgcttttcaaaagcagagtactgcagggtcgcgaaatgcaagacactcagatgtttgaaaatctcccgagttgagaatggctactgtaaaagcgtcaccaagaaactctgacgatctggacagtcctaactctgtgttagcaatacttacttccggaaaattaatgctacttcttgtagatttttgcaaataggaaacccccttgaagaagatctcaaattacgccccccacccccaaaaaaagacaaacaggggagaacaaagttttggcatgcctgcaggaacggtggcttttttagaaactacctaggaggcagaagctaagtgatttgctcatgcctcttacctgggagtagaaggtgggaagaaatggaccgaggctgtgacgagaagacaaggcacagtgcagcttggtgaagccacacgctgactgcgttctgccccctcttcatgcagtgctgcgggctggtgcatcgccggcgagtacgggtgtcctatggttcggcagactcctacactagccgtccatccgattccgatgtatctctggaggaggaccgggaggcagtgcgcagagaagcggagcggcaggcccaggcacagttggaaaaagcaaagacaaagcccgttgcatttgcggttcggacaaatgtcagctacagtgcggcccatgaagatgatgttccagtgcctggcatggccatctcattcgaagcaaaagattttctgcatgttaaggaaaaatttaacaatgactggtggatagggcgattggtaaaagaaggctgtgaaatcggattcattccaagcccagtcaaactagaaaacatgaggctgcagcatgaacagagagccaagcaagggaaattctactccagtaaatcaggaggaaattcatcatccagtttgggtgacatagtacctagttccagaaaatcaacacctccatcatctgctatagacatagatgctactggcttagatgcagaagaaaatgatattccagcaaaccaccgctcccctaaacccagtgcaaacagtgtaacgtcaccccactccaaagagaaaagaatgcccttctttaagaagacagagcacactcctccgtatgatgtggtaccttccatgcgaccagtggtcctagtgggcccttctctgaagggctacgaggtcacagatatgatgcaaaaagcgctgtttgattttttaaaacacagatttgaagggcggatatccatcacaagggtcaccgctgacatctcgcttgccaaacgctcggtattaaacaatcccagtaagcacgcaataatagaaagatccaacacaaggtcaagcttagcggaagttcagagtgaaatcgaaaggatttttgaacttgcaagaacattgcagttggtggtccttgacgcggatacaattaatcatccagctcaactcagtaaaacctccttggcccctattatagtatatgtaaagatttcttctcctaaggttttacaaaggttaataaaatctcgagggaaatctcaagctaaacacctcaacgtccagatggtagcagctgataaactggctcagtgtcctccagagctgttcgatgtgatcttggatgagaaccagcttgaggatgcctgtgagcaccttgccgactatctggaggcctactggaaggccacccatcctcccagcagtagcctccccaaccctctccttagccgtacattagccacttcaagtctgcctcttagccccaccctagcctctaattcacagggttctcaaggtgatcagaggactgatcgctccgctcctatccgttctgcttcccaagctgaagaagaacctagtgtggaaccagtcaagaaatcccagcaccgctcttcctcctcagccccacaccacaaccatcgcagtgggacaagtcgcggcctctccaggcaagagacatttgactcggaaacccaggagagtcgagactctgcctacgtagagccaaaggaagattattcccatgaccacgtggaccactatgcctcacaccgtgaccacaaccacagagacgagacccacgggagcagtgaccacagacacagggagtcccggcaccgttcccgggacgtggatcgagagcaggaccacaacgagtgcaacaagcagcgcagccgtcataaatccaaggatcgctactgtgaaaaggatggagaagtgatatcaaaaaaacggaatgaggctggggagtggaacagggatgtttacatccgccaatgagttttgcccttttgtgtttttttttttttttttttgaagtcttgtataactaacagcatccccaaaacaaaaagtctttggggtctacactgcaatcatatgtgatctgtcttgtaatattttgtattattgctgttgcttgaatagcaatagcatggatagagtattgagatactttttcttttgtaagtgctacataaattggcctggtatggctgcagtcctccggttgcatactggactcttcaaaaactgttttgggtagctgccacttgaacaaaatctgttgccacccaggtgatgttagtgttttaagaaatgtagttgatgtatccaacaagccagaatcagcacagataaaaagtggaatttcttgtttctccagatttttaatacgttaatacgcaggcatctgatttgcatattcattcatggaccactgtttcttgcttgtacctctggctgactaaatttggggacagattcagtcttgccttacacaaaggggatcataaagttagaatctattttctatgtactagtactgtgtactgtatagacagtttgtaaatgttatttctgcaaacaaacaccttcttattatatataatatatatatatatatcagtttgatcacactattttagagtcttaatgccagcagcgattggttagggattcggggctaaagggccctccggaatgcgctactggctccatccctcgtaacggggcccggcaacatatggcgctccagaggactcaaggtacccgcacaggagttccccctgaggatcacgcgttccaccaacgaacctcagctacctcccacaccgcatcaacaaggggtatttccgctcagcggtgctttctttcatcgcagatcg

SEQ ID NO: 381410 - DNA, 2581 bp, Homo sapiens
gtatcctaacacatatggtttgaaaatatggttgctatatatatttcatacttagatgaatttggggcatacacttctatcccctttgattagaccaataaccttaaggtcttctgtgactttttcctccaacaggatatccatcacaagggtcaccgctgacatctcgcttgccaaacgctcggtattaaacaatcccagtaagcacgcaataatagaaagatccaacacaaggtcaagcttagcggaagttcagagtgaaatcgaaaggatttttgaacttgcaagaacattgcagttggtggtccttgacgcggatacaattaatcatccagctcaactcagtaaaacctccttggcccctattatagtatatgtaaagatttcttctcctaaggttttacaaaggttaataaaatctcgagggaaatctcaagctaaacacctcaacgtccagatggtagcagctgataaactggctcagtgtcctccagagctgttcgatgtgatcttggatgagaaccagcttgaggatgcctgtgagcaccttgccgactatctggaggcctactggaaggccacccatcctcccagcagtagcctccccaaccctctccttagccgtacattagccacttcaagtctgcctcttagccccaccctagcctctaattcacagggttctcaaggtgatcagaggactgatcgctccgctcctatccgttctgcttcccaagctgaagaagaacctagtgtggaaccagtcaagaaatcccagcaccgctcttcctcctcagccccacaccacaaccatcgcagtgggacaagtcgcggcctctccaggcaagagacatttgactcggaaacccaggagagtcgagactctgcctacgtagagccaaaggaagattattcccatgaccacgtggaccactatgcctcacaccgtgaccacaaccacagagacgagacccacgggagcagtgaccacagacacagggagtcccggcaccgttcccgggacgtggatcgagagcaggaccacaacgagtgcaacaagcagcgcagccgtcataaatccaaggatcgctactgtgaaaaggatggagaagtgatatcaaaaaaacggaatgaggctggggagtggaacagggatgtttacatccgccaatgagttttgcccttttgtgtttttttttttttttttttgaagtcttgtataactaacagcatccccaaaacaaaaagtctttggggtctacactgcaatcatatgtgatctgtcttgtaatattttgtattattgctgttgcttgaatagcaatagcatggatagagtattgagatactttttcttttgtaagtgctacataaattggcctggtatggctgcagtcctccggttgcatactggactcttcaaaaactgttttgggtagctgccacttgaacaaaatctgttgccacccaggtgatgttagtgttttaagaaatgtagttgatgtatccaacaagccagaatcagcacagataaaaagtggaatttcttgtttctccagatttttaatacgttaatacgcaggcatctgatttgcatattcattcatggaccactgtttcttgcttgtacctctggctgactaaatttggggacagattcagtcttgccttacacaaaggggatcataaagttagaatctattttctatgtactagtactgtgtactgtatagacagtttgtaaatgttatttctgcaaacaaacaccttcttattatatataatatatatatatatatcagtttgatcacactattttagagtcttaatgccaagtcagcagatttgctttatgaattacagggactagaaatgcccacattcaggaaatttgtaataacattgtctagacacctatcctcattctagtagaaagtgtgtacatactgtaaatatgtgtgattgcttgacttgaaaaggtttgaattctgaatgttataccatccttgtaagtaagtttgtaatttccaccataaattatggtaaatataaaactccagaggttgttctactccatacagttcacactgattgtgacacattcttagtagctagtgtctgttctagtcactgcactggagtctacgagccggaactcgctatatgcacgtgtgtgtgtccgtatgtaagaaagtgtgcaccgagtgactgaatggttgagatgaattggaatgctgaagactaacgaagaaactagagactgatatcgagcattctgcccacctcgctctgtatttaattaattgtgctatatgttgctttaacaacccattgagcagtcagggaatgtgagtaagcttgctgccaaaggtaactaggaaagcattcatctgctgcctccttgtttttgctcctagagagtgaaaatacaggcaattttactgtgagtgtttcactggaaatgtacaatctttgtgtgttagagtatttgttttagtaagaaatgtttgtttacacagcttgtggaattatttcgtgggaaaataaatttttataacttctcccacttcaatttctaacc

SEQ ID NO: 381411 - DNA, 657 bp, Homo sapiens
ttctcccacttcaatttctaaccttgcctattgttcctgttgtttgtttacctcccagttacctaccattcctccccaccaccgactccagcaggttcactgtctgtcagaacccagaagtgcttcttataaccaaagtttctgttcttcagaagaaatcagggcaaaatggggtgacttgaagtgaataaaatgttaagaatattatcctacataagacatgtacacagaaggggaaccttgaagacattatctccatgcctcaattacactgctgtaagaagcttacaatgtcatcatgtttaaggctaagaccttttccgtgtctcaagtgtatattttgtccagttataactggatggtaagacagtattaagagtgcaagtacctggcacttgaagtttgtcccaggaaaatgcctgtgtataattacctaacttcagatctgcacattaacttatttaacaaaataaatcagccgggcgcagtggctcatgcctgtaatcccagcaatttgggaggctgaggagggtggatcacctgaggtcaggagttcaagaccagcctggccaacgtggcgaaaccctgtctctactaaaaagataaaaaattagccaggtgtggtggtgcacacctgcaatcccagctacttgggag

SEQ ID NO: 381412 - DNA, 414 bp, Homo sapiens
aaaccaccgctcccctaaacccagtgcaaacagtgtaacgtcaccccactccaaagagaaaagaatgcccttctttaagaaggtaacattaacttccaagctcccattgtccacctgctcaactgcactgcgtcacatttctagtcctgttgactgtctgcgtcctttgataagccaataacgtgcatgctctgttatttgtttcttttccatgctgctgtagctaagcagaagcagaaatcggtaagtttacattgacataagctgtgtttatcctgccactggcatcattagcattaattcccacagttgtattaaatacaatcatttctgtcccaagcaaagaacctatcaacagctaattgagttcatgcatttcaaaccaactaaattcagggagtgacctgttaaaac

SEQ ID NO: 381413 - DNA, 423 bp, Homo sapiens
aatgggaaaataagaatctccctggatgggagtcctctggggcagggagtgaaagccccggaggcagaaagggacggagaacaggggcttgcccagagcatggataggaaaggagctggggttctccggggctcagcgcgcactgagaacctgtgcccggggctgcagctgcggacgataaaggcgctgtctggctcatgaaggccacctggatcaggcttctgaaaagagccaagggaggaaggctgaagaattctgatatctgtgtaagcgcaagggctttcgtttgtggggagaggttattttgtctctgcttttctgttgttgcagtgagtgcaggtagagagggtggtttgatttggttaatcggatcatgattgcaggagagggaagctagggagattcctctcattttttgagctc

SEQ ID NO: 381414 - DNA, 871 bp, Homo sapiens
ccacttgcgtttgttaattgactttgatgagctcctctgctctgcctaagtggttctggaacagagagctgttgtgatccgacgaactttagaaagtcacactaactaagactacacaccccaagccagcaagaaaaaggaaagcagttgctatgctgttcagcaaagcaagacttggctgccttttagctagtcctgaattcttgctcctgtgaagaaaattcctgctggagtgctgggcgcacttggaattggtctagcatgcttgacagacgccttatagctcctcaaactaaatacattattcctgggggttcggcagactcctacactagccgtccatccgattccgatgtatctctggaggaggaccgggaggcagtgcgcagagaagcggagcggcaggcccaggcacagttggaaaaagcaaagacaaagcccgttgcatttgcggttcggacaaatgtcagctacagtgcggcccatgaagatgatgttccagtgcctggcatggccatctcattcgaagcaaaagattttctgcatgttaaggaagtaaggagaataatttcattttctaacagcatgatgtttcaccttgacataccatttcttatttcctattcatatgccgtttctgtgaagtagcattgcacatcgctgcagttgtataacacacataactaaatcaatggctctcaacctctgctaatataaatataccttttaaagtggaaagaagtcacaggcctcttgcaataacttcagcgctccctggggctctgtggcccagaaattgggaactgctagagtagatgatccttttttatgcttaacctatacttttttttaatgtttcaccttgactagg

SEQ ID NO: 381415 - DNA, 3489 bp, Homo sapiens
ccacttgcgtttgttaattgactttgatgagctcctctgctctgcctaagtggttctggaacagagagctgttgtgatccgacgaactttagaaagtcacactaactaagactacacaccccaagccagcaagaaaaaggaaagcagttgctatgctgttcagcaaagcaagacttggctgccttttagctagtcctgaattcttgctcctgtgaagaaaattcctgctggagtgctgggcgcacttggaattggtctagcatgcttgacagacgccttatagctcctcaaactaaatacattattcctgggggttcggcagactcctacactagccgtccatccgattccgatgtatctctggaggaggaccgggaggcagtgcgcagagaagcggagcggcaggcccaggcacagttggaaaaagcaaagacaaagcccgttgcatttgcggttcggacaaatgtcagctacagtgcggcccatgaagatgatgttccagtgcctggcatggccatctcattcgaagcaaaagattttctgcatgttaaggaaaaatttaacaatgactggtggatagggcgattggtaaaagaaggctgtgaaatcggattcattccaagcccagtcaaactagaaaacatgaggctgcagcatgaacagagagccaagcaagggaaattctactccagtaaatcaggaggaaattcatcatccagtttgggtgacatagtacctagttccagaaaatcaacacctccatcatctgctatagacatagatgctactggcttagatgcagaagaaaatgatattccagcaaaccaccgctcccctaaacccagtgcaaacagtgtaacgtcaccccactccaaagagaaaagaatgcccttctttaagaagacagagcacactcctccgtatgatgtggtaccttccatgcgaccagtggtcctagtgggcccttctctgaagggctacgaggtcacagatatgatgcaaaaagcgctgtttgattttttaaaacacagatttgaagggcggatatccatcacaagggtcaccgctgacatctcgcttgccaaacgctcggtattaaacaatcccagtaagcacgcaataatagaaagatccaacacaaggtcaagcttagcggaagttcagagtgaaatcgaaaggatttttgaacttgcaagaacattgcagttggtggtccttgacgcggatacaattaatcatccagctcaactcagtaaaacctccttggcccctattatagtatatgtaaagatttcttctcctaaggttttacaaaggttaataaaatctcgagggaaatctcaagctaaacacctcaacgtccagatggtagcagctgataaactggctcagtgtcctccagagctgttcgatgtgatcttggatgagaaccagcttgaggatgcctgtgagcaccttgccgactatctggaggcctactggaaggccacccatcctcccagcagtagcctccccaaccctctccttagccgtacattagccacttcaagtctgcctcttagccccaccctagcctctaattcacagggttctcaaggtgatcagaggactgatcgctccgctcctatccgttctgcttcccaagctgaagaagaacctagtgtggaaccagtcaagaaatcccagcaccgctcttcctcctcagccccacaccacaaccatcgcagtgggacaagtcgcggcctctccaggcaagagacatttgactcggaaacccaggagagtcgagactctgcctacgtagagccaaaggaagattattcccatgaccacgtggaccactatgcctcacaccgtgaccacaaccacagagacgagacccacgggagcagtgaccacagacacagggagtcccggcaccgttcccgggacgtggatcgagagcaggaccacaacgagtgcaacaagcagcgcagccgtcataaatccaaggatcgctactgtgaaaaggatggagaagtgatatcaaaaaaacggaatgaggctggggagtggaacagggatgtttacatccgccaatgagttttgcccttttgtgtttttttttttttttttttgaagtcttgtataactaacagcatccccaaaacaaaaagtctttggggtctacactgcaatcatatgtgatctgtcttgtaatattttgtattattgctgttgcttgaatagcaatagcatggatagagtattgagatactttttcttttgtaagtgctacataaattggcctggtatggctgcagtcctccggttgcatactggactcttcaaaaactgttttgggtagctgccacttgaacaaaatctgttgccacccaggtgatgttagtgttttaagaaatgtagttgatgtatccaacaagccagaatcagcacagataaaaagtggaatttcttgtttctccagatttttaatacgttaatacgcaggcatctgatttgcatattcattcatggaccactgtttcttgcttgtacctctggctgactaaatttggggacagattcagtcttgccttacacaaaggggatcataaagttagaatctattttctatgtactagtactgtgtactgtatagacagtttgtaaatgttatttctgcaaacaaacaccttcttattatatataatatatatatatatatcagtttgatcacactattttagagtcttaatgccaagtcagcagatttgctttatgaattacagggactagaaatgcccacattcaggaaatttgtaataacattgtctagacacctatcctcattctagtagaaagtgtgtacatactgtaaatatgtgtgattgcttgacttgaaaaggtttgaattctgaatgttataccatccttgtaagtaagtttgtaatttccaccataaattatggtaaatataaaactccagaggttgttctactccatacagttcacactgattgtgacacattcttagtagctagtgtctgttctagtcactgcactggagtctacgagccggaactcgctatatgcacgtgtgtgtgtccgtatgtaagaaagtgtgcaccgagtgactgaatggttgagatgaattggaatgctgaagactaacgaagaaactagagactgatatcgagcattctgcccacctcgctctgtatttaattaattgtgctatatgttgctttaacaacccattgagcagtcagggaatgtgagtaagcttgctgccaaaggtaactaggaaagcattcatctgctgcctccttgtttttgctcctagagagtgaaaatacaggcaattttactgtgagtgtttcactggaaatgtacaatctttgtgtgttagagtatttgttttagtaagaaatgtttgtttacacagcttgtggaattatttcgtgggaaaataaatttttataacttctcccacttcaatttctaacc

SEQ ID NO: 381416 - DNA, 376 bp, Homo sapiens
caggctagagtgtggagtgcaatggcgtgatctcagctcactgcaacctccacctcccaggttcaagagattctcatgcctcagcacccgtccccctcccccaccccaactagctgggattacaggcgcacaccactgcgtctggctaattttttgtatttttagtagaaatggaggtttcaccatgtcggccaggctgctctcgaactcctaacctcaggggatccgcccaccttggcctcccaaagtgctagtattataggcgtgagccaccgcacccagccaagaactgtaaattcttaaaatttgggaggaaccatcaagaaagaaagcctaagccttgtaaccatatgccaacctacattggtctactccc

SEQ ID NO: 381417 - DNA, 257 bp, Homo sapiens
  misc_feature (28)..(28): n is a, c, g, or t
  misc_feature (58)..(58): n is a, c, g, or t
aattttccttttcatgatgatgaaagtnttctgaaattagatagtggtgatggttgtncaactttgtaaatttctctttctataaatttgattactttagatatttcatatatgtgggattatacagtatcttctgtgactggcttatttcacttagcataatgtcttcaagattcattcttgtagtatgttatgggatttctgcctttttaaagactgcgtaacattccatcctatgtatataccacattttgctt

SEQ ID NO: 381418 - DNA, 827 bp, Homo sapiens
atggttgacagcacctgaattaaagaggtgaaagttaataccacagtagtgggaacatcaggcagcgctgataggatgcactgagaagaacacagtctcatttctgtagtattactgactaaactgcagaaacctgagtctacccatgaggaaacatcagtctcaaattgactgatattttgcttttagtattcaaacatactaatttcactgaggaaatggtccagattatttcagactatatagacatgagaatggaatatcacattggttcaggatgtctataaaaggataaggaaggttggcaaaatttgaagacagtccctcaagtagattatagtgttacgtgagtattaattgcctaagttatataattgcctgaggttatataacagaaaattcttgtttttaagaaattaaaacaatttaaaggataaagggataatgtcatagctgtaattttccaagcatttggataaaataatatacatgtttcaaaaaaaaaatgaaacagatgttgtaagatgttagcaaatagggaatccaggtggaaataatccaggaattatggatagtcttgtatctgttcagcaggtctgaaagtagttgatgaaaataatgcaaaagaacatgtcaaaaagaaatggtttgggcatatggcttcaagcatacataaatgctcaggaaacatgaaaatgtgaaataaatggatgagtactataataccagcaggccttgtagatacctgcatttgaagcatttatattagaaggaagcctttttacccagaatttttttcacttagcctaatgttttcaaggtttggc

SEQ ID NO: 381419 - DNA, 477 bp, Homo sapiens
ttaattctgattatttcccatctcactaataaacatgttcataaaacaaccaaaatacccctagacataagtctcatttcttactgcatgatatggtcagaaaataaaaaacaaaacaaaaacgaaacctcagttctttctagcttctgcctcctcctctcaccagcaaaacaaagccccaagcttgtgtacttctctgttgtctcatgttctgttcacttctccatacactataatgtcttctctcatcattcactaaaactgctcgctccaagatcatctggacttcttgctgctaaaaccatcatcttatagaatgttcaaaagtacttgacacttgtcaaattgctgtcttctgttggcttctatgacagtacgcaaagcctcagctgtttctccttaggctcctttgctgccttctcttcttctgccaaatggaaatgttccttacttttttttttttaaatgcatttgcca

SEQ ID NO: 381420 - DNA, 3647 bp, Homo sapiens
gggaactccttcctcagcctctcgtcagcgccgcttctcctggtttctcttgcagatgctgctgctaggggtggtgggagcagccgtgggacgcgtggccgggagcgggggtgacagcctgggattccgggggcttctcttccttgtcctcctcctctcctctctattcccagtgtggccgtggctgacactaaagactttgtagccatcaacccgagtgcagtttcgatggaaaatgaaggttgcacgttttcaaaaaatacctaatggtgaaaatgagacaatgattcctgtattgacatcaaaaaaagcaagtgaattaccagtcagtgaagttgcaagcattctccaagctgatcttcagaatggtctaaacaaatgtgaagttagtcataggcgagcctttcatggctggaatgagtttgatattagtgaagatgagccactgtggaagaagtatatttctcagtttaaaaatccccttattatgctgcttctggcttctgcagtcatcagtgttttaatgcatcagtttgatgatgccgtcagtatcactgtggcaatacttatcgttgttacagttgcctttgttcaggaatatcgttcagaaaaatctcttgaagaattgagtaaacttgtgccaccagaatgccattgtgtgcgtgaaggaaaattggagcatacacttgcccgagacttggttccaggtgatacagtttgcctttctgttggggatagagttcctgctgacttacgcttgtttgaggctgtggatctttccattgatgagtccagcttgacaggtgagacaacgccttgttctaaggtgacagctcctcagccagctgcaactaatggagatcttgcatcgagaagtaacattgcctttatgggaacactggtcagatgtggcaaagcaaagggtgttgtcattggaacaggagaaaattctgaatttggggaggtttttaaaatgatgcaagcagaagaggcaccaaaaacccctctgcagaagagcatggacctcttaggaaaacaactttccttttactcctttggtataataggaatcatcatgttggttggctggttactgggaaaagatatcctggaaatgtttactattagtgtaagtttggctgtagcagcaattcctgaaggtctccccattgtggtcacagtgacgctagctcttggtgttatgagaatggtgaagaaaagggccattgtgaaaaagctgcctattgttgaaactctgggctgctgtaatgtgatttgttcagataaaactggaacactgacgaagaatgaaatgactgttactcacatatttacttcagatggtctgcatgctgaggttactggagttggctataatcaatttggggaagtgattgttgatggtgatgttgttcatggattctataacccagctgttagcagaattgttgaggcgggctgtgtgtgcaatgatgctgtaattagaaacaatactctaatggggaagccaacagaaggggccttaattgctcttgcaatgaagatgggtcttgatggacttcaacaagactacatcagaaaagctgaatacccttttagctctgagcaaaagtggatggctgttaagtgtgtacaccgaacacagcaggacagaccagagatttgttttatgaaaggtgcttacgaacaagtaattaagtactgtactacataccagagcaaagggcagaccttgacacttactcagcagcagagagatgtgtaccaacaagagaaggcacgcatgggctcagcgggactcagagttcttgctttggcttctggtcctgaactgggacagctgacatttcttggcttggtgggaatcattgatccacctagaactggtgtgaaagaagctgttacaacactcattgcctcaggagtatcaataaaaatgattactggagattcacaggagactgcagttgcaatcgccagtcgtctgggattgtattccaaaacttcccagtcagtctcaggagaagaaatagatgcaatggatgttcagcagctttcacaaatagtaccaaaggttgcagtattttacagagctagcccaaggcacaagatgaaaattattaagtcgctacagaagaacggttcagttgtagccatgacaggagatggagtaaatgatgcagttgctctgaaggctgcagacattggagttgcgatgggccagactggtacagatgtttgcaaagaggcagcagacatgatcctagtggatgatgattttcaaaccataatgtctgcaatcgaagagggtaaagggatttataataacattaaaaatttcgttagattccagctgagcacgagtatagcagcattaactttaatctcattggctacattaatgaactttcctaatcctctcaatgccatgcagattttgtggatcaatattattatggatggacccccagctcagagccttggagtagaaccagtggataaagatgtcattcgtaaacctcctcgcaactggaaagacagcattttgactaaaaacttgatacttaaaatacttgtttcatcaataatcattgtttgtgggactttgtttgtcttctggcgtgagctacgagacaatgtgattacacctcgagacacaacaatgaccttcacatgctttgtgttttttgacatgttcaatgcactaagttccagatcccagaccaagtctgtgtttgagattggactctgcagtaatagaatgttttgctatgcagttcttggatccatcatgggacaattactagttatttactttcctccgcttcagaaggtttttcagactgagagcctaagcatactggatctgttgtttcttttgggtctcacctcatcagtgtgcatagtggcagaaattataaagaaggttgaaaggagcagggaaaagatccagaagcatgttagttcgacatcatcatcttttcttgaagtatgatgcatattgcattattttatttgcaaactaggaattgcagtctgaggatcatttagaagggcaagttcaagaggatatgaagatttgagaactttttaactattcattgactaaaaatgaacattaatgttaaagacttaagactttaacctgctggcagtcccaaatgaaattatgcaactttgatatcatattccttgatttaaattggcttttgtgattgagtgaaactttataaagcatatggtcagttatttaattaaaaaggcaaaacctgaaccaccttctgcacttaaagaagtctaacagtacaaatacactatctatcttagatagatatatttttttttatttttaaatattgtactatttatggtggtggggctttcttactaatacacaaataaatttaatcatttcaaaggcattctatttggtttagaagttgattcccaggagtgccatatttcagctactgtatttcctttttcttgtaatgtaagcagctcagataccatgtgctatcatttttgtatcaagttttttgcacaggatgtgaccactgtcagatcactgttcttttctttctttttgtgattgaaaagcctatactacaatttgaagtaaatttttgtttttcttagtaagtgta

SEQ ID NO: 381421 - DNA, 3626 bp, Homo sapiens
caaagctgggttcgcggctggcccaggagtgcggggcgcgactgggcggccggcggcggggaggggcggagcgcaggagtcggaggcgggagcagaccagcacggcctcgcggagccggcccggcggaccgtgacgggtcccctcacctcctcttctctcccctccccgcccgccctctctccctcccttcctccctcccgctcgcttcttctcacgccgggagcaggctcgcgcctcgcaccgctgccccgcgagcagctcctcttctcccgaggcgcgcggggcgcccccgcgagccccgcggctgagaccccgcagcctggaggagggctgtccggggctttgggttgcacgttttcaaaaaatacctaatggtgaaaatgagacaatgattcctgtattgacatcaaaaaaagcaagtgaattaccagtcagtgaagttgcaagcattctccaagctgatcttcagaatggtctaaacaaatgtgaagttagtcataggcgagcctttcatggctggaatgagtttgatattagtgaagatgagccactgtggaagaagtatatttctcagtttaaaaatccccttattatgctgcttctggcttctgcagtcatcagtgttttaatgcatcagtttgatgatgccgtcagtatcactgtggcaatacttatcgttgttacagttgcctttgttcaggaatatcgttcagaaaaatctcttgaagaattgagtaaacttgtgccaccagaatgccattgtgtgcgtgaaggaaaattggagcatacacttgcccgagacttggttccaggtgatacagtttgcctttctgttggggatagagttcctgctgacttacgcttgtttgaggctgtggatctttccattgatgagtccagcttgacaggtgagacaacgccttgttctaaggtgacagctcctcagccagctgcaactaatggagatcttgcatcgagaagtaacattgcctttatgggaacactggtcagatgtggcaaagcaaagggtgttgtcattggaacaggagaaaattctgaatttggggaggtttttaaaatgatgcaagcagaagaggcaccaaaaacccctctgcagaagagcatggacctcttaggaaaacaactttccttttactcctttggtataataggaatcatcatgttggttggctggttactgggaaaagatatcctggaaatgtttactattagtgtaagtttggctgtagcagcaattcctgaaggtctccccattgtggtcacagtgacgctagctcttggtgttatgagaatggtgaagaaaagggccattgtgaaaaagctgcctattgttgaaactctgggctgctgtaatgtgatttgttcagataaaactggaacactgacgaagaatgaaatgactgttactcacatatttacttcagatggtctgcatgctgaggttactggagttggctataatcaatttggggaagtgattgttgatggtgatgttgttcatggattctataacccagctgttagcagaattgttgaggcgggctgtgtgtgcaatgatgctgtaattagaaacaatactctaatggggaagccaacagaaggggccttaattgctcttgcaatgaagatgggtcttgatggacttcaacaagactacatcagaaaagctgaatacccttttagctctgagcaaaagtggatggctgttaagtgtgtacaccgaacacagcaggacagaccagagatttgttttatgaaaggtgcttacgaacaagtaattaagtactgtactacataccagagcaaagggcagaccttgacacttactcagcagcagagagatgtgtaccaacaagagaaggcacgcatgggctcagcgggactcagagttcttgctttggcttctggtcctgaactgggacagctgacatttcttggcttggtgggaatcattgatccacctagaactggtgtgaaagaagctgttacaacactcattgcctcaggagtatcaataaaaatgattactggagattcacaggagactgcagttgcaatcgccagtcgtctgggattgtattccaaaacttcccagtcagtctcaggagaagaaatagatgcaatggatgttcagcagctttcacaaatagtaccaaaggttgcagtattttacagagctagcccaaggcacaagatgaaaattattaagtcgctacagaagaacggttcagttgtagccatgacaggagatggagtaaatgatgcagttgctctgaaggctgcagacattggagttgcgatgggccagactggtacagatgtttgcaaagaggcagcagacatgatcctagtggatgatgattttcaaaccataatgtctgcaatcgaagagggtaaagggatttataataacattaaaaatttcgttagattccagctgagcacgagtatagcagcattaactttaatctcattggctacattaatgaactttcctaatcctctcaatgccatgcagattttgtggatcaatattattatggatggacccccagctcagagccttggagtagaaccagtggataaagatgtcattcgtaaacctcctcgcaactggaaagacagcattttgactaaaaacttgatacttaaaatacttgtttcatcaataatcattgtttgtgggactttgtttgtcttctggcgtgagctacgagacaatgtgattacacctcgagacacaacaatgaccttcacatgctttgtgttttttgacatgttcaatgcactaagttccagatcccagaccaagtctgtgtttgagattggactctgcagtaatagaatgttttgctatgcagttcttggatccatcatgggacaattactagttatttactttcctccgcttcagaaggtttttcagactgagagcctaagcatactggatctgttgtttcttttgggtctcacctcatcagtgtgcatagtggcagaaattataaagaaggttgaaaggagcagggaaaagatccagaagcatgtctggctctgggagaggagtggacagcagctggttgagatacatccccatctggagacaggactgccactgacagaagatgtgagctgtgtctaagtccagtcttgtgcccagccgtgtctgcgccttcactctttggaactctgcatacaacatcttagcaccatcttcctgcagctcttccttacctaaataaagaaacagcccaagggcagtatttctaaaagcactgtaacagcttttcattttctccacatatactacaaattctataaagaaagaaattaatttaaaaaaactaagatgtttttctcttctggcttcataaatgccttgctgtataaattgaaatattgatactgaactgtctttttaatgatgacctaactttattcaacccatcggaatttactttttccctgaaataagatcttttccactggtctactacctgaccataaacatgtctgcatttgaattctctaaaccctaaatctgtgtctatgaaaaatacaaatgactattaaatattattctctttactgttctctttcaccgaaa

SEQ ID NO: 381422 - DNA, 658 bp, Homo sapiens
aagtaactttgttgctttaaatataagtgaaaatactgtatttacttttgtgtgcttccatctgaactaaagtttcccatggtgcttaccgagttaggtctggctctgggagaggagtggacagcagctggttgagatacatccccatctggagacaggactgccactgacagaagatgtgagctgtgtctaagtccagtcttgtgcccagccgtgtctgcgccttcactctttggaactctgcatacaacatcttagcaccatcttcctgcagctcttccttacctaaataaagaaacagcccaagggcagtatttctaaaagcactgtaacagcttttcattttctccacatatactacaaattctataaagaaagaaattaatttaaaaaaactaagatgtttttctcttctggcttcataaatgccttgctgtataaattgaaatattgatactgaactgtctttttaatgatgacctaactttattcaacccatcggaatttactttttccctgaaataagatcttttccactggtctactacctgaccataaacatgtctgcatttgaattctctaaaccctaaatctgtgtctatgaaaaatacaaatgactattaaatattattctctttactgttctctttcaccgaaa

SEQ ID NO: 381423 - DNA, 608 bp, Homo sapiens
atgtaatataagtgtgcataaagataacaaaaaaaaaaaccgttgagtctgacctctgggcacagtttggacagcagctggttgagatacatccccatctggagacaggactgccactgacagaagatgtgagctgtgtctaagtccagtcttgtgcccagccgtgtctgcgccttcactctttggaactctgcatacaacatcttagcaccatcttcctgcagctcttccttacctaaataaagaaacagcccaagggcagtatttctaaaagcactgtaacagcttttcattttctccacatatactacaaattctataaagaaagaaattaatttaaaaaaactaagatgtttttctcttctggcttcataaatgccttgctgtataaattgaaatattgatactgaactgtctttttaatgatgacctaactttattcaacccatcggaatttactttttccctgaaataagatcttttccactggtctactacctgaccataaacatgtctgcatttgaattctctaaaccctaaatctgtgtctatgaaaaatacaaatgactattaaatattattctctttactgttctctttcaccgaaa

SEQ ID NO: 381424 - DNA, 547 bp, Homo sapiens
  misc_feature (46)..(46): n is a, c, g, or t
tcggtacccctcaacgctttatacttccaccctgaacgcgccgtcnccgcacctcaacgctttatacttcaggaaaagatccagaagcatgttagttcgacatcatcatcttttcttgaagtatgatgcatattgcattattttatttgcaaactaggaattgcagtctgaggatcatttagaagggcaagttcaagaggatatgaagatttgagaactttttaactattcattgactaaaaatgaacattaatgttaaagacttaagactttaacctgctggcagtcccaaatgaaattatgcaactttgatatcatattccttgatttaaattggcttttgtgattgagtgaaactttataaagcatatggtcagttatttaattaaaaaggcaaaacctgaaccaccttctgcacttaaagaagtctaaagcgttgagctcaacgctttatacttcattatttctactaattcagtagttacgatcgtagcgccaaatttaaattcttccactggttcttctggaaggaattaaaacttttaca

SEQ ID NO: 381425 - DNA, 310 bp, Homo sapiens
ccacgcgtccgcataaatagtacaatatttatggtggtggggctttcttactaatacacaaataaatttaatcatttcaaaggcattctatttggtttagaagttgattcccaggagtgccatatttcagctactgtatttcctttttcttgtaatgtaagcagctcagataccatgtgctatcatttttgtatcaagttttttgcacaggatgtgaccactgtcagatcactgttcttttctttctttttgtgattgaaaagcctatactacaatttgaagtaaatttttgtttttcttagtaagtgta

SEQ ID NO: 381426 - DNA, 202 bp, Homo sapiens
ctgttacaaagacttgaaatacgtattaacgtgcatttaatacgtatttcaagtctctgttacaaagacttgaaatacgtattaaatgcacgttaatgttttgctttgcattttaggttcagattatgacttgattgaaataaatgtgcctatacattcatttgctttgtactataaaaataaaaatgatttcttaagttaa

SEQ ID NO: 381427 - DNA, 154 bp, Homo sapiens
gcggccgactactactactactgctcgaattcaagcttctaacgatgtacggggacatgtctgcatttgaattctctaaaccctaaatctgtgtctatgaaaaatacaaatgactattaaatattattctctttactgttctctttcaccgaaa

SEQ ID NO: 381428 - DNA, 3753 bp, Homo sapiens
caaagctgggttcgcggctggcccaggagtgcggggcgcgactgggcggccggcggcggggaggggcggagcgcaggagtcggaggcgggagcagaccagcacggcctcgcggagccggcccggcggaccgtgacgggtcccctcacctcctcttctctcccctccccgcccgccctctctccctcccttcctccctcccgctcgcttcttctcacgccgggagcaggctcgcgcctcgcaccgctgccccgcgagcagctcctcttctcccgaggcgcgcggggcgcccccgcgagccccgcggctgagaccccgcagcctggaggagggctgtccggggctttgggttgcacgttttcaaaaaatacctaatggtgaaaatgagacaatgattcctgtattgacatcaaaaaaagcaagtgaattaccagtcagtgaagttgcaagcattctccaagctgatcttcagaatggtctaaacaaatgtgaagttagtcataggcgagcctttcatggctggaatgagtttgatattagtgaagatgagccactgtggaagaagtatatttctcagtttaaaaatccccttattatgctgcttctggcttctgcagtcatcagtgttttaatgcatcagtttgatgatgccgtcagtatcactgtggcaatacttatcgttgttacagttgcctttgttcaggaatatcgttcagaaaaatctcttgaagaattgagtaaacttgtgccaccagaatgccattgtgtgcgtgaaggaaaattggagcatacacttgcccgagacttggttccaggtgatacagtttgcctttctgttggggatagagttcctgctgacttacgcttgtttgaggctgtggatctttccattgatgagtccagcttgacaggtgagacaacgccttgttctaaggtgacagctcctcagccagctgcaactaatggagatcttgcatcgagaagtaacattgcctttatgggaacactggtcagatgtggcaaagcaaagggtgttgtcattggaacaggagaaaattctgaatttggggaggtttttaaaatgatgcaagcagaagaggcaccaaaaacccctctgcagaagagcatggacctcttaggaaaacaactttccttttactcctttggtataataggaatcatcatgttggttggctggttactgggaaaagatatcctggaaatgtttactattagtgtaagtttggctgtagcagcaattcctgaaggtctccccattgtggtcacagtgacgctagctcttggtgttatgagaatggtgaagaaaagggccattgtgaaaaagctgcctattgttgaaactctgggctgctgtaatgtgatttgttcagataaaactggaacactgacgaagaatgaaatgactgttactcacatatttacttcagatggtctgcatgctgaggttactggagttggctataatcaatttggggaagtgattgttgatggtgatgttgttcatggattctataacccagctgttagcagaattgttgaggcgggctgtgtgtgcaatgatgctgtaattagaaacaatactctaatggggaagccaacagaaggggccttaattgctcttgcaatgaagatgggtcttgatggacttcaacaagactacatcagaaaagctgaatacccttttagctctgagcaaaagtggatggctgttaagtgtgtacaccgaacacagcaggacagaccagagatttgttttatgaaaggtgcttacgaacaagtaattaagtactgtactacataccagagcaaagggcagaccttgacacttactcagcagcagagagatgtgtaccaacaagagaaggcacgcatgggctcagcgggactcagagttcttgctttggcttctggtcctgaactgggacagctgacatttcttggcttggtgggaatcattgatccacctagaactggtgtgaaagaagctgttacaacactcattgcctcaggagtatcaataaaaatgattactggagattcacaggagactgcagttgcaatcgccagtcgtctgggattgtattccaaaacttcccagtcagtctcaggagaagaaatagatgcaatggatgttcagcagctttcacaaatagtaccaaaggttgcagtattttacagagctagcccaaggcacaagatgaaaattattaagtcgctacagaagaacggttcagttgtagccatgacaggagatggagtaaatgatgcagttgctctgaaggctgcagacattggagttgcgatgggccagactggtacagatgtttgcaaagaggcagcagacatgatcctagtggatgatgattttcaaaccataatgtctgcaatcgaagagggtaaagggatttataataacattaaaaatttcgttagattccagctgagcacgagtatagcagcattaactttaatctcattggctacattaatgaactttcctaatcctctcaatgccatgcagattttgtggatcaatattattatggatggacccccagctcagagccttggagtagaaccagtggataaagatgtcattcgtaaacctcctcgcaactggaaagacagcattttgactaaaaacttgatacttaaaatacttgtttcatcaataatcattgtttgtgggactttgtttgtcttctggcgtgagctacgagacaatgtgattacacctcgagacacaacaatgaccttcacatgctttgtgttttttgacatgttcaatgcactaagttccagatcccagaccaagtctgtgtttgagattggactctgcagtaatagaatgttttgctatgcagttcttggatccatcatgggacaattactagttatttactttcctccgcttcagaaggtttttcagactgagagcctaagcatactggatctgttgtttcttttgggtctcacctcatcagtgtgcatagtggcagaaattataaagaaggttgaaaggagcagggaaaagatccagaagcatgttagttcgacatcatcatcttttcttgaagtatgatgcatattgcattattttatttgcaaactaggaattgcagtctgaggatcatttagaagggcaagttcaagaggatatgaagatttgagaactttttaactattcattgactaaaaatgaacattaatgttaaagacttaagactttaacctgctggcagtcccaaatgaaattatgcaactttgatatcatattccttgatttaaattggcttttgtgattgagtgaaactttataaagcatatggtcagttatttaattaaaaaggcaaaacctgaaccaccttctgcacttaaagaagtctaacagtacaaatacactatctatcttagatagatatatttttttttatttttaaatattgtactatttatggtggtggggctttcttactaatacacaaataaatttaatcatttcaaaggcattctatttggtttagaagttgattcccaggagtgccatatttcagctactgtatttcctttttcttgtaatgtaagcagctcagataccatgtgctatcatttttgtatcaagttttttgcacaggatgtgaccactgtcagatcactgttcttttctttctttttgtgattgaaaagcctatactacaatttgaagtaaatttttgtttttcttagtaagtgta

SEQ ID NO: 381429 - DNA, 2749 bp, Homo sapiens
  misc_feature (114)..(114): n is a, c, g, or t
ccgtcaatttctacgctctcaacaacccgcacagaaaaatcttcctgaacctcatggcttagcccaatatgtataagatataaacaatccttaataattgtttctgctctaaanggaatcattcgtgatgatcaacatattatgtgtagaacttgaagcgttcaactttgaatcatcatgttggttggctggttactgggaaaagatatcctggaaatgtttactattagtgtaagtttggctgtagcagcaattcctgaaggtctccccattgtggtcacagtgacgctagctcttggtgttatgagaatggtgaagaaaagggccattgtgaaaaagctgcctattgttgaaactctgggctgctgtaatgtgatttgttcagataaaactggaacactgacgaagaatgaaatgactgttactcacatatttacttcagatggtctgcatgctgaggttactggagttggctataatcaatttggggaagtgattgttgatggtgatgttgttcatggattctataacccagctgttagcagaattgttgaggcgggctgtgtgtgcaatgatgctgtaattagaaacaatactctaatggggaagccaacagaaggggccttaattgctcttgcaatgaagatgggtcttgatggacttcaacaagactacatcagaaaagctgaatacccttttagctctgagcaaaagtggatggctgttaagtgtgtacaccgaacacagcaggacagaccagagatttgttttatgaaaggtgcttacgaacaagtaattaagtactgtactacataccagagcaaagggcagaccttgacacttactcagcagcagagagatgtgtaccaacaagagaaggcacgcatgggctcagcgggactcagagttcttgctttggcttctggtcctgaactgggacagctgacatttcttggcttggtgggaatcattgatccacctagaactggtgtgaaagaagctgttacaacactcattgcctcaggagtatcaataaaaatgattactggagattcacaggagactgcagttgcaatcgccagtcgtctgggattgtattccaaaacttcccagtcagtctcaggagaagaaatagatgcaatggatgttcagcagctttcacaaatagtaccaaaggttgcagtattttacagagctagcccaaggcacaagatgaaaattattaagtcgctacagaagaacggttcagttgtagccatgacaggagatggagtaaatgatgcagttgctctgaaggctgcagacattggagttgcgatgggccagactggtacagatgtttgcaaagaggcagcagacatgatcctagtggatgatgattttcaaaccataatgtctgcaatcgaagagggtaaagggatttataataacattaaaaatttcgttagattccagctgagcacgagtatagcagcattaactttaatctcattggctacattaatgaactttcctaatcctctcaatgccatgcagattttgtggatcaatattattatggatggacccccagctcagagccttggagtagaaccagtggataaagatgtcattcgtaaacctcctcgcaactggaaagacagcattttgactaaaaacttgatacttaaaatacttgtttcatcaataatcattgtttgtgggactttgtttgtcttctggcgtgagctacgagacaatgtgattacacctcgagacacaacaatgaccttcacatgctttgtgttttttgacatgttcaatgcactaagttccagatcccagaccaagtctgtgtttgagattggactctgcagtaatagaatgttttgctatgcagttcttggatccatcatgggacaattactagttatttactttcctccgcttcagaaggtttttcagactgagagcctaagcatactggatctgttgtttcttttgggtctcacctcatcagtgtgcatagtggcagaaattataaagaaggttgaaaggagcagggaaaagatccagaagcatgttagttcgacatcatcatcttttcttgaagtatgatgcatattgcattattttatttgcaaactaggaattgcagtctgaggatcatttagaagggcaagttcaagaggatatgaagatttgagaactttttaactattcattgactaaaaatgaacattaatgttaaagacttaagactttaacctgctggcagtcccaaatgaaattatgcaactttgatatcatattccttgatttaaattggcttttgtgattgagtgaaactttataaagcatatggtcagttatttaattaaaaaggcaaaacctgaaccaccttctgcacttaaagaagtctaacagtacaaatacactatctatcttagatagatatatttttttttatttttaaatattgtactatttatggtggtggggctttcttactaatacacaaataaatttaatcatttcaaaggcattctatttggtttagaagttgattcccaggagtgccatatttcagctactgtatttcctttttcttgtaatgtaagcagctcagataccatgtgctatcatttttgtatcaagttttttgcacaggatgtgaccactgtcagatcactgttcttttctttctttttgtgattgaaaagcctatactacaatttgaagtaaatttttgtttttcttagtaagtgta

SEQ ID NO: 381430 - DNA, 4968 bp, Homo sapiens
caaagctgggttcgcggctggcccaggagtgcggggcgcgactgggcggccggcggcggggaggggcggagcgcaggagtcggaggcgggagcagaccagcacggcctcgcggagccggcccggcggaccgtgacgggtcccctcacctcctcttctctcccctccccgcccgccctctctccctcccttcctccctcccgctcgcttcttctcacgccgggagcaggctcgcgcctcgcaccgctgccccgcgagcagctcctcttctcccgaggcgcgcggggcgcccccgcgagccccgcggctgagaccccgcagcctggaggagggctgtccggggctttggtgtggccgtggctgacactaaagactttgtagccatcaacccgagtgcagtttcgatggaaaatgaaggttgcacgttttcaaaaaatacctaatggtgaaaatgagacaatgattcctgtattgacatcaaaaaaagcaagtgaattaccagtcagtgaagttgcaagcattctccaagctgatcttcagaatggtctaaacaaatgtgaagttagtcataggcgagcctttcatggctggaatgagtttgatattagtgaagatgagccactgtggaagaagtatatttctcagtttaaaaatccccttattatgctgcttctggcttctgcagtcatcagtgttttaatgcatcagtttgatgatgccgtcagtatcactgtggcaatacttatcgttgttacagttgcctttgttcaggaatatcgttcagaaaaatctcttgaagaattgagtaaacttgtgccaccagaatgccattgtgtgcgtgaaggaaaattggagcatacacttgcccgagacttggttccaggtgatacagtttgcctttctgttggggatagagttcctgctgacttacgcttgtttgaggctgtggatctttccattgatgagtccagcttgacaggtgagacaacgccttgttctaaggtgacagctcctcagccagctgcaactaatggagatcttgcatcgagaagtaacattgcctttatgggaacactggtcagatgtggcaaagcaaagggtgttgtcattggaacaggagaaaattctgaatttggggaggtttttaaaatgatgcaagcagaagaggcaccaaaaacccctctgcagaagagcatggacctcttaggaaaacaactttccttttactcctttggtataataggaatcatcatgttggttggctggttactgggaaaagatatcctggaaatgtttactattagtgtaagtttggctgtagcagcaattcctgaaggtctccccattgtggtcacagtgacgctagctcttggtgttatgagaatggtgaagaaaagggccattgtgaaaaagctgcctattgttgaaactctgggctgctgtaatgtgatttgttcagataaaactggaacactgacgaagaatgaaatgactgttactcacatatttacttcagatggtctgcatgctgaggttactggagttggctataatcaatttggggaagtgattgttgatggtgatgttgttcatggattctataacccagctgttagcagaattgttgaggcgggctgtgtgtgcaatgatgctgtaattagaaacaatactctaatggggaagccaacagaaggggccttaattgctcttgcaatgaagatgggtcttgatggacttcaacaagactacatcagaaaagctgaatacccttttagctctgagcaaaagtggatggctgttaagtgtgtacaccgaacacagcaggacagaccagagatttgttttatgaaaggtgcttacgaacaagtaattaagtactgtactacataccagagcaaagggcagaccttgacacttactcagcagcagagagatgtgtaccaacaagagaaggcacgcatgggctcagcgggactcagagttcttgctttggcttctggtcctgaactgggacagctgacatttcttggcttggtgggaatcattgatccacctagaactggtgtgaaagaagctgttacaacactcattgcctcaggagtatcaataaaaatgattactggagattcacaggagactgcagttgcaatcgccagtcgtctgggattgtattccaaaacttcccagtcagtctcaggagaagaaatagatgcaatggatgttcagcagctttcacaaatagtaccaaaggttgcagtattttacagagctagcccaaggcacaagatgaaaattattaagtcgctacagaagaacggttcagttgtagccatgacaggagatggagtaaatgatgcagttgctctgaaggctgcagacattggagttgcgatgggccagactggtacagatgtttgcaaagaggcagcagacatgatcctagtggatgatgattttcaaaccataatgtctgcaatcgaagagggtaaagggatttataataacattaaaaatttcgttagattccagctgagcacgagtatagcagcattaactttaatctcattggctacattaatgaactttcctaatcctctcaatgccatgcagattttgtggatcaatattattatggatggacccccagctcagagccttggagtagaaccagtggataaagatgtcattcgtaaacctcctcgcaactggaaagacagcattttgactaaaaacttgatacttaaaatacttgtttcatcaataatcattgtttgtgggactttgtttgtcttctggcgtgagctacgagacaatgtgattacacctcgagacacaacaatgaccttcacatgctttgtgttttttgacatgttcaatgcactaagttccagatcccagaccaagtctgtgtttgagattggactctgcagtaatagaatgttttgctatgcagttcttggatccatcatgggacaattactagttatttactttcctccgcttcagaaggtttttcagactgagagcctaagcatactggatctgttgtttcttttgggtctcacctcatcagtgtgcatagtggcagaaattataaagaaggttgaaaggagcagggaaaagatccagaagcatgttagttcgacatcatcatcttttcttgaagtatgatgcatattgcattattttatttgcaaactaggaattgcagtctgaggatcatttagaagggcaagttcaagaggatatgaagatttgagaactttttaactattcattgactaaaaatgaacattaatgttaaagacttaagactttaacctgctggcagtcccaaatgaaattatgcaactttgatatcatattccttgatttaaattggcttttgtgattgagtgaaactttataaagcatatggtcagttatttaattaaaaaggcaaaacctgaaccaccttctgcacttaaagaagtctaacagtacaaatacactatctatcttagatagatatatttttttttatttttaaatattgtactatttatggtggtggggctttcttactaatacacaaataaatttaatcatttcaaaggcattctatttggtttagaagttgattcccaggagtgccatatttcagctactgtatttcctttttcttgtaatgtaagcagctcagataccatgtgctatcatttttgtatcaagttttttgcacaggatgtgaccactgtcagatcactgttcttttctttctttttgtgattgaaaagcctatactacaatttgaagtaaatttttgtttttcttagtaagtgtaaatggttgctttatttttattttaaaaaggtatgtctttggtttggcagaattcatgcagggctatcaagtggtgttctagggtaacagtgtccataattaacgcttagtcatagagtcaaaaacatttaagactgattgggttgaagtttataataaattatattaacatgtcttcctttttgaggtaaagatatatactttgtcaaatatcattttgtcatcctctaaatataaatccaaatacctcagctaagtaattctattttattatttttactgttatgtatgtttttaatcatatttcttaggaagtataggctactggacttagaataaaaagtccccaaacccaaacaaatggtttatgaaccagagtatatgtggaagattctttgctggtcttgctctgtgtgcatctgaagcttctttggcctagattttagcacaaacctgagtatatctcttctactttcatcatgtgttctgtaccttcttttgtttcattgggcatgctagggaaataggtggattttgtgtgtaatgccatcagtttttatgaaagcttgatgaggtataggtcatttgttttgagtatgtgggccagaaatttaaaattagaaatttgtttttctgttgagtatataaacaaaaattggtcccaattctaacaggtttaatccttcttgaagccaataagttttatcttttataatctgtcaggatgaaccactccttagcttttatccaatattaaactgcaagtgttagcactgaaatattgtcattgatagggaaaatatctattctttgagtcattgttactgaggcagttgagtgtaaggagctggctgcagtttattctacttaaccctttaaggctgaattgtcaaatgtacattgttccatgtcgttagatggaacatggaagccattgtctaatcaactctatcattagtgacttgatgtctcataccttaattttgtaatgatttttattctctgttacaaagacttgaaatacgtattaaatgcacgttaatgttttgctttgcattttaggttcagattatgacttgattgaaataaatgtgcctatacattcatttgctttgtactataaaaataaaaatgatttcttaagttaa

SEQ ID NO: 381431 - DNA, 5063 bp, Homo sapiens
caaagctgggttcgcggctggcccaggagtgcggggcgcgactgggcggccggcggcggggaggggcggagcgcaggagtcggaggcgggagcagaccagcacggcctcgcggagccggcccggcggaccgtgacgggtcccctcacctcctcttctctcccctccccgcccgccctctctccctcccttcctccctcccgctcgcttcttctcacgccgggagcaggctcgcgcctcgcaccgctgccccgcgagcagctcctcttctcccgaggcgcgcggggcgcccccgcgagccccgcggctgagaccccgcagcctggaggagggctgtccggggctttggtgtggccgtggctgacactaaagactttgtagccatcaacccgagtgcagtttcgatggaaaatgaaggttgcacgttttcaaaaaatacctaatggtgaaaatgagacaatgattcctgtattgacatcaaaaaaagcaagtgaattaccagtcagtgaagttgcaagcattctccaagctgatcttcagaatggtctaaacaaatgtgaagttagtcataggcgagcctttcatggctggaatgagtttgatattagtgaagatgagccactgtggaagaagtatatttctcagtttaaaaatccccttattatgctgcttctggcttctgcagtcatcagtgttttaatgcatcagtttgatgatgccgtcagtatcactgtggcaatacttatcgttgttacagttgcctttgttcaggaatatcgttcagaaaaatctcttgaagaattgagtaaacttgtgccaccagaatgccattgtgtgcgtgaaggaaaattggagcatacacttgcccgagacttggttccaggtgatacagtttgcctttctgttggggatagagttcctgctgacttacgcttgtttgaggctgtggatctttccattgatgagtccagcttgacaggtgagacaacgccttgttctaaggtgacagctcctcagccagctgcaactaatggagatcttgcatcgagaagtaacattgcctttatgggaacactggtcagatgtggcaaagcaaagggtgttgtcattggaacaggagaaaattctgaatttggggaggtttttaaaatgatgcaagcagaagaggcaccaaaaacccctctgcagaagagcatggacctcttaggaaaacaactttccttttactcctttggtataataggaatcatcatgttggttggctggttactgggaaaagatatcctggaaatgtttactattagtgtaagtttggctgtagcagcaattcctgaaggtctccccattgtggtcacagtgacgctagctcttggtgttatgagaatggtgaagaaaagggccattgtgaaaaagctgcctattgttgaaactctgggctgctgtaatgtgatttgttcagataaaactggaacactgacgaagaatgaaatgactgttactcacatatttacttcagatggtctgcatgctgaggttactggagttggctataatcaatttggggaagtgattgttgatggtgatgttgttcatggattctataacccagctgttagcagaattgttgaggcgggctgtgtgtgcaatgatgctgtaattagaaacaatactctaatggggaagccaacagaaggggccttaattgctcttgcaatgaagatgggtcttgatggacttcaacaagactacatcagaaaagctgaatacccttttagctctgagcaaaagtggatggctgttaagtgtgtacaccgaacacagcaggacagaccagagatttgttttatgaaaggtgcttacgaacaagtaattaagtactgtactacataccagagcaaagggcagaccttgacacttactcagcagcagagagatgtgtaccaacaagagaaggcacgcatgggctcagcgggactcagagttcttgctttggcttctggtcctgaactgggacagctgacatttcttggcttggtgggaatcattgatccacctagaactggtgtgaaagaagctgttacaacactcattgcctcaggagtatcaataaaaatgattactggagattcacaggagactgcagttgcaatcgccagtcgtctgggattgtattccaaaacttcccagtcagtctcaggagaagaaatagatgcaatggatgttcagcagctttcacaaatagtaccaaaggttgcagtattttacagagctagcccaaggcacaagatgaaaattattaagtcgctacagaagaacggttcagttgtagccatgacaggagatggagtaaatgatgcagttgctctgaaggctgcagacattggagttgcgatgggccagactggtacagatgtttgcaaagaggcagcagacatgatcctagtggatgatgattttcaaaccataatgtctgcaatcgaagagggtaaagggatttataataacattaaaaatttcgttagattccagctgagcacgagtatagcagcattaactttaatctcattggctacattaatgaactttcctaatcctctcaatgccatgcagattttgtggatcaatattattatggatggacccccagctcagagccttggagtagaaccagtggataaagatgtcattcgtaaacctcctcgcaactggaaagacagcattttgactaaaaacttgatacttaaaatacttgtttcatcaataatcattgtttgtgggactttgtttgtcttctggcgtgagctacgagacaatgtgattacacctcgagacacaacaatgaccttcacatgctttgtgttttttgacatgttcaatgcactaagttccagatcccagaccaagtctgtgtttgagattggactctgcagtaatagaatgttttgctatgcagttcttggatccatcatgggacaattactagttatttactttcctccgcttcagaaggtttttcagactgagagcctaagcatactggatctgttgtttcttttgggtctcacctcatcagtgtgcatagtggcagaaattataaagaaggttgaaaggagcagggaaaagatccagaagcatgttagttcgacatcatcatcttttcttgaagtatgatgcatattgcattattttatttgcaaactaggaattgcagtctgaggatcatttagaagggcaagttcaagaggatatgaagatttgagaactttttaactattcattgactaaaaatgaacattaatgttaaagacttaagactttaacctgctggcagtcccaaatgaaattatgcaactttgatatcatattccttgatttaaattggcttttgtgattgagtgaaactttataaagcatatggtcagttatttaattaaaaaggcaaaacctgaaccaccttctgcacttaaagaagtctaacagtacaaatacactatctatcttagatagatatatttttttttatttttaaatattgtactatttatggtggtggggctttcttactaatacacaaataaatttaatcatttcaaaggcattctatttggtttagaagttgattcccaggagtgccatatttcagctactgtatttcctttttcttgtaatgtaagcagctcagataccatgtgctatcatttttgtatcaagttttttgcacaggatgtgaccactgtcagatcactgttcttttctttctttttgtgattgaaaagcctatactacaatttgaagtaaatttttgtttttcttagtaagtgtaaatggttgctttatttttattttaaaaaggtatgtctttggtttggcagaattcatgcagggctatcaagtggtgttctagggtaacagtgtccataattaacgcttagtcatagagtcaaaaacatttaagactgattgggttgaagtttataataaattatattaacatgtcttcctttttgaggtaaagatatatactttgtcaaatatcattttgtcatcctctaaatataaatccaaatacctcagctaagtaattctattttattatttttactgttatgtatgtttttaatcatatttcttaggaagtataggctactggacttagaataaaaagtccccaaacccaaacaaatggtttatgaaccagagtatatgtggaagattctttgctggtcttgctctgtgtgcatctgaagcttctttggcctagattttagcacaaacctgagtatatctcttctactttcatcatgtgttctgtaccttcttttgtttcattgggcatgctagggaaataggtggattttgtgtgtaatgccatcagtttttatgaaagcttgatgaggtataggtcatttgttttgagtatgtgggccagaaatttaaaattagaaatttgtttttctgttgagtatataaacaaaaattggtcccaattctaacaggtttaatccttcttgaagccaataagttttatcttttataatctgtcaggatgaaccactccttagcttttatccaatattaaactgcaagtgttagcactgaaatattgtcattgatagggaaaatatctattctttgagtcattgttactgaggcagttgagtgtaaggagctggctgcagtttattctacttaaccctttaaggctgaattgtcaaatgtacattgttccatgtcgttagatggaacatggaagccattgtctaatcaactctatcattagtgacttgatgtctcataccttaattttgtaatgatttttattctctgttacaaagacttgaaatacgtattaaatgcacgttaatgttttgctttgcattttaggttcagattatgacttgattgaaataaatgtgcctatacattcatttgctttgtactataaaaataaaaatgatttcttaagttaatgacatcccagtggggactattagcattaaaattatccatatggatgctgaagatacagaaattaaaattatccatatggatgctggagaatgca

SEQ ID NO: 381432 - DNA, 3425 bp, Homo sapiens
gggaactccttcctcagcctctcgtcagcgccgcttctcctggtttctcttgcagatgctgctgctaggggtggtgggagcagccgtgggacgcgtggccgggagcgggggtgacagcctgggattccgggggcttctcttccttgtcctcctcctctcctctctattcccagtgtggccgtggctgacactaaagactttgtagccatcaacccgagtgcagtttcgatggaaaatgaaggttgcacgttttcaaaaaatacctaatggtgaaaatgagacaatgattcctgtattgacatcaaaaaaagcaagtgaattaccagtcagtgaagttgcaagcattctccaagctgatcttcagaatggtctaaacaaatgtgaagttagtcataggcgagcctttcatggctggaatgagtttgatattagtgaagatgagccactgtggaagaagtatatttctcagtttaaaaatccccttattatgctgcttctggcttctgcagtcatcagtgttttaatgcatcagtttgatgatgccgtcagtatcactgtggcaatacttatcgttgttacagttgcctttgttcaggaatatcgttcagaaaaatctcttgaagaattgagtaaacttgtgccaccagaatgccattgtgtgcgtgaaggaaaattggagcatacacttgcccgagacttggttccaggtgatacagtttgcctttctgttggggatagagttcctgctgacttacgcttgtttgaggctgtggatctttccattgatgagtccagcttgacaggtgagacaacgccttgttctaaggtgacagctcctcagccagctgcaactaatggagatcttgcatcgagaagtaacattgcctttatgggaacactggtcagatgtggcaaagcaaagggtgttgtcattggaacaggagaaaattctgaatttggggaggtttttaaaatgatgcaagcagaagaggcaccaaaaacccctctgcagaagagcatggacctcttaggaaaacaactttccttttactcctttggtataataggaatcatcatgttggttggctggttactgggaaaagatatcctggaaatgtttactattagtgtaagtttggctgtagcagcaattcctgaaggtctccccattgtggtcacagtgacgctagctcttggtgttatgagaatggtgaagaaaagggccattgtgaaaaagctgcctattgttgaaactctgggctgctgtaatgtgatttgttcagataaaactggaacactgacgaagaatgaaatgactgttactcacatatttacttcagatggtctgcatgctgaggttactggagttggctataatcaatttggggaagtgattgttgatggtgatgttgttcatggattctataacccagctgttagcagaattgttgaggcgggctgtgtgtgcaatgatgctgtaattagaaacaatactctaatggggaagccaacagaaggggccttaattgctcttgcaatgaagatgggtcttgatggacttcaacaagactacatcagaaaagctgaatacccttttagctctgagcaaaagtggatggctgttaagtgtgtacaccgaacacagcaggacagaccagagatttgttttatgaaaggtgcttacgaacaagtaattaagtactgtactacataccagagcaaagggcagaccttgacacttactcagcagcagagagatgtgtaccaacaagagaaggcacgcatgggctcagcgggactcagagttcttgctttggcttctggtcctgaactgggacagctgacatttcttggcttggtgggaatcattgatccacctagaactggtgtgaaagaagctgttacaacactcattgcctcaggagtatcaataaaaatgattactggagattcacaggagactgcagttgcaatcgccagtcgtctgggattgtattccaaaacttcccagtcagtctcaggagaagaaatagatgcaatggatgttcagcagctttcacaaatagtaccaaaggttgcagtattttacagagctagcccaaggcacaagatgaaaattattaagtcgctacagaagaacggttcagttgtagccatgacaggagatggagtaaatgatgcagttgctctgaaggctgcagacattggagttgcgatgggccagactggtacagatgtttgcaaagaggcagcagacatgatcctagtggatgatgattttcaaaccataatgtctgcaatcgaagagggtaaagggatttataataacattaaaaatttcgttagattccagctgagcacgagtatagcagcattaactttaatctcattggctacattaatgaactttcctaatcctctcaatgccatgcagattttgtggatcaatattattatggatggacccccagctcagagccttggagtagaaccagtggataaagatgtcattcgtaaacctcctcgcaactggaaagacagcattttgactaaaaacttgatacttaaaatacttgtttcatcaataatcattgtttgtgggactttgtttgtcttctggcgtgagctacgagacaatgtgattacacctcgagacacaacaatgaccttcacatgctttgtgttttttgacatgttcaatgcactaagttccagatcccagaccaagtctgtgtttgagattggactctgcagtaatagaatgttttgctatgcagttcttggatccatcatgggacaattactagttatttactttcctccgcttcagaaggtttttcagactgagagcctaagcatactgggtctggctctgggagaggagtggacagcagctggttgagatacatccccatctggagacaggactgccactgacagaagatgtgagctgtgtctaagtccagtcttgtgcccagccgtgtctgcgccttcactctttggaactctgcatacaacatcttagcaccatcttcctgcagctcttccttacctaaataaagaaacagcccaagggcagtatttctaaaagcactgtaacagcttttcattttctccacatatactacaaattctataaagaaagaaattaatttaaaaaaactaagatgtttttctcttctggcttcataaatgccttgctgtataaattgaaatattgatactgaactgtctttttaatgatgacctaactttattcaacccatcggaatttactttttccctgaaataagatcttttccactggtctactacctgaccataaacatgtctgcatttgaattctctaaaccctaaatctgtgtctatgaaaaatacaaatgactattaaatattattctctttactgttctctttcaccgaaa

SEQ ID NO: 381433 - DNA, 1928 bp, Homo sapiens
tgctagtagagctggttgtaatcggccgaggcaaagagatgtgtaccaacaagagaaggcacgcatgggctcagcgggactcagagttcttgctttggcttctggtcctgaactgggacagctgacatttcttggcttggtgggaatcattgatccacctagaactggtgtgaaagaagctgttacaacactcattgcctcaggagtatcaataaaaatgattactggagattcacaggagactgcagttgcaatcgccagtcgtctgggattgtattccaaaacttcccagtcagtctcaggagaagaaatagatgcaatggatgttcagcagctttcacaaatagtaccaaaggttgcagtattttacagagctagcccaaggcacaagatgaaaattattaagtcgctacagaagaacggttcagttgtagccatgacaggagatggagtaaatgatgcagttgctctgaaggctgcagacattggagttgcgatgggccagactggtacagatgtttgcaaagaggcagcagacatgatcctagtggatgatgattttcaaaccataatgtctgcaatcgaagagggtaaagggatttataataacattaaaaatttcgttagattccagctgagcacgagtatagcagcattaactttaatctcattggctacattaatgaactttcctaatcctctcaatgccatgcagattttgtggatcaatattattatggatggacccccagctcagagccttggagtagaaccagtggataaagatgtcattcgtaaacctcctcgcaactggaaagacagcattttgactaaaaacttgatacttaaaatacttgtttcatcaataatcattgtttgtgggactttgtttgtcttctggcgtgagctacgagacaatgtgattacacctcgagacacaacaatgaccttcacatgctttgtgttttttgacatgttcaatgcactaagttccagatcccagaccaagtctgtgtttgagattggactctgcagtaatagaatgttttgctatgcagttcttggatccatcatgggacaattactagttatttactttcctccgcttcagaaggtttttcagactgagagcctaagcatactggatctgttgtttcttttgggtctcacctcatcagtgtgcatagtggcagaaattataaagaaggttgaaaggagcagggaaaagatccagaagcatgttagttcgacatcatcatcttttcttgaagtatgatgcatattgcattattttatttgcaaactaggaattgcagtctgaggatcatttagaagggcaagttcaagaggatatgaagatttgagaactttttaactattcattgactaaaaatgaacattaatgttaaagacttaagactttaacctgctggcagtcccaaatgaaattatgcaactttgatatcatattccttgatttaaattggcttttgtgattgagtgaaactttataaagcatatggtcagttatttaattaaaaaggcaaaacctgaaccaccttctgcacttaaagaagtctaacagtacaaatacactatctatcttagatagatatatttttttttatttttaaatattgtactatttatggtggtggggctttcttactaatacacaaataaatttaatcatttcaaaggcattctatttggtttagaagttgattcccaggagtgccatatttcagctactgtatttcctttttcttgtaatgtaagcagctcagataccatgtgctatcatttttgtatcaagttttttgcacaggatgtgaccactgtcagatcactgttcttttctttctttttgtgattgaaaagcctatactacaatttgaagtaaatttttgtttttcttagtaagtgta

SEQ ID NO: 381434 - DNA, 3477 bp, Homo sapiens
gggaactccttcctcagcctctcgtcagcgccgcttctcctggtttctcttgcagatgctgctgctaggggtggtgggagcagccgtgggacgcgtggccgggagcgggggtgacagcctgggattccgggggcttctcttccttgtcctcctcctctcctctctattcccagtgtggccgtggctgacactaaagactttgtagccatcaacccgagtgcagtttcgatggaaaatgaaggttgcacgttttcaaaaaatacctaatggtgaaaatgagacaatgattcctgtattgacatcaaaaaaagcaagtgaattaccagtcagtgaagttgcaagcattctccaagctgatcttcagaatggtctaaacaaatgtgaagttagtcataggcgagcctttcatggctggaatgagtttgatattagtgaagatgagccactgtggaagaagtatatttctcagtttaaaaatccccttattatgctgcttctggcttctgcagtcatcagtgttttaatgcatcagtttgatgatgccgtcagtatcactgtggcaatacttatcgttgttacagttgcctttgttcaggaatatcgttcagaaaaatctcttgaagaattgagtaaacttgtgccaccagaatgccattgtgtgcgtgaaggaaaattggagcatacacttgcccgagacttggttccaggtgatacagtttgcctttctgttggggatagagttcctgctgacttacgcttgtttgaggctgtggatctttccattgatgagtccagcttgacaggtgagacaacgccttgttctaaggtgacagctcctcagccagctgcaactaatggagatcttgcatcgagaagtaacattgcctttatgggaacactggtcagatgtggcaaagcaaagggtgttgtcattggaacaggagaaaattctgaatttggggaggtttttaaaatgatgcaagcagaagaggcaccaaaaacccctctgcagaagagcatggacctcttaggaaaacaactttccttttactcctttggtataataggaatcatcatgttggttggctggttactgggaaaagatatcctggaaatgtttactattagtgtaagtttggctgtagcagcaattcctgaaggtctccccattgtggtcacagtgacgctagctcttggtgttatgagaatggtgaagaaaagggccattgtgaaaaagctgcctattgttgaaactctgggctgctgtaatgtgatttgttcagataaaactggaacactgacgaagaatgaaatgactgttactcacatatttacttcagatggtctgcatgctgaggttactggagttggctataatcaatttggggaagtgattgttgatggtgatgttgttcatggattctataacccagctgttagcagaattgttgaggcgggctgtgtgtgcaatgatgctgtaattagaaacaatactctaatggggaagccaacagaaggggccttaattgctcttgcaatgaagatgggtcttgatggacttcaacaagactacatcagaaaagctgaatacccttttagctctgagcaaaagtggatggctgttaagtgtgtacaccgaacacagcaggacagaccagagatttgttttatgaaaggtgcttacgaacaagtaattaagtactgtactacataccagagcaaagggcagaccttgacacttactcagcagcagagagatgtgtaccaacaagagaaggcacgcatgggctcagcgggactcagagttcttgctttggcttctggtcctgaactgggacagctgacatttcttggcttggtgggaatcattgatccacctagaactggtgtgaaagaagctgttacaacactcattgcctcaggagtatcaataaaaatgattactggagattcacaggagactgcagttgcaatcgccagtcgtctgggattgtattccaaaacttcccagtcagtctcaggagaagaaatagatgcaatggatgttcagcagctttcacaaatagtaccaaaggttgcagtattttacagagctagcccaaggcacaagatgaaaattattaagtcgctacagaagaacggttcagttgtagccatgacaggagatggagtaaatgatgcagttgctctgaaggctgcagacattggagttgcgatgggccagactggtacagatgtttgcaaagaggcagcagacatgatcctagtggatgatgattttcaaaccataatgtctgcaatcgaagagggtaaagggatttataataacattaaaaatttcgttagattccagctgagcacattttgtggatcaatattattatggatggacccccagctcagagccttggagtagaaccagtggataaagatgtcattcgtaaacctcctcgcaactggaaagacagcattttgactaaaaacttgatacttaaaatacttgtttcatcaataatcattgtttgtgggactttgtttgtcttctggcgtgagctacgagacaatgtgattacacctcgagacacaacaatgaccttcacatgctttgtgttttttgacatgttcaatgcactaagttccagatcccagaccaagtctgtgtttgagattggactctgcagtaatagaatgttttgctatgcagttcttggatccatcatgggacaattactagttatttactttcctccgcttcagaaggtttttcagactgagagcctaagcatactggatctgttgtttcttttgggtctcacctcatcagtgtgcatagtggcagaaattataaagaaggttgaaaggagcagggaaaagatccagaagcatgttagttcgacatcatcatcttttcttgaagtctggctctgggagaggagtggacagcagctggttgagatacatccccatctggagacaggactgccactgacagaagatgtgagctgtgtctaagtccagtcttgtgcccagccgtgtctgcgccttcactctttggaactctgcatacaacatcttagcaccatcttcctgcagctcttccttacctaaataaagaaacagcccaagggcagtatttctaaaagcactgtaacagcttttcattttctccacatatactacaaattctataaagaaagaaattaatttaaaaaaactaagatgtttttctcttctggcttcataaatgccttgctgtataaattgaaatattgatactgaactgtctttttaatgatgacctaactttattcaacccatcggaatttactttttccctgaaataagatcttttccactggtctactacctgaccataaacatgtctgcatttgaattctctaaaccctaaatctgtgtctatgaaaaatacaaatgactattaaatattattctctttactgttctctttcaccgaaa

SEQ ID NO: 381435 - DNA, 1954 bp, Homo sapiens
agcacataaatgccttaaaattaaaaatataagtccaaaattcaaaattcaatagatatgttagaagtataaagcgttgagctcaacgctttatacttcaggaaaagatccagaagcatgttagttcgacatcatcatcttttcttgaagtatgatgcatattgcattattttatttgcaaactaggaattgcagtctgaggatcatttagaagggcaagttcaagaggatatgaagatttgagaactttttaactattcattgactaaaaatgaacattaatgttaaagacttaagactttaacctgctggcagtcccaaatgaaattatgcaactttgatatcatattccttgatttaaattggcttttgtgattgagtgaaactttataaagcatatggtcagttatttaattaaaaaggcaaaacctgaaccaccttctgcacttaaagaagtctaacagtacaaatacactatctatcttagatagatatatttttttttatttttaaatattgtactatttatggtggtggggctttcttactaatacacaaataaatttaatcatttcaaaggcattctatttggtttagaagttgattcccaggagtgccatatttcagctactgtatttcctttttcttgtaatgtaagcagctcagataccatgtgctatcatttttgtatcaagttttttgcacaggatgtgaccactgtcagatcactgttcttttctttctttttgtgattgaaaagcctatactacaatttgaagtaaatttttgtttttcttagtaagtgtaaatggttgctttatttttattttaaaaaggtatgtctttggtttggcagaattcatgcagggctatcaagtggtgttctagggtaacagtgtccataattaacgcttagtcatagagtcaaaaacatttaagactgattgggttgaagtttataataaattatattaacatgtcttcctttttgaggtaaagatatatactttgtcaaatatcattttgtcatcctctaaatataaatccaaatacctcagctaagtaattctattttattatttttactgttatgtatgtttttaatcatatttcttaggaagtataggctactggacttagaataaaaagtccccaaacccaaacaaatggtttatgaaccagagtatatgtggaagattctttgctggtcttgctctgtgtgcatctgaagcttctttggcctagattttagcacaaacctgagtatatctcttctactttcatcatgtgttctgtaccttcttttgtttcattgggcatgctagggaaataggtggattttgtgtgtaatgccatcagtttttatgaaagcttgatgaggtataggtcatttgttttgagtatgtgggccagaaatttaaaattagaaatttgtttttctgttgagtatataaacaaaaattggtcccaattctaacaggtttaatccttcttgaagccaataagttttatcttttataatctgtcaggatgaaccactccttagcttttatccaatattaaactgcaagtgttagcactgaaatattgtcattgatagggaaaatatctattctttgagtcattgttactgaggcagttgagtgtaaggagctggctgcagtttattctacttaaccctttaaggctgaattgtcaaatgtacattgttccatgtcgttagatggaacatggaagccattgtctaatcaactctatcattagtgacttgatgtctcataccttaattttgtaatgatttttattctctgttacaaagacttgaaatacgtattaaatgcacgttaatgttttgctttgcattttaggttcagattatgacttgattgaaataaatgtgcctatacattcatttgctttgtactataaaaataaaaatgatttcttaagttaa

SEQ ID NO: 381436 - DNA, 1965 bp, Homo sapiens
tgctctgtgttctagagatcccccttatattctggatctgttgtttcttttgggtctcacctcatcagtgtgcatagtggcagaaattataaagaaggttgaaaggagcagggaaaagatccagaagcatgttagttcgacatcatcatcttttcttgaagtatgatgcatattgcattattttatttgcaaactaggaattgcagtctgaggatcatttagaagggcaagttcaagaggatatgaagatttgagaactttttaactattcattgactaaaaatgaacattaatgttaaagacttaagactttaacctgctggcagtcccaaatgaaattatgcaactttgatatcatattccttgatttaaattggcttttgtgattgagtgaaactttataaagcatatggtcagttatttaattaaaaaggcaaaacctgaaccaccttctgcacttaaagaagtctaacagtacaaatacactatctatcttagatagatatatttttttttatttttaaatattgtactatttatggtggtggggctttcttactaatacacaaataaatttaatcatttcaaaggcattctatttggtttagaagttgattcccaggagtgccatatttcagctactgtatttcctttttcttgtaatgtaagcagctcagataccatgtgctatcatttttgtatcaagttttttgcacaggatgtgaccactgtcagatcactgttcttttctttctttttgtgattgaaaagcctatactacaatttgaagtaaatttttgtttttcttagtaagtgtaaatggttgctttatttttattttaaaaaggtatgtctttggtttggcagaattcatgcagggctatcaagtggtgttctagggtaacagtgtccataattaacgcttagtcatagagtcaaaaacatttaagactgattgggttgaagtttataataaattatattaacatgtcttcctttttgaggtaaagatatatactttgtcaaatatcattttgtcatcctctaaatataaatccaaatacctcagctaagtaattctattttattatttttactgttatgtatgtttttaatcatatttcttaggaagtataggctactggacttagaataaaaagtccccaaacccaaacaaatggtttatgaaccagagtatatgtggaagattctttgctggtcttgctctgtgtgcatctgaagcttctttggcctagattttagcacaaacctgagtatatctcttctactttcatcatgtgttctgtaccttcttttgtttcattgggcatgctagggaaataggtggattttgtgtgtaatgccatcagtttttatgaaagcttgatgaggtataggtcatttgttttgagtatgtgggccagaaatttaaaattagaaatttgtttttctgttgagtatataaacaaaaattggtcccaattctaacaggtttaatccttcttgaagccaataagttttatcttttataatctgtcaggatgaaccactccttagcttttatccaatattaaactgcaagtgttagcactgaaatattgtcattgatagggaaaatatctattctttgagtcattgttactgaggcagttgagtgtaaggagctggctgcagtttattctacttaaccctttaaggctgaattgtcaaatgtacattgttccatgtcgttagatggaacatggaagccattgtctaatcaactctatcattagtgacttgatgtctcataccttaattttgtaatgatttttattctctgttacaaagacttgaaatacgtattaaatgcacgttaatgttttgctttgcattttaggttcagattatgacttgattgaaataaatgtgcctatacattcatttgctttgtactataaaaataaaaatgatttcttaagttaa

SEQ ID NO: 381437 - DNA, 2374 bp, Homo sapiens
gggaactccttcctcagcctctcgtcagcgccgcttctcctggtttctcttgcagatgctgctgctaggggtggtgggagcagccgtgggacgcgtggccgggagcgggggtgacagcctgggattccgggggcttctcttccttgtcctcctcctctcctctctattcccagtgtggccgtggctgacactaaagactttgtagccatcaacccgagtgcagtttcgatggaaaatgaaggttgcacgttttcaaaaaatacctaatggtgaaaatgagacaatgattcctgtattgacatcaaaaaaagcaagtgaattaccagtcagtgaagttgcaagcattctccaagctgatcttcagaatggtctaaacaaatgtgaagttagtcataggcgagcctttcatggctggaatgagtttgatattagtgaagatgagccactgtggaagaagtatatttctcagtttaaaaatccccttattatgctgcttctggcttctgcagtcatcagtgttttaatgcatcagtttgatgatgccgtcagtatcactgtggcaatacttatcgttgttacagttgcctttgttcaggaatatcgttcagaaaaatctcttgaagaattgagtaaacttgtgccaccagaatgccattgtgtgcgtgaaggaaaattggagcatacacttgcccgagacttggttccaggtgatacagtttgcctttctgttggggatagagttcctgctgacttacgcttgtttgaggctgtggatctttccattgatgagtccagcttgacaggtgagacaacgccttgttctaaggtgacagctcctcagccagctgcaactaatggagatcttgcatcgagaagtaacattgcctttatgggaacactggtcagatgtggcaaagcaaagggtgttgtcattggaacaggagaaaattctgaatttggggaggtttttaaaatgatgcaagcagaagaggcaccaaaaacccctctgcagaagagcatggacctcttaggaaaacaactttccttttactcctttggtataataggaatcatcatgttggttggctggttactgggaaaagatatcctggaaatgtttactattagtgtaagtttggctgtagcagcaattcctgaaggtctccccattgtggtcacagtgacgctagctcttggtgttatgagaatggtgaagaaaagggccattgtgaaaaagctgcctattgttgaaactctgggctgctgtaatgtgatttgttcagataaaactggaacactgacgaagaatgaaatgactgttactcacatatttacttcagatggtctgcatgctgaggttactggagttggctataatcaatttggggaagtgattgttgatggtgatgttgttcatggattctataacccagctgttagcagaattgttgaggcgggctgtgtgtgcaatgatgctgtaattagaaacaatactctaatggggaagccaacagaaggggccttaattgctcttgcaatgaagatgggtcttgatggacttcaacaagactacatcagaaaagctgaatacccttttagctctgagcaaaagtggatggctgttaagtgtgtacaccgaacacagcaggacagaccagagatttgttttatgaaaggtgcttacgaacaagtaattaagtactgtactacataccagagcaaagggcagaccttgacacttactcagcagcagagagatgtgtaccaacaagagaaggcacgcatgggctcagcgggactcagagttcttgctttggcttctggtcctgaactgggacagctgacatttcttggcttggtgggaatcattgatccacctagaactggtgtgaaagaagctgttacaacactcattgcctcaggagtatcaataaaaatgattactggagattcacaggagactgcagttgcaatcgccagtcgtctgggattgtattccaaaacttcccagtcagtctcaggagaagaaatagatgcaatggatgttcagcagctttcacaaatagtaccaaaggttgcagtattttacagagctagcccaaggcacaagatgaaaattattaagtcgctacagaagaacggttcagttgtagccatgacaggagatggagtaaatgatgcagttgctctgaaggctgcagacattggagttgcgatgggccagactggtacagatgtttgcaaagaggcagcagacatgatcctagtggatgatgattttcaaaccataatgtctgcaatctttggtactatttgtgaaagctgctgaacatccattgcatctatttcttctcctgagactgactggtcgacg

SEQ ID NO: 381438 - DNA, 1966 bp, Homo sapiens
ttagaggatccccgaaaagtggactcaagcgactggatctgttgtttcttttgggtctcacctcatcagtgtgcatagtggcagaaattataaagaaggttgaaaggagcagggaaaagatccagaagcatgttagttcgacatcatcatcttttcttgaagtatgatgcatattgcattattttatttgcaaactaggaattgcagtctgaggatcatttagaagggcaagttcaagaggatatgaagatttgagaactttttaactattcattgactaaaaatgaacattaatgttaaagacttaagactttaacctgctggcagtcccaaatgaaattatgcaactttgatatcatattccttgatttaaattggcttttgtgattgagtgaaactttataaagcatatggtcagttatttaattaaaaaggcaaaacctgaaccaccttctgcacttaaagaagtctaacagtacaaatacactatctatcttagatagatatatttttttttatttttaaatattgtactatttatggtggtggggctttcttactaatacacaaataaatttaatcatttcaaaggcattctatttggtttagaagttgattcccaggagtgccatatttcagctactgtatttcctttttcttgtaatgtaagcagctcagataccatgtgctatcatttttgtatcaagttttttgcacaggatgtgaccactgtcagatcactgttcttttctttctttttgtgattgaaaagcctatactacaatttgaagtaaatttttgtttttcttagtaagtgtaaatggttgctttatttttattttaaaaaggtatgtctttggtttggcagaattcatgcagggctatcaagtggtgttctagggtaacagtgtccataattaacgcttagtcatagagtcaaaaacatttaagactgattgggttgaagtttataataaattatattaacatgtcttcctttttgaggtaaagatatatactttgtcaaatatcattttgtcatcctctaaatataaatccaaatacctcagctaagtaattctattttattatttttactgttatgtatgtttttaatcatatttcttaggaagtataggctactggacttagaataaaaagtccccaaacccaaacaaatggtttatgaaccagagtatatgtggaagattctttgctggtcttgctctgtgtgcatctgaagcttctttggcctagattttagcacaaacctgagtatatctcttctactttcatcatgtgttctgtaccttcttttgtttcattgggcatgctagggaaataggtggattttgtgtgtaatgccatcagtttttatgaaagcttgatgaggtataggtcatttgttttgagtatgtgggccagaaatttaaaattagaaatttgtttttctgttgagtatataaacaaaaattggtcccaattctaacaggtttaatccttcttgaagccaataagttttatcttttataatctgtcaggatgaaccactccttagcttttatccaatattaaactgcaagtgttagcactgaaatattgtcattgatagggaaaatatctattctttgagtcattgttactgaggcagttgagtgtaaggagctggctgcagtttattctacttaaccctttaaggctgaattgtcaaatgtacattgttccatgtcgttagatggaacatggaagccattgtctaatcaactctatcattagtgacttgatgtctcataccttaattttgtaatgatttttattctctgttacaaagacttgaaatacgtattaaatgcacgttaatgttttgctttgcattttaggttcagattatgacttgattgaaataaatgtgcctatacattcatttgctttgtactataaaaataaaaatgatttcttaagttaa

SEQ ID NO: 381439 - DNA, 1925 bp, Homo sapiens
  misc_feature (46)..(46): n is a, c, g, or t
tcggtacccctcaacgctttatacttccaccctgaacgcgccgtcnccgcacctcaacgctttatacttcaggaaaagatccagaagcatgttagttcgacatcatcatcttttcttgaagtatgatgcatattgcattattttatttgcaaactaggaattgcagtctgaggatcatttagaagggcaagttcaagaggatatgaagatttgagaactttttaactattcattgactaaaaatgaacattaatgttaaagacttaagactttaacctgctggcagtcccaaatgaaattatgcaactttgatatcatattccttgatttaaattggcttttgtgattgagtgaaactttataaagcatatggtcagttatttaattaaaaaggcaaaacctgaaccaccttctgcacttaaagaagtctaacagtacaaatacactatctatcttagatagatatatttttttttatttttaaatattgtactatttatggtggtggggctttcttactaatacacaaataaatttaatcatttcaaaggcattctatttggtttagaagttgattcccaggagtgccatatttcagctactgtatttcctttttcttgtaatgtaagcagctcagataccatgtgctatcatttttgtatcaagttttttgcacaggatgtgaccactgtcagatcactgttcttttctttctttttgtgattgaaaagcctatactacaatttgaagtaaatttttgtttttcttagtaagtgtaaatggttgctttatttttattttaaaaaggtatgtctttggtttggcagaattcatgcagggctatcaagtggtgttctagggtaacagtgtccataattaacgcttagtcatagagtcaaaaacatttaagactgattgggttgaagtttataataaattatattaacatgtcttcctttttgaggtaaagatatatactttgtcaaatatcattttgtcatcctctaaatataaatccaaatacctcagctaagtaattctattttattatttttactgttatgtatgtttttaatcatatttcttaggaagtataggctactggacttagaataaaaagtccccaaacccaaacaaatggtttatgaaccagagtatatgtggaagattctttgctggtcttgctctgtgtgcatctgaagcttctttggcctagattttagcacaaacctgagtatatctcttctactttcatcatgtgttctgtaccttcttttgtttcattgggcatgctagggaaataggtggattttgtgtgtaatgccatcagtttttatgaaagcttgatgaggtataggtcatttgttttgagtatgtgggccagaaatttaaaattagaaatttgtttttctgttgagtatataaacaaaaattggtcccaattctaacaggtttaatccttcttgaagccaataagttttatcttttataatctgtcaggatgaaccactccttagcttttatccaatattaaactgcaagtgttagcactgaaatattgtcattgatagggaaaatatctattctttgagtcattgttactgaggcagttgagtgtaaggagctggctgcagtttattctacttaaccctttaaggctgaattgtcaaatgtacattgttccatgtcgttagatggaacatggaagccattgtctaatcaactctatcattagtgacttgatgtctcataccttaattttgtaatgatttttattctctgttacaaagacttgaaatacgtattaaatgcacgttaatgttttgctttgcattttaggttcagattatgacttgattgaaataaatgtgcctatacattcatttgctttgtactataaaaataaaaatgatttcttaagttaa

SEQ ID NO: 381440 - DNA, 603 bp, Homo sapiens
acgatctaaccacctcccaatccaaaaaacaaaaaaacctgggtctggctctgggagaggagtggacagcagctggttgagatacatccccatctggagacaggactgccactgacagaagatgtgagctgtgtctaagtccagtcttgtgcccagccgtgtctgcgccttcactctttggaactctgcatacaacatcttagcaccatcttcctgcagctcttccttacctaaataaagaaacagcccaagggcagtatttctaaaagcactgtaacagcttttcattttctccacatatactacaaattctataaagaaagaaattaatttaaaaaaactaagatgtttttctcttctggcttcataaatgccttgctgtataaattgaaatattgatactgaactgtctttttaatgatgacctaactttattcaacccatcggaatttactttttccctgaaataagatcttttccactggtctactacctgaccataaacatgtctgcatttgaattctctaaaccctaaatctgtgtctatgaaaaatacaaatgactattaaatattattctctttactgttctctttcaccgaaa

SEQ ID NO: 381441 - DNA, 1634 bp, Homo sapiens
  misc_feature (1585)..(1585): n is a, c, g, or t
gggaactccttcctcagcctctcgtcagcgccgcttctcctggtttctcttgcagatgctgctgctaggggtggtgggagcagccgtgggacgcgtggccgggagcgggggtgacagcctgggattccgggggcttctcttccttgtcctcctcctctcctctctattcccagtgtggccgtggctgacactaaagactttgtagccatcaacccgagtgcagtttcgatggaaaatgaaggttgcacgttttcaaaaaatacctaatggtgaaaatgagacaatgattcctgtattgacatcaaaaaaagcaagtgaattaccagtcagtgaagttgcaagcattctccaagctgatcttcagaatggtctaaacaaatgtgaagttagtcataggcgagcctttcatggctggaatgagtttgatattagtgaagatgagccactgtggaagaagtatatttctcagtttaaaaatccccttattatgctgcttctggcttctgcagtcatcagtgttttaatgcatcagtttgatgatgccgtcagtatcactgtggcaatacttatcgttgttacagttgcctttgttcaggaatatcgttcagaaaaatctcttgaagaattgagtaaacttgtgccaccagaatgccattgtgtgcgtgaaggaaaattggagcatacacttgcccgagacttggttccaggtgatacagtttgcctttctgttggggatagagttcctgctgacttacgcttgtttgaggctgtggatctttccattgatgagtccagcttgacaggtgagacaacgccttgttctaaggtgacagctcctcagccagctgcaactaatggagatcttgcatcgagaagtaacattgcctttatgggaacactggtcagatgtggcaaagcaaagggtgttgtcattggaacaggagaaaattctgaatttggggaggtttttaaaatgatgcaagcagaagaggcaccaaaaacccctctgcagaagagcatggacctcttaggaaaacaactttccttttactcctttggtataataggaatcatcatgttggttggctggttactgggaaaagatatcctggaaatgtttactattagtgtaagtttggctgtagcagcaattcctgaaggtctccccattgtggtcacagtgacgctagctcttggtgttatgagaatggtgaagaaaagggccattgtgaaaaagctgcctattgttgaaactctgggctgctgtaatgtgatttgttcagataaaactggaacactgacgaagaatgaaatgactgttactcacatatttacttcagatggtctgcatgctgaggttactggagttggctataatcaatttggggaagtgattgttgatggtgatgttgttcatggattctataacccagctgttagcagaattgttgaggcgggctgtgtgtgcaatgatgctgtaattagaaacaatactctaatggggaagccaacagaaggggccttaattgctcttgcaatgaagatgggtcttgatggacttcacaagactacatcagggagctgnaggatgatgtaggggcgcgacacgcaggcgcagtaagtataagtcatgt

SEQ ID NO: 381442 - DNA, 556 bp, Homo sapiens
ggaaaatcttcagtttcttttgtggagaggagggaatttttctgtgatatgtgagtcaaccacagaattgtaatctacaccattgtacttgagaaatgtttgaatctcagtgttctattcagtatttcgcccaaatttttagcttaaaaatcatcttctcctgctttttctagcctcagtagaaattcagaacagctgtatttcttaaattaatataccaaaaattgctgtatactataaggaattggttaattcttagttttaagtattgctatttaattttttttttctgaaaaggaactgttaaaaagcttttaaatgtagttaagtataaacgctttttttgttaattgaagagatacataaaataaactgagtatagacttttgtaattttccagtcatgctcttatggttttttttttttaaagcctttgctgagagaactgtcatgtacaaaactgtgttgaattgctgtttgtttttactttcagtttaaaaatccccttattatgctgcttctggcttctgcagtcatcagtgttttaatgcatcag

SEQ ID NO: 381443 - DNA, 669 bp, Homo sapiens
gtagaacttaagcagaatgcctagaaacttctctgccttatatttgtgagcattgttcatatgtcagttttccaaaaagaaaatttattgtattctgaaattttaaatggcatgataaataggttgtaaatgtaacagttagatgtctgtatcatcaaaatgtataaatctttgtgatttatttaatagctcacatctcattgtttcctcttggtatctttttccaaaagtagaaggggtattgtgtagtcaaagaacagttaccaaaatattgttgaaactatcatgcagatgtaaaaattctttatttgttcctgttgtctaaacatcttgaaaatcctttgttaaaatactcttagctttaaaatgtccacgtgactgaagaatagtttacttgaaacagtcttcctttaaaagcatagtagtaagagatttttaaatgctaaaaaagtggtatcatagaatcaacagatttactctactgatatttttaaatgactctctttttcaacaggagtatagcagcattaactttaatctcattggctacattaatgaactttcctaatcctctcaatgccatgcagattttgtggatcaatattattatggatggacccccagctcagaggtacgagttttttaattgcatgagctggaaagacaagg
